United States Patent Application Publication US 2014/0004565 A1 - sequence listing, part 101

SEQ ID NO: 2512512 - RNA, 19 nt, Artificial Sequence
  Description of Artificial Sequence: Synthetic oligonucleotide
cagcucugagugggaggac

SEQ ID NO: 2512513 - RNA, 19 nt, Artificial Sequence
  Description of Artificial Sequence: Synthetic oligonucleotide
cucccauggcucuccgagu

SEQ ID NO: 2512514 - RNA, 19 nt, Artificial Sequence
  Description of Artificial Sequence: Synthetic oligonucleotide
cguugggauauugagcuua

SEQ ID NO: 2512515 - RNA, 19 nt, Artificial Sequence
  Description of Artificial Sequence: Synthetic oligonucleotide
ggaguucccucagcucuga

SEQ ID NO: 2512516 - RNA, 19 nt, Artificial Sequence
  Description of Artificial Sequence: Synthetic oligonucleotide
cuccaucuccaaucaugau

SEQ ID NO: 2512517 - RNA, 19 nt, Artificial Sequence
  Description of Artificial Sequence: Synthetic oligonucleotide
ccuuugcaccugcucccug

SEQ ID NO: 2512518 - RNA, 19 nt, Artificial Sequence
  Description of Artificial Sequence: Synthetic oligonucleotide
gcuccgcuagaagccuuug

SEQ ID NO: 2512519 - RNA, 19 nt, Artificial Sequence
  Description of Artificial Sequence: Synthetic oligonucleotide
gcguucagugagcgcaucu

SEQ ID NO: 2512520 - RNA, 19 nt, Artificial Sequence
  Description of Artificial Sequence: Synthetic oligonucleotide
ccacaugcuccacaauacu

SEQ ID NO: 2512521 - RNA, 19 nt, Artificial Sequence
  Description of Artificial Sequence: Synthetic oligonucleotide
ccaccugacucggcuguug

SEQ ID NO: 2512522 - RNA, 19 nt, Artificial Sequence
  Description of Artificial Sequence: Synthetic oligonucleotide
ggcaaauacguuggucguu

SEQ ID NO: 2512523 - RNA, 19 nt, Artificial Sequence
  Description of Artificial Sequence: Synthetic oligonucleotide
gcuguuggcugcaucucau

SEQ ID NO: 2512524 - RNA, 19 nt, Artificial Sequence
  Description of Artificial Sequence: Synthetic oligonucleotide
ccugaacauuucgcuccug

SEQ ID NO: 2512525 - RNA, 19 nt, Artificial Sequence
  Description of Artificial Sequence: Synthetic oligonucleotide
ggcguucagugagcgcauc

SEQ ID NO: 2512526 - RNA, 19 nt, Artificial Sequence
  Description of Artificial Sequence: Synthetic oligonucleotide
acucggcuguuggcugcau

SEQ ID NO: 2512527 - RNA, 19 nt, Artificial Sequence
  Description of Artificial Sequence: Synthetic oligonucleotide
gccuauuggcaaauacguu

SEQ ID NO: 2512528 - RNA, 19 nt, Artificial Sequence
  Description of Artificial Sequence: Synthetic oligonucleotide
ggcgacuuacaagcucccu

SEQ ID NO: 2512529 - RNA, 19 nt, Artificial Sequence
  Description of Artificial Sequence: Synthetic oligonucleotide
cggcugaacagaggaguuc

SEQ ID NO: 2512530 - RNA, 19 nt, Artificial Sequence
  Description of Artificial Sequence: Synthetic oligonucleotide
ccgagucauuucagacaca

SEQ ID NO: 2512531 - RNA, 19 nt, Artificial Sequence
  Description of Artificial Sequence: Synthetic oligonucleotide
ccccucccauggcucuccg

SEQ ID NO: 2512532 - RNA, 19 nt, Artificial Sequence
  Description of Artificial Sequence: Synthetic oligonucleotide
cauggcucuccgagucauu

SEQ ID NO: 2512533 - RNA, 19 nt, Artificial Sequence
  Description of Artificial Sequence: Synthetic oligonucleotide
gccuuugcaccugcucccu

SEQ ID NO: 2512534 - RNA, 19 nt, Artificial Sequence
  Description of Artificial Sequence: Synthetic oligonucleotide
ccuccacaccacagaauuu

SEQ ID NO: 2512535 - RNA, 19 nt, Artificial Sequence
  Description of Artificial Sequence: Synthetic oligonucleotide
cgcaucucugaaaggcaau

SEQ ID NO: 2512536 - RNA, 19 nt, Artificial Sequence
  Description of Artificial Sequence: Synthetic oligonucleotide
cccucccauggcucuccga

SEQ ID NO: 2512537 - RNA, 19 nt, Artificial Sequence
  Description of Artificial Sequence: Synthetic oligonucleotide
gugcuccgcuagaagccuu

SEQ ID NO: 2512538 - RNA, 19 nt, Artificial Sequence
  Description of Artificial Sequence: Synthetic oligonucleotide
cccaccugacucggcuguu

SEQ ID NO: 2512539 - RNA, 19 nt, Artificial Sequence
  Description of Artificial Sequence: Synthetic oligonucleotide
cguuggucguugggauauu

SEQ ID NO: 2512540 - RNA, 19 nt, Artificial Sequence
  Description of Artificial Sequence: Synthetic oligonucleotide
gauaccaacuccuugugcg

SEQ ID NO: 2512541 - RNA, 19 nt, Artificial Sequence
  Description of Artificial Sequence: Synthetic oligonucleotide
aaaggcugaggucugacac

SEQ ID NO: 2512542 - RNA, 19 nt, Artificial Sequence
  Description of Artificial Sequence: Synthetic oligonucleotide
aaaucaaggaccguguggg

SEQ ID NO: 2512543 - RNA, 19 nt, Artificial Sequence
  Description of Artificial Sequence: Synthetic oligonucleotide
aguacagugguccaucuuc

SEQ ID NO: 2512544 - RNA, 19 nt, Artificial Sequence
  Description of Artificial Sequence: Synthetic oligonucleotide
aaccugucgaagcaaauag

SEQ ID NO: 2512545 - RNA, 19 nt, Artificial Sequence
  Description of Artificial Sequence: Synthetic oligonucleotide
uucacaaggacaugguuag

SEQ ID NO: 2512546 - RNA, 19 nt, Artificial Sequence
  Description of Artificial Sequence: Synthetic oligonucleotide
guagcuuccucccagacag

SEQ ID NO: 2512547 - RNA, 19 nt, Artificial Sequence
  Description of Artificial Sequence: Synthetic oligonucleotide
aguagauuagagguggggc

SEQ ID NO: 2512548 - RNA, 19 nt, Artificial Sequence
  Description of Artificial Sequence: Synthetic oligonucleotide
uucuauaggggcaucgucc

SEQ ID NO: 2512549 - RNA, 19 nt, Artificial Sequence
  Description of Artificial Sequence: Synthetic oligonucleotide
gaaaucaaggaccgugugg

SEQ ID NO: 2512550 - RNA, 19 nt, Artificial Sequence
  Description of Artificial Sequence: Synthetic oligonucleotide
aagcaaauaguccuccucu

SEQ ID NO: 2512551 - RNA, 19 nt, Artificial Sequence
  Description of Artificial Sequence: Synthetic oligonucleotide
gaagccauggcggaagucg

SEQ ID NO: 2512552 - RNA, 19 nt, Artificial Sequence
  Description of Artificial Sequence: Synthetic oligonucleotide
cagauacugguucacaagg

SEQ ID NO: 2512553 - RNA, 19 nt, Artificial Sequence
  Description of Artificial Sequence: Synthetic oligonucleotide
auagaaaucaaggaccgug

SEQ ID NO: 2512554 - RNA, 19 nt, Artificial Sequence
  Description of Artificial Sequence: Synthetic oligonucleotide
acuuuguccacguagcgcu

SEQ ID NO: 2512555 - RNA, 19 nt, Artificial Sequence
  Description of Artificial Sequence: Synthetic oligonucleotide
caaauaguccuccucuucc

SEQ ID NO: 2512556 - RNA, 19 nt, Artificial Sequence
  Description of Artificial Sequence: Synthetic oligonucleotide
uccuccaauuuccagauuc

SEQ ID NO: 2512557 - RNA, 19 nt, Artificial Sequence
  Description of Artificial Sequence: Synthetic oligonucleotide
uccuuggagaugaagucag

SEQ ID NO: 2512558 - RNA, 19 nt, Artificial Sequence
  Description of Artificial Sequence: Synthetic oligonucleotide
aggucugacacuuugucca

SEQ ID NO: 2512559 - RNA, 19 nt, Artificial Sequence
  Description of Artificial Sequence: Synthetic oligonucleotide
uuggguaguacaguggucc

SEQ ID NO: 2512560 - RNA, 19 nt, Artificial Sequence
  Description of Artificial Sequence: Synthetic oligonucleotide
ugacaguuggguaguacag

SEQ ID NO: 2512561 - RNA, 19 nt, Artificial Sequence
  Description of Artificial Sequence: Synthetic oligonucleotide
guagauuagagguggggcc

SEQ ID NO: 2512562 - RNA, 19 nt, Artificial Sequence
  Description of Artificial Sequence: Synthetic oligonucleotide
auggauaccaacuccuugu

SEQ ID NO: 2512563 - RNA, 19 nt, Artificial Sequence
  Description of Artificial Sequence: Synthetic oligonucleotide
gauacugguucacaaggac

SEQ ID NO: 2512564 - RNA, 19 nt, Artificial Sequence
  Description of Artificial Sequence: Synthetic oligonucleotide
ucacuugcucagcaggagg

SEQ ID NO: 2512565 - RNA, 19 nt, Artificial Sequence
  Description of Artificial Sequence: Synthetic oligonucleotide
auaccaacuccuugugcgc

SEQ ID NO: 2512566 - RNA, 19 nt, Artificial Sequence
  Description of Artificial Sequence: Synthetic oligonucleotide
aggggcaucguccucuggc

SEQ ID NO: 2512567 - RNA, 19 nt, Artificial Sequence
  Description of Artificial Sequence: Synthetic oligonucleotide
uaagcuguaccgcggagca

SEQ ID NO: 2512568 - RNA, 19 nt, Artificial Sequence
  Description of Artificial Sequence: Synthetic oligonucleotide
uagcgcugaagccauggcg

SEQ ID NO: 2512569 - RNA, 19 nt, Artificial Sequence
  Description of Artificial Sequence: Synthetic oligonucleotide
aaauaguccuccucuuccu

SEQ ID NO: 2512570 - RNA, 19 nt, Artificial Sequence
  Description of Artificial Sequence: Synthetic oligonucleotide
ucagggacguaguagauua

SEQ ID NO: 2512571 - RNA, 19 nt, Artificial Sequence
  Description of Artificial Sequence: Synthetic oligonucleotide
uccauggauaccaacuccu

SEQ ID NO: 2512572 - RNA, 19 nt, Artificial Sequence
  Description of Artificial Sequence: Synthetic oligonucleotide
uacugguucacaaggacau

SEQ ID NO: 2512573 - RNA, 19 nt, Artificial Sequence
  Description of Artificial Sequence: Synthetic oligonucleotide
acaguuggguaguacagug

SEQ ID NO: 2512574 - RNA, 19 nt, Artificial Sequence
  Description of Artificial Sequence: Synthetic oligonucleotide
agugcugggacccuggcgu

SEQ ID NO: 2512575 - RNA, 19 nt, Artificial Sequence
  Description of Artificial Sequence: Synthetic oligonucleotide
aguuggguaguacaguggu

SEQ ID NO: 2512576 - RNA, 19 nt, Artificial Sequence
  Description of Artificial Sequence: Synthetic oligonucleotide
uucuguagcuuccucccag

SEQ ID NO: 2512577 - RNA, 19 nt, Artificial Sequence
  Description of Artificial Sequence: Synthetic oligonucleotide
uuggagaugaagucaggga

SEQ ID NO: 2512578 - RNA, 19 nt, Artificial Sequence
  Description of Artificial Sequence: Synthetic oligonucleotide
agcuguaccgcggagcacc

SEQ ID NO: 2512579 - RNA, 19 nt, Artificial Sequence
  Description of Artificial Sequence: Synthetic oligonucleotide
ucaugaggcaugaugcccu

SEQ ID NO: 2512580 - RNA, 19 nt, Artificial Sequence
  Description of Artificial Sequence: Synthetic oligonucleotide
gugcguguaagcuguaccg

SEQ ID NO: 2512581 - RNA, 19 nt, Artificial Sequence
  Description of Artificial Sequence: Synthetic oligonucleotide
aaggacaugguuagcuggg

SEQ ID NO: 2512582 - RNA, 19 nt, Artificial Sequence
  Description of Artificial Sequence: Synthetic oligonucleotide
uggcugucgaggcucauag

SEQ ID NO: 2512583 - RNA, 19 nt, Artificial Sequence
  Description of Artificial Sequence: Synthetic oligonucleotide
cugucgaagcaaauagucc

SEQ ID NO: 2512584 - RNA, 19 nt, Artificial Sequence
  Description of Artificial Sequence: Synthetic oligonucleotide
cuuggagaugaagucaggg

SEQ ID NO: 2512585 - RNA, 19 nt, Artificial Sequence
  Description of Artificial Sequence: Synthetic oligonucleotide
aauggucagggagacucgg

SEQ ID NO: 2512586 - RNA, 19 nt, Artificial Sequence
  Description of Artificial Sequence: Synthetic oligonucleotide
aaaaggcugaggucugaca

SEQ ID NO: 2512587 - RNA, 19 nt, Artificial Sequence
  Description of Artificial Sequence: Synthetic oligonucleotide
ugucgaggcucauagaaau

SEQ ID NO: 2512588 - RNA, 19 nt, Artificial Sequence
  Description of Artificial Sequence: Synthetic oligonucleotide
ucuauaggggcaucguccu

SEQ ID NO: 2512589 - RNA, 19 nt, Artificial Sequence
  Description of Artificial Sequence: Synthetic oligonucleotide
ugaggcaugaugcccuccc

SEQ ID NO: 2512590 - RNA, 19 nt, Artificial Sequence
  Description of Artificial Sequence: Synthetic oligonucleotide
uaguagauuagaggugggg

SEQ ID NO: 2512591 - RNA, 19 nt, Artificial Sequence
  Description of Artificial Sequence: Synthetic oligonucleotide
ucaaggaccgugugggagc

SEQ ID NO: 2512592 - RNA, 19 nt, Artificial Sequence
  Description of Artificial Sequence: Synthetic oligonucleotide
gaggugauggguuguggag

SEQ ID NO: 2512593 - RNA, 19 nt, Artificial Sequence
  Description of Artificial Sequence: Synthetic oligonucleotide
uguaccgcggagcaccagc

SEQ ID NO: 2512594 - RNA, 19 nt, Artificial Sequence
  Description of Artificial Sequence: Synthetic oligonucleotide
ucgaggcucauagaaauca

SEQ ID NO: 2512595 - RNA, 19 nt, Artificial Sequence
  Description of Artificial Sequence: Synthetic oligonucleotide
ugcauuggguggcagcgag

SEQ ID NO: 2512596 - RNA, 19 nt, Artificial Sequence
  Description of Artificial Sequence: Synthetic oligonucleotide
gaggcuggcgcgcagcacg

SEQ ID NO: 2512597 - RNA, 19 nt, Artificial Sequence
  Description of Artificial Sequence: Synthetic oligonucleotide
gacacuuuguccacguagc

SEQ ID NO: 2512598 - RNA, 19 nt, Artificial Sequence
  Description of Artificial Sequence: Synthetic oligonucleotide
uguagcuuccucccagaca

SEQ ID NO: 2512599 - RNA, 19 nt, Artificial Sequence
  Description of Artificial Sequence: Synthetic oligonucleotide
cugguucacaaggacaugg

SEQ ID NO: 2512600 - RNA, 19 nt, Artificial Sequence
  Description of Artificial Sequence: Synthetic oligonucleotide
gaagcaaauaguccuccuc

SEQ ID NO: 2512601 - RNA, 19 nt, Artificial Sequence
  Description of Artificial Sequence: Synthetic oligonucleotide
accagcagcgaggugaugg

SEQ ID NO: 2512602 - RNA, 19 nt, Artificial Sequence
  Description of Artificial Sequence: Synthetic oligonucleotide
gcucauagaaaucaaggac

SEQ ID NO: 2512603 - RNA, 19 nt, Artificial Sequence
  Description of Artificial Sequence: Synthetic oligonucleotide
gaggucugacacuuugucc

SEQ ID NO: 2512604 - RNA, 19 nt, Artificial Sequence
  Description of Artificial Sequence: Synthetic oligonucleotide
ugauggguuguggaggcgg

SEQ ID NO: 2512605 - RNA, 19 nt, Artificial Sequence
  Description of Artificial Sequence: Synthetic oligonucleotide
acuccuugugcgcuguccg

SEQ ID NO: 2512606 - RNA, 19 nt, Artificial Sequence
  Description of Artificial Sequence: Synthetic oligonucleotide
agcucauccacaagggugg

SEQ ID NO: 2512607 - RNA, 19 nt, Artificial Sequence
  Description of Artificial Sequence: Synthetic oligonucleotide
cuuccuuggagaugaaguc

SEQ ID NO: 2512608 - RNA, 19 nt, Artificial Sequence
  Description of Artificial Sequence: Synthetic oligonucleotide
cuucaugaggcaugaugcc

SEQ ID NO: 2512609 - RNA, 19 nt, Artificial Sequence
  Description of Artificial Sequence: Synthetic oligonucleotide
caugaugcccuccccaggc

SEQ ID NO: 2512610 - RNA, 19 nt, Artificial Sequence
  Description of Artificial Sequence: Synthetic oligonucleotide
ugcgaugccguggagcagg

SEQ ID NO: 2512611 - RNA, 19 nt, Artificial Sequence
  Description of Artificial Sequence: Synthetic oligonucleotide
ucgggaaccaugccccggg

SEQ ID NO: 2512612 - RNA, 19 nt, Artificial Sequence
  Description of Artificial Sequence: Synthetic oligonucleotide
agcgcugaagccauggcgg

SEQ ID NO: 2512613 - RNA, 19 nt, Artificial Sequence
  Description of Artificial Sequence: Synthetic oligonucleotide
cucagcaggaggcuggcgc

SEQ ID NO: 2512614 - RNA, 19 nt, Artificial Sequence
  Description of Artificial Sequence: Synthetic oligonucleotide
gacaugguuagcugggaga

SEQ ID NO: 2512615 - RNA, 19 nt, Artificial Sequence
  Description of Artificial Sequence: Synthetic oligonucleotide
uggcuuuggggcauuaaaa

SEQ ID NO: 2512616 - RNA, 19 nt, Artificial Sequence
  Description of Artificial Sequence: Synthetic oligonucleotide
uggauaccaacuccuugug

SEQ ID NO: 2512617 - RNA, 19 nt, Artificial Sequence
  Description of Artificial Sequence: Synthetic oligonucleotide
uauaggggcaucguccucu

SEQ ID NO: 2512618 - RNA, 19 nt, Artificial Sequence
  Description of Artificial Sequence: Synthetic oligonucleotide
auggcuccagugcugggac

SEQ ID NO: 2512619 - RNA, 19 nt, Artificial Sequence
  Description of Artificial Sequence: Synthetic oligonucleotide
uguaagcuguaccgcggag

SEQ ID NO: 2512620 - RNA, 19 nt, Artificial Sequence
  Description of Artificial Sequence: Synthetic oligonucleotide
ucugacacuuuguccacgu

SEQ ID NO: 2512621 - RNA, 19 nt, Artificial Sequence
  Description of Artificial Sequence: Synthetic oligonucleotide
ucgggugccgcgcaccagg

SEQ ID NO: 2512622 - RNA, 19 nt, Artificial Sequence
  Description of Artificial Sequence: Synthetic oligonucleotide
aaccaugccccggggaugg

SEQ ID NO: 2512623 - RNA, 19 nt, Artificial Sequence
  Description of Artificial Sequence: Synthetic oligonucleotide
cauggauaccaacuccuug

SEQ ID NO: 2512624 - RNA, 19 nt, Artificial Sequence
  Description of Artificial Sequence: Synthetic oligonucleotide
gucagggagacucgggugc

SEQ ID NO: 2512625 - RNA, 19 nt, Artificial Sequence
  Description of Artificial Sequence: Synthetic oligonucleotide
ucgcucgggaaccaugccc

SEQ ID NO: 2512626 - RNA, 19 nt, Artificial Sequence
  Description of Artificial Sequence: Synthetic oligonucleotide
uguccguccacaacgucuc

SEQ ID NO: 2512627 - RNA, 19 nt, Artificial Sequence
  Description of Artificial Sequence: Synthetic oligonucleotide
ugaugcccuccccaggcag

SEQ ID NO: 2512628 - RNA, 19 nt, Artificial Sequence
  Description of Artificial Sequence: Synthetic oligonucleotide
cuccauggauaccaacucc

SEQ ID NO: 2512629 - RNA, 19 nt, Artificial Sequence
  Description of Artificial Sequence: Synthetic oligonucleotide
cacgcagcugcauugggug

SEQ ID NO: 2512630 - RNA, 19 nt, Artificial Sequence
  Description of Artificial Sequence: Synthetic oligonucleotide
agucgcucgggaaccaugc

SEQ ID NO: 2512631 - RNA, 19 nt, Artificial Sequence
  Description of Artificial Sequence: Synthetic oligonucleotide
uuagcugggagaccaccaa

SEQ ID NO: 2512632 - RNA, 19 nt, Artificial Sequence
  Description of Artificial Sequence: Synthetic oligonucleotide
uagauuagagguggggccu

SEQ ID NO: 2512633 - RNA, 19 nt, Artificial Sequence
  Description of Artificial Sequence: Synthetic oligonucleotide
aaaccugucgaagcaaaua

SEQ ID NO: 2512634 - RNA, 19 nt, Artificial Sequence
  Description of Artificial Sequence: Synthetic oligonucleotide
cugacaguuggguaguaca

SEQ ID NO: 2512635 - RNA, 19 nt, Artificial Sequence
  Description of Artificial Sequence: Synthetic oligonucleotide
caguuggguaguacagugg

SEQ ID NO: 2512636 - RNA, 19 nt, Artificial Sequence
  Description of Artificial Sequence: Synthetic oligonucleotide
agcaggugcguguaagcug

SEQ ID NO: 2512637 - RNA, 19 nt, Artificial Sequence
  Description of Artificial Sequence: Synthetic oligonucleotide
ucgaagcaaauaguccucc

SEQ ID NO: 2512638 - RNA, 19 nt, Artificial Sequence
  Description of Artificial Sequence: Synthetic oligonucleotide
aucaaggaccgugugggag

SEQ ID NO: 2512639 - RNA, 19 nt, Artificial Sequence
  Description of Artificial Sequence: Synthetic oligonucleotide
accgugugggagcccaggc

SEQ ID NO: 2512640 - RNA, 19 nt, Artificial Sequence
  Description of Artificial Sequence: Synthetic oligonucleotide
ggugccgcgcaccaggugg

SEQ ID NO: 2512641 - RNA, 19 nt, Artificial Sequence
  Description of Artificial Sequence: Synthetic oligonucleotide
aaucaaggaccguguggga

SEQ ID NO: 2512642 - RNA, 19 nt, Artificial Sequence
  Description of Artificial Sequence: Synthetic oligonucleotide
ugguucacaaggacauggu

SEQ ID NO: 2512643 - RNA, 19 nt, Artificial Sequence
  Description of Artificial Sequence: Synthetic oligonucleotide
uccacaacgucuccuccaa

SEQ ID NO: 2512644 - RNA, 19 nt, Artificial Sequence
  Description of Artificial Sequence: Synthetic oligonucleotide
uggguuguggaggcggccg

SEQ ID NO: 2512645 - RNA, 19 nt, Artificial Sequence
  Description of Artificial Sequence: Synthetic oligonucleotide
uguucuauaggggcaucgu

SEQ ID NO: 2512646 - RNA, 19 nt, Artificial Sequence
  Description of Artificial Sequence: Synthetic oligonucleotide
ggggcuguucuauaggggc

SEQ ID NO: 2512647 - RNA, 19 nt, Artificial Sequence
  Description of Artificial Sequence: Synthetic oligonucleotide
ggcucauagaaaucaagga

SEQ ID NO: 2512648 - RNA, 19 nt, Artificial Sequence
  Description of Artificial Sequence: Synthetic oligonucleotide
guaagcuguaccgcggagc

SEQ ID NO: 2512649 - RNA, 19 nt, Artificial Sequence
  Description of Artificial Sequence: Synthetic oligonucleotide
ugaagucagggacguagua

SEQ ID NO: 2512650 - RNA, 19 nt, Artificial Sequence
  Description of Artificial Sequence: Synthetic oligonucleotide
gaauggucagggagacucg

SEQ ID NO: 2512651 - RNA, 19 nt, Artificial Sequence
  Description of Artificial Sequence: Synthetic oligonucleotide
auacugguucacaaggaca

SEQ ID NO: 2512652 - RNA, 19 nt, Artificial Sequence
  Description of Artificial Sequence: Synthetic oligonucleotide
ccugucgaagcaaauaguc

SEQ ID NO: 2512653 - RNA, 19 nt, Artificial Sequence
  Description of Artificial Sequence: Synthetic oligonucleotide
ugcguguaagcuguaccgc

SEQ ID NO: 2512654 - RNA, 19 nt, Artificial Sequence
  Description of Artificial Sequence: Synthetic oligonucleotide
cguaguagauuagaggugg

SEQ ID NO: 2512655 - RNA, 19 nt, Artificial Sequence
  Description of Artificial Sequence: Synthetic oligonucleotide
guucacaaggacaugguua

SEQ ID NO: 2512656 - RNA, 19 nt, Artificial Sequence
  Description of Artificial Sequence: Synthetic oligonucleotide
cuguucuauaggggcaucg

SEQ ID NO: 2512657 - RNA, 19 nt, Artificial Sequence
  Description of Artificial Sequence: Synthetic oligonucleotide
acccugaauggcuccagug

SEQ ID NO: 2512658 - RNA, 19 nt, Artificial Sequence
  Description of Artificial Sequence: Synthetic oligonucleotide
cacuuuguccacguagcgc

SEQ ID NO: 2512659 - RNA, 19 nt, Artificial Sequence
  Description of Artificial Sequence: Synthetic oligonucleotide
guucuauaggggcaucguc

SEQ ID NO: 2512660 - RNA, 19 nt, Artificial Sequence
  Description of Artificial Sequence: Synthetic oligonucleotide
ggugcguguaagcuguacc

SEQ ID NO: 2512661 - RNA, 19 nt, Artificial Sequence
  Description of Artificial Sequence: Synthetic oligonucleotide
ggugauggguuguggaggc

SEQ ID NO: 2512662 - RNA, 19 nt, Artificial Sequence
  Description of Artificial Sequence: Synthetic oligonucleotide
cugaauggcuccagugcug

SEQ ID NO: 2512663 - RNA, 19 nt, Artificial Sequence
  Description of Artificial Sequence: Synthetic oligonucleotide
guaguagauuagagguggg

SEQ ID NO: 2512664 - RNA, 19 nt, Artificial Sequence
  Description of Artificial Sequence: Synthetic oligonucleotide
uuagagguggggccuucuc

SEQ ID NO: 2512665 - RNA, 19 nt, Artificial Sequence
  Description of Artificial Sequence: Synthetic oligonucleotide
gcguguaagcuguaccgcg

SEQ ID NO: 2512666 - RNA, 19 nt, Artificial Sequence
  Description of Artificial Sequence: Synthetic oligonucleotide
gcgcuguccguccacaacg

SEQ ID NO: 2512667 - RNA, 19 nt, Artificial Sequence
  Description of Artificial Sequence: Synthetic oligonucleotide
uggguaguacaguggucca

SEQ ID NO: 2512668 - RNA, 19 nt, Artificial Sequence
  Description of Artificial Sequence: Synthetic oligonucleotide
aaaaccugucgaagcaaau

SEQ ID NO: 2512669 - RNA, 19 nt, Artificial Sequence
  Description of Artificial Sequence: Synthetic oligonucleotide
cauggcggaagucgcucgg

SEQ ID NO: 2512670 - RNA, 19 nt, Artificial Sequence
  Description of Artificial Sequence: Synthetic oligonucleotide
gcugcauuggguggcagcg

SEQ ID NO: 2512671 - RNA, 19 nt, Artificial Sequence
  Description of Artificial Sequence: Synthetic oligonucleotide
cuccccaggcagauacugg

SEQ ID NO: 2512672 - RNA, 19 nt, Artificial Sequence
  Description of Artificial Sequence: Synthetic oligonucleotide
agauacugguucacaagga

SEQ ID NO: 2512673 - RNA, 19 nt, Artificial Sequence
  Description of Artificial Sequence: Synthetic oligonucleotide
acguaguagauuagaggug

SEQ ID NO: 2512674 - RNA, 19 nt, Artificial Sequence
  Description of Artificial Sequence: Synthetic oligonucleotide
acgcagcugcauugggugg

SEQ ID NO: 2512675 - RNA, 19 nt, Artificial Sequence
  Description of Artificial Sequence: Synthetic oligonucleotide
aggcaugaugcccucccca

SEQ ID NO: 2512676 - RNA, 19 nt, Artificial Sequence
  Description of Artificial Sequence: Synthetic oligonucleotide
caacgucuccuccaauuuc

SEQ ID NO: 2512677 - RNA, 19 nt, Artificial Sequence
  Description of Artificial Sequence: Synthetic oligonucleotide
agggacguaguagauuaga

SEQ ID NO: 2512678 - RNA, 19 nt, Artificial Sequence
  Description of Artificial Sequence: Synthetic oligonucleotide
ccgacuggcacgcagcugc

SEQ ID NO: 2512679 - RNA, 19 nt, Artificial Sequence
  Description of Artificial Sequence: Synthetic oligonucleotide
uagcugggagaccaccaaa

SEQ ID NO: 2512680 - RNA, 19 nt, Artificial Sequence
  Description of Artificial Sequence: Synthetic oligonucleotide
ggcaugaugcccuccccag

SEQ ID NO: 2512681 - RNA, 19 nt, Artificial Sequence
  Description of Artificial Sequence: Synthetic oligonucleotide
gggacguaguagauuagag

SEQ ID NO: 2512682 - RNA, 19 nt, Artificial Sequence
  Description of Artificial Sequence: Synthetic oligonucleotide
gauggguuguggaggcggc

SEQ ID NO: 2512683 - RNA, 19 nt, Artificial Sequence
  Description of Artificial Sequence: Synthetic oligonucleotide
uuccucccagacagcuggg

SEQ ID NO: 2512684 - RNA, 19 nt, Artificial Sequence
  Description of Artificial Sequence: Synthetic oligonucleotide
ggauaccaacuccuugugc

SEQ ID NO: 2512685 - RNA, 19 nt, Artificial Sequence
  Description of Artificial Sequence: Synthetic oligonucleotide
ucguccucuggcugucgag

SEQ ID NO: 2512686 - RNA, 19 nt, Artificial Sequence
  Description of Artificial Sequence: Synthetic oligonucleotide
uggguggcagcgagguggc

SEQ ID NO: 2512687 - RNA, 19 nt, Artificial Sequence
  Description of Artificial Sequence: Synthetic oligonucleotide
gucacuugcucagcaggag

SEQ ID NO: 2512688 - RNA, 19 nt, Artificial Sequence
  Description of Artificial Sequence: Synthetic oligonucleotide
guagcgcugaagccauggc

SEQ ID NO: 2512689 - RNA, 19 nt, Artificial Sequence
  Description of Artificial Sequence: Synthetic oligonucleotide
auggguuguggaggcggcc

SEQ ID NO: 2512690 - RNA, 19 nt, Artificial Sequence
  Description of Artificial Sequence: Synthetic oligonucleotide
uuguggaggcggccggggc

SEQ ID NO: 2512691 - RNA, 19 nt, Artificial Sequence
  Description of Artificial Sequence: Synthetic oligonucleotide
aagucgcucgggaaccaug

SEQ ID NO: 2512692 - RNA, 19 nt, Artificial Sequence
  Description of Artificial Sequence: Synthetic oligonucleotide
cauccacaaggguggcugc

SEQ ID NO: 2512693 - RNA, 19 nt, Artificial Sequence
  Description of Artificial Sequence: Synthetic oligonucleotide
agcgccgacuggcacgcag

SEQ ID NO: 2512694 - RNA, 19 nt, Artificial Sequence
  Description of Artificial Sequence: Synthetic oligonucleotide
aagcuguaccgcggagcac

SEQ ID NO: 2512695 - RNA, 19 nt, Artificial Sequence
  Description of Artificial Sequence: Synthetic oligonucleotide
augaggcaugaugcccucc

SEQ ID NO: 2512696 - RNA, 19 nt, Artificial Sequence
  Description of Artificial Sequence: Synthetic oligonucleotide
uggcggaagucgcucggga

SEQ ID NO: 2512697 - RNA, 19 nt, Artificial Sequence
  Description of Artificial Sequence: Synthetic oligonucleotide
uaccaacuccuugugcgcu

SEQ ID NO: 2512698 - RNA, 19 nt, Artificial Sequence
  Description of Artificial Sequence: Synthetic oligonucleotide
auggugcugacaguugggu

SEQ ID NO: 2512699 - RNA, 19 nt, Artificial Sequence
  Description of Artificial Sequence: Synthetic oligonucleotide
cagugcugggacccuggcg

SEQ ID NO: 2512700 - RNA, 19 nt, Artificial Sequence
  Description of Artificial Sequence: Synthetic oligonucleotide
auaggggcaucguccucug

SEQ ID NO: 2512701 - RNA, 19 nt, Artificial Sequence
  Description of Artificial Sequence: Synthetic oligonucleotide
aggugcguguaagcuguac

SEQ ID NO: 2512702 - RNA, 19 nt, Artificial Sequence
  Description of Artificial Sequence: Synthetic oligonucleotide
guuagcugggagaccacca

SEQ ID NO: 2512703 - RNA, 19 nt, Artificial Sequence
  Description of Artificial Sequence: Synthetic oligonucleotide
gcguccugcuccuccaugg

SEQ ID NO: 2512704 - RNA, 19 nt, Artificial Sequence
  Description of Artificial Sequence: Synthetic oligonucleotide
uaguacagugguccaucuu

SEQ ID NO: 2512705 - RNA, 19 nt, Artificial Sequence
  Description of Artificial Sequence: Synthetic oligonucleotide
cuuuguccacguagcgcug

SEQ ID NO: 2512706 - RNA, 19 nt, Artificial Sequence
  Description of Artificial Sequence: Synthetic oligonucleotide
gguggggccuucuccaccc

SEQ ID NO: 2512707 - RNA, 19 nt, Artificial Sequence
  Description of Artificial Sequence: Synthetic oligonucleotide
gucugacacuuuguccacg

SEQ ID NO: 2512708 - RNA, 19 nt, Artificial Sequence
  Description of Artificial Sequence: Synthetic oligonucleotide
uccacaaggguggcugcga

SEQ ID NO: 2512709 - RNA, 19 nt, Artificial Sequence
  Description of Artificial Sequence: Synthetic oligonucleotide
ggagcaggugcguguaagc

SEQ ID NO: 2512710 - RNA, 19 nt, Artificial Sequence
  Description of Artificial Sequence: Synthetic oligonucleotide
cuguagcuuccucccagac

SEQ ID NO: 2512711 - RNA, 19 nt, Artificial Sequence
  Description of Artificial Sequence: Synthetic oligonucleotide
uacagugguccaucuucau

SEQ ID NO: 2512712 - RNA, 19 nt, Artificial Sequence
  Description of Artificial Sequence: Synthetic oligonucleotide
guccacaacgucuccucca

SEQ ID NO: 2512713 - RNA, 19 nt, Artificial Sequence
  Description of Artificial Sequence: Synthetic oligonucleotide
uggugcugacaguugggua

SEQ ID NO: 2512714 - RNA, 19 nt, Artificial Sequence
  Description of Artificial Sequence: Synthetic oligonucleotide
gaaccaugccccggggaug

SEQ ID NO: 2512715 - RNA, 19 nt, Artificial Sequence
  Description of Artificial Sequence: Synthetic oligonucleotide
gagaugaagucagggacgu

SEQ ID NO: 2512716 - RNA, 19 nt, Artificial Sequence
  Description of Artificial Sequence: Synthetic oligonucleotide
gucgaagcaaauaguccuc

SEQ ID NO: 2512717 - RNA, 19 nt, Artificial Sequence
  Description of Artificial Sequence: Synthetic oligonucleotide
guuguggaggcggccgggg

SEQ ID NO: 2512718 - RNA, 19 nt, Artificial Sequence
  Description of Artificial Sequence: Synthetic oligonucleotide
gguaguacagugguccauc

SEQ ID NO: 2512719 - RNA, 19 nt, Artificial Sequence
  Description of Artificial Sequence: Synthetic oligonucleotide
ccggcgaauggucagggag

SEQ ID NO: 2512720 - RNA, 19 nt, Artificial Sequence
  Description of Artificial Sequence: Synthetic oligonucleotide
guguaagcuguaccgcgga

SEQ ID NO: 2512721 - RNA, 19 nt, Artificial Sequence
  Description of Artificial Sequence: Synthetic oligonucleotide
gaccgugugggagcccagg

SEQ ID NO: 2512722 - RNA, 19 nt, Artificial Sequence
  Description of Artificial Sequence: Synthetic oligonucleotide
uuuggcuuuggggcauuaa

SEQ ID NO: 2512723 - RNA, 19 nt, Artificial Sequence
  Description of Artificial Sequence: Synthetic oligonucleotide
guacagugguccaucuuca

SEQ ID NO: 2512724 - RNA, 19 nt, Artificial Sequence
  Description of Artificial Sequence: Synthetic oligonucleotide
cgaauggucagggagacuc

SEQ ID NO: 2512725 - RNA, 19 nt, Artificial Sequence
  Description of Artificial Sequence: Synthetic oligonucleotide
uaggggcaucguccucugg

SEQ ID NO: 2512726 - RNA, 19 nt, Artificial Sequence
  Description of Artificial Sequence: Synthetic oligonucleotide
augaagucagggacguagu

SEQ ID NO: 2512727 - RNA, 19 nt, Artificial Sequence
  Description of Artificial Sequence: Synthetic oligonucleotide
cacaaggguggcugcgaug

SEQ ID NO: 2512728 - RNA, 19 nt, Artificial Sequence
  Description of Artificial Sequence: Synthetic oligonucleotide
agacucgggugccgcgcac

SEQ ID NO: 2512729 - RNA, 19 nt, Artificial Sequence
  Description of Artificial Sequence: Synthetic oligonucleotide
ucacaaggacaugguuagc

SEQ ID NO: 2512730 - RNA, 19 nt, Artificial Sequence
  Description of Artificial Sequence: Synthetic oligonucleotide
guggcugcgaugccgugga

SEQ ID NO: 2512731 - RNA, 19 nt, Artificial Sequence
  Description of Artificial Sequence: Synthetic oligonucleotide
cagggacguaguagauuag

SEQ ID NO: 2512732 - RNA, 19 nt, Artificial Sequence
  Description of Artificial Sequence: Synthetic oligonucleotide
uccguccacaacgucuccu

SEQ ID NO: 2512733 - RNA, 19 nt, Artificial Sequence
  Description of Artificial Sequence: Synthetic oligonucleotide
ccggggcuguucuauaggg

SEQ ID NO: 2512734 - RNA, 19 nt, Artificial Sequence
  Description of Artificial Sequence: Synthetic oligonucleotide
uguccacguagcgcugaag

SEQ ID NO: 2512735 - RNA, 19 nt, Artificial Sequence
  Description of Artificial Sequence: Synthetic oligonucleotide
auggcggaagucgcucggg

SEQ ID NO: 2512736 - RNA, 19 nt, Artificial Sequence
  Description of Artificial Sequence: Synthetic oligonucleotide
aaggaccgugugggagccc

SEQ ID NO: 2512737 - RNA, 19 nt, Artificial Sequence
  Description of Artificial Sequence: Synthetic oligonucleotide
uccuugugcgcuguccguc

SEQ ID NO: 2512738 - RNA, 19 nt, Artificial Sequence
  Description of Artificial Sequence: Synthetic oligonucleotide
cuccacccugaauggcucc

SEQ ID NO: 2512739 - RNA, 19 nt, Artificial Sequence
  Description of Artificial Sequence: Synthetic oligonucleotide
uuguccacguagcgcugaa

SEQ ID NO: 2512740 - RNA, 19 nt, Artificial Sequence
  Description of Artificial Sequence: Synthetic oligonucleotide
agcugggagaccaccaaaa

SEQ ID NO: 2512741 - RNA, 19 nt, Artificial Sequence
  Description of Artificial Sequence: Synthetic oligonucleotide
cugucgaggcucauagaaa

SEQ ID NO: 2512742 - RNA, 19 nt, Artificial Sequence
  Description of Artificial Sequence: Synthetic oligonucleotide
cguguaagcuguaccgcgg

SEQ ID NO: 2512743 - RNA, 19 nt, Artificial Sequence
  Description of Artificial Sequence: Synthetic oligonucleotide
augaugcccuccccaggca

SEQ ID NO: 2512744 - RNA, 19 nt, Artificial Sequence
  Description of Artificial Sequence: Synthetic oligonucleotide
acuugcucagcaggaggcu

SEQ ID NO: 2512745 - RNA, 19 nt, Artificial Sequence
  Description of Artificial Sequence: Synthetic oligonucleotide
gguuagcugggagaccacc

SEQ ID NO: 2512746 - RNA, 19 nt, Artificial Sequence
  Description of Artificial Sequence: Synthetic oligonucleotide
ugguuagcugggagaccac

SEQ ID NO: 2512747 - RNA, 19 nt, Artificial Sequence
  Description of Artificial Sequence: Synthetic oligonucleotide
guucuguagcuuccuccca

SEQ ID NO: 2512748 - RNA, 19 nt, Artificial Sequence
  Description of Artificial Sequence: Synthetic oligonucleotide
aggaccgugugggagccca

SEQ ID NO: 2512749 - RNA, 19 nt, Artificial Sequence
  Description of Artificial Sequence: Synthetic oligonucleotide
gacaguuggguaguacagu

SEQ ID NO: 2512750 - RNA, 19 nt, Artificial Sequence
  Description of Artificial Sequence: Synthetic oligonucleotide
uugugcgcuguccguccac

SEQ ID NO: 2512751 - RNA, 19 nt, Artificial Sequence
  Description of Artificial Sequence: Synthetic oligonucleotide
auuagagguggggccuucu

SEQ ID NO: 2512752 - RNA, 19 nt, Artificial Sequence
  Description of Artificial Sequence: Synthetic oligonucleotide
gagguggggccuucuccac

SEQ ID NO: 2512753 - RNA, 19 nt, Artificial Sequence
  Description of Artificial Sequence: Synthetic oligonucleotide
gcggaagucgcucgggaac

SEQ ID NO: 2512754 - RNA, 19 nt, Artificial Sequence
  Description of Artificial Sequence: Synthetic oligonucleotide
caggcugcgcggcuccacc

SEQ ID NO: 2512755 - RNA, 19 nt, Artificial Sequence
  Description of Artificial Sequence: Synthetic oligonucleotide
gguggcugcgaugccgugg

SEQ ID NO: 2512756 - RNA, 19 nt, Artificial Sequence
  Description of Artificial Sequence: Synthetic oligonucleotide
guggcagcgagguggcguc

SEQ ID NO: 2512757 - RNA, 19 nt, Artificial Sequence
  Description of Artificial Sequence: Synthetic oligonucleotide
ccagcagcgaggugauggg

SEQ ID NO: 2512758 - RNA, 19 nt, Artificial Sequence
  Description of Artificial Sequence: Synthetic oligonucleotide
caggcagauacugguucac

SEQ ID NO: 2512759 - RNA, 19 nt, Artificial Sequence
  Description of Artificial Sequence: Synthetic oligonucleotide
ccugcuccuccauggauac

SEQ ID NO: 2512760 - RNA, 19 nt, Artificial Sequence
  Description of Artificial Sequence: Synthetic oligonucleotide
cuauaggggcaucguccuc

SEQ ID NO: 2512761 - RNA, 19 nt, Artificial Sequence
  Description of Artificial Sequence: Synthetic oligonucleotide
acucgggugccgcgcacca

SEQ ID NO: 2512762 - RNA, 19 nt, Artificial Sequence
  Description of Artificial Sequence: Synthetic oligonucleotide
agcgaggugauggguugug

SEQ ID NO: 2512763 - RNA, 19 nt, Artificial Sequence
  Description of Artificial Sequence: Synthetic oligonucleotide
guaguacagugguccaucu

SEQ ID NO: 2512764 - RNA, 19 nt, Artificial Sequence
  Description of Artificial Sequence: Synthetic oligonucleotide
aggcugaggucugacacuu

SEQ ID NO: 2512765 - RNA, 19 nt, Artificial Sequence
  Description of Artificial Sequence: Synthetic oligonucleotide
acccggcgaauggucaggg

SEQ ID NO: 2512766 - RNA, 19 nt, Artificial Sequence
  Description of Artificial Sequence: Synthetic oligonucleotide
gucgcucgggaaccaugcc

SEQ ID NO: 2512767 - RNA, 19 nt, Artificial Sequence
  Description of Artificial Sequence: Synthetic oligonucleotide
ggucugacacuuuguccac

SEQ ID NO: 2512768 - RNA, 19 nt, Artificial Sequence
  Description of Artificial Sequence: Synthetic oligonucleotide
gagacucgggugccgcgca

SEQ ID NO: 2512769 - RNA, 19 nt, Artificial Sequence
  Description of Artificial Sequence: Synthetic oligonucleotide
gauuagagguggggccuuc

SEQ ID NO: 2512770 - RNA, 19 nt, Artificial Sequence
  Description of Artificial Sequence: Synthetic oligonucleotide
cuccgggcagcgccgacug

SEQ ID NO: 2512771 - RNA, 19 nt, Artificial Sequence
  Description of Artificial Sequence: Synthetic oligonucleotide
gccggggcuguucuauagg

SEQ ID NO: 2512772 - RNA, 19 nt, Artificial Sequence
  Description of Artificial Sequence: Synthetic oligonucleotide
ggcuccagugcugggaccc

SEQ ID NO: 2512773 - RNA, 19 nt, Artificial Sequence
  Description of Artificial Sequence: Synthetic oligonucleotide
gacucgggugccgcgcacc

SEQ ID NO: 2512774 - RNA, 19 nt, Artificial Sequence
  Description of Artificial Sequence: Synthetic oligonucleotide
uggcuccagugcugggacc

SEQ ID NO: 2512775 - RNA, 19 nt, Artificial Sequence
  Description of Artificial Sequence: Synthetic oligonucleotide
ugcugggacccuggcgucc

SEQ ID NO: 2512776 - RNA, 19 nt, Artificial Sequence
  Description of Artificial Sequence: Synthetic oligonucleotide
gugauggguuguggaggcg

SEQ ID NO: 2512777 - RNA, 19 nt, Artificial Sequence
  Description of Artificial Sequence: Synthetic oligonucleotide
gcuggcgcgcagcacgcgg

SEQ ID NO: 2512778 - RNA, 19 nt, Artificial Sequence
  Description of Artificial Sequence: Synthetic oligonucleotide
cgcucgggaaccaugcccc

SEQ ID NO: 2512779 - RNA, 19 nt, Artificial Sequence
  Description of Artificial Sequence: Synthetic oligonucleotide
ggguuguggaggcggccgg

SEQ ID NO: 2512780 - RNA, 19 nt, Artificial Sequence
  Description of Artificial Sequence: Synthetic oligonucleotide
aguccuccucuuccuugga

SEQ ID NO: 2512781 - RNA, 19 nt, Artificial Sequence
  Description of Artificial Sequence: Synthetic oligonucleotide
gcccuccccaggcagauac

SEQ ID NO: 2512782 - RNA, 19 nt, Artificial Sequence
  Description of Artificial Sequence: Synthetic oligonucleotide
ccuugugcgcuguccgucc

SEQ ID NO: 2512783 - RNA, 19 nt, Artificial Sequence
  Description of Artificial Sequence: Synthetic oligonucleotide
gaugcccuccccaggcaga

SEQ ID NO: 2512784 - RNA, 19 nt, Artificial Sequence
  Description of Artificial Sequence: Synthetic oligonucleotide
uccgggcagcgccgacugg

SEQ ID NO: 2512785 - RNA, 19 nt, Artificial Sequence
  Description of Artificial Sequence: Synthetic oligonucleotide
gcuggguccacuuuggcuu

SEQ ID NO: 2512786 - RNA, 19 nt, Artificial Sequence
  Description of Artificial Sequence: Synthetic oligonucleotide
caaggguggcugcgaugcc

SEQ ID NO: 2512787 - RNA, 19 nt, Artificial Sequence
  Description of Artificial Sequence: Synthetic oligonucleotide
cacaacgucuccuccaauu

SEQ ID NO: 2512788 - RNA, 19 nt, Artificial Sequence
  Description of Artificial Sequence: Synthetic oligonucleotide
gagcaggugcguguaagcu

SEQ ID NO: 2512789 - RNA, 19 nt, Artificial Sequence
  Description of Artificial Sequence: Synthetic oligonucleotide
cccaggcagauacugguuc

SEQ ID NO: 2512790 - RNA, 19 nt, Artificial Sequence
  Description of Artificial Sequence: Synthetic oligonucleotide
cauuggguggcagcgaggu

SEQ ID NO: 2512791 - RNA, 19 nt, Artificial Sequence
  Description of Artificial Sequence: Synthetic oligonucleotide
uccucccagacagcugggu

SEQ ID NO: 2512792 - RNA, 19 nt, Artificial Sequence
  Description of Artificial Sequence: Synthetic oligonucleotide
cuccaauuuccagauucaa

SEQ ID NO: 2512793 - RNA, 19 nt, Artificial Sequence
  Description of Artificial Sequence: Synthetic oligonucleotide
cacccggcgaauggucagg

SEQ ID NO: 2512794 - RNA, 19 nt, Artificial Sequence
  Description of Artificial Sequence: Synthetic oligonucleotide
ggccggggcuguucuauag

SEQ ID NO: 2512795 - RNA, 19 nt, Artificial Sequence
  Description of Artificial Sequence: Synthetic oligonucleotide
ccgcggagcaccagcaggc

SEQ ID NO: 2512796 - RNA, 19 nt, Artificial Sequence
  Description of Artificial Sequence: Synthetic oligonucleotide
ggagacucgggugccgcgc

SEQ ID NO: 2512797 - RNA, 19 nt, Artificial Sequence
  Description of Artificial Sequence: Synthetic oligonucleotide
ccuccaauuuccagauuca

SEQ ID NO: 2512798 - RNA, 19 nt, Artificial Sequence
  Description of Artificial Sequence: Synthetic oligonucleotide
aggguggcugcgaugccgu

SEQ ID NO: 2512799 - RNA, 19 nt, Artificial Sequence
  Description of Artificial Sequence: Synthetic oligonucleotide
gugccgcgcaccagguggg

SEQ ID NO: 2512800 - RNA, 19 nt, Artificial Sequence
  Description of Artificial Sequence: Synthetic oligonucleotide
aggcugcgcggcuccacca

SEQ ID NO: 2512801 - RNA, 19 nt, Artificial Sequence
  Description of Artificial Sequence: Synthetic oligonucleotide
guaccgcggagcaccagca

SEQ ID NO: 2512802 - RNA, 19 nt, Artificial Sequence
  Description of Artificial Sequence: Synthetic oligonucleotide
cguagcgcugaagccaugg

SEQ ID NO: 2512803 - RNA, 19 nt, Artificial Sequence
  Description of Artificial Sequence: Synthetic oligonucleotide
ggaaccaugccccggggau

SEQ ID NO: 2512804 - RNA, 19 nt, Artificial Sequence
  Description of Artificial Sequence: Synthetic oligonucleotide
ugugggagcccaggcugau

SEQ ID NO: 2512805 - RNA, 19 nt, Artificial Sequence
  Description of Artificial Sequence: Synthetic oligonucleotide
gcacccggcgaauggucag

SEQ ID NO: 2512806 - RNA, 19 nt, Artificial Sequence
  Description of Artificial Sequence: Synthetic oligonucleotide
ccccaguucuguagcuucc

SEQ ID NO: 2512807 - RNA, 19 nt, Artificial Sequence
  Description of Artificial Sequence: Synthetic oligonucleotide
caucguccucuggcugucg

SEQ ID NO: 2512808 - RNA, 19 nt, Artificial Sequence
  Description of Artificial Sequence: Synthetic oligonucleotide
gcucgggaaccaugccccg

SEQ ID NO: 2512809 - RNA, 19 nt, Artificial Sequence
  Description of Artificial Sequence: Synthetic oligonucleotide
guccguccacaacgucucc

SEQ ID NO: 2512810 - RNA, 19 nt, Artificial Sequence
  Description of Artificial Sequence: Synthetic oligonucleotide
gcugacaguuggguaguac

SEQ ID NO: 2512811 - RNA, 19 nt, Artificial Sequence
  Description of Artificial Sequence: Synthetic oligonucleotide
uggcugcgaugccguggag

SEQ ID NO: 2512812 - RNA, 19 nt, Artificial Sequence
  Description of Artificial Sequence: Synthetic oligonucleotide
cuugugcgcuguccgucca

SEQ ID NO: 2512813 - RNA, 19 nt, Artificial Sequence
  Description of Artificial Sequence: Synthetic oligonucleotide
gcgaggugauggguugugg

SEQ ID NO: 2512814 - RNA, 19 nt, Artificial Sequence
  Description of Artificial Sequence: Synthetic oligonucleotide
cgagguggcguccagcuca

SEQ ID NO: 2512815 - RNA, 19 nt, Artificial Sequence
  Description of Artificial Sequence: Synthetic oligonucleotide
ccaggcagauacugguuca

SEQ ID NO: 2512816 - RNA, 19 nt, Artificial Sequence
  Description of Artificial Sequence: Synthetic oligonucleotide
cagcaggaggcuggcgcgc

SEQ ID NO: 2512817 - RNA, 19 nt, Artificial Sequence
  Description of Artificial Sequence: Synthetic oligonucleotide
gcauuggguggcagcgagg

SEQ ID NO: 2512818 - RNA, 19 nt, Artificial Sequence
  Description of Artificial Sequence: Synthetic oligonucleotide
ccguccacaacgucuccuc

SEQ ID NO: 2512819 - RNA, 19 nt, Artificial Sequence
  Description of Artificial Sequence: Synthetic oligonucleotide
gcaggugcguguaagcugu

SEQ ID NO: 2512820 - RNA, 19 nt, Artificial Sequence
  Description of Artificial Sequence: Synthetic oligonucleotide
agcaggaggcuggcgcgca

SEQ ID NO: 2512821 - RNA, 19 nt, Artificial Sequence
  Description of Artificial Sequence: Synthetic oligonucleotide
cugcgcggcuccaccagca

SEQ ID NO: 2512822 - RNA, 19 nt, Artificial Sequence
  Description of Artificial Sequence: Synthetic oligonucleotide
cggggcuguucuauagggg

SEQ ID NO: 2512823 - RNA, 19 nt, Artificial Sequence
  Description of Artificial Sequence: Synthetic oligonucleotide
ggcguccugcuccuccaug

SEQ ID NO: 2512824 - RNA, 19 nt, Artificial Sequence
  Description of Artificial Sequence: Synthetic oligonucleotide
cacguagcgcugaagccau

SEQ ID NO: 2512825 - RNA, 19 nt, Artificial Sequence
  Description of Artificial Sequence: Synthetic oligonucleotide
caggcugauggugcugaca

SEQ ID NO: 2512826 - RNA, 19 nt, Artificial Sequence
  Description of Artificial Sequence: Synthetic oligonucleotide
ccacuuuggcuuuggggca

SEQ ID NO: 2512827 - RNA, 19 nt, Artificial Sequence
  Description of Artificial Sequence: Synthetic oligonucleotide
gcguccagcucauccacaa

SEQ ID NO: 2512828 - RNA, 19 nt, Artificial Sequence
  Description of Artificial Sequence: Synthetic oligonucleotide
gggaaccaugccccgggga

SEQ ID NO: 2512829 - RNA, 19 nt, Artificial Sequence
  Description of Artificial Sequence: Synthetic oligonucleotide
acgcggggcacccggcgaa

SEQ ID NO: 2512830 - RNA, 19 nt, Artificial Sequence
  Description of Artificial Sequence: Synthetic oligonucleotide
caggugggcuccgggcagc

SEQ ID NO: 2512831 - RNA, 19 nt, Artificial Sequence
  Description of Artificial Sequence: Synthetic oligonucleotide
ccaguucuguagcuuccuc

SEQ ID NO: 2512832 - RNA, 19 nt, Artificial Sequence
  Description of Artificial Sequence: Synthetic oligonucleotide
gagcccaccccaguucugu

SEQ ID NO: 2512833 - RNA, 19 nt, Artificial Sequence
  Description of Artificial Sequence: Synthetic oligonucleotide
gcggagcaccagcaggcug

SEQ ID NO: 2512834 - RNA, 19 nt, Artificial Sequence
  Description of Artificial Sequence: Synthetic oligonucleotide
gugcugggacccuggcguc

SEQ ID NO: 2512835 - RNA, 19 nt, Artificial Sequence
  Description of Artificial Sequence: Synthetic oligonucleotide
ggcggaagucgcucgggaa

SEQ ID NO: 2512836 - RNA, 19 nt, Artificial Sequence
  Description of Artificial Sequence: Synthetic oligonucleotide
ccaucuucaugaggcauga

SEQ ID NO: 2512837 - RNA, 19 nt, Artificial Sequence
  Description of Artificial Sequence: Synthetic oligonucleotide
uggcagcgagguggcgucc

SEQ ID NO: 2512838 - RNA, 19 nt, Artificial Sequence
  Description of Artificial Sequence: Synthetic oligonucleotide
augcccuccccaggcagau

SEQ ID NO: 2512839 - RNA, 19 nt, Artificial Sequence
  Description of Artificial Sequence: Synthetic oligonucleotide
cgaggugauggguugugga

SEQ ID NO: 2512840 - RNA, 19 nt, Artificial Sequence
  Description of Artificial Sequence: Synthetic oligonucleotide
cugcuccuccauggauacc

SEQ ID NO: 2512841 - RNA, 19 nt, Artificial Sequence
  Description of Artificial Sequence: Synthetic oligonucleotide
ugcugacaguuggguagua

SEQ ID NO: 2512842 - RNA, 19 nt, Artificial Sequence
  Description of Artificial Sequence: Synthetic oligonucleotide
cguccacaacgucuccucc

SEQ ID NO: 2512843 - RNA, 19 nt, Artificial Sequence
  Description of Artificial Sequence: Synthetic oligonucleotide
gaggcggccggggcuguuc

SEQ ID NO: 2512844 - RNA, 19 nt, Artificial Sequence
  Description of Artificial Sequence: Synthetic oligonucleotide
ccgggcagcgccgacuggc

SEQ ID NO: 2512845 - RNA, 19 nt, Artificial Sequence
  Description of Artificial Sequence: Synthetic oligonucleotide
ugccgcgcaccaggugggc

SEQ ID NO: 2512846 - RNA, 19 nt, Artificial Sequence
  Description of Artificial Sequence: Synthetic oligonucleotide
cugacacuuuguccacgua

SEQ ID NO: 2512847 - RNA, 19 nt, Artificial Sequence
  Description of Artificial Sequence: Synthetic oligonucleotide
cuguaccgcggagcaccag

SEQ ID NO: 2512848 - RNA, 19 nt, Artificial Sequence
  Description of Artificial Sequence: Synthetic oligonucleotide
gccauggcggaagucgcuc

SEQ ID NO: 2512849 - RNA, 19 nt, Artificial Sequence
  Description of Artificial Sequence: Synthetic oligonucleotide
gucagggacguaguagauu

SEQ ID NO: 2512850 - RNA, 19 nt, Artificial Sequence
  Description of Artificial Sequence: Synthetic oligonucleotide
cagacagcuggguccacuu

SEQ ID NO: 2512851 - RNA, 19 nt, Artificial Sequence
  Description of Artificial Sequence: Synthetic oligonucleotide
cagcugcauuggguggcag

SEQ ID NO: 2512852 - RNA, 19 nt, Artificial Sequence
  Description of Artificial Sequence: Synthetic oligonucleotide
gggagcccaccccaguucu

SEQ ID NO: 2512853 - RNA, 19 nt, Artificial Sequence
  Description of Artificial Sequence: Synthetic oligonucleotide
ucuggcugucgaggcucau

SEQ ID NO: 2512854 - RNA, 19 nt, Artificial Sequence
  Description of Artificial Sequence: Synthetic oligonucleotide
cucgggugccgcgcaccag

SEQ ID NO: 2512855 - RNA, 19 nt, Artificial Sequence
  Description of Artificial Sequence: Synthetic oligonucleotide
cugcauuggguggcagcga

SEQ ID NO: 2512856 - RNA, 19 nt, Artificial Sequence
  Description of Artificial Sequence: Synthetic oligonucleotide
ggcacccggcgaaugguca

SEQ ID NO: 2512857 - RNA, 19 nt, Artificial Sequence
  Description of Artificial Sequence: Synthetic oligonucleotide
gguggcagcgagguggcgu

SEQ ID NO: 2512858 - RNA, 19 nt, Artificial Sequence
  Description of Artificial Sequence: Synthetic oligonucleotide
gcgcugaagccauggcgga

SEQ ID NO: 2512859 - RNA, 19 nt, Artificial Sequence
  Description of Artificial Sequence: Synthetic oligonucleotide
cugaagccauggcggaagu

SEQ ID NO: 2512860 - RNA, 19 nt, Artificial Sequence
  Description of Artificial Sequence: Synthetic oligonucleotide
accaugccccggggauggg

SEQ ID NO: 2512861 - RNA, 19 nt, Artificial Sequence
  Description of Artificial Sequence: Synthetic oligonucleotide
cacgcggggcacccggcga

SEQ ID NO: 2512862 - RNA, 19 nt, Artificial Sequence
  Description of Artificial Sequence: Synthetic oligonucleotide
cuccuugugcgcuguccgu

SEQ ID NO: 2512863 - RNA, 19 nt, Artificial Sequence
  Description of Artificial Sequence: Synthetic oligonucleotide
gaagucgcucgggaaccau

SEQ ID NO: 2512864 - RNA, 19 nt, Artificial Sequence
  Description of Artificial Sequence: Synthetic oligonucleotide
ccaugccccggggaugggg

SEQ ID NO: 2512865 - RNA, 19 nt, Artificial Sequence
  Description of Artificial Sequence: Synthetic oligonucleotide
gugcgcuguccguccacaa

SEQ ID NO: 2512866 - RNA, 19 nt, Artificial Sequence
  Description of Artificial Sequence: Synthetic oligonucleotide
ggaagucgcucgggaacca

SEQ ID NO: 2512867 - RNA, 19 nt, Artificial Sequence
  Description of Artificial Sequence: Synthetic oligonucleotide
ggacccuggcguccugcuc

SEQ ID NO: 2512868 - RNA, 19 nt, Artificial Sequence
  Description of Artificial Sequence: Synthetic oligonucleotide
cggcgaauggucagggaga

SEQ ID NO: 2512869 - RNA, 19 nt, Artificial Sequence
  Description of Artificial Sequence: Synthetic oligonucleotide
cuggcugucgaggcucaua

SEQ ID NO: 2512870 - RNA, 19 nt, Artificial Sequence
  Description of Artificial Sequence: Synthetic oligonucleotide
ccgcgcaccaggugggcuc

SEQ ID NO: 2512871 - RNA, 19 nt, Artificial Sequence
  Description of Artificial Sequence: Synthetic oligonucleotide
cggggcacccggcgaaugg

SEQ ID NO: 2512872 - RNA, 19 nt, Artificial Sequence
  Description of Artificial Sequence: Synthetic oligonucleotide
gcuguucuauaggggcauc

SEQ ID NO: 2512873 - RNA, 19 nt, Artificial Sequence
  Description of Artificial Sequence: Synthetic oligonucleotide
gcgccgacuggcacgcagc

SEQ ID NO: 2512874 - RNA, 19 nt, Artificial Sequence
  Description of Artificial Sequence: Synthetic oligonucleotide
gccguggagcaggugcgug

SEQ ID NO: 2512875 - RNA, 19 nt, Artificial Sequence
  Description of Artificial Sequence: Synthetic oligonucleotide
cacccugaauggcuccagu

SEQ ID NO: 2512876 - RNA, 19 nt, Artificial Sequence
  Description of Artificial Sequence: Synthetic oligonucleotide
ccacccugaauggcuccag

SEQ ID NO: 2512877 - RNA, 19 nt, Artificial Sequence
  Description of Artificial Sequence: Synthetic oligonucleotide
cgaggcucauagaaaucaa

SEQ ID NO: 2512878 - RNA, 19 nt, Artificial Sequence
  Description of Artificial Sequence: Synthetic oligonucleotide
cuuuggcuuuggggcauua

SEQ ID NO: 2512879 - RNA, 19 nt, Artificial Sequence
  Description of Artificial Sequence: Synthetic oligonucleotide
cccaggcugauggugcuga

SEQ ID NO: 2512880 - RNA, 19 nt, Artificial Sequence
  Description of Artificial Sequence: Synthetic oligonucleotide
acguagcgcugaagccaug

SEQ ID NO: 2512881 - RNA, 19 nt, Artificial Sequence
  Description of Artificial Sequence: Synthetic oligonucleotide
gcagcugcauuggguggca

SEQ ID NO: 2512882 - RNA, 19 nt, Artificial Sequence
  Description of Artificial Sequence: Synthetic oligonucleotide
ggguggcugcgaugccgug

SEQ ID NO: 2512883 - RNA, 19 nt, Artificial Sequence
  Description of Artificial Sequence: Synthetic oligonucleotide
gcgagguggcguccagcuc

SEQ ID NO: 2512884 - RNA, 19 nt, Artificial Sequence
  Description of Artificial Sequence: Synthetic oligonucleotide
ggcagcgagguggcgucca

SEQ ID NO: 2512885 - RNA, 19 nt, Artificial Sequence
  Description of Artificial Sequence: Synthetic oligonucleotide
cuggguccacuuuggcuuu

SEQ ID NO: 2512886 - RNA, 19 nt, Artificial Sequence
  Description of Artificial Sequence: Synthetic oligonucleotide
gggcacccggcgaaugguc

SEQ ID NO: 2512887 - RNA, 19 nt, Artificial Sequence
  Description of Artificial Sequence: Synthetic oligonucleotide
gccgacuggcacgcagcug

SEQ ID NO: 2512888 - RNA, 19 nt, Artificial Sequence
  Description of Artificial Sequence: Synthetic oligonucleotide
ggcugauggugcugacagu

SEQ ID NO: 2512889 - RNA, 19 nt, Artificial Sequence
  Description of Artificial Sequence: Synthetic oligonucleotide
gcuguaccgcggagcacca

SEQ ID NO: 2512890 - RNA, 19 nt, Artificial Sequence
  Description of Artificial Sequence: Synthetic oligonucleotide
cgggaaccaugccccgggg

SEQ ID NO: 2512891 - RNA, 19 nt, Artificial Sequence
  Description of Artificial Sequence: Synthetic oligonucleotide
gagguggcguccagcucau

SEQ ID NO: 2512892 - RNA, 19 nt, Artificial Sequence
  Description of Artificial Sequence: Synthetic oligonucleotide
gcacgcagcugcauugggu

SEQ ID NO: 2512893 - RNA, 19 nt, Artificial Sequence
  Description of Artificial Sequence: Synthetic oligonucleotide
ugcccuccccaggcagaua

SEQ ID NO: 2512894 - RNA, 19 nt, Artificial Sequence
  Description of Artificial Sequence: Synthetic oligonucleotide
cgaagcaaauaguccuccu

SEQ ID NO: 2512895 - RNA, 19 nt, Artificial Sequence
  Description of Artificial Sequence: Synthetic oligonucleotide
ggguaguacagugguccau

SEQ ID NO: 2512896 - RNA, 19 nt, Artificial Sequence
  Description of Artificial Sequence: Synthetic oligonucleotide
ggguggcagcgagguggcg

SEQ ID NO: 2512897 - RNA, 19 nt, Artificial Sequence
  Description of Artificial Sequence: Synthetic oligonucleotide
ggugggcuccgggcagcgc

SEQ ID NO: 2512898 - RNA, 19 nt, Artificial Sequence
  Description of Artificial Sequence: Synthetic oligonucleotide
gacuggcacgcagcugcau

SEQ ID NO: 2512899 - RNA, 19 nt, Artificial Sequence
  Description of Artificial Sequence: Synthetic oligonucleotide
caggugcguguaagcugua

SEQ ID NO: 2512900 - RNA, 19 nt, Artificial Sequence
  Description of Artificial Sequence: Synthetic oligonucleotide
cagcagcgaggugaugggu

SEQ ID NO: 2512901 - RNA, 19 nt, Artificial Sequence
  Description of Artificial Sequence: Synthetic oligonucleotide
cagcgaggugauggguugu

SEQ ID NO: 2512902 - RNA, 19 nt, Artificial Sequence
  Description of Artificial Sequence: Synthetic oligonucleotide
gcggggcacccggcgaaug

SEQ ID NO: 2512903 - RNA, 19 nt, Artificial Sequence
  Description of Artificial Sequence: Synthetic oligonucleotide
cgcgcaccaggugggcucc

SEQ ID NO: 2512904 - RNA, 19 nt, Artificial Sequence
  Description of Artificial Sequence: Synthetic oligonucleotide
ggcuccgggcagcgccgac

SEQ ID NO: 2512905 - RNA, 19 nt, Artificial Sequence
  Description of Artificial Sequence: Synthetic oligonucleotide
ggggcacccggcgaauggu

SEQ ID NO: 2512906 - RNA, 19 nt, Artificial Sequence
  Description of Artificial Sequence: Synthetic oligonucleotide
ccguggagcaggugcgugu

SEQ ID NO: 2512907 - RNA, 19 nt, Artificial Sequence
  Description of Artificial Sequence: Synthetic oligonucleotide
ccgugugggagcccaggcu

SEQ ID NO: 2512908 - RNA, 19 nt, Artificial Sequence
  Description of Artificial Sequence: Synthetic oligonucleotide
cgcaccaggugggcuccgg

SEQ ID NO: 2512909 - RNA, 19 nt, Artificial Sequence
  Description of Artificial Sequence: Synthetic oligonucleotide
cccggcgaauggucaggga

SEQ ID NO: 2512910 - RNA, 19 nt, Artificial Sequence
  Description of Artificial Sequence: Synthetic oligonucleotide
caucuucaugaggcaugau

SEQ ID NO: 2512911 - RNA, 19 nt, Artificial Sequence
  Description of Artificial Sequence: Synthetic oligonucleotide
gcugggacccuggcguccu

SEQ ID NO: 2512912 - RNA, 19 nt, Artificial Sequence
  Description of Artificial Sequence: Synthetic oligonucleotide
ccaccccaguucuguagcu

SEQ ID NO: 2512913 - RNA, 19 nt, Artificial Sequence
  Description of Artificial Sequence: Synthetic oligonucleotide
gcgcaccaggugggcuccg

SEQ ID NO: 2512914 - RNA, 19 nt, Artificial Sequence
  Description of Artificial Sequence: Synthetic oligonucleotide
cccaguucuguagcuuccu

SEQ ID NO: 2512915 - RNA, 19 nt, Artificial Sequence
  Description of Artificial Sequence: Synthetic oligonucleotide
gcuccgggcagcgccgacu

SEQ ID NO: 2512916 - RNA, 19 nt, Artificial Sequence
  Description of Artificial Sequence: Synthetic oligonucleotide
ccacaaggguggcugcgau

SEQ ID NO: 2512917 - RNA, 19 nt, Artificial Sequence
  Description of Artificial Sequence: Synthetic oligonucleotide
cgacuggcacgcagcugca

SEQ ID NO: 2512918 - RNA, 19 nt, Artificial Sequence
  Description of Artificial Sequence: Synthetic oligonucleotide
gcgaauggucagggagacu

SEQ ID NO: 2512919 - RNA, 19 nt, Artificial Sequence
  Description of Artificial Sequence: Synthetic oligonucleotide
gcggccggggcuguucuau

SEQ ID NO: 2512920 - RNA, 19 nt, Artificial Sequence
  Description of Artificial Sequence: Synthetic oligonucleotide
ggcggccggggcuguucua

SEQ ID NO: 2512921 - RNA, 19 nt, Artificial Sequence
  Description of Artificial Sequence: Synthetic oligonucleotide
ccccaggcagauacugguu

SEQ ID NO: 2512922 - RNA, 19 nt, Artificial Sequence
  Description of Artificial Sequence: Synthetic oligonucleotide
gcgaugccguggagcaggu

SEQ ID NO: 2512923 - RNA, 19 nt, Artificial Sequence
  Description of Artificial Sequence: Synthetic oligonucleotide
gccgcgcaccaggugggcu

SEQ ID NO: 2512924 - RNA, 19 nt, Artificial Sequence
  Description of Artificial Sequence: Synthetic oligonucleotide
cgcugaagccauggcggaa

SEQ ID NO: 2512925 - RNA, 19 nt, Artificial Sequence
  Description of Artificial Sequence: Synthetic oligonucleotide
ccacaacgucuccuccaau

SEQ ID NO: 2512926 - RNA, 19 nt, Artificial Sequence
  Description of Artificial Sequence: Synthetic oligonucleotide
cgccgacuggcacgcagcu

SEQ ID NO: 2512927 - RNA, 19 nt, Artificial Sequence
  Description of Artificial Sequence: Synthetic oligonucleotide
cagcgccgacuggcacgca

SEQ ID NO: 2512928 - RNA, 19 nt, Artificial Sequence
  Description of Artificial Sequence: Synthetic oligonucleotide
cgggugccgcgcaccaggu

SEQ ID NO: 2512929 - RNA, 19 nt, Artificial Sequence
  Description of Artificial Sequence: Synthetic oligonucleotide
cggccggggcuguucuaua

SEQ ID NO: 2512930 - RNA, 19 nt, Artificial Sequence
  Description of Artificial Sequence: Synthetic oligonucleotide
cgcggagcaccagcaggcu

SEQ ID NO: 2512931 - RNA, 19 nt, Artificial Sequence
  Description of Artificial Sequence: Synthetic oligonucleotide
cgcggggcacccggcgaau

SEQ ID NO: 2512932 - RNA, 19 nt, Artificial Sequence
  Description of Artificial Sequence: Synthetic oligonucleotide
aacauuuccuacuagagac

SEQ ID NO: 2512933 - RNA, 19 nt, Artificial Sequence
  Description of Artificial Sequence: Synthetic oligonucleotide
aauauagccaucuugcauc

SEQ ID NO: 2512934 - RNA, 19 nt, Artificial Sequence
  Description of Artificial Sequence: Synthetic oligonucleotide
auaaaugagaaccaaugcc

SEQ ID NO: 2512935 - RNA, 19 nt, Artificial Sequence
  Description of Artificial Sequence: Synthetic oligonucleotide
auaaagaugcaaucaagcc

SEQ ID NO: 2512936 - RNA, 19 nt, Artificial Sequence
  Description of Artificial Sequence: Synthetic oligonucleotide
guugaaucaaaauauagcc

SEQ ID NO: 2512937 - RNA, 19 nt, Artificial Sequence
  Description of Artificial Sequence: Synthetic oligonucleotide
uauggcauaaaugagaacc

SEQ ID NO: 2512938 - RNA, 19 nt, Artificial Sequence
  Description of Artificial Sequence: Synthetic oligonucleotide
caaaauauagccaucuugc

SEQ ID NO: 2512939 - RNA, 19 nt, Artificial Sequence
  Description of Artificial Sequence: Synthetic oligonucleotide
auagaguucacacacgcac

SEQ ID NO: 2512940 - RNA, 19 nt, Artificial Sequence
  Description of Artificial Sequence: Synthetic oligonucleotide
auuuugagaauuuacaagu

SEQ ID NO: 2512941 - RNA, 19 nt, Artificial Sequence
  Description of Artificial Sequence: Synthetic oligonucleotide
aaacaacaaaguuugccac

SEQ ID NO: 2512942 - RNA, 19 nt, Artificial Sequence
  Description of Artificial Sequence: Synthetic oligonucleotide
aacaacaaaguuugccacc

SEQ ID NO: 2512943 - RNA, 19 nt, Artificial Sequence
  Description of Artificial Sequence: Synthetic oligonucleotide
ugacucauaaagcagaaca

SEQ ID NO: 2512944 - RNA, 19 nt, Artificial Sequence
  Description of Artificial Sequence: Synthetic oligonucleotide
aaaaugaaguauugauugg

SEQ ID NO: 2512945 - RNA, 19 nt, Artificial Sequence
  Description of Artificial Sequence: Synthetic oligonucleotide
ucaaaauauagccaucuug

SEQ ID NO: 2512946 - RNA, 19 nt, Artificial Sequence
  Description of Artificial Sequence: Synthetic oligonucleotide
ugaaguauugauuggaaug

SEQ ID NO: 2512947 - RNA, 19 nt, Artificial Sequence
  Description of Artificial Sequence: Synthetic oligonucleotide
uaauaugucuccuucagug

SEQ ID NO: 2512948 - RNA, 19 nt, Artificial Sequence
  Description of Artificial Sequence: Synthetic oligonucleotide
uauucuuuccauaaagaug

SEQ ID NO: 2512949 - RNA, 19 nt, Artificial Sequence
  Description of Artificial Sequence: Synthetic oligonucleotide
uaaagaugcaaucaagccu

SEQ ID NO: 2512950 - RNA, 19 nt, Artificial Sequence
  Description of Artificial Sequence: Synthetic oligonucleotide
augccuguaauauuucucc

SEQ ID NO: 2512951 - RNA, 19 nt, Artificial Sequence
  Description of Artificial Sequence: Synthetic oligonucleotide
cauaaagaugcaaucaagc

SEQ ID NO: 2512952 - RNA, 19 nt, Artificial Sequence
  Description of Artificial Sequence: Synthetic oligonucleotide
ugaaucaaaauauagccau

SEQ ID NO: 2512953 - RNA, 19 nt, Artificial Sequence
  Description of Artificial Sequence: Synthetic oligonucleotide
ucuguaauggcuauuugga

SEQ ID NO: 2512954 - RNA, 19 nt, Artificial Sequence
  Description of Artificial Sequence: Synthetic oligonucleotide
agaacaucaggauacaaca

SEQ ID NO: 2512955 - RNA, 19 nt, Artificial Sequence
  Description of Artificial Sequence: Synthetic oligonucleotide
ucagaauuuccacugacac

SEQ ID NO: 2512956 - RNA, 19 nt, Artificial Sequence
  Description of Artificial Sequence: Synthetic oligonucleotide
aucuguaauggcuauuugg

SEQ ID NO: 2512957 - RNA, 19 nt, Artificial Sequence
  Description of Artificial Sequence: Synthetic oligonucleotide
gaugcaaucaagccuuggg

SEQ ID NO: 2512958 - RNA, 19 nt, Artificial Sequence
  Description of Artificial Sequence: Synthetic oligonucleotide
aagcagaacaucaggauac

SEQ ID NO: 2512959 - RNA, 19 nt, Artificial Sequence
  Description of Artificial Sequence: Synthetic oligonucleotide
ucaggauacaacauuuuga

SEQ ID NO: 2512960 - RNA, 19 nt, Artificial Sequence
  Description of Artificial Sequence: Synthetic oligonucleotide
uccuacuagagacaaguag

SEQ ID NO: 2512961 - RNA, 19 nt, Artificial Sequence
  Description of Artificial Sequence: Synthetic oligonucleotide
uauugauuggaaugucugg

SEQ ID NO: 2512962 - RNA, 19 nt, Artificial Sequence
  Description of Artificial Sequence: Synthetic oligonucleotide
acaaguagacaaaagcgcc

SEQ ID NO: 2512963 - RNA, 19 nt, Artificial Sequence
  Description of Artificial Sequence: Synthetic oligonucleotide
ucuugcaucagccuugcca

SEQ ID NO: 2512964 - RNA, 19 nt, Artificial Sequence
  Description of Artificial Sequence: Synthetic oligonucleotide
agacaaguagacaaaagcg

SEQ ID NO: 2512965 - RNA, 19 nt, Artificial Sequence
  Description of Artificial Sequence: Synthetic oligonucleotide
uuuggaaacaacacuguaa

SEQ ID NO: 2512966 - RNA, 19 nt, Artificial Sequence
  Description of Artificial Sequence: Synthetic oligonucleotide
uuugagaauuuacaagugu

SEQ ID NO: 2512967 - RNA, 19 nt, Artificial Sequence
  Description of Artificial Sequence: Synthetic oligonucleotide
aaauauagccaucuugcau

SEQ ID NO: 2512968 - RNA, 19 nt, Artificial Sequence
  Description of Artificial Sequence: Synthetic oligonucleotide
cauaaaugagaaccaaugc

SEQ ID NO: 2512969 - RNA, 19 nt, Artificial Sequence
  Description of Artificial Sequence: Synthetic oligonucleotide
caggauacaacauuuugag

SEQ ID NO: 2512970 - RNA, 19 nt, Artificial Sequence
  Description of Artificial Sequence: Synthetic oligonucleotide
ucauaaagcagaacaucag

SEQ ID NO: 2512971 - RNA, 19 nt, Artificial Sequence
  Description of Artificial Sequence: Synthetic oligonucleotide
aauuuccacugacacaaug

SEQ ID NO: 2512972 - RNA, 19 nt, Artificial Sequence
  Description of Artificial Sequence: Synthetic oligonucleotide
gacaaguagacaaaagcgc

SEQ ID NO: 2512973 - RNA, 19 nt, Artificial Sequence
  Description of Artificial Sequence: Synthetic oligonucleotide
gaucagaacccauaaacca

SEQ ID NO: 2512974 - RNA, 19 nt, Artificial Sequence
  Description of Artificial Sequence: Synthetic oligonucleotide
uaaauuggccccuugguaa

SEQ ID NO: 2512975 - RNA, 19 nt, Artificial Sequence
  Description of Artificial Sequence: Synthetic oligonucleotide
uuuccuacuagagacaagu

SEQ ID NO: 2512976 - RNA, 19 nt, Artificial Sequence
  Description of Artificial Sequence: Synthetic oligonucleotide
ugaucuguaugaaaugccu

SEQ ID NO: 2512977 - RNA, 19 nt, Artificial Sequence
  Description of Artificial Sequence: Synthetic oligonucleotide
auauucuuuccauaaagau

SEQ ID NO: 2512978 - RNA, 19 nt, Artificial Sequence
  Description of Artificial Sequence: Synthetic oligonucleotide
agaaccaaugccagaaacc

SEQ ID NO: 2512979 - RNA, 19 nt, Artificial Sequence
  Description of Artificial Sequence: Synthetic oligonucleotide
ucuaaauuggccccuuggu

SEQ ID NO: 2512980 - RNA, 19 nt, Artificial Sequence
  Description of Artificial Sequence: Synthetic oligonucleotide
uccauaaagaugcaaucaa

SEQ ID NO: 2512981 - RNA, 19 nt, Artificial Sequence
  Description of Artificial Sequence: Synthetic oligonucleotide
gaaccaaugccagaaaccc

SEQ ID NO: 2512982 - RNA, 19 nt, Artificial Sequence
  Description of Artificial Sequence: Synthetic oligonucleotide
cuugacuauggcauaaaug

SEQ ID NO: 2512983 - RNA, 19 nt, Artificial Sequence
  Description of Artificial Sequence: Synthetic oligonucleotide
uacacccaaaaguagaggu

SEQ ID NO: 2512984 - RNA, 19 nt, Artificial Sequence
  Description of Artificial Sequence: Synthetic oligonucleotide
aaagaugcaaucaagccuu

SEQ ID NO: 2512985 - RNA, 19 nt, Artificial Sequence
  Description of Artificial Sequence: Synthetic oligonucleotide
caaagaggagcccagcgcg

SEQ ID NO: 2512986 - RNA, 19 nt, Artificial Sequence
  Description of Artificial Sequence: Synthetic oligonucleotide
ggauacaacauuuugagaa

SEQ ID NO: 2512987 - RNA, 19 nt, Artificial Sequence
  Description of Artificial Sequence: Synthetic oligonucleotide
aacaucaggauacaacauu

SEQ ID NO: 2512988 - RNA, 19 nt, Artificial Sequence
  Description of Artificial Sequence: Synthetic oligonucleotide
uugggaaucugcaacauuu

SEQ ID NO: 2512989 - RNA, 19 nt, Artificial Sequence
  Description of Artificial Sequence: Synthetic oligonucleotide
ugauuggaaugucugguca

SEQ ID NO: 2512990 - RNA, 19 nt, Artificial Sequence
  Description of Artificial Sequence: Synthetic oligonucleotide
guaauggcuauuuggaaac

SEQ ID NO: 2512991 - RNA, 19 nt, Artificial Sequence
  Description of Artificial Sequence: Synthetic oligonucleotide
aaacccauccaagacaaca

SEQ ID NO: 2512992 - RNA, 19 nt, Artificial Sequence
  Description of Artificial Sequence: Synthetic oligonucleotide
uguaugaaaugccuguaau

SEQ ID NO: 2512993 - RNA, 19 nt, Artificial Sequence
  Description of Artificial Sequence: Synthetic oligonucleotide
uugagaauuuacaaguguu

SEQ ID NO: 2512994 - RNA, 19 nt, Artificial Sequence
  Description of Artificial Sequence: Synthetic oligonucleotide
uuugccaccuuccaaccca

SEQ ID NO: 2512995 - RNA, 19 nt, Artificial Sequence
  Description of Artificial Sequence: Synthetic oligonucleotide
uauuuggaaacaacacugu

SEQ ID NO: 2512996 - RNA, 19 nt, Artificial Sequence
  Description of Artificial Sequence: Synthetic oligonucleotide
ucauagcacagccaggcga

SEQ ID NO: 2512997 - RNA, 19 nt, Artificial Sequence
  Description of Artificial Sequence: Synthetic oligonucleotide
cacagaagcaaagaggagc

SEQ ID NO: 2512998 - RNA, 19 nt, Artificial Sequence
  Description of Artificial Sequence: Synthetic oligonucleotide
aaaugagaaccaaugccag

SEQ ID NO: 2512999 - RNA, 19 nt, Artificial Sequence
  Description of Artificial Sequence: Synthetic oligonucleotide
uuuccauaaagaugcaauc

SEQ ID NO: 2513000 - RNA, 19 nt, Artificial Sequence
  Description of Artificial Sequence: Synthetic oligonucleotide
cucauaaagcagaacauca

SEQ ID NO: 2513001 - RNA, 19 nt, Artificial Sequence
  Description of Artificial Sequence: Synthetic oligonucleotide
aucuguaugaaaugccugu

SEQ ID NO: 2513002 - RNA, 19 nt, Artificial Sequence
  Description of Artificial Sequence: Synthetic oligonucleotide
ugacacaaugguugaauca

SEQ ID NO: 2513003 - RNA, 19 nt, Artificial Sequence
  Description of Artificial Sequence: Synthetic oligonucleotide
caccauagaguucacacac

SEQ ID NO: 2513004 - RNA, 19 nt, Artificial Sequence
  Description of Artificial Sequence: Synthetic oligonucleotide
guagagguagcucuuggug

SEQ ID NO: 2513005 - RNA, 19 nt, Artificial Sequence
  Description of Artificial Sequence: Synthetic oligonucleotide
cuacuagagacaaguagac

SEQ ID NO: 2513006 - RNA, 19 nt, Artificial Sequence
  Description of Artificial Sequence: Synthetic oligonucleotide
gguugaaucaaaauauagc

SEQ ID NO: 2513007 - RNA, 19 nt, Artificial Sequence
  Description of Artificial Sequence: Synthetic oligonucleotide
gguaauaugucuccuucag

SEQ ID NO: 2513008 - RNA, 19 nt, Artificial Sequence
  Description of Artificial Sequence: Synthetic oligonucleotide
ugcaaucaagccuugggaa

SEQ ID NO: 2513009 - RNA, 19 nt, Artificial Sequence
  Description of Artificial Sequence: Synthetic oligonucleotide
aaguauugauuggaauguc

SEQ ID NO: 2513010 - RNA, 19 nt, Artificial Sequence
  Description of Artificial Sequence: Synthetic oligonucleotide
caucauagcacagccaggc

SEQ ID NO: 2513011 - RNA, 19 nt, Artificial Sequence
  Description of Artificial Sequence: Synthetic oligonucleotide
gggaucagaacccauaaac

SEQ ID NO: 2513012 - RNA, 19 nt, Artificial Sequence
  Description of Artificial Sequence: Synthetic oligonucleotide
cucuaaauuggccccuugg

SEQ ID NO: 2513013 - RNA, 19 nt, Artificial Sequence
  Description of Artificial Sequence: Synthetic oligonucleotide
uagagguagcucuuggugu

SEQ ID NO: 2513014 - RNA, 19 nt, Artificial Sequence
  Description of Artificial Sequence: Synthetic oligonucleotide
gucuggucaauucugacuc

SEQ ID NO: 2513015 - RNA, 19 nt, Artificial Sequence
  Description of Artificial Sequence: Synthetic oligonucleotide
uuccaagaagccacucagg

SEQ ID NO: 2513016 - RNA, 19 nt, Artificial Sequence
  Description of Artificial Sequence: Synthetic oligonucleotide
ugucuggucaauucugacu

SEQ ID NO: 2513017 - RNA, 19 nt, Artificial Sequence
  Description of Artificial Sequence: Synthetic oligonucleotide
aacaaacaacaaaguuugc

SEQ ID NO: 2513018 - RNA, 19 nt, Artificial Sequence
  Description of Artificial Sequence: Synthetic oligonucleotide
aaugaaguauugauuggaa

SEQ ID NO: 2513019 - RNA, 19 nt, Artificial Sequence
  Description of Artificial Sequence: Synthetic oligonucleotide
augcaaucaagccuuggga

SEQ ID NO: 2513020 - RNA, 19 nt, Artificial Sequence
  Description of Artificial Sequence: Synthetic oligonucleotide
aacccauccaagacaacag

SEQ ID NO: 2513021 - RNA, 19 nt, Artificial Sequence
  Description of Artificial Sequence: Synthetic oligonucleotide
aagacaacagucagaauuu

SEQ ID NO: 2513022 - RNA, 19 nt, Artificial Sequence
  Description of Artificial Sequence: Synthetic oligonucleotide
cacaaggugaucuguauga

SEQ ID NO: 2513023 - RNA, 19 nt, Artificial Sequence
  Description of Artificial Sequence: Synthetic oligonucleotide
ugccagaaacccauccaag

SEQ ID NO: 2513024 - RNA, 19 nt, Artificial Sequence
  Description of Artificial Sequence: Synthetic oligonucleotide
caccaaauacacccaaaag

SEQ ID NO: 2513025 - RNA, 19 nt, Artificial Sequence
  Description of Artificial Sequence: Synthetic oligonucleotide
guuggggcuuccaagaagc

SEQ ID NO: 2513026 - RNA, 19 nt, Artificial Sequence
  Description of Artificial Sequence: Synthetic oligonucleotide
ugguaauaugucuccuuca

SEQ ID NO: 2513027 - RNA, 19 nt, Artificial Sequence
  Description of Artificial Sequence: Synthetic oligonucleotide
augaaguauugauuggaau

SEQ ID NO: 2513028 - RNA, 19 nt, Artificial Sequence
  Description of Artificial Sequence: Synthetic oligonucleotide
cacaccacgcuccaccacg

SEQ ID NO: 2513029 - RNA, 19 nt, Artificial Sequence
  Description of Artificial Sequence: Synthetic oligonucleotide
gaaguauugauuggaaugu

SEQ ID NO: 2513030 - RNA, 19 nt, Artificial Sequence
  Description of Artificial Sequence: Synthetic oligonucleotide
gacacaaugguugaaucaa

SEQ ID NO: 2513031 - RNA, 19 nt, Artificial Sequence
  Description of Artificial Sequence: Synthetic oligonucleotide
aaauuggccccuugguaau

SEQ ID NO: 2513032 - RNA, 19 nt, Artificial Sequence
  Description of Artificial Sequence: Synthetic oligonucleotide
aaugucuggucaauucuga

SEQ ID NO: 2513033 - RNA, 19 nt, Artificial Sequence
  Description of Artificial Sequence: Synthetic oligonucleotide
gacaacagucagaauuucc

SEQ ID NO: 2513034 - RNA, 19 nt, Artificial Sequence
  Description of Artificial Sequence: Synthetic oligonucleotide
gaucuguaugaaaugccug

SEQ ID NO: 2513035 - RNA, 19 nt, Artificial Sequence
  Description of Artificial Sequence: Synthetic oligonucleotide
aguagacaaaagcgccuuc

SEQ ID NO: 2513036 - RNA, 19 nt, Artificial Sequence
  Description of Artificial Sequence: Synthetic oligonucleotide
acaacaaaguuugccaccu

SEQ ID NO: 2513037 - RNA, 19 nt, Artificial Sequence
  Description of Artificial Sequence: Synthetic oligonucleotide
uugauuggaaugucugguc

SEQ ID NO: 2513038 - RNA, 19 nt, Artificial Sequence
  Description of Artificial Sequence: Synthetic oligonucleotide
auauagccaucuugcauca

SEQ ID NO: 2513039 - RNA, 19 nt, Artificial Sequence
  Description of Artificial Sequence: Synthetic oligonucleotide
ggugaucuguaugaaaugc

SEQ ID NO: 2513040 - RNA, 19 nt, Artificial Sequence
  Description of Artificial Sequence: Synthetic oligonucleotide
aucauagcacagccaggcg

SEQ ID NO: 2513041 - RNA, 19 nt, Artificial Sequence
  Description of Artificial Sequence: Synthetic oligonucleotide
acuauggcauaaaugagaa

SEQ ID NO: 2513042 - RNA, 19 nt, Artificial Sequence
  Description of Artificial Sequence: Synthetic oligonucleotide
aggggagaaggucauccag

SEQ ID NO: 2513043 - RNA, 19 nt, Artificial Sequence
  Description of Artificial Sequence: Synthetic oligonucleotide
augagaaccaaugccagaa

SEQ ID NO: 2513044 - RNA, 19 nt, Artificial Sequence
  Description of Artificial Sequence: Synthetic oligonucleotide
aauggcuauuuggaaacaa

SEQ ID NO: 2513045 - RNA, 19 nt, Artificial Sequence
  Description of Artificial Sequence: Synthetic oligonucleotide
ugcaccagggcaucauagc

SEQ ID NO: 2513046 - RNA, 19 nt, Artificial Sequence
  Description of Artificial Sequence: Synthetic oligonucleotide
auacacccaaaaguagagg

SEQ ID NO: 2513047 - RNA, 19 nt, Artificial Sequence
  Description of Artificial Sequence: Synthetic oligonucleotide
agagacaaguagacaaaag

SEQ ID NO: 2513048 - RNA, 19 nt, Artificial Sequence
  Description of Artificial Sequence: Synthetic oligonucleotide
cugacacaaugguugaauc

SEQ ID NO: 2513049 - RNA, 19 nt, Artificial Sequence
  Description of Artificial Sequence: Synthetic oligonucleotide
gagguuggggcuuccaaga

SEQ ID NO: 2513050 - RNA, 19 nt, Artificial Sequence
  Description of Artificial Sequence: Synthetic oligonucleotide
aggauacaacauuuugaga

SEQ ID NO: 2513051 - RNA, 19 nt, Artificial Sequence
  Description of Artificial Sequence: Synthetic oligonucleotide
guagcucuugguguugagg

SEQ ID NO: 2513052 - RNA, 19 nt, Artificial Sequence
  Description of Artificial Sequence: Synthetic oligonucleotide
cuuuccauaaagaugcaau

SEQ ID NO: 2513053 - RNA, 19 nt, Artificial Sequence
  Description of Artificial Sequence: Synthetic oligonucleotide
uggccccuugguaauaugu

SEQ ID NO: 2513054 - RNA, 19 nt, Artificial Sequence
  Description of Artificial Sequence: Synthetic oligonucleotide
agcacgaagugcaccaggg

SEQ ID NO: 2513055 - RNA, 19 nt, Artificial Sequence
  Description of Artificial Sequence: Synthetic oligonucleotide
agaaacccauccaagacaa

SEQ ID NO: 2513056 - RNA, 19 nt, Artificial Sequence
  Description of Artificial Sequence: Synthetic oligonucleotide
augacugccacagcagcag

SEQ ID NO: 2513057 - RNA, 19 nt, Artificial Sequence
  Description of Artificial Sequence: Synthetic oligonucleotide
gauacaacauuuugagaau

SEQ ID NO: 2513058 - RNA, 19 nt, Artificial Sequence
  Description of Artificial Sequence: Synthetic oligonucleotide
agcgccuuccagcacgaag

SEQ ID NO: 2513059 - RNA, 19 nt, Artificial Sequence
  Description of Artificial Sequence: Synthetic oligonucleotide
aaucaagccuugggaaucu

SEQ ID NO: 2513060 - RNA, 19 nt, Artificial Sequence
  Description of Artificial Sequence: Synthetic oligonucleotide
augccagaaacccauccaa

SEQ ID NO: 2513061 - RNA, 19 nt, Artificial Sequence
  Description of Artificial Sequence: Synthetic oligonucleotide
ccauaaagaugcaaucaag

SEQ ID NO: 2513062 - RNA, 19 nt, Artificial Sequence
  Description of Artificial Sequence: Synthetic oligonucleotide
gauuggaaugucuggucaa

SEQ ID NO: 2513063 - RNA, 19 nt, Artificial Sequence
  Description of Artificial Sequence: Synthetic oligonucleotide
cagacgcaggcccagcgcg

SEQ ID NO: 2513064 - RNA, 19 nt, Artificial Sequence
  Description of Artificial Sequence: Synthetic oligonucleotide
caacauuuccuacuagaga

SEQ ID NO: 2513065 - RNA, 19 nt, Artificial Sequence
  Description of Artificial Sequence: Synthetic oligonucleotide
gaaucaaaauauagccauc

SEQ ID NO: 2513066 - RNA, 19 nt, Artificial Sequence
  Description of Artificial Sequence: Synthetic oligonucleotide
aaguagacaaaagcgccuu

SEQ ID NO: 2513067 - RNA, 19 nt, Artificial Sequence
  Description of Artificial Sequence: Synthetic oligonucleotide
ucucuaaauuggccccuug

SEQ ID NO: 2513068 - RNA, 19 nt, Artificial Sequence
  Description of Artificial Sequence: Synthetic oligonucleotide
cagcgcggagcacagaagc

SEQ ID NO: 2513069 - RNA, 19 nt, Artificial Sequence
  Description of Artificial Sequence: Synthetic oligonucleotide
ugggaaucugcaacauuuc

SEQ ID NO: 2513070 - RNA, 19 nt, Artificial Sequence
  Description of Artificial Sequence: Synthetic oligonucleotide
ccaaauacacccaaaagua

SEQ ID NO: 2513071 - RNA, 19 nt, Artificial Sequence
  Description of Artificial Sequence: Synthetic oligonucleotide
uugagguuggggcuuccaa

SEQ ID NO: 2513072 - RNA, 19 nt, Artificial Sequence
  Description of Artificial Sequence: Synthetic oligonucleotide
augaaaugccuguaauauu

SEQ ID NO: 2513073 - RNA, 19 nt, Artificial Sequence
  Description of Artificial Sequence: Synthetic oligonucleotide
accacgcuccaccacgcuc

SEQ ID NO: 2513074 - RNA, 19 nt, Artificial Sequence
  Description of Artificial Sequence: Synthetic oligonucleotide
cacgaagugcaccagggca

SEQ ID NO: 2513075 - RNA, 19 nt, Artificial Sequence
  Description of Artificial Sequence: Synthetic oligonucleotide
aggucauccagccaccaua

SEQ ID NO: 2513076 - RNA, 19 nt, Artificial Sequence
  Description of Artificial Sequence: Synthetic oligonucleotide
ugagaaccaaugccagaaa

SEQ ID NO: 2513077 - RNA, 19 nt, Artificial Sequence
  Description of Artificial Sequence: Synthetic oligonucleotide
gggaaucugcaacauuucc

SEQ ID NO: 2513078 - RNA, 19 nt, Artificial Sequence
  Description of Artificial Sequence: Synthetic oligonucleotide
ucuuuccauaaagaugcaa

SEQ ID NO: 2513079 - RNA, 19 nt, Artificial Sequence
  Description of Artificial Sequence: Synthetic oligonucleotide
caaucaagccuugggaauc

SEQ ID NO: 2513080 - RNA, 19 nt, Artificial Sequence
  Description of Artificial Sequence: Synthetic oligonucleotide
cuagagacaaguagacaaa

SEQ ID NO: 2513081 - RNA, 19 nt, Artificial Sequence
  Description of Artificial Sequence: Synthetic oligonucleotide
acaacauuuugagaauuua

SEQ ID NO: 2513082 - RNA, 19 nt, Artificial Sequence
  Description of Artificial Sequence: Synthetic oligonucleotide
ucuggucaauucugacuca

SEQ ID NO: 2513083 - RNA, 19 nt, Artificial Sequence
  Description of Artificial Sequence: Synthetic oligonucleotide
cuaaauuggccccuuggua

SEQ ID NO: 2513084 - RNA, 19 nt, Artificial Sequence
  Description of Artificial Sequence: Synthetic oligonucleotide
cuccaugacugccacagca

SEQ ID NO: 2513085 - RNA, 19 nt, Artificial Sequence
  Description of Artificial Sequence: Synthetic oligonucleotide
cacucaggggagaagguca

SEQ ID NO: 2513086 - RNA, 19 nt, Artificial Sequence
  Description of Artificial Sequence: Synthetic oligonucleotide
cacaaugguugaaucaaaa

SEQ ID NO: 2513087 - RNA, 19 nt, Artificial Sequence
  Description of Artificial Sequence: Synthetic oligonucleotide
uucuuuccauaaagaugca

SEQ ID NO: 2513088 - RNA, 19 nt, Artificial Sequence
  Description of Artificial Sequence: Synthetic oligonucleotide
acccaaaaguagagguagc

SEQ ID NO: 2513089 - RNA, 19 nt, Artificial Sequence
  Description of Artificial Sequence: Synthetic oligonucleotide
ugggaucagaacccauaaa

SEQ ID NO: 2513090 - RNA, 19 nt, Artificial Sequence
  Description of Artificial Sequence: Synthetic oligonucleotide
uuccacugacacaaugguu

SEQ ID NO: 2513091 - RNA, 19 nt, Artificial Sequence
  Description of Artificial Sequence: Synthetic oligonucleotide
gcaaagaggagcccagcgc

SEQ ID NO: 2513092 - RNA, 19 nt, Artificial Sequence
  Description of Artificial Sequence: Synthetic oligonucleotide
agaugcaaucaagccuugg

SEQ ID NO: 2513093 - RNA, 19 nt, Artificial Sequence
  Description of Artificial Sequence: Synthetic oligonucleotide
ggcuauuuggaaacaacac

SEQ ID NO: 2513094 - RNA, 19 nt, Artificial Sequence
  Description of Artificial Sequence: Synthetic oligonucleotide
acccauccaagacaacagu

SEQ ID NO: 2513095 - RNA, 19 nt, Artificial Sequence
  Description of Artificial Sequence: Synthetic oligonucleotide
caaaguuugccaccuucca

SEQ ID NO: 2513096 - RNA, 19 nt, Artificial Sequence
  Description of Artificial Sequence: Synthetic oligonucleotide
cuauggcauaaaugagaac

SEQ ID NO: 2513097 - RNA, 19 nt, Artificial Sequence
  Description of Artificial Sequence: Synthetic oligonucleotide
accauagaguucacacacg

SEQ ID NO: 2513098 - RNA, 19 nt, Artificial Sequence
  Description of Artificial Sequence: Synthetic oligonucleotide
guuugccaccuuccaaccc

SEQ ID NO: 2513099 - RNA, 19 nt, Artificial Sequence
  Description of Artificial Sequence: Synthetic oligonucleotide
caucuguaauggcuauuug

SEQ ID NO: 2513100 - RNA, 19 nt, Artificial Sequence
  Description of Artificial Sequence: Synthetic oligonucleotide
aacccaucuguaauggcua

SEQ ID NO: 2513101 - RNA, 19 nt, Artificial Sequence
  Description of Artificial Sequence: Synthetic oligonucleotide
uaauggcuauuuggaaaca

SEQ ID NO: 2513102 - RNA, 19 nt, Artificial Sequence
  Description of Artificial Sequence: Synthetic oligonucleotide
uggcauaaaugagaaccaa

SEQ ID NO: 2513103 - RNA, 19 nt, Artificial Sequence
  Description of Artificial Sequence: Synthetic oligonucleotide
aggcccagcgcgcaccccg

SEQ ID NO: 2513104 - RNA, 19 nt, Artificial Sequence
  Description of Artificial Sequence: Synthetic oligonucleotide
cauagaguucacacacgca

SEQ ID NO: 2513105 - RNA, 19 nt, Artificial Sequence
  Description of Artificial Sequence: Synthetic oligonucleotide
cuugcaucagccuugccau

SEQ ID NO: 2513106 - RNA, 19 nt, Artificial Sequence
  Description of Artificial Sequence: Synthetic oligonucleotide
acacgcacaaggugaucug

SEQ ID NO: 2513107 - RNA, 19 nt, Artificial Sequence
  Description of Artificial Sequence: Synthetic oligonucleotide
uggggcuuccaagaagcca

SEQ ID NO: 2513108 - RNA, 19 nt, Artificial Sequence
  Description of Artificial Sequence: Synthetic oligonucleotide
uuccuacuagagacaagua

SEQ ID NO: 2513109 - RNA, 19 nt, Artificial Sequence
  Description of Artificial Sequence: Synthetic oligonucleotide
caacccaucuguaauggcu

SEQ ID NO: 2513110 - RNA, 19 nt, Artificial Sequence
  Description of Artificial Sequence: Synthetic oligonucleotide
uccaccacgcuccgcccgc

SEQ ID NO: 2513111 - RNA, 19 nt, Artificial Sequence
  Description of Artificial Sequence: Synthetic oligonucleotide
cauccagccaccauagagu

SEQ ID NO: 2513112 - RNA, 19 nt, Artificial Sequence
  Description of Artificial Sequence: Synthetic oligonucleotide
cuguaauauuucuccuuga

SEQ ID NO: 2513113 - RNA, 19 nt, Artificial Sequence
  Description of Artificial Sequence: Synthetic oligonucleotide
auagcacagccaggcgagc

SEQ ID NO: 2513114 - RNA, 19 nt, Artificial Sequence
  Description of Artificial Sequence: Synthetic oligonucleotide
ccuuccagcacgaagugca

SEQ ID NO: 2513115 - RNA, 19 nt, Artificial Sequence
  Description of Artificial Sequence: Synthetic oligonucleotide
ucuccuugacuauggcaua

SEQ ID NO: 2513116 - RNA, 19 nt, Artificial Sequence
  Description of Artificial Sequence: Synthetic oligonucleotide
cauuuccuacuagagacaa

SEQ ID NO: 2513117 - RNA, 19 nt, Artificial Sequence
  Description of Artificial Sequence: Synthetic oligonucleotide
guaauaugucuccuucagu

SEQ ID NO: 2513118 - RNA, 19 nt, Artificial Sequence
  Description of Artificial Sequence: Synthetic oligonucleotide
acauuuccuacuagagaca

SEQ ID NO: 2513119 - RNA, 19 nt, Artificial Sequence
  Description of Artificial Sequence: Synthetic oligonucleotide
caaggugaucuguaugaaa

SEQ ID NO: 2513120 - RNA, 19 nt, Artificial Sequence
  Description of Artificial Sequence: Synthetic oligonucleotide
uggucaauucugacucaua

SEQ ID NO: 2513121 - RNA, 19 nt, Artificial Sequence
  Description of Artificial Sequence: Synthetic oligonucleotide
ugacugccacagcagcagu

SEQ ID NO: 2513122 - RNA, 19 nt, Artificial Sequence
  Description of Artificial Sequence: Synthetic oligonucleotide
auuuccuacuagagacaag

SEQ ID NO: 2513123 - RNA, 19 nt, Artificial Sequence
  Description of Artificial Sequence: Synthetic oligonucleotide
caaguagacaaaagcgccu

SEQ ID NO: 2513124 - RNA, 19 nt, Artificial Sequence
  Description of Artificial Sequence: Synthetic oligonucleotide
cccuugguaauaugucucc

SEQ ID NO: 2513125 - RNA, 19 nt, Artificial Sequence
  Description of Artificial Sequence: Synthetic oligonucleotide
aagaugcaaucaagccuug

SEQ ID NO: 2513126 - RNA, 19 nt, Artificial Sequence
  Description of Artificial Sequence: Synthetic oligonucleotide
cugcaacauuuccuacuag

SEQ ID NO: 2513127 - RNA, 19 nt, Artificial Sequence
  Description of Artificial Sequence: Synthetic oligonucleotide
ggaaugucuggucaauucu

SEQ ID NO: 2513128 - RNA, 19 nt, Artificial Sequence
  Description of Artificial Sequence: Synthetic oligonucleotide
cugacucauaaagcagaac

SEQ ID NO: 2513129 - RNA, 19 nt, Artificial Sequence
  Description of Artificial Sequence: Synthetic oligonucleotide
ucuugguguugagguuggg

SEQ ID NO: 2513130 - RNA, 19 nt, Artificial Sequence
  Description of Artificial Sequence: Synthetic oligonucleotide
aagccacucaggggagaag

SEQ ID NO: 2513131 - RNA, 19 nt, Artificial Sequence
  Description of Artificial Sequence: Synthetic oligonucleotide
acaaggugaucuguaugaa

SEQ ID NO: 2513132 - RNA, 19 nt, Artificial Sequence
  Description of Artificial Sequence: Synthetic oligonucleotide
ccacgcuccaccacgcucc

SEQ ID NO: 2513133 - RNA, 19 nt, Artificial Sequence
  Description of Artificial Sequence: Synthetic oligonucleotide
uuggccccuugguaauaug

SEQ ID NO: 2513134 - RNA, 19 nt, Artificial Sequence
  Description of Artificial Sequence: Synthetic oligonucleotide
acgaagugcaccagggcau

SEQ ID NO: 2513135 - RNA, 19 nt, Artificial Sequence
  Description of Artificial Sequence: Synthetic oligonucleotide
aagugcaccagggcaucau

SEQ ID NO: 2513136 - RNA, 19 nt, Artificial Sequence
  Description of Artificial Sequence: Synthetic oligonucleotide
caaaagcgccuuccagcac

SEQ ID NO: 2513137 - RNA, 19 nt, Artificial Sequence
  Description of Artificial Sequence: Synthetic oligonucleotide
gcuuccaagaagccacuca

SEQ ID NO: 2513138 - RNA, 19 nt, Artificial Sequence
  Description of Artificial Sequence: Synthetic oligonucleotide
ccaugacugccacagcagc

SEQ ID NO: 2513139 - RNA, 19 nt, Artificial Sequence
  Description of Artificial Sequence: Synthetic oligonucleotide
agugcaccagggcaucaua

SEQ ID NO: 2513140 - RNA, 19 nt, Artificial Sequence
  Description of Artificial Sequence: Synthetic oligonucleotide
ccuucagugcccuccauga

SEQ ID NO: 2513141 - RNA, 19 nt, Artificial Sequence
  Description of Artificial Sequence: Synthetic oligonucleotide
uccuugacuauggcauaaa

SEQ ID NO: 2513142 - RNA, 19 nt, Artificial Sequence
  Description of Artificial Sequence: Synthetic oligonucleotide
ggaaucugcaacauuuccu

SEQ ID NO: 2513143 - RNA, 19 nt, Artificial Sequence
  Description of Artificial Sequence: Synthetic oligonucleotide
agccaggcgagcacaccac

SEQ ID NO: 2513144 - RNA, 19 nt, Artificial Sequence
  Description of Artificial Sequence: Synthetic oligonucleotide
uugccaccuuccaacccau

SEQ ID NO: 2513145 - RNA, 19 nt, Artificial Sequence
  Description of Artificial Sequence: Synthetic oligonucleotide
acccaucuguaauggcuau

SEQ ID NO: 2513146 - RNA, 19 nt, Artificial Sequence
  Description of Artificial Sequence: Synthetic oligonucleotide
acacccaaaaguagaggua

SEQ ID NO: 2513147 - RNA, 19 nt, Artificial Sequence
  Description of Artificial Sequence: Synthetic oligonucleotide
aauuggccccuugguaaua

SEQ ID NO: 2513148 - RNA, 19 nt, Artificial Sequence
  Description of Artificial Sequence: Synthetic oligonucleotide
acacaaugguugaaucaaa

SEQ ID NO: 2513149 - RNA, 19 nt, Artificial Sequence
  Description of Artificial Sequence: Synthetic oligonucleotide
gaacaucaggauacaacau

SEQ ID NO: 2513150 - RNA, 19 nt, Artificial Sequence
  Description of Artificial Sequence: Synthetic oligonucleotide
cagccaggcgagcacacca

SEQ ID NO: 2513151 - RNA, 19 nt, Artificial Sequence
  Description of Artificial Sequence: Synthetic oligonucleotide
gguagcucuugguguugag

SEQ ID NO: 2513152 - RNA, 19 nt, Artificial Sequence
  Description of Artificial Sequence: Synthetic oligonucleotide
ccccuugguaauaugucuc

SEQ ID NO: 2513153 - RNA, 19 nt, Artificial Sequence
  Description of Artificial Sequence: Synthetic oligonucleotide
auuggccccuugguaauau

SEQ ID NO: 2513154 - RNA, 19 nt, Artificial Sequence
  Description of Artificial Sequence: Synthetic oligonucleotide
gaaacccauccaagacaac

SEQ ID NO: 2513155 - RNA, 19 nt, Artificial Sequence
  Description of Artificial Sequence: Synthetic oligonucleotide
acacacgcacaaggugauc

SEQ ID NO: 2513156 - RNA, 19 nt, Artificial Sequence
  Description of Artificial Sequence: Synthetic oligonucleotide
uucucuaaauuggccccuu

SEQ ID NO: 2513157 - RNA, 19 nt, Artificial Sequence
  Description of Artificial Sequence: Synthetic oligonucleotide
agguagcucuugguguuga

SEQ ID NO: 2513158 - RNA, 19 nt, Artificial Sequence
  Description of Artificial Sequence: Synthetic oligonucleotide
gccaggcgagcacaccacg

SEQ ID NO: 2513159 - RNA, 19 nt, Artificial Sequence
  Description of Artificial Sequence: Synthetic oligonucleotide
cacgcuccaccacgcuccg

SEQ ID NO: 2513160 - RNA, 19 nt, Artificial Sequence
  Description of Artificial Sequence: Synthetic oligonucleotide
cagaacccauaaaccauua

SEQ ID NO: 2513161 - RNA, 19 nt, Artificial Sequence
  Description of Artificial Sequence: Synthetic oligonucleotide
agcaguccugggaucagaa

SEQ ID NO: 2513162 - RNA, 19 nt, Artificial Sequence
  Description of Artificial Sequence: Synthetic oligonucleotide
ccaacccaucuguaauggc

SEQ ID NO: 2513163 - RNA, 19 nt, Artificial Sequence
  Description of Artificial Sequence: Synthetic oligonucleotide
ccaggcgagcacaccacgc

SEQ ID NO: 2513164 - RNA, 19 nt, Artificial Sequence
  Description of Artificial Sequence: Synthetic oligonucleotide
caccuuccaacccaucugu

SEQ ID NO: 2513165 - RNA, 19 nt, Artificial Sequence
  Description of Artificial Sequence: Synthetic oligonucleotide
ccgcccgcggcccagacgc

SEQ ID NO: 2513166 - RNA, 19 nt, Artificial Sequence
  Description of Artificial Sequence: Synthetic oligonucleotide
gcggcccagacgcaggccc

SEQ ID NO: 2513167 - RNA, 19 nt, Artificial Sequence
  Description of Artificial Sequence: Synthetic oligonucleotide
gaagugcaccagggcauca

SEQ ID NO: 2513168 - RNA, 19 nt, Artificial Sequence
  Description of Artificial Sequence: Synthetic oligonucleotide
gcaaucaagccuugggaau

SEQ ID NO: 2513169 - RNA, 19 nt, Artificial Sequence
  Description of Artificial Sequence: Synthetic oligonucleotide
agcgcggagcacagaagca

SEQ ID NO: 2513170 - RNA, 19 nt, Artificial Sequence
  Description of Artificial Sequence: Synthetic oligonucleotide
guugagguuggggcuucca

SEQ ID NO: 2513171 - RNA, 19 nt, Artificial Sequence
  Description of Artificial Sequence: Synthetic oligonucleotide
cuccuugacuauggcauaa

SEQ ID NO: 2513172 - RNA, 19 nt, Artificial Sequence
  Description of Artificial Sequence: Synthetic oligonucleotide
caucaggauacaacauuuu

SEQ ID NO: 2513173 - RNA, 19 nt, Artificial Sequence
  Description of Artificial Sequence: Synthetic oligonucleotide
cccagacgcaggcccagcg

SEQ ID NO: 2513174 - RNA, 19 nt, Artificial Sequence
  Description of Artificial Sequence: Synthetic oligonucleotide
gcggagcacagaagcaaag

SEQ ID NO: 2513175 - RNA, 19 nt, Artificial Sequence
  Description of Artificial Sequence: Synthetic oligonucleotide
agggcccaguccucaccca

SEQ ID NO: 2513176 - RNA, 19 nt, Artificial Sequence
  Description of Artificial Sequence: Synthetic oligonucleotide
ugccaccuuccaacccauc

SEQ ID NO: 2513177 - RNA, 19 nt, Artificial Sequence
  Description of Artificial Sequence: Synthetic oligonucleotide
gacgcaggcccagcgcgca

SEQ ID NO: 2513178 - RNA, 19 nt, Artificial Sequence
  Description of Artificial Sequence: Synthetic oligonucleotide
ggccccuugguaauauguc

SEQ ID NO: 2513179 - RNA, 19 nt, Artificial Sequence
  Description of Artificial Sequence: Synthetic oligonucleotide
acgcacaaggugaucugua

SEQ ID NO: 2513180 - RNA, 19 nt, Artificial Sequence
  Description of Artificial Sequence: Synthetic oligonucleotide
cacgcuccgcccgcggccc

SEQ ID NO: 2513181 - RNA, 19 nt, Artificial Sequence
  Description of Artificial Sequence: Synthetic oligonucleotide
caccacgcuccgcccgcgg

SEQ ID NO: 2513182 - RNA, 19 nt, Artificial Sequence
  Description of Artificial Sequence: Synthetic oligonucleotide
cacacacgcacaaggugau

SEQ ID NO: 2513183 - RNA, 19 nt, Artificial Sequence
  Description of Artificial Sequence: Synthetic oligonucleotide
caggcgagcacaccacgcu

SEQ ID NO: 2513184 - RNA, 19 nt, Artificial Sequence
  Description of Artificial Sequence: Synthetic oligonucleotide
gccuguaauauuucuccuu

SEQ ID NO: 2513185 - RNA, 19 nt, Artificial Sequence
  Description of Artificial Sequence: Synthetic oligonucleotide
cagcgcgcaccccgcggcc

SEQ ID NO: 2513186 - RNA, 19 nt, Artificial Sequence
  Description of Artificial Sequence: Synthetic oligonucleotide
ccagcgcgcaccccgcggc

SEQ ID NO: 2513187 - RNA, 19 nt, Artificial Sequence
  Description of Artificial Sequence: Synthetic oligonucleotide
cuggucaauucugacucau

SEQ ID NO: 2513188 - RNA, 19 nt, Artificial Sequence
  Description of Artificial Sequence: Synthetic oligonucleotide
gcagcgcggagcacagaag

SEQ ID NO: 2513189 - RNA, 19 nt, Artificial Sequence
  Description of Artificial Sequence: Synthetic oligonucleotide
gcgccuuccagcacgaagu

SEQ ID NO: 2513190 - RNA, 19 nt, Artificial Sequence
  Description of Artificial Sequence: Synthetic oligonucleotide
cagccaccauagaguucac

SEQ ID NO: 2513191 - RNA, 19 nt, Artificial Sequence
  Description of Artificial Sequence: Synthetic oligonucleotide
cacgcacaaggugaucugu

SEQ ID NO: 2513192 - RNA, 19 nt, Artificial Sequence
  Description of Artificial Sequence: Synthetic oligonucleotide
cacugacacaaugguugaa

SEQ ID NO: 2513193 - RNA, 19 nt, Artificial Sequence
  Description of Artificial Sequence: Synthetic oligonucleotide
accuuccaacccaucugua

SEQ ID NO: 2513194 - RNA, 19 nt, Artificial Sequence
  Description of Artificial Sequence: Synthetic oligonucleotide
ggcccaguccucacccaug

SEQ ID NO: 2513195 - RNA, 19 nt, Artificial Sequence
  Description of Artificial Sequence: Synthetic oligonucleotide
gcgagcacaccacgcucca

SEQ ID NO: 2513196 - RNA, 19 nt, Artificial Sequence
  Description of Artificial Sequence: Synthetic oligonucleotide
gcgcggagcacagaagcaa

SEQ ID NO: 2513197 - RNA, 19 nt, Artificial Sequence
  Description of Artificial Sequence: Synthetic oligonucleotide
cccagcgcgcaccccgcgg

SEQ ID NO: 2513198 - RNA, 19 nt, Artificial Sequence
  Description of Artificial Sequence: Synthetic oligonucleotide
aagcgccuuccagcacgaa

SEQ ID NO: 2513199 - RNA, 19 nt, Artificial Sequence
  Description of Artificial Sequence: Synthetic oligonucleotide
ccuugacuauggcauaaau

SEQ ID NO: 2513200 - RNA, 19 nt, Artificial Sequence
  Description of Artificial Sequence: Synthetic oligonucleotide
gcccagcgcgcaccccgcg

SEQ ID NO: 2513201 - RNA, 19 nt, Artificial Sequence
  Description of Artificial Sequence: Synthetic oligonucleotide
caacaaaguuugccaccuu

SEQ ID NO: 2513202 - RNA, 19 nt, Artificial Sequence
  Description of Artificial Sequence: Synthetic oligonucleotide
ccuugguaauaugucuccu

SEQ ID NO: 2513203 - RNA, 19 nt, Artificial Sequence
  Description of Artificial Sequence: Synthetic oligonucleotide
cgcggagcacagaagcaaa

SEQ ID NO: 2513204 - RNA, 19 nt, Artificial Sequence
  Description of Artificial Sequence: Synthetic oligonucleotide
gccacucaggggagaaggu

SEQ ID NO: 2513205 - RNA, 19 nt, Artificial Sequence
  Description of Artificial Sequence: Synthetic oligonucleotide
gcuccgcccgcggcccaga

SEQ ID NO: 2513206 - RNA, 19 nt, Artificial Sequence
  Description of Artificial Sequence: Synthetic oligonucleotide
cgcuccgcccgcggcccag

SEQ ID NO: 2513207 - RNA, 19 nt, Artificial Sequence
  Description of Artificial Sequence: Synthetic oligonucleotide
cgcgcaccccgcggccagc

SEQ ID NO: 2513208 - RNA, 19 nt, Artificial Sequence
  Description of Artificial Sequence: Synthetic oligonucleotide
aagauggagaccuucuugc

SEQ ID NO: 2513209 - RNA, 19 nt, Artificial Sequence
  Description of Artificial Sequence: Synthetic oligonucleotide
uuauucaauugacauaagg

SEQ ID NO: 2513210 - RNA, 19 nt, Artificial Sequence
  Description of Artificial Sequence: Synthetic oligonucleotide
uauucaauugacauaaggu

SEQ ID NO: 2513211 - RNA, 19 nt, Artificial Sequence
  Description of Artificial Sequence: Synthetic oligonucleotide
gaugcaucaggacaggugg

SEQ ID NO: 2513212 - RNA, 19 nt, Artificial Sequence
  Description of Artificial Sequence: Synthetic oligonucleotide
acacgcaucauccaagugc

SEQ ID NO: 2513213 - RNA, 19 nt, Artificial Sequence
  Description of Artificial Sequence: Synthetic oligonucleotide
aguauaggaggguggaucc

SEQ ID NO: 2513214 - RNA, 19 nt, Artificial Sequence
  Description of Artificial Sequence: Synthetic oligonucleotide
ucaauugacauaagguuug

SEQ ID NO: 2513215 - RNA, 19 nt, Artificial Sequence
  Description of Artificial Sequence: Synthetic oligonucleotide
gaagagacuagucuuggag

SEQ ID NO: 2513216 - RNA, 19 nt, Artificial Sequence
  Description of Artificial Sequence: Synthetic oligonucleotide
aacauugccuuugucaggg

SEQ ID NO: 2513217 - RNA, 19 nt, Artificial Sequence
  Description of Artificial Sequence: Synthetic oligonucleotide
gauaucugggugcucaggg

SEQ ID NO: 2513218 - RNA, 19 nt, Artificial Sequence
  Description of Artificial Sequence: Synthetic oligonucleotide
aagccuuugaggucacgcc

SEQ ID NO: 2513219 - RNA, 19 nt, Artificial Sequence
  Description of Artificial Sequence: Synthetic oligonucleotide
uauugcgugaaaccgggag

SEQ ID NO: 2513220 - RNA, 19 nt, Artificial Sequence
  Description of Artificial Sequence: Synthetic oligonucleotide
auacuuauucaauugacau

SEQ ID NO: 2513221 - RNA, 19 nt, Artificial Sequence
  Description of Artificial Sequence: Synthetic oligonucleotide
auugcgugaaaccgggagc

SEQ ID NO: 2513222 - RNA, 19 nt, Artificial Sequence
  Description of Artificial Sequence: Synthetic oligonucleotide
auucaauugacauaagguu

SEQ ID NO: 2513223 - RNA, 19 nt, Artificial Sequence
  Description of Artificial Sequence: Synthetic oligonucleotide
uuauucagcuggaagauau

SEQ ID NO: 2513224 - RNA, 19 nt, Artificial Sequence
  Description of Artificial Sequence: Synthetic oligonucleotide
acuuauucaauugacauaa

SEQ ID NO: 2513225 - RNA, 19 nt, Artificial Sequence
  Description of Artificial Sequence: Synthetic oligonucleotide
ucggcaaugauccggagga

SEQ ID NO: 2513226 - RNA, 19 nt, Artificial Sequence
  Description of Artificial Sequence: Synthetic oligonucleotide
gauucugagugacaguuug

SEQ ID NO: 2513227 - RNA, 19 nt, Artificial Sequence
  Description of Artificial Sequence: Synthetic oligonucleotide
cagguguagauuuauaaug

SEQ ID NO: 2513228 - RNA, 19 nt, Artificial Sequence
  Description of Artificial Sequence: Synthetic oligonucleotide
aguacgacccaguaccugg

SEQ ID NO: 2513229 - RNA, 19 nt, Artificial Sequence
  Description of Artificial Sequence: Synthetic oligonucleotide
uucaauugacauaagguuu

SEQ ID NO: 2513230 - RNA, 19 nt, Artificial Sequence
  Description of Artificial Sequence: Synthetic oligonucleotide
aagagacuagucuuggaga

SEQ ID NO: 2513231 - RNA, 19 nt, Artificial Sequence
  Description of Artificial Sequence: Synthetic oligonucleotide
acaguauugcgugaaaccg

SEQ ID NO: 2513232 - RNA, 19 nt, Artificial Sequence
  Description of Artificial Sequence: Synthetic oligonucleotide
gguacuucugcacaugugg

SEQ ID NO: 2513233 - RNA, 19 nt, Artificial Sequence
  Description of Artificial Sequence: Synthetic oligonucleotide
aauugacauaagguuugcc

SEQ ID NO: 2513234 - RNA, 19 nt, Artificial Sequence
  Description of Artificial Sequence: Synthetic oligonucleotide
agagacuagucuuggagag

SEQ ID NO: 2513235 - RNA, 19 nt, Artificial Sequence
  Description of Artificial Sequence: Synthetic oligonucleotide
acagacuucagguacuucu

SEQ ID NO: 2513236 - RNA, 19 nt, Artificial Sequence
  Description of Artificial Sequence: Synthetic oligonucleotide
uggaguuccucaauguagc

SEQ ID NO: 2513237 - RNA, 19 nt, Artificial Sequence
  Description of Artificial Sequence: Synthetic oligonucleotide
ggcuccauaguauaggagg

SEQ ID NO: 2513238 - RNA, 19 nt, Artificial Sequence
  Description of Artificial Sequence: Synthetic oligonucleotide
gaaacuugcaaaucggcaa

SEQ ID NO: 2513239 - RNA, 19 nt, Artificial Sequence
  Description of Artificial Sequence: Synthetic oligonucleotide
uagauuuauaauguuuucu

SEQ ID NO: 2513240 - RNA, 19 nt, Artificial Sequence
  Description of Artificial Sequence: Synthetic oligonucleotide
guagcguacagacuucagg

SEQ ID NO: 2513241 - RNA, 19 nt, Artificial Sequence
  Description of Artificial Sequence: Synthetic oligonucleotide
cacaguauugcgugaaacc

SEQ ID NO: 2513242 - RNA, 19 nt, Artificial Sequence
  Description of Artificial Sequence: Synthetic oligonucleotide
aaguccugcagauacuuau

SEQ ID NO: 2513243 - RNA, 19 nt, Artificial Sequence
  Description of Artificial Sequence: Synthetic oligonucleotide
agauggagaccuucuugcc

SEQ ID NO: 2513244 - RNA, 19 nt, Artificial Sequence
  Description of Artificial Sequence: Synthetic oligonucleotide
aaacuugcaaaucggcaau

SEQ ID NO: 2513245 - RNA, 19 nt, Artificial Sequence
  Description of Artificial Sequence: Synthetic oligonucleotide
ggaacuuguaaacauugcc

SEQ ID NO: 2513246 - RNA, 19 nt, Artificial Sequence
  Description of Artificial Sequence: Synthetic oligonucleotide
cuggaguuccucaauguag

SEQ ID NO: 2513247 - RNA, 19 nt, Artificial Sequence
  Description of Artificial Sequence: Synthetic oligonucleotide
gcaggaaacuugcaaaucg

SEQ ID NO: 2513248 - RNA, 19 nt, Artificial Sequence
  Description of Artificial Sequence: Synthetic oligonucleotide
cuggaacuuguaaacauug

SEQ ID NO: 2513249 - RNA, 19 nt, Artificial Sequence
  Description of Artificial Sequence: Synthetic oligonucleotide
cuggaagauaucugggugc

SEQ ID NO: 2513250 - RNA, 19 nt, Artificial Sequence
  Description of Artificial Sequence: Synthetic oligonucleotide
ucuuccuuggaagagacua

SEQ ID NO: 2513251 - RNA, 19 nt, Artificial Sequence
  Description of Artificial Sequence: Synthetic oligonucleotide
gauacuuauucaauugaca

SEQ ID NO: 2513252 - RNA, 19 nt, Artificial Sequence
  Description of Artificial Sequence: Synthetic oligonucleotide
ugaucauagcugcaggaaa

SEQ ID NO: 2513253 - RNA, 19 nt, Artificial Sequence
  Description of Artificial Sequence: Synthetic oligonucleotide
cauagcugcaggaaacuug

SEQ ID NO: 2513254 - RNA, 19 nt, Artificial Sequence
  Description of Artificial Sequence: Synthetic oligonucleotide
caggaaacuugcaaaucgg

SEQ ID NO: 2513255 - RNA, 19 nt, Artificial Sequence
  Description of Artificial Sequence: Synthetic oligonucleotide
uccucaauguagcguacag

SEQ ID NO: 2513256 - RNA, 19 nt, Artificial Sequence
  Description of Artificial Sequence: Synthetic oligonucleotide
caaaucggcaaugauccgg

SEQ ID NO: 2513257 - RNA, 19 nt, Artificial Sequence
  Description of Artificial Sequence: Synthetic oligonucleotide
ugaggucacgccaaguccu

SEQ ID NO: 2513258 - RNA, 19 nt, Artificial Sequence
  Description of Artificial Sequence: Synthetic oligonucleotide
uggaacuuguaaacauugc

SEQ ID NO: 2513259 - RNA, 19 nt, Artificial Sequence
  Description of Artificial Sequence: Synthetic oligonucleotide
aguauugcgugaaaccggg

SEQ ID NO: 2513260 - RNA, 19 nt, Artificial Sequence
  Description of Artificial Sequence: Synthetic oligonucleotide
agagcugcuuccugguucg

SEQ ID NO: 2513261 - RNA, 19 nt, Artificial Sequence
  Description of Artificial Sequence: Synthetic oligonucleotide
uguaguugucaucuuccac

SEQ ID NO: 2513262 - RNA, 19 nt, Artificial Sequence
  Description of Artificial Sequence: Synthetic oligonucleotide
aaugauccggaggauguug

SEQ ID NO: 2513263 - RNA, 19 nt, Artificial Sequence
  Description of Artificial Sequence: Synthetic oligonucleotide
agcuuaugcccagagcugc

SEQ ID NO: 2513264 - RNA, 19 nt, Artificial Sequence
  Description of Artificial Sequence: Synthetic oligonucleotide
caguauugcgugaaaccgg

SEQ ID NO: 2513265 - RNA, 19 nt, Artificial Sequence
  Description of Artificial Sequence: Synthetic oligonucleotide
aagugcuugugccacagua

SEQ ID NO: 2513266 - RNA, 19 nt, Artificial Sequence
  Description of Artificial Sequence: Synthetic oligonucleotide
aggaaacuugcaaaucggc

SEQ ID NO: 2513267 - RNA, 19 nt, Artificial Sequence
  Description of Artificial Sequence: Synthetic oligonucleotide
acgacccaguaccuggucc

SEQ ID NO: 2513268 - RNA, 19 nt, Artificial Sequence
  Description of Artificial Sequence: Synthetic oligonucleotide
gaagauaucugggugcuca

SEQ ID NO: 2513269 - RNA, 19 nt, Artificial Sequence
  Description of Artificial Sequence: Synthetic oligonucleotide
ugcacauguggcaggguag

SEQ ID NO: 2513270 - RNA, 19 nt, Artificial Sequence
  Description of Artificial Sequence: Synthetic oligonucleotide
aguuccucaauguagcgua

SEQ ID NO: 2513271 - RNA, 19 nt, Artificial Sequence
  Description of Artificial Sequence: Synthetic oligonucleotide
ugagaguacgacccaguac

SEQ ID NO: 2513272 - RNA, 19 nt, Artificial Sequence
  Description of Artificial Sequence: Synthetic oligonucleotide
guucgauucugagugacag

SEQ ID NO: 2513273 - RNA, 19 nt, Artificial Sequence
  Description of Artificial Sequence: Synthetic oligonucleotide
aagguuugccgguaccuga

SEQ ID NO: 2513274 - RNA, 19 nt, Artificial Sequence
  Description of Artificial Sequence: Synthetic oligonucleotide
cauguggcaggguagugag

SEQ ID NO: 2513275 - RNA, 19 nt, Artificial Sequence
  Description of Artificial Sequence: Synthetic oligonucleotide
aagauaucugggugcucag

SEQ ID NO: 2513276 - RNA, 19 nt, Artificial Sequence
  Description of Artificial Sequence: Synthetic oligonucleotide
ugcagauacuuauucaauu

SEQ ID NO: 2513277 - RNA, 19 nt, Artificial Sequence
  Description of Artificial Sequence: Synthetic oligonucleotide
agugaggugaucauagcug

SEQ ID NO: 2513278 - RNA, 19 nt, Artificial Sequence
  Description of Artificial Sequence: Synthetic oligonucleotide
uuguucaucugguuggauc

SEQ ID NO: 2513279 - RNA, 19 nt, Artificial Sequence
  Description of Artificial Sequence: Synthetic oligonucleotide
uacuuauucaauugacaua

SEQ ID NO: 2513280 - RNA, 19 nt, Artificial Sequence
  Description of Artificial Sequence: Synthetic oligonucleotide
uccauaguauaggagggug

SEQ ID NO: 2513281 - RNA, 19 nt, Artificial Sequence
  Description of Artificial Sequence: Synthetic oligonucleotide
ccugguucgauucugagug

SEQ ID NO: 2513282 - RNA, 19 nt, Artificial Sequence
  Description of Artificial Sequence: Synthetic oligonucleotide
gaucauagcugcaggaaac

SEQ ID NO: 2513283 - RNA, 19 nt, Artificial Sequence
  Description of Artificial Sequence: Synthetic oligonucleotide
agaccuucuugccaggugu

SEQ ID NO: 2513284 - RNA, 19 nt, Artificial Sequence
  Description of Artificial Sequence: Synthetic oligonucleotide
uguuuucugucugugcccc

SEQ ID NO: 2513285 - RNA, 19 nt, Artificial Sequence
  Description of Artificial Sequence: Synthetic oligonucleotide
aauguagcguacagacuuc

SEQ ID NO: 2513286 - RNA, 19 nt, Artificial Sequence
  Description of Artificial Sequence: Synthetic oligonucleotide
guagauuuauaauguuuuc

SEQ ID NO: 2513287 - RNA, 19 nt, Artificial Sequence
  Description of Artificial Sequence: Synthetic oligonucleotide
uggaagagacuagucuugg

SEQ ID NO: 2513288 - RNA, 19 nt, Artificial Sequence
  Description of Artificial Sequence: Synthetic oligonucleotide
ucaauguagcguacagacu

SEQ ID NO: 2513289 - RNA, 19 nt, Artificial Sequence
  Description of Artificial Sequence: Synthetic oligonucleotide
uuugccgguaccugaggcc

SEQ ID NO: 2513290 - RNA, 19 nt, Artificial Sequence
  Description of Artificial Sequence: Synthetic oligonucleotide
acauaagguuugccgguac

SEQ ID NO: 2513291 - RNA, 19 nt, Artificial Sequence
  Description of Artificial Sequence: Synthetic oligonucleotide
uaucugggugcucaggguc

SEQ ID NO: 2513292 - RNA, 19 nt, Artificial Sequence
  Description of Artificial Sequence: Synthetic oligonucleotide
gguagugaggugaucauag

SEQ ID NO: 2513293 - RNA, 19 nt, Artificial Sequence
  Description of Artificial Sequence: Synthetic oligonucleotide
gcuuuuacacgcaucaucc

SEQ ID NO: 2513294 - RNA, 19 nt, Artificial Sequence
  Description of Artificial Sequence: Synthetic oligonucleotide
uccuccaccagaccuaguc

SEQ ID NO: 2513295 - RNA, 19 nt, Artificial Sequence
  Description of Artificial Sequence: Synthetic oligonucleotide
aggugaucauagcugcagg

SEQ ID NO: 2513296 - RNA, 19 nt, Artificial Sequence
  Description of Artificial Sequence: Synthetic oligonucleotide
guuuguaguugucaucuuc

SEQ ID NO: 2513297 - RNA, 19 nt, Artificial Sequence
  Description of Artificial Sequence: Synthetic oligonucleotide
ucuggaacuuguaaacauu

SEQ ID NO: 2513298 - RNA, 19 nt, Artificial Sequence
  Description of Artificial Sequence: Synthetic oligonucleotide
aaaccgggagcccgucugg

SEQ ID NO: 2513299 - RNA, 19 nt, Artificial Sequence
  Description of Artificial Sequence: Synthetic oligonucleotide
gaaaccgggagcccgucug

SEQ ID NO: 2513300 - RNA, 19 nt, Artificial Sequence
  Description of Artificial Sequence: Synthetic oligonucleotide
uaguauaggaggguggauc

SEQ ID NO: 2513301 - RNA, 19 nt, Artificial Sequence
  Description of Artificial Sequence: Synthetic oligonucleotide
aucuuccacgaacuucugg

SEQ ID NO: 2513302 - RNA, 19 nt, Artificial Sequence
  Description of Artificial Sequence: Synthetic oligonucleotide
ucauccggcagcugcacca

SEQ ID NO: 2513303 - RNA, 19 nt, Artificial Sequence
  Description of Artificial Sequence: Synthetic oligonucleotide
ucuggaguuccucaaugua

SEQ ID NO: 2513304 - RNA, 19 nt, Artificial Sequence
  Description of Artificial Sequence: Synthetic oligonucleotide
uccacguuguugcccaggc

SEQ ID NO: 2513305 - RNA, 19 nt, Artificial Sequence
  Description of Artificial Sequence: Synthetic oligonucleotide
uugcgugaaaccgggagcc

SEQ ID NO: 2513306 - RNA, 19 nt, Artificial Sequence
  Description of Artificial Sequence: Synthetic oligonucleotide
ugacaguuuguaguuguca

SEQ ID NO: 2513307 - RNA, 19 nt, Artificial Sequence
  Description of Artificial Sequence: Synthetic oligonucleotide
aaaucggcaaugauccgga

SEQ ID NO: 2513308 - RNA, 19 nt, Artificial Sequence
  Description of Artificial Sequence: Synthetic oligonucleotide
caaggacuuggcuccauag

SEQ ID NO: 2513309 - RNA, 19 nt, Artificial Sequence
  Description of Artificial Sequence: Synthetic oligonucleotide
ucgauucugagugacaguu

SEQ ID NO: 2513310 - RNA, 19 nt, Artificial Sequence
  Description of Artificial Sequence: Synthetic oligonucleotide
uuacacgcaucauccaagu

SEQ ID NO: 2513311 - RNA, 19 nt, Artificial Sequence
  Description of Artificial Sequence: Synthetic oligonucleotide
uauaggaggguggauccug

SEQ ID NO: 2513312 - RNA, 19 nt, Artificial Sequence
  Description of Artificial Sequence: Synthetic oligonucleotide
uuguaaacauugccuuugu

SEQ ID NO: 2513313 - RNA, 19 nt, Artificial Sequence
  Description of Artificial Sequence: Synthetic oligonucleotide
uguggcucuuccuaugguc

SEQ ID NO: 2513314 - RNA, 19 nt, Artificial Sequence
  Description of Artificial Sequence: Synthetic oligonucleotide
agacuagucuuggagagcu

SEQ ID NO: 2513315 - RNA, 19 nt, Artificial Sequence
  Description of Artificial Sequence: Synthetic oligonucleotide
uuguaguugucaucuucca

SEQ ID NO: 2513316 - RNA, 19 nt, Artificial Sequence
  Description of Artificial Sequence: Synthetic oligonucleotide
agguguagauuuauaaugu

SEQ ID NO: 2513317 - RNA, 19 nt, Artificial Sequence
  Description of Artificial Sequence: Synthetic oligonucleotide
cauaagguuugccgguacc

SEQ ID NO: 2513318 - RNA, 19 nt, Artificial Sequence
  Description of Artificial Sequence: Synthetic oligonucleotide
gaacuuguaaacauugccu

SEQ ID NO: 2513319 - RNA, 19 nt, Artificial Sequence
  Description of Artificial Sequence: Synthetic oligonucleotide
uucuggaguuccucaaugu

SEQ ID NO: 2513320 - RNA, 19 nt, Artificial Sequence
  Description of Artificial Sequence: Synthetic oligonucleotide
uuccacgaacuucuggagu

SEQ ID NO: 2513321 - RNA, 19 nt, Artificial Sequence
  Description of Artificial Sequence: Synthetic oligonucleotide
uguaaacauugccuuuguc

SEQ ID NO: 2513322 - RNA, 19 nt, Artificial Sequence
  Description of Artificial Sequence: Synthetic oligonucleotide
cuuccuuggaagagacuag

SEQ ID NO: 2513323 - RNA, 19 nt, Artificial Sequence
  Description of Artificial Sequence: Synthetic oligonucleotide
cuugugccacaguauugcg

SEQ ID NO: 2513324 - RNA, 19 nt, Artificial Sequence
  Description of Artificial Sequence: Synthetic oligonucleotide
ggguuauucagcuggaaga

SEQ ID NO: 2513325 - RNA, 19 nt, Artificial Sequence
  Description of Artificial Sequence: Synthetic oligonucleotide
uguugcuuuuacacgcauc

SEQ ID NO: 2513326 - RNA, 19 nt, Artificial Sequence
  Description of Artificial Sequence: Synthetic oligonucleotide
ucugugccccgcaaggacu

SEQ ID NO: 2513327 - RNA, 19 nt, Artificial Sequence
  Description of Artificial Sequence: Synthetic oligonucleotide
uucugcacauguggcaggg

SEQ ID NO: 2513328 - RNA, 19 nt, Artificial Sequence
  Description of Artificial Sequence: Synthetic oligonucleotide
uuaugcccagagcugcucu

SEQ ID NO: 2513329 - RNA, 19 nt, Artificial Sequence
  Description of Artificial Sequence: Synthetic oligonucleotide
uugugccacaguauugcgu

SEQ ID NO: 2513330 - RNA, 19 nt, Artificial Sequence
  Description of Artificial Sequence: Synthetic oligonucleotide
agaggggccugcaagaucu

SEQ ID NO: 2513331 - RNA, 19 nt, Artificial Sequence
  Description of Artificial Sequence: Synthetic oligonucleotide
uggcuccauaguauaggag

SEQ ID NO: 2513332 - RNA, 19 nt, Artificial Sequence
  Description of Artificial Sequence: Synthetic oligonucleotide
uccaccagaccuaguccag

SEQ ID NO: 2513333 - RNA, 19 nt, Artificial Sequence
  Description of Artificial Sequence: Synthetic oligonucleotide
cagaccuaguccaggcucc

SEQ ID NO: 2513334 - RNA, 19 nt, Artificial Sequence
  Description of Artificial Sequence: Synthetic oligonucleotide
guuugccgguaccugaggc

SEQ ID NO: 2513335 - RNA, 19 nt, Artificial Sequence
  Description of Artificial Sequence: Synthetic oligonucleotide
uaagguuugccgguaccug

SEQ ID NO: 2513336 - RNA, 19 nt, Artificial Sequence
  Description of Artificial Sequence: Synthetic oligonucleotide
uuuucugucugugccccgc

SEQ ID NO: 2513337 - RNA, 19 nt, Artificial Sequence
  Description of Artificial Sequence: Synthetic oligonucleotide
accuaguccaggcucccag

SEQ ID NO: 2513338 - RNA, 19 nt, Artificial Sequence
  Description of Artificial Sequence: Synthetic oligonucleotide
auaagguuugccgguaccu

SEQ ID NO: 2513339 - RNA, 19 nt, Artificial Sequence
  Description of Artificial Sequence: Synthetic oligonucleotide
uccugguucgauucugagu

SEQ ID NO: 2513340 - RNA, 19 nt, Artificial Sequence
  Description of Artificial Sequence: Synthetic oligonucleotide
aacuugcaaaucggcaaug

SEQ ID NO: 2513341 - RNA, 19 nt, Artificial Sequence
  Description of Artificial Sequence: Synthetic oligonucleotide
agccuuugaggucacgcca

SEQ ID NO: 2513342 - RNA, 19 nt, Artificial Sequence
  Description of Artificial Sequence: Synthetic oligonucleotide
uucagguacuucugcacau

SEQ ID NO: 2513343 - RNA, 19 nt, Artificial Sequence
  Description of Artificial Sequence: Synthetic oligonucleotide
uucugagugacaguuugua

SEQ ID NO: 2513344 - RNA, 19 nt, Artificial Sequence
  Description of Artificial Sequence: Synthetic oligonucleotide
ugcaucaggacaggugggc

SEQ ID NO: 2513345 - RNA, 19 nt, Artificial Sequence
  Description of Artificial Sequence: Synthetic oligonucleotide
uacacgcaucauccaagug

SEQ ID NO: 2513346 - RNA, 19 nt, Artificial Sequence
  Description of Artificial Sequence: Synthetic oligonucleotide
gguggauccugagaguacg

SEQ ID NO: 2513347 - RNA, 19 nt, Artificial Sequence
  Description of Artificial Sequence: Synthetic oligonucleotide
acugguggcgugggaaggc

SEQ ID NO: 2513348 - RNA, 19 nt, Artificial Sequence
  Description of Artificial Sequence: Synthetic oligonucleotide
guagugaggugaucauagc

SEQ ID NO: 2513349 - RNA, 19 nt, Artificial Sequence
  Description of Artificial Sequence: Synthetic oligonucleotide
agaugcaucaggacaggug

SEQ ID NO: 2513350 - RNA, 19 nt, Artificial Sequence
  Description of Artificial Sequence: Synthetic oligonucleotide
gagaccuucuugccaggug

SEQ ID NO: 2513351 - RNA, 19 nt, Artificial Sequence
  Description of Artificial Sequence: Synthetic oligonucleotide
caauguagcguacagacuu

SEQ ID NO: 2513352 - RNA, 19 nt, Artificial Sequence
  Description of Artificial Sequence: Synthetic oligonucleotide
uuccuuggaagagacuagu

SEQ ID NO: 2513353 - RNA, 19 nt, Artificial Sequence
  Description of Artificial Sequence: Synthetic oligonucleotide
cauaguauaggagggugga

SEQ ID NO: 2513354 - RNA, 19 nt, Artificial Sequence
  Description of Artificial Sequence: Synthetic oligonucleotide
agaucuuccuuggaagaga

SEQ ID NO: 2513355 - RNA, 19 nt, Artificial Sequence
  Description of Artificial Sequence: Synthetic oligonucleotide
gacaguuuguaguugucau

SEQ ID NO: 2513356 - RNA, 19 nt, Artificial Sequence
  Description of Artificial Sequence: Synthetic oligonucleotide
uucgauucugagugacagu

SEQ ID NO: 2513357 - RNA, 19 nt, Artificial Sequence
  Description of Artificial Sequence: Synthetic oligonucleotide
ccauaguauaggagggugg

SEQ ID NO: 2513358 - RNA, 19 nt, Artificial Sequence
  Description of Artificial Sequence: Synthetic oligonucleotide
ucacgccaaguccugcaga

SEQ ID NO: 2513359 - RNA, 19 nt, Artificial Sequence
  Description of Artificial Sequence: Synthetic oligonucleotide
caauugacauaagguuugc

SEQ ID NO: 2513360 - RNA, 19 nt, Artificial Sequence
  Description of Artificial Sequence: Synthetic oligonucleotide
gcuccauaguauaggaggg

SEQ ID NO: 2513361 - RNA, 19 nt, Artificial Sequence
  Description of Artificial Sequence: Synthetic oligonucleotide
uccugagaguacgacccag

SEQ ID NO: 2513362 - RNA, 19 nt, Artificial Sequence
  Description of Artificial Sequence: Synthetic oligonucleotide
ugcaggaaacuugcaaauc

SEQ ID NO: 2513363 - RNA, 19 nt, Artificial Sequence
  Description of Artificial Sequence: Synthetic oligonucleotide
uccggcggaaccuggcuga

SEQ ID NO: 2513364 - RNA, 19 nt, Artificial Sequence
  Description of Artificial Sequence: Synthetic oligonucleotide
cagcuuaugcccagagcug

SEQ ID NO: 2513365 - RNA, 19 nt, Artificial Sequence
  Description of Artificial Sequence: Synthetic oligonucleotide
aucauagcugcaggaaacu

SEQ ID NO: 2513366 - RNA, 19 nt, Artificial Sequence
  Description of Artificial Sequence: Synthetic oligonucleotide
ugguucgauucugagugac

SEQ ID NO: 2513367 - RNA, 19 nt, Artificial Sequence
  Description of Artificial Sequence: Synthetic oligonucleotide
gauccggaggauguuguuc

SEQ ID NO: 2513368 - RNA, 19 nt, Artificial Sequence
  Description of Artificial Sequence: Synthetic oligonucleotide
gagacuagucuuggagagc

SEQ ID NO: 2513369 - RNA, 19 nt, Artificial Sequence
  Description of Artificial Sequence: Synthetic oligonucleotide
acauguggcaggguaguga

SEQ ID NO: 2513370 - RNA, 19 nt, Artificial Sequence
  Description of Artificial Sequence: Synthetic oligonucleotide
cagcagaggggccugcaag

SEQ ID NO: 2513371 - RNA, 19 nt, Artificial Sequence
  Description of Artificial Sequence: Synthetic oligonucleotide
cagccacagaugcaucagg

SEQ ID NO: 2513372 - RNA, 19 nt, Artificial Sequence
  Description of Artificial Sequence: Synthetic oligonucleotide
cccgcaaggacuuggcucc

SEQ ID NO: 2513373 - RNA, 19 nt, Artificial Sequence
  Description of Artificial Sequence: Synthetic oligonucleotide
caccauccagcccaagaug

SEQ ID NO: 2513374 - RNA, 19 nt, Artificial Sequence
  Description of Artificial Sequence: Synthetic oligonucleotide
ggaaacuugcaaaucggca

SEQ ID NO: 2513375 - RNA, 19 nt, Artificial Sequence
  Description of Artificial Sequence: Synthetic oligonucleotide
guuuucugucugugccccg

SEQ ID NO: 2513376 - RNA, 19 nt, Artificial Sequence
  Description of Artificial Sequence: Synthetic oligonucleotide
uggagaccuucuugccagg

SEQ ID NO: 2513377 - RNA, 19 nt, Artificial Sequence
  Description of Artificial Sequence: Synthetic oligonucleotide
uggauccugagaguacgac

SEQ ID NO: 2513378 - RNA, 19 nt, Artificial Sequence
  Description of Artificial Sequence: Synthetic oligonucleotide
gucacgccaaguccugcag

SEQ ID NO: 2513379 - RNA, 19 nt, Artificial Sequence
  Description of Artificial Sequence: Synthetic oligonucleotide
gacuuggcuccauaguaua

SEQ ID NO: 2513380 - RNA, 19 nt, Artificial Sequence
  Description of Artificial Sequence: Synthetic oligonucleotide
acuuggcuccauaguauag

SEQ ID NO: 2513381 - RNA, 19 nt, Artificial Sequence
  Description of Artificial Sequence: Synthetic oligonucleotide
agaccuaguccaggcuccc

SEQ ID NO: 2513382 - RNA, 19 nt, Artificial Sequence
  Description of Artificial Sequence: Synthetic oligonucleotide
ggugaucauagcugcagga

SEQ ID NO: 2513383 - RNA, 19 nt, Artificial Sequence
  Description of Artificial Sequence: Synthetic oligonucleotide
aguaccugguccacguugu

SEQ ID NO: 2513384 - RNA, 19 nt, Artificial Sequence
  Description of Artificial Sequence: Synthetic oligonucleotide
cacgaacuucuggaguucc

SEQ ID NO: 2513385 - RNA, 19 nt, Artificial Sequence
  Description of Artificial Sequence: Synthetic oligonucleotide
ugucaucuuccacgaacuu

SEQ ID NO: 2513386 - RNA, 19 nt, Artificial Sequence
  Description of Artificial Sequence: Synthetic oligonucleotide
gucugugccccgcaaggac

SEQ ID NO: 2513387 - RNA, 19 nt, Artificial Sequence
  Description of Artificial Sequence: Synthetic oligonucleotide
uaugcccagagcugcucuc

SEQ ID NO: 2513388 - RNA, 19 nt, Artificial Sequence
  Description of Artificial Sequence: Synthetic oligonucleotide
cacgcaucauccaagugcu

SEQ ID NO: 2513389 - RNA, 19 nt, Artificial Sequence
  Description of Artificial Sequence: Synthetic oligonucleotide
gaggccuguugcuuuuaca

SEQ ID NO: 2513390 - RNA, 19 nt, Artificial Sequence
  Description of Artificial Sequence: Synthetic oligonucleotide
gccagguguagauuuauaa

SEQ ID NO: 2513391 - RNA, 19 nt, Artificial Sequence
  Description of Artificial Sequence: Synthetic oligonucleotide
gaguacgacccaguaccug

SEQ ID NO: 2513392 - RNA, 19 nt, Artificial Sequence
  Description of Artificial Sequence: Synthetic oligonucleotide
aggguagugaggugaucau

SEQ ID NO: 2513393 - RNA, 19 nt, Artificial Sequence
  Description of Artificial Sequence: Synthetic oligonucleotide
ugucugugccccgcaagga

SEQ ID NO: 2513394 - RNA, 19 nt, Artificial Sequence
  Description of Artificial Sequence: Synthetic oligonucleotide
agugcuugugccacaguau

SEQ ID NO: 2513395 - RNA, 19 nt, Artificial Sequence
  Description of Artificial Sequence: Synthetic oligonucleotide
gugaucauagcugcaggaa

SEQ ID NO: 2513396 - RNA, 19 nt, Artificial Sequence
  Description of Artificial Sequence: Synthetic oligonucleotide
agguuugccgguaccugag

SEQ ID NO: 2513397 - RNA, 19 nt, Artificial Sequence
  Description of Artificial Sequence: Synthetic oligonucleotide
ugccccgcaaggacuuggc

SEQ ID NO: 2513398 - RNA, 19 nt, Artificial Sequence
  Description of Artificial Sequence: Synthetic oligonucleotide
aggucacgccaaguccugc

SEQ ID NO: 2513399 - RNA, 19 nt, Artificial Sequence
  Description of Artificial Sequence: Synthetic oligonucleotide
ugccacaguauugcgugaa

SEQ ID NO: 2513400 - RNA, 19 nt, Artificial Sequence
  Description of Artificial Sequence: Synthetic oligonucleotide
gaaccuggcugagcuggag

SEQ ID NO: 2513401 - RNA, 19 nt, Artificial Sequence
  Description of Artificial Sequence: Synthetic oligonucleotide
gcaaaucggcaaugauccg

SEQ ID NO: 2513402 - RNA, 19 nt, Artificial Sequence
  Description of Artificial Sequence: Synthetic oligonucleotide
ugccagguguagauuuaua

SEQ ID NO: 2513403 - RNA, 19 nt, Artificial Sequence
  Description of Artificial Sequence: Synthetic oligonucleotide
caucauccaagugcuugug

SEQ ID NO: 2513404 - RNA, 19 nt, Artificial Sequence
  Description of Artificial Sequence: Synthetic oligonucleotide
augauccggaggauguugu

SEQ ID NO: 2513405 - RNA, 19 nt, Artificial Sequence
  Description of Artificial Sequence: Synthetic oligonucleotide
uucugucugugccccgcaa

SEQ ID NO: 2513406 - RNA, 19 nt, Artificial Sequence
  Description of Artificial Sequence: Synthetic oligonucleotide
aggguggauccugagagua

SEQ ID NO: 2513407 - RNA, 19 nt, Artificial Sequence
  Description of Artificial Sequence: Synthetic oligonucleotide
cuuccugguucgauucuga

SEQ ID NO: 2513408 - RNA, 19 nt, Artificial Sequence
  Description of Artificial Sequence: Synthetic oligonucleotide
auaguauaggaggguggau

SEQ ID NO: 2513409 - RNA, 19 nt, Artificial Sequence
  Description of Artificial Sequence: Synthetic oligonucleotide
uacgacccaguaccugguc

SEQ ID NO: 2513410 - RNA, 19 nt, Artificial Sequence
  Description of Artificial Sequence: Synthetic oligonucleotide
gguuugccgguaccugagg

SEQ ID NO: 2513411 - RNA, 19 nt, Artificial Sequence
  Description of Artificial Sequence: Synthetic oligonucleotide
cugguccacguuguugccc

SEQ ID NO: 2513412 - RNA, 19 nt, Artificial Sequence
  Description of Artificial Sequence: Synthetic oligonucleotide
guguagauuuauaauguuu

SEQ ID NO: 2513413 - RNA, 19 nt, Artificial Sequence
  Description of Artificial Sequence: Synthetic oligonucleotide
uugccagguguagauuuau

SEQ ID NO: 2513414 - RNA, 19 nt, Artificial Sequence
  Description of Artificial Sequence: Synthetic oligonucleotide
ggcgugggaaggcugccag

SEQ ID NO: 2513415 - RNA, 19 nt, Artificial Sequence
  Description of Artificial Sequence: Synthetic oligonucleotide
gaggucacgccaaguccug

SEQ ID NO: 2513416 - RNA, 19 nt, Artificial Sequence
  Description of Artificial Sequence: Synthetic oligonucleotide
gucauccggcagcugcacc

SEQ ID NO: 2513417 - RNA, 19 nt, Artificial Sequence
  Description of Artificial Sequence: Synthetic oligonucleotide
gacauaagguuugccggua

SEQ ID NO: 2513418 - RNA, 19 nt, Artificial Sequence
  Description of Artificial Sequence: Synthetic oligonucleotide
ugauccggaggauguuguu

SEQ ID NO: 2513419 - RNA, 19 nt, Artificial Sequence
  Description of Artificial Sequence: Synthetic oligonucleotide
gaguuccucaauguagcgu

SEQ ID NO: 2513420 - RNA, 19 nt, Artificial Sequence
  Description of Artificial Sequence: Synthetic oligonucleotide
ugcgugaaaccgggagccc

SEQ ID NO: 2513421 - RNA, 19 nt, Artificial Sequence
  Description of Artificial Sequence: Synthetic oligonucleotide
agaagccuuugaggucacg

SEQ ID NO: 2513422 - RNA, 19 nt, Artificial Sequence
  Description of Artificial Sequence: Synthetic oligonucleotide
caggcuguggcucuuccua

SEQ ID NO: 2513423 - RNA, 19 nt, Artificial Sequence
  Description of Artificial Sequence: Synthetic oligonucleotide
aggcuguggcucuuccuau

SEQ ID NO: 2513424 - RNA, 19 nt, Artificial Sequence
  Description of Artificial Sequence: Synthetic oligonucleotide
uacagacuucagguacuuc

SEQ ID NO: 2513425 - RNA, 19 nt, Artificial Sequence
  Description of Artificial Sequence: Synthetic oligonucleotide
gccaacagcuuaugcccag

SEQ ID NO: 2513426 - RNA, 19 nt, Artificial Sequence
  Description of Artificial Sequence: Synthetic oligonucleotide
cugagaguacgacccagua

SEQ ID NO: 2513427 - RNA, 19 nt, Artificial Sequence
  Description of Artificial Sequence: Synthetic oligonucleotide
gcgugaaaccgggagcccg

SEQ ID NO: 2513428 - RNA, 19 nt, Artificial Sequence
  Description of Artificial Sequence: Synthetic oligonucleotide
ggaagagacuagucuugga

SEQ ID NO: 2513429 - RNA, 19 nt, Artificial Sequence
  Description of Artificial Sequence: Synthetic oligonucleotide
guuauucagcuggaagaua

SEQ ID NO: 2513430 - RNA, 19 nt, Artificial Sequence
  Description of Artificial Sequence: Synthetic oligonucleotide
acguuguugcccaggcugu

SEQ ID NO: 2513431 - RNA, 19 nt, Artificial Sequence
  Description of Artificial Sequence: Synthetic oligonucleotide
ccagaagccuuugagguca

SEQ ID NO: 2513432 - RNA, 19 nt, Artificial Sequence
  Description of Artificial Sequence: Synthetic oligonucleotide
cagaggggccugcaagauc

SEQ ID NO: 2513433 - RNA, 19 nt, Artificial Sequence
  Description of Artificial Sequence: Synthetic oligonucleotide
cuugccagguguagauuua

SEQ ID NO: 2513434 - RNA, 19 nt, Artificial Sequence
  Description of Artificial Sequence: Synthetic oligonucleotide
aaccgggagcccgucugga

SEQ ID NO: 2513435 - RNA, 19 nt, Artificial Sequence
  Description of Artificial Sequence: Synthetic oligonucleotide
gacuagucuuggagagcug

SEQ ID NO: 2513436 - RNA, 19 nt, Artificial Sequence
  Description of Artificial Sequence: Synthetic oligonucleotide
gugacaguuuguaguuguc

SEQ ID NO: 2513437 - RNA, 19 nt, Artificial Sequence
  Description of Artificial Sequence: Synthetic oligonucleotide
guuccucaauguagcguac

SEQ ID NO: 2513438 - RNA, 19 nt, Artificial Sequence
  Description of Artificial Sequence: Synthetic oligonucleotide
acauugccuuugucagggu

SEQ ID NO: 2513439 - RNA, 19 nt, Artificial Sequence
  Description of Artificial Sequence: Synthetic oligonucleotide
cugcagauacuuauucaau

SEQ ID NO: 2513440 - RNA, 19 nt, Artificial Sequence
  Description of Artificial Sequence: Synthetic oligonucleotide
uucuugccagguguagauu

SEQ ID NO: 2513441 - RNA, 19 nt, Artificial Sequence
  Description of Artificial Sequence: Synthetic oligonucleotide
cuagucuuggagagcugcu

SEQ ID NO: 2513442 - RNA, 19 nt, Artificial Sequence
  Description of Artificial Sequence: Synthetic oligonucleotide
guggcucuuccuauggucu

SEQ ID NO: 2513443 - RNA, 19 nt, Artificial Sequence
  Description of Artificial Sequence: Synthetic oligonucleotide
uccggaggauguuguucau

SEQ ID NO: 2513444 - RNA, 19 nt, Artificial Sequence
  Description of Artificial Sequence: Synthetic oligonucleotide
ggcggaaccuggcugagcu

SEQ ID NO: 2513445 - RNA, 19 nt, Artificial Sequence
  Description of Artificial Sequence: Synthetic oligonucleotide
cacauguggcaggguagug

SEQ ID NO: 2513446 - RNA, 19 nt, Artificial Sequence
  Description of Artificial Sequence: Synthetic oligonucleotide
ggucacgccaaguccugca

SEQ ID NO: 2513447 - RNA, 19 nt, Artificial Sequence
  Description of Artificial Sequence: Synthetic oligonucleotide
gguuauucagcuggaagau

SEQ ID NO: 2513448 - RNA, 19 nt, Artificial Sequence
  Description of Artificial Sequence: Synthetic oligonucleotide
cggaaccuggcugagcugg

SEQ ID NO: 2513449 - RNA, 19 nt, Artificial Sequence
  Description of Artificial Sequence: Synthetic oligonucleotide
ccccgcaaggacuuggcuc

SEQ ID NO: 2513450 - RNA, 19 nt, Artificial Sequence
  Description of Artificial Sequence: Synthetic oligonucleotide
acgaacuucuggaguuccu

SEQ ID NO: 2513451 - RNA, 19 nt, Artificial Sequence
  Description of Artificial Sequence: Synthetic oligonucleotide
gguguagauuuauaauguu

SEQ ID NO: 2513452 - RNA, 19 nt, Artificial Sequence
  Description of Artificial Sequence: Synthetic oligonucleotide
gaggguggauccugagagu

SEQ ID NO: 2513453 - RNA, 19 nt, Artificial Sequence
  Description of Artificial Sequence: Synthetic oligonucleotide
caaguccugcagauacuua

SEQ ID NO: 2513454 - RNA, 19 nt, Artificial Sequence
  Description of Artificial Sequence: Synthetic oligonucleotide
uggcgugggaaggcugcca

SEQ ID NO: 2513455 - RNA, 19 nt, Artificial Sequence
  Description of Artificial Sequence: Synthetic oligonucleotide
cccagaagccuuugagguc

SEQ ID NO: 2513456 - RNA, 19 nt, Artificial Sequence
  Description of Artificial Sequence: Synthetic oligonucleotide
accgggagcccgucuggaa

SEQ ID NO: 2513457 - RNA, 19 nt, Artificial Sequence
  Description of Artificial Sequence: Synthetic oligonucleotide
ugugccccgcaaggacuug

SEQ ID NO: 2513458 - RNA, 19 nt, Artificial Sequence
  Description of Artificial Sequence: Synthetic oligonucleotide
cacgccaaguccugcagau

SEQ ID NO: 2513459 - RNA, 19 nt, Artificial Sequence
  Description of Artificial Sequence: Synthetic oligonucleotide
gugccacaguauugcguga

SEQ ID NO: 2513460 - RNA, 19 nt, Artificial Sequence
  Description of Artificial Sequence: Synthetic oligonucleotide
cugcaagaucuuccuugga

SEQ ID NO: 2513461 - RNA, 19 nt, Artificial Sequence
  Description of Artificial Sequence: Synthetic oligonucleotide
gguucgauucugagugaca

SEQ ID NO: 2513462 - RNA, 19 nt, Artificial Sequence
  Description of Artificial Sequence: Synthetic oligonucleotide
guggauccugagaguacga

SEQ ID NO: 2513463 - RNA, 19 nt, Artificial Sequence
  Description of Artificial Sequence: Synthetic oligonucleotide
ccagguguagauuuauaau

SEQ ID NO: 2513464 - RNA, 19 nt, Artificial Sequence
  Description of Artificial Sequence: Synthetic oligonucleotide
guauugcgugaaaccggga

SEQ ID NO: 2513465 - RNA, 19 nt, Artificial Sequence
  Description of Artificial Sequence: Synthetic oligonucleotide
ccugguccacguuguugcc

SEQ ID NO: 2513466 - RNA, 19 nt, Artificial Sequence
  Description of Artificial Sequence: Synthetic oligonucleotide
cauugccuuugucaggguu

SEQ ID NO: 2513467 - RNA, 19 nt, Artificial Sequence
  Description of Artificial Sequence: Synthetic oligonucleotide
guggcgugggaaggcugcc

SEQ ID NO: 2513468 - RNA, 19 nt, Artificial Sequence
  Description of Artificial Sequence: Synthetic oligonucleotide
gaccuaguccaggcuccca

SEQ ID NO: 2513469 - RNA, 19 nt, Artificial Sequence
  Description of Artificial Sequence: Synthetic oligonucleotide
gagcccgucuggaacuugu

SEQ ID NO: 2513470 - RNA, 19 nt, Artificial Sequence
  Description of Artificial Sequence: Synthetic oligonucleotide
cuccauaguauaggagggu

SEQ ID NO: 2513471 - RNA, 19 nt, Artificial Sequence
  Description of Artificial Sequence: Synthetic oligonucleotide
guauaggaggguggauccu

SEQ ID NO: 2513472 - RNA, 19 nt, Artificial Sequence
  Description of Artificial Sequence: Synthetic oligonucleotide
ggguggauccugagaguac

SEQ ID NO: 2513473 - RNA, 19 nt, Artificial Sequence
  Description of Artificial Sequence: Synthetic oligonucleotide
gugaaaccgggagcccguc

SEQ ID NO: 2513474 - RNA, 19 nt, Artificial Sequence
  Description of Artificial Sequence: Synthetic oligonucleotide
ccucaauguagcguacaga

SEQ ID NO: 2513475 - RNA, 19 nt, Artificial Sequence
  Description of Artificial Sequence: Synthetic oligonucleotide
gcgugggaaggcugccagc

SEQ ID NO: 2513476 - RNA, 19 nt, Artificial Sequence
  Description of Artificial Sequence: Synthetic oligonucleotide
gcccgucuggaacuuguaa

SEQ ID NO: 2513477 - RNA, 19 nt, Artificial Sequence
  Description of Artificial Sequence: Synthetic oligonucleotide
caggguuauucagcuggaa

SEQ ID NO: 2513478 - RNA, 19 nt, Artificial Sequence
  Description of Artificial Sequence: Synthetic oligonucleotide
cuccagugccuuggccaac

SEQ ID NO: 2513479 - RNA, 19 nt, Artificial Sequence
  Description of Artificial Sequence: Synthetic oligonucleotide
ccuaguccaggcucccaga

SEQ ID NO: 2513480 - RNA, 19 nt, Artificial Sequence
  Description of Artificial Sequence: Synthetic oligonucleotide
gccuuugaggucacgccaa

SEQ ID NO: 2513481 - RNA, 19 nt, Artificial Sequence
  Description of Artificial Sequence: Synthetic oligonucleotide
aggcucccagaagccuuug

SEQ ID NO: 2513482 - RNA, 19 nt, Artificial Sequence
  Description of Artificial Sequence: Synthetic oligonucleotide
gcggaaccuggcugagcug

SEQ ID NO: 2513483 - RNA, 19 nt, Artificial Sequence
  Description of Artificial Sequence: Synthetic oligonucleotide
ccauccagcccaagaugga

SEQ ID NO: 2513484 - RNA, 19 nt, Artificial Sequence
  Description of Artificial Sequence: Synthetic oligonucleotide
cgacccaguaccuggucca

SEQ ID NO: 2513485 - RNA, 19 nt, Artificial Sequence
  Description of Artificial Sequence: Synthetic oligonucleotide
guuguucaucugguuggau

SEQ ID NO: 2513486 - RNA, 19 nt, Artificial Sequence
  Description of Artificial Sequence: Synthetic oligonucleotide
acgccaaguccugcagaua

SEQ ID NO: 2513487 - RNA, 19 nt, Artificial Sequence
  Description of Artificial Sequence: Synthetic oligonucleotide
gggaaggcugccagccaca

SEQ ID NO: 2513488 - RNA, 19 nt, Artificial Sequence
  Description of Artificial Sequence: Synthetic oligonucleotide
cgucuggaacuuguaaaca

SEQ ID NO: 2513489 - RNA, 19 nt, Artificial Sequence
  Description of Artificial Sequence: Synthetic oligonucleotide
cccaguaccugguccacgu

SEQ ID NO: 2513490 - RNA, 19 nt, Artificial Sequence
  Description of Artificial Sequence: Synthetic oligonucleotide
cguacagacuucagguacu

SEQ ID NO: 2513491 - RNA, 19 nt, Artificial Sequence
  Description of Artificial Sequence: Synthetic oligonucleotide
ccggaggauguuguucauc

SEQ ID NO: 2513492 - RNA, 19 nt, Artificial Sequence
  Description of Artificial Sequence: Synthetic oligonucleotide
ccugagaguacgacccagu

SEQ ID NO: 2513493 - RNA, 19 nt, Artificial Sequence
  Description of Artificial Sequence: Synthetic oligonucleotide
ggagcccgucuggaacuug

SEQ ID NO: 2513494 - RNA, 19 nt, Artificial Sequence
  Description of Artificial Sequence: Synthetic oligonucleotide
cugcaccauccagcccaag

SEQ ID NO: 2513495 - RNA, 19 nt, Artificial Sequence
  Description of Artificial Sequence: Synthetic oligonucleotide
cugugccccgcaaggacuu

SEQ ID NO: 2513496 - RNA, 19 nt, Artificial Sequence
  Description of Artificial Sequence: Synthetic oligonucleotide
caagugcuugugccacagu

SEQ ID NO: 2513497 - RNA, 19 nt, Artificial Sequence
  Description of Artificial Sequence: Synthetic oligonucleotide
agcccgucuggaacuugua

SEQ ID NO: 2513498 - RNA, 19 nt, Artificial Sequence
  Description of Artificial Sequence: Synthetic oligonucleotide
ggccuccggcggaaccugg

SEQ ID NO: 2513499 - RNA, 19 nt, Artificial Sequence
  Description of Artificial Sequence: Synthetic oligonucleotide
gagcugcuuccugguucga

SEQ ID NO: 2513500 - RNA, 19 nt, Artificial Sequence
  Description of Artificial Sequence: Synthetic oligonucleotide
ggagaccuucuugccaggu

SEQ ID NO: 2513501 - RNA, 19 nt, Artificial Sequence
  Description of Artificial Sequence: Synthetic oligonucleotide
ccaacagcuuaugcccaga

SEQ ID NO: 2513502 - RNA, 19 nt, Artificial Sequence
  Description of Artificial Sequence: Synthetic oligonucleotide
gccuccggcggaaccuggc

SEQ ID NO: 2513503 - RNA, 19 nt, Artificial Sequence
  Description of Artificial Sequence: Synthetic oligonucleotide
gggccuccggcggaaccug

SEQ ID NO: 2513504 - RNA, 19 nt, Artificial Sequence
  Description of Artificial Sequence: Synthetic oligonucleotide
caaugauccggaggauguu

SEQ ID NO: 2513505 - RNA, 19 nt, Artificial Sequence
  Description of Artificial Sequence: Synthetic oligonucleotide
guaccugguccacguuguu

SEQ ID NO: 2513506 - RNA, 19 nt, Artificial Sequence
  Description of Artificial Sequence: Synthetic oligonucleotide
agcccaagauggagaccuu

SEQ ID NO: 2513507 - RNA, 19 nt, Artificial Sequence
  Description of Artificial Sequence: Synthetic oligonucleotide
gcuuaugcccagagcugcu

SEQ ID NO: 2513508 - RNA, 19 nt, Artificial Sequence
  Description of Artificial Sequence: Synthetic oligonucleotide
cguuguugcccaggcugug

SEQ ID NO: 2513509 - RNA, 19 nt, Artificial Sequence
  Description of Artificial Sequence: Synthetic oligonucleotide
cugaggccuguugcuuuua

SEQ ID NO: 2513510 - RNA, 19 nt, Artificial Sequence
  Description of Artificial Sequence: Synthetic oligonucleotide
acgcaucauccaagugcuu

SEQ ID NO: 2513511 - RNA, 19 nt, Artificial Sequence
  Description of Artificial Sequence: Synthetic oligonucleotide
ggcaggguagugaggugau

SEQ ID NO: 2513512 - RNA, 19 nt, Artificial Sequence
  Description of Artificial Sequence: Synthetic oligonucleotide
ccaggcucccagaagccuu

SEQ ID NO: 2513513 - RNA, 19 nt, Artificial Sequence
  Description of Artificial Sequence: Synthetic oligonucleotide
cgugaaaccgggagcccgu

SEQ ID NO: 2513514 - RNA, 19 nt, Artificial Sequence
  Description of Artificial Sequence: Synthetic oligonucleotide
ggugggccuccggcggaac

SEQ ID NO: 2513515 - RNA, 19 nt, Artificial Sequence
  Description of Artificial Sequence: Synthetic oligonucleotide
ccggcggaaccuggcugag

SEQ ID NO: 2513516 - RNA, 19 nt, Artificial Sequence
  Description of Artificial Sequence: Synthetic oligonucleotide
gccccgcaaggacuuggcu

SEQ ID NO: 2513517 - RNA, 19 nt, Artificial Sequence
  Description of Artificial Sequence: Synthetic oligonucleotide
ccuccggcggaaccuggcu

SEQ ID NO: 2513518 - RNA, 19 nt, Artificial Sequence
  Description of Artificial Sequence: Synthetic oligonucleotide
cgauucugagugacaguuu

SEQ ID NO: 2513519 - RNA, 19 nt, Artificial Sequence
  Description of Artificial Sequence: Synthetic oligonucleotide
ccacguuguugcccaggcu

SEQ ID NO: 2513520 - RNA, 19 nt, Artificial Sequence
  Description of Artificial Sequence: Synthetic oligonucleotide
cggcggaaccuggcugagc

SEQ ID NO: 2513521 - RNA, 19 nt, Artificial Sequence
  Description of Artificial Sequence: Synthetic oligonucleotide
ccgcaaggacuuggcucca

SEQ ID NO: 2513522 - RNA, 19 nt, Artificial Sequence
  Description of Artificial Sequence: Synthetic oligonucleotide
cgcaaggacuuggcuccau

SEQ ID NO: 2513523 - RNA, 19 nt, Artificial Sequence
  Description of Artificial Sequence: Synthetic oligonucleotide
ccgguaccugaggccuguu

SEQ ID NO: 2513524 - RNA, 19 nt, Artificial Sequence
  Description of Artificial Sequence: Synthetic oligonucleotide
acauuagauaaacauaacc

SEQ ID NO: 2513525 - RNA, 19 nt, Artificial Sequence
  Description of Artificial Sequence: Synthetic oligonucleotide
aacauaaccaagucuuuac

SEQ ID NO: 2513526 - RNA, 19 nt, Artificial Sequence
  Description of Artificial Sequence: Synthetic oligonucleotide
uuagauaaacauaaccaag

SEQ ID NO: 2513527 - RNA, 19 nt, Artificial Sequence
  Description of Artificial Sequence: Synthetic oligonucleotide
aagcauuucagccugccuc

SEQ ID NO: 2513528 - RNA, 19 nt, Artificial Sequence
  Description of Artificial Sequence: Synthetic oligonucleotide
gaaguuuucagccaaucug

SEQ ID NO: 2513529 - RNA, 19 nt, Artificial Sequence
  Description of Artificial Sequence: Synthetic oligonucleotide
ugaucuucggaucaggggc

SEQ ID NO: 2513530 - RNA, 19 nt, Artificial Sequence
  Description of Artificial Sequence: Synthetic oligonucleotide
cauuagauaaacauaacca

SEQ ID NO: 2513531 - RNA, 19 nt, Artificial Sequence
  Description of Artificial Sequence: Synthetic oligonucleotide
gacacagaaguuuucagcc

SEQ ID NO: 2513532 - RNA, 19 nt, Artificial Sequence
  Description of Artificial Sequence: Synthetic oligonucleotide
aaauggcagacacagaagu

SEQ ID NO: 2513533 - RNA, 19 nt, Artificial Sequence
  Description of Artificial Sequence: Synthetic oligonucleotide
uuuuccccagcucagaacc

SEQ ID NO: 2513534 - RNA, 19 nt, Artificial Sequence
  Description of Artificial Sequence: Synthetic oligonucleotide
uuacauguggcuuuggaga

SEQ ID NO: 2513535 - RNA, 19 nt, Artificial Sequence
  Description of Artificial Sequence: Synthetic oligonucleotide
aauucaaucaccgaaucaa

SEQ ID NO: 2513536 - RNA, 19 nt, Artificial Sequence
  Description of Artificial Sequence: Synthetic oligonucleotide
auuagauaaacauaaccaa

SEQ ID NO: 2513537 - RNA, 19 nt, Artificial Sequence
  Description of Artificial Sequence: Synthetic oligonucleotide
uuuagaacccaacauuaga

SEQ ID NO: 2513538 - RNA, 19 nt, Artificial Sequence
  Description of Artificial Sequence: Synthetic oligonucleotide
aaguuuucagccaaucugg

SEQ ID NO: 2513539 - RNA, 19 nt, Artificial Sequence
  Description of Artificial Sequence: Synthetic oligonucleotide
uuuacauguggcuuuggag

SEQ ID NO: 2513540 - RNA, 19 nt, Artificial Sequence
  Description of Artificial Sequence: Synthetic oligonucleotide
aacuccucaugguacgacc

SEQ ID NO: 2513541 - RNA, 19 nt, Artificial Sequence
  Description of Artificial Sequence: Synthetic oligonucleotide
aacccaacauuagauaaac

SEQ ID NO: 2513542 - RNA, 19 nt, Artificial Sequence
  Description of Artificial Sequence: Synthetic oligonucleotide
aaucugggugccugggucc

SEQ ID NO: 2513543 - RNA, 19 nt, Artificial Sequence
  Description of Artificial Sequence: Synthetic oligonucleotide
uuagaacccaacauuagau

SEQ ID NO: 2513544 - RNA, 19 nt, Artificial Sequence
  Description of Artificial Sequence: Synthetic oligonucleotide
auaaccaagucuuuacaug

SEQ ID NO: 2513545 - RNA, 19 nt, Artificial Sequence
  Description of Artificial Sequence: Synthetic oligonucleotide
ucaaucaccgaaucaagcu

SEQ ID NO: 2513546 - RNA, 19 nt, Artificial Sequence
  Description of Artificial Sequence: Synthetic oligonucleotide
ucugaucuucggaucaggg

SEQ ID NO: 2513547 - RNA, 19 nt, Artificial Sequence
  Description of Artificial Sequence: Synthetic oligonucleotide
aggguugaacuccucaugg

SEQ ID NO: 2513548 - RNA, 19 nt, Artificial Sequence
  Description of Artificial Sequence: Synthetic oligonucleotide
uaguacuccacaagugggg

SEQ ID NO: 2513549 - RNA, 19 nt, Artificial Sequence
  Description of Artificial Sequence: Synthetic oligonucleotide
gaaccugaagcuaccaugg

SEQ ID NO: 2513550 - RNA, 19 nt, Artificial Sequence
  Description of Artificial Sequence: Synthetic oligonucleotide
aaucaccgaaucaagcuuc

SEQ ID NO: 2513551 - RNA, 19 nt, Artificial Sequence
  Description of Artificial Sequence: Synthetic oligonucleotide
aacauuagauaaacauaac

SEQ ID NO: 2513552 - RNA, 19 nt, Artificial Sequence
  Description of Artificial Sequence: Synthetic oligonucleotide
ucuagaagaaagccguuuc

SEQ ID NO: 2513553 - RNA, 19 nt, Artificial Sequence
  Description of Artificial Sequence: Synthetic oligonucleotide
aucaaccuuccagugaucc

SEQ ID NO: 2513554 - RNA, 19 nt, Artificial Sequence
  Description of Artificial Sequence: Synthetic oligonucleotide
uccaucguggccuucagcu

SEQ ID NO: 2513555 - RNA, 19 nt, Artificial Sequence
  Description of Artificial Sequence: Synthetic oligonucleotide
gaugcucgcaaacacaaca

SEQ ID NO: 2513556 - RNA, 19 nt, Artificial Sequence
  Description of Artificial Sequence: Synthetic oligonucleotide
gaaugcugaauucaaucac

SEQ ID NO: 2513557 - RNA, 19 nt, Artificial Sequence
  Description of Artificial Sequence: Synthetic oligonucleotide
ucgcaaacacaacaucagg

SEQ ID NO: 2513558 - RNA, 19 nt, Artificial Sequence
  Description of Artificial Sequence: Synthetic oligonucleotide
ucaucugaucuucggauca

SEQ ID NO: 2513559 - RNA, 19 nt, Artificial Sequence
  Description of Artificial Sequence: Synthetic oligonucleotide
gaaucaagcuucucuuucc

SEQ ID NO: 2513560 - RNA, 19 nt, Artificial Sequence
  Description of Artificial Sequence: Synthetic oligonucleotide
uugaacuccucaugguacg

SEQ ID NO: 2513561 - RNA, 19 nt, Artificial Sequence
  Description of Artificial Sequence: Synthetic oligonucleotide
ugaaucaaccuuccaguga

SEQ ID NO: 2513562 - RNA, 19 nt, Artificial Sequence
  Description of Artificial Sequence: Synthetic oligonucleotide
ugugguaggccuccaggcg

SEQ ID NO: 2513563 - RNA, 19 nt, Artificial Sequence
  Description of Artificial Sequence: Synthetic oligonucleotide
uggaaugcugaauucaauc

SEQ ID NO: 2513564 - RNA, 19 nt, Artificial Sequence
  Description of Artificial Sequence: Synthetic oligonucleotide
agaacccaacauuagauaa

SEQ ID NO: 2513565 - RNA, 19 nt, Artificial Sequence
  Description of Artificial Sequence: Synthetic oligonucleotide
ucugccaaagucucacucc

SEQ ID NO: 2513566 - RNA, 19 nt, Artificial Sequence
  Description of Artificial Sequence: Synthetic oligonucleotide
ucaucacucaccaguuucc

SEQ ID NO: 2513567 - RNA, 19 nt, Artificial Sequence
  Description of Artificial Sequence: Synthetic oligonucleotide
agccaucuagaagaaagcc

SEQ ID NO: 2513568 - RNA, 19 nt, Artificial Sequence
  Description of Artificial Sequence: Synthetic oligonucleotide
ucagcauguccccaguggc

SEQ ID NO: 2513569 - RNA, 19 nt, Artificial Sequence
  Description of Artificial Sequence: Synthetic oligonucleotide
ugaauucaaucaccgaauc

SEQ ID NO: 2513570 - RNA, 19 nt, Artificial Sequence
  Description of Artificial Sequence: Synthetic oligonucleotide
uuuggagaaggcugcuagg

SEQ ID NO: 2513571 - RNA, 19 nt, Artificial Sequence
  Description of Artificial Sequence: Synthetic oligonucleotide
cuuuagaacccaacauuag

SEQ ID NO: 2513572 - RNA, 19 nt, Artificial Sequence
  Description of Artificial Sequence: Synthetic oligonucleotide
uccgagggaagccaucuag

SEQ ID NO: 2513573 - RNA, 19 nt, Artificial Sequence
  Description of Artificial Sequence: Synthetic oligonucleotide
auggcucucagcauguccc

SEQ ID NO: 2513574 - RNA, 19 nt, Artificial Sequence
  Description of Artificial Sequence: Synthetic oligonucleotide
cuauuggggugaaucaacc

SEQ ID NO: 2513575 - RNA, 19 nt, Artificial Sequence
  Description of Artificial Sequence: Synthetic oligonucleotide
aaggccuucucauugucau

SEQ ID NO: 2513576 - RNA, 19 nt, Artificial Sequence
  Description of Artificial Sequence: Synthetic oligonucleotide
agagugaauuccccguuuc

SEQ ID NO: 2513577 - RNA, 19 nt, Artificial Sequence
  Description of Artificial Sequence: Synthetic oligonucleotide
cucgcaaacacaacaucag

SEQ ID NO: 2513578 - RNA, 19 nt, Artificial Sequence
  Description of Artificial Sequence: Synthetic oligonucleotide
uccuguaguacuccacaag

SEQ ID NO: 2513579 - RNA, 19 nt, Artificial Sequence
  Description of Artificial Sequence: Synthetic oligonucleotide
cugaucuucggaucagggg

SEQ ID NO: 2513580 - RNA, 19 nt, Artificial Sequence
  Description of Artificial Sequence: Synthetic oligonucleotide
caaagucucacuccgccag

SEQ ID NO: 2513581 - RNA, 19 nt, Artificial Sequence
  Description of Artificial Sequence: Synthetic oligonucleotide
ugucaucugaucuucggau

SEQ ID NO: 2513582 - RNA, 19 nt, Artificial Sequence
  Description of Artificial Sequence: Synthetic oligonucleotide
acuauuggggugaaucaac

SEQ ID NO: 2513583 - RNA, 19 nt, Artificial Sequence
  Description of Artificial Sequence: Synthetic oligonucleotide
guaguacuccacaaguggg

SEQ ID NO: 2513584 - RNA, 19 nt, Artificial Sequence
  Description of Artificial Sequence: Synthetic oligonucleotide
uugucaucugaucuucgga

SEQ ID NO: 2513585 - RNA, 19 nt, Artificial Sequence
  Description of Artificial Sequence: Synthetic oligonucleotide
acaacaucaggggucuggc

SEQ ID NO: 2513586 - RNA, 19 nt, Artificial Sequence
  Description of Artificial Sequence: Synthetic oligonucleotide
agccguuucugcaugaagg

SEQ ID NO: 2513587 - RNA, 19 nt, Artificial Sequence
  Description of Artificial Sequence: Synthetic oligonucleotide
uccacgaccauuucaucac

SEQ ID NO: 2513588 - RNA, 19 nt, Artificial Sequence
  Description of Artificial Sequence: Synthetic oligonucleotide
uccccaguggccaaauggc

SEQ ID NO: 2513589 - RNA, 19 nt, Artificial Sequence
  Description of Artificial Sequence: Synthetic oligonucleotide
acauaaccaagucuuuaca

SEQ ID NO: 2513590 - RNA, 19 nt, Artificial Sequence
  Description of Artificial Sequence: Synthetic oligonucleotide
uuggggugaaucaaccuuc

SEQ ID NO: 2513591 - RNA, 19 nt, Artificial Sequence
  Description of Artificial Sequence: Synthetic oligonucleotide
aauuccccguuuccuguag

SEQ ID NO: 2513592 - RNA, 19 nt, Artificial Sequence
  Description of Artificial Sequence: Synthetic oligonucleotide
cugccaaagucucacuccg

SEQ ID NO: 2513593 - RNA, 19 nt, Artificial Sequence
  Description of Artificial Sequence: Synthetic oligonucleotide
augucugccaaagucucac

SEQ ID NO: 2513594 - RNA, 19 nt, Artificial Sequence
  Description of Artificial Sequence: Synthetic oligonucleotide
aagccguuucugcaugaag

SEQ ID NO: 2513595 - RNA, 19 nt, Artificial Sequence
  Description of Artificial Sequence: Synthetic oligonucleotide
aggggucuggcaugcaucg

SEQ ID NO: 2513596 - RNA, 19 nt, Artificial Sequence
  Description of Artificial Sequence: Synthetic oligonucleotide
cuaggaugcucgcaaacac

SEQ ID NO: 2513597 - RNA, 19 nt, Artificial Sequence
  Description of Artificial Sequence: Synthetic oligonucleotide
auacccuuccgacucucgg

SEQ ID NO: 2513598 - RNA, 19 nt, Artificial Sequence
  Description of Artificial Sequence: Synthetic oligonucleotide
gggugaaucaaccuuccag

SEQ ID NO: 2513599 - RNA, 19 nt, Artificial Sequence
  Description of Artificial Sequence: Synthetic oligonucleotide
gauggcagagugaauuccc

SEQ ID NO: 2513600 - RNA, 19 nt, Artificial Sequence
  Description of Artificial Sequence: Synthetic oligonucleotide
uggcaugcaucgauggcag

SEQ ID NO: 2513601 - RNA, 19 nt, Artificial Sequence
  Description of Artificial Sequence: Synthetic oligonucleotide
ugauccuccggaucagcag

SEQ ID NO: 2513602 - RNA, 19 nt, Artificial Sequence
  Description of Artificial Sequence: Synthetic oligonucleotide
uacccuuccgacucucggg

SEQ ID NO: 2513603 - RNA, 19 nt, Artificial Sequence
  Description of Artificial Sequence: Synthetic oligonucleotide
uggcagagugaauuccccg

SEQ ID NO: 2513604 - RNA, 19 nt, Artificial Sequence
  Description of Artificial Sequence: Synthetic oligonucleotide
uaggaugcucgcaaacaca

SEQ ID NO: 2513605 - RNA, 19 nt, Artificial Sequence
  Description of Artificial Sequence: Synthetic oligonucleotide
agcauuucagccugccuca

SEQ ID NO: 2513606 - RNA, 19 nt, Artificial Sequence
  Description of Artificial Sequence: Synthetic oligonucleotide
uaaacauaaccaagucuuu

SEQ ID NO: 2513607 - RNA, 19 nt, Artificial Sequence
  Description of Artificial Sequence: Synthetic oligonucleotide
augcugaauucaaucaccg

SEQ ID NO: 2513608 - RNA, 19 nt, Artificial Sequence
  Description of Artificial Sequence: Synthetic oligonucleotide
uggcuuuggagaaggcugc

SEQ ID NO: 2513609 - RNA, 19 nt, Artificial Sequence
  Description of Artificial Sequence: Synthetic oligonucleotide
uacauguggcuuuggagaa

SEQ ID NO: 2513610 - RNA, 19 nt, Artificial Sequence
  Description of Artificial Sequence: Synthetic oligonucleotide
gugguaggccuccaggcgg

SEQ ID NO: 2513611 - RNA, 19 nt, Artificial Sequence
  Description of Artificial Sequence: Synthetic oligonucleotide
agaaagccguuucugcaug

SEQ ID NO: 2513612 - RNA, 19 nt, Artificial Sequence
  Description of Artificial Sequence: Synthetic oligonucleotide
uauuggggugaaucaaccu

SEQ ID NO: 2513613 - RNA, 19 nt, Artificial Sequence
  Description of Artificial Sequence: Synthetic oligonucleotide
gaaucaaccuuccagugau

SEQ ID NO: 2513614 - RNA, 19 nt, Artificial Sequence
  Description of Artificial Sequence: Synthetic oligonucleotide
guggcuuuggagaaggcug

SEQ ID NO: 2513615 - RNA, 19 nt, Artificial Sequence
  Description of Artificial Sequence: Synthetic oligonucleotide
gugaaucaaccuuccagug

SEQ ID NO: 2513616 - RNA, 19 nt, Artificial Sequence
  Description of Artificial Sequence: Synthetic oligonucleotide
acgaccggccacuauuggg

SEQ ID NO: 2513617 - RNA, 19 nt, Artificial Sequence
  Description of Artificial Sequence: Synthetic oligonucleotide
uucucauugucaucugauc

SEQ ID NO: 2513618 - RNA, 19 nt, Artificial Sequence
  Description of Artificial Sequence: Synthetic oligonucleotide
cuguaguacuccacaagug

SEQ ID NO: 2513619 - RNA, 19 nt, Artificial Sequence
  Description of Artificial Sequence: Synthetic oligonucleotide
gagugaauuccccguuucc

SEQ ID NO: 2513620 - RNA, 19 nt, Artificial Sequence
  Description of Artificial Sequence: Synthetic oligonucleotide
guggccaaauggcagacac

SEQ ID NO: 2513621 - RNA, 19 nt, Artificial Sequence
  Description of Artificial Sequence: Synthetic oligonucleotide
gugaauuccccguuuccug

SEQ ID NO: 2513622 - RNA, 19 nt, Artificial Sequence
  Description of Artificial Sequence: Synthetic oligonucleotide
guugaacuccucaugguac

SEQ ID NO: 2513623 - RNA, 19 nt, Artificial Sequence
  Description of Artificial Sequence: Synthetic oligonucleotide
cugccucacaguccgaggg

SEQ ID NO: 2513624 - RNA, 19 nt, Artificial Sequence
  Description of Artificial Sequence: Synthetic oligonucleotide
aagugggguggucugcgug

SEQ ID NO: 2513625 - RNA, 19 nt, Artificial Sequence
  Description of Artificial Sequence: Synthetic oligonucleotide
gucuggcaugcaucgaugg

SEQ ID NO: 2513626 - RNA, 19 nt, Artificial Sequence
  Description of Artificial Sequence: Synthetic oligonucleotide
gcugaauucaaucaccgaa

SEQ ID NO: 2513627 - RNA, 19 nt, Artificial Sequence
  Description of Artificial Sequence: Synthetic oligonucleotide
auucaaucaccgaaucaag

SEQ ID NO: 2513628 - RNA, 19 nt, Artificial Sequence
  Description of Artificial Sequence: Synthetic oligonucleotide
agugaauuccccguuuccu

SEQ ID NO: 2513629 - RNA, 19 nt, Artificial Sequence
  Description of Artificial Sequence: Synthetic oligonucleotide
agucuuuacauguggcuuu

SEQ ID NO: 2513630 - RNA, 19 nt, Artificial Sequence
  Description of Artificial Sequence: Synthetic oligonucleotide
ggccaaauggcagacacag

SEQ ID NO: 2513631 - RNA, 19 nt, Artificial Sequence
  Description of Artificial Sequence: Synthetic oligonucleotide
cucagaaccugaagcuacc

SEQ ID NO: 2513632 - RNA, 19 nt, Artificial Sequence
  Description of Artificial Sequence: Synthetic oligonucleotide
uggggugaaucaaccuucc

SEQ ID NO: 2513633 - RNA, 19 nt, Artificial Sequence
  Description of Artificial Sequence: Synthetic oligonucleotide
accgaaucaagcuucucuu

SEQ ID NO: 2513634 - RNA, 19 nt, Artificial Sequence
  Description of Artificial Sequence: Synthetic oligonucleotide
cauggcucucagcaugucc

SEQ ID NO: 2513635 - RNA, 19 nt, Artificial Sequence
  Description of Artificial Sequence: Synthetic oligonucleotide
aucgauggcagagugaauu

SEQ ID NO: 2513636 - RNA, 19 nt, Artificial Sequence
  Description of Artificial Sequence: Synthetic oligonucleotide
ugcuaggaugcucgcaaac

SEQ ID NO: 2513637 - RNA, 19 nt, Artificial Sequence
  Description of Artificial Sequence: Synthetic oligonucleotide
ugcaugaaggacucuccaa

SEQ ID NO: 2513638 - RNA, 19 nt, Artificial Sequence
  Description of Artificial Sequence: Synthetic oligonucleotide
auggcagagugaauucccc

SEQ ID NO: 2513639 - RNA, 19 nt, Artificial Sequence
  Description of Artificial Sequence: Synthetic oligonucleotide
acacagaaguuuucagcca

SEQ ID NO: 2513640 - RNA, 19 nt, Artificial Sequence
  Description of Artificial Sequence: Synthetic oligonucleotide
aguuuucagccaaucuggg

SEQ ID NO: 2513641 - RNA, 19 nt, Artificial Sequence
  Description of Artificial Sequence: Synthetic oligonucleotide
gaagcuaccauggcucuca

SEQ ID NO: 2513642 - RNA, 19 nt, Artificial Sequence
  Description of Artificial Sequence: Synthetic oligonucleotide
acgaccauuucaucacuca

SEQ ID NO: 2513643 - RNA, 19 nt, Artificial Sequence
  Description of Artificial Sequence: Synthetic oligonucleotide
uacgaccggccacuauugg

SEQ ID NO: 2513644 - RNA, 19 nt, Artificial Sequence
  Description of Artificial Sequence: Synthetic oligonucleotide
gaucaggggcucuccagug

SEQ ID NO: 2513645 - RNA, 19 nt, Artificial Sequence
  Description of Artificial Sequence: Synthetic oligonucleotide
uccgccagccgccagcaca

SEQ ID NO: 2513646 - RNA, 19 nt, Artificial Sequence
  Description of Artificial Sequence: Synthetic oligonucleotide
ucaugguacgaccggccac

SEQ ID NO: 2513647 - RNA, 19 nt, Artificial Sequence
  Description of Artificial Sequence: Synthetic oligonucleotide
gugugguaggccuccaggc

SEQ ID NO: 2513648 - RNA, 19 nt, Artificial Sequence
  Description of Artificial Sequence: Synthetic oligonucleotide
auccaucguggccuucagc

SEQ ID NO: 2513649 - RNA, 19 nt, Artificial Sequence
  Description of Artificial Sequence: Synthetic oligonucleotide
gccaucuagaagaaagccg

SEQ ID NO: 2513650 - RNA, 19 nt, Artificial Sequence
  Description of Artificial Sequence: Synthetic oligonucleotide
ucggguucgggagccagcg

SEQ ID NO: 2513651 - RNA, 19 nt, Artificial Sequence
  Description of Artificial Sequence: Synthetic oligonucleotide
uccacaagugggguggucu

SEQ ID NO: 2513652 - RNA, 19 nt, Artificial Sequence
  Description of Artificial Sequence: Synthetic oligonucleotide
acaucaggggucuggcaug

SEQ ID NO: 2513653 - RNA, 19 nt, Artificial Sequence
  Description of Artificial Sequence: Synthetic oligonucleotide
ugcucgcaaacacaacauc

SEQ ID NO: 2513654 - RNA, 19 nt, Artificial Sequence
  Description of Artificial Sequence: Synthetic oligonucleotide
augcaucgauggcagagug

SEQ ID NO: 2513655 - RNA, 19 nt, Artificial Sequence
  Description of Artificial Sequence: Synthetic oligonucleotide
ucaaccuuccagugauccu

SEQ ID NO: 2513656 - RNA, 19 nt, Artificial Sequence
  Description of Artificial Sequence: Synthetic oligonucleotide
cucacaguccgagggaagc

SEQ ID NO: 2513657 - RNA, 19 nt, Artificial Sequence
  Description of Artificial Sequence: Synthetic oligonucleotide
cuuuacauguggcuuugga

SEQ ID NO: 2513658 - RNA, 19 nt, Artificial Sequence
  Description of Artificial Sequence: Synthetic oligonucleotide
ugcaucgauggcagaguga

SEQ ID NO: 2513659 - RNA, 19 nt, Artificial Sequence
  Description of Artificial Sequence: Synthetic oligonucleotide
aaccaagucuuuacaugug

SEQ ID NO: 2513660 - RNA, 19 nt, Artificial Sequence
  Description of Artificial Sequence: Synthetic oligonucleotide
ucuccaaauucuucucaau

SEQ ID NO: 2513661 - RNA, 19 nt, Artificial Sequence
  Description of Artificial Sequence: Synthetic oligonucleotide
acuccucaugguacgaccg

SEQ ID NO: 2513662 - RNA, 19 nt, Artificial Sequence
  Description of Artificial Sequence: Synthetic oligonucleotide
uccagugauccuccggauc

SEQ ID NO: 2513663 - RNA, 19 nt, Artificial Sequence
  Description of Artificial Sequence: Synthetic oligonucleotide
ucgauggcagagugaauuc

SEQ ID NO: 2513664 - RNA, 19 nt, Artificial Sequence
  Description of Artificial Sequence: Synthetic oligonucleotide
aggacucuccaaauucuuc

SEQ ID NO: 2513665 - RNA, 19 nt, Artificial Sequence
  Description of Artificial Sequence: Synthetic oligonucleotide
cuccacgaccauuucauca

SEQ ID NO: 2513666 - RNA, 19 nt, Artificial Sequence
  Description of Artificial Sequence: Synthetic oligonucleotide
gucaucugaucuucggauc

SEQ ID NO: 2513667 - RNA, 19 nt, Artificial Sequence
  Description of Artificial Sequence: Synthetic oligonucleotide
uggcagacacagaaguuuu

SEQ ID NO: 2513668 - RNA, 19 nt, Artificial Sequence
  Description of Artificial Sequence: Synthetic oligonucleotide
ggugaaucaaccuuccagu

SEQ ID NO: 2513669 - RNA, 19 nt, Artificial Sequence
  Description of Artificial Sequence: Synthetic oligonucleotide
acucucggguucgggagcc

SEQ ID NO: 2513670 - RNA, 19 nt, Artificial Sequence
  Description of Artificial Sequence: Synthetic oligonucleotide
uuccuguaguacuccacaa

SEQ ID NO: 2513671 - RNA, 19 nt, Artificial Sequence
  Description of Artificial Sequence: Synthetic oligonucleotide
ucaggggcucuccagugau

SEQ ID NO: 2513672 - RNA, 19 nt, Artificial Sequence
  Description of Artificial Sequence: Synthetic oligonucleotide
gauacccuuccgacucucg

SEQ ID NO: 2513673 - RNA, 19 nt, Artificial Sequence
  Description of Artificial Sequence: Synthetic oligonucleotide
aucugaucuucggaucagg

SEQ ID NO: 2513674 - RNA, 19 nt, Artificial Sequence
  Description of Artificial Sequence: Synthetic oligonucleotide
agucucacuccgccagccg

SEQ ID NO: 2513675 - RNA, 19 nt, Artificial Sequence
  Description of Artificial Sequence: Synthetic oligonucleotide
aaucaaccuuccagugauc

SEQ ID NO: 2513676 - RNA, 19 nt, Artificial Sequence
  Description of Artificial Sequence: Synthetic oligonucleotide
ucuuuacauguggcuuugg

SEQ ID NO: 2513677 - RNA, 19 nt, Artificial Sequence
  Description of Artificial Sequence: Synthetic oligonucleotide
gagucuggaaugcugaauu

SEQ ID NO: 2513678 - RNA, 19 nt, Artificial Sequence
  Description of Artificial Sequence: Synthetic oligonucleotide
aauggcagacacagaaguu

SEQ ID NO: 2513679 - RNA, 19 nt, Artificial Sequence
  Description of Artificial Sequence: Synthetic oligonucleotide
caggcggaucuucaaggcc

SEQ ID NO: 2513680 - RNA, 19 nt, Artificial Sequence
  Description of Artificial Sequence: Synthetic oligonucleotide
ccaagucuuuacauguggc

SEQ ID NO: 2513681 - RNA, 19 nt, Artificial Sequence
  Description of Artificial Sequence: Synthetic oligonucleotide
gucucacuccgccagccgc

SEQ ID NO: 2513682 - RNA, 19 nt, Artificial Sequence
  Description of Artificial Sequence: Synthetic oligonucleotide
cuccucaugguacgaccgg

SEQ ID NO: 2513683 - RNA, 19 nt, Artificial Sequence
  Description of Artificial Sequence: Synthetic oligonucleotide
accgcccggauacccuucc

SEQ ID NO: 2513684 - RNA, 19 nt, Artificial Sequence
  Description of Artificial Sequence: Synthetic oligonucleotide
uccucaugguacgaccggc

SEQ ID NO: 2513685 - RNA, 19 nt, Artificial Sequence
  Description of Artificial Sequence: Synthetic oligonucleotide
ugccaaagucucacuccgc

SEQ ID NO: 2513686 - RNA, 19 nt, Artificial Sequence
  Description of Artificial Sequence: Synthetic oligonucleotide
gccaaagucucacuccgcc

SEQ ID NO: 2513687 - RNA, 19 nt, Artificial Sequence
  Description of Artificial Sequence: Synthetic oligonucleotide
gacucucggguucgggagc

SEQ ID NO: 2513688 - RNA, 19 nt, Artificial Sequence
  Description of Artificial Sequence: Synthetic oligonucleotide
uggccaaauggcagacaca

SEQ ID NO: 2513689 - RNA, 19 nt, Artificial Sequence
  Description of Artificial Sequence: Synthetic oligonucleotide
acccuuccgacucucgggu

SEQ ID NO: 2513690 - RNA, 19 nt, Artificial Sequence
  Description of Artificial Sequence: Synthetic oligonucleotide
gaacccaacauuagauaaa

SEQ ID NO: 2513691 - RNA, 19 nt, Artificial Sequence
  Description of Artificial Sequence: Synthetic oligonucleotide
aggaugcucgcaaacacaa

SEQ ID NO: 2513692 - RNA, 19 nt, Artificial Sequence
  Description of Artificial Sequence: Synthetic oligonucleotide
ggguucgggagccagcgag

SEQ ID NO: 2513693 - RNA, 19 nt, Artificial Sequence
  Description of Artificial Sequence: Synthetic oligonucleotide
gaaagccguuucugcauga

SEQ ID NO: 2513694 - RNA, 19 nt, Artificial Sequence
  Description of Artificial Sequence: Synthetic oligonucleotide
ucugcgugugguaggccuc

SEQ ID NO: 2513695 - RNA, 19 nt, Artificial Sequence
  Description of Artificial Sequence: Synthetic oligonucleotide
aggcggaucuucaaggccu

SEQ ID NO: 2513696 - RNA, 19 nt, Artificial Sequence
  Description of Artificial Sequence: Synthetic oligonucleotide
ugaacuccucaugguacga

SEQ ID NO: 2513697 - RNA, 19 nt, Artificial Sequence
  Description of Artificial Sequence: Synthetic oligonucleotide
cuggcaugcaucgauggca

SEQ ID NO: 2513698 - RNA, 19 nt, Artificial Sequence
  Description of Artificial Sequence: Synthetic oligonucleotide
cugaauucaaucaccgaau

SEQ ID NO: 2513699 - RNA, 19 nt, Artificial Sequence
  Description of Artificial Sequence: Synthetic oligonucleotide
agcuccacgaccauuucau

SEQ ID NO: 2513700 - RNA, 19 nt, Artificial Sequence
  Description of Artificial Sequence: Synthetic oligonucleotide
ugguaggccuccaggcgga

SEQ ID NO: 2513701 - RNA, 19 nt, Artificial Sequence
  Description of Artificial Sequence: Synthetic oligonucleotide
ccaacauuagauaaacaua

SEQ ID NO: 2513702 - RNA, 19 nt, Artificial Sequence
  Description of Artificial Sequence: Synthetic oligonucleotide
guacuccacaaguggggug

SEQ ID NO: 2513703 - RNA, 19 nt, Artificial Sequence
  Description of Artificial Sequence: Synthetic oligonucleotide
ucggaucaggggcucucca

SEQ ID NO: 2513704 - RNA, 19 nt, Artificial Sequence
  Description of Artificial Sequence: Synthetic oligonucleotide
aguccgagggaagccaucu

SEQ ID NO: 2513705 - RNA, 19 nt, Artificial Sequence
  Description of Artificial Sequence: Synthetic oligonucleotide
cagaaguuuucagccaauc

SEQ ID NO: 2513706 - RNA, 19 nt, Artificial Sequence
  Description of Artificial Sequence: Synthetic oligonucleotide
aaagccguuucugcaugaa

SEQ ID NO: 2513707 - RNA, 19 nt, Artificial Sequence
  Description of Artificial Sequence: Synthetic oligonucleotide
cacgaccauuucaucacuc

SEQ ID NO: 2513708 - RNA, 19 nt, Artificial Sequence
  Description of Artificial Sequence: Synthetic oligonucleotide
uccccagcucagaaccuga

SEQ ID NO: 2513709 - RNA, 19 nt, Artificial Sequence
  Description of Artificial Sequence: Synthetic oligonucleotide
gcaugcaucgauggcagag

SEQ ID NO: 2513710 - RNA, 19 nt, Artificial Sequence
  Description of Artificial Sequence: Synthetic oligonucleotide
uggucugcgugugguaggc

SEQ ID NO: 2513711 - RNA, 19 nt, Artificial Sequence
  Description of Artificial Sequence: Synthetic oligonucleotide
gccacuauuggggugaauc

SEQ ID NO: 2513712 - RNA, 19 nt, Artificial Sequence
  Description of Artificial Sequence: Synthetic oligonucleotide
aucaggggcucuccaguga

SEQ ID NO: 2513713 - RNA, 19 nt, Artificial Sequence
  Description of Artificial Sequence: Synthetic oligonucleotide
acucaccaguuucccagca

SEQ ID NO: 2513714 - RNA, 19 nt, Artificial Sequence
  Description of Artificial Sequence: Synthetic oligonucleotide
gagcugggagccaugucug

SEQ ID NO: 2513715 - RNA, 19 nt, Artificial Sequence
  Description of Artificial Sequence: Synthetic oligonucleotide
aggcugcuaggaugcucgc

SEQ ID NO: 2513716 - RNA, 19 nt, Artificial Sequence
  Description of Artificial Sequence: Synthetic oligonucleotide
ugucauccuucaugggcuc

SEQ ID NO: 2513717 - RNA, 19 nt, Artificial Sequence
  Description of Artificial Sequence: Synthetic oligonucleotide
ugggguggucugcgugugg

SEQ ID NO: 2513718 - RNA, 19 nt, Artificial Sequence
  Description of Artificial Sequence: Synthetic oligonucleotide
caggggucuggcaugcauc

SEQ ID NO: 2513719 - RNA, 19 nt, Artificial Sequence
  Description of Artificial Sequence: Synthetic oligonucleotide
cuagaagaaagccguuucu

SEQ ID NO: 2513720 - RNA, 19 nt, Artificial Sequence
  Description of Artificial Sequence: Synthetic oligonucleotide
ccuuuagaacccaacauua

SEQ ID NO: 2513721 - RNA, 19 nt, Artificial Sequence
  Description of Artificial Sequence: Synthetic oligonucleotide
caucugaucuucggaucag

SEQ ID NO: 2513722 - RNA, 19 nt, Artificial Sequence
  Description of Artificial Sequence: Synthetic oligonucleotide
gcucgcaaacacaacauca

SEQ ID NO: 2513723 - RNA, 19 nt, Artificial Sequence
  Description of Artificial Sequence: Synthetic oligonucleotide
cccaacauuagauaaacau

SEQ ID NO: 2513724 - RNA, 19 nt, Artificial Sequence
  Description of Artificial Sequence: Synthetic oligonucleotide
uucggaucaggggcucucc

SEQ ID NO: 2513725 - RNA, 19 nt, Artificial Sequence
  Description of Artificial Sequence: Synthetic oligonucleotide
guacgaccggccacuauug

SEQ ID NO: 2513726 - RNA, 19 nt, Artificial Sequence
  Description of Artificial Sequence: Synthetic oligonucleotide
uccccguuuccuguaguac

SEQ ID NO: 2513727 - RNA, 19 nt, Artificial Sequence
  Description of Artificial Sequence: Synthetic oligonucleotide
uuccccguuuccuguagua

SEQ ID NO: 2513728 - RNA, 19 nt, Artificial Sequence
  Description of Artificial Sequence: Synthetic oligonucleotide
caucaggggucuggcaugc

SEQ ID NO: 2513729 - RNA, 19 nt, Artificial Sequence
  Description of Artificial Sequence: Synthetic oligonucleotide
ccaucuagaagaaagccgu

SEQ ID NO: 2513730 - RNA, 19 nt, Artificial Sequence
  Description of Artificial Sequence: Synthetic oligonucleotide
cgaccggccacuauugggg

SEQ ID NO: 2513731 - RNA, 19 nt, Artificial Sequence
  Description of Artificial Sequence: Synthetic oligonucleotide
ggacucuccaaauucuucu

SEQ ID NO: 2513732 - RNA, 19 nt, Artificial Sequence
  Description of Artificial Sequence: Synthetic oligonucleotide
accuuccagugauccuccg

SEQ ID NO: 2513733 - RNA, 19 nt, Artificial Sequence
  Description of Artificial Sequence: Synthetic oligonucleotide
uccgacucucggguucggg

SEQ ID NO: 2513734 - RNA, 19 nt, Artificial Sequence
  Description of Artificial Sequence: Synthetic oligonucleotide
gaaggcugcuaggaugcuc

SEQ ID NO: 2513735 - RNA, 19 nt, Artificial Sequence
  Description of Artificial Sequence: Synthetic oligonucleotide
cccaguggccaaauggcag

SEQ ID NO: 2513736 - RNA, 19 nt, Artificial Sequence
  Description of Artificial Sequence: Synthetic oligonucleotide
uuccagugauccuccggau

SEQ ID NO: 2513737 - RNA, 19 nt, Artificial Sequence
  Description of Artificial Sequence: Synthetic oligonucleotide
auuccccguuuccuguagu

SEQ ID NO: 2513738 - RNA, 19 nt, Artificial Sequence
  Description of Artificial Sequence: Synthetic oligonucleotide
cucaugguacgaccggcca

SEQ ID NO: 2513739 - RNA, 19 nt, Artificial Sequence
  Description of Artificial Sequence: Synthetic oligonucleotide
caccgaaucaagcuucucu

SEQ ID NO: 2513740 - RNA, 19 nt, Artificial Sequence
  Description of Artificial Sequence: Synthetic oligonucleotide
cucggguucgggagccagc

SEQ ID NO: 2513741 - RNA, 19 nt, Artificial Sequence
  Description of Artificial Sequence: Synthetic oligonucleotide
cacaagugggguggucugc

SEQ ID NO: 2513742 - RNA, 19 nt, Artificial Sequence
  Description of Artificial Sequence: Synthetic oligonucleotide
gcucagaaccugaagcuac

SEQ ID NO: 2513743 - RNA, 19 nt, Artificial Sequence
  Description of Artificial Sequence: Synthetic oligonucleotide
gcaucgauggcagagugaa

SEQ ID NO: 2513744 - RNA, 19 nt, Artificial Sequence
  Description of Artificial Sequence: Synthetic oligonucleotide
aucuucggaucaggggcuc

SEQ ID NO: 2513745 - RNA, 19 nt, Artificial Sequence
  Description of Artificial Sequence: Synthetic oligonucleotide
ccagugauccuccggauca

SEQ ID NO: 2513746 - RNA, 19 nt, Artificial Sequence
  Description of Artificial Sequence: Synthetic oligonucleotide
augcucgcaaacacaacau

SEQ ID NO: 2513747 - RNA, 19 nt, Artificial Sequence
  Description of Artificial Sequence: Synthetic oligonucleotide
ccggauacccuuccgacuc

SEQ ID NO: 2513748 - RNA, 19 nt, Artificial Sequence
  Description of Artificial Sequence: Synthetic oligonucleotide
ugaagcuaccauggcucuc

SEQ ID NO: 2513749 - RNA, 19 nt, Artificial Sequence
  Description of Artificial Sequence: Synthetic oligonucleotide
gaauuccccguuuccugua

SEQ ID NO: 2513750 - RNA, 19 nt, Artificial Sequence
  Description of Artificial Sequence: Synthetic oligonucleotide
cgaaucaagcuucucuuuc

SEQ ID NO: 2513751 - RNA, 19 nt, Artificial Sequence
  Description of Artificial Sequence: Synthetic oligonucleotide
aucaccgaaucaagcuucu

SEQ ID NO: 2513752 - RNA, 19 nt, Artificial Sequence
  Description of Artificial Sequence: Synthetic oligonucleotide
ggugccuggguccccuugc

SEQ ID NO: 2513753 - RNA, 19 nt, Artificial Sequence
  Description of Artificial Sequence: Synthetic oligonucleotide
cacuauuggggugaaucaa

SEQ ID NO: 2513754 - RNA, 19 nt, Artificial Sequence
  Description of Artificial Sequence: Synthetic oligonucleotide
gcuaggaugcucgcaaaca

SEQ ID NO: 2513755 - RNA, 19 nt, Artificial Sequence
  Description of Artificial Sequence: Synthetic oligonucleotide
ccucaugguacgaccggcc

SEQ ID NO: 2513756 - RNA, 19 nt, Artificial Sequence
  Description of Artificial Sequence: Synthetic oligonucleotide
ggaucagcagggagucugg

SEQ ID NO: 2513757 - RNA, 19 nt, Artificial Sequence
  Description of Artificial Sequence: Synthetic oligonucleotide
cgugugguaggccuccagg

SEQ ID NO: 2513758 - RNA, 19 nt, Artificial Sequence
  Description of Artificial Sequence: Synthetic oligonucleotide
ccuuccagugauccuccgg

SEQ ID NO: 2513759 - RNA, 19 nt, Artificial Sequence
  Description of Artificial Sequence: Synthetic oligonucleotide
gucugcgugugguaggccu

SEQ ID NO: 2513760 - RNA, 19 nt, Artificial Sequence
  Description of Artificial Sequence: Synthetic oligonucleotide
gaucuucggaucaggggcu

SEQ ID NO: 2513761 - RNA, 19 nt, Artificial Sequence
  Description of Artificial Sequence: Synthetic oligonucleotide
caaucaccgaaucaagcuu

SEQ ID NO: 2513762 - RNA, 19 nt, Artificial Sequence
  Description of Artificial Sequence: Synthetic oligonucleotide
cugcgugugguaggccucc

SEQ ID NO: 2513763 - RNA, 19 nt, Artificial Sequence
  Description of Artificial Sequence: Synthetic oligonucleotide
cuccggaucagcagggagu

SEQ ID NO: 2513764 - RNA, 19 nt, Artificial Sequence
  Description of Artificial Sequence: Synthetic oligonucleotide
ucuucggaucaggggcucu

SEQ ID NO: 2513765 - RNA, 19 nt, Artificial Sequence
  Description of Artificial Sequence: Synthetic oligonucleotide
ccacuauuggggugaauca

SEQ ID NO: 2513766 - RNA, 19 nt, Artificial Sequence
  Description of Artificial Sequence: Synthetic oligonucleotide
ccuguaguacuccacaagu

SEQ ID NO: 2513767 - RNA, 19 nt, Artificial Sequence
  Description of Artificial Sequence: Synthetic oligonucleotide
agcgagcugggagccaugu

SEQ ID NO: 2513768 - RNA, 19 nt, Artificial Sequence
  Description of Artificial Sequence: Synthetic oligonucleotide
ggcagagugaauuccccgu

SEQ ID NO: 2513769 - RNA, 19 nt, Artificial Sequence
  Description of Artificial Sequence: Synthetic oligonucleotide
caguggccaaauggcagac

SEQ ID NO: 2513770 - RNA, 19 nt, Artificial Sequence
  Description of Artificial Sequence: Synthetic oligonucleotide
acccaacauuagauaaaca

SEQ ID NO: 2513771 - RNA, 19 nt, Artificial Sequence
  Description of Artificial Sequence: Synthetic oligonucleotide
ccagccgccagcacacccc

SEQ ID NO: 2513772 - RNA, 19 nt, Artificial Sequence
  Description of Artificial Sequence: Synthetic oligonucleotide
cacaguccgagggaagcca

SEQ ID NO: 2513773 - RNA, 19 nt, Artificial Sequence
  Description of Artificial Sequence: Synthetic oligonucleotide
ugguacgaccggccacuau

SEQ ID NO: 2513774 - RNA, 19 nt, Artificial Sequence
  Description of Artificial Sequence: Synthetic oligonucleotide
gguacgaccggccacuauu

SEQ ID NO: 2513775 - RNA, 19 nt, Artificial Sequence
  Description of Artificial Sequence: Synthetic oligonucleotide
ccugccucacaguccgagg

SEQ ID NO: 2513776 - RNA, 19 nt, Artificial Sequence
  Description of Artificial Sequence: Synthetic oligonucleotide
aguggccaaauggcagaca

SEQ ID NO: 2513777 - RNA, 19 nt, Artificial Sequence
  Description of Artificial Sequence: Synthetic oligonucleotide
cccguuuccuguaguacuc

SEQ ID NO: 2513778 - RNA, 19 nt, Artificial Sequence
  Description of Artificial Sequence: Synthetic oligonucleotide
cagugauccuccggaucag

SEQ ID NO: 2513779 - RNA, 19 nt, Artificial Sequence
  Description of Artificial Sequence: Synthetic oligonucleotide
ucaccgaaucaagcuucuc

SEQ ID NO: 2513780 - RNA, 19 nt, Artificial Sequence
  Description of Artificial Sequence: Synthetic oligonucleotide
caugguacgaccggccacu

SEQ ID NO: 2513781 - RNA, 19 nt, Artificial Sequence
  Description of Artificial Sequence: Synthetic oligonucleotide
caguccgagggaagccauc

SEQ ID NO: 2513782 - RNA, 19 nt, Artificial Sequence
  Description of Artificial Sequence: Synthetic oligonucleotide
gcugggagccaugucugcc

SEQ ID NO: 2513783 - RNA, 19 nt, Artificial Sequence
  Description of Artificial Sequence: Synthetic oligonucleotide
gcccggauacccuuccgac

SEQ ID NO: 2513784 - RNA, 19 nt, Artificial Sequence
  Description of Artificial Sequence: Synthetic oligonucleotide
cugaagcuaccauggcucu

SEQ ID NO: 2513785 - RNA, 19 nt, Artificial Sequence
  Description of Artificial Sequence: Synthetic oligonucleotide
cgacucucggguucgggag

SEQ ID NO: 2513786 - RNA, 19 nt, Artificial Sequence
  Description of Artificial Sequence: Synthetic oligonucleotide
ccauuucaucacucaccag

SEQ ID NO: 2513787 - RNA, 19 nt, Artificial Sequence
  Description of Artificial Sequence: Synthetic oligonucleotide
ccuuccgacucucggguuc

SEQ ID NO: 2513788 - RNA, 19 nt, Artificial Sequence
  Description of Artificial Sequence: Synthetic oligonucleotide
gguucgggagccagcgagc

SEQ ID NO: 2513789 - RNA, 19 nt, Artificial Sequence
  Description of Artificial Sequence: Synthetic oligonucleotide
ggaucaggggcucuccagu

SEQ ID NO: 2513790 - RNA, 19 nt, Artificial Sequence
  Description of Artificial Sequence: Synthetic oligonucleotide
ccaguggccaaauggcaga

SEQ ID NO: 2513791 - RNA, 19 nt, Artificial Sequence
  Description of Artificial Sequence: Synthetic oligonucleotide
ccuccggaucagcagggag

SEQ ID NO: 2513792 - RNA, 19 nt, Artificial Sequence
  Description of Artificial Sequence: Synthetic oligonucleotide
cagcaccgcccggauaccc

SEQ ID NO: 2513793 - RNA, 19 nt, Artificial Sequence
  Description of Artificial Sequence: Synthetic oligonucleotide
cgauggcagagugaauucc

SEQ ID NO: 2513794 - RNA, 19 nt, Artificial Sequence
  Description of Artificial Sequence: Synthetic oligonucleotide
caucguggccuucagcuuu

SEQ ID NO: 2513795 - RNA, 19 nt, Artificial Sequence
  Description of Artificial Sequence: Synthetic oligonucleotide
caugcaucgauggcagagu

SEQ ID NO: 2513796 - RNA, 19 nt, Artificial Sequence
  Description of Artificial Sequence: Synthetic oligonucleotide
gugggguggucugcgugug

SEQ ID NO: 2513797 - RNA, 19 nt, Artificial Sequence
  Description of Artificial Sequence: Synthetic oligonucleotide
ccucacaguccgagggaag

SEQ ID NO: 2513798 - RNA, 19 nt, Artificial Sequence
  Description of Artificial Sequence: Synthetic oligonucleotide
ggcggccccagcagcaccg

SEQ ID NO: 2513799 - RNA, 19 nt, Artificial Sequence
  Description of Artificial Sequence: Synthetic oligonucleotide
agcaccgcccggauacccu

SEQ ID NO: 2513800 - RNA, 19 nt, Artificial Sequence
  Description of Artificial Sequence: Synthetic oligonucleotide
gaccggccacuauuggggu

SEQ ID NO: 2513801 - RNA, 19 nt, Artificial Sequence
  Description of Artificial Sequence: Synthetic oligonucleotide
cugcuaggaugcucgcaaa

SEQ ID NO: 2513802 - RNA, 19 nt, Artificial Sequence
  Description of Artificial Sequence: Synthetic oligonucleotide
gccugccucacaguccgag

SEQ ID NO: 2513803 - RNA, 19 nt, Artificial Sequence
  Description of Artificial Sequence: Synthetic oligonucleotide
cagaaccugaagcuaccau

SEQ ID NO: 2513804 - RNA, 19 nt, Artificial Sequence
  Description of Artificial Sequence: Synthetic oligonucleotide
ggaugcucgcaaacacaac

SEQ ID NO: 2513805 - RNA, 19 nt, Artificial Sequence
  Description of Artificial Sequence: Synthetic oligonucleotide
ugcgugugguaggccucca

SEQ ID NO: 2513806 - RNA, 19 nt, Artificial Sequence
  Description of Artificial Sequence: Synthetic oligonucleotide
ccgagggaagccaucuaga

SEQ ID NO: 2513807 - RNA, 19 nt, Artificial Sequence
  Description of Artificial Sequence: Synthetic oligonucleotide
ggggugaaucaaccuucca

SEQ ID NO: 2513808 - RNA, 19 nt, Artificial Sequence
  Description of Artificial Sequence: Synthetic oligonucleotide
cccuugccagccccgggcg

SEQ ID NO: 2513809 - RNA, 19 nt, Artificial Sequence
  Description of Artificial Sequence: Synthetic oligonucleotide
ccguuuccuguaguacucc

SEQ ID NO: 2513810 - RNA, 19 nt, Artificial Sequence
  Description of Artificial Sequence: Synthetic oligonucleotide
gcgugugguaggccuccag

SEQ ID NO: 2513811 - RNA, 19 nt, Artificial Sequence
  Description of Artificial Sequence: Synthetic oligonucleotide
caucuagaagaaagccguu

SEQ ID NO: 2513812 - RNA, 19 nt, Artificial Sequence
  Description of Artificial Sequence: Synthetic oligonucleotide
cuaccauggcucucagcau

SEQ ID NO: 2513813 - RNA, 19 nt, Artificial Sequence
  Description of Artificial Sequence: Synthetic oligonucleotide
acacaacaucaggggucug

SEQ ID NO: 2513814 - RNA, 19 nt, Artificial Sequence
  Description of Artificial Sequence: Synthetic oligonucleotide
caccgcccggauacccuuc

SEQ ID NO: 2513815 - RNA, 19 nt, Artificial Sequence
  Description of Artificial Sequence: Synthetic oligonucleotide
cagcgagcugggagccaug

SEQ ID NO: 2513816 - RNA, 19 nt, Artificial Sequence
  Description of Artificial Sequence: Synthetic oligonucleotide
auguccccaguggccaaau

SEQ ID NO: 2513817 - RNA, 19 nt, Artificial Sequence
  Description of Artificial Sequence: Synthetic oligonucleotide
cagagugaauuccccguuu

SEQ ID NO: 2513818 - RNA, 19 nt, Artificial Sequence
  Description of Artificial Sequence: Synthetic oligonucleotide
ggauacccuuccgacucuc

SEQ ID NO: 2513819 - RNA, 19 nt, Artificial Sequence
  Description of Artificial Sequence: Synthetic oligonucleotide
guaggccuccaggcggauc

SEQ ID NO: 2513820 - RNA, 19 nt, Artificial Sequence
  Description of Artificial Sequence: Synthetic oligonucleotide
aucguggccuucagcuuuu

SEQ ID NO: 2513821 - RNA, 19 nt, Artificial Sequence
  Description of Artificial Sequence: Synthetic oligonucleotide
ccccaguggccaaauggca

SEQ ID NO: 2513822 - RNA, 19 nt, Artificial Sequence
  Description of Artificial Sequence: Synthetic oligonucleotide
aucaggggucuggcaugca

SEQ ID NO: 2513823 - RNA, 19 nt, Artificial Sequence
  Description of Artificial Sequence: Synthetic oligonucleotide
guccgagggaagccaucua

SEQ ID NO: 2513824 - RNA, 19 nt, Artificial Sequence
  Description of Artificial Sequence: Synthetic oligonucleotide
gcagagugaauuccccguu

SEQ ID NO: 2513825 - RNA, 19 nt, Artificial Sequence
  Description of Artificial Sequence: Synthetic oligonucleotide
ggcaugcaucgauggcaga

SEQ ID NO: 2513826 - RNA, 19 nt, Artificial Sequence
  Description of Artificial Sequence: Synthetic oligonucleotide
ggucugcgugugguaggcc

SEQ ID NO: 2513827 - RNA, 19 nt, Artificial Sequence
  Description of Artificial Sequence: Synthetic oligonucleotide
caagugggguggucugcgu

SEQ ID NO: 2513828 - RNA, 19 nt, Artificial Sequence
  Description of Artificial Sequence: Synthetic oligonucleotide
gccucacaguccgagggaa

SEQ ID NO: 2513829 - RNA, 19 nt, Artificial Sequence
  Description of Artificial Sequence: Synthetic oligonucleotide
gccaaauggcagacacaga

SEQ ID NO: 2513830 - RNA, 19 nt, Artificial Sequence
  Description of Artificial Sequence: Synthetic oligonucleotide
augguacgaccggccacua

SEQ ID NO: 2513831 - RNA, 19 nt, Artificial Sequence
  Description of Artificial Sequence: Synthetic oligonucleotide
gggcggccccagcagcacc

SEQ ID NO: 2513832 - RNA, 19 nt, Artificial Sequence
  Description of Artificial Sequence: Synthetic oligonucleotide
caucgauggcagagugaau

SEQ ID NO: 2513833 - RNA, 19 nt, Artificial Sequence
  Description of Artificial Sequence: Synthetic oligonucleotide
cuccgccagccgccagcac

SEQ ID NO: 2513834 - RNA, 19 nt, Artificial Sequence
  Description of Artificial Sequence: Synthetic oligonucleotide
ccgcccggauacccuuccg

SEQ ID NO: 2513835 - RNA, 19 nt, Artificial Sequence
  Description of Artificial Sequence: Synthetic oligonucleotide
gggagccaugucugccaaa

SEQ ID NO: 2513836 - RNA, 19 nt, Artificial Sequence
  Description of Artificial Sequence: Synthetic oligonucleotide
cccggauacccuuccgacu

SEQ ID NO: 2513837 - RNA, 19 nt, Artificial Sequence
  Description of Artificial Sequence: Synthetic oligonucleotide
ccgaaucaagcuucucuuu

SEQ ID NO: 2513838 - RNA, 19 nt, Artificial Sequence
  Description of Artificial Sequence: Synthetic oligonucleotide
ggcuuuggagaaggcugcu

SEQ ID NO: 2513839 - RNA, 19 nt, Artificial Sequence
  Description of Artificial Sequence: Synthetic oligonucleotide
ggggucuggcaugcaucga

SEQ ID NO: 2513840 - RNA, 19 nt, Artificial Sequence
  Description of Artificial Sequence: Synthetic oligonucleotide
ccacgaccauuucaucacu

SEQ ID NO: 2513841 - RNA, 19 nt, Artificial Sequence
  Description of Artificial Sequence: Synthetic oligonucleotide
cgcccggauacccuuccga

SEQ ID NO: 2513842 - RNA, 19 nt, Artificial Sequence
  Description of Artificial Sequence: Synthetic oligonucleotide
ccauggcucucagcauguc

SEQ ID NO: 2513843 - RNA, 19 nt, Artificial Sequence
  Description of Artificial Sequence: Synthetic oligonucleotide
ccccagcucagaaccugaa

SEQ ID NO: 2513844 - RNA, 19 nt, Artificial Sequence
  Description of Artificial Sequence: Synthetic oligonucleotide
gcggaucuucaaggccuuc

SEQ ID NO: 2513845 - RNA, 19 nt, Artificial Sequence
  Description of Artificial Sequence: Synthetic oligonucleotide
agccugccucacaguccga

SEQ ID NO: 2513846 - RNA, 19 nt, Artificial Sequence
  Description of Artificial Sequence: Synthetic oligonucleotide
cagcauccaucguggccuu

SEQ ID NO: 2513847 - RNA, 19 nt, Artificial Sequence
  Description of Artificial Sequence: Synthetic oligonucleotide
ggcggaucuucaaggccuu

SEQ ID NO: 2513848 - RNA, 19 nt, Artificial Sequence
  Description of Artificial Sequence: Synthetic oligonucleotide
gguaggccuccaggcggau

SEQ ID NO: 2513849 - RNA, 19 nt, Artificial Sequence
  Description of Artificial Sequence: Synthetic oligonucleotide
cggguucgggagccagcga

SEQ ID NO: 2513850 - RNA, 19 nt, Artificial Sequence
  Description of Artificial Sequence: Synthetic oligonucleotide
cggauacccuuccgacucu

SEQ ID NO: 2513851 - RNA, 19 nt, Artificial Sequence
  Description of Artificial Sequence: Synthetic oligonucleotide
cccuuccgacucucggguu

SEQ ID NO: 2513852 - RNA, 19 nt, Artificial Sequence
  Description of Artificial Sequence: Synthetic oligonucleotide
ggccacuauuggggugaau

SEQ ID NO: 2513853 - RNA, 19 nt, Artificial Sequence
  Description of Artificial Sequence: Synthetic oligonucleotide
cggccacuauuggggugaa

SEQ ID NO: 2513854 - RNA, 19 nt, Artificial Sequence
  Description of Artificial Sequence: Synthetic oligonucleotide
aaaguauuaaccuuaaaag

SEQ ID NO: 2513855 - RNA, 19 nt, Artificial Sequence
  Description of Artificial Sequence: Synthetic oligonucleotide
aauaacacaaaacaaagug

SEQ ID NO: 2513856 - RNA, 19 nt, Artificial Sequence
  Description of Artificial Sequence: Synthetic oligonucleotide
aaguauuaaccuuaaaagc

SEQ ID NO: 2513857 - RNA, 19 nt, Artificial Sequence
  Description of Artificial Sequence: Synthetic oligonucleotide
aauauaaauguccauguuc

SEQ ID NO: 2513858 - RNA, 19 nt, Artificial Sequence
  Description of Artificial Sequence: Synthetic oligonucleotide
aaaaucuuaauaacaaagc

SEQ ID NO: 2513859 - RNA, 19 nt, Artificial Sequence
  Description of Artificial Sequence: Synthetic oligonucleotide
uuuccaauaacacaaaaca

SEQ ID NO: 2513860 - RNA, 19 nt, Artificial Sequence
  Description of Artificial Sequence: Synthetic oligonucleotide
auuguaaugaucuuggcag

SEQ ID NO: 2513861 - RNA, 19 nt, Artificial Sequence
  Description of Artificial Sequence: Synthetic oligonucleotide
uuuaaugguagccaacugg

SEQ ID NO: 2513862 - RNA, 19 nt, Artificial Sequence
  Description of Artificial Sequence: Synthetic oligonucleotide
ucuuaauccauauucauca

SEQ ID NO: 2513863 - RNA, 19 nt, Artificial Sequence
  Description of Artificial Sequence: Synthetic oligonucleotide
aaacacguaauuuguacac

SEQ ID NO: 2513864 - RNA, 19 nt, Artificial Sequence
  Description of Artificial Sequence: Synthetic oligonucleotide
uaacacaaaacaaagugcc

SEQ ID NO: 2513865 - RNA, 19 nt, Artificial Sequence
  Description of Artificial Sequence: Synthetic oligonucleotide
auuauauuuaaugguagcc

SEQ ID NO: 2513866 - RNA, 19 nt, Artificial Sequence
  Description of Artificial Sequence: Synthetic oligonucleotide
uuaagaauaaccccaauau

SEQ ID NO: 2513867 - RNA, 19 nt, Artificial Sequence
  Description of Artificial Sequence: Synthetic oligonucleotide
uuuaccuuaacuaugcaaa

SEQ ID NO: 2513868 - RNA, 19 nt, Artificial Sequence
  Description of Artificial Sequence: Synthetic oligonucleotide
auaacaaagcuuccaauac

SEQ ID NO: 2513869 - RNA, 19 nt, Artificial Sequence
  Description of Artificial Sequence: Synthetic oligonucleotide
uaaccuuaaaagcagcccg

SEQ ID NO: 2513870 - RNA, 19 nt, Artificial Sequence
  Description of Artificial Sequence: Synthetic oligonucleotide
aauguaaaccuuucauagg

SEQ ID NO: 2513871 - RNA, 19 nt, Artificial Sequence
  Description of Artificial Sequence: Synthetic oligonucleotide
uuuucuuguauguacagug

SEQ ID NO: 2513872 - RNA, 19 nt, Artificial Sequence
  Description of Artificial Sequence: Synthetic oligonucleotide
uccauuguaaugaucuugg

SEQ ID NO: 2513873 - RNA, 19 nt, Artificial Sequence
  Description of Artificial Sequence: Synthetic oligonucleotide
uccaauacaaaacacguaa

SEQ ID NO: 2513874 - RNA, 19 nt, Artificial Sequence
  Description of Artificial Sequence: Synthetic oligonucleotide
aauuuguacacacuuaguu

SEQ ID NO: 2513875 - RNA, 19 nt, Artificial Sequence
  Description of Artificial Sequence: Synthetic oligonucleotide
ucaucguuaguucuaaagc

SEQ ID NO: 2513876 - RNA, 19 nt, Artificial Sequence
  Description of Artificial Sequence: Synthetic oligonucleotide
auaacacaaaacaaagugc

SEQ ID NO: 2513877 - RNA, 19 nt, Artificial Sequence
  Description of Artificial Sequence: Synthetic oligonucleotide
auacaaaacacguaauuug

SEQ ID NO: 2513878 - RNA, 19 nt, Artificial Sequence
  Description of Artificial Sequence: Synthetic oligonucleotide
aaccccaauauaaaugucc

SEQ ID NO: 2513879 - RNA, 19 nt, Artificial Sequence
  Description of Artificial Sequence: Synthetic oligonucleotide
aaguaugaaaaucuuaaua

SEQ ID NO: 2513880 - RNA, 19 nt, Artificial Sequence
  Description of Artificial Sequence: Synthetic oligonucleotide
aaaacacguaauuuguaca

SEQ ID NO: 2513881 - RNA, 19 nt, Artificial Sequence
  Description of Artificial Sequence: Synthetic oligonucleotide
uuuuccaauaacacaaaac

SEQ ID NO: 2513882 - RNA, 19 nt, Artificial Sequence
  Description of Artificial Sequence: Synthetic oligonucleotide
uuaaugguagccaacugga

SEQ ID NO: 2513883 - RNA, 19 nt, Artificial Sequence
  Description of Artificial Sequence: Synthetic oligonucleotide
aauaaccccaauauaaaug

SEQ ID NO: 2513884 - RNA, 19 nt, Artificial Sequence
  Description of Artificial Sequence: Synthetic oligonucleotide
aagaauaaccccaauauaa

SEQ ID NO: 2513885 - RNA, 19 nt, Artificial Sequence
  Description of Artificial Sequence: Synthetic oligonucleotide
guuuacuuaagaauaaccc

SEQ ID NO: 2513886 - RNA, 19 nt, Artificial Sequence
  Description of Artificial Sequence: Synthetic oligonucleotide
aguuuacuuaagaauaacc

SEQ ID NO: 2513887 - RNA, 19 nt, Artificial Sequence
  Description of Artificial Sequence: Synthetic oligonucleotide
agcacagguuucuuaaucc

SEQ ID NO: 2513888 - RNA, 19 nt, Artificial Sequence
  Description of Artificial Sequence: Synthetic oligonucleotide
uuaauaacaaagcuuccaa

SEQ ID NO: 2513889 - RNA, 19 nt, Artificial Sequence
  Description of Artificial Sequence: Synthetic oligonucleotide
auaaccccaauauaaaugu

SEQ ID NO: 2513890 - RNA, 19 nt, Artificial Sequence
  Description of Artificial Sequence: Synthetic oligonucleotide
aacuaugcaaaguacacuu

SEQ ID NO: 2513891 - RNA, 19 nt, Artificial Sequence
  Description of Artificial Sequence: Synthetic oligonucleotide
aguauuaaccuuaaaagca

SEQ ID NO: 2513892 - RNA, 19 nt, Artificial Sequence
  Description of Artificial Sequence: Synthetic oligonucleotide
uguaacauuuuccaauaac

SEQ ID NO: 2513893 - RNA, 19 nt, Artificial Sequence
  Description of Artificial Sequence: Synthetic oligonucleotide
uucaucguuaguucuaaag

SEQ ID NO: 2513894 - RNA, 19 nt, Artificial Sequence
  Description of Artificial Sequence: Synthetic oligonucleotide
aaugguagccaacuggaga

SEQ ID NO: 2513895 - RNA, 19 nt, Artificial Sequence
  Description of Artificial Sequence: Synthetic oligonucleotide
uaagauaacuugaaaaguu

SEQ ID NO: 2513896 - RNA, 19 nt, Artificial Sequence
  Description of Artificial Sequence: Synthetic oligonucleotide
uaaauguccauguucuuca

SEQ ID NO: 2513897 - RNA, 19 nt, Artificial Sequence
  Description of Artificial Sequence: Synthetic oligonucleotide
gugccauuauauuuaaugg

SEQ ID NO: 2513898 - RNA, 19 nt, Artificial Sequence
  Description of Artificial Sequence: Synthetic oligonucleotide
uuauauuuaaugguagcca

SEQ ID NO: 2513899 - RNA, 19 nt, Artificial Sequence
  Description of Artificial Sequence: Synthetic oligonucleotide
acuuaguuuacuuaagaau

SEQ ID NO: 2513900 - RNA, 19 nt, Artificial Sequence
  Description of Artificial Sequence: Synthetic oligonucleotide
ucuaaagcagcuugaagga

SEQ ID NO: 2513901 - RNA, 19 nt, Artificial Sequence
  Description of Artificial Sequence: Synthetic oligonucleotide
acacguaauuuguacacac

SEQ ID NO: 2513902 - RNA, 19 nt, Artificial Sequence
  Description of Artificial Sequence: Synthetic oligonucleotide
auguaaaccuuucauagga

SEQ ID NO: 2513903 - RNA, 19 nt, Artificial Sequence
  Description of Artificial Sequence: Synthetic oligonucleotide
uauauuuaaugguagccaa

SEQ ID NO: 2513904 - RNA, 19 nt, Artificial Sequence
  Description of Artificial Sequence: Synthetic oligonucleotide
acacuuauauauuuucuug

SEQ ID NO: 2513905 - RNA, 19 nt, Artificial Sequence
  Description of Artificial Sequence: Synthetic oligonucleotide
uuacuuuaccuuaacuaug

SEQ ID NO: 2513906 - RNA, 19 nt, Artificial Sequence
  Description of Artificial Sequence: Synthetic oligonucleotide
cauuauauuuaaugguagc

SEQ ID NO: 2513907 - RNA, 19 nt, Artificial Sequence
  Description of Artificial Sequence: Synthetic oligonucleotide
aaaguacacuuauauauuu

SEQ ID NO: 2513908 - RNA, 19 nt, Artificial Sequence
  Description of Artificial Sequence: Synthetic oligonucleotide
uaggcauuaaccaugccaa

SEQ ID NO: 2513909 - RNA, 19 nt, Artificial Sequence
  Description of Artificial Sequence: Synthetic oligonucleotide
aaagcaccucucugaaggc

SEQ ID NO: 2513910 - RNA, 19 nt, Artificial Sequence
  Description of Artificial Sequence: Synthetic oligonucleotide
acuuacuuuaccuuaacua

SEQ ID NO: 2513911 - RNA, 19 nt, Artificial Sequence
  Description of Artificial Sequence: Synthetic oligonucleotide
caaaacacguaauuuguac

SEQ ID NO: 2513912 - RNA, 19 nt, Artificial Sequence
  Description of Artificial Sequence: Synthetic oligonucleotide
cauaggauaauauuuugca

SEQ ID NO: 2513913 - RNA, 19 nt, Artificial Sequence
  Description of Artificial Sequence: Synthetic oligonucleotide
uaacuugaaaaguucuggc

SEQ ID NO: 2513914 - RNA, 19 nt, Artificial Sequence
  Description of Artificial Sequence: Synthetic oligonucleotide
gguuucuuaauccauauuc

SEQ ID NO: 2513915 - RNA, 19 nt, Artificial Sequence
  Description of Artificial Sequence: Synthetic oligonucleotide
uuaguuuacuuaagaauaa

SEQ ID NO: 2513916 - RNA, 19 nt, Artificial Sequence
  Description of Artificial Sequence: Synthetic oligonucleotide
gacaaggggaguuaauggc

SEQ ID NO: 2513917 - RNA, 19 nt, Artificial Sequence
  Description of Artificial Sequence: Synthetic oligonucleotide
aaaguaugaaaaucuuaau

SEQ ID NO: 2513918 - RNA, 19 nt, Artificial Sequence
  Description of Artificial Sequence: Synthetic oligonucleotide
uauuaaccuuaaaagcagc

SEQ ID NO: 2513919 - RNA, 19 nt, Artificial Sequence
  Description of Artificial Sequence: Synthetic oligonucleotide
accucuguauuucagggag

SEQ ID NO: 2513920 - RNA, 19 nt, Artificial Sequence
  Description of Artificial Sequence: Synthetic oligonucleotide
uauuuaaugguagccaacu

SEQ ID NO: 2513921 - RNA, 19 nt, Artificial Sequence
  Description of Artificial Sequence: Synthetic oligonucleotide
acuggagacuuacuuuacc

SEQ ID NO: 2513922 - RNA, 19 nt, Artificial Sequence
  Description of Artificial Sequence: Synthetic oligonucleotide
uaacaaagcuuccaauaca

SEQ ID NO: 2513923 - RNA, 19 nt, Artificial Sequence
  Description of Artificial Sequence: Synthetic oligonucleotide
uuaaccuuaaaagcagccc

SEQ ID NO: 2513924 - RNA, 19 nt, Artificial Sequence
  Description of Artificial Sequence: Synthetic oligonucleotide
uucuuaauccauauucauc

SEQ ID NO: 2513925 - RNA, 19 nt, Artificial Sequence
  Description of Artificial Sequence: Synthetic oligonucleotide
agugaagcaagguaccucu

SEQ ID NO: 2513926 - RNA, 19 nt, Artificial Sequence
  Description of Artificial Sequence: Synthetic oligonucleotide
uuaccuuaacuaugcaaag

SEQ ID NO: 2513927 - RNA, 19 nt, Artificial Sequence
  Description of Artificial Sequence: Synthetic oligonucleotide
guaccucuguauuucaggg

SEQ ID NO: 2513928 - RNA, 19 nt, Artificial Sequence
  Description of Artificial Sequence: Synthetic oligonucleotide
ugccauuauauuuaauggu

SEQ ID NO: 2513929 - RNA, 19 nt, Artificial Sequence
  Description of Artificial Sequence: Synthetic oligonucleotide
uuccaauaacacaaaacaa

SEQ ID NO: 2513930 - RNA, 19 nt, Artificial Sequence
  Description of Artificial Sequence: Synthetic oligonucleotide
auguggagaauguaaaccu

SEQ ID NO: 2513931 - RNA, 19 nt, Artificial Sequence
  Description of Artificial Sequence: Synthetic oligonucleotide
ucuuaauaacaaagcuucc

SEQ ID NO: 2513932 - RNA, 19 nt, Artificial Sequence
  Description of Artificial Sequence: Synthetic oligonucleotide
cauguggagaauguaaacc

SEQ ID NO: 2513933 - RNA, 19 nt, Artificial Sequence
  Description of Artificial Sequence: Synthetic oligonucleotide
uguauguacagugcuguag

SEQ ID NO: 2513934 - RNA, 19 nt, Artificial Sequence
  Description of Artificial Sequence: Synthetic oligonucleotide
guauuaaccuuaaaagcag

SEQ ID NO: 2513935 - RNA, 19 nt, Artificial Sequence
  Description of Artificial Sequence: Synthetic oligonucleotide
gaugcaucuguguuggaac

SEQ ID NO: 2513936 - RNA, 19 nt, Artificial Sequence
  Description of Artificial Sequence: Synthetic oligonucleotide
gaguuaauggcaauguaac

SEQ ID NO: 2513937 - RNA, 19 nt, Artificial Sequence
  Description of Artificial Sequence: Synthetic oligonucleotide
uuguaaugaucuuggcagg

SEQ ID NO: 2513938 - RNA, 19 nt, Artificial Sequence
  Description of Artificial Sequence: Synthetic oligonucleotide
uggcaauguaacauuuucc

SEQ ID NO: 2513939 - RNA, 19 nt, Artificial Sequence
  Description of Artificial Sequence: Synthetic oligonucleotide
aacaaagugccauuauauu

SEQ ID NO: 2513940 - RNA, 19 nt, Artificial Sequence
  Description of Artificial Sequence: Synthetic oligonucleotide
ucguuaguucuaaagcagc

SEQ ID NO: 2513941 - RNA, 19 nt, Artificial Sequence
  Description of Artificial Sequence: Synthetic oligonucleotide
uaagaauaaccccaauaua

SEQ ID NO: 2513942 - RNA, 19 nt, Artificial Sequence
  Description of Artificial Sequence: Synthetic oligonucleotide
acugacuccauuguaauga

SEQ ID NO: 2513943 - RNA, 19 nt, Artificial Sequence
  Description of Artificial Sequence: Synthetic oligonucleotide
augcaaaguacacuuauau

SEQ ID NO: 2513944 - RNA, 19 nt, Artificial Sequence
  Description of Artificial Sequence: Synthetic oligonucleotide
auuuguacacacuuaguuu

SEQ ID NO: 2513945 - RNA, 19 nt, Artificial Sequence
  Description of Artificial Sequence: Synthetic oligonucleotide
uuucuuaauccauauucau

SEQ ID NO: 2513946 - RNA, 19 nt, Artificial Sequence
  Description of Artificial Sequence: Synthetic oligonucleotide
uccgagaccuacuggagag

SEQ ID NO: 2513947 - RNA, 19 nt, Artificial Sequence
  Description of Artificial Sequence: Synthetic oligonucleotide
uucuccgagaccuacugga

SEQ ID NO: 2513948 - RNA, 19 nt, Artificial Sequence
  Description of Artificial Sequence: Synthetic oligonucleotide
uggauaaaaguaugaaaau

SEQ ID NO: 2513949 - RNA, 19 nt, Artificial Sequence
  Description of Artificial Sequence: Synthetic oligonucleotide
uucaucauguggagaaugu

SEQ ID NO: 2513950 - RNA, 19 nt, Artificial Sequence
  Description of Artificial Sequence: Synthetic oligonucleotide
uguucuucaucguuaguuc

SEQ ID NO: 2513951 - RNA, 19 nt, Artificial Sequence
  Description of Artificial Sequence: Synthetic oligonucleotide
uguucuccgagaccuacug

SEQ ID NO: 2513952 - RNA, 19 nt, Artificial Sequence
  Description of Artificial Sequence: Synthetic oligonucleotide
gaaggagccugacacucgg

SEQ ID NO: 2513953 - RNA, 19 nt, Artificial Sequence
  Description of Artificial Sequence: Synthetic oligonucleotide
uaauuuguacacacuuagu

SEQ ID NO: 2513954 - RNA, 19 nt, Artificial Sequence
  Description of Artificial Sequence: Synthetic oligonucleotide
guuggaacaggucacacaa

SEQ ID NO: 2513955 - RNA, 19 nt, Artificial Sequence
  Description of Artificial Sequence: Synthetic oligonucleotide
acacacuuaguuuacuuaa

SEQ ID NO: 2513956 - RNA, 19 nt, Artificial Sequence
  Description of Artificial Sequence: Synthetic oligonucleotide
auaggauaauauuuugcau

SEQ ID NO: 2513957 - RNA, 19 nt, Artificial Sequence
  Description of Artificial Sequence: Synthetic oligonucleotide
auugccagcuucuaacccu

SEQ ID NO: 2513958 - RNA, 19 nt, Artificial Sequence
  Description of Artificial Sequence: Synthetic oligonucleotide
aacugacuccauuguaaug

SEQ ID NO: 2513959 - RNA, 19 nt, Artificial Sequence
  Description of Artificial Sequence: Synthetic oligonucleotide
cuuaaaagcagcccgugga

SEQ ID NO: 2513960 - RNA, 19 nt, Artificial Sequence
  Description of Artificial Sequence: Synthetic oligonucleotide
caucguuaguucuaaagca

SEQ ID NO: 2513961 - RNA, 19 nt, Artificial Sequence
  Description of Artificial Sequence: Synthetic oligonucleotide
auauuuaaugguagccaac

SEQ ID NO: 2513962 - RNA, 19 nt, Artificial Sequence
  Description of Artificial Sequence: Synthetic oligonucleotide
accuuaacuaugcaaagua

SEQ ID NO: 2513963 - RNA, 19 nt, Artificial Sequence
  Description of Artificial Sequence: Synthetic oligonucleotide
ugcaaacugacuccauugu

SEQ ID NO: 2513964 - RNA, 19 nt, Artificial Sequence
  Description of Artificial Sequence: Synthetic oligonucleotide
aguuaauggcaauguaaca

SEQ ID NO: 2513965 - RNA, 19 nt, Artificial Sequence
  Description of Artificial Sequence: Synthetic oligonucleotide
uuaaaagcagcccguggau

SEQ ID NO: 2513966 - RNA, 19 nt, Artificial Sequence
  Description of Artificial Sequence: Synthetic oligonucleotide
ugaaggagccugacacucg

SEQ ID NO: 2513967 - RNA, 19 nt, Artificial Sequence
  Description of Artificial Sequence: Synthetic oligonucleotide
auuuaaugguagccaacug

SEQ ID NO: 2513968 - RNA, 19 nt, Artificial Sequence
  Description of Artificial Sequence: Synthetic oligonucleotide
acacaaagcaccucucuga

SEQ ID NO: 2513969 - RNA, 19 nt, Artificial Sequence
  Description of Artificial Sequence: Synthetic oligonucleotide
uaaugguagccaacuggag

SEQ ID NO: 2513970 - RNA, 19 nt, Artificial Sequence
  Description of Artificial Sequence: Synthetic oligonucleotide
ugaagcaagguaccucugu

SEQ ID NO: 2513971 - RNA, 19 nt, Artificial Sequence
  Description of Artificial Sequence: Synthetic oligonucleotide
cucgguauguacugcaaac

SEQ ID NO: 2513972 - RNA, 19 nt, Artificial Sequence
  Description of Artificial Sequence: Synthetic oligonucleotide
agacuuacuuuaccuuaac

SEQ ID NO: 2513973 - RNA, 19 nt, Artificial Sequence
  Description of Artificial Sequence: Synthetic oligonucleotide
acguaauuuguacacacuu

SEQ ID NO: 2513974 - RNA, 19 nt, Artificial Sequence
  Description of Artificial Sequence: Synthetic oligonucleotide
uacuuaagaauaaccccaa

SEQ ID NO: 2513975 - RNA, 19 nt, Artificial Sequence
  Description of Artificial Sequence: Synthetic oligonucleotide
ggcaauguaacauuuucca

SEQ ID NO: 2513976 - RNA, 19 nt, Artificial Sequence
  Description of Artificial Sequence: Synthetic oligonucleotide
gcuuccaauacaaaacacg

SEQ ID NO: 2513977 - RNA, 19 nt, Artificial Sequence
  Description of Artificial Sequence: Synthetic oligonucleotide
aggauagcagcacagguuu

SEQ ID NO: 2513978 - RNA, 19 nt, Artificial Sequence
  Description of Artificial Sequence: Synthetic oligonucleotide
uacacacuuaguuuacuua

SEQ ID NO: 2513979 - RNA, 19 nt, Artificial Sequence
  Description of Artificial Sequence: Synthetic oligonucleotide
ugacacucgguauguacug

SEQ ID NO: 2513980 - RNA, 19 nt, Artificial Sequence
  Description of Artificial Sequence: Synthetic oligonucleotide
gaucuuggcaggauagcag

SEQ ID NO: 2513981 - RNA, 19 nt, Artificial Sequence
  Description of Artificial Sequence: Synthetic oligonucleotide
ugugugugugugcuuaaaa

SEQ ID NO: 2513982 - RNA, 19 nt, Artificial Sequence
  Description of Artificial Sequence: Synthetic oligonucleotide
aucguuaguucuaaagcag

SEQ ID NO: 2513983 - RNA, 19 nt, Artificial Sequence
  Description of Artificial Sequence: Synthetic oligonucleotide
ucacacaaagcaccucucu

SEQ ID NO: 2513984 - RNA, 19 nt, Artificial Sequence
  Description of Artificial Sequence: Synthetic oligonucleotide
uccugaugcaucuguguug

SEQ ID NO: 2513985 - RNA, 19 nt, Artificial Sequence
  Description of Artificial Sequence: Synthetic oligonucleotide
cuuacuuuaccuuaacuau

SEQ ID NO: 2513986 - RNA, 19 nt, Artificial Sequence
  Description of Artificial Sequence: Synthetic oligonucleotide
uaugcaaaguacacuuaua

SEQ ID NO: 2513987 - RNA, 19 nt, Artificial Sequence
  Description of Artificial Sequence: Synthetic oligonucleotide
cucucugaaggccccaccg

SEQ ID NO: 2513988 - RNA, 19 nt, Artificial Sequence
  Description of Artificial Sequence: Synthetic oligonucleotide
gacuccauuguaaugaucu

SEQ ID NO: 2513989 - RNA, 19 nt, Artificial Sequence
  Description of Artificial Sequence: Synthetic oligonucleotide
uguaaugaucuuggcagga

SEQ ID NO: 2513990 - RNA, 19 nt, Artificial Sequence
  Description of Artificial Sequence: Synthetic oligonucleotide
cacacuuaguuuacuuaag

SEQ ID NO: 2513991 - RNA, 19 nt, Artificial Sequence
  Description of Artificial Sequence: Synthetic oligonucleotide
uguaaaccuuucauaggau

SEQ ID NO: 2513992 - RNA, 19 nt, Artificial Sequence
  Description of Artificial Sequence: Synthetic oligonucleotide
uaacuaugcaaaguacacu

SEQ ID NO: 2513993 - RNA, 19 nt, Artificial Sequence
  Description of Artificial Sequence: Synthetic oligonucleotide
cuuccaauacaaaacacgu

SEQ ID NO: 2513994 - RNA, 19 nt, Artificial Sequence
  Description of Artificial Sequence: Synthetic oligonucleotide
aacacguaauuuguacaca

SEQ ID NO: 2513995 - RNA, 19 nt, Artificial Sequence
  Description of Artificial Sequence: Synthetic oligonucleotide
aacuggagacuuacuuuac

SEQ ID NO: 2513996 - RNA, 19 nt, Artificial Sequence
  Description of Artificial Sequence: Synthetic oligonucleotide
auucaucauguggagaaug

SEQ ID NO: 2513997 - RNA, 19 nt, Artificial Sequence
  Description of Artificial Sequence: Synthetic oligonucleotide
ccauuauauuuaaugguag

SEQ ID NO: 2513998 - RNA, 19 nt, Artificial Sequence
  Description of Artificial Sequence: Synthetic oligonucleotide
uaguuuacuuaagaauaac

SEQ ID NO: 2513999 - RNA, 19 nt, Artificial Sequence
  Description of Artificial Sequence: Synthetic oligonucleotide
agcaccucucugaaggccc

SEQ ID NO: 2514000 - RNA, 19 nt, Artificial Sequence
  Description of Artificial Sequence: Synthetic oligonucleotide
gagaggucugacuucccug

SEQ ID NO: 2514001 - RNA, 19 nt, Artificial Sequence
  Description of Artificial Sequence: Synthetic oligonucleotide
uuccaauacaaaacacgua

SEQ ID NO: 2514002 - RNA, 19 nt, Artificial Sequence
  Description of Artificial Sequence: Synthetic oligonucleotide
aacccugugugugugugug

SEQ ID NO: 2514003 - RNA, 19 nt, Artificial Sequence
  Description of Artificial Sequence: Synthetic oligonucleotide
uguggagaauguaaaccuu

SEQ ID NO: 2514004 - RNA, 19 nt, Artificial Sequence
  Description of Artificial Sequence: Synthetic oligonucleotide
uugaaggagccugacacuc

SEQ ID NO: 2514005 - RNA, 19 nt, Artificial Sequence
  Description of Artificial Sequence: Synthetic oligonucleotide
cacacaaagcaccucucug

SEQ ID NO: 2514006 - RNA, 19 nt, Artificial Sequence
  Description of Artificial Sequence: Synthetic oligonucleotide
gagccugacacucgguaug

SEQ ID NO: 2514007 - RNA, 19 nt, Artificial Sequence
  Description of Artificial Sequence: Synthetic oligonucleotide
uucuucaucguuaguucua

SEQ ID NO: 2514008 - RNA, 19 nt, Artificial Sequence
  Description of Artificial Sequence: Synthetic oligonucleotide
auaaaaguaugaaaaucuu

SEQ ID NO: 2514009 - RNA, 19 nt, Artificial Sequence
  Description of Artificial Sequence: Synthetic oligonucleotide
aagguaccucuguauuuca

SEQ ID NO: 2514010 - RNA, 19 nt, Artificial Sequence
  Description of Artificial Sequence: Synthetic oligonucleotide
guuaauggcaauguaacau

SEQ ID NO: 2514011 - RNA, 19 nt, Artificial Sequence
  Description of Artificial Sequence: Synthetic oligonucleotide
agaauaaccccaauauaaa

SEQ ID NO: 2514012 - RNA, 19 nt, Artificial Sequence
  Description of Artificial Sequence: Synthetic oligonucleotide
cuguguuggaacaggucac

SEQ ID NO: 2514013 - RNA, 19 nt, Artificial Sequence
  Description of Artificial Sequence: Synthetic oligonucleotide
cuccauuguaaugaucuug

SEQ ID NO: 2514014 - RNA, 19 nt, Artificial Sequence
  Description of Artificial Sequence: Synthetic oligonucleotide
cagcuucuaacccugugug

SEQ ID NO: 2514015 - RNA, 19 nt, Artificial Sequence
  Description of Artificial Sequence: Synthetic oligonucleotide
uaccuuaacuaugcaaagu

SEQ ID NO: 2514016 - RNA, 19 nt, Artificial Sequence
  Description of Artificial Sequence: Synthetic oligonucleotide
ugaugcaucuguguuggaa

SEQ ID NO: 2514017 - RNA, 19 nt, Artificial Sequence
  Description of Artificial Sequence: Synthetic oligonucleotide
gaauaaccccaauauaaau

SEQ ID NO: 2514018 - RNA, 19 nt, Artificial Sequence
  Description of Artificial Sequence: Synthetic oligonucleotide
aaccuuaaaagcagcccgu

SEQ ID NO: 2514019 - RNA, 19 nt, Artificial Sequence
  Description of Artificial Sequence: Synthetic oligonucleotide
ucgguauguacugcaaacu

SEQ ID NO: 2514020 - RNA, 19 nt, Artificial Sequence
  Description of Artificial Sequence: Synthetic oligonucleotide
agcaagguaccucuguauu

SEQ ID NO: 2514021 - RNA, 19 nt, Artificial Sequence
  Description of Artificial Sequence: Synthetic oligonucleotide
caagguaccucuguauuuc

SEQ ID NO: 2514022 - RNA, 19 nt, Artificial Sequence
  Description of Artificial Sequence: Synthetic oligonucleotide
ugugugugugugugugugc

SEQ ID NO: 2514023 - RNA, 19 nt, Artificial Sequence
  Description of Artificial Sequence: Synthetic oligonucleotide
cccaauauaaauguccaug

SEQ ID NO: 2514024 - RNA, 19 nt, Artificial Sequence
  Description of Artificial Sequence: Synthetic oligonucleotide
ucuucaucguuaguucuaa

SEQ ID NO: 2514025 - RNA, 19 nt, Artificial Sequence
  Description of Artificial Sequence: Synthetic oligonucleotide
uguguuggaacaggucaca

SEQ ID NO: 2514026 - RNA, 19 nt, Artificial Sequence
  Description of Artificial Sequence: Synthetic oligonucleotide
uaccucuguauuucaggga

SEQ ID NO: 2514027 - RNA, 19 nt, Artificial Sequence
  Description of Artificial Sequence: Synthetic oligonucleotide
ugaaaaguucuggcccucc

SEQ ID NO: 2514028 - RNA, 19 nt, Artificial Sequence
  Description of Artificial Sequence: Synthetic oligonucleotide
acugcaaacugacuccauu

SEQ ID NO: 2514029 - RNA, 19 nt, Artificial Sequence
  Description of Artificial Sequence: Synthetic oligonucleotide
ugcaucuguguuggaacag

SEQ ID NO: 2514030 - RNA, 19 nt, Artificial Sequence
  Description of Artificial Sequence: Synthetic oligonucleotide
uaaccccaauauaaauguc

SEQ ID NO: 2514031 - RNA, 19 nt, Artificial Sequence
  Description of Artificial Sequence: Synthetic oligonucleotide
acaaggggaguuaauggca

SEQ ID NO: 2514032 - RNA, 19 nt, Artificial Sequence
  Description of Artificial Sequence: Synthetic oligonucleotide
cacuuauauauuuucuugu

SEQ ID NO: 2514033 - RNA, 19 nt, Artificial Sequence
  Description of Artificial Sequence: Synthetic oligonucleotide
guucuccgagaccuacugg

SEQ ID NO: 2514034 - RNA, 19 nt, Artificial Sequence
  Description of Artificial Sequence: Synthetic oligonucleotide
acacucgguauguacugca

SEQ ID NO: 2514035 - RNA, 19 nt, Artificial Sequence
  Description of Artificial Sequence: Synthetic oligonucleotide
ucagugaagcaagguaccu

SEQ ID NO: 2514036 - RNA, 19 nt, Artificial Sequence
  Description of Artificial Sequence: Synthetic oligonucleotide
uguacacacuuaguuuacu

SEQ ID NO: 2514037 - RNA, 19 nt, Artificial Sequence
  Description of Artificial Sequence: Synthetic oligonucleotide
uuucagggagacaggccaa

SEQ ID NO: 2514038 - RNA, 19 nt, Artificial Sequence
  Description of Artificial Sequence: Synthetic oligonucleotide
ccuuaacuaugcaaaguac

SEQ ID NO: 2514039 - RNA, 19 nt, Artificial Sequence
  Description of Artificial Sequence: Synthetic oligonucleotide
gccauugccagcuucuaac

SEQ ID NO: 2514040 - RNA, 19 nt, Artificial Sequence
  Description of Artificial Sequence: Synthetic oligonucleotide
gcuucuaacccugugugug

SEQ ID NO: 2514041 - RNA, 19 nt, Artificial Sequence
  Description of Artificial Sequence: Synthetic oligonucleotide
uagccaacuggagacuuac

SEQ ID NO: 2514042 - RNA, 19 nt, Artificial Sequence
  Description of Artificial Sequence: Synthetic oligonucleotide
ggaguuaauggcaauguaa

SEQ ID NO: 2514043 - RNA, 19 nt, Artificial Sequence
  Description of Artificial Sequence: Synthetic oligonucleotide
aggggaguuaauggcaaug

SEQ ID NO: 2514044 - RNA, 19 nt, Artificial Sequence
  Description of Artificial Sequence: Synthetic oligonucleotide
ugugugugugugugugugu

SEQ ID NO: 2514045 - RNA, 19 nt, Artificial Sequence
  Description of Artificial Sequence: Synthetic oligonucleotide
agcuucuaacccugugugu

SEQ ID NO: 2514046 - RNA, 19 nt, Artificial Sequence
  Description of Artificial Sequence: Synthetic oligonucleotide
uucccugcccucucaguga

SEQ ID NO: 2514047 - RNA, 19 nt, Artificial Sequence
  Description of Artificial Sequence: Synthetic oligonucleotide
gacuuacuuuaccuuaacu

SEQ ID NO: 2514048 - RNA, 19 nt, Artificial Sequence
  Description of Artificial Sequence: Synthetic oligonucleotide
aaggggaguuaauggcaau

SEQ ID NO: 2514049 - RNA, 19 nt, Artificial Sequence
  Description of Artificial Sequence: Synthetic oligonucleotide
acucgguauguacugcaaa

SEQ ID NO: 2514050 - RNA, 19 nt, Artificial Sequence
  Description of Artificial Sequence: Synthetic oligonucleotide
uaaaagcagcccguggaua

SEQ ID NO: 2514051 - RNA, 19 nt, Artificial Sequence
  Description of Artificial Sequence: Synthetic oligonucleotide
ugacuccauuguaaugauc

SEQ ID NO: 2514052 - RNA, 19 nt, Artificial Sequence
  Description of Artificial Sequence: Synthetic oligonucleotide
cuugaaaaguucuggcccu

SEQ ID NO: 2514053 - RNA, 19 nt, Artificial Sequence
  Description of Artificial Sequence: Synthetic oligonucleotide
agcuugaaggagccugaca

SEQ ID NO: 2514054 - RNA, 19 nt, Artificial Sequence
  Description of Artificial Sequence: Synthetic oligonucleotide
cugugugugugugugugug

SEQ ID NO: 2514055 - RNA, 19 nt, Artificial Sequence
  Description of Artificial Sequence: Synthetic oligonucleotide
gacacucgguauguacugc

SEQ ID NO: 2514056 - RNA, 19 nt, Artificial Sequence
  Description of Artificial Sequence: Synthetic oligonucleotide
cuaacccugugugugugug

SEQ ID NO: 2514057 - RNA, 19 nt, Artificial Sequence
  Description of Artificial Sequence: Synthetic oligonucleotide
gugugugugugugugugug

SEQ ID NO: 2514058 - RNA, 19 nt, Artificial Sequence
  Description of Artificial Sequence: Synthetic oligonucleotide
ggagaauguaaaccuuuca

SEQ ID NO: 2514059 - RNA, 19 nt, Artificial Sequence
  Description of Artificial Sequence: Synthetic oligonucleotide
ccauauucaucauguggag

SEQ ID NO: 2514060 - RNA, 19 nt, Artificial Sequence
  Description of Artificial Sequence: Synthetic oligonucleotide
cucucagugaagcaaggua

SEQ ID NO: 2514061 - RNA, 19 nt, Artificial Sequence
  Description of Artificial Sequence: Synthetic oligonucleotide
gagacuuacuuuaccuuaa

SEQ ID NO: 2514062 - RNA, 19 nt, Artificial Sequence
  Description of Artificial Sequence: Synthetic oligonucleotide
gguauguacugcaaacuga

SEQ ID NO: 2514063 - RNA, 19 nt, Artificial Sequence
  Description of Artificial Sequence: Synthetic oligonucleotide
ccuuaaaagcagcccgugg

SEQ ID NO: 2514064 - RNA, 19 nt, Artificial Sequence
  Description of Artificial Sequence: Synthetic oligonucleotide
cauauucaucauguggaga

SEQ ID NO: 2514065 - RNA, 19 nt, Artificial Sequence
  Description of Artificial Sequence: Synthetic oligonucleotide
accuuaaaagcagcccgug

SEQ ID NO: 2514066 - RNA, 19 nt, Artificial Sequence
  Description of Artificial Sequence: Synthetic oligonucleotide
gaggucugacuucccugcc

SEQ ID NO: 2514067 - RNA, 19 nt, Artificial Sequence
  Description of Artificial Sequence: Synthetic oligonucleotide
ugcccucucagugaagcaa

SEQ ID NO: 2514068 - RNA, 19 nt, Artificial Sequence
  Description of Artificial Sequence: Synthetic oligonucleotide
gacuccugaugcaucugug

SEQ ID NO: 2514069 - RNA, 19 nt, Artificial Sequence
  Description of Artificial Sequence: Synthetic oligonucleotide
gauagcagcacagguuucu

SEQ ID NO: 2514070 - RNA, 19 nt, Artificial Sequence
  Description of Artificial Sequence: Synthetic oligonucleotide
aggccccaccgccauugcc

SEQ ID NO: 2514071 - RNA, 19 nt, Artificial Sequence
  Description of Artificial Sequence: Synthetic oligonucleotide
cuaugcaaaguacacuuau

SEQ ID NO: 2514072 - RNA, 19 nt, Artificial Sequence
  Description of Artificial Sequence: Synthetic oligonucleotide
uacagugcuguaggcauua

SEQ ID NO: 2514073 - RNA, 19 nt, Artificial Sequence
  Description of Artificial Sequence: Synthetic oligonucleotide
cagcccguggauaaaagua

SEQ ID NO: 2514074 - RNA, 19 nt, Artificial Sequence
  Description of Artificial Sequence: Synthetic oligonucleotide
ugugugugugugugcuuaa

SEQ ID NO: 2514075 - RNA, 19 nt, Artificial Sequence
  Description of Artificial Sequence: Synthetic oligonucleotide
gaaggacuccugaugcauc

SEQ ID NO: 2514076 - RNA, 19 nt, Artificial Sequence
  Description of Artificial Sequence: Synthetic oligonucleotide
caaggggaguuaauggcaa

SEQ ID NO: 2514077 - RNA, 19 nt, Artificial Sequence
  Description of Artificial Sequence: Synthetic oligonucleotide
acaaaacacguaauuugua

SEQ ID NO: 2514078 - RNA, 19 nt, Artificial Sequence
  Description of Artificial Sequence: Synthetic oligonucleotide
uaacccugugugugugugu

SEQ ID NO: 2514079 - RNA, 19 nt, Artificial Sequence
  Description of Artificial Sequence: Synthetic oligonucleotide
agguuucuuaauccauauu

SEQ ID NO: 2514080 - RNA, 19 nt, Artificial Sequence
  Description of Artificial Sequence: Synthetic oligonucleotide
ccauugccagcuucuaacc

SEQ ID NO: 2514081 - RNA, 19 nt, Artificial Sequence
  Description of Artificial Sequence: Synthetic oligonucleotide
cuggcccuccuguucuccg

SEQ ID NO: 2514082 - RNA, 19 nt, Artificial Sequence
  Description of Artificial Sequence: Synthetic oligonucleotide
acuccauuguaaugaucuu

SEQ ID NO: 2514083 - RNA, 19 nt, Artificial Sequence
  Description of Artificial Sequence: Synthetic oligonucleotide
uugaaaaguucuggcccuc

SEQ ID NO: 2514084 - RNA, 19 nt, Artificial Sequence
  Description of Artificial Sequence: Synthetic oligonucleotide
cacaaagcaccucucugaa

SEQ ID NO: 2514085 - RNA, 19 nt, Artificial Sequence
  Description of Artificial Sequence: Synthetic oligonucleotide
ccaauauaaauguccaugu

SEQ ID NO: 2514086 - RNA, 19 nt, Artificial Sequence
  Description of Artificial Sequence: Synthetic oligonucleotide
ggcaggauagcagcacagg

SEQ ID NO: 2514087 - RNA, 19 nt, Artificial Sequence
  Description of Artificial Sequence: Synthetic oligonucleotide
ggucacacaaagcaccucu

SEQ ID NO: 2514088 - RNA, 19 nt, Artificial Sequence
  Description of Artificial Sequence: Synthetic oligonucleotide
ucccugcccucucagugaa

SEQ ID NO: 2514089 - RNA, 19 nt, Artificial Sequence
  Description of Artificial Sequence: Synthetic oligonucleotide
uacugcaaacugacuccau

SEQ ID NO: 2514090 - RNA, 19 nt, Artificial Sequence
  Description of Artificial Sequence: Synthetic oligonucleotide
cagugaagcaagguaccuc

SEQ ID NO: 2514091 - RNA, 19 nt, Artificial Sequence
  Description of Artificial Sequence: Synthetic oligonucleotide
agcccguggauaaaaguau

SEQ ID NO: 2514092 - RNA, 19 nt, Artificial Sequence
  Description of Artificial Sequence: Synthetic oligonucleotide
aagcagcccguggauaaaa

SEQ ID NO: 2514093 - RNA, 19 nt, Artificial Sequence
  Description of Artificial Sequence: Synthetic oligonucleotide
aaagcagcccguggauaaa

SEQ ID NO: 2514094 - RNA, 19 nt, Artificial Sequence
  Description of Artificial Sequence: Synthetic oligonucleotide
agguaccucuguauuucag

SEQ ID NO: 2514095 - RNA, 19 nt, Artificial Sequence
  Description of Artificial Sequence: Synthetic oligonucleotide
gaagggcuggaaggacucc

SEQ ID NO: 2514096 - RNA, 19 nt, Artificial Sequence
  Description of Artificial Sequence: Synthetic oligonucleotide
acuaugcaaaguacacuua

SEQ ID NO: 2514097 - RNA, 19 nt, Artificial Sequence
  Description of Artificial Sequence: Synthetic oligonucleotide
guacacacuuaguuuacuu

SEQ ID NO: 2514098 - RNA, 19 nt, Artificial Sequence
  Description of Artificial Sequence: Synthetic oligonucleotide
ugugugugugugugugcuu

SEQ ID NO: 2514099 - RNA, 19 nt, Artificial Sequence
  Description of Artificial Sequence: Synthetic oligonucleotide
guguuggaacaggucacac

SEQ ID NO: 2514100 - RNA, 19 nt, Artificial Sequence
  Description of Artificial Sequence: Synthetic oligonucleotide
ggcauuaaccaugccaaaa

SEQ ID NO: 2514101 - RNA, 19 nt, Artificial Sequence
  Description of Artificial Sequence: Synthetic oligonucleotide
guucuggcccuccuguucu

SEQ ID NO: 2514102 - RNA, 19 nt, Artificial Sequence
  Description of Artificial Sequence: Synthetic oligonucleotide
cuccgagaccuacuggaga

SEQ ID NO: 2514103 - RNA, 19 nt, Artificial Sequence
  Description of Artificial Sequence: Synthetic oligonucleotide
cgguauguacugcaaacug

SEQ ID NO: 2514104 - RNA, 19 nt, Artificial Sequence
  Description of Artificial Sequence: Synthetic oligonucleotide
cuugaaggagccugacacu

SEQ ID NO: 2514105 - RNA, 19 nt, Artificial Sequence
  Description of Artificial Sequence: Synthetic oligonucleotide
agcagcccguggauaaaag

SEQ ID NO: 2514106 - RNA, 19 nt, Artificial Sequence
  Description of Artificial Sequence: Synthetic oligonucleotide
accgccauugccagcuucu

SEQ ID NO: 2514107 - RNA, 19 nt, Artificial Sequence
  Description of Artificial Sequence: Synthetic oligonucleotide
cugacuucccugcccucuc

SEQ ID NO: 2514108 - RNA, 19 nt, Artificial Sequence
  Description of Artificial Sequence: Synthetic oligonucleotide
cguggauaaaaguaugaaa

SEQ ID NO: 2514109 - RNA, 19 nt, Artificial Sequence
  Description of Artificial Sequence: Synthetic oligonucleotide
ccugcccucucagugaagc

SEQ ID NO: 2514110 - RNA, 19 nt, Artificial Sequence
  Description of Artificial Sequence: Synthetic oligonucleotide
gucacacaaagcaccucuc

SEQ ID NO: 2514111 - RNA, 19 nt, Artificial Sequence
  Description of Artificial Sequence: Synthetic oligonucleotide
agccugacacucgguaugu

SEQ ID NO: 2514112 - RNA, 19 nt, Artificial Sequence
  Description of Artificial Sequence: Synthetic oligonucleotide
cacguaauuuguacacacu

SEQ ID NO: 2514113 - RNA, 19 nt, Artificial Sequence
  Description of Artificial Sequence: Synthetic oligonucleotide
aagugccauuauauuuaau

SEQ ID NO: 2514114 - RNA, 19 nt, Artificial Sequence
  Description of Artificial Sequence: Synthetic oligonucleotide
uggcccuccuguucuccga

SEQ ID NO: 2514115 - RNA, 19 nt, Artificial Sequence
  Description of Artificial Sequence: Synthetic oligonucleotide
gugugugugugugugcuua

SEQ ID NO: 2514116 - RNA, 19 nt, Artificial Sequence
  Description of Artificial Sequence: Synthetic oligonucleotide
gcaaacugacuccauugua

SEQ ID NO: 2514117 - RNA, 19 nt, Artificial Sequence
  Description of Artificial Sequence: Synthetic oligonucleotide
gugaagcaagguaccucug

SEQ ID NO: 2514118 - RNA, 19 nt, Artificial Sequence
  Description of Artificial Sequence: Synthetic oligonucleotide
caucuguguuggaacaggu

SEQ ID NO: 2514119 - RNA, 19 nt, Artificial Sequence
  Description of Artificial Sequence: Synthetic oligonucleotide
agacagacaaggggaguua

SEQ ID NO: 2514120 - RNA, 19 nt, Artificial Sequence
  Description of Artificial Sequence: Synthetic oligonucleotide
accuacuggagaggucuga

SEQ ID NO: 2514121 - RNA, 19 nt, Artificial Sequence
  Description of Artificial Sequence: Synthetic oligonucleotide
guuaguucuaaagcagcuu

SEQ ID NO: 2514122 - RNA, 19 nt, Artificial Sequence
  Description of Artificial Sequence: Synthetic oligonucleotide
gugugugugugugugugcu

SEQ ID NO: 2514123 - RNA, 19 nt, Artificial Sequence
  Description of Artificial Sequence: Synthetic oligonucleotide
gcccucucagugaagcaag

SEQ ID NO: 2514124 - RNA, 19 nt, Artificial Sequence
  Description of Artificial Sequence: Synthetic oligonucleotide
cacucgguauguacugcaa

SEQ ID NO: 2514125 - RNA, 19 nt, Artificial Sequence
  Description of Artificial Sequence: Synthetic oligonucleotide
gccagcuucuaacccugug

SEQ ID NO: 2514126 - RNA, 19 nt, Artificial Sequence
  Description of Artificial Sequence: Synthetic oligonucleotide
acccugugugugugugugu

SEQ ID NO: 2514127 - RNA, 19 nt, Artificial Sequence
  Description of Artificial Sequence: Synthetic oligonucleotide
cccucucagugaagcaagg

SEQ ID NO: 2514128 - RNA, 19 nt, Artificial Sequence
  Description of Artificial Sequence: Synthetic oligonucleotide
cuucaucguuaguucuaaa

SEQ ID NO: 2514129 - RNA, 19 nt, Artificial Sequence
  Description of Artificial Sequence: Synthetic oligonucleotide
cuacuggagaggucugacu

SEQ ID NO: 2514130 - RNA, 19 nt, Artificial Sequence
  Description of Artificial Sequence: Synthetic oligonucleotide
guaaugaucuuggcaggau

SEQ ID NO: 2514131 - RNA, 19 nt, Artificial Sequence
  Description of Artificial Sequence: Synthetic oligonucleotide
ccuuucauaggauaauauu

SEQ ID NO: 2514132 - RNA, 19 nt, Artificial Sequence
  Description of Artificial Sequence: Synthetic oligonucleotide
cccguggauaaaaguauga

SEQ ID NO: 2514133 - RNA, 19 nt, Artificial Sequence
  Description of Artificial Sequence: Synthetic oligonucleotide
gccaacuggagacuuacuu

SEQ ID NO: 2514134 - RNA, 19 nt, Artificial Sequence
  Description of Artificial Sequence: Synthetic oligonucleotide
ggucugacuucccugcccu

SEQ ID NO: 2514135 - RNA, 19 nt, Artificial Sequence
  Description of Artificial Sequence: Synthetic oligonucleotide
ccuccuguucuccgagacc

SEQ ID NO: 2514136 - RNA, 19 nt, Artificial Sequence
  Description of Artificial Sequence: Synthetic oligonucleotide
gcccguggauaaaaguaug

SEQ ID NO: 2514137 - RNA, 19 nt, Artificial Sequence
  Description of Artificial Sequence: Synthetic oligonucleotide
ggcccuccuguucuccgag

SEQ ID NO: 2514138 - RNA, 19 nt, Artificial Sequence
  Description of Artificial Sequence: Synthetic oligonucleotide
cuccugaugcaucuguguu

SEQ ID NO: 2514139 - RNA, 19 nt, Artificial Sequence
  Description of Artificial Sequence: Synthetic oligonucleotide
caccgccauugccagcuuc

SEQ ID NO: 2514140 - RNA, 19 nt, Artificial Sequence
  Description of Artificial Sequence: Synthetic oligonucleotide
ugaaggccccaccgccauu

SEQ ID NO: 2514141 - RNA, 19 nt, Artificial Sequence
  Description of Artificial Sequence: Synthetic oligonucleotide
ggauaauauuuugcauaaa

SEQ ID NO: 2514142 - RNA, 19 nt, Artificial Sequence
  Description of Artificial Sequence: Synthetic oligonucleotide
ggccaaggggaagggcugg

SEQ ID NO: 2514143 - RNA, 19 nt, Artificial Sequence
  Description of Artificial Sequence: Synthetic oligonucleotide
ggggaguuaauggcaaugu

SEQ ID NO: 2514144 - RNA, 19 nt, Artificial Sequence
  Description of Artificial Sequence: Synthetic oligonucleotide
cccugugugugugugugug

SEQ ID NO: 2514145 - RNA, 19 nt, Artificial Sequence
  Description of Artificial Sequence: Synthetic oligonucleotide
cugcccucucagugaagca

SEQ ID NO: 2514146 - RNA, 19 nt, Artificial Sequence
  Description of Artificial Sequence: Synthetic oligonucleotide
ccucucugaaggccccacc

SEQ ID NO: 2514147 - RNA, 19 nt, Artificial Sequence
  Description of Artificial Sequence: Synthetic oligonucleotide
gccccaccgccauugccag

SEQ ID NO: 2514148 - RNA, 19 nt, Artificial Sequence
  Description of Artificial Sequence: Synthetic oligonucleotide
guagccaacuggagacuua

SEQ ID NO: 2514149 - RNA, 19 nt, Artificial Sequence
  Description of Artificial Sequence: Synthetic oligonucleotide
gugugugugugugcuuaaa

SEQ ID NO: 2514150 - RNA, 19 nt, Artificial Sequence
  Description of Artificial Sequence: Synthetic oligonucleotide
agccaacuggagacuuacu

SEQ ID NO: 2514151 - RNA, 19 nt, Artificial Sequence
  Description of Artificial Sequence: Synthetic oligonucleotide
cagacagacaaggggaguu

SEQ ID NO: 2514152 - RNA, 19 nt, Artificial Sequence
  Description of Artificial Sequence: Synthetic oligonucleotide
cuguucuccgagaccuacu

SEQ ID NO: 2514153 - RNA, 19 nt, Artificial Sequence
  Description of Artificial Sequence: Synthetic oligonucleotide
ggagccugacacucgguau

SEQ ID NO: 2514154 - RNA, 19 nt, Artificial Sequence
  Description of Artificial Sequence: Synthetic oligonucleotide
ccaacuggagacuuacuuu

SEQ ID NO: 2514155 - RNA, 19 nt, Artificial Sequence
  Description of Artificial Sequence: Synthetic oligonucleotide
ccguggauaaaaguaugaa

SEQ ID NO: 2514156 - RNA, 19 nt, Artificial Sequence
  Description of Artificial Sequence: Synthetic oligonucleotide
cguuaguucuaaagcagcu

SEQ ID NO: 2514157 - RNA, 19 nt, Artificial Sequence
  Description of Artificial Sequence: Synthetic oligonucleotide
ccgagaccuacuggagagg

SEQ ID NO: 2514158 - RNA, 19 nt, Artificial Sequence
  Description of Artificial Sequence: Synthetic oligonucleotide
ccucuguauuucagggaga

SEQ ID NO: 2514159 - RNA, 19 nt, Artificial Sequence
  Description of Artificial Sequence: Synthetic oligonucleotide
cugcacacuguacuuuauu

SEQ ID NO: 2514160 - RNA, 19 nt, Artificial Sequence
  Description of Artificial Sequence: Synthetic oligonucleotide
cugaugcaucuguguugga

SEQ ID NO: 2514161 - RNA, 19 nt, Artificial Sequence
  Description of Artificial Sequence: Synthetic oligonucleotide
ggcuggaaggacuccugau

SEQ ID NO: 2514162 - RNA, 19 nt, Artificial Sequence
  Description of Artificial Sequence: Synthetic oligonucleotide
gguagccaacuggagacuu

SEQ ID NO: 2514163 - RNA, 19 nt, Artificial Sequence
  Description of Artificial Sequence: Synthetic oligonucleotide
gcccuccuguucuccgaga

SEQ ID NO: 2514164 - RNA, 19 nt, Artificial Sequence
  Description of Artificial Sequence: Synthetic oligonucleotide
ccugugugugugugugugu

SEQ ID NO: 2514165 - RNA, 19 nt, Artificial Sequence
  Description of Artificial Sequence: Synthetic oligonucleotide
ccccaauauaaauguccau

SEQ ID NO: 2514166 - RNA, 19 nt, Artificial Sequence
  Description of Artificial Sequence: Synthetic oligonucleotide
cccugcccucucagugaag

SEQ ID NO: 2514167 - RNA, 19 nt, Artificial Sequence
  Description of Artificial Sequence: Synthetic oligonucleotide
cgagaccuacuggagaggu

SEQ ID NO: 2514168 - RNA, 19 nt, Artificial Sequence
  Description of Artificial Sequence: Synthetic oligonucleotide
gcugcacacuguacuuuau

SEQ ID NO: 2514169 - RNA, 19 nt, Artificial Sequence
  Description of Artificial Sequence: Synthetic oligonucleotide
cgccauugccagcuucuaa

SEQ ID NO: 2514170 - RNA, 19 nt, Artificial Sequence
  Description of Artificial Sequence: Synthetic oligonucleotide
ccgccauugccagcuucua

SEQ ID NO: 2514171 - RNA, 19 nt, Artificial Sequence
  Description of Artificial Sequence: Synthetic oligonucleotide
uuaguaacaucaaucagag

SEQ ID NO: 2514172 - RNA, 19 nt, Artificial Sequence
  Description of Artificial Sequence: Synthetic oligonucleotide
agaugaucuccuuugagcc

SEQ ID NO: 2514173 - RNA, 19 nt, Artificial Sequence
  Description of Artificial Sequence: Synthetic oligonucleotide
aauuccaugaaaagagugc

SEQ ID NO: 2514174 - RNA, 19 nt, Artificial Sequence
  Description of Artificial Sequence: Synthetic oligonucleotide
augcugaguagcuagaacc

SEQ ID NO: 2514175 - RNA, 19 nt, Artificial Sequence
  Description of Artificial Sequence: Synthetic oligonucleotide
aagacucuacugcugauac

SEQ ID NO: 2514176 - RNA, 19 nt, Artificial Sequence
  Description of Artificial Sequence: Synthetic oligonucleotide
cuaagaaugaaccccaccc

SEQ ID NO: 2514177 - RNA, 19 nt, Artificial Sequence
  Description of Artificial Sequence: Synthetic oligonucleotide
aagaaugaaccccacccuc

SEQ ID NO: 2514178 - RNA, 19 nt, Artificial Sequence
  Description of Artificial Sequence: Synthetic oligonucleotide
gauaccagcaugucagugg

SEQ ID NO: 2514179 - RNA, 19 nt, Artificial Sequence
  Description of Artificial Sequence: Synthetic oligonucleotide
aauacugacuggcaucaag

SEQ ID NO: 2514180 - RNA, 19 nt, Artificial Sequence
  Description of Artificial Sequence: Synthetic oligonucleotide
uuuguuacgcugcacaacu

SEQ ID NO: 2514181 - RNA, 19 nt, Artificial Sequence
  Description of Artificial Sequence: Synthetic oligonucleotide
aauaagaauuccaugaaaa

SEQ ID NO: 2514182 - RNA, 19 nt, Artificial Sequence
  Description of Artificial Sequence: Synthetic oligonucleotide
auaagaauuccaugaaaag

SEQ ID NO: 2514183 - RNA, 19 nt, Artificial Sequence
  Description of Artificial Sequence: Synthetic oligonucleotide
aaagcaggucagcucacgc

SEQ ID NO: 2514184 - RNA, 19 nt, Artificial Sequence
  Description of Artificial Sequence: Synthetic oligonucleotide
caucaaggaauuuucgugg

SEQ ID NO: 2514185 - RNA, 19 nt, Artificial Sequence
  Description of Artificial Sequence: Synthetic oligonucleotide
uguuacgcugcacaacucg

SEQ ID NO: 2514186 - RNA, 19 nt, Artificial Sequence
  Description of Artificial Sequence: Synthetic oligonucleotide
uauccacuaagcaucagug

SEQ ID NO: 2514187 - RNA, 19 nt, Artificial Sequence
  Description of Artificial Sequence: Synthetic oligonucleotide
uguuaguaacaucaaucag

SEQ ID NO: 2514188 - RNA, 19 nt, Artificial Sequence
  Description of Artificial Sequence: Synthetic oligonucleotide
cugaauaagaauuccauga

SEQ ID NO: 2514189 - RNA, 19 nt, Artificial Sequence
  Description of Artificial Sequence: Synthetic oligonucleotide
gauguuaguaacaucaauc

SEQ ID NO: 2514190 - RNA, 19 nt, Artificial Sequence
  Description of Artificial Sequence: Synthetic oligonucleotide
auguuaguaacaucaauca

SEQ ID NO: 2514191 - RNA, 19 nt, Artificial Sequence
  Description of Artificial Sequence: Synthetic oligonucleotide
auggauauacuccagcucu

SEQ ID NO: 2514192 - RNA, 19 nt, Artificial Sequence
  Description of Artificial Sequence: Synthetic oligonucleotide
auaccagcaugucaguggc

SEQ ID NO: 2514193 - RNA, 19 nt, Artificial Sequence
  Description of Artificial Sequence: Synthetic oligonucleotide
cuaagguagugcuugcugg

SEQ ID NO: 2514194 - RNA, 19 nt, Artificial Sequence
  Description of Artificial Sequence: Synthetic oligonucleotide
aaucagaggaccgggagag

SEQ ID NO: 2514195 - RNA, 19 nt, Artificial Sequence
  Description of Artificial Sequence: Synthetic oligonucleotide
ugaauaagaauuccaugaa

SEQ ID NO: 2514196 - RNA, 19 nt, Artificial Sequence
  Description of Artificial Sequence: Synthetic oligonucleotide
uguaggcaaaagcagguca

SEQ ID NO: 2514197 - RNA, 19 nt, Artificial Sequence
  Description of Artificial Sequence: Synthetic oligonucleotide
uggaucacacuccaagucc

SEQ ID NO: 2514198 - RNA, 19 nt, Artificial Sequence
  Description of Artificial Sequence: Synthetic oligonucleotide
aacccugaauaagaauucc

SEQ ID NO: 2514199 - RNA, 19 nt, Artificial Sequence
  Description of Artificial Sequence: Synthetic oligonucleotide
guuaguaacaucaaucaga

SEQ ID NO: 2514200 - RNA, 19 nt, Artificial Sequence
  Description of Artificial Sequence: Synthetic oligonucleotide
gucaguggcacuaagguag

SEQ ID NO: 2514201 - RNA, 19 nt, Artificial Sequence
  Description of Artificial Sequence: Synthetic oligonucleotide
ucaaucagaggaccgggag

SEQ ID NO: 2514202 - RNA, 19 nt, Artificial Sequence
  Description of Artificial Sequence: Synthetic oligonucleotide
aaugaaccccacccucacc

SEQ ID NO: 2514203 - RNA, 19 nt, Artificial Sequence
  Description of Artificial Sequence: Synthetic oligonucleotide
cagaugaucuccuuugagc

SEQ ID NO: 2514204 - RNA, 19 nt, Artificial Sequence
  Description of Artificial Sequence: Synthetic oligonucleotide
uuuucguggaguagggaug

SEQ ID NO: 2514205 - RNA, 19 nt, Artificial Sequence
  Description of Artificial Sequence: Synthetic oligonucleotide
uccucuaugaggaccaagu

SEQ ID NO: 2514206 - RNA, 19 nt, Artificial Sequence
  Description of Artificial Sequence: Synthetic oligonucleotide
cucuaugaggaccaagugc

SEQ ID NO: 2514207 - RNA, 19 nt, Artificial Sequence
  Description of Artificial Sequence: Synthetic oligonucleotide
uccacuaagcaucagugua

SEQ ID NO: 2514208 - RNA, 19 nt, Artificial Sequence
  Description of Artificial Sequence: Synthetic oligonucleotide
ugcacaacucggcuagugg

SEQ ID NO: 2514209 - RNA, 19 nt, Artificial Sequence
  Description of Artificial Sequence: Synthetic oligonucleotide
uaagaaugaaccccacccu

SEQ ID NO: 2514210 - RNA, 19 nt, Artificial Sequence
  Description of Artificial Sequence: Synthetic oligonucleotide
aguggcacuaagguagugc

SEQ ID NO: 2514211 - RNA, 19 nt, Artificial Sequence
  Description of Artificial Sequence: Synthetic oligonucleotide
auuuucguggaguagggau

SEQ ID NO: 2514212 - RNA, 19 nt, Artificial Sequence
  Description of Artificial Sequence: Synthetic oligonucleotide
ugcugaguagcuagaaccc

SEQ ID NO: 2514213 - RNA, 19 nt, Artificial Sequence
  Description of Artificial Sequence: Synthetic oligonucleotide
augucuugcagguucaccu

SEQ ID NO: 2514214 - RNA, 19 nt, Artificial Sequence
  Description of Artificial Sequence: Synthetic oligonucleotide
caguguaggcaaaagcagg

SEQ ID NO: 2514215 - RNA, 19 nt, Artificial Sequence
  Description of Artificial Sequence: Synthetic oligonucleotide
ggaauuuucguggaguagg

SEQ ID NO: 2514216 - RNA, 19 nt, Artificial Sequence
  Description of Artificial Sequence: Synthetic oligonucleotide
aaagagugcugcucuccuc

SEQ ID NO: 2514217 - RNA, 19 nt, Artificial Sequence
  Description of Artificial Sequence: Synthetic oligonucleotide
aucaguguaggcaaaagca

SEQ ID NO: 2514218 - RNA, 19 nt, Artificial Sequence
  Description of Artificial Sequence: Synthetic oligonucleotide
aagguagugcuugcuggcc

SEQ ID NO: 2514219 - RNA, 19 nt, Artificial Sequence
  Description of Artificial Sequence: Synthetic oligonucleotide
cucuggaucacacuccaag

SEQ ID NO: 2514220 - RNA, 19 nt, Artificial Sequence
  Description of Artificial Sequence: Synthetic oligonucleotide
uccuuugagccucugcagc

SEQ ID NO: 2514221 - RNA, 19 nt, Artificial Sequence
  Description of Artificial Sequence: Synthetic oligonucleotide
ucaaggaauuuucguggag

SEQ ID NO: 2514222 - RNA, 19 nt, Artificial Sequence
  Description of Artificial Sequence: Synthetic oligonucleotide
caucaguguaggcaaaagc

SEQ ID NO: 2514223 - RNA, 19 nt, Artificial Sequence
  Description of Artificial Sequence: Synthetic oligonucleotide
aauuccucuaugaggacca

SEQ ID NO: 2514224 - RNA, 19 nt, Artificial Sequence
  Description of Artificial Sequence: Synthetic oligonucleotide
aguggauuugauguacagg

SEQ ID NO: 2514225 - RNA, 19 nt, Artificial Sequence
  Description of Artificial Sequence: Synthetic oligonucleotide
ugauguacaggugucggug

SEQ ID NO: 2514226 - RNA, 19 nt, Artificial Sequence
  Description of Artificial Sequence: Synthetic oligonucleotide
ugaguagcuagaacccgag

SEQ ID NO: 2514227 - RNA, 19 nt, Artificial Sequence
  Description of Artificial Sequence: Synthetic oligonucleotide
gaauuuucguggaguaggg

SEQ ID NO: 2514228 - RNA, 19 nt, Artificial Sequence
  Description of Artificial Sequence: Synthetic oligonucleotide
gacucuacugcugauacca

SEQ ID NO: 2514229 - RNA, 19 nt, Artificial Sequence
  Description of Artificial Sequence: Synthetic oligonucleotide
gaauaagaauuccaugaaa

SEQ ID NO: 2514230 - RNA, 19 nt, Artificial Sequence
  Description of Artificial Sequence: Synthetic oligonucleotide
guggauuugauguacaggu

SEQ ID NO: 2514231 - RNA, 19 nt, Artificial Sequence
  Description of Artificial Sequence: Synthetic oligonucleotide
caugagaacucaucuuccc

SEQ ID NO: 2514232 - RNA, 19 nt, Artificial Sequence
  Description of Artificial Sequence: Synthetic oligonucleotide
uaugcugaguagcuagaac

SEQ ID NO: 2514233 - RNA, 19 nt, Artificial Sequence
  Description of Artificial Sequence: Synthetic oligonucleotide
agccugaggucacugaguc

SEQ ID NO: 2514234 - RNA, 19 nt, Artificial Sequence
  Description of Artificial Sequence: Synthetic oligonucleotide
acagaugaucuccuuugag

SEQ ID NO: 2514235 - RNA, 19 nt, Artificial Sequence
  Description of Artificial Sequence: Synthetic oligonucleotide
cucuguguacuucacgccc

SEQ ID NO: 2514236 - RNA, 19 nt, Artificial Sequence
  Description of Artificial Sequence: Synthetic oligonucleotide
acuaagcaucaguguaggc

SEQ ID NO: 2514237 - RNA, 19 nt, Artificial Sequence
  Description of Artificial Sequence: Synthetic oligonucleotide
acaucaaucagaggaccgg

SEQ ID NO: 2514238 - RNA, 19 nt, Artificial Sequence
  Description of Artificial Sequence: Synthetic oligonucleotide
uaacaucaaucagaggacc

SEQ ID NO: 2514239 - RNA, 19 nt, Artificial Sequence
  Description of Artificial Sequence: Synthetic oligonucleotide
ucacacuugaguugccggc

SEQ ID NO: 2514240 - RNA, 19 nt, Artificial Sequence
  Description of Artificial Sequence: Synthetic oligonucleotide
gauguacaggugucggugc

SEQ ID NO: 2514241 - RNA, 19 nt, Artificial Sequence
  Description of Artificial Sequence: Synthetic oligonucleotide
accagcaugucaguggcac

SEQ ID NO: 2514242 - RNA, 19 nt, Artificial Sequence
  Description of Artificial Sequence: Synthetic oligonucleotide
  modified_base (14)..(14): a, c, u, g, unknown or other
acccucacccacuncgggg

SEQ ID NO: 2514243 - RNA, 19 nt, Artificial Sequence
  Description of Artificial Sequence: Synthetic oligonucleotide
uccuugaugucuugcaggu

SEQ ID NO: 2514244 - RNA, 19 nt, Artificial Sequence
  Description of Artificial Sequence: Synthetic oligonucleotide
ucggcuaguggauuugaug

SEQ ID NO: 2514245 - RNA, 19 nt, Artificial Sequence
  Description of Artificial Sequence: Synthetic oligonucleotide
guacuucacgcccuggucc

SEQ ID NO: 2514246 - RNA, 19 nt, Artificial Sequence
  Description of Artificial Sequence: Synthetic oligonucleotide
acaggugucggugcaauuc

SEQ ID NO: 2514247 - RNA, 19 nt, Artificial Sequence
  Description of Artificial Sequence: Synthetic oligonucleotide
gauauacuccagcucugug

SEQ ID NO: 2514248 - RNA, 19 nt, Artificial Sequence
  Description of Artificial Sequence: Synthetic oligonucleotide
cuaagcaucaguguaggca

SEQ ID NO: 2514249 - RNA, 19 nt, Artificial Sequence
  Description of Artificial Sequence: Synthetic oligonucleotide
ucaucuucuugcugugaag

SEQ ID NO: 2514250 - RNA, 19 nt, Artificial Sequence
  Description of Artificial Sequence: Synthetic oligonucleotide
uccacuuucuauccacuaa

SEQ ID NO: 2514251 - RNA, 19 nt, Artificial Sequence
  Description of Artificial Sequence: Synthetic oligonucleotide
acggucguuauuuucuugu

SEQ ID NO: 2514252 - RNA, 19 nt, Artificial Sequence
  Description of Artificial Sequence: Synthetic oligonucleotide
cuggcaucaaggaauuuuc

SEQ ID NO: 2514253 - RNA, 19 nt, Artificial Sequence
  Description of Artificial Sequence: Synthetic oligonucleotide
ggugcaauuccucuaugag

SEQ ID NO: 2514254 - RNA, 19 nt, Artificial Sequence
  Description of Artificial Sequence: Synthetic oligonucleotide
agacucuacugcugauacc

SEQ ID NO: 2514255 - RNA, 19 nt, Artificial Sequence
  Description of Artificial Sequence: Synthetic oligonucleotide
gaguagggauguuaguaac

SEQ ID NO: 2514256 - RNA, 19 nt, Artificial Sequence
  Description of Artificial Sequence: Synthetic oligonucleotide
ugaguugccggcagcagaa

SEQ ID NO: 2514257 - RNA, 19 nt, Artificial Sequence
  Description of Artificial Sequence: Synthetic oligonucleotide
guaacaucaaucagaggac

SEQ ID NO: 2514258 - RNA, 19 nt, Artificial Sequence
  Description of Artificial Sequence: Synthetic oligonucleotide
aagcaggucagcucacgcu

SEQ ID NO: 2514259 - RNA, 19 nt, Artificial Sequence
  Description of Artificial Sequence: Synthetic oligonucleotide
uuacgcugcacaacucggc

SEQ ID NO: 2514260 - RNA, 19 nt, Artificial Sequence
  Description of Artificial Sequence: Synthetic oligonucleotide
cagaauacugacuggcauc

SEQ ID NO: 2514261 - RNA, 19 nt, Artificial Sequence
  Description of Artificial Sequence: Synthetic oligonucleotide
ucuguguacuucacgcccu

SEQ ID NO: 2514262 - RNA, 19 nt, Artificial Sequence
  Description of Artificial Sequence: Synthetic oligonucleotide
gcugcacuaagaaugaacc

SEQ ID NO: 2514263 - RNA, 19 nt, Artificial Sequence
  Description of Artificial Sequence: Synthetic oligonucleotide
aucaaggaauuuucgugga

SEQ ID NO: 2514264 - RNA, 19 nt, Artificial Sequence
  Description of Artificial Sequence: Synthetic oligonucleotide
uggauauacuccagcucug

SEQ ID NO: 2514265 - RNA, 19 nt, Artificial Sequence
  Description of Artificial Sequence: Synthetic oligonucleotide
uggaguagggauguuagua

SEQ ID NO: 2514266 - RNA, 19 nt, Artificial Sequence
  Description of Artificial Sequence: Synthetic oligonucleotide
caauuccucuaugaggacc

SEQ ID NO: 2514267 - RNA, 19 nt, Artificial Sequence
  Description of Artificial Sequence: Synthetic oligonucleotide
cuugcuugauggcagccug

SEQ ID NO: 2514268 - RNA, 19 nt, Artificial Sequence
  Description of Artificial Sequence: Synthetic oligonucleotide
caacccugaauaagaauuc

SEQ ID NO: 2514269 - RNA, 19 nt, Artificial Sequence
  Description of Artificial Sequence: Synthetic oligonucleotide
guuacgcugcacaacucgg

SEQ ID NO: 2514270 - RNA, 19 nt, Artificial Sequence
  Description of Artificial Sequence: Synthetic oligonucleotide
uaguaacaucaaucagagg

SEQ ID NO: 2514271 - RNA, 19 nt, Artificial Sequence
  Description of Artificial Sequence: Synthetic oligonucleotide
ucacgcuaugcugaguagc

SEQ ID NO: 2514272 - RNA, 19 nt, Artificial Sequence
  Description of Artificial Sequence: Synthetic oligonucleotide
aacccgaggcugcacuaag

SEQ ID NO: 2514273 - RNA, 19 nt, Artificial Sequence
  Description of Artificial Sequence: Synthetic oligonucleotide
cacuaagcaucaguguagg

SEQ ID NO: 2514274 - RNA, 19 nt, Artificial Sequence
  Description of Artificial Sequence: Synthetic oligonucleotide
gaguagcuagaacccgagg

SEQ ID NO: 2514275 - RNA, 19 nt, Artificial Sequence
  Description of Artificial Sequence: Synthetic oligonucleotide
cuggcaacccugaauaaga

SEQ ID NO: 2514276 - RNA, 19 nt, Artificial Sequence
  Description of Artificial Sequence: Synthetic oligonucleotide
uagaacccgaggcugcacu

SEQ ID NO: 2514277 - RNA, 19 nt, Artificial Sequence
  Description of Artificial Sequence: Synthetic oligonucleotide
gaaugaaccccacccucac

SEQ ID NO: 2514278 - RNA, 19 nt, Artificial Sequence
  Description of Artificial Sequence: Synthetic oligonucleotide
ucccucacacuugaguugc

SEQ ID NO: 2514279 - RNA, 19 nt, Artificial Sequence
  Description of Artificial Sequence: Synthetic oligonucleotide
gugaaguuccagccugagg

SEQ ID NO: 2514280 - RNA, 19 nt, Artificial Sequence
  Description of Artificial Sequence: Synthetic oligonucleotide
aaagacucuacugcugaua

SEQ ID NO: 2514281 - RNA, 19 nt, Artificial Sequence
  Description of Artificial Sequence: Synthetic oligonucleotide
agggucagggcauggauau

SEQ ID NO: 2514282 - RNA, 19 nt, Artificial Sequence
  Description of Artificial Sequence: Synthetic oligonucleotide
gaugucuugcagguucacc

SEQ ID NO: 2514283 - RNA, 19 nt, Artificial Sequence
  Description of Artificial Sequence: Synthetic oligonucleotide
uuucguggaguagggaugu

SEQ ID NO: 2514284 - RNA, 19 nt, Artificial Sequence
  Description of Artificial Sequence: Synthetic oligonucleotide
ucagacggucguuauuuuc

SEQ ID NO: 2514285 - RNA, 19 nt, Artificial Sequence
  Description of Artificial Sequence: Synthetic oligonucleotide
aauuuucguggaguaggga

SEQ ID NO: 2514286 - RNA, 19 nt, Artificial Sequence
  Description of Artificial Sequence: Synthetic oligonucleotide
gucguuauuuucuuguccu

SEQ ID NO: 2514287 - RNA, 19 nt, Artificial Sequence
  Description of Artificial Sequence: Synthetic oligonucleotide
caggugucggugcaauucc

SEQ ID NO: 2514288 - RNA, 19 nt, Artificial Sequence
  Description of Artificial Sequence: Synthetic oligonucleotide
ggcacuaagguagugcuug

SEQ ID NO: 2514289 - RNA, 19 nt, Artificial Sequence
  Description of Artificial Sequence: Synthetic oligonucleotide
ccugaauaagaauuccaug

SEQ ID NO: 2514290 - RNA, 19 nt, Artificial Sequence
  Description of Artificial Sequence: Synthetic oligonucleotide
aggucagcucacgcuaugc

SEQ ID NO: 2514291 - RNA, 19 nt, Artificial Sequence
  Description of Artificial Sequence: Synthetic oligonucleotide
uagcuagaacccgaggcug

SEQ ID NO: 2514292 - RNA, 19 nt, Artificial Sequence
  Description of Artificial Sequence: Synthetic oligonucleotide
acuggcaucaaggaauuuu

SEQ ID NO: 2514293 - RNA, 19 nt, Artificial Sequence
  Description of Artificial Sequence: Synthetic oligonucleotide
aggaauuuucguggaguag

SEQ ID NO: 2514294 - RNA, 19 nt, Artificial Sequence
  Description of Artificial Sequence: Synthetic oligonucleotide
  modified_base (2)..(2): a, c, u, g, unknown or other
uncggggcacaccaucaga

SEQ ID NO: 2514295 - RNA, 19 nt, Artificial Sequence
  Description of Artificial Sequence: Synthetic oligonucleotide
gagugcugcucuccucugg

SEQ ID NO: 2514296 - RNA, 19 nt, Artificial Sequence
  Description of Artificial Sequence: Synthetic oligonucleotide
aauccacuuucuauccacu

SEQ ID NO: 2514297 - RNA, 19 nt, Artificial Sequence
  Description of Artificial Sequence: Synthetic oligonucleotide
agcuagaacccgaggcugc

SEQ ID NO: 2514298 - RNA, 19 nt, Artificial Sequence
  Description of Artificial Sequence: Synthetic oligonucleotide
cuuuguuacgcugcacaac

SEQ ID NO: 2514299 - RNA, 19 nt, Artificial Sequence
  Description of Artificial Sequence: Synthetic oligonucleotide
auacuccagcucuguguac

SEQ ID NO: 2514300 - RNA, 19 nt, Artificial Sequence
  Description of Artificial Sequence: Synthetic oligonucleotide
acacuugaguugccggcag

SEQ ID NO: 2514301 - RNA, 19 nt, Artificial Sequence
  Description of Artificial Sequence: Synthetic oligonucleotide
gaggaccaagugcagguuc

SEQ ID NO: 2514302 - RNA, 19 nt, Artificial Sequence
  Description of Artificial Sequence: Synthetic oligonucleotide
agcaggucagcucacgcua

SEQ ID NO: 2514303 - RNA, 19 nt, Artificial Sequence
  Description of Artificial Sequence: Synthetic oligonucleotide
uaggcaaaagcaggucagc

SEQ ID NO: 2514304 - RNA, 19 nt, Artificial Sequence
  Description of Artificial Sequence: Synthetic oligonucleotide
cuaugaggaccaagugcag

SEQ ID NO: 2514305 - RNA, 19 nt, Artificial Sequence
  Description of Artificial Sequence: Synthetic oligonucleotide
gacggucguuauuuucuug

SEQ ID NO: 2514306 - RNA, 19 nt, Artificial Sequence
  Description of Artificial Sequence: Synthetic oligonucleotide
caagugcagguucaucuuc

SEQ ID NO: 2514307 - RNA, 19 nt, Artificial Sequence
  Description of Artificial Sequence: Synthetic oligonucleotide
aguagggauguuaguaaca

SEQ ID NO: 2514308 - RNA, 19 nt, Artificial Sequence
  Description of Artificial Sequence: Synthetic oligonucleotide
ccacuuucuauccacuaag

SEQ ID NO: 2514309 - RNA, 19 nt, Artificial Sequence
  Description of Artificial Sequence: Synthetic oligonucleotide
agaaugaaccccacccuca

SEQ ID NO: 2514310 - RNA, 19 nt, Artificial Sequence
  Description of Artificial Sequence: Synthetic oligonucleotide
guugccggcagcagaauac

SEQ ID NO: 2514311 - RNA, 19 nt, Artificial Sequence
  Description of Artificial Sequence: Synthetic oligonucleotide
cagugggcccuccaaagac

SEQ ID NO: 2514312 - RNA, 19 nt, Artificial Sequence
  Description of Artificial Sequence: Synthetic oligonucleotide
guagcuagaacccgaggcu

SEQ ID NO: 2514313 - RNA, 19 nt, Artificial Sequence
  Description of Artificial Sequence: Synthetic oligonucleotide
ggcauggauauacuccagc

SEQ ID NO: 2514314 - RNA, 19 nt, Artificial Sequence
  Description of Artificial Sequence: Synthetic oligonucleotide
ugacuggcaucaaggaauu

SEQ ID NO: 2514315 - RNA, 19 nt, Artificial Sequence
  Description of Artificial Sequence: Synthetic oligonucleotide
cucccucacacuugaguug

SEQ ID NO: 2514316 - RNA, 19 nt, Artificial Sequence
  Description of Artificial Sequence: Synthetic oligonucleotide
cugaguagcuagaacccga

SEQ ID NO: 2514317 - RNA, 19 nt, Artificial Sequence
  Description of Artificial Sequence: Synthetic oligonucleotide
uggcaacccugaauaagaa

SEQ ID NO: 2514318 - RNA, 19 nt, Artificial Sequence
  Description of Artificial Sequence: Synthetic oligonucleotide
agguagugcuugcuggcca

SEQ ID NO: 2514319 - RNA, 19 nt, Artificial Sequence
  Description of Artificial Sequence: Synthetic oligonucleotide
ccacuaagcaucaguguag

SEQ ID NO: 2514320 - RNA, 19 nt, Artificial Sequence
  Description of Artificial Sequence: Synthetic oligonucleotide
cuaguggauuugauguaca

SEQ ID NO: 2514321 - RNA, 19 nt, Artificial Sequence
  Description of Artificial Sequence: Synthetic oligonucleotide
uagggauguuaguaacauc

SEQ ID NO: 2514322 - RNA, 19 nt, Artificial Sequence
  Description of Artificial Sequence: Synthetic oligonucleotide
ugccaugagaacucaucuu

SEQ ID NO: 2514323 - RNA, 19 nt, Artificial Sequence
  Description of Artificial Sequence: Synthetic oligonucleotide
cucacgcuaugcugaguag

SEQ ID NO: 2514324 - RNA, 19 nt, Artificial Sequence
  Description of Artificial Sequence: Synthetic oligonucleotide
ucuuugccaugagaacuca

SEQ ID NO: 2514325 - RNA, 19 nt, Artificial Sequence
  Description of Artificial Sequence: Synthetic oligonucleotide
ggaguagggauguuaguaa

SEQ ID NO: 2514326 - RNA, 19 nt, Artificial Sequence
  Description of Artificial Sequence: Synthetic oligonucleotide
gaugaucuccuuugagccu

SEQ ID NO: 2514327 - RNA, 19 nt, Artificial Sequence
  Description of Artificial Sequence: Synthetic oligonucleotide
  modified_base (17)..(17): a, c, u, g, unknown or other
cccacccucacccacuncg

SEQ ID NO: 2514328 - RNA, 19 nt, Artificial Sequence
  Description of Artificial Sequence: Synthetic oligonucleotide
ugucggugcaauuccucua

SEQ ID NO: 2514329 - RNA, 19 nt, Artificial Sequence
  Description of Artificial Sequence: Synthetic oligonucleotide
uuguuacgcugcacaacuc

SEQ ID NO: 2514330 - RNA, 19 nt, Artificial Sequence
  Description of Artificial Sequence: Synthetic oligonucleotide
  modified_base (4)..(4): a, c, u, g, unknown or other
acuncggggcacaccauca

SEQ ID NO: 2514331 - RNA, 19 nt, Artificial Sequence
  Description of Artificial Sequence: Synthetic oligonucleotide
ucggugcaauuccucuaug

SEQ ID NO: 2514332 - RNA, 19 nt, Artificial Sequence
  Description of Artificial Sequence: Synthetic oligonucleotide
caaucagaggaccgggaga

SEQ ID NO: 2514333 - RNA, 19 nt, Artificial Sequence
  Description of Artificial Sequence: Synthetic oligonucleotide
uuucuuuguuacgcugcac

SEQ ID NO: 2514334 - RNA, 19 nt, Artificial Sequence
  Description of Artificial Sequence: Synthetic oligonucleotide
ucuauccacuaagcaucag

SEQ ID NO: 2514335 - RNA, 19 nt, Artificial Sequence
  Description of Artificial Sequence: Synthetic oligonucleotide
aggcaucuuugccaugaga

SEQ ID NO: 2514336 - RNA, 19 nt, Artificial Sequence
  Description of Artificial Sequence: Synthetic oligonucleotide
cuauccacuaagcaucagu

SEQ ID NO: 2514337 - RNA, 19 nt, Artificial Sequence
  Description of Artificial Sequence: Synthetic oligonucleotide
  modified_base (3)..(3): a, c, u, g, unknown or other
cuncggggcacaccaucag

SEQ ID NO: 2514338 - RNA, 19 nt, Artificial Sequence
  Description of Artificial Sequence: Synthetic oligonucleotide
ccuuugagccucugcagcc

SEQ ID NO: 2514339 - RNA, 19 nt, Artificial Sequence
  Description of Artificial Sequence: Synthetic oligonucleotide
  modified_base (5)..(5): a, c, u, g, unknown or other
cacuncggggcacaccauc

SEQ ID NO: 2514340 - RNA, 19 nt, Artificial Sequence
  Description of Artificial Sequence: Synthetic oligonucleotide
ggucagggcauggauauac

SEQ ID NO: 2514341 - RNA, 19 nt, Artificial Sequence
  Description of Artificial Sequence: Synthetic oligonucleotide
acccugaauaagaauucca

SEQ ID NO: 2514342 - RNA, 19 nt, Artificial Sequence
  Description of Artificial Sequence: Synthetic oligonucleotide
ucguuauuuucuuguccuu

SEQ ID NO: 2514343 - RNA, 19 nt, Artificial Sequence
  Description of Artificial Sequence: Synthetic oligonucleotide
guggcacuaagguagugcu

SEQ ID NO: 2514344 - RNA, 19 nt, Artificial Sequence
  Description of Artificial Sequence: Synthetic oligonucleotide
cagacggucguuauuuucu

SEQ ID NO: 2514345 - RNA, 19 nt, Artificial Sequence
  Description of Artificial Sequence: Synthetic oligonucleotide
  modified_base (10)..(10): a, c, u, g, unknown or other
ucacccacuncggggcaca

SEQ ID NO: 2514346 - RNA, 19 nt, Artificial Sequence
  Description of Artificial Sequence: Synthetic oligonucleotide
gcuaguggauuugauguac

SEQ ID NO: 2514347 - RNA, 19 nt, Artificial Sequence
  Description of Artificial Sequence: Synthetic oligonucleotide
ugccggcagcagaauacug

SEQ ID NO: 2514348 - RNA, 19 nt, Artificial Sequence
  Description of Artificial Sequence: Synthetic oligonucleotide
cugguccaccaccagguuc

SEQ ID NO: 2514349 - RNA, 19 nt, Artificial Sequence
  Description of Artificial Sequence: Synthetic oligonucleotide
cguggaguagggauguuag

SEQ ID NO: 2514350 - RNA, 19 nt, Artificial Sequence
  Description of Artificial Sequence: Synthetic oligonucleotide
ugcggugcagcagggucag

SEQ ID NO: 2514351 - RNA, 19 nt, Artificial Sequence
  Description of Artificial Sequence: Synthetic oligonucleotide
accaucagacggucguuau

SEQ ID NO: 2514352 - RNA, 19 nt, Artificial Sequence
  Description of Artificial Sequence: Synthetic oligonucleotide
uggcuugcuugauggcagc

SEQ ID NO: 2514353 - RNA, 19 nt, Artificial Sequence
  Description of Artificial Sequence: Synthetic oligonucleotide
agagugcugcucuccucug

SEQ ID NO: 2514354 - RNA, 19 nt, Artificial Sequence
  Description of Artificial Sequence: Synthetic oligonucleotide
  modified_base (15)..(15): a, c, u, g, unknown or other
cacccucacccacuncggg

SEQ ID NO: 2514355 - RNA, 19 nt, Artificial Sequence
  Description of Artificial Sequence: Synthetic oligonucleotide
aguugccggcagcagaaua

SEQ ID NO: 2514356 - RNA, 19 nt, Artificial Sequence
  Description of Artificial Sequence: Synthetic oligonucleotide
gcacaacucggcuagugga

SEQ ID NO: 2514357 - RNA, 19 nt, Artificial Sequence
  Description of Artificial Sequence: Synthetic oligonucleotide
aggaccaagugcagguuca

SEQ ID NO: 2514358 - RNA, 19 nt, Artificial Sequence
  Description of Artificial Sequence: Synthetic oligonucleotide
uguacaggugucggugcaa

SEQ ID NO: 2514359 - RNA, 19 nt, Artificial Sequence
  Description of Artificial Sequence: Synthetic oligonucleotide
ugaucuccuuugagccucu

SEQ ID NO: 2514360 - RNA, 19 nt, Artificial Sequence
  Description of Artificial Sequence: Synthetic oligonucleotide
auggcagccugcucacaga

SEQ ID NO: 2514361 - RNA, 19 nt, Artificial Sequence
  Description of Artificial Sequence: Synthetic oligonucleotide
aucaaucagaggaccggga

SEQ ID NO: 2514362 - RNA, 19 nt, Artificial Sequence
  Description of Artificial Sequence: Synthetic oligonucleotide
cgcuaugcugaguagcuag

SEQ ID NO: 2514363 - RNA, 19 nt, Artificial Sequence
  Description of Artificial Sequence: Synthetic oligonucleotide
agacggucguuauuuucuu

SEQ ID NO: 2514364 - RNA, 19 nt, Artificial Sequence
  Description of Artificial Sequence: Synthetic oligonucleotide
ggcugcacuaagaaugaac

SEQ ID NO: 2514365 - RNA, 19 nt, Artificial Sequence
  Description of Artificial Sequence: Synthetic oligonucleotide
accgggagaggcaucuuug

SEQ ID NO: 2514366 - RNA, 19 nt, Artificial Sequence
  Description of Artificial Sequence: Synthetic oligonucleotide
cacugaguccuuccaccug

SEQ ID NO: 2514367 - RNA, 19 nt, Artificial Sequence
  Description of Artificial Sequence: Synthetic oligonucleotide
aggaccgggagaggcaucu

SEQ ID NO: 2514368 - RNA, 19 nt, Artificial Sequence
  Description of Artificial Sequence: Synthetic oligonucleotide
  modified_base (7)..(7): a, c, u, g, unknown or other
cccacuncggggcacacca

SEQ ID NO: 2514369 - RNA, 19 nt, Artificial Sequence
  Description of Artificial Sequence: Synthetic oligonucleotide
guagggauguuaguaacau

SEQ ID NO: 2514370 - RNA, 19 nt, Artificial Sequence
  Description of Artificial Sequence: Synthetic oligonucleotide
ggcaucaaggaauuuucgu

SEQ ID NO: 2514371 - RNA, 19 nt, Artificial Sequence
  Description of Artificial Sequence: Synthetic oligonucleotide
agaacccgaggcugcacua

SEQ ID NO: 2514372 - RNA, 19 nt, Artificial Sequence
  Description of Artificial Sequence: Synthetic oligonucleotide
cagcucacgcuaugcugag

SEQ ID NO: 2514373 - RNA, 19 nt, Artificial Sequence
  Description of Artificial Sequence: Synthetic oligonucleotide
  modified_base (13)..(13): a, c, u, g, unknown or other
cccucacccacuncggggc

SEQ ID NO: 2514374 - RNA, 19 nt, Artificial Sequence
  Description of Artificial Sequence: Synthetic oligonucleotide
  modified_base (8)..(8): a, c, u, g, unknown or other
acccacuncggggcacacc

SEQ ID NO: 2514375 - RNA, 19 nt, Artificial Sequence
  Description of Artificial Sequence: Synthetic oligonucleotide
ugaugucuugcagguucac

SEQ ID NO: 2514376 - RNA, 19 nt, Artificial Sequence
  Description of Artificial Sequence: Synthetic oligonucleotide
uggcacuaagguagugcuu

SEQ ID NO: 2514377 - RNA, 19 nt, Artificial Sequence
  Description of Artificial Sequence: Synthetic oligonucleotide
agugggcccuccaaagacu

SEQ ID NO: 2514378 - RNA, 19 nt, Artificial Sequence
  Description of Artificial Sequence: Synthetic oligonucleotide
cacgcuaugcugaguagcu

SEQ ID NO: 2514379 - RNA, 19 nt, Artificial Sequence
  Description of Artificial Sequence: Synthetic oligonucleotide
agaggaccgggagaggcau

SEQ ID NO: 2514380 - RNA, 19 nt, Artificial Sequence
  Description of Artificial Sequence: Synthetic oligonucleotide
gcaacccugaauaagaauu

SEQ ID NO: 2514381 - RNA, 19 nt, Artificial Sequence
  Description of Artificial Sequence: Synthetic oligonucleotide
aucagacggucguuauuuu

SEQ ID NO: 2514382 - RNA, 19 nt, Artificial Sequence
  Description of Artificial Sequence: Synthetic oligonucleotide
cugcacaacucggcuagug

SEQ ID NO: 2514383 - RNA, 19 nt, Artificial Sequence
  Description of Artificial Sequence: Synthetic oligonucleotide
cacacuugaguugccggca

SEQ ID NO: 2514384 - RNA, 19 nt, Artificial Sequence
  Description of Artificial Sequence: Synthetic oligonucleotide
gugucggugcaauuccucu

SEQ ID NO: 2514385 - RNA, 19 nt, Artificial Sequence
  Description of Artificial Sequence: Synthetic oligonucleotide
cugcggugcagcaggguca

SEQ ID NO: 2514386 - RNA, 19 nt, Artificial Sequence
  Description of Artificial Sequence: Synthetic oligonucleotide
ugggcccuccaaagacucu

SEQ ID NO: 2514387 - RNA, 19 nt, Artificial Sequence
  Description of Artificial Sequence: Synthetic oligonucleotide
gcucacgcuaugcugagua

SEQ ID NO: 2514388 - RNA, 19 nt, Artificial Sequence
  Description of Artificial Sequence: Synthetic oligonucleotide
acaacucggcuaguggauu

SEQ ID NO: 2514389 - RNA, 19 nt, Artificial Sequence
  Description of Artificial Sequence: Synthetic oligonucleotide
cugugaaguuccagccuga

SEQ ID NO: 2514390 - RNA, 19 nt, Artificial Sequence
  Description of Artificial Sequence: Synthetic oligonucleotide
caggucagcucacgcuaug

SEQ ID NO: 2514391 - RNA, 19 nt, Artificial Sequence
  Description of Artificial Sequence: Synthetic oligonucleotide
cuaugcugaguagcuagaa

SEQ ID NO: 2514392 - RNA, 19 nt, Artificial Sequence
  Description of Artificial Sequence: Synthetic oligonucleotide
uacaggugucggugcaauu

SEQ ID NO: 2514393 - RNA, 19 nt, Artificial Sequence
  Description of Artificial Sequence: Synthetic oligonucleotide
caucagacggucguuauuu

SEQ ID NO: 2514394 - RNA, 19 nt, Artificial Sequence
  Description of Artificial Sequence: Synthetic oligonucleotide
acucggcuaguggauuuga

SEQ ID NO: 2514395 - RNA, 19 nt, Artificial Sequence
  Description of Artificial Sequence: Synthetic oligonucleotide
cagaggaccgggagaggca

SEQ ID NO: 2514396 - RNA, 19 nt, Artificial Sequence
  Description of Artificial Sequence: Synthetic oligonucleotide
gucggugcaauuccucuau

SEQ ID NO: 2514397 - RNA, 19 nt, Artificial Sequence
  Description of Artificial Sequence: Synthetic oligonucleotide
cuagaacccgaggcugcac

SEQ ID NO: 2514398 - RNA, 19 nt, Artificial Sequence
  Description of Artificial Sequence: Synthetic oligonucleotide
acgccggucuggcugcggu

SEQ ID NO: 2514399 - RNA, 19 nt, Artificial Sequence
  Description of Artificial Sequence: Synthetic oligonucleotide
aagcaucaguguaggcaaa

SEQ ID NO: 2514400 - RNA, 19 nt, Artificial Sequence
  Description of Artificial Sequence: Synthetic oligonucleotide
gugggcccuccaaagacuc

SEQ ID NO: 2514401 - RNA, 19 nt, Artificial Sequence
  Description of Artificial Sequence: Synthetic oligonucleotide
acgcugcacaacucggcua

SEQ ID NO: 2514402 - RNA, 19 nt, Artificial Sequence
  Description of Artificial Sequence: Synthetic oligonucleotide
gcagaauacugacuggcau

SEQ ID NO: 2514403 - RNA, 19 nt, Artificial Sequence
  Description of Artificial Sequence: Synthetic oligonucleotide
ccgggagaggcaucuuugc

SEQ ID NO: 2514404 - RNA, 19 nt, Artificial Sequence
  Description of Artificial Sequence: Synthetic oligonucleotide
guagugcuugcuggccaug

SEQ ID NO: 2514405 - RNA, 19 nt, Artificial Sequence
  Description of Artificial Sequence: Synthetic oligonucleotide
gaacccgaggcugcacuaa

SEQ ID NO: 2514406 - RNA, 19 nt, Artificial Sequence
  Description of Artificial Sequence: Synthetic oligonucleotide
cugcugauaccagcauguc

SEQ ID NO: 2514407 - RNA, 19 nt, Artificial Sequence
  Description of Artificial Sequence: Synthetic oligonucleotide
cacaacucggcuaguggau

SEQ ID NO: 2514408 - RNA, 19 nt, Artificial Sequence
  Description of Artificial Sequence: Synthetic oligonucleotide
  modified_base (11)..(11): a, c, u, g, unknown or other
cucacccacuncggggcac

SEQ ID NO: 2514409 - RNA, 19 nt, Artificial Sequence
  Description of Artificial Sequence: Synthetic oligonucleotide
aggugucggugcaauuccu

SEQ ID NO: 2514410 - RNA, 19 nt, Artificial Sequence
  Description of Artificial Sequence: Synthetic oligonucleotide
ggcuaguggauuugaugua

SEQ ID NO: 2514411 - RNA, 19 nt, Artificial Sequence
  Description of Artificial Sequence: Synthetic oligonucleotide
ggugucggugcaauuccuc

SEQ ID NO: 2514412 - RNA, 19 nt, Artificial Sequence
  Description of Artificial Sequence: Synthetic oligonucleotide
ggagcagugggcccuccaa

SEQ ID NO: 2514413 - RNA, 19 nt, Artificial Sequence
  Description of Artificial Sequence: Synthetic oligonucleotide
gggauguuaguaacaucaa

SEQ ID NO: 2514414 - RNA, 19 nt, Artificial Sequence
  Description of Artificial Sequence: Synthetic oligonucleotide
gcuaugcugaguagcuaga

SEQ ID NO: 2514415 - RNA, 19 nt, Artificial Sequence
  Description of Artificial Sequence: Synthetic oligonucleotide
cggcuaguggauuugaugu

SEQ ID NO: 2514416 - RNA, 19 nt, Artificial Sequence
  Description of Artificial Sequence: Synthetic oligonucleotide
ggucuggcugcggugcagc

SEQ ID NO: 2514417 - RNA, 19 nt, Artificial Sequence
  Description of Artificial Sequence: Synthetic oligonucleotide
gaccgggagaggcaucuuu

SEQ ID NO: 2514418 - RNA, 19 nt, Artificial Sequence
  Description of Artificial Sequence: Synthetic oligonucleotide
ggucagcucacgcuaugcu

SEQ ID NO: 2514419 - RNA, 19 nt, Artificial Sequence
  Description of Artificial Sequence: Synthetic oligonucleotide
ggcacaccaucagacgguc

SEQ ID NO: 2514420 - RNA, 19 nt, Artificial Sequence
  Description of Artificial Sequence: Synthetic oligonucleotide
acgcccugguccaccacca

SEQ ID NO: 2514421 - RNA, 19 nt, Artificial Sequence
  Description of Artificial Sequence: Synthetic oligonucleotide
ggauauacuccagcucugu

SEQ ID NO: 2514422 - RNA, 19 nt, Artificial Sequence
  Description of Artificial Sequence: Synthetic oligonucleotide
ggcaacccugaauaagaau

SEQ ID NO: 2514423 - RNA, 19 nt, Artificial Sequence
  Description of Artificial Sequence: Synthetic oligonucleotide
cuuugccaugagaacucau

SEQ ID NO: 2514424 - RNA, 19 nt, Artificial Sequence
  Description of Artificial Sequence: Synthetic oligonucleotide
cccacgccggucuggcugc

SEQ ID NO: 2514425 - RNA, 19 nt, Artificial Sequence
  Description of Artificial Sequence: Synthetic oligonucleotide
agcucacgcuaugcugagu

SEQ ID NO: 2514426 - RNA, 19 nt, Artificial Sequence
  Description of Artificial Sequence: Synthetic oligonucleotide
acgcuaugcugaguagcua

SEQ ID NO: 2514427 - RNA, 19 nt, Artificial Sequence
  Description of Artificial Sequence: Synthetic oligonucleotide
gcacaccaucagacggucg

SEQ ID NO: 2514428 - RNA, 19 nt, Artificial Sequence
  Description of Artificial Sequence: Synthetic oligonucleotide
cuugcagguucaccucccu

SEQ ID NO: 2514429 - RNA, 19 nt, Artificial Sequence
  Description of Artificial Sequence: Synthetic oligonucleotide
gcuagaacccgaggcugca

SEQ ID NO: 2514430 - RNA, 19 nt, Artificial Sequence
  Description of Artificial Sequence: Synthetic oligonucleotide
gguagugcuugcuggccau

SEQ ID NO: 2514431 - RNA, 19 nt, Artificial Sequence
  Description of Artificial Sequence: Synthetic oligonucleotide
guacaggugucggugcaau

SEQ ID NO: 2514432 - RNA, 19 nt, Artificial Sequence
  Description of Artificial Sequence: Synthetic oligonucleotide
cggugcaauuccucuauga

SEQ ID NO: 2514433 - RNA, 19 nt, Artificial Sequence
  Description of Artificial Sequence: Synthetic oligonucleotide
cccgaggcugcacuaagaa

SEQ ID NO: 2514434 - RNA, 19 nt, Artificial Sequence
  Description of Artificial Sequence: Synthetic oligonucleotide
cggucguuauuuucuuguc

SEQ ID NO: 2514435 - RNA, 19 nt, Artificial Sequence
  Description of Artificial Sequence: Synthetic oligonucleotide
caacucggcuaguggauuu

SEQ ID NO: 2514436 - RNA, 19 nt, Artificial Sequence
  Description of Artificial Sequence: Synthetic oligonucleotide
cacuaagguagugcuugcu

SEQ ID NO: 2514437 - RNA, 19 nt, Artificial Sequence
  Description of Artificial Sequence: Synthetic oligonucleotide
gucagggcauggauauacu

SEQ ID NO: 2514438 - RNA, 19 nt, Artificial Sequence
  Description of Artificial Sequence: Synthetic oligonucleotide
gaggaccgggagaggcauc

SEQ ID NO: 2514439 - RNA, 19 nt, Artificial Sequence
  Description of Artificial Sequence: Synthetic oligonucleotide
uucguggaguagggauguu

SEQ ID NO: 2514440 - RNA, 19 nt, Artificial Sequence
  Description of Artificial Sequence: Synthetic oligonucleotide
  modified_base (9)..(9): a, c, u, g, unknown or other
cacccacuncggggcacac

SEQ ID NO: 2514441 - RNA, 19 nt, Artificial Sequence
  Description of Artificial Sequence: Synthetic oligonucleotide
cucggcuaguggauuugau

SEQ ID NO: 2514442 - RNA, 19 nt, Artificial Sequence
  Description of Artificial Sequence: Synthetic oligonucleotide
gcuugcuugauggcagccu

SEQ ID NO: 2514443 - RNA, 19 nt, Artificial Sequence
  Description of Artificial Sequence: Synthetic oligonucleotide
gggcacaccaucagacggu

SEQ ID NO: 2514444 - RNA, 19 nt, Artificial Sequence
  Description of Artificial Sequence: Synthetic oligonucleotide
guuccagccugaggucacu

SEQ ID NO: 2514445 - RNA, 19 nt, Artificial Sequence
  Description of Artificial Sequence: Synthetic oligonucleotide
gcccuccaaagacucuacu

SEQ ID NO: 2514446 - RNA, 19 nt, Artificial Sequence
  Description of Artificial Sequence: Synthetic oligonucleotide
gaguugccggcagcagaau

SEQ ID NO: 2514447 - RNA, 19 nt, Artificial Sequence
  Description of Artificial Sequence: Synthetic oligonucleotide
gacuggcaucaaggaauuu

SEQ ID NO: 2514448 - RNA, 19 nt, Artificial Sequence
  Description of Artificial Sequence: Synthetic oligonucleotide
  modified_base (12)..(12): a, c, u, g, unknown or other
ccucacccacuncggggca

SEQ ID NO: 2514449 - RNA, 19 nt, Artificial Sequence
  Description of Artificial Sequence: Synthetic oligonucleotide
ccagguucaggaucuccuu

SEQ ID NO: 2514450 - RNA, 19 nt, Artificial Sequence
  Description of Artificial Sequence: Synthetic oligonucleotide
ccgaggcugcacuaagaau

SEQ ID NO: 2514451 - RNA, 19 nt, Artificial Sequence
  Description of Artificial Sequence: Synthetic oligonucleotide
ggaccaagugcagguucau

SEQ ID NO: 2514452 - RNA, 19 nt, Artificial Sequence
  Description of Artificial Sequence: Synthetic oligonucleotide
gcaggucagcucacgcuau

SEQ ID NO: 2514453 - RNA, 19 nt, Artificial Sequence
  Description of Artificial Sequence: Synthetic oligonucleotide
ccaucagacggucguuauu

SEQ ID NO: 2514454 - RNA, 19 nt, Artificial Sequence
  Description of Artificial Sequence: Synthetic oligonucleotide
  modified_base (18)..(18): a, c, u, g, unknown or other
ccccacccucacccacunc

SEQ ID NO: 2514455 - RNA, 19 nt, Artificial Sequence
  Description of Artificial Sequence: Synthetic oligonucleotide
cggucuggcugcggugcag

SEQ ID NO: 2514456 - RNA, 19 nt, Artificial Sequence
  Description of Artificial Sequence: Synthetic oligonucleotide
gggucagggcauggauaua

SEQ ID NO: 2514457 - RNA, 19 nt, Artificial Sequence
  Description of Artificial Sequence: Synthetic oligonucleotide
ccggucuggcugcggugca

SEQ ID NO: 2514458 - RNA, 19 nt, Artificial Sequence
  Description of Artificial Sequence: Synthetic oligonucleotide
  modified_base (6)..(6): a, c, u, g, unknown or other
ccacuncggggcacaccau

SEQ ID NO: 2514459 - RNA, 19 nt, Artificial Sequence
  Description of Artificial Sequence: Synthetic oligonucleotide
ggaccgggagaggcaucuu

SEQ ID NO: 2514460 - RNA, 19 nt, Artificial Sequence
  Description of Artificial Sequence: Synthetic oligonucleotide
aaucuuaaggaacauaaag

SEQ ID NO: 2514461 - RNA, 19 nt, Artificial Sequence
  Description of Artificial Sequence: Synthetic oligonucleotide
aaguuuauuucccucaagg

SEQ ID NO: 2514462 - RNA, 19 nt, Artificial Sequence
  Description of Artificial Sequence: Synthetic oligonucleotide
auugucaugagcugcaagc

SEQ ID NO: 2514463 - RNA, 19 nt, Artificial Sequence
  Description of Artificial Sequence: Synthetic oligonucleotide
accaaguucaaacacaacg

SEQ ID NO: 2514464 - RNA, 19 nt, Artificial Sequence
  Description of Artificial Sequence: Synthetic oligonucleotide
aagcuuuuacauuuugggc

SEQ ID NO: 2514465 - RNA, 19 nt, Artificial Sequence
  Description of Artificial Sequence: Synthetic oligonucleotide
aaaugaaguccuaacaagc

SEQ ID NO: 2514466 - RNA, 19 nt, Artificial Sequence
  Description of Artificial Sequence: Synthetic oligonucleotide
aacgucaauguuucgaaac

SEQ ID NO: 2514467 - RNA, 19 nt, Artificial Sequence
  Description of Artificial Sequence: Synthetic oligonucleotide
ucuuaaggaacauaaagca

SEQ ID NO: 2514468 - RNA, 19 nt, Artificial Sequence
  Description of Artificial Sequence: Synthetic oligonucleotide
uagaguauagucaaaguug

SEQ ID NO: 2514469 - RNA, 19 nt, Artificial Sequence
  Description of Artificial Sequence: Synthetic oligonucleotide
aauaaguuuauuucccuca

SEQ ID NO: 2514470 - RNA, 19 nt, Artificial Sequence
  Description of Artificial Sequence: Synthetic oligonucleotide
cuuuucaccaaguuaaugc

SEQ ID NO: 2514471 - RNA, 19 nt, Artificial Sequence
  Description of Artificial Sequence: Synthetic oligonucleotide
uaauagugaauuuauuucc

SEQ ID NO: 2514472 - RNA, 19 nt, Artificial Sequence
  Description of Artificial Sequence: Synthetic oligonucleotide
uuugcaauaaguuuauuuc

SEQ ID NO: 2514473 - RNA, 19 nt, Artificial Sequence
  Description of Artificial Sequence: Synthetic oligonucleotide
aguuuauuucccucaaggc

SEQ ID NO: 2514474 - RNA, 19 nt, Artificial Sequence
  Description of Artificial Sequence: Synthetic oligonucleotide
acauaaagcaaaugaaguc

SEQ ID NO: 2514475 - RNA, 19 nt, Artificial Sequence
  Description of Artificial Sequence: Synthetic oligonucleotide
caagcuuuuacauuuuggg

SEQ ID NO: 2514476 - RNA, 19 nt, Artificial Sequence
  Description of Artificial Sequence: Synthetic oligonucleotide
aaccaguucaugcaaaucu

SEQ ID NO: 2514477 - RNA, 19 nt, Artificial Sequence
  Description of Artificial Sequence: Synthetic oligonucleotide
agaaauuucgcagauauca

SEQ ID NO: 2514478 - RNA, 19 nt, Artificial Sequence
  Description of Artificial Sequence: Synthetic oligonucleotide
uuuauuucccucaaggcuc

SEQ ID NO: 2514479 - RNA, 19 nt, Artificial Sequence
  Description of Artificial Sequence: Synthetic oligonucleotide
aaaggaugaaccugccugg

SEQ ID NO: 2514480 - RNA, 19 nt, Artificial Sequence
  Description of Artificial Sequence: Synthetic oligonucleotide
auugaguucaguuccaucu

SEQ ID NO: 2514481 - RNA, 19 nt, Artificial Sequence
  Description of Artificial Sequence: Synthetic oligonucleotide
gcagauaucaaucagcucc

SEQ ID NO: 2514482 - RNA, 19 nt, Artificial Sequence
  Description of Artificial Sequence: Synthetic oligonucleotide
aguccuaacaagcuuuuac

SEQ ID NO: 2514483 - RNA, 19 nt, Artificial Sequence
  Description of Artificial Sequence: Synthetic oligonucleotide
cauaaagcaaaugaagucc

SEQ ID NO: 2514484 - RNA, 19 nt, Artificial Sequence
  Description of Artificial Sequence: Synthetic oligonucleotide
aauuucgcagauaucaauc

SEQ ID NO: 2514485 - RNA, 19 nt, Artificial Sequence
  Description of Artificial Sequence: Synthetic oligonucleotide
ugcaauaaguuuauuuccc

SEQ ID NO: 2514486 - RNA, 19 nt, Artificial Sequence
  Description of Artificial Sequence: Synthetic oligonucleotide
uucuuaaagauccgcuugg

SEQ ID NO: 2514487 - RNA, 19 nt, Artificial Sequence
  Description of Artificial Sequence: Synthetic oligonucleotide
ucuggauuaguucaccacc

SEQ ID NO: 2514488 - RNA, 19 nt, Artificial Sequence
  Description of Artificial Sequence: Synthetic oligonucleotide
aacauaaagcaaaugaagu

SEQ ID NO: 2514489 - RNA, 19 nt, Artificial Sequence
  Description of Artificial Sequence: Synthetic oligonucleotide
agcuuuuacauuuugggcu

SEQ ID NO: 2514490 - RNA, 19 nt, Artificial Sequence
  Description of Artificial Sequence: Synthetic oligonucleotide
cuggcauuaacacaauugg

SEQ ID NO: 2514491 - RNA, 19 nt, Artificial Sequence
  Description of Artificial Sequence: Synthetic oligonucleotide
caugaaaggaugaaccugc

SEQ ID NO: 2514492 - RNA, 19 nt, Artificial Sequence
  Description of Artificial Sequence: Synthetic oligonucleotide
aacacaacgucaauguuuc

SEQ ID NO: 2514493 - RNA, 19 nt, Artificial Sequence
  Description of Artificial Sequence: Synthetic oligonucleotide
uucgaaaccugcaugauuc

SEQ ID NO: 2514494 - RNA, 19 nt, Artificial Sequence
  Description of Artificial Sequence: Synthetic oligonucleotide
ugcucauuccuucuuaaag

SEQ ID NO: 2514495 - RNA, 19 nt, Artificial Sequence
  Description of Artificial Sequence: Synthetic oligonucleotide
guauagucaaaguugacac

SEQ ID NO: 2514496 - RNA, 19 nt, Artificial Sequence
  Description of Artificial Sequence: Synthetic oligonucleotide
uugaauuuugcaauaaguu

SEQ ID NO: 2514497 - RNA, 19 nt, Artificial Sequence
  Description of Artificial Sequence: Synthetic oligonucleotide
uuuucaccaaguuaaugcc

SEQ ID NO: 2514498 - RNA, 19 nt, Artificial Sequence
  Description of Artificial Sequence: Synthetic oligonucleotide
uacauuuugggcuuugaca

SEQ ID NO: 2514499 - RNA, 19 nt, Artificial Sequence
  Description of Artificial Sequence: Synthetic oligonucleotide
uugggcuuugacaagacug

SEQ ID NO: 2514500 - RNA, 19 nt, Artificial Sequence
  Description of Artificial Sequence: Synthetic oligonucleotide
uugcaauaaguuuauuucc

SEQ ID NO: 2514501 - RNA, 19 nt, Artificial Sequence
  Description of Artificial Sequence: Synthetic oligonucleotide
cauuaacacaauuggagag

SEQ ID NO: 2514502 - RNA, 19 nt, Artificial Sequence
  Description of Artificial Sequence: Synthetic oligonucleotide
aauaugccaguguucauga

SEQ ID NO: 2514503 - RNA, 19 nt, Artificial Sequence
  Description of Artificial Sequence: Synthetic oligonucleotide
guugacaccaaguucaaac

SEQ ID NO: 2514504 - RNA, 19 nt, Artificial Sequence
  Description of Artificial Sequence: Synthetic oligonucleotide
uccaacugccaucaaaugc

SEQ ID NO: 2514505 - RNA, 19 nt, Artificial Sequence
  Description of Artificial Sequence: Synthetic oligonucleotide
guuaaugcccauuuucucc

SEQ ID NO: 2514506 - RNA, 19 nt, Artificial Sequence
  Description of Artificial Sequence: Synthetic oligonucleotide
acgucaauguuucgaaacc

SEQ ID NO: 2514507 - RNA, 19 nt, Artificial Sequence
  Description of Artificial Sequence: Synthetic oligonucleotide
ugaauuuugcaauaaguuu

SEQ ID NO: 2514508 - RNA, 19 nt, Artificial Sequence
  Description of Artificial Sequence: Synthetic oligonucleotide
caaaugaaguccuaacaag

SEQ ID NO: 2514509 - RNA, 19 nt, Artificial Sequence
  Description of Artificial Sequence: Synthetic oligonucleotide
caugaaguuaucauaguuc

SEQ ID NO: 2514510 - RNA, 19 nt, Artificial Sequence
  Description of Artificial Sequence: Synthetic oligonucleotide
uugauggucaguuucaaau

SEQ ID NO: 2514511 - RNA, 19 nt, Artificial Sequence
  Description of Artificial Sequence: Synthetic oligonucleotide
caugcaaaucuuaaggaac

SEQ ID NO: 2514512 - RNA, 19 nt, Artificial Sequence
  Description of Artificial Sequence: Synthetic oligonucleotide
acauuuugggcuuugacaa

SEQ ID NO: 2514513 - RNA, 19 nt, Artificial Sequence
  Description of Artificial Sequence: Synthetic oligonucleotide
agugaauuuauuuccuucu

SEQ ID NO: 2514514 - RNA, 19 nt, Artificial Sequence
  Description of Artificial Sequence: Synthetic oligonucleotide
ucaauguuucgaaaccugc

SEQ ID NO: 2514515 - RNA, 19 nt, Artificial Sequence
  Description of Artificial Sequence: Synthetic oligonucleotide
ucugcuagaguauagucaa

SEQ ID NO: 2514516 - RNA, 19 nt, Artificial Sequence
  Description of Artificial Sequence: Synthetic oligonucleotide
gaaguuaucauaguucuca

SEQ ID NO: 2514517 - RNA, 19 nt, Artificial Sequence
  Description of Artificial Sequence: Synthetic oligonucleotide
ugggcuuugacaagacugg

SEQ ID NO: 2514518 - RNA, 19 nt, Artificial Sequence
  Description of Artificial Sequence: Synthetic oligonucleotide
aguuccaucugcuagagua

SEQ ID NO: 2514519 - RNA, 19 nt, Artificial Sequence
  Description of Artificial Sequence: Synthetic oligonucleotide
aauguuucgaaaccugcau

SEQ ID NO: 2514520 - RNA, 19 nt, Artificial Sequence
  Description of Artificial Sequence: Synthetic oligonucleotide
uguuucgaaaccugcauga

SEQ ID NO: 2514521 - RNA, 19 nt, Artificial Sequence
  Description of Artificial Sequence: Synthetic oligonucleotide
uucgcagauaucaaucagc

SEQ ID NO: 2514522 - RNA, 19 nt, Artificial Sequence
  Description of Artificial Sequence: Synthetic oligonucleotide
ucaaaguugacaccaaguu

SEQ ID NO: 2514523 - RNA, 19 nt, Artificial Sequence
  Description of Artificial Sequence: Synthetic oligonucleotide
uuaaagauccgcuuggcuu

SEQ ID NO: 2514524 - RNA, 19 nt, Artificial Sequence
  Description of Artificial Sequence: Synthetic oligonucleotide
cuccaugaaguuaucauag

SEQ ID NO: 2514525 - RNA, 19 nt, Artificial Sequence
  Description of Artificial Sequence: Synthetic oligonucleotide
uauauguaggucuggauua

SEQ ID NO: 2514526 - RNA, 19 nt, Artificial Sequence
  Description of Artificial Sequence: Synthetic oligonucleotide
gauggucaguuucaaauug

SEQ ID NO: 2514527 - RNA, 19 nt, Artificial Sequence
  Description of Artificial Sequence: Synthetic oligonucleotide
accaccagaaauuucgcag

SEQ ID NO: 2514528 - RNA, 19 nt, Artificial Sequence
  Description of Artificial Sequence: Synthetic oligonucleotide
gugaacaauauuuauuuuc

SEQ ID NO: 2514529 - RNA, 19 nt, Artificial Sequence
  Description of Artificial Sequence: Synthetic oligonucleotide
caaaucuuaaggaacauaa

SEQ ID NO: 2514530 - RNA, 19 nt, Artificial Sequence
  Description of Artificial Sequence: Synthetic oligonucleotide
ucuacuuuccaacugccau

SEQ ID NO: 2514531 - RNA, 19 nt, Artificial Sequence
  Description of Artificial Sequence: Synthetic oligonucleotide
ucaaauugucaugagcugc

SEQ ID NO: 2514532 - RNA, 19 nt, Artificial Sequence
  Description of Artificial Sequence: Synthetic oligonucleotide
aaauuucgcagauaucaau

SEQ ID NO: 2514533 - RNA, 19 nt, Artificial Sequence
  Description of Artificial Sequence: Synthetic oligonucleotide
aguuaaugcccauuuucuc

SEQ ID NO: 2514534 - RNA, 19 nt, Artificial Sequence
  Description of Artificial Sequence: Synthetic oligonucleotide
uaucaaucagcuccuuucc

SEQ ID NO: 2514535 - RNA, 19 nt, Artificial Sequence
  Description of Artificial Sequence: Synthetic oligonucleotide
ugugugaacaauauuuauu

SEQ ID NO: 2514536 - RNA, 19 nt, Artificial Sequence
  Description of Artificial Sequence: Synthetic oligonucleotide
uucaccaaguuaaugccca

SEQ ID NO: 2514537 - RNA, 19 nt, Artificial Sequence
  Description of Artificial Sequence: Synthetic oligonucleotide
auauauguaggucuggauu

SEQ ID NO: 2514538 - RNA, 19 nt, Artificial Sequence
  Description of Artificial Sequence: Synthetic oligonucleotide
aauugucaugagcugcaag

SEQ ID NO: 2514539 - RNA, 19 nt, Artificial Sequence
  Description of Artificial Sequence: Synthetic oligonucleotide
uuaucauaguucucauucc

SEQ ID NO: 2514540 - RNA, 19 nt, Artificial Sequence
  Description of Artificial Sequence: Synthetic oligonucleotide
uuaaugcccauuuucucca

SEQ ID NO: 2514541 - RNA, 19 nt, Artificial Sequence
  Description of Artificial Sequence: Synthetic oligonucleotide
acaauuggagagaugacuc

SEQ ID NO: 2514542 - RNA, 19 nt, Artificial Sequence
  Description of Artificial Sequence: Synthetic oligonucleotide
uguuugauggucaguuuca

SEQ ID NO: 2514543 - RNA, 19 nt, Artificial Sequence
  Description of Artificial Sequence: Synthetic oligonucleotide
aguauagucaaaguugaca

SEQ ID NO: 2514544 - RNA, 19 nt, Artificial Sequence
  Description of Artificial Sequence: Synthetic oligonucleotide
gaauuuugcaauaaguuua

SEQ ID NO: 2514545 - RNA, 19 nt, Artificial Sequence
  Description of Artificial Sequence: Synthetic oligonucleotide
auagucaaaguugacacca

SEQ ID NO: 2514546 - RNA, 19 nt, Artificial Sequence
  Description of Artificial Sequence: Synthetic oligonucleotide
uugucuacacguuugaauu

SEQ ID NO: 2514547 - RNA, 19 nt, Artificial Sequence
  Description of Artificial Sequence: Synthetic oligonucleotide
aauagugaauuuauuuccu

SEQ ID NO: 2514548 - RNA, 19 nt, Artificial Sequence
  Description of Artificial Sequence: Synthetic oligonucleotide
agcaaaugaaguccuaaca

SEQ ID NO: 2514549 - RNA, 19 nt, Artificial Sequence
  Description of Artificial Sequence: Synthetic oligonucleotide
uuucaccaaguuaaugccc

SEQ ID NO: 2514550 - RNA, 19 nt, Artificial Sequence
  Description of Artificial Sequence: Synthetic oligonucleotide
caaguuaaugcccauuuuc

SEQ ID NO: 2514551 - RNA, 19 nt, Artificial Sequence
  Description of Artificial Sequence: Synthetic oligonucleotide
uuucgcagauaucaaucag

SEQ ID NO: 2514552 - RNA, 19 nt, Artificial Sequence
  Description of Artificial Sequence: Synthetic oligonucleotide
uuucccucaaggcuccagg

SEQ ID NO: 2514553 - RNA, 19 nt, Artificial Sequence
  Description of Artificial Sequence: Synthetic oligonucleotide
ucaugcaaaucuuaaggaa

SEQ ID NO: 2514554 - RNA, 19 nt, Artificial Sequence
  Description of Artificial Sequence: Synthetic oligonucleotide
uuguuugauggucaguuuc

SEQ ID NO: 2514555 - RNA, 19 nt, Artificial Sequence
  Description of Artificial Sequence: Synthetic oligonucleotide
uucaugaaaggaugaaccu

SEQ ID NO: 2514556 - RNA, 19 nt, Artificial Sequence
  Description of Artificial Sequence: Synthetic oligonucleotide
ucugacaucagcucagcuc

SEQ ID NO: 2514557 - RNA, 19 nt, Artificial Sequence
  Description of Artificial Sequence: Synthetic oligonucleotide
uuugacaagacugggaaua

SEQ ID NO: 2514558 - RNA, 19 nt, Artificial Sequence
  Description of Artificial Sequence: Synthetic oligonucleotide
aaaaccaguucaugcaaau

SEQ ID NO: 2514559 - RNA, 19 nt, Artificial Sequence
  Description of Artificial Sequence: Synthetic oligonucleotide
ugcaugauucuuuaauagu

SEQ ID NO: 2514560 - RNA, 19 nt, Artificial Sequence
  Description of Artificial Sequence: Synthetic oligonucleotide
cugcaugauucuuuaauag

SEQ ID NO: 2514561 - RNA, 19 nt, Artificial Sequence
  Description of Artificial Sequence: Synthetic oligonucleotide
uacacguuugaauuuugca

SEQ ID NO: 2514562 - RNA, 19 nt, Artificial Sequence
  Description of Artificial Sequence: Synthetic oligonucleotide
ucgcagauaucaaucagcu

SEQ ID NO: 2514563 - RNA, 19 nt, Artificial Sequence
  Description of Artificial Sequence: Synthetic oligonucleotide
ugcuagaguauagucaaag

SEQ ID NO: 2514564 - RNA, 19 nt, Artificial Sequence
  Description of Artificial Sequence: Synthetic oligonucleotide
ucaaaugccauggucucag

SEQ ID NO: 2514565 - RNA, 19 nt, Artificial Sequence
  Description of Artificial Sequence: Synthetic oligonucleotide
aaguuaaugcccauuuucu

SEQ ID NO: 2514566 - RNA, 19 nt, Artificial Sequence
  Description of Artificial Sequence: Synthetic oligonucleotide
uaugccaguguucaugaaa

SEQ ID NO: 2514567 - RNA, 19 nt, Artificial Sequence
  Description of Artificial Sequence: Synthetic oligonucleotide
augacucugacaucagcuc

SEQ ID NO: 2514568 - RNA, 19 nt, Artificial Sequence
  Description of Artificial Sequence: Synthetic oligonucleotide
gaauaugccaguguucaug

SEQ ID NO: 2514569 - RNA, 19 nt, Artificial Sequence
  Description of Artificial Sequence: Synthetic oligonucleotide
acacguuugaauuuugcaa

SEQ ID NO: 2514570 - RNA, 19 nt, Artificial Sequence
  Description of Artificial Sequence: Synthetic oligonucleotide
ugaaguccuaacaagcuuu

SEQ ID NO: 2514571 - RNA, 19 nt, Artificial Sequence
  Description of Artificial Sequence: Synthetic oligonucleotide
uaaguuuauuucccucaag

SEQ ID NO: 2514572 - RNA, 19 nt, Artificial Sequence
  Description of Artificial Sequence: Synthetic oligonucleotide
uugacaccaaguucaaaca

SEQ ID NO: 2514573 - RNA, 19 nt, Artificial Sequence
  Description of Artificial Sequence: Synthetic oligonucleotide
cuucuuaaagauccgcuug

SEQ ID NO: 2514574 - RNA, 19 nt, Artificial Sequence
  Description of Artificial Sequence: Synthetic oligonucleotide
auugucuacacguuugaau

SEQ ID NO: 2514575 - RNA, 19 nt, Artificial Sequence
  Description of Artificial Sequence: Synthetic oligonucleotide
ugugugugaacaauauuua

SEQ ID NO: 2514576 - RNA, 19 nt, Artificial Sequence
  Description of Artificial Sequence: Synthetic oligonucleotide
ucaugaaaggaugaaccug

SEQ ID NO: 2514577 - RNA, 19 nt, Artificial Sequence
  Description of Artificial Sequence: Synthetic oligonucleotide
ggcauuaacacaauuggag

SEQ ID NO: 2514578 - RNA, 19 nt, Artificial Sequence
  Description of Artificial Sequence: Synthetic oligonucleotide
uuacauuuugggcuuugac

SEQ ID NO: 2514579 - RNA, 19 nt, Artificial Sequence
  Description of Artificial Sequence: Synthetic oligonucleotide
auuucgcagauaucaauca

SEQ ID NO: 2514580 - RNA, 19 nt, Artificial Sequence
  Description of Artificial Sequence: Synthetic oligonucleotide
auccgcuuggcuucgacuc

SEQ ID NO: 2514581 - RNA, 19 nt, Artificial Sequence
  Description of Artificial Sequence: Synthetic oligonucleotide
gauuaguucaccaccagaa

SEQ ID NO: 2514582 - RNA, 19 nt, Artificial Sequence
  Description of Artificial Sequence: Synthetic oligonucleotide
acugccaucaaaugccaug

SEQ ID NO: 2514583 - RNA, 19 nt, Artificial Sequence
  Description of Artificial Sequence: Synthetic oligonucleotide
uucaguuccaucugcuaga

SEQ ID NO: 2514584 - RNA, 19 nt, Artificial Sequence
  Description of Artificial Sequence: Synthetic oligonucleotide
guaggucuggauuaguuca

SEQ ID NO: 2514585 - RNA, 19 nt, Artificial Sequence
  Description of Artificial Sequence: Synthetic oligonucleotide
uccuucuuaaagauccgcu

SEQ ID NO: 2514586 - RNA, 19 nt, Artificial Sequence
  Description of Artificial Sequence: Synthetic oligonucleotide
aaaccaguucaugcaaauc

SEQ ID NO: 2514587 - RNA, 19 nt, Artificial Sequence
  Description of Artificial Sequence: Synthetic oligonucleotide
uagugaauuuauuuccuuc

SEQ ID NO: 2514588 - RNA, 19 nt, Artificial Sequence
  Description of Artificial Sequence: Synthetic oligonucleotide
ugauucuuuaauagugaau

SEQ ID NO: 2514589 - RNA, 19 nt, Artificial Sequence
  Description of Artificial Sequence: Synthetic oligonucleotide
uaaggaacauaaagcaaau

SEQ ID NO: 2514590 - RNA, 19 nt, Artificial Sequence
  Description of Artificial Sequence: Synthetic oligonucleotide
aaagcaaaugaaguccuaa

SEQ ID NO: 2514591 - RNA, 19 nt, Artificial Sequence
  Description of Artificial Sequence: Synthetic oligonucleotide
uugaguucaguuccaucug

SEQ ID NO: 2514592 - RNA, 19 nt, Artificial Sequence
  Description of Artificial Sequence: Synthetic oligonucleotide
uuauuucccucaaggcucc

SEQ ID NO: 2514593 - RNA, 19 nt, Artificial Sequence
  Description of Artificial Sequence: Synthetic oligonucleotide
ucgacuccuucauauaugu

SEQ ID NO: 2514594 - RNA, 19 nt, Artificial Sequence
  Description of Artificial Sequence: Synthetic oligonucleotide
uguaggucuggauuaguuc

SEQ ID NO: 2514595 - RNA, 19 nt, Artificial Sequence
  Description of Artificial Sequence: Synthetic oligonucleotide
aaggaugaaccugccuggc

SEQ ID NO: 2514596 - RNA, 19 nt, Artificial Sequence
  Description of Artificial Sequence: Synthetic oligonucleotide
ccaacugccaucaaaugcc

SEQ ID NO: 2514597 - RNA, 19 nt, Artificial Sequence
  Description of Artificial Sequence: Synthetic oligonucleotide
accugccuggcauuaacac

SEQ ID NO: 2514598 - RNA, 19 nt, Artificial Sequence
  Description of Artificial Sequence: Synthetic oligonucleotide
auuaacacaauuggagaga

SEQ ID NO: 2514599 - RNA, 19 nt, Artificial Sequence
  Description of Artificial Sequence: Synthetic oligonucleotide
uggcauuaacacaauugga

SEQ ID NO: 2514600 - RNA, 19 nt, Artificial Sequence
  Description of Artificial Sequence: Synthetic oligonucleotide
acaagcuuuuacauuuugg

SEQ ID NO: 2514601 - RNA, 19 nt, Artificial Sequence
  Description of Artificial Sequence: Synthetic oligonucleotide
uucgacuccuucauauaug

SEQ ID NO: 2514602 - RNA, 19 nt, Artificial Sequence
  Description of Artificial Sequence: Synthetic oligonucleotide
acuccuucauauauguagg

SEQ ID NO: 2514603 - RNA, 19 nt, Artificial Sequence
  Description of Artificial Sequence: Synthetic oligonucleotide
guuuauuucccucaaggcu

SEQ ID NO: 2514604 - RNA, 19 nt, Artificial Sequence
  Description of Artificial Sequence: Synthetic oligonucleotide
aauuuugcaauaaguuuau

SEQ ID NO: 2514605 - RNA, 19 nt, Artificial Sequence
  Description of Artificial Sequence: Synthetic oligonucleotide
acaagacugggaauaugcc

SEQ ID NO: 2514606 - RNA, 19 nt, Artificial Sequence
  Description of Artificial Sequence: Synthetic oligonucleotide
ucauauauguaggucugga

SEQ ID NO: 2514607 - RNA, 19 nt, Artificial Sequence
  Description of Artificial Sequence: Synthetic oligonucleotide
agaguauagucaaaguuga

SEQ ID NO: 2514608 - RNA, 19 nt, Artificial Sequence
  Description of Artificial Sequence: Synthetic oligonucleotide
caauaaguuuauuucccuc

SEQ ID NO: 2514609 - RNA, 19 nt, Artificial Sequence
  Description of Artificial Sequence: Synthetic oligonucleotide
uaguucaccaccagaaauu

SEQ ID NO: 2514610 - RNA, 19 nt, Artificial Sequence
  Description of Artificial Sequence: Synthetic oligonucleotide
cuuuccauugucuacacgu

SEQ ID NO: 2514611 - RNA, 19 nt, Artificial Sequence
  Description of Artificial Sequence: Synthetic oligonucleotide
aaggcuccaggucccauug

SEQ ID NO: 2514612 - RNA, 19 nt, Artificial Sequence
  Description of Artificial Sequence: Synthetic oligonucleotide
aggguuuugcucugggcuc

SEQ ID NO: 2514613 - RNA, 19 nt, Artificial Sequence
  Description of Artificial Sequence: Synthetic oligonucleotide
aguuucaaauugucaugag

SEQ ID NO: 2514614 - RNA, 19 nt, Artificial Sequence
  Description of Artificial Sequence: Synthetic oligonucleotide
uucauauauguaggucugg

SEQ ID NO: 2514615 - RNA, 19 nt, Artificial Sequence
  Description of Artificial Sequence: Synthetic oligonucleotide
uccuaacaagcuuuuacau

SEQ ID NO: 2514616 - RNA, 19 nt, Artificial Sequence
  Description of Artificial Sequence: Synthetic oligonucleotide
auguuucgaaaccugcaug

SEQ ID NO: 2514617 - RNA, 19 nt, Artificial Sequence
  Description of Artificial Sequence: Synthetic oligonucleotide
acaacgucaauguuucgaa

SEQ ID NO: 2514618 - RNA, 19 nt, Artificial Sequence
  Description of Artificial Sequence: Synthetic oligonucleotide
auaaguuuauuucccucaa

SEQ ID NO: 2514619 - RNA, 19 nt, Artificial Sequence
  Description of Artificial Sequence: Synthetic oligonucleotide
aaguuaucauaguucucau

SEQ ID NO: 2514620 - RNA, 19 nt, Artificial Sequence
  Description of Artificial Sequence: Synthetic oligonucleotide
uggauuaguucaccaccag

SEQ ID NO: 2514621 - RNA, 19 nt, Artificial Sequence
  Description of Artificial Sequence: Synthetic oligonucleotide
aaaccugcaugauucuuua

SEQ ID NO: 2514622 - RNA, 19 nt, Artificial Sequence
  Description of Artificial Sequence: Synthetic oligonucleotide
cuacacguuugaauuuugc

SEQ ID NO: 2514623 - RNA, 19 nt, Artificial Sequence
  Description of Artificial Sequence: Synthetic oligonucleotide
uuaacacaauuggagagau

SEQ ID NO: 2514624 - RNA, 19 nt, Artificial Sequence
  Description of Artificial Sequence: Synthetic oligonucleotide
ucucauuccggucuacuuu

SEQ ID NO: 2514625 - RNA, 19 nt, Artificial Sequence
  Description of Artificial Sequence: Synthetic oligonucleotide
ucuacacguuugaauuuug

SEQ ID NO: 2514626 - RNA, 19 nt, Artificial Sequence
  Description of Artificial Sequence: Synthetic oligonucleotide
ugaaaggaugaaccugccu

SEQ ID NO: 2514627 - RNA, 19 nt, Artificial Sequence
  Description of Artificial Sequence: Synthetic oligonucleotide
cuaacaagcuuuuacauuu

SEQ ID NO: 2514628 - RNA, 19 nt, Artificial Sequence
  Description of Artificial Sequence: Synthetic oligonucleotide
accugcaugauucuuuaau

SEQ ID NO: 2514629 - RNA, 19 nt, Artificial Sequence
  Description of Artificial Sequence: Synthetic oligonucleotide
aucauaguucucauuccgg

SEQ ID NO: 2514630 - RNA, 19 nt, Artificial Sequence
  Description of Artificial Sequence: Synthetic oligonucleotide
uacuuuccaacugccauca

SEQ ID NO: 2514631 - RNA, 19 nt, Artificial Sequence
  Description of Artificial Sequence: Synthetic oligonucleotide
accaaguuaaugcccauuu

SEQ ID NO: 2514632 - RNA, 19 nt, Artificial Sequence
  Description of Artificial Sequence: Synthetic oligonucleotide
aagcuuccuuuucaccaag

SEQ ID NO: 2514633 - RNA, 19 nt, Artificial Sequence
  Description of Artificial Sequence: Synthetic oligonucleotide
aguucaaacacaacgucaa

SEQ ID NO: 2514634 - RNA, 19 nt, Artificial Sequence
  Description of Artificial Sequence: Synthetic oligonucleotide
ggagagaugacucugacau

SEQ ID NO: 2514635 - RNA, 19 nt, Artificial Sequence
  Description of Artificial Sequence: Synthetic oligonucleotide
uggucaguuucaaauuguc

SEQ ID NO: 2514636 - RNA, 19 nt, Artificial Sequence
  Description of Artificial Sequence: Synthetic oligonucleotide
cucauuccggucuacuuuc

SEQ ID NO: 2514637 - RNA, 19 nt, Artificial Sequence
  Description of Artificial Sequence: Synthetic oligonucleotide
caucaaaugccauggucuc

SEQ ID NO: 2514638 - RNA, 19 nt, Artificial Sequence
  Description of Artificial Sequence: Synthetic oligonucleotide
aaaugccauggucucaguu

SEQ ID NO: 2514639 - RNA, 19 nt, Artificial Sequence
  Description of Artificial Sequence: Synthetic oligonucleotide
uuucgaaaccugcaugauu

SEQ ID NO: 2514640 - RNA, 19 nt, Artificial Sequence
  Description of Artificial Sequence: Synthetic oligonucleotide
auuaguucaccaccagaaa

SEQ ID NO: 2514641 - RNA, 19 nt, Artificial Sequence
  Description of Artificial Sequence: Synthetic oligonucleotide
caaauugucaugagcugca

SEQ ID NO: 2514642 - RNA, 19 nt, Artificial Sequence
  Description of Artificial Sequence: Synthetic oligonucleotide
ugcaagcuuccuuuucacc

SEQ ID NO: 2514643 - RNA, 19 nt, Artificial Sequence
  Description of Artificial Sequence: Synthetic oligonucleotide
ucuuaaagauccgcuuggc

SEQ ID NO: 2514644 - RNA, 19 nt, Artificial Sequence
  Description of Artificial Sequence: Synthetic oligonucleotide
aaaucuuaaggaacauaaa

SEQ ID NO: 2514645 - RNA, 19 nt, Artificial Sequence
  Description of Artificial Sequence: Synthetic oligonucleotide
aaagauccgcuuggcuucg

SEQ ID NO: 2514646 - RNA, 19 nt, Artificial Sequence
  Description of Artificial Sequence: Synthetic oligonucleotide
uuggcuucgacuccuucau

SEQ ID NO: 2514647 - RNA, 19 nt, Artificial Sequence
  Description of Artificial Sequence: Synthetic oligonucleotide
caucugcuagaguauaguc

SEQ ID NO: 2514648 - RNA, 19 nt, Artificial Sequence
  Description of Artificial Sequence: Synthetic oligonucleotide
ugaaguuaucauaguucuc

SEQ ID NO: 2514649 - RNA, 19 nt, Artificial Sequence
  Description of Artificial Sequence: Synthetic oligonucleotide
cuacuuuccaacugccauc

SEQ ID NO: 2514650 - RNA, 19 nt, Artificial Sequence
  Description of Artificial Sequence: Synthetic oligonucleotide
ccuggcauuaacacaauug

SEQ ID NO: 2514651 - RNA, 19 nt, Artificial Sequence
  Description of Artificial Sequence: Synthetic oligonucleotide
ugugaacaauauuuauuuu

SEQ ID NO: 2514652 - RNA, 19 nt, Artificial Sequence
  Description of Artificial Sequence: Synthetic oligonucleotide
ucaccaccagaaauuucgc

SEQ ID NO: 2514653 - RNA, 19 nt, Artificial Sequence
  Description of Artificial Sequence: Synthetic oligonucleotide
uuccggucuacuuuccaac

SEQ ID NO: 2514654 - RNA, 19 nt, Artificial Sequence
  Description of Artificial Sequence: Synthetic oligonucleotide
auagugaauuuauuuccuu

SEQ ID NO: 2514655 - RNA, 19 nt, Artificial Sequence
  Description of Artificial Sequence: Synthetic oligonucleotide
aucugcuagaguauaguca

SEQ ID NO: 2514656 - RNA, 19 nt, Artificial Sequence
  Description of Artificial Sequence: Synthetic oligonucleotide
uccaugaaguuaucauagu

SEQ ID NO: 2514657 - RNA, 19 nt, Artificial Sequence
  Description of Artificial Sequence: Synthetic oligonucleotide
uuccaacugccaucaaaug

SEQ ID NO: 2514658 - RNA, 19 nt, Artificial Sequence
  Description of Artificial Sequence: Synthetic oligonucleotide
acugggaauaugccagugu

SEQ ID NO: 2514659 - RNA, 19 nt, Artificial Sequence
  Description of Artificial Sequence: Synthetic oligonucleotide
ugccaguguucaugaaagg

SEQ ID NO: 2514660 - RNA, 19 nt, Artificial Sequence
  Description of Artificial Sequence: Synthetic oligonucleotide
uggagagaugacucugaca

SEQ ID NO: 2514661 - RNA, 19 nt, Artificial Sequence
  Description of Artificial Sequence: Synthetic oligonucleotide
ucaguuccaucugcuagag

SEQ ID NO: 2514662 - RNA, 19 nt, Artificial Sequence
  Description of Artificial Sequence: Synthetic oligonucleotide
uuccuucuuaaagauccgc

SEQ ID NO: 2514663 - RNA, 19 nt, Artificial Sequence
  Description of Artificial Sequence: Synthetic oligonucleotide
gcaaaugaaguccuaacaa

SEQ ID NO: 2514664 - RNA, 19 nt, Artificial Sequence
  Description of Artificial Sequence: Synthetic oligonucleotide
uuuacauuuugggcuuuga

SEQ ID NO: 2514665 - RNA, 19 nt, Artificial Sequence
  Description of Artificial Sequence: Synthetic oligonucleotide
caauguuucgaaaccugca

SEQ ID NO: 2514666 - RNA, 19 nt, Artificial Sequence
  Description of Artificial Sequence: Synthetic oligonucleotide
gcauuaacacaauuggaga

SEQ ID NO: 2514667 - RNA, 19 nt, Artificial Sequence
  Description of Artificial Sequence: Synthetic oligonucleotide
uuuccauugucuacacguu

SEQ ID NO: 2514668 - RNA, 19 nt, Artificial Sequence
  Description of Artificial Sequence: Synthetic oligonucleotide
cauggucucaguugucgug

SEQ ID NO: 2514669 - RNA, 19 nt, Artificial Sequence
  Description of Artificial Sequence: Synthetic oligonucleotide
uugucaugagcugcaagcu

SEQ ID NO: 2514670 - RNA, 19 nt, Artificial Sequence
  Description of Artificial Sequence: Synthetic oligonucleotide
aagcuugcucauuccuucu

SEQ ID NO: 2514671 - RNA, 19 nt, Artificial Sequence
  Description of Artificial Sequence: Synthetic oligonucleotide
gucaauguuucgaaaccug

SEQ ID NO: 2514672 - RNA, 19 nt, Artificial Sequence
  Description of Artificial Sequence: Synthetic oligonucleotide
augaaaggaugaaccugcc

SEQ ID NO: 2514673 - RNA, 19 nt, Artificial Sequence
  Description of Artificial Sequence: Synthetic oligonucleotide
auauguaggucuggauuag

SEQ ID NO: 2514674 - RNA, 19 nt, Artificial Sequence
  Description of Artificial Sequence: Synthetic oligonucleotide
uccuucauauauguagguc

SEQ ID NO: 2514675 - RNA, 19 nt, Artificial Sequence
  Description of Artificial Sequence: Synthetic oligonucleotide
aucaaucagcuccuuucca

SEQ ID NO: 2514676 - RNA, 19 nt, Artificial Sequence
  Description of Artificial Sequence: Synthetic oligonucleotide
gcaagcuuccuuuucacca

SEQ ID NO: 2514677 - RNA, 19 nt, Artificial Sequence
  Description of Artificial Sequence: Synthetic oligonucleotide
uaggucuggauuaguucac

SEQ ID NO: 2514678 - RNA, 19 nt, Artificial Sequence
  Description of Artificial Sequence: Synthetic oligonucleotide
agcugcaagcuuccuuuuc

SEQ ID NO: 2514679 - RNA, 19 nt, Artificial Sequence
  Description of Artificial Sequence: Synthetic oligonucleotide
gucuggauuaguucaccac

SEQ ID NO: 2514680 - RNA, 19 nt, Artificial Sequence
  Description of Artificial Sequence: Synthetic oligonucleotide
aggucuggauuaguucacc

SEQ ID NO: 2514681 - RNA, 19 nt, Artificial Sequence
  Description of Artificial Sequence: Synthetic oligonucleotide
gcuccaagaagcuugcuca

SEQ ID NO: 2514682 - RNA, 19 nt, Artificial Sequence
  Description of Artificial Sequence: Synthetic oligonucleotide
cugccuggcauuaacacaa

SEQ ID NO: 2514683 - RNA, 19 nt, Artificial Sequence
  Description of Artificial Sequence: Synthetic oligonucleotide
cuggauuaguucaccacca

SEQ ID NO: 2514684 - RNA, 19 nt, Artificial Sequence
  Description of Artificial Sequence: Synthetic oligonucleotide
gucucaguugucgugugcc

SEQ ID NO: 2514685 - RNA, 19 nt, Artificial Sequence
  Description of Artificial Sequence: Synthetic oligonucleotide
ucuucaggguuuugcucug

SEQ ID NO: 2514686 - RNA, 19 nt, Artificial Sequence
  Description of Artificial Sequence: Synthetic oligonucleotide
cugacaucagcucagcucu

SEQ ID NO: 2514687 - RNA, 19 nt, Artificial Sequence
  Description of Artificial Sequence: Synthetic oligonucleotide
gaacaauauuuauuuuccu

SEQ ID NO: 2514688 - RNA, 19 nt, Artificial Sequence
  Description of Artificial Sequence: Synthetic oligonucleotide
gcucauuccuucuuaaaga

SEQ ID NO: 2514689 - RNA, 19 nt, Artificial Sequence
  Description of Artificial Sequence: Synthetic oligonucleotide
agauccgcuuggcuucgac

SEQ ID NO: 2514690 - RNA, 19 nt, Artificial Sequence
  Description of Artificial Sequence: Synthetic oligonucleotide
gaaauuucgcagauaucaa

SEQ ID NO: 2514691 - RNA, 19 nt, Artificial Sequence
  Description of Artificial Sequence: Synthetic oligonucleotide
uccggucuacuuuccaacu

SEQ ID NO: 2514692 - RNA, 19 nt, Artificial Sequence
  Description of Artificial Sequence: Synthetic oligonucleotide
uccuucuuguuugaugguc

SEQ ID NO: 2514693 - RNA, 19 nt, Artificial Sequence
  Description of Artificial Sequence: Synthetic oligonucleotide
auuccggucuacuuuccaa

SEQ ID NO: 2514694 - RNA, 19 nt, Artificial Sequence
  Description of Artificial Sequence: Synthetic oligonucleotide
aguguucaugaaaggauga

SEQ ID NO: 2514695 - RNA, 19 nt, Artificial Sequence
  Description of Artificial Sequence: Synthetic oligonucleotide
cuagaguauagucaaaguu

SEQ ID NO: 2514696 - RNA, 19 nt, Artificial Sequence
  Description of Artificial Sequence: Synthetic oligonucleotide
cauugaguucaguuccauc

SEQ ID NO: 2514697 - RNA, 19 nt, Artificial Sequence
  Description of Artificial Sequence: Synthetic oligonucleotide
acacaauuggagagaugac

SEQ ID NO: 2514698 - RNA, 19 nt, Artificial Sequence
  Description of Artificial Sequence: Synthetic oligonucleotide
ucauuccggucuacuuucc

SEQ ID NO: 2514699 - RNA, 19 nt, Artificial Sequence
  Description of Artificial Sequence: Synthetic oligonucleotide
ugucuacacguuugaauuu

SEQ ID NO: 2514700 - RNA, 19 nt, Artificial Sequence
  Description of Artificial Sequence: Synthetic oligonucleotide
aguuaucauaguucucauu

SEQ ID NO: 2514701 - RNA, 19 nt, Artificial Sequence
  Description of Artificial Sequence: Synthetic oligonucleotide
gcuuugacaagacugggaa

SEQ ID NO: 2514702 - RNA, 19 nt, Artificial Sequence
  Description of Artificial Sequence: Synthetic oligonucleotide
ugggcuccaagaagcuugc

SEQ ID NO: 2514703 - RNA, 19 nt, Artificial Sequence
  Description of Artificial Sequence: Synthetic oligonucleotide
caguuucaaauugucauga

SEQ ID NO: 2514704 - RNA, 19 nt, Artificial Sequence
  Description of Artificial Sequence: Synthetic oligonucleotide
uugcucugggcuccaagaa

SEQ ID NO: 2514705 - RNA, 19 nt, Artificial Sequence
  Description of Artificial Sequence: Synthetic oligonucleotide
uccgcuuggcuucgacucc

SEQ ID NO: 2514706 - RNA, 19 nt, Artificial Sequence
  Description of Artificial Sequence: Synthetic oligonucleotide
auuccuucuuaaagauccg

SEQ ID NO: 2514707 - RNA, 19 nt, Artificial Sequence
  Description of Artificial Sequence: Synthetic oligonucleotide
cacaacgucaauguuucga

SEQ ID NO: 2514708 - RNA, 19 nt, Artificial Sequence
  Description of Artificial Sequence: Synthetic oligonucleotide
acguuugaauuuugcaaua

SEQ ID NO: 2514709 - RNA, 19 nt, Artificial Sequence
  Description of Artificial Sequence: Synthetic oligonucleotide
uucccucaaggcuccaggu

SEQ ID NO: 2514710 - RNA, 19 nt, Artificial Sequence
  Description of Artificial Sequence: Synthetic oligonucleotide
cagaaauuucgcagauauc

SEQ ID NO: 2514711 - RNA, 19 nt, Artificial Sequence
  Description of Artificial Sequence: Synthetic oligonucleotide
auggucucaguugucgugu

SEQ ID NO: 2514712 - RNA, 19 nt, Artificial Sequence
  Description of Artificial Sequence: Synthetic oligonucleotide
cacguuugaauuuugcaau

SEQ ID NO: 2514713 - RNA, 19 nt, Artificial Sequence
  Description of Artificial Sequence: Synthetic oligonucleotide
agcuccuuuccauugucua

SEQ ID NO: 2514714 - RNA, 19 nt, Artificial Sequence
  Description of Artificial Sequence: Synthetic oligonucleotide
uugcucauuccuucuuaaa

SEQ ID NO: 2514715 - RNA, 19 nt, Artificial Sequence
  Description of Artificial Sequence: Synthetic oligonucleotide
uccuuuucaccaaguuaau

SEQ ID NO: 2514716 - RNA, 19 nt, Artificial Sequence
  Description of Artificial Sequence: Synthetic oligonucleotide
ucgaaaccugcaugauucu

SEQ ID NO: 2514717 - RNA, 19 nt, Artificial Sequence
  Description of Artificial Sequence: Synthetic oligonucleotide
cugcaagcuuccuuuucac

SEQ ID NO: 2514718 - RNA, 19 nt, Artificial Sequence
  Description of Artificial Sequence: Synthetic oligonucleotide
caguucaugcaaaucuuaa

SEQ ID NO: 2514719 - RNA, 19 nt, Artificial Sequence
  Description of Artificial Sequence: Synthetic oligonucleotide
aaauugucaugagcugcaa

SEQ ID NO: 2514720 - RNA, 19 nt, Artificial Sequence
  Description of Artificial Sequence: Synthetic oligonucleotide
uccuuuccauugucuacac

SEQ ID NO: 2514721 - RNA, 19 nt, Artificial Sequence
  Description of Artificial Sequence: Synthetic oligonucleotide
ucccucaaggcuccagguc

SEQ ID NO: 2514722 - RNA, 19 nt, Artificial Sequence
  Description of Artificial Sequence: Synthetic oligonucleotide
cccucaaggcuccaggucc

SEQ ID NO: 2514723 - RNA, 19 nt, Artificial Sequence
  Description of Artificial Sequence: Synthetic oligonucleotide
uauguaggucuggauuagu

SEQ ID NO: 2514724 - RNA, 19 nt, Artificial Sequence
  Description of Artificial Sequence: Synthetic oligonucleotide
cagcucuucaggguuuugc

SEQ ID NO: 2514725 - RNA, 19 nt, Artificial Sequence
  Description of Artificial Sequence: Synthetic oligonucleotide
uugacaagacugggaauau

SEQ ID NO: 2514726 - RNA, 19 nt, Artificial Sequence
  Description of Artificial Sequence: Synthetic oligonucleotide
aguucaccaccagaaauuu

SEQ ID NO: 2514727 - RNA, 19 nt, Artificial Sequence
  Description of Artificial Sequence: Synthetic oligonucleotide
aggaugaaccugccuggca

SEQ ID NO: 2514728 - RNA, 19 nt, Artificial Sequence
  Description of Artificial Sequence: Synthetic oligonucleotide
ugcaaaucuuaaggaacau

SEQ ID NO: 2514729 - RNA, 19 nt, Artificial Sequence
  Description of Artificial Sequence: Synthetic oligonucleotide
auggucaguuucaaauugu

SEQ ID NO: 2514730 - RNA, 19 nt, Artificial Sequence
  Description of Artificial Sequence: Synthetic oligonucleotide
ccaagaagcuugcucauuc

SEQ ID NO: 2514731 - RNA, 19 nt, Artificial Sequence
  Description of Artificial Sequence: Synthetic oligonucleotide
agacugggaauaugccagu

SEQ ID NO: 2514732 - RNA, 19 nt, Artificial Sequence
  Description of Artificial Sequence: Synthetic oligonucleotide
ggauuaguucaccaccaga

SEQ ID NO: 2514733 - RNA, 19 nt, Artificial Sequence
  Description of Artificial Sequence: Synthetic oligonucleotide
gagagaugacucugacauc

SEQ ID NO: 2514734 - RNA, 19 nt, Artificial Sequence
  Description of Artificial Sequence: Synthetic oligonucleotide
ugcccauuuucuccaugaa

SEQ ID NO: 2514735 - RNA, 19 nt, Artificial Sequence
  Description of Artificial Sequence: Synthetic oligonucleotide
gacugggaauaugccagug

SEQ ID NO: 2514736 - RNA, 19 nt, Artificial Sequence
  Description of Artificial Sequence: Synthetic oligonucleotide
gccauggucucaguugucg

SEQ ID NO: 2514737 - RNA, 19 nt, Artificial Sequence
  Description of Artificial Sequence: Synthetic oligonucleotide
aguucucauuccggucuac

SEQ ID NO: 2514738 - RNA, 19 nt, Artificial Sequence
  Description of Artificial Sequence: Synthetic oligonucleotide
cuccuuuccauugucuaca

SEQ ID NO: 2514739 - RNA, 19 nt, Artificial Sequence
  Description of Artificial Sequence: Synthetic oligonucleotide
aaccugccuggcauuaaca

SEQ ID NO: 2514740 - RNA, 19 nt, Artificial Sequence
  Description of Artificial Sequence: Synthetic oligonucleotide
cuugcucauuccuucuuaa

SEQ ID NO: 2514741 - RNA, 19 nt, Artificial Sequence
  Description of Artificial Sequence: Synthetic oligonucleotide
gauaucaaucagcuccuuu

SEQ ID NO: 2514742 - RNA, 19 nt, Artificial Sequence
  Description of Artificial Sequence: Synthetic oligonucleotide
cacaauuggagagaugacu

SEQ ID NO: 2514743 - RNA, 19 nt, Artificial Sequence
  Description of Artificial Sequence: Synthetic oligonucleotide
ugccaucaaaugccauggu

SEQ ID NO: 2514744 - RNA, 19 nt, Artificial Sequence
  Description of Artificial Sequence: Synthetic oligonucleotide
auuucccucaaggcuccag

SEQ ID NO: 2514745 - RNA, 19 nt, Artificial Sequence
  Description of Artificial Sequence: Synthetic oligonucleotide
uaguucucauuccggucua

SEQ ID NO: 2514746 - RNA, 19 nt, Artificial Sequence
  Description of Artificial Sequence: Synthetic oligonucleotide
cucauuccuucuuaaagau

SEQ ID NO: 2514747 - RNA, 19 nt, Artificial Sequence
  Description of Artificial Sequence: Synthetic oligonucleotide
aaccugcaugauucuuuaa

SEQ ID NO: 2514748 - RNA, 19 nt, Artificial Sequence
  Description of Artificial Sequence: Synthetic oligonucleotide
aucaaaugccauggucuca

SEQ ID NO: 2514749 - RNA, 19 nt, Artificial Sequence
  Description of Artificial Sequence: Synthetic oligonucleotide
gcucugggcuccaagaagc

SEQ ID NO: 2514750 - RNA, 19 nt, Artificial Sequence
  Description of Artificial Sequence: Synthetic oligonucleotide
gucaaaguugacaccaagu

SEQ ID NO: 2514751 - RNA, 19 nt, Artificial Sequence
  Description of Artificial Sequence: Synthetic oligonucleotide
uggucucaguugucgugug

SEQ ID NO: 2514752 - RNA, 19 nt, Artificial Sequence
  Description of Artificial Sequence: Synthetic oligonucleotide
gccaucaaaugccaugguc

SEQ ID NO: 2514753 - RNA, 19 nt, Artificial Sequence
  Description of Artificial Sequence: Synthetic oligonucleotide
caagcuuccuuuucaccaa

SEQ ID NO: 2514754 - RNA, 19 nt, Artificial Sequence
  Description of Artificial Sequence: Synthetic oligonucleotide
cuuaaagauccgcuuggcu

SEQ ID NO: 2514755 - RNA, 19 nt, Artificial Sequence
  Description of Artificial Sequence: Synthetic oligonucleotide
ggcuccaagaagcuugcuc

SEQ ID NO: 2514756 - RNA, 19 nt, Artificial Sequence
  Description of Artificial Sequence: Synthetic oligonucleotide
gaaaccugcaugauucuuu

SEQ ID NO: 2514757 - RNA, 19 nt, Artificial Sequence
  Description of Artificial Sequence: Synthetic oligonucleotide
cuuuaauagugaauuuauu

SEQ ID NO: 2514758 - RNA, 19 nt, Artificial Sequence
  Description of Artificial Sequence: Synthetic oligonucleotide
ccaucaaaugccauggucu

SEQ ID NO: 2514759 - RNA, 19 nt, Artificial Sequence
  Description of Artificial Sequence: Synthetic oligonucleotide
cauuuucuccaugaaguua

SEQ ID NO: 2514760 - RNA, 19 nt, Artificial Sequence
  Description of Artificial Sequence: Synthetic oligonucleotide
aaguugacaccaaguucaa

SEQ ID NO: 2514761 - RNA, 19 nt, Artificial Sequence
  Description of Artificial Sequence: Synthetic oligonucleotide
gacaucagcucagcucuuc

SEQ ID NO: 2514762 - RNA, 19 nt, Artificial Sequence
  Description of Artificial Sequence: Synthetic oligonucleotide
ucaccaaguuaaugcccau

SEQ ID NO: 2514763 - RNA, 19 nt, Artificial Sequence
  Description of Artificial Sequence: Synthetic oligonucleotide
gcuccuuuccauugucuac

SEQ ID NO: 2514764 - RNA, 19 nt, Artificial Sequence
  Description of Artificial Sequence: Synthetic oligonucleotide
cucaguugucgugugccuc

SEQ ID NO: 2514765 - RNA, 19 nt, Artificial Sequence
  Description of Artificial Sequence: Synthetic oligonucleotide
gugugugaacaauauuuau

SEQ ID NO: 2514766 - RNA, 19 nt, Artificial Sequence
  Description of Artificial Sequence: Synthetic oligonucleotide
auguaggucuggauuaguu

SEQ ID NO: 2514767 - RNA, 19 nt, Artificial Sequence
  Description of Artificial Sequence: Synthetic oligonucleotide
caacugccaucaaaugcca

SEQ ID NO: 2514768 - RNA, 19 nt, Artificial Sequence
  Description of Artificial Sequence: Synthetic oligonucleotide
ccagaaauuucgcagauau

SEQ ID NO: 2514769 - RNA, 19 nt, Artificial Sequence
  Description of Artificial Sequence: Synthetic oligonucleotide
caccaccagaaauuucgca

SEQ ID NO: 2514770 - RNA, 19 nt, Artificial Sequence
  Description of Artificial Sequence: Synthetic oligonucleotide
cauauauguaggucuggau

SEQ ID NO: 2514771 - RNA, 19 nt, Artificial Sequence
  Description of Artificial Sequence: Synthetic oligonucleotide
ggucaguuucaaauuguca

SEQ ID NO: 2514772 - RNA, 19 nt, Artificial Sequence
  Description of Artificial Sequence: Synthetic oligonucleotide
ggucuacuuuccaacugcc

SEQ ID NO: 2514773 - RNA, 19 nt, Artificial Sequence
  Description of Artificial Sequence: Synthetic oligonucleotide
cuucgacuccuucauauau

SEQ ID NO: 2514774 - RNA, 19 nt, Artificial Sequence
  Description of Artificial Sequence: Synthetic oligonucleotide
gcaauaaguuuauuucccu

SEQ ID NO: 2514775 - RNA, 19 nt, Artificial Sequence
  Description of Artificial Sequence: Synthetic oligonucleotide
ggucuggauuaguucacca

SEQ ID NO: 2514776 - RNA, 19 nt, Artificial Sequence
  Description of Artificial Sequence: Synthetic oligonucleotide
gauccgcuuggcuucgacu

SEQ ID NO: 2514777 - RNA, 19 nt, Artificial Sequence
  Description of Artificial Sequence: Synthetic oligonucleotide
ccuucuuguuugaugguca

SEQ ID NO: 2514778 - RNA, 19 nt, Artificial Sequence
  Description of Artificial Sequence: Synthetic oligonucleotide
aaguccuaacaagcuuuua

SEQ ID NO: 2514779 - RNA, 19 nt, Artificial Sequence
  Description of Artificial Sequence: Synthetic oligonucleotide
agcuugcucauuccuucuu

SEQ ID NO: 2514780 - RNA, 19 nt, Artificial Sequence
  Description of Artificial Sequence: Synthetic oligonucleotide
auaugccaguguucaugaa

SEQ ID NO: 2514781 - RNA, 19 nt, Artificial Sequence
  Description of Artificial Sequence: Synthetic oligonucleotide
cggucuacuuuccaacugc

SEQ ID NO: 2514782 - RNA, 19 nt, Artificial Sequence
  Description of Artificial Sequence: Synthetic oligonucleotide
uccaagaagcuugcucauu

SEQ ID NO: 2514783 - RNA, 19 nt, Artificial Sequence
  Description of Artificial Sequence: Synthetic oligonucleotide
caacgucaauguuucgaaa

SEQ ID NO: 2514784 - RNA, 19 nt, Artificial Sequence
  Description of Artificial Sequence: Synthetic oligonucleotide
gcuagaguauagucaaagu

SEQ ID NO: 2514785 - RNA, 19 nt, Artificial Sequence
  Description of Artificial Sequence: Synthetic oligonucleotide
ccugcaugauucuuuaaua

SEQ ID NO: 2514786 - RNA, 19 nt, Artificial Sequence
  Description of Artificial Sequence: Synthetic oligonucleotide
cauuccggucuacuuucca

SEQ ID NO: 2514787 - RNA, 19 nt, Artificial Sequence
  Description of Artificial Sequence: Synthetic oligonucleotide
ggucucaguugucgugugc

SEQ ID NO: 2514788 - RNA, 19 nt, Artificial Sequence
  Description of Artificial Sequence: Synthetic oligonucleotide
ugaaccugccuggcauuaa

SEQ ID NO: 2514789 - RNA, 19 nt, Artificial Sequence
  Description of Artificial Sequence: Synthetic oligonucleotide
ccuuuucaccaaguuaaug

SEQ ID NO: 2514790 - RNA, 19 nt, Artificial Sequence
  Description of Artificial Sequence: Synthetic oligonucleotide
aacugccaucaaaugccau

SEQ ID NO: 2514791 - RNA, 19 nt, Artificial Sequence
  Description of Artificial Sequence: Synthetic oligonucleotide
ucugggcuccaagaagcuu

SEQ ID NO: 2514792 - RNA, 19 nt, Artificial Sequence
  Description of Artificial Sequence: Synthetic oligonucleotide
gaguucaguuccaucugcu

SEQ ID NO: 2514793 - RNA, 19 nt, Artificial Sequence
  Description of Artificial Sequence: Synthetic oligonucleotide
ggaugaaccugccuggcau

SEQ ID NO: 2514794 - RNA, 19 nt, Artificial Sequence
  Description of Artificial Sequence: Synthetic oligonucleotide
ccuuuccauugucuacacg

SEQ ID NO: 2514795 - RNA, 19 nt, Artificial Sequence
  Description of Artificial Sequence: Synthetic oligonucleotide
ugacaucagcucagcucuu

SEQ ID NO: 2514796 - RNA, 19 nt, Artificial Sequence
  Description of Artificial Sequence: Synthetic oligonucleotide
aguugacaccaaguucaaa

SEQ ID NO: 2514797 - RNA, 19 nt, Artificial Sequence
  Description of Artificial Sequence: Synthetic oligonucleotide
gaugaaccugccuggcauu

SEQ ID NO: 2514798 - RNA, 19 nt, Artificial Sequence
  Description of Artificial Sequence: Synthetic oligonucleotide
cuccuucauauauguaggu

SEQ ID NO: 2514799 - RNA, 19 nt, Artificial Sequence
  Description of Artificial Sequence: Synthetic oligonucleotide
ccucaaggcuccagguccc

SEQ ID NO: 2514800 - RNA, 19 nt, Artificial Sequence
  Description of Artificial Sequence: Synthetic oligonucleotide
augaaccugccuggcauua

SEQ ID NO: 2514801 - RNA, 19 nt, Artificial Sequence
  Description of Artificial Sequence: Synthetic oligonucleotide
accagaaauuucgcagaua

SEQ ID NO: 2514802 - RNA, 19 nt, Artificial Sequence
  Description of Artificial Sequence: Synthetic oligonucleotide
cauugucuacacguuugaa

SEQ ID NO: 2514803 - RNA, 19 nt, Artificial Sequence
  Description of Artificial Sequence: Synthetic oligonucleotide
ggcuucgacuccuucauau

SEQ ID NO: 2514804 - RNA, 19 nt, Artificial Sequence
  Description of Artificial Sequence: Synthetic oligonucleotide
gcuuuuacauuuugggcuu

SEQ ID NO: 2514805 - RNA, 19 nt, Artificial Sequence
  Description of Artificial Sequence: Synthetic oligonucleotide
ggcuuugacaagacuggga

SEQ ID NO: 2514806 - RNA, 19 nt, Artificial Sequence
  Description of Artificial Sequence: Synthetic oligonucleotide
uggcuucgacuccuucaua

SEQ ID NO: 2514807 - RNA, 19 nt, Artificial Sequence
  Description of Artificial Sequence: Synthetic oligonucleotide
ccaggucccauugaguuca

SEQ ID NO: 2514808 - RNA, 19 nt, Artificial Sequence
  Description of Artificial Sequence: Synthetic oligonucleotide
gcaaaucuuaaggaacaua

SEQ ID NO: 2514809 - RNA, 19 nt, Artificial Sequence
  Description of Artificial Sequence: Synthetic oligonucleotide
ccaguguucaugaaaggau

SEQ ID NO: 2514810 - RNA, 19 nt, Artificial Sequence
  Description of Artificial Sequence: Synthetic oligonucleotide
ucaaggcuccaggucccau

SEQ ID NO: 2514811 - RNA, 19 nt, Artificial Sequence
  Description of Artificial Sequence: Synthetic oligonucleotide
gaaguccuaacaagcuuuu

SEQ ID NO: 2514812 - RNA, 19 nt, Artificial Sequence
  Description of Artificial Sequence: Synthetic oligonucleotide
gucuacacguuugaauuuu

SEQ ID NO: 2514813 - RNA, 19 nt, Artificial Sequence
  Description of Artificial Sequence: Synthetic oligonucleotide
ccggucuacuuuccaacug

SEQ ID NO: 2514814 - RNA, 19 nt, Artificial Sequence
  Description of Artificial Sequence: Synthetic oligonucleotide
agauaucaaucagcuccuu

SEQ ID NO: 2514815 - RNA, 19 nt, Artificial Sequence
  Description of Artificial Sequence: Synthetic oligonucleotide
caaacacaacgucaauguu

SEQ ID NO: 2514816 - RNA, 19 nt, Artificial Sequence
  Description of Artificial Sequence: Synthetic oligonucleotide
gcuugcucauuccuucuua

SEQ ID NO: 2514817 - RNA, 19 nt, Artificial Sequence
  Description of Artificial Sequence: Synthetic oligonucleotide
aggcuccaggucccauuga

SEQ ID NO: 2514818 - RNA, 19 nt, Artificial Sequence
  Description of Artificial Sequence: Synthetic oligonucleotide
ccauugucuacacguuuga

SEQ ID NO: 2514819 - RNA, 19 nt, Artificial Sequence
  Description of Artificial Sequence: Synthetic oligonucleotide
cugcuagaguauagucaaa

SEQ ID NO: 2514820 - RNA, 19 nt, Artificial Sequence
  Description of Artificial Sequence: Synthetic oligonucleotide
aagauccgcuuggcuucga

SEQ ID NO: 2514821 - RNA, 19 nt, Artificial Sequence
  Description of Artificial Sequence: Synthetic oligonucleotide
ccaguucaugcaaaucuua

SEQ ID NO: 2514822 - RNA, 19 nt, Artificial Sequence
  Description of Artificial Sequence: Synthetic oligonucleotide
guuucgaaaccugcaugau

SEQ ID NO: 2514823 - RNA, 19 nt, Artificial Sequence
  Description of Artificial Sequence: Synthetic oligonucleotide
caggucccauugaguucag

SEQ ID NO: 2514824 - RNA, 19 nt, Artificial Sequence
  Description of Artificial Sequence: Synthetic oligonucleotide
caccagaaauuucgcagau

SEQ ID NO: 2514825 - RNA, 19 nt, Artificial Sequence
  Description of Artificial Sequence: Synthetic oligonucleotide
gcuucgacuccuucauaua

SEQ ID NO: 2514826 - RNA, 19 nt, Artificial Sequence
  Description of Artificial Sequence: Synthetic oligonucleotide
ccaugaaguuaucauaguu

SEQ ID NO: 2514827 - RNA, 19 nt, Artificial Sequence
  Description of Artificial Sequence: Synthetic oligonucleotide
cuccaagaagcuugcucau

SEQ ID NO: 2514828 - RNA, 19 nt, Artificial Sequence
  Description of Artificial Sequence: Synthetic oligonucleotide
ccuucuuaaagauccgcuu

SEQ ID NO: 2514829 - RNA, 19 nt, Artificial Sequence
  Description of Artificial Sequence: Synthetic oligonucleotide
gcuuggcuucgacuccuuc

SEQ ID NO: 2514830 - RNA, 19 nt, Artificial Sequence
  Description of Artificial Sequence: Synthetic oligonucleotide
ggaauaugccaguguucau

SEQ ID NO: 2514831 - RNA, 19 nt, Artificial Sequence
  Description of Artificial Sequence: Synthetic oligonucleotide
caaggcuccaggucccauu

SEQ ID NO: 2514832 - RNA, 19 nt, Artificial Sequence
  Description of Artificial Sequence: Synthetic oligonucleotide
gagcugcaagcuuccuuuu

SEQ ID NO: 2514833 - RNA, 19 nt, Artificial Sequence
  Description of Artificial Sequence: Synthetic oligonucleotide
caaaugccauggucucagu

SEQ ID NO: 2514834 - RNA, 19 nt, Artificial Sequence
  Description of Artificial Sequence: Synthetic oligonucleotide
cguuugaauuuugcaauaa

SEQ ID NO: 2514835 - RNA, 19 nt, Artificial Sequence
  Description of Artificial Sequence: Synthetic oligonucleotide
ccaucugcuagaguauagu

SEQ ID NO: 2514836 - RNA, 19 nt, Artificial Sequence
  Description of Artificial Sequence: Synthetic oligonucleotide
cuuuuacauuuugggcuuu

SEQ ID NO: 2514837 - RNA, 19 nt, Artificial Sequence
  Description of Artificial Sequence: Synthetic oligonucleotide
caccaaguuaaugcccauu

SEQ ID NO: 2514838 - RNA, 19 nt, Artificial Sequence
  Description of Artificial Sequence: Synthetic oligonucleotide
ccauggucucaguugucgu

SEQ ID NO: 2514839 - RNA, 19 nt, Artificial Sequence
  Description of Artificial Sequence: Synthetic oligonucleotide
ccaaguuaaugcccauuuu

SEQ ID NO: 2514840 - RNA, 19 nt, Artificial Sequence
  Description of Artificial Sequence: Synthetic oligonucleotide
caguuccaucugcuagagu

SEQ ID NO: 2514841 - RNA, 19 nt, Artificial Sequence
  Description of Artificial Sequence: Synthetic oligonucleotide
gccuggcauuaacacaauu

SEQ ID NO: 2514842 - RNA, 19 nt, Artificial Sequence
  Description of Artificial Sequence: Synthetic oligonucleotide
gcucagcucuucaggguuu

SEQ ID NO: 2514843 - RNA, 19 nt, Artificial Sequence
  Description of Artificial Sequence: Synthetic oligonucleotide
cgaaaccugcaugauucuu

SEQ ID NO: 2514844 - RNA, 19 nt, Artificial Sequence
  Description of Artificial Sequence: Synthetic oligonucleotide
ccgcuuggcuucgacuccu

SEQ ID NO: 2514845 - RNA, 19 nt, Artificial Sequence
  Description of Artificial Sequence: Synthetic oligonucleotide
ucuaaaugagcccugaccg

SEQ ID NO: 2514846 - RNA, 19 nt, Artificial Sequence
  Description of Artificial Sequence: Synthetic oligonucleotide
uuuagagccucuuugggcg

SEQ ID NO: 2514847 - RNA, 19 nt, Artificial Sequence
  Description of Artificial Sequence: Synthetic oligonucleotide
ugauguuuuguauaggggc

SEQ ID NO: 2514848 - RNA, 19 nt, Artificial Sequence
  Description of Artificial Sequence: Synthetic oligonucleotide
aaagucgggguguucggcc

SEQ ID NO: 2514849 - RNA, 19 nt, Artificial Sequence
  Description of Artificial Sequence: Synthetic oligonucleotide
uacauguugaacagaaacu

SEQ ID NO: 2514850 - RNA, 19 nt, Artificial Sequence
  Description of Artificial Sequence: Synthetic oligonucleotide
agcugcaagggcuaaaguc

SEQ ID NO: 2514851 - RNA, 19 nt, Artificial Sequence
  Description of Artificial Sequence: Synthetic oligonucleotide
uuuguauaggggcagcgcu

SEQ ID NO: 2514852 - RNA, 19 nt, Artificial Sequence
  Description of Artificial Sequence: Synthetic oligonucleotide
aacaccgccgucuuggacu

SEQ ID NO: 2514853 - RNA, 19 nt, Artificial Sequence
  Description of Artificial Sequence: Synthetic oligonucleotide
ugcucuuuucuaaaugagc

SEQ ID NO: 2514854 - RNA, 19 nt, Artificial Sequence
  Description of Artificial Sequence: Synthetic oligonucleotide
auuauugcugccguccggc

SEQ ID NO: 2514855 - RNA, 19 nt, Artificial Sequence
  Description of Artificial Sequence: Synthetic oligonucleotide
aaagccgcaggccuaggag

SEQ ID NO: 2514856 - RNA, 19 nt, Artificial Sequence
  Description of Artificial Sequence: Synthetic oligonucleotide
caugaagccaguuggcagc

SEQ ID NO: 2514857 - RNA, 19 nt, Artificial Sequence
  Description of Artificial Sequence: Synthetic oligonucleotide
uuuuagcuugcucuuuucu

SEQ ID NO: 2514858 - RNA, 19 nt, Artificial Sequence
  Description of Artificial Sequence: Synthetic oligonucleotide
uuagcuugcucuuuucuaa

SEQ ID NO: 2514859 - RNA, 19 nt, Artificial Sequence
  Description of Artificial Sequence: Synthetic oligonucleotide
aauaaagccgcaggccuag

SEQ ID NO: 2514860 - RNA, 19 nt, Artificial Sequence
  Description of Artificial Sequence: Synthetic oligonucleotide
uugcucuuuucuaaaugag

SEQ ID NO: 2514861 - RNA, 19 nt, Artificial Sequence
  Description of Artificial Sequence: Synthetic oligonucleotide
guuuagagccucuuugggc

SEQ ID NO: 2514862 - RNA, 19 nt, Artificial Sequence
  Description of Artificial Sequence: Synthetic oligonucleotide
gaaggaguccacauaguag

SEQ ID NO: 2514863 - RNA, 19 nt, Artificial Sequence
  Description of Artificial Sequence: Synthetic oligonucleotide
aagggcuaaagucggggug

SEQ ID NO: 2514864 - RNA, 19 nt, Artificial Sequence
  Description of Artificial Sequence: Synthetic oligonucleotide
cuaaaugagcccugaccgg

SEQ ID NO: 2514865 - RNA, 19 nt, Artificial Sequence
  Description of Artificial Sequence: Synthetic oligonucleotide
uaaaugagcccugaccggc

SEQ ID NO: 2514866 - RNA, 19 nt, Artificial Sequence
  Description of Artificial Sequence: Synthetic oligonucleotide
cuugcucuuuucuaaauga

SEQ ID NO: 2514867 - RNA, 19 nt, Artificial Sequence
  Description of Artificial Sequence: Synthetic oligonucleotide
gauuauugcugccguccgg

SEQ ID NO: 2514868 - RNA, 19 nt, Artificial Sequence
  Description of Artificial Sequence: Synthetic oligonucleotide
cuaggagccagccugagca

SEQ ID NO: 2514869 - RNA, 19 nt, Artificial Sequence
  Description of Artificial Sequence: Synthetic oligonucleotide
uuugcucgguccuuguuga

SEQ ID NO: 2514870 - RNA, 19 nt, Artificial Sequence
  Description of Artificial Sequence: Synthetic oligonucleotide
acauaguaguugcccaggg

SEQ ID NO: 2514871 - RNA, 19 nt, Artificial Sequence
  Description of Artificial Sequence: Synthetic oligonucleotide
gaagccaguuggcagccgg

SEQ ID NO: 2514872 - RNA, 19 nt, Artificial Sequence
  Description of Artificial Sequence: Synthetic oligonucleotide
agcagggaaugccaggcgg

SEQ ID NO: 2514873 - RNA, 19 nt, Artificial Sequence
  Description of Artificial Sequence: Synthetic oligonucleotide
aaugagcccugaccggcgg

SEQ ID NO: 2514874 - RNA, 19 nt, Artificial Sequence
  Description of Artificial Sequence: Synthetic oligonucleotide
agcaucggugcccagcagg

SEQ ID NO: 2514875 - RNA, 19 nt, Artificial Sequence
  Description of Artificial Sequence: Synthetic oligonucleotide
uuuagcuugcucuuuucua

SEQ ID NO: 2514876 - RNA, 19 nt, Artificial Sequence
  Description of Artificial Sequence: Synthetic oligonucleotide
acagaaacucuuucuccag

SEQ ID NO: 2514877 - RNA, 19 nt, Artificial Sequence
  Description of Artificial Sequence: Synthetic oligonucleotide
ugcaccggguuccacgagg

SEQ ID NO: 2514878 - RNA, 19 nt, Artificial Sequence
  Description of Artificial Sequence: Synthetic oligonucleotide
gauguuuuguauaggggca

SEQ ID NO: 2514879 - RNA, 19 nt, Artificial Sequence
  Description of Artificial Sequence: Synthetic oligonucleotide
uggcgcauagcguccagcg

SEQ ID NO: 2514880 - RNA, 19 nt, Artificial Sequence
  Description of Artificial Sequence: Synthetic oligonucleotide
gcugcaagggcuaaagucg

SEQ ID NO: 2514881 - RNA, 19 nt, Artificial Sequence
  Description of Artificial Sequence: Synthetic oligonucleotide
uaguaguugcccagggccc

SEQ ID NO: 2514882 - RNA, 19 nt, Artificial Sequence
  Description of Artificial Sequence: Synthetic oligonucleotide
uuuuguauaggggcagcgc

SEQ ID NO: 2514883 - RNA, 19 nt, Artificial Sequence
  Description of Artificial Sequence: Synthetic oligonucleotide
aggccuaggagccagccug

SEQ ID NO: 2514884 - RNA, 19 nt, Artificial Sequence
  Description of Artificial Sequence: Synthetic oligonucleotide
ucggugcccagcaggaagg

SEQ ID NO: 2514885 - RNA, 19 nt, Artificial Sequence
  Description of Artificial Sequence: Synthetic oligonucleotide
cagcucgucagcagcaucg

SEQ ID NO: 2514886 - RNA, 19 nt, Artificial Sequence
  Description of Artificial Sequence: Synthetic oligonucleotide
gcucuuuucuaaaugagcc

SEQ ID NO: 2514887 - RNA, 19 nt, Artificial Sequence
  Description of Artificial Sequence: Synthetic oligonucleotide
ugccaggcggagaugaggc

SEQ ID NO: 2514888 - RNA, 19 nt, Artificial Sequence
  Description of Artificial Sequence: Synthetic oligonucleotide
uuccacgaggcaccgaaca

SEQ ID NO: 2514889 - RNA, 19 nt, Artificial Sequence
  Description of Artificial Sequence: Synthetic oligonucleotide
cacgaggcaccgaacaccg

SEQ ID NO: 2514890 - RNA, 19 nt, Artificial Sequence
  Description of Artificial Sequence: Synthetic oligonucleotide
cucucggugagguugagca

SEQ ID NO: 2514891 - RNA, 19 nt, Artificial Sequence
  Description of Artificial Sequence: Synthetic oligonucleotide
uguugaacagaaacucuuu

SEQ ID NO: 2514892 - RNA, 19 nt, Artificial Sequence
  Description of Artificial Sequence: Synthetic oligonucleotide
gagaaggggacagacaguc

SEQ ID NO: 2514893 - RNA, 19 nt, Artificial Sequence
  Description of Artificial Sequence: Synthetic oligonucleotide
uuuucuaaaugagcccuga

SEQ ID NO: 2514894 - RNA, 19 nt, Artificial Sequence
  Description of Artificial Sequence: Synthetic oligonucleotide
gguuuagagccucuuuggg

SEQ ID NO: 2514895 - RNA, 19 nt, Artificial Sequence
  Description of Artificial Sequence: Synthetic oligonucleotide
cucgucuuuugcucggucc

SEQ ID NO: 2514896 - RNA, 19 nt, Artificial Sequence
  Description of Artificial Sequence: Synthetic oligonucleotide
cuaaagucgggguguucgg

SEQ ID NO: 2514897 - RNA, 19 nt, Artificial Sequence
  Description of Artificial Sequence: Synthetic oligonucleotide
uuucuaaaugagcccugac

SEQ ID NO: 2514898 - RNA, 19 nt, Artificial Sequence
  Description of Artificial Sequence: Synthetic oligonucleotide
ucgucuuuugcucgguccu

SEQ ID NO: 2514899 - RNA, 19 nt, Artificial Sequence
  Description of Artificial Sequence: Synthetic oligonucleotide
aucggugcccagcaggaag

SEQ ID NO: 2514900 - RNA, 19 nt, Artificial Sequence
  Description of Artificial Sequence: Synthetic oligonucleotide
uuucuuuuagcuugcucuu

SEQ ID NO: 2514901 - RNA, 19 nt, Artificial Sequence
  Description of Artificial Sequence: Synthetic oligonucleotide
guuuuguauaggggcagcg

SEQ ID NO: 2514902 - RNA, 19 nt, Artificial Sequence
  Description of Artificial Sequence: Synthetic oligonucleotide
aguaguugcccagggcccc

SEQ ID NO: 2514903 - RNA, 19 nt, Artificial Sequence
  Description of Artificial Sequence: Synthetic oligonucleotide
cauaguaguugcccagggc

SEQ ID NO: 2514904 - RNA, 19 nt, Artificial Sequence
  Description of Artificial Sequence: Synthetic oligonucleotide
ugguggugauacacggccg

SEQ ID NO: 2514905 - RNA, 19 nt, Artificial Sequence
  Description of Artificial Sequence: Synthetic oligonucleotide
uuagagccucuuugggcgg

SEQ ID NO: 2514906 - RNA, 19 nt, Artificial Sequence
  Description of Artificial Sequence: Synthetic oligonucleotide
cugcaagggcuaaagucgg

SEQ ID NO: 2514907 - RNA, 19 nt, Artificial Sequence
  Description of Artificial Sequence: Synthetic oligonucleotide
gcuaaagucgggguguucg

SEQ ID NO: 2514908 - RNA, 19 nt, Artificial Sequence
  Description of Artificial Sequence: Synthetic oligonucleotide
cuuuucuaaaugagcccug

SEQ ID NO: 2514909 - RNA, 19 nt, Artificial Sequence
  Description of Artificial Sequence: Synthetic oligonucleotide
auagcguccagcgcccagc

SEQ ID NO: 2514910 - RNA, 19 nt, Artificial Sequence
  Description of Artificial Sequence: Synthetic oligonucleotide
uauugcugccguccggcgc

SEQ ID NO: 2514911 - RNA, 19 nt, Artificial Sequence
  Description of Artificial Sequence: Synthetic oligonucleotide
ggugagguugagcagccgg

SEQ ID NO: 2514912 - RNA, 19 nt, Artificial Sequence
  Description of Artificial Sequence: Synthetic oligonucleotide
ucacucgucuuuugcucgg

SEQ ID NO: 2514913 - RNA, 19 nt, Artificial Sequence
  Description of Artificial Sequence: Synthetic oligonucleotide
ggguuuagagccucuuugg

SEQ ID NO: 2514914 - RNA, 19 nt, Artificial Sequence
  Description of Artificial Sequence: Synthetic oligonucleotide
aaaugagcccugaccggcg

SEQ ID NO: 2514915 - RNA, 19 nt, Artificial Sequence
  Description of Artificial Sequence: Synthetic oligonucleotide
uaaagccgcaggccuagga

SEQ ID NO: 2514916 - RNA, 19 nt, Artificial Sequence
  Description of Artificial Sequence: Synthetic oligonucleotide
augaagccaguuggcagcc

SEQ ID NO: 2514917 - RNA, 19 nt, Artificial Sequence
  Description of Artificial Sequence: Synthetic oligonucleotide
ugcaagggcuaaagucggg

SEQ ID NO: 2514918 - RNA, 19 nt, Artificial Sequence
  Description of Artificial Sequence: Synthetic oligonucleotide
gaaggggacagacaguccu

SEQ ID NO: 2514919 - RNA, 19 nt, Artificial Sequence
  Description of Artificial Sequence: Synthetic oligonucleotide
cucggugagguugagcagc

SEQ ID NO: 2514920 - RNA, 19 nt, Artificial Sequence
  Description of Artificial Sequence: Synthetic oligonucleotide
cguggagcgagcaugaagc

SEQ ID NO: 2514921 - RNA, 19 nt, Artificial Sequence
  Description of Artificial Sequence: Synthetic oligonucleotide
auuggcgcccgccgcgugc

SEQ ID NO: 2514922 - RNA, 19 nt, Artificial Sequence
  Description of Artificial Sequence: Synthetic oligonucleotide
uguuuuguauaggggcagc

SEQ ID NO: 2514923 - RNA, 19 nt, Artificial Sequence
  Description of Artificial Sequence: Synthetic oligonucleotide
ucuuggacuggaagcugca

SEQ ID NO: 2514924 - RNA, 19 nt, Artificial Sequence
  Description of Artificial Sequence: Synthetic oligonucleotide
gggguuuagagccucuuug

SEQ ID NO: 2514925 - RNA, 19 nt, Artificial Sequence
  Description of Artificial Sequence: Synthetic oligonucleotide
accggguuccacgaggcac

SEQ ID NO: 2514926 - RNA, 19 nt, Artificial Sequence
  Description of Artificial Sequence: Synthetic oligonucleotide
auguuuuguauaggggcag

SEQ ID NO: 2514927 - RNA, 19 nt, Artificial Sequence
  Description of Artificial Sequence: Synthetic oligonucleotide
cacauaguaguugcccagg

SEQ ID NO: 2514928 - RNA, 19 nt, Artificial Sequence
  Description of Artificial Sequence: Synthetic oligonucleotide
ggauuauugcugccguccg

SEQ ID NO: 2514929 - RNA, 19 nt, Artificial Sequence
  Description of Artificial Sequence: Synthetic oligonucleotide
uggugauacacggccgccg

SEQ ID NO: 2514930 - RNA, 19 nt, Artificial Sequence
  Description of Artificial Sequence: Synthetic oligonucleotide
accgcauuggcgcccgccg

SEQ ID NO: 2514931 - RNA, 19 nt, Artificial Sequence
  Description of Artificial Sequence: Synthetic oligonucleotide
guuggcagccggauuauug

SEQ ID NO: 2514932 - RNA, 19 nt, Artificial Sequence
  Description of Artificial Sequence: Synthetic oligonucleotide
ugauacacggccgccggca

SEQ ID NO: 2514933 - RNA, 19 nt, Artificial Sequence
  Description of Artificial Sequence: Synthetic oligonucleotide
uccacgaggcaccgaacac

SEQ ID NO: 2514934 - RNA, 19 nt, Artificial Sequence
  Description of Artificial Sequence: Synthetic oligonucleotide
acagacaguccuuucuuuu

SEQ ID NO: 2514935 - RNA, 19 nt, Artificial Sequence
  Description of Artificial Sequence: Synthetic oligonucleotide
aagucgggguguucggcca

SEQ ID NO: 2514936 - RNA, 19 nt, Artificial Sequence
  Description of Artificial Sequence: Synthetic oligonucleotide
ggagcgagcaugaagccag

SEQ ID NO: 2514937 - RNA, 19 nt, Artificial Sequence
  Description of Artificial Sequence: Synthetic oligonucleotide
uaaagucgggguguucggc

SEQ ID NO: 2514938 - RNA, 19 nt, Artificial Sequence
  Description of Artificial Sequence: Synthetic oligonucleotide
uuugggcggggaguggagg

SEQ ID NO: 2514939 - RNA, 19 nt, Artificial Sequence
  Description of Artificial Sequence: Synthetic oligonucleotide
uguugaucuucuucauuuu

SEQ ID NO: 2514940 - RNA, 19 nt, Artificial Sequence
  Description of Artificial Sequence: Synthetic oligonucleotide
gcguccagcgcccagcucg

SEQ ID NO: 2514941 - RNA, 19 nt, Artificial Sequence
  Description of Artificial Sequence: Synthetic oligonucleotide
ucggugagguugagcagcc

SEQ ID NO: 2514942 - RNA, 19 nt, Artificial Sequence
  Description of Artificial Sequence: Synthetic oligonucleotide
uccgcguggagcgagcaug

SEQ ID NO: 2514943 - RNA, 19 nt, Artificial Sequence
  Description of Artificial Sequence: Synthetic oligonucleotide
guggccaucgcaguagccc

SEQ ID NO: 2514944 - RNA, 19 nt, Artificial Sequence
  Description of Artificial Sequence: Synthetic oligonucleotide
ccuccaauaaagccgcagg

SEQ ID NO: 2514945 - RNA, 19 nt, Artificial Sequence
  Description of Artificial Sequence: Synthetic oligonucleotide
gagcagggaaugccaggcg

SEQ ID NO: 2514946 - RNA, 19 nt, Artificial Sequence
  Description of Artificial Sequence: Synthetic oligonucleotide
ggugauacacggccgccgg

SEQ ID NO: 2514947 - RNA, 19 nt, Artificial Sequence
  Description of Artificial Sequence: Synthetic oligonucleotide
caucgcaguagcccgcgcc

SEQ ID NO: 2514948 - RNA, 19 nt, Artificial Sequence
  Description of Artificial Sequence: Synthetic oligonucleotide
uuguauaggggcagcgcuu

SEQ ID NO: 2514949 - RNA, 19 nt, Artificial Sequence
  Description of Artificial Sequence: Synthetic oligonucleotide
agccggauuauugcugccg

SEQ ID NO: 2514950 - RNA, 19 nt, Artificial Sequence
  Description of Artificial Sequence: Synthetic oligonucleotide
ugagguugagcagccgggc

SEQ ID NO: 2514951 - RNA, 19 nt, Artificial Sequence
  Description of Artificial Sequence: Synthetic oligonucleotide
accucguaccugcgguccc

SEQ ID NO: 2514952 - RNA, 19 nt, Artificial Sequence
  Description of Artificial Sequence: Synthetic oligonucleotide
ugagcccugaccggcggcg

SEQ ID NO: 2514953 - RNA, 19 nt, Artificial Sequence
  Description of Artificial Sequence: Synthetic oligonucleotide
agcgucugauguuuuguau

SEQ ID NO: 2514954 - RNA, 19 nt, Artificial Sequence
  Description of Artificial Sequence: Synthetic oligonucleotide
agaaggggacagacagucc

SEQ ID NO: 2514955 - RNA, 19 nt, Artificial Sequence
  Description of Artificial Sequence: Synthetic oligonucleotide
ugcccagcaggaaggaguc

SEQ ID NO: 2514956 - RNA, 19 nt, Artificial Sequence
  Description of Artificial Sequence: Synthetic oligonucleotide
gcuugcucuuuucuaaaug

SEQ ID NO: 2514957 - RNA, 19 nt, Artificial Sequence
  Description of Artificial Sequence: Synthetic oligonucleotide
uugggcggggaguggaggc

SEQ ID NO: 2514958 - RNA, 19 nt, Artificial Sequence
  Description of Artificial Sequence: Synthetic oligonucleotide
acucgucuuuugcucgguc

SEQ ID NO: 2514959 - RNA, 19 nt, Artificial Sequence
  Description of Artificial Sequence: Synthetic oligonucleotide
gaggcaccgaacaccgccg

SEQ ID NO: 2514960 - RNA, 19 nt, Artificial Sequence
  Description of Artificial Sequence: Synthetic oligonucleotide
aucgcaguagcccgcgccu

SEQ ID NO: 2514961 - RNA, 19 nt, Artificial Sequence
  Description of Artificial Sequence: Synthetic oligonucleotide
gccgucuuggacuggaagc

SEQ ID NO: 2514962 - RNA, 19 nt, Artificial Sequence
  Description of Artificial Sequence: Synthetic oligonucleotide
cacguaggggugguggugg

SEQ ID NO: 2514963 - RNA, 19 nt, Artificial Sequence
  Description of Artificial Sequence: Synthetic oligonucleotide
ucuuugggcggggagugga

SEQ ID NO: 2514964 - RNA, 19 nt, Artificial Sequence
  Description of Artificial Sequence: Synthetic oligonucleotide
guaccugcggucccgugug

SEQ ID NO: 2514965 - RNA, 19 nt, Artificial Sequence
  Description of Artificial Sequence: Synthetic oligonucleotide
augagcccugaccggcggc

SEQ ID NO: 2514966 - RNA, 19 nt, Artificial Sequence
  Description of Artificial Sequence: Synthetic oligonucleotide
gucugauguuuuguauagg

SEQ ID NO: 2514967 - RNA, 19 nt, Artificial Sequence
  Description of Artificial Sequence: Synthetic oligonucleotide
agggcuaaagucggggugu

SEQ ID NO: 2514968 - RNA, 19 nt, Artificial Sequence
  Description of Artificial Sequence: Synthetic oligonucleotide
caggcggagaugaggcccg

SEQ ID NO: 2514969 - RNA, 19 nt, Artificial Sequence
  Description of Artificial Sequence: Synthetic oligonucleotide
gugcacguagggguggugg

SEQ ID NO: 2514970 - RNA, 19 nt, Artificial Sequence
  Description of Artificial Sequence: Synthetic oligonucleotide
gguggugauacacggccgc

SEQ ID NO: 2514971 - RNA, 19 nt, Artificial Sequence
  Description of Artificial Sequence: Synthetic oligonucleotide
uagcuugcucuuuucuaaa

SEQ ID NO: 2514972 - RNA, 19 nt, Artificial Sequence
  Description of Artificial Sequence: Synthetic oligonucleotide
ccugccuugggguuggccc

SEQ ID NO: 2514973 - RNA, 19 nt, Artificial Sequence
  Description of Artificial Sequence: Synthetic oligonucleotide
gcgcauagcguccagcgcc

SEQ ID NO: 2514974 - RNA, 19 nt, Artificial Sequence
  Description of Artificial Sequence: Synthetic oligonucleotide
uggagcgagcaugaagcca

SEQ ID NO: 2514975 - RNA, 19 nt, Artificial Sequence
  Description of Artificial Sequence: Synthetic oligonucleotide
gucuuggacuggaagcugc

SEQ ID NO: 2514976 - RNA, 19 nt, Artificial Sequence
  Description of Artificial Sequence: Synthetic oligonucleotide
cauguugaacagaaacucu

SEQ ID NO: 2514977 - RNA, 19 nt, Artificial Sequence
  Description of Artificial Sequence: Synthetic oligonucleotide
gagcaugaagccaguuggc

SEQ ID NO: 2514978 - RNA, 19 nt, Artificial Sequence
  Description of Artificial Sequence: Synthetic oligonucleotide
uggcagccggauuauugcu

SEQ ID NO: 2514979 - RNA, 19 nt, Artificial Sequence
  Description of Artificial Sequence: Synthetic oligonucleotide
aguuccagcgucugauguu

SEQ ID NO: 2514980 - RNA, 19 nt, Artificial Sequence
  Description of Artificial Sequence: Synthetic oligonucleotide
cugccucucggugagguug

SEQ ID NO: 2514981 - RNA, 19 nt, Artificial Sequence
  Description of Artificial Sequence: Synthetic oligonucleotide
ugguggccaucgcaguagc

SEQ ID NO: 2514982 - RNA, 19 nt, Artificial Sequence
  Description of Artificial Sequence: Synthetic oligonucleotide
agcuugcucuuuucuaaau

SEQ ID NO: 2514983 - RNA, 19 nt, Artificial Sequence
  Description of Artificial Sequence: Synthetic oligonucleotide
gcaagggcuaaagucgggg

SEQ ID NO: 2514984 - RNA, 19 nt, Artificial Sequence
  Description of Artificial Sequence: Synthetic oligonucleotide
ucuugaccugccucucggu

SEQ ID NO: 2514985 - RNA, 19 nt, Artificial Sequence
  Description of Artificial Sequence: Synthetic oligonucleotide
cgucugauguuuuguauag

SEQ ID NO: 2514986 - RNA, 19 nt, Artificial Sequence
  Description of Artificial Sequence: Synthetic oligonucleotide
ucuuccgcguggagcgagc

SEQ ID NO: 2514987 - RNA, 19 nt, Artificial Sequence
  Description of Artificial Sequence: Synthetic oligonucleotide
gccggcaccgcauuggcgc

SEQ ID NO: 2514988 - RNA, 19 nt, Artificial Sequence
  Description of Artificial Sequence: Synthetic oligonucleotide
gcagccggauuauugcugc

SEQ ID NO: 2514989 - RNA, 19 nt, Artificial Sequence
  Description of Artificial Sequence: Synthetic oligonucleotide
uagagccucuuugggcggg

SEQ ID NO: 2514990 - RNA, 19 nt, Artificial Sequence
  Description of Artificial Sequence: Synthetic oligonucleotide
acaccgccgucuuggacug

SEQ ID NO: 2514991 - RNA, 19 nt, Artificial Sequence
  Description of Artificial Sequence: Synthetic oligonucleotide
ugccucucggugagguuga

SEQ ID NO: 2514992 - RNA, 19 nt, Artificial Sequence
  Description of Artificial Sequence: Synthetic oligonucleotide
uucuuccgcguggagcgag

SEQ ID NO: 2514993 - RNA, 19 nt, Artificial Sequence
  Description of Artificial Sequence: Synthetic oligonucleotide
gcgagcaugaagccaguug

SEQ ID NO: 2514994 - RNA, 19 nt, Artificial Sequence
  Description of Artificial Sequence: Synthetic oligonucleotide
cuuugggcggggaguggag

SEQ ID NO: 2514995 - RNA, 19 nt, Artificial Sequence
  Description of Artificial Sequence: Synthetic oligonucleotide
ggaaggaguccacauagua

SEQ ID NO: 2514996 - RNA, 19 nt, Artificial Sequence
  Description of Artificial Sequence: Synthetic oligonucleotide
accggcggcggcucacucg

SEQ ID NO: 2514997 - RNA, 19 nt, Artificial Sequence
  Description of Artificial Sequence: Synthetic oligonucleotide
gugguggccaucgcaguag

SEQ ID NO: 2514998 - RNA, 19 nt, Artificial Sequence
  Description of Artificial Sequence: Synthetic oligonucleotide
agcccugaccggcggcggc

SEQ ID NO: 2514999 - RNA, 19 nt, Artificial Sequence
  Description of Artificial Sequence: Synthetic oligonucleotide
ccacauaguaguugcccag

SEQ ID NO: 2515000 - RNA, 19 nt, Artificial Sequence
  Description of Artificial Sequence: Synthetic oligonucleotide
gaacaccgccgucuuggac

SEQ ID NO: 2515001 - RNA, 19 nt, Artificial Sequence
  Description of Artificial Sequence: Synthetic oligonucleotide
uugccugccuugggguugg

SEQ ID NO: 2515002 - RNA, 19 nt, Artificial Sequence
  Description of Artificial Sequence: Synthetic oligonucleotide
gguuccacgaggcaccgaa

SEQ ID NO: 2515003 - RNA, 19 nt, Artificial Sequence
  Description of Artificial Sequence: Synthetic oligonucleotide
cauagcguccagcgcccag

SEQ ID NO: 2515004 - RNA, 19 nt, Artificial Sequence
  Description of Artificial Sequence: Synthetic oligonucleotide
agucgggguguucggccag

SEQ ID NO: 2515005 - RNA, 19 nt, Artificial Sequence
  Description of Artificial Sequence: Synthetic oligonucleotide
ccgaacaccgccgucuugg

SEQ ID NO: 2515006 - RNA, 19 nt, Artificial Sequence
  Description of Artificial Sequence: Synthetic oligonucleotide
guucggccagcgcugcuug

SEQ ID NO: 2515007 - RNA, 19 nt, Artificial Sequence
  Description of Artificial Sequence: Synthetic oligonucleotide
ugaagccaguuggcagccg

SEQ ID NO: 2515008 - RNA, 19 nt, Artificial Sequence
  Description of Artificial Sequence: Synthetic oligonucleotide
ucggccagcgcugcuugcc

SEQ ID NO: 2515009 - RNA, 19 nt, Artificial Sequence
  Description of Artificial Sequence: Synthetic oligonucleotide
caccucguaccugcggucc

SEQ ID NO: 2515010 - RNA, 19 nt, Artificial Sequence
  Description of Artificial Sequence: Synthetic oligonucleotide
uagcguccagcgcccagcu

SEQ ID NO: 2515011 - RNA, 19 nt, Artificial Sequence
  Description of Artificial Sequence: Synthetic oligonucleotide
caauaaagccgcaggccua

SEQ ID NO: 2515012 - RNA, 19 nt, Artificial Sequence
  Description of Artificial Sequence: Synthetic oligonucleotide
gaguggaggcugggguugg

SEQ ID NO: 2515013 - RNA, 19 nt, Artificial Sequence
  Description of Artificial Sequence: Synthetic oligonucleotide
gcgugcaccggguuccacg

SEQ ID NO: 2515014 - RNA, 19 nt, Artificial Sequence
  Description of Artificial Sequence: Synthetic oligonucleotide
gcucacucgucuuuugcuc

SEQ ID NO: 2515015 - RNA, 19 nt, Artificial Sequence
  Description of Artificial Sequence: Synthetic oligonucleotide
gaugaggcccgggguuuag

SEQ ID NO: 2515016 - RNA, 19 nt, Artificial Sequence
  Description of Artificial Sequence: Synthetic oligonucleotide
cagggaaugccaggcggag

SEQ ID NO: 2515017 - RNA, 19 nt, Artificial Sequence
  Description of Artificial Sequence: Synthetic oligonucleotide
auaaagccgcaggccuagg

SEQ ID NO: 2515018 - RNA, 19 nt, Artificial Sequence
  Description of Artificial Sequence: Synthetic oligonucleotide
gcguggagcgagcaugaag

SEQ ID NO: 2515019 - RNA, 19 nt, Artificial Sequence
  Description of Artificial Sequence: Synthetic oligonucleotide
gugauacacggccgccggc

SEQ ID NO: 2515020 - RNA, 19 nt, Artificial Sequence
  Description of Artificial Sequence: Synthetic oligonucleotide
agcgcugcuugccugccuu

SEQ ID NO: 2515021 - RNA, 19 nt, Artificial Sequence
  Description of Artificial Sequence: Synthetic oligonucleotide
ucgggguguucggccagcg

SEQ ID NO: 2515022 - RNA, 19 nt, Artificial Sequence
  Description of Artificial Sequence: Synthetic oligonucleotide
uguucggccagcgcugcuu

SEQ ID NO: 2515023 - RNA, 19 nt, Artificial Sequence
  Description of Artificial Sequence: Synthetic oligonucleotide
cggauuauugcugccgucc

SEQ ID NO: 2515024 - RNA, 19 nt, Artificial Sequence
  Description of Artificial Sequence: Synthetic oligonucleotide
cgaggcaccgaacaccgcc

SEQ ID NO: 2515025 - RNA, 19 nt, Artificial Sequence
  Description of Artificial Sequence: Synthetic oligonucleotide
ggaguggaggcugggguug

SEQ ID NO: 2515026 - RNA, 19 nt, Artificial Sequence
  Description of Artificial Sequence: Synthetic oligonucleotide
agagccucuuugggcgggg

SEQ ID NO: 2515027 - RNA, 19 nt, Artificial Sequence
  Description of Artificial Sequence: Synthetic oligonucleotide
cagccggauuauugcugcc

SEQ ID NO: 2515028 - RNA, 19 nt, Artificial Sequence
  Description of Artificial Sequence: Synthetic oligonucleotide
gacagacaguccuuucuuu

SEQ ID NO: 2515029 - RNA, 19 nt, Artificial Sequence
  Description of Artificial Sequence: Synthetic oligonucleotide
aggaaggaguccacauagu

SEQ ID NO: 2515030 - RNA, 19 nt, Artificial Sequence
  Description of Artificial Sequence: Synthetic oligonucleotide
gcagcaucggugcccagca

SEQ ID NO: 2515031 - RNA, 19 nt, Artificial Sequence
  Description of Artificial Sequence: Synthetic oligonucleotide
uucggccagcgcugcuugc

SEQ ID NO: 2515032 - RNA, 19 nt, Artificial Sequence
  Description of Artificial Sequence: Synthetic oligonucleotide
ccaggcggagaugaggccc

SEQ ID NO: 2515033 - RNA, 19 nt, Artificial Sequence
  Description of Artificial Sequence: Synthetic oligonucleotide
accgaacaccgccgucuug

SEQ ID NO: 2515034 - RNA, 19 nt, Artificial Sequence
  Description of Artificial Sequence: Synthetic oligonucleotide
cugccuugggguuggccca

SEQ ID NO: 2515035 - RNA, 19 nt, Artificial Sequence
  Description of Artificial Sequence: Synthetic oligonucleotide
gcgucugauguuuuguaua

SEQ ID NO: 2515036 - RNA, 19 nt, Artificial Sequence
  Description of Artificial Sequence: Synthetic oligonucleotide
cuggcgcauagcguccagc

SEQ ID NO: 2515037 - RNA, 19 nt, Artificial Sequence
  Description of Artificial Sequence: Synthetic oligonucleotide
ggugguggugauacacggc

SEQ ID NO: 2515038 - RNA, 19 nt, Artificial Sequence
  Description of Artificial Sequence: Synthetic oligonucleotide
ugccuugggguuggcccag

SEQ ID NO: 2515039 - RNA, 19 nt, Artificial Sequence
  Description of Artificial Sequence: Synthetic oligonucleotide
agcguccagcgcccagcuc

SEQ ID NO: 2515040 - RNA, 19 nt, Artificial Sequence
  Description of Artificial Sequence: Synthetic oligonucleotide
ccacgaggcaccgaacacc

SEQ ID NO: 2515041 - RNA, 19 nt, Artificial Sequence
  Description of Artificial Sequence: Synthetic oligonucleotide
ggcgcauagcguccagcgc

SEQ ID NO: 2515042 - RNA, 19 nt, Artificial Sequence
  Description of Artificial Sequence: Synthetic oligonucleotide
cucuuugggcggggagugg

SEQ ID NO: 2515043 - RNA, 19 nt, Artificial Sequence
  Description of Artificial Sequence: Synthetic oligonucleotide
caagggcuaaagucggggu

SEQ ID NO: 2515044 - RNA, 19 nt, Artificial Sequence
  Description of Artificial Sequence: Synthetic oligonucleotide
aggcaccgaacaccgccgu

SEQ ID NO: 2515045 - RNA, 19 nt, Artificial Sequence
  Description of Artificial Sequence: Synthetic oligonucleotide
accugcggucccgugugag

SEQ ID NO: 2515046 - RNA, 19 nt, Artificial Sequence
  Description of Artificial Sequence: Synthetic oligonucleotide
ggcagccggauuauugcug

SEQ ID NO: 2515047 - RNA, 19 nt, Artificial Sequence
  Description of Artificial Sequence: Synthetic oligonucleotide
uggaagcugcaagggcuaa

SEQ ID NO: 2515048 - RNA, 19 nt, Artificial Sequence
  Description of Artificial Sequence: Synthetic oligonucleotide
gggguguucggccagcgcu

SEQ ID NO: 2515049 - RNA, 19 nt, Artificial Sequence
  Description of Artificial Sequence: Synthetic oligonucleotide
ucguaccugcggucccgug

SEQ ID NO: 2515050 - RNA, 19 nt, Artificial Sequence
  Description of Artificial Sequence: Synthetic oligonucleotide
cagccgggccaccucguac

SEQ ID NO: 2515051 - RNA, 19 nt, Artificial Sequence
  Description of Artificial Sequence: Synthetic oligonucleotide
uuccgcguggagcgagcau

SEQ ID NO: 2515052 - RNA, 19 nt, Artificial Sequence
  Description of Artificial Sequence: Synthetic oligonucleotide
gggaaugccaggcggagau

SEQ ID NO: 2515053 - RNA, 19 nt, Artificial Sequence
  Description of Artificial Sequence: Synthetic oligonucleotide
ccugcggucccgugugagg

SEQ ID NO: 2515054 - RNA, 19 nt, Artificial Sequence
  Description of Artificial Sequence: Synthetic oligonucleotide
accgccgucuuggacugga

SEQ ID NO: 2515055 - RNA, 19 nt, Artificial Sequence
  Description of Artificial Sequence: Synthetic oligonucleotide
caguuccagcgucugaugu

SEQ ID NO: 2515056 - RNA, 19 nt, Artificial Sequence
  Description of Artificial Sequence: Synthetic oligonucleotide
agggaaugccaggcggaga

SEQ ID NO: 2515057 - RNA, 19 nt, Artificial Sequence
  Description of Artificial Sequence: Synthetic oligonucleotide
ccaguuggcagccggauua

SEQ ID NO: 2515058 - RNA, 19 nt, Artificial Sequence
  Description of Artificial Sequence: Synthetic oligonucleotide
gagcccugaccggcggcgg

SEQ ID NO: 2515059 - RNA, 19 nt, Artificial Sequence
  Description of Artificial Sequence: Synthetic oligonucleotide
uaccugcggucccguguga

SEQ ID NO: 2515060 - RNA, 19 nt, Artificial Sequence
  Description of Artificial Sequence: Synthetic oligonucleotide
acguagggguggugguggu

SEQ ID NO: 2515061 - RNA, 19 nt, Artificial Sequence
  Description of Artificial Sequence: Synthetic oligonucleotide
acgaggcaccgaacaccgc

SEQ ID NO: 2515062 - RNA, 19 nt, Artificial Sequence
  Description of Artificial Sequence: Synthetic oligonucleotide
ccuaggagccagccugagc

SEQ ID NO: 2515063 - RNA, 19 nt, Artificial Sequence
  Description of Artificial Sequence: Synthetic oligonucleotide
uuggcgcccgccgcgugca

SEQ ID NO: 2515064 - RNA, 19 nt, Artificial Sequence
  Description of Artificial Sequence: Synthetic oligonucleotide
caccgcauuggcgcccgcc

SEQ ID NO: 2515065 - RNA, 19 nt, Artificial Sequence
  Description of Artificial Sequence: Synthetic oligonucleotide
ggcccagggccccuggcgc

SEQ ID NO: 2515066 - RNA, 19 nt, Artificial Sequence
  Description of Artificial Sequence: Synthetic oligonucleotide
gcaggaaggaguccacaua

SEQ ID NO: 2515067 - RNA, 19 nt, Artificial Sequence
  Description of Artificial Sequence: Synthetic oligonucleotide
agccaguuggcagccggau

SEQ ID NO: 2515068 - RNA, 19 nt, Artificial Sequence
  Description of Artificial Sequence: Synthetic oligonucleotide
ggcucacucgucuuuugcu

SEQ ID NO: 2515069 - RNA, 19 nt, Artificial Sequence
  Description of Artificial Sequence: Synthetic oligonucleotide
uugcucgguccuuguugau

SEQ ID NO: 2515070 - RNA, 19 nt, Artificial Sequence
  Description of Artificial Sequence: Synthetic oligonucleotide
gugcaccggguuccacgag

SEQ ID NO: 2515071 - RNA, 19 nt, Artificial Sequence
  Description of Artificial Sequence: Synthetic oligonucleotide
ugcggucccgugugaggua

SEQ ID NO: 2515072 - RNA, 19 nt, Artificial Sequence
  Description of Artificial Sequence: Synthetic oligonucleotide
ggguguucggccagcgcug

SEQ ID NO: 2515073 - RNA, 19 nt, Artificial Sequence
  Description of Artificial Sequence: Synthetic oligonucleotide
gccaucgcaguagcccgcg

SEQ ID NO: 2515074 - RNA, 19 nt, Artificial Sequence
  Description of Artificial Sequence: Synthetic oligonucleotide
cagcaucggugcccagcag

SEQ ID NO: 2515075 - RNA, 19 nt, Artificial Sequence
  Description of Artificial Sequence: Synthetic oligonucleotide
ggugguggccaucgcagua

SEQ ID NO: 2515076 - RNA, 19 nt, Artificial Sequence
  Description of Artificial Sequence: Synthetic oligonucleotide
cuuggacuggaagcugcaa

SEQ ID NO: 2515077 - RNA, 19 nt, Artificial Sequence
  Description of Artificial Sequence: Synthetic oligonucleotide
ggggacagacaguccuuuc

SEQ ID NO: 2515078 - RNA, 19 nt, Artificial Sequence
  Description of Artificial Sequence: Synthetic oligonucleotide
gguguucggccagcgcugc

SEQ ID NO: 2515079 - RNA, 19 nt, Artificial Sequence
  Description of Artificial Sequence: Synthetic oligonucleotide
gccgcgugcaccggguucc

SEQ ID NO: 2515080 - RNA, 19 nt, Artificial Sequence
  Description of Artificial Sequence: Synthetic oligonucleotide
ggggugcacguaggggugg

SEQ ID NO: 2515081 - RNA, 19 nt, Artificial Sequence
  Description of Artificial Sequence: Synthetic oligonucleotide
gcaccggguuccacgaggc

SEQ ID NO: 2515082 - RNA, 19 nt, Artificial Sequence
  Description of Artificial Sequence: Synthetic oligonucleotide
ugaccggcggcggcucacu

SEQ ID NO: 2515083 - RNA, 19 nt, Artificial Sequence
  Description of Artificial Sequence: Synthetic oligonucleotide
ggacagacaguccuuucuu

SEQ ID NO: 2515084 - RNA, 19 nt, Artificial Sequence
  Description of Artificial Sequence: Synthetic oligonucleotide
cgcauagcguccagcgccc

SEQ ID NO: 2515085 - RNA, 19 nt, Artificial Sequence
  Description of Artificial Sequence: Synthetic oligonucleotide
ggagaugaggcccgggguu

SEQ ID NO: 2515086 - RNA, 19 nt, Artificial Sequence
  Description of Artificial Sequence: Synthetic oligonucleotide
gccgccggcaccgcauugg

SEQ ID NO: 2515087 - RNA, 19 nt, Artificial Sequence
  Description of Artificial Sequence: Synthetic oligonucleotide
gcaucggugcccagcagga

SEQ ID NO: 2515088 - RNA, 19 nt, Artificial Sequence
  Description of Artificial Sequence: Synthetic oligonucleotide
ggcaccgcauuggcgcccg

SEQ ID NO: 2515089 - RNA, 19 nt, Artificial Sequence
  Description of Artificial Sequence: Synthetic oligonucleotide
cagggccccuggcgcauag

SEQ ID NO: 2515090 - RNA, 19 nt, Artificial Sequence
  Description of Artificial Sequence: Synthetic oligonucleotide
gcaggccuaggagccagcc

SEQ ID NO: 2515091 - RNA, 19 nt, Artificial Sequence
  Description of Artificial Sequence: Synthetic oligonucleotide
gcgcccgccgcgugcaccg

SEQ ID NO: 2515092 - RNA, 19 nt, Artificial Sequence
  Description of Artificial Sequence: Synthetic oligonucleotide
gccccggugguggccaucg

SEQ ID NO: 2515093 - RNA, 19 nt, Artificial Sequence
  Description of Artificial Sequence: Synthetic oligonucleotide
gcagggaaugccaggcgga

SEQ ID NO: 2515094 - RNA, 19 nt, Artificial Sequence
  Description of Artificial Sequence: Synthetic oligonucleotide
gucgggguguucggccagc

SEQ ID NO: 2515095 - RNA, 19 nt, Artificial Sequence
  Description of Artificial Sequence: Synthetic oligonucleotide
ccuugggguuggcccaggg

SEQ ID NO: 2515096 - RNA, 19 nt, Artificial Sequence
  Description of Artificial Sequence: Synthetic oligonucleotide
ggaaugccaggcggagaug

SEQ ID NO: 2515097 - RNA, 19 nt, Artificial Sequence
  Description of Artificial Sequence: Synthetic oligonucleotide
gguggccaucgcaguagcc

SEQ ID NO: 2515098 - RNA, 19 nt, Artificial Sequence
  Description of Artificial Sequence: Synthetic oligonucleotide
cgcauuggcgcccgccgcg

SEQ ID NO: 2515099 - RNA, 19 nt, Artificial Sequence
  Description of Artificial Sequence: Synthetic oligonucleotide
aguuggcagccggauuauu

SEQ ID NO: 2515100 - RNA, 19 nt, Artificial Sequence
  Description of Artificial Sequence: Synthetic oligonucleotide
aggcggagaugaggcccgg

SEQ ID NO: 2515101 - RNA, 19 nt, Artificial Sequence
  Description of Artificial Sequence: Synthetic oligonucleotide
gagccagccugagcaggga

SEQ ID NO: 2515102 - RNA, 19 nt, Artificial Sequence
  Description of Artificial Sequence: Synthetic oligonucleotide
agcgagcaugaagccaguu

SEQ ID NO: 2515103 - RNA, 19 nt, Artificial Sequence
  Description of Artificial Sequence: Synthetic oligonucleotide
cagcgcccagcucgucagc

SEQ ID NO: 2515104 - RNA, 19 nt, Artificial Sequence
  Description of Artificial Sequence: Synthetic oligonucleotide
guugagcagccgggccacc

SEQ ID NO: 2515105 - RNA, 19 nt, Artificial Sequence
  Description of Artificial Sequence: Synthetic oligonucleotide
cugaccggcggcggcucac

SEQ ID NO: 2515106 - RNA, 19 nt, Artificial Sequence
  Description of Artificial Sequence: Synthetic oligonucleotide
ccucguaccugcggucccg

SEQ ID NO: 2515107 - RNA, 19 nt, Artificial Sequence
  Description of Artificial Sequence: Synthetic oligonucleotide
ccggauuauugcugccguc

SEQ ID NO: 2515108 - RNA, 19 nt, Artificial Sequence
  Description of Artificial Sequence: Synthetic oligonucleotide
gccggauuauugcugccgu

SEQ ID NO: 2515109 - RNA, 19 nt, Artificial Sequence
  Description of Artificial Sequence: Synthetic oligonucleotide
cuuccgcguggagcgagca

SEQ ID NO: 2515110 - RNA, 19 nt, Artificial Sequence
  Description of Artificial Sequence: Synthetic oligonucleotide
gaccggcggcggcucacuc

SEQ ID NO: 2515111 - RNA, 19 nt, Artificial Sequence
  Description of Artificial Sequence: Synthetic oligonucleotide
uagcccgcgccuggccggc

SEQ ID NO: 2515112 - RNA, 19 nt, Artificial Sequence
  Description of Artificial Sequence: Synthetic oligonucleotide
cggcucacucgucuuuugc

SEQ ID NO: 2515113 - RNA, 19 nt, Artificial Sequence
  Description of Artificial Sequence: Synthetic oligonucleotide
gcgcccagcucgucagcag

SEQ ID NO: 2515114 - RNA, 19 nt, Artificial Sequence
  Description of Artificial Sequence: Synthetic oligonucleotide
cugcggucccgugugaggu

SEQ ID NO: 2515115 - RNA, 19 nt, Artificial Sequence
  Description of Artificial Sequence: Synthetic oligonucleotide
gccgccacgggcgccuggg

SEQ ID NO: 2515116 - RNA, 19 nt, Artificial Sequence
  Description of Artificial Sequence: Synthetic oligonucleotide
ggcggggaguggaggcugg

SEQ ID NO: 2515117 - RNA, 19 nt, Artificial Sequence
  Description of Artificial Sequence: Synthetic oligonucleotide
cgcaguagcccgcgccugg

SEQ ID NO: 2515118 - RNA, 19 nt, Artificial Sequence
  Description of Artificial Sequence: Synthetic oligonucleotide
ggcggagaugaggcccggg

SEQ ID NO: 2515119 - RNA, 19 nt, Artificial Sequence
  Description of Artificial Sequence: Synthetic oligonucleotide
cgccgucuuggacuggaag

SEQ ID NO: 2515120 - RNA, 19 nt, Artificial Sequence
  Description of Artificial Sequence: Synthetic oligonucleotide
ccagcucgucagcagcauc

SEQ ID NO: 2515121 - RNA, 19 nt, Artificial Sequence
  Description of Artificial Sequence: Synthetic oligonucleotide
gcaguagcccgcgccuggc

SEQ ID NO: 2515122 - RNA, 19 nt, Artificial Sequence
  Description of Artificial Sequence: Synthetic oligonucleotide
gagccucuuugggcgggga

SEQ ID NO: 2515123 - RNA, 19 nt, Artificial Sequence
  Description of Artificial Sequence: Synthetic oligonucleotide
ccggcaccgcauuggcgcc

SEQ ID NO: 2515124 - RNA, 19 nt, Artificial Sequence
  Description of Artificial Sequence: Synthetic oligonucleotide
uugcugccguccggcgcug

SEQ ID NO: 2515125 - RNA, 19 nt, Artificial Sequence
  Description of Artificial Sequence: Synthetic oligonucleotide
gggguuggcccagggcccc

SEQ ID NO: 2515126 - RNA, 19 nt, Artificial Sequence
  Description of Artificial Sequence: Synthetic oligonucleotide
ccucucggugagguugagc

SEQ ID NO: 2515127 - RNA, 19 nt, Artificial Sequence
  Description of Artificial Sequence: Synthetic oligonucleotide
cagggccccggugguggcc

SEQ ID NO: 2515128 - RNA, 19 nt, Artificial Sequence
  Description of Artificial Sequence: Synthetic oligonucleotide
caccggguuccacgaggca

SEQ ID NO: 2515129 - RNA, 19 nt, Artificial Sequence
  Description of Artificial Sequence: Synthetic oligonucleotide
ccgcauuggcgcccgccgc

SEQ ID NO: 2515130 - RNA, 19 nt, Artificial Sequence
  Description of Artificial Sequence: Synthetic oligonucleotide
ggugcacguagggguggug

SEQ ID NO: 2515131 - RNA, 19 nt, Artificial Sequence
  Description of Artificial Sequence: Synthetic oligonucleotide
cgugcaccggguuccacga

SEQ ID NO: 2515132 - RNA, 19 nt, Artificial Sequence
  Description of Artificial Sequence: Synthetic oligonucleotide
cuucuuccgcguggagcga

SEQ ID NO: 2515133 - RNA, 19 nt, Artificial Sequence
  Description of Artificial Sequence: Synthetic oligonucleotide
gccuaggagccagccugag

SEQ ID NO: 2515134 - RNA, 19 nt, Artificial Sequence
  Description of Artificial Sequence: Synthetic oligonucleotide
ugcugccguccggcgcugc

SEQ ID NO: 2515135 - RNA, 19 nt, Artificial Sequence
  Description of Artificial Sequence: Synthetic oligonucleotide
ggagaaggggacagacagu

SEQ ID NO: 2515136 - RNA, 19 nt, Artificial Sequence
  Description of Artificial Sequence: Synthetic oligonucleotide
caggccuaggagccagccu

SEQ ID NO: 2515137 - RNA, 19 nt, Artificial Sequence
  Description of Artificial Sequence: Synthetic oligonucleotide
cagcagcaucggugcccag

SEQ ID NO: 2515138 - RNA, 19 nt, Artificial Sequence
  Description of Artificial Sequence: Synthetic oligonucleotide
ggcuaaagucgggguguuc

SEQ ID NO: 2515139 - RNA, 19 nt, Artificial Sequence
  Description of Artificial Sequence: Synthetic oligonucleotide
acggccgccggcaccgcau

SEQ ID NO: 2515140 - RNA, 19 nt, Artificial Sequence
  Description of Artificial Sequence: Synthetic oligonucleotide
cccggugguggccaucgca

SEQ ID NO: 2515141 - RNA, 19 nt, Artificial Sequence
  Description of Artificial Sequence: Synthetic oligonucleotide
ccgccggcaccgcauuggc

SEQ ID NO: 2515142 - RNA, 19 nt, Artificial Sequence
  Description of Artificial Sequence: Synthetic oligonucleotide
ccuggcgcauagcguccag

SEQ ID NO: 2515143 - RNA, 19 nt, Artificial Sequence
  Description of Artificial Sequence: Synthetic oligonucleotide
ggcagcgcuucuuccgcgu

SEQ ID NO: 2515144 - RNA, 19 nt, Artificial Sequence
  Description of Artificial Sequence: Synthetic oligonucleotide
gccucuuugggcggggagu

SEQ ID NO: 2515145 - RNA, 19 nt, Artificial Sequence
  Description of Artificial Sequence: Synthetic oligonucleotide
ccaucgcaguagcccgcgc

SEQ ID NO: 2515146 - RNA, 19 nt, Artificial Sequence
  Description of Artificial Sequence: Synthetic oligonucleotide
caucggugcccagcaggaa

SEQ ID NO: 2515147 - RNA, 19 nt, Artificial Sequence
  Description of Artificial Sequence: Synthetic oligonucleotide
ccgucuuggacuggaagcu

SEQ ID NO: 2515148 - RNA, 19 nt, Artificial Sequence
  Description of Artificial Sequence: Synthetic oligonucleotide
gcccgccgcgugcaccggg

SEQ ID NO: 2515149 - RNA, 19 nt, Artificial Sequence
  Description of Artificial Sequence: Synthetic oligonucleotide
gcggggaguggaggcuggg

SEQ ID NO: 2515150 - RNA, 19 nt, Artificial Sequence
  Description of Artificial Sequence: Synthetic oligonucleotide
ccgcaggccuaggagccag

SEQ ID NO: 2515151 - RNA, 19 nt, Artificial Sequence
  Description of Artificial Sequence: Synthetic oligonucleotide
gcccagcucgucagcagca

SEQ ID NO: 2515152 - RNA, 19 nt, Artificial Sequence
  Description of Artificial Sequence: Synthetic oligonucleotide
gguuggcccagggccccug

SEQ ID NO: 2515153 - RNA, 19 nt, Artificial Sequence
  Description of Artificial Sequence: Synthetic oligonucleotide
gggccaccucguaccugcg

SEQ ID NO: 2515154 - RNA, 19 nt, Artificial Sequence
  Description of Artificial Sequence: Synthetic oligonucleotide
ccguccggcgcugccgccg

SEQ ID NO: 2515155 - RNA, 19 nt, Artificial Sequence
  Description of Artificial Sequence: Synthetic oligonucleotide
ccagcgcugcuugccugcc

SEQ ID NO: 2515156 - RNA, 19 nt, Artificial Sequence
  Description of Artificial Sequence: Synthetic oligonucleotide
gagcgagcaugaagccagu

SEQ ID NO: 2515157 - RNA, 19 nt, Artificial Sequence
  Description of Artificial Sequence: Synthetic oligonucleotide
ccgcguggagcgagcauga

SEQ ID NO: 2515158 - RNA, 19 nt, Artificial Sequence
  Description of Artificial Sequence: Synthetic oligonucleotide
uggcgcccgccgcgugcac

SEQ ID NO: 2515159 - RNA, 19 nt, Artificial Sequence
  Description of Artificial Sequence: Synthetic oligonucleotide
cgccggcaccgcauuggcg

SEQ ID NO: 2515160 - RNA, 19 nt, Artificial Sequence
  Description of Artificial Sequence: Synthetic oligonucleotide
caccgccgucuuggacugg

SEQ ID NO: 2515161 - RNA, 19 nt, Artificial Sequence
  Description of Artificial Sequence: Synthetic oligonucleotide
ggccgccggcaccgcauug

SEQ ID NO: 2515162 - RNA, 19 nt, Artificial Sequence
  Description of Artificial Sequence: Synthetic oligonucleotide
gccuugggguuggcccagg

SEQ ID NO: 2515163 - RNA, 19 nt, Artificial Sequence
  Description of Artificial Sequence: Synthetic oligonucleotide
gcccagggccccuggcgca

SEQ ID NO: 2515164 - RNA, 19 nt, Artificial Sequence
  Description of Artificial Sequence: Synthetic oligonucleotide
gcucgucagcagcaucggu

SEQ ID NO: 2515165 - RNA, 19 nt, Artificial Sequence
  Description of Artificial Sequence: Synthetic oligonucleotide
guguucggccagcgcugcu

SEQ ID NO: 2515166 - RNA, 19 nt, Artificial Sequence
  Description of Artificial Sequence: Synthetic oligonucleotide
cacucgucuuuugcucggu

SEQ ID NO: 2515167 - RNA, 19 nt, Artificial Sequence
  Description of Artificial Sequence: Synthetic oligonucleotide
ugccugccuugggguuggc

SEQ ID NO: 2515168 - RNA, 19 nt, Artificial Sequence
  Description of Artificial Sequence: Synthetic oligonucleotide
cggguuccacgaggcaccg

SEQ ID NO: 2515169 - RNA, 19 nt, Artificial Sequence
  Description of Artificial Sequence: Synthetic oligonucleotide
caccgaacaccgccgucuu

SEQ ID NO: 2515170 - RNA, 19 nt, Artificial Sequence
  Description of Artificial Sequence: Synthetic oligonucleotide
caguuggcagccggauuau

SEQ ID NO: 2515171 - RNA, 19 nt, Artificial Sequence
  Description of Artificial Sequence: Synthetic oligonucleotide
cguaccugcggucccgugu

SEQ ID NO: 2515172 - RNA, 19 nt, Artificial Sequence
  Description of Artificial Sequence: Synthetic oligonucleotide
cgggguguucggccagcgc

SEQ ID NO: 2515173 - RNA, 19 nt, Artificial Sequence
  Description of Artificial Sequence: Synthetic oligonucleotide
cgaacaccgccgucuugga

SEQ ID NO: 2515174 - RNA, 19 nt, Artificial Sequence
  Description of Artificial Sequence: Synthetic oligonucleotide
cucguaccugcggucccgu

SEQ ID NO: 2515175 - RNA, 19 nt, Artificial Sequence
  Description of Artificial Sequence: Synthetic oligonucleotide
cgcaggccuaggagccagc

SEQ ID NO: 2515176 - RNA, 19 nt, Artificial Sequence
  Description of Artificial Sequence: Synthetic oligonucleotide
gccaguuggcagccggauu

SEQ ID NO: 2515177 - RNA, 19 nt, Artificial Sequence
  Description of Artificial Sequence: Synthetic oligonucleotide
gccagccugagcagggaau

SEQ ID NO: 2515178 - RNA, 19 nt, Artificial Sequence
  Description of Artificial Sequence: Synthetic oligonucleotide
gcauagcguccagcgccca

SEQ ID NO: 2515179 - RNA, 19 nt, Artificial Sequence
  Description of Artificial Sequence: Synthetic oligonucleotide
gcccgggguuuagagccuc

SEQ ID NO: 2515180 - RNA, 19 nt, Artificial Sequence
  Description of Artificial Sequence: Synthetic oligonucleotide
ccgccacgggcgccugggg

SEQ ID NO: 2515181 - RNA, 19 nt, Artificial Sequence
  Description of Artificial Sequence: Synthetic oligonucleotide
cucgguccuuguugaucuu

SEQ ID NO: 2515182 - RNA, 19 nt, Artificial Sequence
  Description of Artificial Sequence: Synthetic oligonucleotide
guccagcgcccagcucguc

SEQ ID NO: 2515183 - RNA, 19 nt, Artificial Sequence
  Description of Artificial Sequence: Synthetic oligonucleotide
ccggcggcggcucacucgu

SEQ ID NO: 2515184 - RNA, 19 nt, Artificial Sequence
  Description of Artificial Sequence: Synthetic oligonucleotide
cgccgcgugcaccggguuc

SEQ ID NO: 2515185 - RNA, 19 nt, Artificial Sequence
  Description of Artificial Sequence: Synthetic oligonucleotide
cagcgcugcuugccugccu

SEQ ID NO: 2515186 - RNA, 19 nt, Artificial Sequence
  Description of Artificial Sequence: Synthetic oligonucleotide
gcaccgcauuggcgcccgc

SEQ ID NO: 2515187 - RNA, 19 nt, Artificial Sequence
  Description of Artificial Sequence: Synthetic oligonucleotide
ggguuccacgaggcaccga

SEQ ID NO: 2515188 - RNA, 19 nt, Artificial Sequence
  Description of Artificial Sequence: Synthetic oligonucleotide
gccgggccaccucguaccu

SEQ ID NO: 2515189 - RNA, 19 nt, Artificial Sequence
  Description of Artificial Sequence: Synthetic oligonucleotide
ccccggugguggccaucgc

SEQ ID NO: 2515190 - RNA, 19 nt, Artificial Sequence
  Description of Artificial Sequence: Synthetic oligonucleotide
gggugcacguagggguggu

SEQ ID NO: 2515191 - RNA, 19 nt, Artificial Sequence
  Description of Artificial Sequence: Synthetic oligonucleotide
ccgggccaccucguaccug

SEQ ID NO: 2515192 - RNA, 19 nt, Artificial Sequence
  Description of Artificial Sequence: Synthetic oligonucleotide
ccugaccggcggcggcuca

SEQ ID NO: 2515193 - RNA, 19 nt, Artificial Sequence
  Description of Artificial Sequence: Synthetic oligonucleotide
gggcuaaagucgggguguu

SEQ ID NO: 2515194 - RNA, 19 nt, Artificial Sequence
  Description of Artificial Sequence: Synthetic oligonucleotide
gcggcggcucacucgucuu

SEQ ID NO: 2515195 - RNA, 19 nt, Artificial Sequence
  Description of Artificial Sequence: Synthetic oligonucleotide
gcccugaccggcggcggcu

SEQ ID NO: 2515196 - RNA, 19 nt, Artificial Sequence
  Description of Artificial Sequence: Synthetic oligonucleotide
ggcccgggguuuagagccu

SEQ ID NO: 2515197 - RNA, 19 nt, Artificial Sequence
  Description of Artificial Sequence: Synthetic oligonucleotide
ggccccggugguggccauc

SEQ ID NO: 2515198 - RNA, 19 nt, Artificial Sequence
  Description of Artificial Sequence: Synthetic oligonucleotide
ccgccgucuuggacuggaa

SEQ ID NO: 2515199 - RNA, 19 nt, Artificial Sequence
  Description of Artificial Sequence: Synthetic oligonucleotide
cgggguuuagagccucuuu

SEQ ID NO: 2515200 - RNA, 19 nt, Artificial Sequence
  Description of Artificial Sequence: Synthetic oligonucleotide
cccgggguuuagagccucu

SEQ ID NO: 2515201 - RNA, 19 nt, Artificial Sequence
  Description of Artificial Sequence: Synthetic oligonucleotide
cggugguggccaucgcagu

SEQ ID NO: 2515202 - RNA, 19 nt, Artificial Sequence
  Description of Artificial Sequence: Synthetic oligonucleotide
cccgccgcgugcaccgggu

SEQ ID NO: 2515203 - RNA, 19 nt, Artificial Sequence
  Description of Artificial Sequence: Synthetic oligonucleotide
cccgcgccuggccggccca

SEQ ID NO: 2515204 - RNA, 19 nt, Artificial Sequence
  Description of Artificial Sequence: Synthetic oligonucleotide
cgcgugcaccggguuccac

SEQ ID NO: 2515205 - RNA, 19 nt, Artificial Sequence
  Description of Artificial Sequence: Synthetic oligonucleotide
cccagcucgucagcagcau

SEQ ID NO: 2515206 - RNA, 19 nt, Artificial Sequence
  Description of Artificial Sequence: Synthetic oligonucleotide
cggccagcgcugcuugccu

SEQ ID NO: 2515207 - RNA, 19 nt, Artificial Sequence
  Description of Artificial Sequence: Synthetic oligonucleotide
ccgggguuuagagccucuu

SEQ ID NO: 2515208 - RNA, 19 nt, Artificial Sequence
  Description of Artificial Sequence: Synthetic oligonucleotide
ccgcgugcaccggguucca

SEQ ID NO: 2515209 - RNA, 19 nt, Artificial Sequence
  Description of Artificial Sequence: Synthetic oligonucleotide
cgcguggagcgagcaugaa

SEQ ID NO: 2515210 - RNA, 19 nt, Artificial Sequence
  Description of Artificial Sequence: Synthetic oligonucleotide
cgcccgccgcgugcaccgg

SEQ ID NO: 2515211 - RNA, 19 nt, Artificial Sequence
  Description of Artificial Sequence: Synthetic oligonucleotide
cggcggcggcucacucguc

SEQ ID NO: 2515212 - RNA, 19 nt, Artificial Sequence
  Description of Artificial Sequence: Synthetic oligonucleotide
ccagggccccuggcgcaua

SEQ ID NO: 2515213 - RNA, 19 nt, Artificial Sequence
  Description of Artificial Sequence: Synthetic oligonucleotide
ccgccgccacgggcgccug

SEQ ID NO: 2515214 - RNA, 19 nt, Artificial Sequence
  Description of Artificial Sequence: Synthetic oligonucleotide
cccagggccccuggcgcau

SEQ ID NO: 2515215 - RNA, 19 nt, Artificial Sequence
  Description of Artificial Sequence: Synthetic oligonucleotide
gggccccggugguggccau

SEQ ID NO: 2515216 - RNA, 19 nt, Artificial Sequence
  Description of Artificial Sequence: Synthetic oligonucleotide
ccgccgcgugcaccggguu

SEQ ID NO: 2515217 - RNA, 19 nt, Artificial Sequence
  Description of Artificial Sequence: Synthetic oligonucleotide
cggccgccggcaccgcauu

SEQ ID NO: 2515218 - RNA, 19 nt, Artificial Sequence
  Description of Artificial Sequence: Synthetic oligonucleotide
aaugguuucaauuaccagc

SEQ ID NO: 2515219 - RNA, 19 nt, Artificial Sequence
  Description of Artificial Sequence: Synthetic oligonucleotide
aauacaacgaaauauauuu

SEQ ID NO: 2515220 - RNA, 19 nt, Artificial Sequence
  Description of Artificial Sequence: Synthetic oligonucleotide
ugaaacaaaauuaagugcc

SEQ ID NO: 2515221 - RNA, 19 nt, Artificial Sequence
  Description of Artificial Sequence: Synthetic oligonucleotide
acgaaauauauuuaaaugg

SEQ ID NO: 2515222 - RNA, 19 nt, Artificial Sequence
  Description of Artificial Sequence: Synthetic oligonucleotide
aaaagaaagauuuuauuga

SEQ ID NO: 2515223 - RNA, 19 nt, Artificial Sequence
  Description of Artificial Sequence: Synthetic oligonucleotide
auugaaacaaaauuaagug

SEQ ID NO: 2515224 - RNA, 19 nt, Artificial Sequence
  Description of Artificial Sequence: Synthetic oligonucleotide
uuuggaaggacauacaaag

SEQ ID NO: 2515225 - RNA, 19 nt, Artificial Sequence
  Description of Artificial Sequence: Synthetic oligonucleotide
aacgaaauauauuuaaaug

SEQ ID NO: 2515226 - RNA, 19 nt, Artificial Sequence
  Description of Artificial Sequence: Synthetic oligonucleotide
aauugugucaccauugggc

SEQ ID NO: 2515227 - RNA, 19 nt, Artificial Sequence
  Description of Artificial Sequence: Synthetic oligonucleotide
aaagcuuugaacuccauga

SEQ ID NO: 2515228 - RNA, 19 nt, Artificial Sequence
  Description of Artificial Sequence: Synthetic oligonucleotide
aaaguuuugagacuguacu

SEQ ID NO: 2515229 - RNA, 19 nt, Artificial Sequence
  Description of Artificial Sequence: Synthetic oligonucleotide
uuggauuuaauguugagug

SEQ ID NO: 2515230 - RNA, 19 nt, Artificial Sequence
  Description of Artificial Sequence: Synthetic oligonucleotide
ucaaguuuggauuuaaugu

SEQ ID NO: 2515231 - RNA, 19 nt, Artificial Sequence
  Description of Artificial Sequence: Synthetic oligonucleotide
auacaaagugaauacaacg

SEQ ID NO: 2515232 - RNA, 19 nt, Artificial Sequence
  Description of Artificial Sequence: Synthetic oligonucleotide
aaaaguuuaccagugacug

SEQ ID NO: 2515233 - RNA, 19 nt, Artificial Sequence
  Description of Artificial Sequence: Synthetic oligonucleotide
cauguugucauccaggagc

SEQ ID NO: 2515234 - RNA, 19 nt, Artificial Sequence
  Description of Artificial Sequence: Synthetic oligonucleotide
ucaauuaccagcauugaaa

SEQ ID NO: 2515235 - RNA, 19 nt, Artificial Sequence
  Description of Artificial Sequence: Synthetic oligonucleotide
uacaaagugaauacaacga

SEQ ID NO: 2515236 - RNA, 19 nt, Artificial Sequence
  Description of Artificial Sequence: Synthetic oligonucleotide
uuugagacuguacugguug

SEQ ID NO: 2515237 - RNA, 19 nt, Artificial Sequence
  Description of Artificial Sequence: Synthetic oligonucleotide
caagauauguuccagggag

SEQ ID NO: 2515238 - RNA, 19 nt, Artificial Sequence
  Description of Artificial Sequence: Synthetic oligonucleotide
uggaaggacauacaaagug

SEQ ID NO: 2515239 - RNA, 19 nt, Artificial Sequence
  Description of Artificial Sequence: Synthetic oligonucleotide
aaaguuuaccagugacugc

SEQ ID NO: 2515240 - RNA, 19 nt, Artificial Sequence
  Description of Artificial Sequence: Synthetic oligonucleotide
uuuaaaugguuucaauuac

SEQ ID NO: 2515241 - RNA, 19 nt, Artificial Sequence
  Description of Artificial Sequence: Synthetic oligonucleotide
aauaccaggggucuugaug

SEQ ID NO: 2515242 - RNA, 19 nt, Artificial Sequence
  Description of Artificial Sequence: Synthetic oligonucleotide
agaaagauuuuauugaaaa

SEQ ID NO: 2515243 - RNA, 19 nt, Artificial Sequence
  Description of Artificial Sequence: Synthetic oligonucleotide
ugaauguccucucagcaag

SEQ ID NO: 2515244 - RNA, 19 nt, Artificial Sequence
  Description of Artificial Sequence: Synthetic oligonucleotide
uuaaaugguuucaauuacc

SEQ ID NO: 2515245 - RNA, 19 nt, Artificial Sequence
  Description of Artificial Sequence: Synthetic oligonucleotide
uaaaugguuucaauuacca

SEQ ID NO: 2515246 - RNA, 19 nt, Artificial Sequence
  Description of Artificial Sequence: Synthetic oligonucleotide
ugauguugacaacagagga

SEQ ID NO: 2515247 - RNA, 19 nt, Artificial Sequence
  Description of Artificial Sequence: Synthetic oligonucleotide
gucucugucauuuucagug

SEQ ID NO: 2515248 - RNA, 19 nt, Artificial Sequence
  Description of Artificial Sequence: Synthetic oligonucleotide
auacaaguugugcagacag

SEQ ID NO: 2515249 - RNA, 19 nt, Artificial Sequence
  Description of Artificial Sequence: Synthetic oligonucleotide
ucaauugugucaccauugg

SEQ ID NO: 2515250 - RNA, 19 nt, Artificial Sequence
  Description of Artificial Sequence: Synthetic oligonucleotide
uuaaucaucuguuucaguu

SEQ ID NO: 2515251 - RNA, 19 nt, Artificial Sequence
  Description of Artificial Sequence: Synthetic oligonucleotide
gauucuucaauggugacug

SEQ ID NO: 2515252 - RNA, 19 nt, Artificial Sequence
  Description of Artificial Sequence: Synthetic oligonucleotide
cuagcuacagguuauucag

SEQ ID NO: 2515253 - RNA, 19 nt, Artificial Sequence
  Description of Artificial Sequence: Synthetic oligonucleotide
aaaagcuuugaacuccaug

SEQ ID NO: 2515254 - RNA, 19 nt, Artificial Sequence
  Description of Artificial Sequence: Synthetic oligonucleotide
uuaaucuucucauucauuu

SEQ ID NO: 2515255 - RNA, 19 nt, Artificial Sequence
  Description of Artificial Sequence: Synthetic oligonucleotide
aaagcauugguuuguacau

SEQ ID NO: 2515256 - RNA, 19 nt, Artificial Sequence
  Description of Artificial Sequence: Synthetic oligonucleotide
auugggcuuacccaauacc

SEQ ID NO: 2515257 - RNA, 19 nt, Artificial Sequence
  Description of Artificial Sequence: Synthetic oligonucleotide
cuuacaaaagcuuugaacu

SEQ ID NO: 2515258 - RNA, 19 nt, Artificial Sequence
  Description of Artificial Sequence: Synthetic oligonucleotide
uauuuaaaugguuucaauu

SEQ ID NO: 2515259 - RNA, 19 nt, Artificial Sequence
  Description of Artificial Sequence: Synthetic oligonucleotide
uguacauaaugucuagaca

SEQ ID NO: 2515260 - RNA, 19 nt, Artificial Sequence
  Description of Artificial Sequence: Synthetic oligonucleotide
uuucagugagugcuggugg

SEQ ID NO: 2515261 - RNA, 19 nt, Artificial Sequence
  Description of Artificial Sequence: Synthetic oligonucleotide
aaaugguuucaauuaccag

SEQ ID NO: 2515262 - RNA, 19 nt, Artificial Sequence
  Description of Artificial Sequence: Synthetic oligonucleotide
uaaauccuuaaucaucugu

SEQ ID NO: 2515263 - RNA, 19 nt, Artificial Sequence
  Description of Artificial Sequence: Synthetic oligonucleotide
gaaagcauugguuuguaca

SEQ ID NO: 2515264 - RNA, 19 nt, Artificial Sequence
  Description of Artificial Sequence: Synthetic oligonucleotide
aguuuugagacuguacugg

SEQ ID NO: 2515265 - RNA, 19 nt, Artificial Sequence
  Description of Artificial Sequence: Synthetic oligonucleotide
uuguacauaaugucuagac

SEQ ID NO: 2515266 - RNA, 19 nt, Artificial Sequence
  Description of Artificial Sequence: Synthetic oligonucleotide
aggaucucuguauggaccc

SEQ ID NO: 2515267 - RNA, 19 nt, Artificial Sequence
  Description of Artificial Sequence: Synthetic oligonucleotide
agcuuugaacuccaugagc

SEQ ID NO: 2515268 - RNA, 19 nt, Artificial Sequence
  Description of Artificial Sequence: Synthetic oligonucleotide
agggagacaguccaauccc

SEQ ID NO: 2515269 - RNA, 19 nt, Artificial Sequence
  Description of Artificial Sequence: Synthetic oligonucleotide
uacaacgaaauauauuuaa

SEQ ID NO: 2515270 - RNA, 19 nt, Artificial Sequence
  Description of Artificial Sequence: Synthetic oligonucleotide
agugaauacaacgaaauau

SEQ ID NO: 2515271 - RNA, 19 nt, Artificial Sequence
  Description of Artificial Sequence: Synthetic oligonucleotide
guuucaauuaccagcauug

SEQ ID NO: 2515272 - RNA, 19 nt, Artificial Sequence
  Description of Artificial Sequence: Synthetic oligonucleotide
ucuguauggaccccacagg

SEQ ID NO: 2515273 - RNA, 19 nt, Artificial Sequence
  Description of Artificial Sequence: Synthetic oligonucleotide
aaguugugcagacaguggu

SEQ ID NO: 2515274 - RNA, 19 nt, Artificial Sequence
  Description of Artificial Sequence: Synthetic oligonucleotide
aaagugaauacaacgaaau

SEQ ID NO: 2515275 - RNA, 19 nt, Artificial Sequence
  Description of Artificial Sequence: Synthetic oligonucleotide
auaugaagccuguauagca

SEQ ID NO: 2515276 - RNA, 19 nt, Artificial Sequence
  Description of Artificial Sequence: Synthetic oligonucleotide
uuucaguuguuucugguaa

SEQ ID NO: 2515277 - RNA, 19 nt, Artificial Sequence
  Description of Artificial Sequence: Synthetic oligonucleotide
ucuagcuacagguuauuca

SEQ ID NO: 2515278 - RNA, 19 nt, Artificial Sequence
  Description of Artificial Sequence: Synthetic oligonucleotide
uggauuuaauguugagugg

SEQ ID NO: 2515279 - RNA, 19 nt, Artificial Sequence
  Description of Artificial Sequence: Synthetic oligonucleotide
uugggcuuacccaauacca

SEQ ID NO: 2515280 - RNA, 19 nt, Artificial Sequence
  Description of Artificial Sequence: Synthetic oligonucleotide
ucuugcuuugguguggugg

SEQ ID NO: 2515281 - RNA, 19 nt, Artificial Sequence
  Description of Artificial Sequence: Synthetic oligonucleotide
caauuaccagcauugaaac

SEQ ID NO: 2515282 - RNA, 19 nt, Artificial Sequence
  Description of Artificial Sequence: Synthetic oligonucleotide
auuaccagcauugaaacaa

SEQ ID NO: 2515283 - RNA, 19 nt, Artificial Sequence
  Description of Artificial Sequence: Synthetic oligonucleotide
uauagcagcuuaaucuucu

SEQ ID NO: 2515284 - RNA, 19 nt, Artificial Sequence
  Description of Artificial Sequence: Synthetic oligonucleotide
uuuggauuuaauguugagu

SEQ ID NO: 2515285 - RNA, 19 nt, Artificial Sequence
  Description of Artificial Sequence: Synthetic oligonucleotide
ugaauacaacgaaauauau

SEQ ID NO: 2515286 - RNA, 19 nt, Artificial Sequence
  Description of Artificial Sequence: Synthetic oligonucleotide
auaccaggggucuugaugu

SEQ ID NO: 2515287 - RNA, 19 nt, Artificial Sequence
  Description of Artificial Sequence: Synthetic oligonucleotide
aauguugaguggcuuuuca

SEQ ID NO: 2515288 - RNA, 19 nt, Artificial Sequence
  Description of Artificial Sequence: Synthetic oligonucleotide
ucaauuuuauccuuuucuu

SEQ ID NO: 2515289 - RNA, 19 nt, Artificial Sequence
  Description of Artificial Sequence: Synthetic oligonucleotide
agguuauucagcuucaguu

SEQ ID NO: 2515290 - RNA, 19 nt, Artificial Sequence
  Description of Artificial Sequence: Synthetic oligonucleotide
guauggaccccacaggucc

SEQ ID NO: 2515291 - RNA, 19 nt, Artificial Sequence
  Description of Artificial Sequence: Synthetic oligonucleotide
cuugcuuuggugugguggg

SEQ ID NO: 2515292 - RNA, 19 nt, Artificial Sequence
  Description of Artificial Sequence: Synthetic oligonucleotide
acauugaaagcauugguuu

SEQ ID NO: 2515293 - RNA, 19 nt, Artificial Sequence
  Description of Artificial Sequence: Synthetic oligonucleotide
uguauagcagcuuaaucuu

SEQ ID NO: 2515294 - RNA, 19 nt, Artificial Sequence
  Description of Artificial Sequence: Synthetic oligonucleotide
auugugucaccauugggcu

SEQ ID NO: 2515295 - RNA, 19 nt, Artificial Sequence
  Description of Artificial Sequence: Synthetic oligonucleotide
ugcucagugagaagcgagg

SEQ ID NO: 2515296 - RNA, 19 nt, Artificial Sequence
  Description of Artificial Sequence: Synthetic oligonucleotide
ucuagacagcuuacaaaag

SEQ ID NO: 2515297 - RNA, 19 nt, Artificial Sequence
  Description of Artificial Sequence: Synthetic oligonucleotide
uuuuauccuuuucuuuggc

SEQ ID NO: 2515298 - RNA, 19 nt, Artificial Sequence
  Description of Artificial Sequence: Synthetic oligonucleotide
ucuucaauggugacuggcu

SEQ ID NO: 2515299 - RNA, 19 nt, Artificial Sequence
  Description of Artificial Sequence: Synthetic oligonucleotide
ucugguaaucaauuguguc

SEQ ID NO: 2515300 - RNA, 19 nt, Artificial Sequence
  Description of Artificial Sequence: Synthetic oligonucleotide
agccaaauacaaguugugc

SEQ ID NO: 2515301 - RNA, 19 nt, Artificial Sequence
  Description of Artificial Sequence: Synthetic oligonucleotide
ucagugagaagcgaggcca

SEQ ID NO: 2515302 - RNA, 19 nt, Artificial Sequence
  Description of Artificial Sequence: Synthetic oligonucleotide
cauugaaacaaaauuaagu

SEQ ID NO: 2515303 - RNA, 19 nt, Artificial Sequence
  Description of Artificial Sequence: Synthetic oligonucleotide
gauaugaagccuguauagc

SEQ ID NO: 2515304 - RNA, 19 nt, Artificial Sequence
  Description of Artificial Sequence: Synthetic oligonucleotide
agcauugguuuguacauug

SEQ ID NO: 2515305 - RNA, 19 nt, Artificial Sequence
  Description of Artificial Sequence: Synthetic oligonucleotide
ugacugcucagugagaagc

SEQ ID NO: 2515306 - RNA, 19 nt, Artificial Sequence
  Description of Artificial Sequence: Synthetic oligonucleotide
acaaagugaauacaacgaa

SEQ ID NO: 2515307 - RNA, 19 nt, Artificial Sequence
  Description of Artificial Sequence: Synthetic oligonucleotide
uguugaguggcuuuucaaa

SEQ ID NO: 2515308 - RNA, 19 nt, Artificial Sequence
  Description of Artificial Sequence: Synthetic oligonucleotide
uucaauuaccagcauugaa

SEQ ID NO: 2515309 - RNA, 19 nt, Artificial Sequence
  Description of Artificial Sequence: Synthetic oligonucleotide
aauuaccagcauugaaaca

SEQ ID NO: 2515310 - RNA, 19 nt, Artificial Sequence
  Description of Artificial Sequence: Synthetic oligonucleotide
ggauaugaagccuguauag

SEQ ID NO: 2515311 - RNA, 19 nt, Artificial Sequence
  Description of Artificial Sequence: Synthetic oligonucleotide
agauauguuccagggagac

SEQ ID NO: 2515312 - RNA, 19 nt, Artificial Sequence
  Description of Artificial Sequence: Synthetic oligonucleotide
aaguuuggauuuaauguug

SEQ ID NO: 2515313 - RNA, 19 nt, Artificial Sequence
  Description of Artificial Sequence: Synthetic oligonucleotide
uucaugcuguggcuggugg

SEQ ID NO: 2515314 - RNA, 19 nt, Artificial Sequence
  Description of Artificial Sequence: Synthetic oligonucleotide
caaacuucuagcuacaggu

SEQ ID NO: 2515315 - RNA, 19 nt, Artificial Sequence
  Description of Artificial Sequence: Synthetic oligonucleotide
acaaaauuaagugccaaaa

SEQ ID NO: 2515316 - RNA, 19 nt, Artificial Sequence
  Description of Artificial Sequence: Synthetic oligonucleotide
uuuaccagugacugcucag

SEQ ID NO: 2515317 - RNA, 19 nt, Artificial Sequence
  Description of Artificial Sequence: Synthetic oligonucleotide
aacuucuagcuacagguua

SEQ ID NO: 2515318 - RNA, 19 nt, Artificial Sequence
  Description of Artificial Sequence: Synthetic oligonucleotide
guucccagcaaacuucuag

SEQ ID NO: 2515319 - RNA, 19 nt, Artificial Sequence
  Description of Artificial Sequence: Synthetic oligonucleotide
gucuagacagcuuacaaaa

SEQ ID NO: 2515320 - RNA, 19 nt, Artificial Sequence
  Description of Artificial Sequence: Synthetic oligonucleotide
cucuguauggaccccacag

SEQ ID NO: 2515321 - RNA, 19 nt, Artificial Sequence
  Description of Artificial Sequence: Synthetic oligonucleotide
aaauccuuaaucaucuguu

SEQ ID NO: 2515322 - RNA, 19 nt, Artificial Sequence
  Description of Artificial Sequence: Synthetic oligonucleotide
aguccaauccccuucaauu

SEQ ID NO: 2515323 - RNA, 19 nt, Artificial Sequence
  Description of Artificial Sequence: Synthetic oligonucleotide
uucccagcaaacuucuagc

SEQ ID NO: 2515324 - RNA, 19 nt, Artificial Sequence
  Description of Artificial Sequence: Synthetic oligonucleotide
uuuucagugagugcuggug

SEQ ID NO: 2515325 - RNA, 19 nt, Artificial Sequence
  Description of Artificial Sequence: Synthetic oligonucleotide
gacaacagaggauucuuca

SEQ ID NO: 2515326 - RNA, 19 nt, Artificial Sequence
  Description of Artificial Sequence: Synthetic oligonucleotide
uucagugagugcugguggg

SEQ ID NO: 2515327 - RNA, 19 nt, Artificial Sequence
  Description of Artificial Sequence: Synthetic oligonucleotide
ugggaucuugcuuuggugu

SEQ ID NO: 2515328 - RNA, 19 nt, Artificial Sequence
  Description of Artificial Sequence: Synthetic oligonucleotide
gucaccauugggcuuaccc

SEQ ID NO: 2515329 - RNA, 19 nt, Artificial Sequence
  Description of Artificial Sequence: Synthetic oligonucleotide
aacauugaaagcauugguu

SEQ ID NO: 2515330 - RNA, 19 nt, Artificial Sequence
  Description of Artificial Sequence: Synthetic oligonucleotide
cauugaaagcauugguuug

SEQ ID NO: 2515331 - RNA, 19 nt, Artificial Sequence
  Description of Artificial Sequence: Synthetic oligonucleotide
cauuguacauaaugucuag

SEQ ID NO: 2515332 - RNA, 19 nt, Artificial Sequence
  Description of Artificial Sequence: Synthetic oligonucleotide
ugguaaucaauugugucac

SEQ ID NO: 2515333 - RNA, 19 nt, Artificial Sequence
  Description of Artificial Sequence: Synthetic oligonucleotide
ugggauaugaagccuguau

SEQ ID NO: 2515334 - RNA, 19 nt, Artificial Sequence
  Description of Artificial Sequence: Synthetic oligonucleotide
acaaguugugcagacagug

SEQ ID NO: 2515335 - RNA, 19 nt, Artificial Sequence
  Description of Artificial Sequence: Synthetic oligonucleotide
agcaaggaucucuguaugg

SEQ ID NO: 2515336 - RNA, 19 nt, Artificial Sequence
  Description of Artificial Sequence: Synthetic oligonucleotide
uuuaauguugaguggcuuu

SEQ ID NO: 2515337 - RNA, 19 nt, Artificial Sequence
  Description of Artificial Sequence: Synthetic oligonucleotide
aauccuuaaucaucuguuu

SEQ ID NO: 2515338 - RNA, 19 nt, Artificial Sequence
  Description of Artificial Sequence: Synthetic oligonucleotide
uccauguugucauccagga

SEQ ID NO: 2515339 - RNA, 19 nt, Artificial Sequence
  Description of Artificial Sequence: Synthetic oligonucleotide
ucuucucauucauuucucc

SEQ ID NO: 2515340 - RNA, 19 nt, Artificial Sequence
  Description of Artificial Sequence: Synthetic oligonucleotide
uccccuucaauuuuauccu

SEQ ID NO: 2515341 - RNA, 19 nt, Artificial Sequence
  Description of Artificial Sequence: Synthetic oligonucleotide
cuguauagcagcuuaaucu

SEQ ID NO: 2515342 - RNA, 19 nt, Artificial Sequence
  Description of Artificial Sequence: Synthetic oligonucleotide
cugguaaucaauuguguca

SEQ ID NO: 2515343 - RNA, 19 nt, Artificial Sequence
  Description of Artificial Sequence: Synthetic oligonucleotide
agcuacagguuauucagcu

SEQ ID NO: 2515344 - RNA, 19 nt, Artificial Sequence
  Description of Artificial Sequence: Synthetic oligonucleotide
uuacccaauaccagggguc

SEQ ID NO: 2515345 - RNA, 19 nt, Artificial Sequence
  Description of Artificial Sequence: Synthetic oligonucleotide
ucaccauugggcuuaccca

SEQ ID NO: 2515346 - RNA, 19 nt, Artificial Sequence
  Description of Artificial Sequence: Synthetic oligonucleotide
ugucuagacagcuuacaaa

SEQ ID NO: 2515347 - RNA, 19 nt, Artificial Sequence
  Description of Artificial Sequence: Synthetic oligonucleotide
uucucauucauuucuccau

SEQ ID NO: 2515348 - RNA, 19 nt, Artificial Sequence
  Description of Artificial Sequence: Synthetic oligonucleotide
ugggcuuacccaauaccag

SEQ ID NO: 2515349 - RNA, 19 nt, Artificial Sequence
  Description of Artificial Sequence: Synthetic oligonucleotide
uucugguaaucaauugugu

SEQ ID NO: 2515350 - RNA, 19 nt, Artificial Sequence
  Description of Artificial Sequence: Synthetic oligonucleotide
aaugucuagacagcuuaca

SEQ ID NO: 2515351 - RNA, 19 nt, Artificial Sequence
  Description of Artificial Sequence: Synthetic oligonucleotide
agaagcgaggccaagauau

SEQ ID NO: 2515352 - RNA, 19 nt, Artificial Sequence
  Description of Artificial Sequence: Synthetic oligonucleotide
caaguugugcagacagugg

SEQ ID NO: 2515353 - RNA, 19 nt, Artificial Sequence
  Description of Artificial Sequence: Synthetic oligonucleotide
agcuuaaucuucucauuca

SEQ ID NO: 2515354 - RNA, 19 nt, Artificial Sequence
  Description of Artificial Sequence: Synthetic oligonucleotide
agcagcuuaaucuucucau

SEQ ID NO: 2515355 - RNA, 19 nt, Artificial Sequence
  Description of Artificial Sequence: Synthetic oligonucleotide
uugagcuuggcauuuucaa

SEQ ID NO: 2515356 - RNA, 19 nt, Artificial Sequence
  Description of Artificial Sequence: Synthetic oligonucleotide
ggauuuaauguugaguggc

SEQ ID NO: 2515357 - RNA, 19 nt, Artificial Sequence
  Description of Artificial Sequence: Synthetic oligonucleotide
uuguuucugguaaucaauu

SEQ ID NO: 2515358 - RNA, 19 nt, Artificial Sequence
  Description of Artificial Sequence: Synthetic oligonucleotide
gccaagauauguuccaggg

SEQ ID NO: 2515359 - RNA, 19 nt, Artificial Sequence
  Description of Artificial Sequence: Synthetic oligonucleotide
agcauugaaacaaaauuaa

SEQ ID NO: 2515360 - RNA, 19 nt, Artificial Sequence
  Description of Artificial Sequence: Synthetic oligonucleotide
aauacaaguugugcagaca

SEQ ID NO: 2515361 - RNA, 19 nt, Artificial Sequence
  Description of Artificial Sequence: Synthetic oligonucleotide
agugguucugggaucuugc

SEQ ID NO: 2515362 - RNA, 19 nt, Artificial Sequence
  Description of Artificial Sequence: Synthetic oligonucleotide
agaggauucuucaauggug

SEQ ID NO: 2515363 - RNA, 19 nt, Artificial Sequence
  Description of Artificial Sequence: Synthetic oligonucleotide
ucugucauuuucagugagu

SEQ ID NO: 2515364 - RNA, 19 nt, Artificial Sequence
  Description of Artificial Sequence: Synthetic oligonucleotide
ugagaagcgaggccaagau

SEQ ID NO: 2515365 - RNA, 19 nt, Artificial Sequence
  Description of Artificial Sequence: Synthetic oligonucleotide
ucugggaucuugcuuuggu

SEQ ID NO: 2515366 - RNA, 19 nt, Artificial Sequence
  Description of Artificial Sequence: Synthetic oligonucleotide
auugaaagcauugguuugu

SEQ ID NO: 2515367 - RNA, 19 nt, Artificial Sequence
  Description of Artificial Sequence: Synthetic oligonucleotide
uggugggauaugaagccug

SEQ ID NO: 2515368 - RNA, 19 nt, Artificial Sequence
  Description of Artificial Sequence: Synthetic oligonucleotide
uucuucaauggugacuggc

SEQ ID NO: 2515369 - RNA, 19 nt, Artificial Sequence
  Description of Artificial Sequence: Synthetic oligonucleotide
uuggaaggacauacaaagu

SEQ ID NO: 2515370 - RNA, 19 nt, Artificial Sequence
  Description of Artificial Sequence: Synthetic oligonucleotide
aucaauugugucaccauug

SEQ ID NO: 2515371 - RNA, 19 nt, Artificial Sequence
  Description of Artificial Sequence: Synthetic oligonucleotide
uaaugucuagacagcuuac

SEQ ID NO: 2515372 - RNA, 19 nt, Artificial Sequence
  Description of Artificial Sequence: Synthetic oligonucleotide
cagcauugaaacaaaauua

SEQ ID NO: 2515373 - RNA, 19 nt, Artificial Sequence
  Description of Artificial Sequence: Synthetic oligonucleotide
guuuggauuuaauguugag

SEQ ID NO: 2515374 - RNA, 19 nt, Artificial Sequence
  Description of Artificial Sequence: Synthetic oligonucleotide
uacagguuauucagcuuca

SEQ ID NO: 2515375 - RNA, 19 nt, Artificial Sequence
  Description of Artificial Sequence: Synthetic oligonucleotide
acuguacugguugagcuug

SEQ ID NO: 2515376 - RNA, 19 nt, Artificial Sequence
  Description of Artificial Sequence: Synthetic oligonucleotide
uaaucaauugugucaccau

SEQ ID NO: 2515377 - RNA, 19 nt, Artificial Sequence
  Description of Artificial Sequence: Synthetic oligonucleotide
aagccuguauagcagcuua

SEQ ID NO: 2515378 - RNA, 19 nt, Artificial Sequence
  Description of Artificial Sequence: Synthetic oligonucleotide
uagcagcuuaaucuucuca

SEQ ID NO: 2515379 - RNA, 19 nt, Artificial Sequence
  Description of Artificial Sequence: Synthetic oligonucleotide
cagcuuaaucuucucauuc

SEQ ID NO: 2515380 - RNA, 19 nt, Artificial Sequence
  Description of Artificial Sequence: Synthetic oligonucleotide
caaagugaauacaacgaaa

SEQ ID NO: 2515381 - RNA, 19 nt, Artificial Sequence
  Description of Artificial Sequence: Synthetic oligonucleotide
gaggauucuucaaugguga

SEQ ID NO: 2515382 - RNA, 19 nt, Artificial Sequence
  Description of Artificial Sequence: Synthetic oligonucleotide
ugaagccuguauagcagcu

SEQ ID NO: 2515383 - RNA, 19 nt, Artificial Sequence
  Description of Artificial Sequence: Synthetic oligonucleotide
guccaaaguuuugagacug

SEQ ID NO: 2515384 - RNA, 19 nt, Artificial Sequence
  Description of Artificial Sequence: Synthetic oligonucleotide
gguuauucagcuucaguuc

SEQ ID NO: 2515385 - RNA, 19 nt, Artificial Sequence
  Description of Artificial Sequence: Synthetic oligonucleotide
ucucauucauuucuccauu

SEQ ID NO: 2515386 - RNA, 19 nt, Artificial Sequence
  Description of Artificial Sequence: Synthetic oligonucleotide
ucaguucaugcuguggcug

SEQ ID NO: 2515387 - RNA, 19 nt, Artificial Sequence
  Description of Artificial Sequence: Synthetic oligonucleotide
guugaguggcuuuucaaaa

SEQ ID NO: 2515388 - RNA, 19 nt, Artificial Sequence
  Description of Artificial Sequence: Synthetic oligonucleotide
uucaguucaugcuguggcu

SEQ ID NO: 2515389 - RNA, 19 nt, Artificial Sequence
  Description of Artificial Sequence: Synthetic oligonucleotide
caaggaucucuguauggac

SEQ ID NO: 2515390 - RNA, 19 nt, Artificial Sequence
  Description of Artificial Sequence: Synthetic oligonucleotide
ucucugucauuuucaguga

SEQ ID NO: 2515391 - RNA, 19 nt, Artificial Sequence
  Description of Artificial Sequence: Synthetic oligonucleotide
uuucaauuaccagcauuga

SEQ ID NO: 2515392 - RNA, 19 nt, Artificial Sequence
  Description of Artificial Sequence: Synthetic oligonucleotide
ucauuucuccauuguacau

SEQ ID NO: 2515393 - RNA, 19 nt, Artificial Sequence
  Description of Artificial Sequence: Synthetic oligonucleotide
gagcuuggcauuuucaagu

SEQ ID NO: 2515394 - RNA, 19 nt, Artificial Sequence
  Description of Artificial Sequence: Synthetic oligonucleotide
uggcucauguccaaaguuu

SEQ ID NO: 2515395 - RNA, 19 nt, Artificial Sequence
  Description of Artificial Sequence: Synthetic oligonucleotide
augucuagacagcuuacaa

SEQ ID NO: 2515396 - RNA, 19 nt, Artificial Sequence
  Description of Artificial Sequence: Synthetic oligonucleotide
uguggcugguggcucaugu

SEQ ID NO: 2515397 - RNA, 19 nt, Artificial Sequence
  Description of Artificial Sequence: Synthetic oligonucleotide
acagcuuacaaaagcuuug

SEQ ID NO: 2515398 - RNA, 19 nt, Artificial Sequence
  Description of Artificial Sequence: Synthetic oligonucleotide
gugaauacaacgaaauaua

SEQ ID NO: 2515399 - RNA, 19 nt, Artificial Sequence
  Description of Artificial Sequence: Synthetic oligonucleotide
gcaaacuucuagcuacagg

SEQ ID NO: 2515400 - RNA, 19 nt, Artificial Sequence
  Description of Artificial Sequence: Synthetic oligonucleotide
uuaccagcauugaaacaaa

SEQ ID NO: 2515401 - RNA, 19 nt, Artificial Sequence
  Description of Artificial Sequence: Synthetic oligonucleotide
aagccaaauacaaguugug

SEQ ID NO: 2515402 - RNA, 19 nt, Artificial Sequence
  Description of Artificial Sequence: Synthetic oligonucleotide
uguauggaccccacagguc

SEQ ID NO: 2515403 - RNA, 19 nt, Artificial Sequence
  Description of Artificial Sequence: Synthetic oligonucleotide
uacaaguugugcagacagu

SEQ ID NO: 2515404 - RNA, 19 nt, Artificial Sequence
  Description of Artificial Sequence: Synthetic oligonucleotide
uagcuacagguuauucagc

SEQ ID NO: 2515405 - RNA, 19 nt, Artificial Sequence
  Description of Artificial Sequence: Synthetic oligonucleotide
uuaauguugaguggcuuuu

SEQ ID NO: 2515406 - RNA, 19 nt, Artificial Sequence
  Description of Artificial Sequence: Synthetic oligonucleotide
uauucagcuucaguucaug

SEQ ID NO: 2515407 - RNA, 19 nt, Artificial Sequence
  Description of Artificial Sequence: Synthetic oligonucleotide
ugacaacagaggauucuuc

SEQ ID NO: 2515408 - RNA, 19 nt, Artificial Sequence
  Description of Artificial Sequence: Synthetic oligonucleotide
auugguuuguacauuguuu

SEQ ID NO: 2515409 - RNA, 19 nt, Artificial Sequence
  Description of Artificial Sequence: Synthetic oligonucleotide
uugagacuguacugguuga

SEQ ID NO: 2515410 - RNA, 19 nt, Artificial Sequence
  Description of Artificial Sequence: Synthetic oligonucleotide
gagacuguacugguugagc

SEQ ID NO: 2515411 - RNA, 19 nt, Artificial Sequence
  Description of Artificial Sequence: Synthetic oligonucleotide
uggcuaaauccuuaaucau

SEQ ID NO: 2515412 - RNA, 19 nt, Artificial Sequence
  Description of Artificial Sequence: Synthetic oligonucleotide
gaaggacauacaaagugaa

SEQ ID NO: 2515413 - RNA, 19 nt, Artificial Sequence
  Description of Artificial Sequence: Synthetic oligonucleotide
uguugacaacagaggauuc

SEQ ID NO: 2515414 - RNA, 19 nt, Artificial Sequence
  Description of Artificial Sequence: Synthetic oligonucleotide
ugagacuguacugguugag

SEQ ID NO: 2515415 - RNA, 19 nt, Artificial Sequence
  Description of Artificial Sequence: Synthetic oligonucleotide
ugugucaccauugggcuua

SEQ ID NO: 2515416 - RNA, 19 nt, Artificial Sequence
  Description of Artificial Sequence: Synthetic oligonucleotide
gggcuuacccaauaccagg

SEQ ID NO: 2515417 - RNA, 19 nt, Artificial Sequence
  Description of Artificial Sequence: Synthetic oligonucleotide
caacgaaauauauuuaaau

SEQ ID NO: 2515418 - RNA, 19 nt, Artificial Sequence
  Description of Artificial Sequence: Synthetic oligonucleotide
uuuugagacuguacugguu

SEQ ID NO: 2515419 - RNA, 19 nt, Artificial Sequence
  Description of Artificial Sequence: Synthetic oligonucleotide
uuaccagugacugcucagu

SEQ ID NO: 2515420 - RNA, 19 nt, Artificial Sequence
  Description of Artificial Sequence: Synthetic oligonucleotide
cucugucauuuucagugag

SEQ ID NO: 2515421 - RNA, 19 nt, Artificial Sequence
  Description of Artificial Sequence: Synthetic oligonucleotide
agugacugcucagugagaa

SEQ ID NO: 2515422 - RNA, 19 nt, Artificial Sequence
  Description of Artificial Sequence: Synthetic oligonucleotide
aagauauguuccagggaga

SEQ ID NO: 2515423 - RNA, 19 nt, Artificial Sequence
  Description of Artificial Sequence: Synthetic oligonucleotide
auuguacauaaugucuaga

SEQ ID NO: 2515424 - RNA, 19 nt, Artificial Sequence
  Description of Artificial Sequence: Synthetic oligonucleotide
aagcgaggccaagauaugu

SEQ ID NO: 2515425 - RNA, 19 nt, Artificial Sequence
  Description of Artificial Sequence: Synthetic oligonucleotide
cuaaauccuuaaucaucug

SEQ ID NO: 2515426 - RNA, 19 nt, Artificial Sequence
  Description of Artificial Sequence: Synthetic oligonucleotide
cugcucagugagaagcgag

SEQ ID NO: 2515427 - RNA, 19 nt, Artificial Sequence
  Description of Artificial Sequence: Synthetic oligonucleotide
gaauguccucucagcaagg

SEQ ID NO: 2515428 - RNA, 19 nt, Artificial Sequence
  Description of Artificial Sequence: Synthetic oligonucleotide
ucaguuguuucugguaauc

SEQ ID NO: 2515429 - RNA, 19 nt, Artificial Sequence
  Description of Artificial Sequence: Synthetic oligonucleotide
ugugcagacagugguucug

SEQ ID NO: 2515430 - RNA, 19 nt, Artificial Sequence
  Description of Artificial Sequence: Synthetic oligonucleotide
acaacgaaauauauuuaaa

SEQ ID NO: 2515431 - RNA, 19 nt, Artificial Sequence
  Description of Artificial Sequence: Synthetic oligonucleotide
gugggcuccaguguguucc

SEQ ID NO: 2515432 - RNA, 19 nt, Artificial Sequence
  Description of Artificial Sequence: Synthetic oligonucleotide
agcugguccauguugucau

SEQ ID NO: 2515433 - RNA, 19 nt, Artificial Sequence
  Description of Artificial Sequence: Synthetic oligonucleotide
ugucucugucauuuucagu

SEQ ID NO: 2515434 - RNA, 19 nt, Artificial Sequence
  Description of Artificial Sequence: Synthetic oligonucleotide
auguuccagggagacaguc

SEQ ID NO: 2515435 - RNA, 19 nt, Artificial Sequence
  Description of Artificial Sequence: Synthetic oligonucleotide
aguuuggauuuaauguuga

SEQ ID NO: 2515436 - RNA, 19 nt, Artificial Sequence
  Description of Artificial Sequence: Synthetic oligonucleotide
ccagugacugcucagugag

SEQ ID NO: 2515437 - RNA, 19 nt, Artificial Sequence
  Description of Artificial Sequence: Synthetic oligonucleotide
ggggucuugauguugacaa

SEQ ID NO: 2515438 - RNA, 19 nt, Artificial Sequence
  Description of Artificial Sequence: Synthetic oligonucleotide
ugacuggcugucucuguca

SEQ ID NO: 2515439 - RNA, 19 nt, Artificial Sequence
  Description of Artificial Sequence: Synthetic oligonucleotide
auuuucagugagugcuggu

SEQ ID NO: 2515440 - RNA, 19 nt, Artificial Sequence
  Description of Artificial Sequence: Synthetic oligonucleotide
gacaguccaauccccuuca

SEQ ID NO: 2515441 - RNA, 19 nt, Artificial Sequence
  Description of Artificial Sequence: Synthetic oligonucleotide
uucaguuguuucugguaau

SEQ ID NO: 2515442 - RNA, 19 nt, Artificial Sequence
  Description of Artificial Sequence: Synthetic oligonucleotide
gcauugaaacaaaauuaag

SEQ ID NO: 2515443 - RNA, 19 nt, Artificial Sequence
  Description of Artificial Sequence: Synthetic oligonucleotide
cauugggcuuacccaauac

SEQ ID NO: 2515444 - RNA, 19 nt, Artificial Sequence
  Description of Artificial Sequence: Synthetic oligonucleotide
caaguuuggauuuaauguu

SEQ ID NO: 2515445 - RNA, 19 nt, Artificial Sequence
  Description of Artificial Sequence: Synthetic oligonucleotide
gguguggugggcuccagug

SEQ ID NO: 2515446 - RNA, 19 nt, Artificial Sequence
  Description of Artificial Sequence: Synthetic oligonucleotide
guugugcagacagugguuc

SEQ ID NO: 2515447 - RNA, 19 nt, Artificial Sequence
  Description of Artificial Sequence: Synthetic oligonucleotide
ggccaagauauguuccagg

SEQ ID NO: 2515448 - RNA, 19 nt, Artificial Sequence
  Description of Artificial Sequence: Synthetic oligonucleotide
uacccaauaccaggggucu

SEQ ID NO: 2515449 - RNA, 19 nt, Artificial Sequence
  Description of Artificial Sequence: Synthetic oligonucleotide
ggggccaacauugaaagca

SEQ ID NO: 2515450 - RNA, 19 nt, Artificial Sequence
  Description of Artificial Sequence: Synthetic oligonucleotide
uauggaccccacaggucca

SEQ ID NO: 2515451 - RNA, 19 nt, Artificial Sequence
  Description of Artificial Sequence: Synthetic oligonucleotide
cucauguccaaaguuuuga

SEQ ID NO: 2515452 - RNA, 19 nt, Artificial Sequence
  Description of Artificial Sequence: Synthetic oligonucleotide
uaccagcauugaaacaaaa

SEQ ID NO: 2515453 - RNA, 19 nt, Artificial Sequence
  Description of Artificial Sequence: Synthetic oligonucleotide
ggaaggacauacaaaguga

SEQ ID NO: 2515454 - RNA, 19 nt, Artificial Sequence
  Description of Artificial Sequence: Synthetic oligonucleotide
acaaaagcuuugaacucca

SEQ ID NO: 2515455 - RNA, 19 nt, Artificial Sequence
  Description of Artificial Sequence: Synthetic oligonucleotide
guuuaccagugacugcuca

SEQ ID NO: 2515456 - RNA, 19 nt, Artificial Sequence
  Description of Artificial Sequence: Synthetic oligonucleotide
cugguccauguugucaucc

SEQ ID NO: 2515457 - RNA, 19 nt, Artificial Sequence
  Description of Artificial Sequence: Synthetic oligonucleotide
ugguucugggaucuugcuu

SEQ ID NO: 2515458 - RNA, 19 nt, Artificial Sequence
  Description of Artificial Sequence: Synthetic oligonucleotide
ggcuaaauccuuaaucauc

SEQ ID NO: 2515459 - RNA, 19 nt, Artificial Sequence
  Description of Artificial Sequence: Synthetic oligonucleotide
auggugacuggcugucucu

SEQ ID NO: 2515460 - RNA, 19 nt, Artificial Sequence
  Description of Artificial Sequence: Synthetic oligonucleotide
auuuaauguugaguggcuu

SEQ ID NO: 2515461 - RNA, 19 nt, Artificial Sequence
  Description of Artificial Sequence: Synthetic oligonucleotide
ggcuuacccaauaccaggg

SEQ ID NO: 2515462 - RNA, 19 nt, Artificial Sequence
  Description of Artificial Sequence: Synthetic oligonucleotide
aaacuucuagcuacagguu

SEQ ID NO: 2515463 - RNA, 19 nt, Artificial Sequence
  Description of Artificial Sequence: Synthetic oligonucleotide
agcuuacaaaagcuuugaa

SEQ ID NO: 2515464 - RNA, 19 nt, Artificial Sequence
  Description of Artificial Sequence: Synthetic oligonucleotide
uugugcagacagugguucu

SEQ ID NO: 2515465 - RNA, 19 nt, Artificial Sequence
  Description of Artificial Sequence: Synthetic oligonucleotide
gaauacaacgaaauauauu

SEQ ID NO: 2515466 - RNA, 19 nt, Artificial Sequence
  Description of Artificial Sequence: Synthetic oligonucleotide
ggcauuuucaaguuuggau

SEQ ID NO: 2515467 - RNA, 19 nt, Artificial Sequence
  Description of Artificial Sequence: Synthetic oligonucleotide
accagcauugaaacaaaau

SEQ ID NO: 2515468 - RNA, 19 nt, Artificial Sequence
  Description of Artificial Sequence: Synthetic oligonucleotide
uucuagcuacagguuauuc

SEQ ID NO: 2515469 - RNA, 19 nt, Artificial Sequence
  Description of Artificial Sequence: Synthetic oligonucleotide
ggucuugauguugacaaca

SEQ ID NO: 2515470 - RNA, 19 nt, Artificial Sequence
  Description of Artificial Sequence: Synthetic oligonucleotide
gauuuaauguugaguggcu

SEQ ID NO: 2515471 - RNA, 19 nt, Artificial Sequence
  Description of Artificial Sequence: Synthetic oligonucleotide
cugaauguccucucagcaa

SEQ ID NO: 2515472 - RNA, 19 nt, Artificial Sequence
  Description of Artificial Sequence: Synthetic oligonucleotide
gcuaaauccuuaaucaucu

SEQ ID NO: 2515473 - RNA, 19 nt, Artificial Sequence
  Description of Artificial Sequence: Synthetic oligonucleotide
gcuuacccaauaccagggg

SEQ ID NO: 2515474 - RNA, 19 nt, Artificial Sequence
  Description of Artificial Sequence: Synthetic oligonucleotide
gcauuuucaaguuuggauu

SEQ ID NO: 2515475 - RNA, 19 nt, Artificial Sequence
  Description of Artificial Sequence: Synthetic oligonucleotide
uuugguguggugggcucca

SEQ ID NO: 2515476 - RNA, 19 nt, Artificial Sequence
  Description of Artificial Sequence: Synthetic oligonucleotide
ugcuuugguguggugggcu

SEQ ID NO: 2515477 - RNA, 19 nt, Artificial Sequence
  Description of Artificial Sequence: Synthetic oligonucleotide
ucagugagugcugguggga

SEQ ID NO: 2515478 - RNA, 19 nt, Artificial Sequence
  Description of Artificial Sequence: Synthetic oligonucleotide
uaauguugaguggcuuuuc

SEQ ID NO: 2515479 - RNA, 19 nt, Artificial Sequence
  Description of Artificial Sequence: Synthetic oligonucleotide
agcuuggcauuuucaaguu

SEQ ID NO: 2515480 - RNA, 19 nt, Artificial Sequence
  Description of Artificial Sequence: Synthetic oligonucleotide
guuuugagacuguacuggu

SEQ ID NO: 2515481 - RNA, 19 nt, Artificial Sequence
  Description of Artificial Sequence: Synthetic oligonucleotide
gggaucuugcuuuggugug

SEQ ID NO: 2515482 - RNA, 19 nt, Artificial Sequence
  Description of Artificial Sequence: Synthetic oligonucleotide
caacauugaaagcauuggu

SEQ ID NO: 2515483 - RNA, 19 nt, Artificial Sequence
  Description of Artificial Sequence: Synthetic oligonucleotide
gaagcgaggccaagauaug

SEQ ID NO: 2515484 - RNA, 19 nt, Artificial Sequence
  Description of Artificial Sequence: Synthetic oligonucleotide
auacaacgaaauauauuua

SEQ ID NO: 2515485 - RNA, 19 nt, Artificial Sequence
  Description of Artificial Sequence: Synthetic oligonucleotide
guauagcagcuuaaucuuc

SEQ ID NO: 2515486 - RNA, 19 nt, Artificial Sequence
  Description of Artificial Sequence: Synthetic oligonucleotide
gaucucuguauggacccca

SEQ ID NO: 2515487 - RNA, 19 nt, Artificial Sequence
  Description of Artificial Sequence: Synthetic oligonucleotide
cuuugguguggugggcucc

SEQ ID NO: 2515488 - RNA, 19 nt, Artificial Sequence
  Description of Artificial Sequence: Synthetic oligonucleotide
ucucagcaaggaucucugu

SEQ ID NO: 2515489 - RNA, 19 nt, Artificial Sequence
  Description of Artificial Sequence: Synthetic oligonucleotide
guugagcuuggcauuuuca

SEQ ID NO: 2515490 - RNA, 19 nt, Artificial Sequence
  Description of Artificial Sequence: Synthetic oligonucleotide
gggauaugaagccuguaua

SEQ ID NO: 2515491 - RNA, 19 nt, Artificial Sequence
  Description of Artificial Sequence: Synthetic oligonucleotide
uccagggagacaguccaau

SEQ ID NO: 2515492 - RNA, 19 nt, Artificial Sequence
  Description of Artificial Sequence: Synthetic oligonucleotide
gguaaucaauugugucacc

SEQ ID NO: 2515493 - RNA, 19 nt, Artificial Sequence
  Description of Artificial Sequence: Synthetic oligonucleotide
uggugacuggcugucucug

SEQ ID NO: 2515494 - RNA, 19 nt, Artificial Sequence
  Description of Artificial Sequence: Synthetic oligonucleotide
aagcauugguuuguacauu

SEQ ID NO: 2515495 - RNA, 19 nt, Artificial Sequence
  Description of Artificial Sequence: Synthetic oligonucleotide
gacagcuuacaaaagcuuu

SEQ ID NO: 2515496 - RNA, 19 nt, Artificial Sequence
  Description of Artificial Sequence: Synthetic oligonucleotide
cucagcaaggaucucugua

SEQ ID NO: 2515497 - RNA, 19 nt, Artificial Sequence
  Description of Artificial Sequence: Synthetic oligonucleotide
cauuucuccauuguacaua

SEQ ID NO: 2515498 - RNA, 19 nt, Artificial Sequence
  Description of Artificial Sequence: Synthetic oligonucleotide
ccuguauagcagcuuaauc

SEQ ID NO: 2515499 - RNA, 19 nt, Artificial Sequence
  Description of Artificial Sequence: Synthetic oligonucleotide
ugagcugguccauguuguc

SEQ ID NO: 2515500 - RNA, 19 nt, Artificial Sequence
  Description of Artificial Sequence: Synthetic oligonucleotide
cuguauggaccccacaggu

SEQ ID NO: 2515501 - RNA, 19 nt, Artificial Sequence
  Description of Artificial Sequence: Synthetic oligonucleotide
cuuacccaauaccaggggu

SEQ ID NO: 2515502 - RNA, 19 nt, Artificial Sequence
  Description of Artificial Sequence: Synthetic oligonucleotide
ggaccccacagguccaagg

SEQ ID NO: 2515503 - RNA, 19 nt, Artificial Sequence
  Description of Artificial Sequence: Synthetic oligonucleotide
cagacagugguucugggau

SEQ ID NO: 2515504 - RNA, 19 nt, Artificial Sequence
  Description of Artificial Sequence: Synthetic oligonucleotide
gccugaauguccucucagc

SEQ ID NO: 2515505 - RNA, 19 nt, Artificial Sequence
  Description of Artificial Sequence: Synthetic oligonucleotide
acugcucagugagaagcga

SEQ ID NO: 2515506 - RNA, 19 nt, Artificial Sequence
  Description of Artificial Sequence: Synthetic oligonucleotide
ugguuucaauuaccagcau

SEQ ID NO: 2515507 - RNA, 19 nt, Artificial Sequence
  Description of Artificial Sequence: Synthetic oligonucleotide
accaggggucuugauguug

SEQ ID NO: 2515508 - RNA, 19 nt, Artificial Sequence
  Description of Artificial Sequence: Synthetic oligonucleotide
cagcuuacaaaagcuuuga

SEQ ID NO: 2515509 - RNA, 19 nt, Artificial Sequence
  Description of Artificial Sequence: Synthetic oligonucleotide
agugagugcuggugggaua

SEQ ID NO: 2515510 - RNA, 19 nt, Artificial Sequence
  Description of Artificial Sequence: Synthetic oligonucleotide
aggggucuugauguugaca

SEQ ID NO: 2515511 - RNA, 19 nt, Artificial Sequence
  Description of Artificial Sequence: Synthetic oligonucleotide
uugugucaccauugggcuu

SEQ ID NO: 2515512 - RNA, 19 nt, Artificial Sequence
  Description of Artificial Sequence: Synthetic oligonucleotide
ccugaauguccucucagca

SEQ ID NO: 2515513 - RNA, 19 nt, Artificial Sequence
  Description of Artificial Sequence: Synthetic oligonucleotide
ugggcuccaguguguuccc

SEQ ID NO: 2515514 - RNA, 19 nt, Artificial Sequence
  Description of Artificial Sequence: Synthetic oligonucleotide
gugagaagcgaggccaaga

SEQ ID NO: 2515515 - RNA, 19 nt, Artificial Sequence
  Description of Artificial Sequence: Synthetic oligonucleotide
uugcuuugguguggugggc

SEQ ID NO: 2515516 - RNA, 19 nt, Artificial Sequence
  Description of Artificial Sequence: Synthetic oligonucleotide
ggcuccaguguguucccag

SEQ ID NO: 2515517 - RNA, 19 nt, Artificial Sequence
  Description of Artificial Sequence: Synthetic oligonucleotide
gcaaggaucucuguaugga

SEQ ID NO: 2515518 - RNA, 19 nt, Artificial Sequence
  Description of Artificial Sequence: Synthetic oligonucleotide
ccagcauugaaacaaaauu

SEQ ID NO: 2515519 - RNA, 19 nt, Artificial Sequence
  Description of Artificial Sequence: Synthetic oligonucleotide
caacagaggauucuucaau

SEQ ID NO: 2515520 - RNA, 19 nt, Artificial Sequence
  Description of Artificial Sequence: Synthetic oligonucleotide
uuucuccauuguacauaau

SEQ ID NO: 2515521 - RNA, 19 nt, Artificial Sequence
  Description of Artificial Sequence: Synthetic oligonucleotide
gcucagugagaagcgaggc

SEQ ID NO: 2515522 - RNA, 19 nt, Artificial Sequence
  Description of Artificial Sequence: Synthetic oligonucleotide
gguugagcuuggcauuuuc

SEQ ID NO: 2515523 - RNA, 19 nt, Artificial Sequence
  Description of Artificial Sequence: Synthetic oligonucleotide
uguucccagcaaacuucua

SEQ ID NO: 2515524 - RNA, 19 nt, Artificial Sequence
  Description of Artificial Sequence: Synthetic oligonucleotide
aguugugcagacagugguu

SEQ ID NO: 2515525 - RNA, 19 nt, Artificial Sequence
  Description of Artificial Sequence: Synthetic oligonucleotide
aucuugcuuugguguggug

SEQ ID NO: 2515526 - RNA, 19 nt, Artificial Sequence
  Description of Artificial Sequence: Synthetic oligonucleotide
gguuucaauuaccagcauu

SEQ ID NO: 2515527 - RNA, 19 nt, Artificial Sequence
  Description of Artificial Sequence: Synthetic oligonucleotide
gcagacagugguucuggga

SEQ ID NO: 2515528 - RNA, 19 nt, Artificial Sequence
  Description of Artificial Sequence: Synthetic oligonucleotide
guccaauccccuucaauuu

SEQ ID NO: 2515529 - RNA, 19 nt, Artificial Sequence
  Description of Artificial Sequence: Synthetic oligonucleotide
guguguucccagcaaacuu

SEQ ID NO: 2515530 - RNA, 19 nt, Artificial Sequence
  Description of Artificial Sequence: Synthetic oligonucleotide
gcucauguccaaaguuuug

SEQ ID NO: 2515531 - RNA, 19 nt, Artificial Sequence
  Description of Artificial Sequence: Synthetic oligonucleotide
gggagacaguccaaucccc

SEQ ID NO: 2515532 - RNA, 19 nt, Artificial Sequence
  Description of Artificial Sequence: Synthetic oligonucleotide
agcgaggccaagauauguu

SEQ ID NO: 2515533 - RNA, 19 nt, Artificial Sequence
  Description of Artificial Sequence: Synthetic oligonucleotide
ugagugcuggugggauaug

SEQ ID NO: 2515534 - RNA, 19 nt, Artificial Sequence
  Description of Artificial Sequence: Synthetic oligonucleotide
guccucucagcaaggaucu

SEQ ID NO: 2515535 - RNA, 19 nt, Artificial Sequence
  Description of Artificial Sequence: Synthetic oligonucleotide
guggcucauguccaaaguu

SEQ ID NO: 2515536 - RNA, 19 nt, Artificial Sequence
  Description of Artificial Sequence: Synthetic oligonucleotide
ccauguugucauccaggag

SEQ ID NO: 2515537 - RNA, 19 nt, Artificial Sequence
  Description of Artificial Sequence: Synthetic oligonucleotide
gagacaguccaauccccuu

SEQ ID NO: 2515538 - RNA, 19 nt, Artificial Sequence
  Description of Artificial Sequence: Synthetic oligonucleotide
caggggucuugauguugac

SEQ ID NO: 2515539 - RNA, 19 nt, Artificial Sequence
  Description of Artificial Sequence: Synthetic oligonucleotide
uggaccccacagguccaag

SEQ ID NO: 2515540 - RNA, 19 nt, Artificial Sequence
  Description of Artificial Sequence: Synthetic oligonucleotide
ccaagauauguuccaggga

SEQ ID NO: 2515541 - RNA, 19 nt, Artificial Sequence
  Description of Artificial Sequence: Synthetic oligonucleotide
uugguguggugggcuccag

SEQ ID NO: 2515542 - RNA, 19 nt, Artificial Sequence
  Description of Artificial Sequence: Synthetic oligonucleotide
accauugggcuuacccaau

SEQ ID NO: 2515543 - RNA, 19 nt, Artificial Sequence
  Description of Artificial Sequence: Synthetic oligonucleotide
gugagugcuggugggauau

SEQ ID NO: 2515544 - RNA, 19 nt, Artificial Sequence
  Description of Artificial Sequence: Synthetic oligonucleotide
ggaucucuguauggacccc

SEQ ID NO: 2515545 - RNA, 19 nt, Artificial Sequence
  Description of Artificial Sequence: Synthetic oligonucleotide
cagcuucaguucaugcugu

SEQ ID NO: 2515546 - RNA, 19 nt, Artificial Sequence
  Description of Artificial Sequence: Synthetic oligonucleotide
agccuguauagcagcuuaa

SEQ ID NO: 2515547 - RNA, 19 nt, Artificial Sequence
  Description of Artificial Sequence: Synthetic oligonucleotide
cagugacugcucagugaga

SEQ ID NO: 2515548 - RNA, 19 nt, Artificial Sequence
  Description of Artificial Sequence: Synthetic oligonucleotide
gaagccuguauagcagcuu

SEQ ID NO: 2515549 - RNA, 19 nt, Artificial Sequence
  Description of Artificial Sequence: Synthetic oligonucleotide
ugguugagcuuggcauuuu

SEQ ID NO: 2515550 - RNA, 19 nt, Artificial Sequence
  Description of Artificial Sequence: Synthetic oligonucleotide
aucaucuguuucaguuguu

SEQ ID NO: 2515551 - RNA, 19 nt, Artificial Sequence
  Description of Artificial Sequence: Synthetic oligonucleotide
caauccccuucaauuuuau

SEQ ID NO: 2515552 - RNA, 19 nt, Artificial Sequence
  Description of Artificial Sequence: Synthetic oligonucleotide
ccaauccccuucaauuuua

SEQ ID NO: 2515553 - RNA, 19 nt, Artificial Sequence
  Description of Artificial Sequence: Synthetic oligonucleotide
ccaguguguucccagcaaa

SEQ ID NO: 2515554 - RNA, 19 nt, Artificial Sequence
  Description of Artificial Sequence: Synthetic oligonucleotide
caguccaauccccuucaau

SEQ ID NO: 2515555 - RNA, 19 nt, Artificial Sequence
  Description of Artificial Sequence: Synthetic oligonucleotide
auggaccccacagguccaa

SEQ ID NO: 2515556 - RNA, 19 nt, Artificial Sequence
  Description of Artificial Sequence: Synthetic oligonucleotide
gcagcuuaaucuucucauu

SEQ ID NO: 2515557 - RNA, 19 nt, Artificial Sequence
  Description of Artificial Sequence: Synthetic oligonucleotide
caaaagcuuugaacuccau

SEQ ID NO: 2515558 - RNA, 19 nt, Artificial Sequence
  Description of Artificial Sequence: Synthetic oligonucleotide
ggagacaguccaauccccu

SEQ ID NO: 2515559 - RNA, 19 nt, Artificial Sequence
  Description of Artificial Sequence: Synthetic oligonucleotide
ccaaaguuuugagacugua

SEQ ID NO: 2515560 - RNA, 19 nt, Artificial Sequence
  Description of Artificial Sequence: Synthetic oligonucleotide
cccagcaaacuucuagcua

SEQ ID NO: 2515561 - RNA, 19 nt, Artificial Sequence
  Description of Artificial Sequence: Synthetic oligonucleotide
gugggauaugaagccugua

SEQ ID NO: 2515562 - RNA, 19 nt, Artificial Sequence
  Description of Artificial Sequence: Synthetic oligonucleotide
ggugggauaugaagccugu

SEQ ID NO: 2515563 - RNA, 19 nt, Artificial Sequence
  Description of Artificial Sequence: Synthetic oligonucleotide
ccuucaauuuuauccuuuu

SEQ ID NO: 2515564 - RNA, 19 nt, Artificial Sequence
  Description of Artificial Sequence: Synthetic oligonucleotide
ccaggagccugaauguccu

SEQ ID NO: 2515565 - RNA, 19 nt, Artificial Sequence
  Description of Artificial Sequence: Synthetic oligonucleotide
ggcucauguccaaaguuuu

SEQ ID NO: 2515566 - RNA, 19 nt, Artificial Sequence
  Description of Artificial Sequence: Synthetic oligonucleotide
cugguggcucauguccaaa

SEQ ID NO: 2515567 - RNA, 19 nt, Artificial Sequence
  Description of Artificial Sequence: Synthetic oligonucleotide
acccaauaccaggggucuu

SEQ ID NO: 2515568 - RNA, 19 nt, Artificial Sequence
  Description of Artificial Sequence: Synthetic oligonucleotide
caauaccaggggucuugau

SEQ ID NO: 2515569 - RNA, 19 nt, Artificial Sequence
  Description of Artificial Sequence: Synthetic oligonucleotide
gucauccaggagccugaau

SEQ ID NO: 2515570 - RNA, 19 nt, Artificial Sequence
  Description of Artificial Sequence: Synthetic oligonucleotide
cagugagugcuggugggau

SEQ ID NO: 2515571 - RNA, 19 nt, Artificial Sequence
  Description of Artificial Sequence: Synthetic oligonucleotide
ccaauaccaggggucuuga

SEQ ID NO: 2515572 - RNA, 19 nt, Artificial Sequence
  Description of Artificial Sequence: Synthetic oligonucleotide
cuucuagcuacagguuauu

SEQ ID NO: 2515573 - RNA, 19 nt, Artificial Sequence
  Description of Artificial Sequence: Synthetic oligonucleotide
gcauugguuuguacauugu

SEQ ID NO: 2515574 - RNA, 19 nt, Artificial Sequence
  Description of Artificial Sequence: Synthetic oligonucleotide
gcuuggcauuuucaaguuu

SEQ ID NO: 2515575 - RNA, 19 nt, Artificial Sequence
  Description of Artificial Sequence: Synthetic oligonucleotide
gccuguauagcagcuuaau

SEQ ID NO: 2515576 - RNA, 19 nt, Artificial Sequence
  Description of Artificial Sequence: Synthetic oligonucleotide
caauggugacuggcugucu

SEQ ID NO: 2515577 - RNA, 19 nt, Artificial Sequence
  Description of Artificial Sequence: Synthetic oligonucleotide
ggccaacauugaaagcauu

SEQ ID NO: 2515578 - RNA, 19 nt, Artificial Sequence
  Description of Artificial Sequence: Synthetic oligonucleotide
gggcuccaguguguuccca

SEQ ID NO: 2515579 - RNA, 19 nt, Artificial Sequence
  Description of Artificial Sequence: Synthetic oligonucleotide
ccaugagcugguccauguu

SEQ ID NO: 2515580 - RNA, 19 nt, Artificial Sequence
  Description of Artificial Sequence: Synthetic oligonucleotide
aauuauuaacgacacacuc

SEQ ID NO: 2515581 - RNA, 19 nt, Artificial Sequence
  Description of Artificial Sequence: Synthetic oligonucleotide
agaauuauuaacgacacac

SEQ ID NO: 2515582 - RNA, 19 nt, Artificial Sequence
  Description of Artificial Sequence: Synthetic oligonucleotide
  modified_base (3)..(3): a, c, u, g, unknown or other
agnuaaaagaggcauuucc

SEQ ID NO: 2515583 - RNA, 19 nt, Artificial Sequence
  Description of Artificial Sequence: Synthetic oligonucleotide
gacauuauagcuuauuugc

SEQ ID NO: 2515584 - RNA, 19 nt, Artificial Sequence
  Description of Artificial Sequence: Synthetic oligonucleotide
agaaugaagauuuacuagg

SEQ ID NO: 2515585 - RNA, 19 nt, Artificial Sequence
  Description of Artificial Sequence: Synthetic oligonucleotide
uuauuaacgacacacuccc

SEQ ID NO: 2515586 - RNA, 19 nt, Artificial Sequence
  Description of Artificial Sequence: Synthetic oligonucleotide
uauguuuucaagauucucc

SEQ ID NO: 2515587 - RNA, 19 nt, Artificial Sequence
  Description of Artificial Sequence: Synthetic oligonucleotide
uccagaauuauuaacgaca

SEQ ID NO: 2515588 - RNA, 19 nt, Artificial Sequence
  Description of Artificial Sequence: Synthetic oligonucleotide
uggucuaccgacauuauag

SEQ ID NO: 2515589 - RNA, 19 nt, Artificial Sequence
  Description of Artificial Sequence: Synthetic oligonucleotide
uuuacuguaaccuuuuaaa

SEQ ID NO: 2515590 - RNA, 19 nt, Artificial Sequence
  Description of Artificial Sequence: Synthetic oligonucleotide
uucaaaggugacuuaaccg

SEQ ID NO: 2515591 - RNA, 19 nt, Artificial Sequence
  Description of Artificial Sequence: Synthetic oligonucleotide
auuuccagaauuauuaacg

SEQ ID NO: 2515592 - RNA, 19 nt, Artificial Sequence
  Description of Artificial Sequence: Synthetic oligonucleotide
uucagaaagcaccagagac

SEQ ID NO: 2515593 - RNA, 19 nt, Artificial Sequence
  Description of Artificial Sequence: Synthetic oligonucleotide
uuaccuaaagaacugcaag

SEQ ID NO: 2515594 - RNA, 19 nt, Artificial Sequence
  Description of Artificial Sequence: Synthetic oligonucleotide
caagaaaugacccgggugg

SEQ ID NO: 2515595 - RNA, 19 nt, Artificial Sequence
  Description of Artificial Sequence: Synthetic oligonucleotide
ugaacuugcauccaucucu

SEQ ID NO: 2515596 - RNA, 19 nt, Artificial Sequence
  Description of Artificial Sequence: Synthetic oligonucleotide
auuauuaacgacacacucc

SEQ ID NO: 2515597 - RNA, 19 nt, Artificial Sequence
  Description of Artificial Sequence: Synthetic oligonucleotide
ugcucuacgguuaucgugg

SEQ ID NO: 2515598 - RNA, 19 nt, Artificial Sequence
  Description of Artificial Sequence: Synthetic oligonucleotide
ugaagauuuacuaggacuc

SEQ ID NO: 2515599 - RNA, 19 nt, Artificial Sequence
  Description of Artificial Sequence: Synthetic oligonucleotide
ugacuuaaccguaacgggg

SEQ ID NO: 2515600 - RNA, 19 nt, Artificial Sequence
  Description of Artificial Sequence: Synthetic oligonucleotide
guaaagauucaucaaacug

SEQ ID NO: 2515601 - RNA, 19 nt, Artificial Sequence
  Description of Artificial Sequence: Synthetic oligonucleotide
aaaauuuggcugaaguaac

SEQ ID NO: 2515602 - RNA, 19 nt, Artificial Sequence
  Description of Artificial Sequence: Synthetic oligonucleotide
  modified_base (9)..(9): a, c, u, g, unknown or other
uucccaagnuaaaagaggc

SEQ ID NO: 2515603 - RNA, 19 nt, Artificial Sequence
  Description of Artificial Sequence: Synthetic oligonucleotide
ucaagauuaccuaaagaac

SEQ ID NO: 2515604 - RNA, 19 nt, Artificial Sequence
  Description of Artificial Sequence: Synthetic oligonucleotide
uucuacacgcuucugaggc

SEQ ID NO: 2515605 - RNA, 19 nt, Artificial Sequence
  Description of Artificial Sequence: Synthetic oligonucleotide
aaaagaggcauuuccagaa

SEQ ID NO: 2515606 - RNA, 19 nt, Artificial Sequence
  Description of Artificial Sequence: Synthetic oligonucleotide
uucaagauucuccucacug

SEQ ID NO: 2515607 - RNA, 19 nt, Artificial Sequence
  Description of Artificial Sequence: Synthetic oligonucleotide
gaaagcaccagagacaggc

SEQ ID NO: 2515608 - RNA, 19 nt, Artificial Sequence
  Description of Artificial Sequence: Synthetic oligonucleotide
agucgcgucuucuacacgc

SEQ ID NO: 2515609 - RNA, 19 nt, Artificial Sequence
  Description of Artificial Sequence: Synthetic oligonucleotide
augaagauuuacuaggacu

SEQ ID NO: 2515610 - RNA, 19 nt, Artificial Sequence
  Description of Artificial Sequence: Synthetic oligonucleotide
uucuuugacgcacaggugu

SEQ ID NO: 2515611 - RNA, 19 nt, Artificial Sequence
  Description of Artificial Sequence: Synthetic oligonucleotide
gaaguaacugcucaugaac

SEQ ID NO: 2515612 - RNA, 19 nt, Artificial Sequence
  Description of Artificial Sequence: Synthetic oligonucleotide
auuauagcuuauuugcuca

SEQ ID NO: 2515613 - RNA, 19 nt, Artificial Sequence
  Description of Artificial Sequence: Synthetic oligonucleotide
aucaaaauuuggcugaagu

SEQ ID NO: 2515614 - RNA, 19 nt, Artificial Sequence
  Description of Artificial Sequence: Synthetic oligonucleotide
guaugaguugcacacaacc

SEQ ID NO: 2515615 - RNA, 19 nt, Artificial Sequence
  Description of Artificial Sequence: Synthetic oligonucleotide
agguguuccuccuuuacac

SEQ ID NO: 2515616 - RNA, 19 nt, Artificial Sequence
  Description of Artificial Sequence: Synthetic oligonucleotide
auuaacgacacacucccug

SEQ ID NO: 2515617 - RNA, 19 nt, Artificial Sequence
  Description of Artificial Sequence: Synthetic oligonucleotide
uauuugcucaagauuaccu

SEQ ID NO: 2515618 - RNA, 19 nt, Artificial Sequence
  Description of Artificial Sequence: Synthetic oligonucleotide
uuaacgacacacucccugg

SEQ ID NO: 2515619 - RNA, 19 nt, Artificial Sequence
  Description of Artificial Sequence: Synthetic oligonucleotide
ucuucuacacgcuucugag

SEQ ID NO: 2515620 - RNA, 19 nt, Artificial Sequence
  Description of Artificial Sequence: Synthetic oligonucleotide
uaguguaugaguugcacac

SEQ ID NO: 2515621 - RNA, 19 nt, Artificial Sequence
  Description of Artificial Sequence: Synthetic oligonucleotide
ucaagaaaugacccgggug

SEQ ID NO: 2515622 - RNA, 19 nt, Artificial Sequence
  Description of Artificial Sequence: Synthetic oligonucleotide
  modified_base (16)..(16): a, c, u, g, unknown or other
uuuccgguucccaagnuaa

SEQ ID NO: 2515623 - RNA, 19 nt, Artificial Sequence
  Description of Artificial Sequence: Synthetic oligonucleotide
uacacaacggaguauuggc

SEQ ID NO: 2515624 - RNA, 19 nt, Artificial Sequence
  Description of Artificial Sequence: Synthetic oligonucleotide
aacugcucuacgguuaucg

SEQ ID NO: 2515625 - RNA, 19 nt, Artificial Sequence
  Description of Artificial Sequence: Synthetic oligonucleotide
  modified_base (10)..(10): a, c, u, g, unknown or other
guucccaagnuaaaagagg

SEQ ID NO: 2515626 - RNA, 19 nt, Artificial Sequence
  Description of Artificial Sequence: Synthetic oligonucleotide
uuuggcugaaguaacugcu

SEQ ID NO: 2515627 - RNA, 19 nt, Artificial Sequence
  Description of Artificial Sequence: Synthetic oligonucleotide
ucagaaagcaccagagaca

SEQ ID NO: 2515628 - RNA, 19 nt, Artificial Sequence
  Description of Artificial Sequence: Synthetic oligonucleotide
ucguggagaaguucaaagg

SEQ ID NO: 2515629 - RNA, 19 nt, Artificial Sequence
  Description of Artificial Sequence: Synthetic oligonucleotide
ugguaaagauucaucaaac

SEQ ID NO: 2515630 - RNA, 19 nt, Artificial Sequence
  Description of Artificial Sequence: Synthetic oligonucleotide
uuuuacuguaaccuuuuaa

SEQ ID NO: 2515631 - RNA, 19 nt, Artificial Sequence
  Description of Artificial Sequence: Synthetic oligonucleotide
acagacgacgacgacaagc

SEQ ID NO: 2515632 - RNA, 19 nt, Artificial Sequence
  Description of Artificial Sequence: Synthetic oligonucleotide
aaagauucaucaaacugcu

SEQ ID NO: 2515633 - RNA, 19 nt, Artificial Sequence
  Description of Artificial Sequence: Synthetic oligonucleotide
uuuccagaauuauuaacga

SEQ ID NO: 2515634 - RNA, 19 nt, Artificial Sequence
  Description of Artificial Sequence: Synthetic oligonucleotide
uuaaguuucuuugacgcac

SEQ ID NO: 2515635 - RNA, 19 nt, Artificial Sequence
  Description of Artificial Sequence: Synthetic oligonucleotide
acgacgacaagcgucacgc

SEQ ID NO: 2515636 - RNA, 19 nt, Artificial Sequence
  Description of Artificial Sequence: Synthetic oligonucleotide
aucguggagaaguucaaag

SEQ ID NO: 2515637 - RNA, 19 nt, Artificial Sequence
  Description of Artificial Sequence: Synthetic oligonucleotide
guuuucaagauucuccuca

SEQ ID NO: 2515638 - RNA, 19 nt, Artificial Sequence
  Description of Artificial Sequence: Synthetic oligonucleotide
ugcaauugguaucugaguu

SEQ ID NO: 2515639 - RNA, 19 nt, Artificial Sequence
  Description of Artificial Sequence: Synthetic oligonucleotide
ggugacuuaaccguaacgg

SEQ ID NO: 2515640 - RNA, 19 nt, Artificial Sequence
  Description of Artificial Sequence: Synthetic oligonucleotide
accuuuuaaaaccucuucu

SEQ ID NO: 2515641 - RNA, 19 nt, Artificial Sequence
  Description of Artificial Sequence: Synthetic oligonucleotide
aaggugacuuaaccguaac

SEQ ID NO: 2515642 - RNA, 19 nt, Artificial Sequence
  Description of Artificial Sequence: Synthetic oligonucleotide
uuacacaacggaguauugg

SEQ ID NO: 2515643 - RNA, 19 nt, Artificial Sequence
  Description of Artificial Sequence: Synthetic oligonucleotide
  modified_base (4)..(4): a, c, u, g, unknown or other
aagnuaaaagaggcauuuc

SEQ ID NO: 2515644 - RNA, 19 nt, Artificial Sequence
  Description of Artificial Sequence: Synthetic oligonucleotide
cagacgacgacgacaagcg

SEQ ID NO: 2515645 - RNA, 19 nt, Artificial Sequence
  Description of Artificial Sequence: Synthetic oligonucleotide
  modified_base (2)..(2): a, c, u, g, unknown or other
gnuaaaagaggcauuucca

SEQ ID NO: 2515646 - RNA, 19 nt, Artificial Sequence
  Description of Artificial Sequence: Synthetic oligonucleotide
ucaaaauuuggcugaagua

SEQ ID NO: 2515647 - RNA, 19 nt, Artificial Sequence
  Description of Artificial Sequence: Synthetic oligonucleotide
cauuauagcuuauuugcuc

SEQ ID NO: 2515648 - RNA, 19 nt, Artificial Sequence
  Description of Artificial Sequence: Synthetic oligonucleotide
aaauccguguuggucuacc

SEQ ID NO: 2515649 - RNA, 19 nt, Artificial Sequence
  Description of Artificial Sequence: Synthetic oligonucleotide
ucuacgguuaucguggaga

SEQ ID NO: 2515650 - RNA, 19 nt, Artificial Sequence
  Description of Artificial Sequence: Synthetic oligonucleotide
agauuaccuaaagaacugc

SEQ ID NO: 2515651 - RNA, 19 nt, Artificial Sequence
  Description of Artificial Sequence: Synthetic oligonucleotide
caauugguaucugaguugg

SEQ ID NO: 2515652 - RNA, 19 nt, Artificial Sequence
  Description of Artificial Sequence: Synthetic oligonucleotide
uaccuaaagaacugcaagu

SEQ ID NO: 2515653 - RNA, 19 nt, Artificial Sequence
  Description of Artificial Sequence: Synthetic oligonucleotide
gugacuuaaccguaacggg

SEQ ID NO: 2515654 - RNA, 19 nt, Artificial Sequence
  Description of Artificial Sequence: Synthetic oligonucleotide
uuugcucaagauuaccuaa

SEQ ID NO: 2515655 - RNA, 19 nt, Artificial Sequence
  Description of Artificial Sequence: Synthetic oligonucleotide
ucuaccgacauuauagcuu

SEQ ID NO: 2515656 - RNA, 19 nt, Artificial Sequence
  Description of Artificial Sequence: Synthetic oligonucleotide
auugcaauugguaucugag

SEQ ID NO: 2515657 - RNA, 19 nt, Artificial Sequence
  Description of Artificial Sequence: Synthetic oligonucleotide
uuuuaaaaccucuucucuu

SEQ ID NO: 2515658 - RNA, 19 nt, Artificial Sequence
  Description of Artificial Sequence: Synthetic oligonucleotide
uccuccuuuacacaacgga

SEQ ID NO: 2515659 - RNA, 19 nt, Artificial Sequence
  Description of Artificial Sequence: Synthetic oligonucleotide
ugguucuauguuuucaaga

SEQ ID NO: 2515660 - RNA, 19 nt, Artificial Sequence
  Description of Artificial Sequence: Synthetic oligonucleotide
gacucagaauugcaauugg

SEQ ID NO: 2515661 - RNA, 19 nt, Artificial Sequence
  Description of Artificial Sequence: Synthetic oligonucleotide
aagauuuacuaggacucag

SEQ ID NO: 2515662 - RNA, 19 nt, Artificial Sequence
  Description of Artificial Sequence: Synthetic oligonucleotide
agaauugcaauugguaucu

SEQ ID NO: 2515663 - RNA, 19 nt, Artificial Sequence
  Description of Artificial Sequence: Synthetic oligonucleotide
uuuaaguuucuuugacgca

SEQ ID NO: 2515664 - RNA, 19 nt, Artificial Sequence
  Description of Artificial Sequence: Synthetic oligonucleotide
caggcucaagaaaugaccc

SEQ ID NO: 2515665 - RNA, 19 nt, Artificial Sequence
  Description of Artificial Sequence: Synthetic oligonucleotide
ucaagauucuccucacugu

SEQ ID NO: 2515666 - RNA, 19 nt, Artificial Sequence
  Description of Artificial Sequence: Synthetic oligonucleotide
acaacggaguauuggcugg

SEQ ID NO: 2515667 - RNA, 19 nt, Artificial Sequence
  Description of Artificial Sequence: Synthetic oligonucleotide
aguaacugcucaugaacug

SEQ ID NO: 2515668 - RNA, 19 nt, Artificial Sequence
  Description of Artificial Sequence: Synthetic oligonucleotide
aauccguguuggucuaccg

SEQ ID NO: 2515669 - RNA, 19 nt, Artificial Sequence
  Description of Artificial Sequence: Synthetic oligonucleotide
gacgacaagcgucacgcag

SEQ ID NO: 2515670 - RNA, 19 nt, Artificial Sequence
  Description of Artificial Sequence: Synthetic oligonucleotide
caagauuaccuaaagaacu

SEQ ID NO: 2515671 - RNA, 19 nt, Artificial Sequence
  Description of Artificial Sequence: Synthetic oligonucleotide
aaguaacugcucaugaacu

SEQ ID NO: 2515672 - RNA, 19 nt, Artificial Sequence
  Description of Artificial Sequence: Synthetic oligonucleotide
gucgugugaacuugcaucc

SEQ ID NO: 2515673 - RNA, 19 nt, Artificial Sequence
  Description of Artificial Sequence: Synthetic oligonucleotide
ucugaggcgucacagacuu

SEQ ID NO: 2515674 - RNA, 19 nt, Artificial Sequence
  Description of Artificial Sequence: Synthetic oligonucleotide
ucuauguuuucaagauucu

SEQ ID NO: 2515675 - RNA, 19 nt, Artificial Sequence
  Description of Artificial Sequence: Synthetic oligonucleotide
acgguuaucguggagaagu

SEQ ID NO: 2515676 - RNA, 19 nt, Artificial Sequence
  Description of Artificial Sequence: Synthetic oligonucleotide
cagaauugcaauugguauc

SEQ ID NO: 2515677 - RNA, 19 nt, Artificial Sequence
  Description of Artificial Sequence: Synthetic oligonucleotide
uucugugagaaauccgugu

SEQ ID NO: 2515678 - RNA, 19 nt, Artificial Sequence
  Description of Artificial Sequence: Synthetic oligonucleotide
cuuauuugcucaagauuac

SEQ ID NO: 2515679 - RNA, 19 nt, Artificial Sequence
  Description of Artificial Sequence: Synthetic oligonucleotide
uugguucuauguuuucaag

SEQ ID NO: 2515680 - RNA, 19 nt, Artificial Sequence
  Description of Artificial Sequence: Synthetic oligonucleotide
ucagagaaugaagauuuac

SEQ ID NO: 2515681 - RNA, 19 nt, Artificial Sequence
  Description of Artificial Sequence: Synthetic oligonucleotide
uuuucaagauucuccucac

SEQ ID NO: 2515682 - RNA, 19 nt, Artificial Sequence
  Description of Artificial Sequence: Synthetic oligonucleotide
uguuggucuaccgacauua

SEQ ID NO: 2515683 - RNA, 19 nt, Artificial Sequence
  Description of Artificial Sequence: Synthetic oligonucleotide
aagaaaugacccggguggg

SEQ ID NO: 2515684 - RNA, 19 nt, Artificial Sequence
  Description of Artificial Sequence: Synthetic oligonucleotide
acaagcgucacgcaggauu

SEQ ID NO: 2515685 - RNA, 19 nt, Artificial Sequence
  Description of Artificial Sequence: Synthetic oligonucleotide
acagguguuccuccuuuac

SEQ ID NO: 2515686 - RNA, 19 nt, Artificial Sequence
  Description of Artificial Sequence: Synthetic oligonucleotide
aggugacuuaaccguaacg

SEQ ID NO: 2515687 - RNA, 19 nt, Artificial Sequence
  Description of Artificial Sequence: Synthetic oligonucleotide
aaguuucuuugacgcacag

SEQ ID NO: 2515688 - RNA, 19 nt, Artificial Sequence
  Description of Artificial Sequence: Synthetic oligonucleotide
acaacccuccugcagaacu

SEQ ID NO: 2515689 - RNA, 19 nt, Artificial Sequence
  Description of Artificial Sequence: Synthetic oligonucleotide
ugagaaauccguguugguc

SEQ ID NO: 2515690 - RNA, 19 nt, Artificial Sequence
  Description of Artificial Sequence: Synthetic oligonucleotide
guuaucguggagaaguuca

SEQ ID NO: 2515691 - RNA, 19 nt, Artificial Sequence
  Description of Artificial Sequence: Synthetic oligonucleotide
uccguguuggucuaccgac

SEQ ID NO: 2515692 - RNA, 19 nt, Artificial Sequence
  Description of Artificial Sequence: Synthetic oligonucleotide
aaguucaaaggugacuuaa

SEQ ID NO: 2515693 - RNA, 19 nt, Artificial Sequence
  Description of Artificial Sequence: Synthetic oligonucleotide
gaaaugacccgggugggcc

SEQ ID NO: 2515694 - RNA, 19 nt, Artificial Sequence
  Description of Artificial Sequence: Synthetic oligonucleotide
guucccacagacgacgacg

SEQ ID NO: 2515695 - RNA, 19 nt, Artificial Sequence
  Description of Artificial Sequence: Synthetic oligonucleotide
cacaacggaguauuggcug

SEQ ID NO: 2515696 - RNA, 19 nt, Artificial Sequence
  Description of Artificial Sequence: Synthetic oligonucleotide
uguaguguaugaguugcac

SEQ ID NO: 2515697 - RNA, 19 nt, Artificial Sequence
  Description of Artificial Sequence: Synthetic oligonucleotide
ucaugaacuggugacugca

SEQ ID NO: 2515698 - RNA, 19 nt, Artificial Sequence
  Description of Artificial Sequence: Synthetic oligonucleotide
uccuuuacacaacggagua

SEQ ID NO: 2515699 - RNA, 19 nt, Artificial Sequence
  Description of Artificial Sequence: Synthetic oligonucleotide
auuuacuaggacucagaau

SEQ ID NO: 2515700 - RNA, 19 nt, Artificial Sequence
  Description of Artificial Sequence: Synthetic oligonucleotide
uuucuuugacgcacaggug

SEQ ID NO: 2515701 - RNA, 19 nt, Artificial Sequence
  Description of Artificial Sequence: Synthetic oligonucleotide
agcuuauuugcucaagauu

SEQ ID NO: 2515702 - RNA, 19 nt, Artificial Sequence
  Description of Artificial Sequence: Synthetic oligonucleotide
aacgacacacucccuggcu

SEQ ID NO: 2515703 - RNA, 19 nt, Artificial Sequence
  Description of Artificial Sequence: Synthetic oligonucleotide
ucuacacgcuucugaggcg

SEQ ID NO: 2515704 - RNA, 19 nt, Artificial Sequence
  Description of Artificial Sequence: Synthetic oligonucleotide
gagucucagagaaugaaga

SEQ ID NO: 2515705 - RNA, 19 nt, Artificial Sequence
  Description of Artificial Sequence: Synthetic oligonucleotide
uaggacucagaauugcaau

SEQ ID NO: 2515706 - RNA, 19 nt, Artificial Sequence
  Description of Artificial Sequence: Synthetic oligonucleotide
acugcucaugaacugguga

SEQ ID NO: 2515707 - RNA, 19 nt, Artificial Sequence
  Description of Artificial Sequence: Synthetic oligonucleotide
aggcucaagaaaugacccg

SEQ ID NO: 2515708 - RNA, 19 nt, Artificial Sequence
  Description of Artificial Sequence: Synthetic oligonucleotide
auuugcucaagauuaccua

SEQ ID NO: 2515709 - RNA, 19 nt, Artificial Sequence
  Description of Artificial Sequence: Synthetic oligonucleotide
aaauuuggcugaaguaacu

SEQ ID NO: 2515710 - RNA, 19 nt, Artificial Sequence
  Description of Artificial Sequence: Synthetic oligonucleotide
aguucaaaggugacuuaac

SEQ ID NO: 2515711 - RNA, 19 nt, Artificial Sequence
  Description of Artificial Sequence: Synthetic oligonucleotide
aagaggcauuuccagaauu

SEQ ID NO: 2515712 - RNA, 19 nt, Artificial Sequence
  Description of Artificial Sequence: Synthetic oligonucleotide
uaaccuuuuaaaaccucuu

SEQ ID NO: 2515713 - RNA, 19 nt, Artificial Sequence
  Description of Artificial Sequence: Synthetic oligonucleotide
caagauucuccucacuguc

SEQ ID NO: 2515714 - RNA, 19 nt, Artificial Sequence
  Description of Artificial Sequence: Synthetic oligonucleotide
ucacagacuuuccgguucc

SEQ ID NO: 2515715 - RNA, 19 nt, Artificial Sequence
  Description of Artificial Sequence: Synthetic oligonucleotide
gauuaccuaaagaacugca

SEQ ID NO: 2515716 - RNA, 19 nt, Artificial Sequence
  Description of Artificial Sequence: Synthetic oligonucleotide
uuuacagggcucagcuucu

SEQ ID NO: 2515717 - RNA, 19 nt, Artificial Sequence
  Description of Artificial Sequence: Synthetic oligonucleotide
cuucuacacgcuucugagg

SEQ ID NO: 2515718 - RNA, 19 nt, Artificial Sequence
  Description of Artificial Sequence: Synthetic oligonucleotide
aagagucucagagaaugaa

SEQ ID NO: 2515719 - RNA, 19 nt, Artificial Sequence
  Description of Artificial Sequence: Synthetic oligonucleotide
aaagaggcauuuccagaau

SEQ ID NO: 2515720 - RNA, 19 nt, Artificial Sequence
  Description of Artificial Sequence: Synthetic oligonucleotide
cugcucaugaacuggugac

SEQ ID NO: 2515721 - RNA, 19 nt, Artificial Sequence
  Description of Artificial Sequence: Synthetic oligonucleotide
uuugacgcacagguguucc

SEQ ID NO: 2515722 - RNA, 19 nt, Artificial Sequence
  Description of Artificial Sequence: Synthetic oligonucleotide
aagaacugcaagugucaau

SEQ ID NO: 2515723 - RNA, 19 nt, Artificial Sequence
  Description of Artificial Sequence: Synthetic oligonucleotide
ggugcaaagauuaggaguc

SEQ ID NO: 2515724 - RNA, 19 nt, Artificial Sequence
  Description of Artificial Sequence: Synthetic oligonucleotide
ugaggcgucacagacuuuc

SEQ ID NO: 2515725 - RNA, 19 nt, Artificial Sequence
  Description of Artificial Sequence: Synthetic oligonucleotide
accugcuuucuucugugag

SEQ ID NO: 2515726 - RNA, 19 nt, Artificial Sequence
  Description of Artificial Sequence: Synthetic oligonucleotide
agagucucagagaaugaag

SEQ ID NO: 2515727 - RNA, 19 nt, Artificial Sequence
  Description of Artificial Sequence: Synthetic oligonucleotide
uguaugaguugcacacaac

SEQ ID NO: 2515728 - RNA, 19 nt, Artificial Sequence
  Description of Artificial Sequence: Synthetic oligonucleotide
agaaaugacccgggugggc

SEQ ID NO: 2515729 - RNA, 19 nt, Artificial Sequence
  Description of Artificial Sequence: Synthetic oligonucleotide
  modified_base (8)..(8): a, c, u, g, unknown or other
ucccaagnuaaaagaggca

SEQ ID NO: 2515730 - RNA, 19 nt, Artificial Sequence
  Description of Artificial Sequence: Synthetic oligonucleotide
uugcucaagauuaccuaaa

SEQ ID NO: 2515731 - RNA, 19 nt, Artificial Sequence
  Description of Artificial Sequence: Synthetic oligonucleotide
uacuaggacucagaauugc

SEQ ID NO: 2515732 - RNA, 19 nt, Artificial Sequence
  Description of Artificial Sequence: Synthetic oligonucleotide
ccagaauuauuaacgacac

SEQ ID NO: 2515733 - RNA, 19 nt, Artificial Sequence
  Description of Artificial Sequence: Synthetic oligonucleotide
uaacgacacacucccuggc

SEQ ID NO: 2515734 - RNA, 19 nt, Artificial Sequence
  Description of Artificial Sequence: Synthetic oligonucleotide
cacugucaucaaaauuugg

SEQ ID NO: 2515735 - RNA, 19 nt, Artificial Sequence
  Description of Artificial Sequence: Synthetic oligonucleotide
gacgacgacaagcgucacg

SEQ ID NO: 2515736 - RNA, 19 nt, Artificial Sequence
  Description of Artificial Sequence: Synthetic oligonucleotide
uuccuccuuuacacaacgg

SEQ ID NO: 2515737 - RNA, 19 nt, Artificial Sequence
  Description of Artificial Sequence: Synthetic oligonucleotide
uguuccuccuuuacacaac

SEQ ID NO: 2515738 - RNA, 19 nt, Artificial Sequence
  Description of Artificial Sequence: Synthetic oligonucleotide
cugcaagugucaaugccug

SEQ ID NO: 2515739 - RNA, 19 nt, Artificial Sequence
  Description of Artificial Sequence: Synthetic oligonucleotide
uuauagcuuauuugcucaa

SEQ ID NO: 2515740 - RNA, 19 nt, Artificial Sequence
  Description of Artificial Sequence: Synthetic oligonucleotide
guaguguaugaguugcaca

SEQ ID NO: 2515741 - RNA, 19 nt, Artificial Sequence
  Description of Artificial Sequence: Synthetic oligonucleotide
  modified_base (11)..(11): a, c, u, g, unknown or other
gguucccaagnuaaaagag

SEQ ID NO: 2515742 - RNA, 19 nt, Artificial Sequence
  Description of Artificial Sequence: Synthetic oligonucleotide
aguuucuuugacgcacagg

SEQ ID NO: 2515743 - RNA, 19 nt, Artificial Sequence
  Description of Artificial Sequence: Synthetic oligonucleotide
cucagaauugcaauuggua

SEQ ID NO: 2515744 - RNA, 19 nt, Artificial Sequence
  Description of Artificial Sequence: Synthetic oligonucleotide
ggcucaagaaaugacccgg

SEQ ID NO: 2515745 - RNA, 19 nt, Artificial Sequence
  Description of Artificial Sequence: Synthetic oligonucleotide
uaggagucgcgucuucuac

SEQ ID NO: 2515746 - RNA, 19 nt, Artificial Sequence
  Description of Artificial Sequence: Synthetic oligonucleotide
gcuuauuugcucaagauua

SEQ ID NO: 2515747 - RNA, 19 nt, Artificial Sequence
  Description of Artificial Sequence: Synthetic oligonucleotide
guugguucuauguuuucaa

SEQ ID NO: 2515748 - RNA, 19 nt, Artificial Sequence
  Description of Artificial Sequence: Synthetic oligonucleotide
ggcgucacagacuuuccgg

SEQ ID NO: 2515749 - RNA, 19 nt, Artificial Sequence
  Description of Artificial Sequence: Synthetic oligonucleotide
uguuuucaagauucuccuc

SEQ ID NO: 2515750 - RNA, 19 nt, Artificial Sequence
  Description of Artificial Sequence: Synthetic oligonucleotide
cagguucccacagacgacg

SEQ ID NO: 2515751 - RNA, 19 nt, Artificial Sequence
  Description of Artificial Sequence: Synthetic oligonucleotide
aaaugacccgggugggccu

SEQ ID NO: 2515752 - RNA, 19 nt, Artificial Sequence
  Description of Artificial Sequence: Synthetic oligonucleotide
acgacaagcgucacgcagg

SEQ ID NO: 2515753 - RNA, 19 nt, Artificial Sequence
  Description of Artificial Sequence: Synthetic oligonucleotide
acauuauagcuuauuugcu

SEQ ID NO: 2515754 - RNA, 19 nt, Artificial Sequence
  Description of Artificial Sequence: Synthetic oligonucleotide
  modified_base (14)..(14): a, c, u, g, unknown or other
uccgguucccaagnuaaaa

SEQ ID NO: 2515755 - RNA, 19 nt, Artificial Sequence
  Description of Artificial Sequence: Synthetic oligonucleotide
cugcucuacgguuaucgug

SEQ ID NO: 2515756 - RNA, 19 nt, Artificial Sequence
  Description of Artificial Sequence: Synthetic oligonucleotide
ugaggagauggucucuuuu

SEQ ID NO: 2515757 - RNA, 19 nt, Artificial Sequence
  Description of Artificial Sequence: Synthetic oligonucleotide
ggaguauuggcugguaaag

SEQ ID NO: 2515758 - RNA, 19 nt, Artificial Sequence
  Description of Artificial Sequence: Synthetic oligonucleotide
aggcgucacagacuuuccg

SEQ ID NO: 2515759 - RNA, 19 nt, Artificial Sequence
  Description of Artificial Sequence: Synthetic oligonucleotide
cuauguuuucaagauucuc

SEQ ID NO: 2515760 - RNA, 19 nt, Artificial Sequence
  Description of Artificial Sequence: Synthetic oligonucleotide
auugguaucugaguugguu

SEQ ID NO: 2515761 - RNA, 19 nt, Artificial Sequence
  Description of Artificial Sequence: Synthetic oligonucleotide
gacgacgacgacaagcguc

SEQ ID NO: 2515762 - RNA, 19 nt, Artificial Sequence
  Description of Artificial Sequence: Synthetic oligonucleotide
gaagauuuacuaggacuca

SEQ ID NO: 2515763 - RNA, 19 nt, Artificial Sequence
  Description of Artificial Sequence: Synthetic oligonucleotide
caucucucccgcccgaggc

SEQ ID NO: 2515764 - RNA, 19 nt, Artificial Sequence
  Description of Artificial Sequence: Synthetic oligonucleotide
gacgcacagguguuccucc

SEQ ID NO: 2515765 - RNA, 19 nt, Artificial Sequence
  Description of Artificial Sequence: Synthetic oligonucleotide
aggacucagaauugcaauu

SEQ ID NO: 2515766 - RNA, 19 nt, Artificial Sequence
  Description of Artificial Sequence: Synthetic oligonucleotide
aaugccuggaagagucuca

SEQ ID NO: 2515767 - RNA, 19 nt, Artificial Sequence
  Description of Artificial Sequence: Synthetic oligonucleotide
acccgggugggccuccugc

SEQ ID NO: 2515768 - RNA, 19 nt, Artificial Sequence
  Description of Artificial Sequence: Synthetic oligonucleotide
gucuucuacacgcuucuga

SEQ ID NO: 2515769 - RNA, 19 nt, Artificial Sequence
  Description of Artificial Sequence: Synthetic oligonucleotide
ccuccuuuacacaacggag

SEQ ID NO: 2515770 - RNA, 19 nt, Artificial Sequence
  Description of Artificial Sequence: Synthetic oligonucleotide
uucugaggcgucacagacu

SEQ ID NO: 2515771 - RNA, 19 nt, Artificial Sequence
  Description of Artificial Sequence: Synthetic oligonucleotide
aaaggugacuuaaccguaa

SEQ ID NO: 2515772 - RNA, 19 nt, Artificial Sequence
  Description of Artificial Sequence: Synthetic oligonucleotide
uggcugguaaagauucauc

SEQ ID NO: 2515773 - RNA, 19 nt, Artificial Sequence
  Description of Artificial Sequence: Synthetic oligonucleotide
ucuuugacgcacagguguu

SEQ ID NO: 2515774 - RNA, 19 nt, Artificial Sequence
  Description of Artificial Sequence: Synthetic oligonucleotide
uauuaacgacacacucccu

SEQ ID NO: 2515775 - RNA, 19 nt, Artificial Sequence
  Description of Artificial Sequence: Synthetic oligonucleotide
uuggucuaccgacauuaua

SEQ ID NO: 2515776 - RNA, 19 nt, Artificial Sequence
  Description of Artificial Sequence: Synthetic oligonucleotide
  modified_base (19)..(19): a, c, u, g, unknown or other
gacuuuccgguucccaagn

SEQ ID NO: 2515777 - RNA, 19 nt, Artificial Sequence
  Description of Artificial Sequence: Synthetic oligonucleotide
cacacaacccuccugcaga

SEQ ID NO: 2515778 - RNA, 19 nt, Artificial Sequence
  Description of Artificial Sequence: Synthetic oligonucleotide
cuaggacucagaauugcaa

SEQ ID NO: 2515779 - RNA, 19 nt, Artificial Sequence
  Description of Artificial Sequence: Synthetic oligonucleotide
cuaccgacauuauagcuua

SEQ ID NO: 2515780 - RNA, 19 nt, Artificial Sequence
  Description of Artificial Sequence: Synthetic oligonucleotide
uuaggagucgcgucuucua

SEQ ID NO: 2515781 - RNA, 19 nt, Artificial Sequence
  Description of Artificial Sequence: Synthetic oligonucleotide
guucugaggagauggucuc

SEQ ID NO: 2515782 - RNA, 19 nt, Artificial Sequence
  Description of Artificial Sequence: Synthetic oligonucleotide
ggucuaccgacauuauagc

SEQ ID NO: 2515783 - RNA, 19 nt, Artificial Sequence
  Description of Artificial Sequence: Synthetic oligonucleotide
gcaaagauuaggagucgcg

SEQ ID NO: 2515784 - RNA, 19 nt, Artificial Sequence
  Description of Artificial Sequence: Synthetic oligonucleotide
agauuuacuaggacucaga

SEQ ID NO: 2515785 - RNA, 19 nt, Artificial Sequence
  Description of Artificial Sequence: Synthetic oligonucleotide
agcuucuguaguguaugag

SEQ ID NO: 2515786 - RNA, 19 nt, Artificial Sequence
  Description of Artificial Sequence: Synthetic oligonucleotide
gaacuugcauccaucucuc

SEQ ID NO: 2515787 - RNA, 19 nt, Artificial Sequence
  Description of Artificial Sequence: Synthetic oligonucleotide
ugcucaugaacuggugacu

SEQ ID NO: 2515788 - RNA, 19 nt, Artificial Sequence
  Description of Artificial Sequence: Synthetic oligonucleotide
uccugcaggccgccgcacg

SEQ ID NO: 2515789 - RNA, 19 nt, Artificial Sequence
  Description of Artificial Sequence: Synthetic oligonucleotide
ggacucagaauugcaauug

SEQ ID NO: 2515790 - RNA, 19 nt, Artificial Sequence
  Description of Artificial Sequence: Synthetic oligonucleotide
auccguguuggucuaccga

SEQ ID NO: 2515791 - RNA, 19 nt, Artificial Sequence
  Description of Artificial Sequence: Synthetic oligonucleotide
ucaucaaaauuuggcugaa

SEQ ID NO: 2515792 - RNA, 19 nt, Artificial Sequence
  Description of Artificial Sequence: Synthetic oligonucleotide
acugcucuacgguuaucgu

SEQ ID NO: 2515793 - RNA, 19 nt, Artificial Sequence
  Description of Artificial Sequence: Synthetic oligonucleotide
gaguauuggcugguaaaga

SEQ ID NO: 2515794 - RNA, 19 nt, Artificial Sequence
  Description of Artificial Sequence: Synthetic oligonucleotide
aggagucgcgucuucuaca

SEQ ID NO: 2515795 - RNA, 19 nt, Artificial Sequence
  Description of Artificial Sequence: Synthetic oligonucleotide
gguucuauguuuucaagau

SEQ ID NO: 2515796 - RNA, 19 nt, Artificial Sequence
  Description of Artificial Sequence: Synthetic oligonucleotide
ugucaaugccuggaagagu

SEQ ID NO: 2515797 - RNA, 19 nt, Artificial Sequence
  Description of Artificial Sequence: Synthetic oligonucleotide
guaaccuuuuaaaaccucu

SEQ ID NO: 2515798 - RNA, 19 nt, Artificial Sequence
  Description of Artificial Sequence: Synthetic oligonucleotide
acuaggacucagaauugca

SEQ ID NO: 2515799 - RNA, 19 nt, Artificial Sequence
  Description of Artificial Sequence: Synthetic oligonucleotide
ucacuucagaaagcaccag

SEQ ID NO: 2515800 - RNA, 19 nt, Artificial Sequence
  Description of Artificial Sequence: Synthetic oligonucleotide
agcgucacgcaggauucac

SEQ ID NO: 2515801 - RNA, 19 nt, Artificial Sequence
  Description of Artificial Sequence: Synthetic oligonucleotide
gggacuggcagcauuuaag

SEQ ID NO: 2515802 - RNA, 19 nt, Artificial Sequence
  Description of Artificial Sequence: Synthetic oligonucleotide
guguuccuccuuuacacaa

SEQ ID NO: 2515803 - RNA, 19 nt, Artificial Sequence
  Description of Artificial Sequence: Synthetic oligonucleotide
ggauucacuucagaaagca

SEQ ID NO: 2515804 - RNA, 19 nt, Artificial Sequence
  Description of Artificial Sequence: Synthetic oligonucleotide
acucagaauugcaauuggu

SEQ ID NO: 2515805 - RNA, 19 nt, Artificial Sequence
  Description of Artificial Sequence: Synthetic oligonucleotide
cgacauuauagcuuauuug

SEQ ID NO: 2515806 - RNA, 19 nt, Artificial Sequence
  Description of Artificial Sequence: Synthetic oligonucleotide
cucuuuacagggcucagcu

SEQ ID NO: 2515807 - RNA, 19 nt, Artificial Sequence
  Description of Artificial Sequence: Synthetic oligonucleotide
aguguaugaguugcacaca

SEQ ID NO: 2515808 - RNA, 19 nt, Artificial Sequence
  Description of Artificial Sequence: Synthetic oligonucleotide
acgacgacgacaagcguca

SEQ ID NO: 2515809 - RNA, 19 nt, Artificial Sequence
  Description of Artificial Sequence: Synthetic oligonucleotide
gaagagucucagagaauga

SEQ ID NO: 2515810 - RNA, 19 nt, Artificial Sequence
  Description of Artificial Sequence: Synthetic oligonucleotide
gguaaagauucaucaaacu

SEQ ID NO: 2515811 - RNA, 19 nt, Artificial Sequence
  Description of Artificial Sequence: Synthetic oligonucleotide
uaucguggagaaguucaaa

SEQ ID NO: 2515812 - RNA, 19 nt, Artificial Sequence
  Description of Artificial Sequence: Synthetic oligonucleotide
gugcaaagauuaggagucg

SEQ ID NO: 2515813 - RNA, 19 nt, Artificial Sequence
  Description of Artificial Sequence: Synthetic oligonucleotide
aacccuccugcagaacuca

SEQ ID NO: 2515814 - RNA, 19 nt, Artificial Sequence
  Description of Artificial Sequence: Synthetic oligonucleotide
ugcacacaacccuccugca

SEQ ID NO: 2515815 - RNA, 19 nt, Artificial Sequence
  Description of Artificial Sequence: Synthetic oligonucleotide
augccuggaagagucucag

SEQ ID NO: 2515816 - RNA, 19 nt, Artificial Sequence
  Description of Artificial Sequence: Synthetic oligonucleotide
aaacugcucuacgguuauc

SEQ ID NO: 2515817 - RNA, 19 nt, Artificial Sequence
  Description of Artificial Sequence: Synthetic oligonucleotide
gagucgcgucuucuacacg

SEQ ID NO: 2515818 - RNA, 19 nt, Artificial Sequence
  Description of Artificial Sequence: Synthetic oligonucleotide
  modified_base (13)..(13): a, c, u, g, unknown or other
ccgguucccaagnuaaaag

SEQ ID NO: 2515819 - RNA, 19 nt, Artificial Sequence
  Description of Artificial Sequence: Synthetic oligonucleotide
cuccuuuacacaacggagu

SEQ ID NO: 2515820 - RNA, 19 nt, Artificial Sequence
  Description of Artificial Sequence: Synthetic oligonucleotide
ucuuuacagggcucagcuu

SEQ ID NO: 2515821 - RNA, 19 nt, Artificial Sequence
  Description of Artificial Sequence: Synthetic oligonucleotide
uacgguuaucguggagaag

SEQ ID NO: 2515822 - RNA, 19 nt, Artificial Sequence
  Description of Artificial Sequence: Synthetic oligonucleotide
ggagucgcgucuucuacac

SEQ ID NO: 2515823 - RNA, 19 nt, Artificial Sequence
  Description of Artificial Sequence: Synthetic oligonucleotide
acacaacggaguauuggcu

SEQ ID NO: 2515824 - RNA, 19 nt, Artificial Sequence
  Description of Artificial Sequence: Synthetic oligonucleotide
caaaggugacuuaaccgua

SEQ ID NO: 2515825 - RNA, 19 nt, Artificial Sequence
  Description of Artificial Sequence: Synthetic oligonucleotide
cuugucgugugaacuugca

SEQ ID NO: 2515826 - RNA, 19 nt, Artificial Sequence
  Description of Artificial Sequence: Synthetic oligonucleotide
acggaguauuggcugguaa

SEQ ID NO: 2515827 - RNA, 19 nt, Artificial Sequence
  Description of Artificial Sequence: Synthetic oligonucleotide
cacgccuggacacaccaca

SEQ ID NO: 2515828 - RNA, 19 nt, Artificial Sequence
  Description of Artificial Sequence: Synthetic oligonucleotide
gcucaagauuaccuaaaga

SEQ ID NO: 2515829 - RNA, 19 nt, Artificial Sequence
  Description of Artificial Sequence: Synthetic oligonucleotide
  modified_base (5)..(5): a, c, u, g, unknown or other
caagnuaaaagaggcauuu

SEQ ID NO: 2515830 - RNA, 19 nt, Artificial Sequence
  Description of Artificial Sequence: Synthetic oligonucleotide
cuacgguuaucguggagaa

SEQ ID NO: 2515831 - RNA, 19 nt, Artificial Sequence
  Description of Artificial Sequence: Synthetic oligonucleotide
caacccuccugcagaacuc

SEQ ID NO: 2515832 - RNA, 19 nt, Artificial Sequence
  Description of Artificial Sequence: Synthetic oligonucleotide
cacgcaggauucacuucag

SEQ ID NO: 2515833 - RNA, 19 nt, Artificial Sequence
  Description of Artificial Sequence: Synthetic oligonucleotide
ggcuucagagggcugcuug

SEQ ID NO: 2515834 - RNA, 19 nt, Artificial Sequence
  Description of Artificial Sequence: Synthetic oligonucleotide
uugacgcacagguguuccu

SEQ ID NO: 2515835 - RNA, 19 nt, Artificial Sequence
  Description of Artificial Sequence: Synthetic oligonucleotide
ugacgcacagguguuccuc

SEQ ID NO: 2515836 - RNA, 19 nt, Artificial Sequence
  Description of Artificial Sequence: Synthetic oligonucleotide
cuuuacacaacggaguauu

SEQ ID NO: 2515837 - RNA, 19 nt, Artificial Sequence
  Description of Artificial Sequence: Synthetic oligonucleotide
cuguaaccuuuuaaaaccu

SEQ ID NO: 2515838 - RNA, 19 nt, Artificial Sequence
  Description of Artificial Sequence: Synthetic oligonucleotide
acgacacacucccuggcuu

SEQ ID NO: 2515839 - RNA, 19 nt, Artificial Sequence
  Description of Artificial Sequence: Synthetic oligonucleotide
  modified_base (15)..(15): a, c, u, g, unknown or other
uuccgguucccaagnuaaa

SEQ ID NO: 2515840 - RNA, 19 nt, Artificial Sequence
  Description of Artificial Sequence: Synthetic oligonucleotide
aauugguaucugaguuggu

SEQ ID NO: 2515841 - RNA, 19 nt, Artificial Sequence
  Description of Artificial Sequence: Synthetic oligonucleotide
gcugguaaagauucaucaa

SEQ ID NO: 2515842 - RNA, 19 nt, Artificial Sequence
  Description of Artificial Sequence: Synthetic oligonucleotide
gaauugcaauugguaucug

SEQ ID NO: 2515843 - RNA, 19 nt, Artificial Sequence
  Description of Artificial Sequence: Synthetic oligonucleotide
cagaauuauuaacgacaca

SEQ ID NO: 2515844 - RNA, 19 nt, Artificial Sequence
  Description of Artificial Sequence: Synthetic oligonucleotide
gucuaccgacauuauagcu

SEQ ID NO: 2515845 - RNA, 19 nt, Artificial Sequence
  Description of Artificial Sequence: Synthetic oligonucleotide
caaagauuaggagucgcgu

SEQ ID NO: 2515846 - RNA, 19 nt, Artificial Sequence
  Description of Artificial Sequence: Synthetic oligonucleotide
acagacuuuccgguuccca

SEQ ID NO: 2515847 - RNA, 19 nt, Artificial Sequence
  Description of Artificial Sequence: Synthetic oligonucleotide
gcucaagaaaugacccggg

SEQ ID NO: 2515848 - RNA, 19 nt, Artificial Sequence
  Description of Artificial Sequence: Synthetic oligonucleotide
  modified_base (18)..(18): a, c, u, g, unknown or other
acuuuccgguucccaagnu

SEQ ID NO: 2515849 - RNA, 19 nt, Artificial Sequence
  Description of Artificial Sequence: Synthetic oligonucleotide
caagugucaaugccuggaa

SEQ ID NO: 2515850 - RNA, 19 nt, Artificial Sequence
  Description of Artificial Sequence: Synthetic oligonucleotide
cucuacgguuaucguggag

SEQ ID NO: 2515851 - RNA, 19 nt, Artificial Sequence
  Description of Artificial Sequence: Synthetic oligonucleotide
gcacacaacccuccugcag

SEQ ID NO: 2515852 - RNA, 19 nt, Artificial Sequence
  Description of Artificial Sequence: Synthetic oligonucleotide
gaggcgucacagacuuucc

SEQ ID NO: 2515853 - RNA, 19 nt, Artificial Sequence
  Description of Artificial Sequence: Synthetic oligonucleotide
gucacgcaggauucacuuc

SEQ ID NO: 2515854 - RNA, 19 nt, Artificial Sequence
  Description of Artificial Sequence: Synthetic oligonucleotide
agacgacgacgacaagcgu

SEQ ID NO: 2515855 - RNA, 19 nt, Artificial Sequence
  Description of Artificial Sequence: Synthetic oligonucleotide
cuuugacgcacagguguuc

SEQ ID NO: 2515856 - RNA, 19 nt, Artificial Sequence
  Description of Artificial Sequence: Synthetic oligonucleotide
gguguuccuccuuuacaca

SEQ ID NO: 2515857 - RNA, 19 nt, Artificial Sequence
  Description of Artificial Sequence: Synthetic oligonucleotide
ucgugugaacuugcaucca

SEQ ID NO: 2515858 - RNA, 19 nt, Artificial Sequence
  Description of Artificial Sequence: Synthetic oligonucleotide
gcaagugucaaugccugga

SEQ ID NO: 2515859 - RNA, 19 nt, Artificial Sequence
  Description of Artificial Sequence: Synthetic oligonucleotide
accgacauuauagcuuauu

SEQ ID NO: 2515860 - RNA, 19 nt, Artificial Sequence
  Description of Artificial Sequence: Synthetic oligonucleotide
  modified_base (17)..(17): a, c, u, g, unknown or other
cuuuccgguucccaagnua

SEQ ID NO: 2515861 - RNA, 19 nt, Artificial Sequence
  Description of Artificial Sequence: Synthetic oligonucleotide
auuggcugguaaagauuca

SEQ ID NO: 2515862 - RNA, 19 nt, Artificial Sequence
  Description of Artificial Sequence: Synthetic oligonucleotide
acgcaggauucacuucaga

SEQ ID NO: 2515863 - RNA, 19 nt, Artificial Sequence
  Description of Artificial Sequence: Synthetic oligonucleotide
ugcaggccgccgcacgccu

SEQ ID NO: 2515864 - RNA, 19 nt, Artificial Sequence
  Description of Artificial Sequence: Synthetic oligonucleotide
gaaauccguguuggucuac

SEQ ID NO: 2515865 - RNA, 19 nt, Artificial Sequence
  Description of Artificial Sequence: Synthetic oligonucleotide
ggagaaguucaaaggugac

SEQ ID NO: 2515866 - RNA, 19 nt, Artificial Sequence
  Description of Artificial Sequence: Synthetic oligonucleotide
agagggcugcuugucgugu

SEQ ID NO: 2515867 - RNA, 19 nt, Artificial Sequence
  Description of Artificial Sequence: Synthetic oligonucleotide
acgcacagguguuccuccu

SEQ ID NO: 2515868 - RNA, 19 nt, Artificial Sequence
  Description of Artificial Sequence: Synthetic oligonucleotide
aggcauuuccagaauuauu

SEQ ID NO: 2515869 - RNA, 19 nt, Artificial Sequence
  Description of Artificial Sequence: Synthetic oligonucleotide
gaggcauuuccagaauuau

SEQ ID NO: 2515870 - RNA, 19 nt, Artificial Sequence
  Description of Artificial Sequence: Synthetic oligonucleotide
gcuuucuucugugagaaau

SEQ ID NO: 2515871 - RNA, 19 nt, Artificial Sequence
  Description of Artificial Sequence: Synthetic oligonucleotide
ucccacagacgacgacgac

SEQ ID NO: 2515872 - RNA, 19 nt, Artificial Sequence
  Description of Artificial Sequence: Synthetic oligonucleotide
gggcucagcuucuguagug

SEQ ID NO: 2515873 - RNA, 19 nt, Artificial Sequence
  Description of Artificial Sequence: Synthetic oligonucleotide
uacacgcuucugaggcguc

SEQ ID NO: 2515874 - RNA, 19 nt, Artificial Sequence
  Description of Artificial Sequence: Synthetic oligonucleotide
aacggaguauuggcuggua

SEQ ID NO: 2515875 - RNA, 19 nt, Artificial Sequence
  Description of Artificial Sequence: Synthetic oligonucleotide
aagcgucacgcaggauuca

SEQ ID NO: 2515876 - RNA, 19 nt, Artificial Sequence
  Description of Artificial Sequence: Synthetic oligonucleotide
gacacacucccuggcuuca

SEQ ID NO: 2515877 - RNA, 19 nt, Artificial Sequence
  Description of Artificial Sequence: Synthetic oligonucleotide
auccaucucucccgcccga

SEQ ID NO: 2515878 - RNA, 19 nt, Artificial Sequence
  Description of Artificial Sequence: Synthetic oligonucleotide
ucgcgucuucuacacgcuu

SEQ ID NO: 2515879 - RNA, 19 nt, Artificial Sequence
  Description of Artificial Sequence: Synthetic oligonucleotide
cagcuucuguaguguauga

SEQ ID NO: 2515880 - RNA, 19 nt, Artificial Sequence
  Description of Artificial Sequence: Synthetic oligonucleotide
cucaagaaaugacccgggu

SEQ ID NO: 2515881 - RNA, 19 nt, Artificial Sequence
  Description of Artificial Sequence: Synthetic oligonucleotide
cacgcuucugaggcgucac

SEQ ID NO: 2515882 - RNA, 19 nt, Artificial Sequence
  Description of Artificial Sequence: Synthetic oligonucleotide
  modified_base (7)..(7): a, c, u, g, unknown or other
cccaagnuaaaagaggcau

SEQ ID NO: 2515883 - RNA, 19 nt, Artificial Sequence
  Description of Artificial Sequence: Synthetic oligonucleotide
cccgcagguucccacagac

SEQ ID NO: 2515884 - RNA, 19 nt, Artificial Sequence
  Description of Artificial Sequence: Synthetic oligonucleotide
uaccgacauuauagcuuau

SEQ ID NO: 2515885 - RNA, 19 nt, Artificial Sequence
  Description of Artificial Sequence: Synthetic oligonucleotide
guauuggcugguaaagauu

SEQ ID NO: 2515886 - RNA, 19 nt, Artificial Sequence
  Description of Artificial Sequence: Synthetic oligonucleotide
acacgcuucugaggcguca

SEQ ID NO: 2515887 - RNA, 19 nt, Artificial Sequence
  Description of Artificial Sequence: Synthetic oligonucleotide
gcuugucgugugaacuugc

SEQ ID NO: 2515888 - RNA, 19 nt, Artificial Sequence
  Description of Artificial Sequence: Synthetic oligonucleotide
gugagaaauccguguuggu

SEQ ID NO: 2515889 - RNA, 19 nt, Artificial Sequence
  Description of Artificial Sequence: Synthetic oligonucleotide
ccugcagaacucaucaccu

SEQ ID NO: 2515890 - RNA, 19 nt, Artificial Sequence
  Description of Artificial Sequence: Synthetic oligonucleotide
ccuaaagaacugcaagugu

SEQ ID NO: 2515891 - RNA, 19 nt, Artificial Sequence
  Description of Artificial Sequence: Synthetic oligonucleotide
caaacugcucuacgguuau

SEQ ID NO: 2515892 - RNA, 19 nt, Artificial Sequence
  Description of Artificial Sequence: Synthetic oligonucleotide
  modified_base (12)..(12): a, c, u, g, unknown or other
cgguucccaagnuaaaaga

SEQ ID NO: 2515893 - RNA, 19 nt, Artificial Sequence
  Description of Artificial Sequence: Synthetic oligonucleotide
cacagacgacgacgacaag

SEQ ID NO: 2515894 - RNA, 19 nt, Artificial Sequence
  Description of Artificial Sequence: Synthetic oligonucleotide
cgcaggauucacuucagaa

SEQ ID NO: 2515895 - RNA, 19 nt, Artificial Sequence
  Description of Artificial Sequence: Synthetic oligonucleotide
cacacucccuggcuucaga

SEQ ID NO: 2515896 - RNA, 19 nt, Artificial Sequence
  Description of Artificial Sequence: Synthetic oligonucleotide
cuacacgcuucugaggcgu

SEQ ID NO: 2515897 - RNA, 19 nt, Artificial Sequence
  Description of Artificial Sequence: Synthetic oligonucleotide
caccugcuuucuucuguga

SEQ ID NO: 2515898 - RNA, 19 nt, Artificial Sequence
  Description of Artificial Sequence: Synthetic oligonucleotide
ccgcagguucccacagacg

SEQ ID NO: 2515899 - RNA, 19 nt, Artificial Sequence
  Description of Artificial Sequence: Synthetic oligonucleotide
cccacagacgacgacgaca

SEQ ID NO: 2515900 - RNA, 19 nt, Artificial Sequence
  Description of Artificial Sequence: Synthetic oligonucleotide
caccagagacaggcucaag

SEQ ID NO: 2515901 - RNA, 19 nt, Artificial Sequence
  Description of Artificial Sequence: Synthetic oligonucleotide
gcgucacagacuuuccggu

SEQ ID NO: 2515902 - RNA, 19 nt, Artificial Sequence
  Description of Artificial Sequence: Synthetic oligonucleotide
cugcuugucgugugaacuu

SEQ ID NO: 2515903 - RNA, 19 nt, Artificial Sequence
  Description of Artificial Sequence: Synthetic oligonucleotide
ggggacuggcagcauuuaa

SEQ ID NO: 2515904 - RNA, 19 nt, Artificial Sequence
  Description of Artificial Sequence: Synthetic oligonucleotide
acgccuggacacaccacau

SEQ ID NO: 2515905 - RNA, 19 nt, Artificial Sequence
  Description of Artificial Sequence: Synthetic oligonucleotide
cggaguauuggcugguaaa

SEQ ID NO: 2515906 - RNA, 19 nt, Artificial Sequence
  Description of Artificial Sequence: Synthetic oligonucleotide
gacccgggugggccuccug

SEQ ID NO: 2515907 - RNA, 19 nt, Artificial Sequence
  Description of Artificial Sequence: Synthetic oligonucleotide
gccgccgcacgccuggaca

SEQ ID NO: 2515908 - RNA, 19 nt, Artificial Sequence
  Description of Artificial Sequence: Synthetic oligonucleotide
ccgacauuauagcuuauuu

SEQ ID NO: 2515909 - RNA, 19 nt, Artificial Sequence
  Description of Artificial Sequence: Synthetic oligonucleotide
  modified_base (6)..(6): a, c, u, g, unknown or other
ccaagnuaaaagaggcauu

SEQ ID NO: 2515910 - RNA, 19 nt, Artificial Sequence
  Description of Artificial Sequence: Synthetic oligonucleotide
ggcugaaguaacugcucau

SEQ ID NO: 2515911 - RNA, 19 nt, Artificial Sequence
  Description of Artificial Sequence: Synthetic oligonucleotide
caggggacuggcagcauuu

SEQ ID NO: 2515912 - RNA, 19 nt, Artificial Sequence
  Description of Artificial Sequence: Synthetic oligonucleotide
gcucuacgguuaucgugga

SEQ ID NO: 2515913 - RNA, 19 nt, Artificial Sequence
  Description of Artificial Sequence: Synthetic oligonucleotide
gcccgaggcccgcagguuc

SEQ ID NO: 2515914 - RNA, 19 nt, Artificial Sequence
  Description of Artificial Sequence: Synthetic oligonucleotide
ccguguuggucuaccgaca

SEQ ID NO: 2515915 - RNA, 19 nt, Artificial Sequence
  Description of Artificial Sequence: Synthetic oligonucleotide
ccgccgcacgccuggacac

SEQ ID NO: 2515916 - RNA, 19 nt, Artificial Sequence
  Description of Artificial Sequence: Synthetic oligonucleotide
gucgcgucuucuacacgcu

SEQ ID NO: 2515917 - RNA, 19 nt, Artificial Sequence
  Description of Artificial Sequence: Synthetic oligonucleotide
ugacccgggugggccuccu

SEQ ID NO: 2515918 - RNA, 19 nt, Artificial Sequence
  Description of Artificial Sequence: Synthetic oligonucleotide
ccgggugggccuccugcag

SEQ ID NO: 2515919 - RNA, 19 nt, Artificial Sequence
  Description of Artificial Sequence: Synthetic oligonucleotide
cugaggagauggucucuuu

SEQ ID NO: 2515920 - RNA, 19 nt, Artificial Sequence
  Description of Artificial Sequence: Synthetic oligonucleotide
ccucacugucaucaaaauu

SEQ ID NO: 2515921 - RNA, 19 nt, Artificial Sequence
  Description of Artificial Sequence: Synthetic oligonucleotide
cgacaagcgucacgcagga

SEQ ID NO: 2515922 - RNA, 19 nt, Artificial Sequence
  Description of Artificial Sequence: Synthetic oligonucleotide
gccgcacgccuggacacac

SEQ ID NO: 2515923 - RNA, 19 nt, Artificial Sequence
  Description of Artificial Sequence: Synthetic oligonucleotide
cgccuggacacaccacauc

SEQ ID NO: 2515924 - RNA, 19 nt, Artificial Sequence
  Description of Artificial Sequence: Synthetic oligonucleotide
gcacgccuggacacaccac

SEQ ID NO: 2515925 - RNA, 19 nt, Artificial Sequence
  Description of Artificial Sequence: Synthetic oligonucleotide
gggcugcuugucgugugaa

SEQ ID NO: 2515926 - RNA, 19 nt, Artificial Sequence
  Description of Artificial Sequence: Synthetic oligonucleotide
cgucacgcaggauucacuu

SEQ ID NO: 2515927 - RNA, 19 nt, Artificial Sequence
  Description of Artificial Sequence: Synthetic oligonucleotide
gacaagcgucacgcaggau

SEQ ID NO: 2515928 - RNA, 19 nt, Artificial Sequence
  Description of Artificial Sequence: Synthetic oligonucleotide
gcccgcagguucccacaga

SEQ ID NO: 2515929 - RNA, 19 nt, Artificial Sequence
  Description of Artificial Sequence: Synthetic oligonucleotide
cguguuggucuaccgacau

SEQ ID NO: 2515930 - RNA, 19 nt, Artificial Sequence
  Description of Artificial Sequence: Synthetic oligonucleotide
ccuuuacacaacggaguau

SEQ ID NO: 2515931 - RNA, 19 nt, Artificial Sequence
  Description of Artificial Sequence: Synthetic oligonucleotide
gcgucacgcaggauucacu

SEQ ID NO: 2515932 - RNA, 19 nt, Artificial Sequence
  Description of Artificial Sequence: Synthetic oligonucleotide
ccgaggcccgcagguuccc

SEQ ID NO: 2515933 - RNA, 19 nt, Artificial Sequence
  Description of Artificial Sequence: Synthetic oligonucleotide
cgacgacaagcgucacgca

SEQ ID NO: 2515934 - RNA, 19 nt, Artificial Sequence
  Description of Artificial Sequence: Synthetic oligonucleotide
cugaggcgucacagacuuu

SEQ ID NO: 2515935 - RNA, 19 nt, Artificial Sequence
  Description of Artificial Sequence: Synthetic oligonucleotide
cgucacagacuuuccgguu

SEQ ID NO: 2515936 - RNA, 19 nt, Artificial Sequence
  Description of Artificial Sequence: Synthetic oligonucleotide
cgacgacgacaagcgucac

SEQ ID NO: 2515937 - RNA, 19 nt, Artificial Sequence
  Description of Artificial Sequence: Synthetic oligonucleotide
cgguuaucguggagaaguu

SEQ ID NO: 2515938 - RNA, 19 nt, Artificial Sequence
  Description of Artificial Sequence: Synthetic oligonucleotide
ccgcccgaggcccgcaggu

SEQ ID NO: 2515939 - RNA, 19 nt, Artificial Sequence
  Description of Artificial Sequence: Synthetic oligonucleotide
cgccgcacgccuggacaca

SEQ ID NO: 2515940 - RNA, 19 nt, Artificial Sequence
  Description of Artificial Sequence: Synthetic oligonucleotide
cgcccgaggcccgcagguu

SEQ ID NO: 2515941 - RNA, 19 nt, Artificial Sequence
  Description of Artificial Sequence: Synthetic oligonucleotide
  modified_base (1)..(1): a, c, u, g, unknown or other
nuaaaagaggcauuuccag

SEQ ID NO: 2515942 - RNA, 19 nt, Artificial Sequence
  Description of Artificial Sequence: Synthetic oligonucleotide
acucuauauacgcaaaccc

SEQ ID NO: 2515943 - RNA, 19 nt, Artificial Sequence
  Description of Artificial Sequence: Synthetic oligonucleotide
augaaagugagcuuccagc

SEQ ID NO: 2515944 - RNA, 19 nt, Artificial Sequence
  Description of Artificial Sequence: Synthetic oligonucleotide
aauaccaugaugucgcucu

SEQ ID NO: 2515945 - RNA, 19 nt, Artificial Sequence
  Description of Artificial Sequence: Synthetic oligonucleotide
ugcaccauaguccacauug

SEQ ID NO: 2515946 - RNA, 19 nt, Artificial Sequence
  Description of Artificial Sequence: Synthetic oligonucleotide
aacucuauauacgcaaacc

SEQ ID NO: 2515947 - RNA, 19 nt, Artificial Sequence
  Description of Artificial Sequence: Synthetic oligonucleotide
uuugucacagaguauagug

SEQ ID NO: 2515948 - RNA, 19 nt, Artificial Sequence
  Description of Artificial Sequence: Synthetic oligonucleotide
ucugagaacucuauauacg

SEQ ID NO: 2515949 - RNA, 19 nt, Artificial Sequence
  Description of Artificial Sequence: Synthetic oligonucleotide
uccucaagagacaugauca

SEQ ID NO: 2515950 - RNA, 19 nt, Artificial Sequence
  Description of Artificial Sequence: Synthetic oligonucleotide
ucaagagacaugaucacug

SEQ ID NO: 2515951 - RNA, 19 nt, Artificial Sequence
  Description of Artificial Sequence: Synthetic oligonucleotide
uuuuguagcuccuuuagcu

SEQ ID NO: 2515952 - RNA, 19 nt, Artificial Sequence
  Description of Artificial Sequence: Synthetic oligonucleotide
uauacgcaaacccuuuagg

SEQ ID NO: 2515953 - RNA, 19 nt, Artificial Sequence
  Description of Artificial Sequence: Synthetic oligonucleotide
gauagaacgggcaucagcc

SEQ ID NO: 2515954 - RNA, 19 nt, Artificial Sequence
  Description of Artificial Sequence: Synthetic oligonucleotide
uugucuuccucuaaacagg

SEQ ID NO: 2515955 - RNA, 19 nt, Artificial Sequence
  Description of Artificial Sequence: Synthetic oligonucleotide
acaaccaugaaagugagcu

SEQ ID NO: 2515956 - RNA, 19 nt, Artificial Sequence
  Description of Artificial Sequence: Synthetic oligonucleotide
ucaucuaaggccagggaag

SEQ ID NO: 2515957 - RNA, 19 nt, Artificial Sequence
  Description of Artificial Sequence: Synthetic oligonucleotide
agauagaacgggcaucagc

SEQ ID NO: 2515958 - RNA, 19 nt, Artificial Sequence
  Description of Artificial Sequence: Synthetic oligonucleotide
cugacucgggcuuugaucg

SEQ ID NO: 2515959 - RNA, 19 nt, Artificial Sequence
  Description of Artificial Sequence: Synthetic oligonucleotide
cacuaaauuugucacagag

SEQ ID NO: 2515960 - RNA, 19 nt, Artificial Sequence
  Description of Artificial Sequence: Synthetic oligonucleotide
aaggggaauaccaugaugu

SEQ ID NO: 2515961 - RNA, 19 nt, Artificial Sequence
  Description of Artificial Sequence: Synthetic oligonucleotide
ucuaaacagggacucaucu

SEQ ID NO: 2515962 - RNA, 19 nt, Artificial Sequence
  Description of Artificial Sequence: Synthetic oligonucleotide
caugaugucgcucuagccc

SEQ ID NO: 2515963 - RNA, 19 nt, Artificial Sequence
  Description of Artificial Sequence: Synthetic oligonucleotide
uuugaucgcuucuagcucc

SEQ ID NO: 2515964 - RNA, 19 nt, Artificial Sequence
  Description of Artificial Sequence: Synthetic oligonucleotide
agagacaugaucacugggc

SEQ ID NO: 2515965 - RNA, 19 nt, Artificial Sequence
  Description of Artificial Sequence: Synthetic oligonucleotide
ugccaacguagauagaacg

SEQ ID NO: 2515966 - RNA, 19 nt, Artificial Sequence
  Description of Artificial Sequence: Synthetic oligonucleotide
aacccuuuaggauggccac

SEQ ID NO: 2515967 - RNA, 19 nt, Artificial Sequence
  Description of Artificial Sequence: Synthetic oligonucleotide
acagaguauagugacacgg

SEQ ID NO: 2515968 - RNA, 19 nt, Artificial Sequence
  Description of Artificial Sequence: Synthetic oligonucleotide
augaugucgcucuagcccg

SEQ ID NO: 2515969 - RNA, 19 nt, Artificial Sequence
  Description of Artificial Sequence: Synthetic oligonucleotide
uuaaaaccgcuguagaauc

SEQ ID NO: 2515970 - RNA, 19 nt, Artificial Sequence
  Description of Artificial Sequence: Synthetic oligonucleotide
ugaaagugagcuuccagcu

SEQ ID NO: 2515971 - RNA, 19 nt, Artificial Sequence
  Description of Artificial Sequence: Synthetic oligonucleotide
ucuauauacgcaaacccuu

SEQ ID NO: 2515972 - RNA, 19 nt, Artificial Sequence
  Description of Artificial Sequence: Synthetic oligonucleotide
ugucacagaguauagugac

SEQ ID NO: 2515973 - RNA, 19 nt, Artificial Sequence
  Description of Artificial Sequence: Synthetic oligonucleotide
accaugaugucgcucuagc

SEQ ID NO: 2515974 - RNA, 19 nt, Artificial Sequence
  Description of Artificial Sequence: Synthetic oligonucleotide
auauacgcaaacccuuuag

SEQ ID NO: 2515975 - RNA, 19 nt, Artificial Sequence
  Description of Artificial Sequence: Synthetic oligonucleotide
gagacaugaucacugggcc

SEQ ID NO: 2515976 - RNA, 19 nt, Artificial Sequence
  Description of Artificial Sequence: Synthetic oligonucleotide
uuguaauugguaguccggg

SEQ ID NO: 2515977 - RNA, 19 nt, Artificial Sequence
  Description of Artificial Sequence: Synthetic oligonucleotide
aaaaccgcuguagaaucuc

SEQ ID NO: 2515978 - RNA, 19 nt, Artificial Sequence
  Description of Artificial Sequence: Synthetic oligonucleotide
uugucugagaacucuauau

SEQ ID NO: 2515979 - RNA, 19 nt, Artificial Sequence
  Description of Artificial Sequence: Synthetic oligonucleotide
aaccacaaccaugaaagug

SEQ ID NO: 2515980 - RNA, 19 nt, Artificial Sequence
  Description of Artificial Sequence: Synthetic oligonucleotide
uguuaaaaccgcuguagaa

SEQ ID NO: 2515981 - RNA, 19 nt, Artificial Sequence
  Description of Artificial Sequence: Synthetic oligonucleotide
ucuaaggccagggaagucc

SEQ ID NO: 2515982 - RNA, 19 nt, Artificial Sequence
  Description of Artificial Sequence: Synthetic oligonucleotide
auggccacuaaauuuguca

SEQ ID NO: 2515983 - RNA, 19 nt, Artificial Sequence
  Description of Artificial Sequence: Synthetic oligonucleotide
uguagacucgaccccgggg

SEQ ID NO: 2515984 - RNA, 19 nt, Artificial Sequence
  Description of Artificial Sequence: Synthetic oligonucleotide
uagaaucucgaucgggagc

SEQ ID NO: 2515985 - RNA, 19 nt, Artificial Sequence
  Description of Artificial Sequence: Synthetic oligonucleotide
auacgcaaacccuuuagga

SEQ ID NO: 2515986 - RNA, 19 nt, Artificial Sequence
  Description of Artificial Sequence: Synthetic oligonucleotide
uguacugaugccuggucug

SEQ ID NO: 2515987 - RNA, 19 nt, Artificial Sequence
  Description of Artificial Sequence: Synthetic oligonucleotide
uugucacagaguauaguga

SEQ ID NO: 2515988 - RNA, 19 nt, Artificial Sequence
  Description of Artificial Sequence: Synthetic oligonucleotide
gguugacugaaccacaacc

SEQ ID NO: 2515989 - RNA, 19 nt, Artificial Sequence
  Description of Artificial Sequence: Synthetic oligonucleotide
gacaugaucacugggccag

SEQ ID NO: 2515990 - RNA, 19 nt, Artificial Sequence
  Description of Artificial Sequence: Synthetic oligonucleotide
cucacugacucuuugucug

SEQ ID NO: 2515991 - RNA, 19 nt, Artificial Sequence
  Description of Artificial Sequence: Synthetic oligonucleotide
uauucaucugcuucucuac

SEQ ID NO: 2515992 - RNA, 19 nt, Artificial Sequence
  Description of Artificial Sequence: Synthetic oligonucleotide
acgcaaacccuuuaggaug

SEQ ID NO: 2515993 - RNA, 19 nt, Artificial Sequence
  Description of Artificial Sequence: Synthetic oligonucleotide
ugagaacucuauauacgca

SEQ ID NO: 2515994 - RNA, 19 nt, Artificial Sequence
  Description of Artificial Sequence: Synthetic oligonucleotide
ugauuugucuuccucuaaa

SEQ ID NO: 2515995 - RNA, 19 nt, Artificial Sequence
  Description of Artificial Sequence: Synthetic oligonucleotide
uuaguaaggggaauaccau

SEQ ID NO: 2515996 - RNA, 19 nt, Artificial Sequence
  Description of Artificial Sequence: Synthetic oligonucleotide
gauuugucuuccucuaaac

SEQ ID NO: 2515997 - RNA, 19 nt, Artificial Sequence
  Description of Artificial Sequence: Synthetic oligonucleotide
ucuaccucguuuuguagcu

SEQ ID NO: 2515998 - RNA, 19 nt, Artificial Sequence
  Description of Artificial Sequence: Synthetic oligonucleotide
agcuccuuuagcuucucag

SEQ ID NO: 2515999 - RNA, 19 nt, Artificial Sequence
  Description of Artificial Sequence: Synthetic oligonucleotide
gagaacucuauauacgcaa

SEQ ID NO: 2516000 - RNA, 19 nt, Artificial Sequence
  Description of Artificial Sequence: Synthetic oligonucleotide
uaguaaggggaauaccaug

SEQ ID NO: 2516001 - RNA, 19 nt, Artificial Sequence
  Description of Artificial Sequence: Synthetic oligonucleotide
aauuugucacagaguauag

SEQ ID NO: 2516002 - RNA, 19 nt, Artificial Sequence
  Description of Artificial Sequence: Synthetic oligonucleotide
ugacacgguugacugaacc

SEQ ID NO: 2516003 - RNA, 19 nt, Artificial Sequence
  Description of Artificial Sequence: Synthetic oligonucleotide
cuccuuuagcuucucagcc

SEQ ID NO: 2516004 - RNA, 19 nt, Artificial Sequence
  Description of Artificial Sequence: Synthetic oligonucleotide
uuguacugaugccuggucu

SEQ ID NO: 2516005 - RNA, 19 nt, Artificial Sequence
  Description of Artificial Sequence: Synthetic oligonucleotide
guagacucgaccccggggc

SEQ ID NO: 2516006 - RNA, 19 nt, Artificial Sequence
  Description of Artificial Sequence: Synthetic oligonucleotide
acgggcaucagccuccauc

SEQ ID NO: 2516007 - RNA, 19 nt, Artificial Sequence
  Description of Artificial Sequence: Synthetic oligonucleotide
cucuaccucguuuuguagc

SEQ ID NO: 2516008 - RNA, 19 nt, Artificial Sequence
  Description of Artificial Sequence: Synthetic oligonucleotide
acacgguugacugaaccac

SEQ ID NO: 2516009 - RNA, 19 nt, Artificial Sequence
  Description of Artificial Sequence: Synthetic oligonucleotide
uaggauggccacuaaauuu

SEQ ID NO: 2516010 - RNA, 19 nt, Artificial Sequence
  Description of Artificial Sequence: Synthetic oligonucleotide
uacgcaaacccuuuaggau

SEQ ID NO: 2516011 - RNA, 19 nt, Artificial Sequence
  Description of Artificial Sequence: Synthetic oligonucleotide
guuguaauugguaguccgg

SEQ ID NO: 2516012 - RNA, 19 nt, Artificial Sequence
  Description of Artificial Sequence: Synthetic oligonucleotide
uccucaauggcgccguccc

SEQ ID NO: 2516013 - RNA, 19 nt, Artificial Sequence
  Description of Artificial Sequence: Synthetic oligonucleotide
cacgguaucgggcacgcgg

SEQ ID NO: 2516014 - RNA, 19 nt, Artificial Sequence
  Description of Artificial Sequence: Synthetic oligonucleotide
aauugguaguccgggcacg

SEQ ID NO: 2516015 - RNA, 19 nt, Artificial Sequence
  Description of Artificial Sequence: Synthetic oligonucleotide
gaacucuauauacgcaaac

SEQ ID NO: 2516016 - RNA, 19 nt, Artificial Sequence
  Description of Artificial Sequence: Synthetic oligonucleotide
uggucuguugguucguuug

SEQ ID NO: 2516017 - RNA, 19 nt, Artificial Sequence
  Description of Artificial Sequence: Synthetic oligonucleotide
agaaucucgaucgggagcu

SEQ ID NO: 2516018 - RNA, 19 nt, Artificial Sequence
  Description of Artificial Sequence: Synthetic oligonucleotide
caacguagauagaacgggc

SEQ ID NO: 2516019 - RNA, 19 nt, Artificial Sequence
  Description of Artificial Sequence: Synthetic oligonucleotide
accacaaccaugaaaguga

SEQ ID NO: 2516020 - RNA, 19 nt, Artificial Sequence
  Description of Artificial Sequence: Synthetic oligonucleotide
uguugcaccauaguccaca

SEQ ID NO: 2516021 - RNA, 19 nt, Artificial Sequence
  Description of Artificial Sequence: Synthetic oligonucleotide
uuaggauggccacuaaauu

SEQ ID NO: 2516022 - RNA, 19 nt, Artificial Sequence
  Description of Artificial Sequence: Synthetic oligonucleotide
aguaaggggaauaccauga

SEQ ID NO: 2516023 - RNA, 19 nt, Artificial Sequence
  Description of Artificial Sequence: Synthetic oligonucleotide
uugacugaaccacaaccau

SEQ ID NO: 2516024 - RNA, 19 nt, Artificial Sequence
  Description of Artificial Sequence: Synthetic oligonucleotide
auauucaucugcuucucua

SEQ ID NO: 2516025 - RNA, 19 nt, Artificial Sequence
  Description of Artificial Sequence: Synthetic oligonucleotide
gacucaucuaaggccaggg

SEQ ID NO: 2516026 - RNA, 19 nt, Artificial Sequence
  Description of Artificial Sequence: Synthetic oligonucleotide
guuuuguagcuccuuuagc

SEQ ID NO: 2516027 - RNA, 19 nt, Artificial Sequence
  Description of Artificial Sequence: Synthetic oligonucleotide
guccacauugccaacguag

SEQ ID NO: 2516028 - RNA, 19 nt, Artificial Sequence
  Description of Artificial Sequence: Synthetic oligonucleotide
uaaaaccgcuguagaaucu

SEQ ID NO: 2516029 - RNA, 19 nt, Artificial Sequence
  Description of Artificial Sequence: Synthetic oligonucleotide
gaucgcuucuagcuccggg

SEQ ID NO: 2516030 - RNA, 19 nt, Artificial Sequence
  Description of Artificial Sequence: Synthetic oligonucleotide
aggauggccacuaaauuug

SEQ ID NO: 2516031 - RNA, 19 nt, Artificial Sequence
  Description of Artificial Sequence: Synthetic oligonucleotide
uuugucugagaacucuaua

SEQ ID NO: 2516032 - RNA, 19 nt, Artificial Sequence
  Description of Artificial Sequence: Synthetic oligonucleotide
gggaauaccaugaugucgc

SEQ ID NO: 2516033 - RNA, 19 nt, Artificial Sequence
  Description of Artificial Sequence: Synthetic oligonucleotide
aacguagauagaacgggca

SEQ ID NO: 2516034 - RNA, 19 nt, Artificial Sequence
  Description of Artificial Sequence: Synthetic oligonucleotide
uugaucgcuucuagcuccg

SEQ ID NO: 2516035 - RNA, 19 nt, Artificial Sequence
  Description of Artificial Sequence: Synthetic oligonucleotide
uccucacugacucuuuguc

SEQ ID NO: 2516036 - RNA, 19 nt, Artificial Sequence
  Description of Artificial Sequence: Synthetic oligonucleotide
aggggaauaccaugauguc

SEQ ID NO: 2516037 - RNA, 19 nt, Artificial Sequence
  Description of Artificial Sequence: Synthetic oligonucleotide
uauauacgcaaacccuuua

SEQ ID NO: 2516038 - RNA, 19 nt, Artificial Sequence
  Description of Artificial Sequence: Synthetic oligonucleotide
ucuguugguucguuuggga

SEQ ID NO: 2516039 - RNA, 19 nt, Artificial Sequence
  Description of Artificial Sequence: Synthetic oligonucleotide
ucggccucgaccagucccg

SEQ ID NO: 2516040 - RNA, 19 nt, Artificial Sequence
  Description of Artificial Sequence: Synthetic oligonucleotide
ugucgcucuagcccggccc

SEQ ID NO: 2516041 - RNA, 19 nt, Artificial Sequence
  Description of Artificial Sequence: Synthetic oligonucleotide
guagauagaacgggcauca

SEQ ID NO: 2516042 - RNA, 19 nt, Artificial Sequence
  Description of Artificial Sequence: Synthetic oligonucleotide
uagaacgggcaucagccuc

SEQ ID NO: 2516043 - RNA, 19 nt, Artificial Sequence
  Description of Artificial Sequence: Synthetic oligonucleotide
gacacgguugacugaacca

SEQ ID NO: 2516044 - RNA, 19 nt, Artificial Sequence
  Description of Artificial Sequence: Synthetic oligonucleotide
guugacugaaccacaacca

SEQ ID NO: 2516045 - RNA, 19 nt, Artificial Sequence
  Description of Artificial Sequence: Synthetic oligonucleotide
ugaucacugggccagcauu

SEQ ID NO: 2516046 - RNA, 19 nt, Artificial Sequence
  Description of Artificial Sequence: Synthetic oligonucleotide
ugccuggucuguugguucg

SEQ ID NO: 2516047 - RNA, 19 nt, Artificial Sequence
  Description of Artificial Sequence: Synthetic oligonucleotide
cuuugaucgcuucuagcuc

SEQ ID NO: 2516048 - RNA, 19 nt, Artificial Sequence
  Description of Artificial Sequence: Synthetic oligonucleotide
ugggaaucaccuugauuug

SEQ ID NO: 2516049 - RNA, 19 nt, Artificial Sequence
  Description of Artificial Sequence: Synthetic oligonucleotide
uugccaacguagauagaac

SEQ ID NO: 2516050 - RNA, 19 nt, Artificial Sequence
  Description of Artificial Sequence: Synthetic oligonucleotide
gcuguuaaaaccgcuguag

SEQ ID NO: 2516051 - RNA, 19 nt, Artificial Sequence
  Description of Artificial Sequence: Synthetic oligonucleotide
accaugaaagugagcuucc

SEQ ID NO: 2516052 - RNA, 19 nt, Artificial Sequence
  Description of Artificial Sequence: Synthetic oligonucleotide
agaguauagugacacgguu

SEQ ID NO: 2516053 - RNA, 19 nt, Artificial Sequence
  Description of Artificial Sequence: Synthetic oligonucleotide
aucgcuucuagcuccgggu

SEQ ID NO: 2516054 - RNA, 19 nt, Artificial Sequence
  Description of Artificial Sequence: Synthetic oligonucleotide
uccucuucgggcucgggcu

SEQ ID NO: 2516055 - RNA, 19 nt, Artificial Sequence
  Description of Artificial Sequence: Synthetic oligonucleotide
ucuagcccggccccuguag

SEQ ID NO: 2516056 - RNA, 19 nt, Artificial Sequence
  Description of Artificial Sequence: Synthetic oligonucleotide
gaucacugggccagcauug

SEQ ID NO: 2516057 - RNA, 19 nt, Artificial Sequence
  Description of Artificial Sequence: Synthetic oligonucleotide
uugauuugucuuccucuaa

SEQ ID NO: 2516058 - RNA, 19 nt, Artificial Sequence
  Description of Artificial Sequence: Synthetic oligonucleotide
augccuggucuguugguuc

SEQ ID NO: 2516059 - RNA, 19 nt, Artificial Sequence
  Description of Artificial Sequence: Synthetic oligonucleotide
aaaccccggucuguuguac

SEQ ID NO: 2516060 - RNA, 19 nt, Artificial Sequence
  Description of Artificial Sequence: Synthetic oligonucleotide
cacagaguauagugacacg

SEQ ID NO: 2516061 - RNA, 19 nt, Artificial Sequence
  Description of Artificial Sequence: Synthetic oligonucleotide
cuguagaaucucgaucggg

SEQ ID NO: 2516062 - RNA, 19 nt, Artificial Sequence
  Description of Artificial Sequence: Synthetic oligonucleotide
cugcuguugcaccauaguc

SEQ ID NO: 2516063 - RNA, 19 nt, Artificial Sequence
  Description of Artificial Sequence: Synthetic oligonucleotide
ucaauggcgccguccccgg

SEQ ID NO: 2516064 - RNA, 19 nt, Artificial Sequence
  Description of Artificial Sequence: Synthetic oligonucleotide
cucaucuaaggccagggaa

SEQ ID NO: 2516065 - RNA, 19 nt, Artificial Sequence
  Description of Artificial Sequence: Synthetic oligonucleotide
agugacacgguugacugaa

SEQ ID NO: 2516066 - RNA, 19 nt, Artificial Sequence
  Description of Artificial Sequence: Synthetic oligonucleotide
ugcuguuaaaaccgcugua

SEQ ID NO: 2516067 - RNA, 19 nt, Artificial Sequence
  Description of Artificial Sequence: Synthetic oligonucleotide
aucacugggccagcauugc

SEQ ID NO: 2516068 - RNA, 19 nt, Artificial Sequence
  Description of Artificial Sequence: Synthetic oligonucleotide
cucuauauacgcaaacccu

SEQ ID NO: 2516069 - RNA, 19 nt, Artificial Sequence
  Description of Artificial Sequence: Synthetic oligonucleotide
uguuguacugaugccuggu

SEQ ID NO: 2516070 - RNA, 19 nt, Artificial Sequence
  Description of Artificial Sequence: Synthetic oligonucleotide
acguagauagaacgggcau

SEQ ID NO: 2516071 - RNA, 19 nt, Artificial Sequence
  Description of Artificial Sequence: Synthetic oligonucleotide
cuguuguacugaugccugg

SEQ ID NO: 2516072 - RNA, 19 nt, Artificial Sequence
  Description of Artificial Sequence: Synthetic oligonucleotide
guuaaaaccgcuguagaau

SEQ ID NO: 2516073 - RNA, 19 nt, Artificial Sequence
  Description of Artificial Sequence: Synthetic oligonucleotide
auugguaguccgggcacgg

SEQ ID NO: 2516074 - RNA, 19 nt, Artificial Sequence
  Description of Artificial Sequence: Synthetic oligonucleotide
auagaacgggcaucagccu

SEQ ID NO: 2516075 - RNA, 19 nt, Artificial Sequence
  Description of Artificial Sequence: Synthetic oligonucleotide
ccaacguagauagaacggg

SEQ ID NO: 2516076 - RNA, 19 nt, Artificial Sequence
  Description of Artificial Sequence: Synthetic oligonucleotide
ggggccugcuguuaaaacc

SEQ ID NO: 2516077 - RNA, 19 nt, Artificial Sequence
  Description of Artificial Sequence: Synthetic oligonucleotide
ucguuuuguagcuccuuua

SEQ ID NO: 2516078 - RNA, 19 nt, Artificial Sequence
  Description of Artificial Sequence: Synthetic oligonucleotide
cuugauuugucuuccucua

SEQ ID NO: 2516079 - RNA, 19 nt, Artificial Sequence
  Description of Artificial Sequence: Synthetic oligonucleotide
ggucuguugguucguuugg

SEQ ID NO: 2516080 - RNA, 19 nt, Artificial Sequence
  Description of Artificial Sequence: Synthetic oligonucleotide
ucacugggccagcauugcc

SEQ ID NO: 2516081 - RNA, 19 nt, Artificial Sequence
  Description of Artificial Sequence: Synthetic oligonucleotide
ucacugacucuuugucuga

SEQ ID NO: 2516082 - RNA, 19 nt, Artificial Sequence
  Description of Artificial Sequence: Synthetic oligonucleotide
uagacucgaccccggggcc

SEQ ID NO: 2516083 - RNA, 19 nt, Artificial Sequence
  Description of Artificial Sequence: Synthetic oligonucleotide
cuguuaaaaccgcuguaga

SEQ ID NO: 2516084 - RNA, 19 nt, Artificial Sequence
  Description of Artificial Sequence: Synthetic oligonucleotide
guugguucguuugggaauc

SEQ ID NO: 2516085 - RNA, 19 nt, Artificial Sequence
  Description of Artificial Sequence: Synthetic oligonucleotide
acucaucuaaggccaggga

SEQ ID NO: 2516086 - RNA, 19 nt, Artificial Sequence
  Description of Artificial Sequence: Synthetic oligonucleotide
gccaacguagauagaacgg

SEQ ID NO: 2516087 - RNA, 19 nt, Artificial Sequence
  Description of Artificial Sequence: Synthetic oligonucleotide
uagcuccggguccucaaug

SEQ ID NO: 2516088 - RNA, 19 nt, Artificial Sequence
  Description of Artificial Sequence: Synthetic oligonucleotide
cuguuguaauugguagucc

SEQ ID NO: 2516089 - RNA, 19 nt, Artificial Sequence
  Description of Artificial Sequence: Synthetic oligonucleotide
guucguuugggaaucaccu

SEQ ID NO: 2516090 - RNA, 19 nt, Artificial Sequence
  Description of Artificial Sequence: Synthetic oligonucleotide
guuguacugaugccugguc

SEQ ID NO: 2516091 - RNA, 19 nt, Artificial Sequence
  Description of Artificial Sequence: Synthetic oligonucleotide
gccccuguagacucgaccc

SEQ ID NO: 2516092 - RNA, 19 nt, Artificial Sequence
  Description of Artificial Sequence: Synthetic oligonucleotide
gcuuugaucgcuucuagcu

SEQ ID NO: 2516093 - RNA, 19 nt, Artificial Sequence
  Description of Artificial Sequence: Synthetic oligonucleotide
ugguaguccgggcacggua

SEQ ID NO: 2516094 - RNA, 19 nt, Artificial Sequence
  Description of Artificial Sequence: Synthetic oligonucleotide
uaguccgggcacgguaucg

SEQ ID NO: 2516095 - RNA, 19 nt, Artificial Sequence
  Description of Artificial Sequence: Synthetic oligonucleotide
augucgcucuagcccggcc

SEQ ID NO: 2516096 - RNA, 19 nt, Artificial Sequence
  Description of Artificial Sequence: Synthetic oligonucleotide
aaccccggucuguuguacu

SEQ ID NO: 2516097 - RNA, 19 nt, Artificial Sequence
  Description of Artificial Sequence: Synthetic oligonucleotide
uccgggcacgguaucgggc

SEQ ID NO: 2516098 - RNA, 19 nt, Artificial Sequence
  Description of Artificial Sequence: Synthetic oligonucleotide
cuaaacagggacucaucua

SEQ ID NO: 2516099 - RNA, 19 nt, Artificial Sequence
  Description of Artificial Sequence: Synthetic oligonucleotide
ucgcuucuagcuccggguc

SEQ ID NO: 2516100 - RNA, 19 nt, Artificial Sequence
  Description of Artificial Sequence: Synthetic oligonucleotide
uucguuugggaaucaccuu

SEQ ID NO: 2516101 - RNA, 19 nt, Artificial Sequence
  Description of Artificial Sequence: Synthetic oligonucleotide
ucuagcuccggguccucaa

SEQ ID NO: 2516102 - RNA, 19 nt, Artificial Sequence
  Description of Artificial Sequence: Synthetic oligonucleotide
cuuuaggauggccacuaaa

SEQ ID NO: 2516103 - RNA, 19 nt, Artificial Sequence
  Description of Artificial Sequence: Synthetic oligonucleotide
ucgggcacgcgggaaaccc

SEQ ID NO: 2516104 - RNA, 19 nt, Artificial Sequence
  Description of Artificial Sequence: Synthetic oligonucleotide
ccugcuguuaaaaccgcug

SEQ ID NO: 2516105 - RNA, 19 nt, Artificial Sequence
  Description of Artificial Sequence: Synthetic oligonucleotide
ucucgaucgggagcuguug

SEQ ID NO: 2516106 - RNA, 19 nt, Artificial Sequence
  Description of Artificial Sequence: Synthetic oligonucleotide
gguucguuugggaaucacc

SEQ ID NO: 2516107 - RNA, 19 nt, Artificial Sequence
  Description of Artificial Sequence: Synthetic oligonucleotide
acgguaucgggcacgcggg

SEQ ID NO: 2516108 - RNA, 19 nt, Artificial Sequence
  Description of Artificial Sequence: Synthetic oligonucleotide
aguccgggcacgguaucgg

SEQ ID NO: 2516109 - RNA, 19 nt, Artificial Sequence
  Description of Artificial Sequence: Synthetic oligonucleotide
gcuguagaaucucgaucgg

SEQ ID NO: 2516110 - RNA, 19 nt, Artificial Sequence
  Description of Artificial Sequence: Synthetic oligonucleotide
uagugacacgguugacuga

SEQ ID NO: 2516111 - RNA, 19 nt, Artificial Sequence
  Description of Artificial Sequence: Synthetic oligonucleotide
cuguagacucgaccccggg

SEQ ID NO: 2516112 - RNA, 19 nt, Artificial Sequence
  Description of Artificial Sequence: Synthetic oligonucleotide
aaccgcuguagaaucucga

SEQ ID NO: 2516113 - RNA, 19 nt, Artificial Sequence
  Description of Artificial Sequence: Synthetic oligonucleotide
cguuuuguagcuccuuuag

SEQ ID NO: 2516114 - RNA, 19 nt, Artificial Sequence
  Description of Artificial Sequence: Synthetic oligonucleotide
aucuaaggccagggaaguc

SEQ ID NO: 2516115 - RNA, 19 nt, Artificial Sequence
  Description of Artificial Sequence: Synthetic oligonucleotide
uagauagaacgggcaucag

SEQ ID NO: 2516116 - RNA, 19 nt, Artificial Sequence
  Description of Artificial Sequence: Synthetic oligonucleotide
acucuuugucugagaacuc

SEQ ID NO: 2516117 - RNA, 19 nt, Artificial Sequence
  Description of Artificial Sequence: Synthetic oligonucleotide
cuuccucuaaacagggacu

SEQ ID NO: 2516118 - RNA, 19 nt, Artificial Sequence
  Description of Artificial Sequence: Synthetic oligonucleotide
ggucuguuguacugaugcc

SEQ ID NO: 2516119 - RNA, 19 nt, Artificial Sequence
  Description of Artificial Sequence: Synthetic oligonucleotide
cacauugccaacguagaua

SEQ ID NO: 2516120 - RNA, 19 nt, Artificial Sequence
  Description of Artificial Sequence: Synthetic oligonucleotide
cuccaggccguucccguag

SEQ ID NO: 2516121 - RNA, 19 nt, Artificial Sequence
  Description of Artificial Sequence: Synthetic oligonucleotide
ugacucgggcuuugaucgc

SEQ ID NO: 2516122 - RNA, 19 nt, Artificial Sequence
  Description of Artificial Sequence: Synthetic oligonucleotide
augaucacugggccagcau

SEQ ID NO: 2516123 - RNA, 19 nt, Artificial Sequence
  Description of Artificial Sequence: Synthetic oligonucleotide
ucgaucgggagcuguugua

SEQ ID NO: 2516124 - RNA, 19 nt, Artificial Sequence
  Description of Artificial Sequence: Synthetic oligonucleotide
cgcaaacccuuuaggaugg

SEQ ID NO: 2516125 - RNA, 19 nt, Artificial Sequence
  Description of Artificial Sequence: Synthetic oligonucleotide
ccaugaugucgcucuagcc

SEQ ID NO: 2516126 - RNA, 19 nt, Artificial Sequence
  Description of Artificial Sequence: Synthetic oligonucleotide
gucuguuguacugaugccu

SEQ ID NO: 2516127 - RNA, 19 nt, Artificial Sequence
  Description of Artificial Sequence: Synthetic oligonucleotide
ucuccucaagagacaugau

SEQ ID NO: 2516128 - RNA, 19 nt, Artificial Sequence
  Description of Artificial Sequence: Synthetic oligonucleotide
aucgggcacgcgggaaacc

SEQ ID NO: 2516129 - RNA, 19 nt, Artificial Sequence
  Description of Artificial Sequence: Synthetic oligonucleotide
guccgggcacgguaucggg

SEQ ID NO: 2516130 - RNA, 19 nt, Artificial Sequence
  Description of Artificial Sequence: Synthetic oligonucleotide
ggaaucaccuugauuuguc

SEQ ID NO: 2516131 - RNA, 19 nt, Artificial Sequence
  Description of Artificial Sequence: Synthetic oligonucleotide
uaucgggcacgcgggaaac

SEQ ID NO: 2516132 - RNA, 19 nt, Artificial Sequence
  Description of Artificial Sequence: Synthetic oligonucleotide
ugaucgcuucuagcuccgg

SEQ ID NO: 2516133 - RNA, 19 nt, Artificial Sequence
  Description of Artificial Sequence: Synthetic oligonucleotide
ccucaagagacaugaucac

SEQ ID NO: 2516134 - RNA, 19 nt, Artificial Sequence
  Description of Artificial Sequence: Synthetic oligonucleotide
ccacaaccaugaaagugag

SEQ ID NO: 2516135 - RNA, 19 nt, Artificial Sequence
  Description of Artificial Sequence: Synthetic oligonucleotide
cacgguugacugaaccaca

SEQ ID NO: 2516136 - RNA, 19 nt, Artificial Sequence
  Description of Artificial Sequence: Synthetic oligonucleotide
cagucccggcucuuccucc

SEQ ID NO: 2516137 - RNA, 19 nt, Artificial Sequence
  Description of Artificial Sequence: Synthetic oligonucleotide
cagaguauagugacacggu

SEQ ID NO: 2516138 - RNA, 19 nt, Artificial Sequence
  Description of Artificial Sequence: Synthetic oligonucleotide
acugaaccacaaccaugaa

SEQ ID NO: 2516139 - RNA, 19 nt, Artificial Sequence
  Description of Artificial Sequence: Synthetic oligonucleotide
agucccggcucuuccuccu

SEQ ID NO: 2516140 - RNA, 19 nt, Artificial Sequence
  Description of Artificial Sequence: Synthetic oligonucleotide
uagcccggccccuguagac

SEQ ID NO: 2516141 - RNA, 19 nt, Artificial Sequence
  Description of Artificial Sequence: Synthetic oligonucleotide
cuauauacgcaaacccuuu

SEQ ID NO: 2516142 - RNA, 19 nt, Artificial Sequence
  Description of Artificial Sequence: Synthetic oligonucleotide
guaucgggcacgcgggaaa

SEQ ID NO: 2516143 - RNA, 19 nt, Artificial Sequence
  Description of Artificial Sequence: Synthetic oligonucleotide
ugguucguuugggaaucac

SEQ ID NO: 2516144 - RNA, 19 nt, Artificial Sequence
  Description of Artificial Sequence: Synthetic oligonucleotide
cuuugucugagaacucuau

SEQ ID NO: 2516145 - RNA, 19 nt, Artificial Sequence
  Description of Artificial Sequence: Synthetic oligonucleotide
gaaguccucacugacucuu

SEQ ID NO: 2516146 - RNA, 19 nt, Artificial Sequence
  Description of Artificial Sequence: Synthetic oligonucleotide
uccaggccguucccguagu

SEQ ID NO: 2516147 - RNA, 19 nt, Artificial Sequence
  Description of Artificial Sequence: Synthetic oligonucleotide
gcuucucuaccucguuuug

SEQ ID NO: 2516148 - RNA, 19 nt, Artificial Sequence
  Description of Artificial Sequence: Synthetic oligonucleotide
gaaaccccggucuguugua

SEQ ID NO: 2516149 - RNA, 19 nt, Artificial Sequence
  Description of Artificial Sequence: Synthetic oligonucleotide
cugcuguuaaaaccgcugu

SEQ ID NO: 2516150 - RNA, 19 nt, Artificial Sequence
  Description of Artificial Sequence: Synthetic oligonucleotide
ggccccuguagacucgacc

SEQ ID NO: 2516151 - RNA, 19 nt, Artificial Sequence
  Description of Artificial Sequence: Synthetic oligonucleotide
cacgcgggaaaccccgguc

SEQ ID NO: 2516152 - RNA, 19 nt, Artificial Sequence
  Description of Artificial Sequence: Synthetic oligonucleotide
auaccaugaugucgcucua

SEQ ID NO: 2516153 - RNA, 19 nt, Artificial Sequence
  Description of Artificial Sequence: Synthetic oligonucleotide
uugguucguuugggaauca

SEQ ID NO: 2516154 - RNA, 19 nt, Artificial Sequence
  Description of Artificial Sequence: Synthetic oligonucleotide
ccuguagacucgaccccgg

SEQ ID NO: 2516155 - RNA, 19 nt, Artificial Sequence
  Description of Artificial Sequence: Synthetic oligonucleotide
guaaggggaauaccaugau

SEQ ID NO: 2516156 - RNA, 19 nt, Artificial Sequence
  Description of Artificial Sequence: Synthetic oligonucleotide
acgguugacugaaccacaa

SEQ ID NO: 2516157 - RNA, 19 nt, Artificial Sequence
  Description of Artificial Sequence: Synthetic oligonucleotide
ggaaaccccggucuguugu

SEQ ID NO: 2516158 - RNA, 19 nt, Artificial Sequence
  Description of Artificial Sequence: Synthetic oligonucleotide
gacucauauucaucugcuu

SEQ ID NO: 2516159 - RNA, 19 nt, Artificial Sequence
  Description of Artificial Sequence: Synthetic oligonucleotide
gaucgggagcuguuguaau

SEQ ID NO: 2516160 - RNA, 19 nt, Artificial Sequence
  Description of Artificial Sequence: Synthetic oligonucleotide
gaaucucgaucgggagcug

SEQ ID NO: 2516161 - RNA, 19 nt, Artificial Sequence
  Description of Artificial Sequence: Synthetic oligonucleotide
cucgggcuuugaucgcuuc

SEQ ID NO: 2516162 - RNA, 19 nt, Artificial Sequence
  Description of Artificial Sequence: Synthetic oligonucleotide
cccuguagacucgaccccg

SEQ ID NO: 2516163 - RNA, 19 nt, Artificial Sequence
  Description of Artificial Sequence: Synthetic oligonucleotide
acccuuuaggauggccacu

SEQ ID NO: 2516164 - RNA, 19 nt, Artificial Sequence
  Description of Artificial Sequence: Synthetic oligonucleotide
ucgaccccggggccugcug

SEQ ID NO: 2516165 - RNA, 19 nt, Artificial Sequence
  Description of Artificial Sequence: Synthetic oligonucleotide
uugguaguccgggcacggu

SEQ ID NO: 2516166 - RNA, 19 nt, Artificial Sequence
  Description of Artificial Sequence: Synthetic oligonucleotide
gacucgaccccggggccug

SEQ ID NO: 2516167 - RNA, 19 nt, Artificial Sequence
  Description of Artificial Sequence: Synthetic oligonucleotide
guaguccgggcacgguauc

SEQ ID NO: 2516168 - RNA, 19 nt, Artificial Sequence
  Description of Artificial Sequence: Synthetic oligonucleotide
ccaucucccugacucgggc

SEQ ID NO: 2516169 - RNA, 19 nt, Artificial Sequence
  Description of Artificial Sequence: Synthetic oligonucleotide
gggcacgcgggaaaccccg

SEQ ID NO: 2516170 - RNA, 19 nt, Artificial Sequence
  Description of Artificial Sequence: Synthetic oligonucleotide
ccgcuguagaaucucgauc

SEQ ID NO: 2516171 - RNA, 19 nt, Artificial Sequence
  Description of Artificial Sequence: Synthetic oligonucleotide
aaguccucacugacucuuu

SEQ ID NO: 2516172 - RNA, 19 nt, Artificial Sequence
  Description of Artificial Sequence: Synthetic oligonucleotide
cuagcccggccccuguaga

SEQ ID NO: 2516173 - RNA, 19 nt, Artificial Sequence
  Description of Artificial Sequence: Synthetic oligonucleotide
caugaucacugggccagca

SEQ ID NO: 2516174 - RNA, 19 nt, Artificial Sequence
  Description of Artificial Sequence: Synthetic oligonucleotide
auggcgccguccccggggu

SEQ ID NO: 2516175 - RNA, 19 nt, Artificial Sequence
  Description of Artificial Sequence: Synthetic oligonucleotide
cuaccucguuuuguagcuc

SEQ ID NO: 2516176 - RNA, 19 nt, Artificial Sequence
  Description of Artificial Sequence: Synthetic oligonucleotide
caauggcgccguccccggg

SEQ ID NO: 2516177 - RNA, 19 nt, Artificial Sequence
  Description of Artificial Sequence: Synthetic oligonucleotide
cacggggccgggcggcucc

SEQ ID NO: 2516178 - RNA, 19 nt, Artificial Sequence
  Description of Artificial Sequence: Synthetic oligonucleotide
ggacucauauucaucugcu

SEQ ID NO: 2516179 - RNA, 19 nt, Artificial Sequence
  Description of Artificial Sequence: Synthetic oligonucleotide
caucuaaggccagggaagu

SEQ ID NO: 2516180 - RNA, 19 nt, Artificial Sequence
  Description of Artificial Sequence: Synthetic oligonucleotide
agacucgaccccggggccu

SEQ ID NO: 2516181 - RNA, 19 nt, Artificial Sequence
  Description of Artificial Sequence: Synthetic oligonucleotide
acuccaggccguucccgua

SEQ ID NO: 2516182 - RNA, 19 nt, Artificial Sequence
  Description of Artificial Sequence: Synthetic oligonucleotide
gaugccuggucuguugguu

SEQ ID NO: 2516183 - RNA, 19 nt, Artificial Sequence
  Description of Artificial Sequence: Synthetic oligonucleotide
cguagauagaacgggcauc

SEQ ID NO: 2516184 - RNA, 19 nt, Artificial Sequence
  Description of Artificial Sequence: Synthetic oligonucleotide
gggaaaccccggucuguug

SEQ ID NO: 2516185 - RNA, 19 nt, Artificial Sequence
  Description of Artificial Sequence: Synthetic oligonucleotide
ggcgccguccccggggucg

SEQ ID NO: 2516186 - RNA, 19 nt, Artificial Sequence
  Description of Artificial Sequence: Synthetic oligonucleotide
cucguuuuguagcuccuuu

SEQ ID NO: 2516187 - RNA, 19 nt, Artificial Sequence
  Description of Artificial Sequence: Synthetic oligonucleotide
accucguuuuguagcuccu

SEQ ID NO: 2516188 - RNA, 19 nt, Artificial Sequence
  Description of Artificial Sequence: Synthetic oligonucleotide
cccggggucggccucgacc

SEQ ID NO: 2516189 - RNA, 19 nt, Artificial Sequence
  Description of Artificial Sequence: Synthetic oligonucleotide
ccgagccgggcccaggacc

SEQ ID NO: 2516190 - RNA, 19 nt, Artificial Sequence
  Description of Artificial Sequence: Synthetic oligonucleotide
agcccggccccuguagacu

SEQ ID NO: 2516191 - RNA, 19 nt, Artificial Sequence
  Description of Artificial Sequence: Synthetic oligonucleotide
cuucucuaccucguuuugu

SEQ ID NO: 2516192 - RNA, 19 nt, Artificial Sequence
  Description of Artificial Sequence: Synthetic oligonucleotide
cucgaucgggagcuguugu

SEQ ID NO: 2516193 - RNA, 19 nt, Artificial Sequence
  Description of Artificial Sequence: Synthetic oligonucleotide
ccccuguagacucgacccc

SEQ ID NO: 2516194 - RNA, 19 nt, Artificial Sequence
  Description of Artificial Sequence: Synthetic oligonucleotide
ggcacgguaucgggcacgc

SEQ ID NO: 2516195 - RNA, 19 nt, Artificial Sequence
  Description of Artificial Sequence: Synthetic oligonucleotide
guuugggaaucaccuugau

SEQ ID NO: 2516196 - RNA, 19 nt, Artificial Sequence
  Description of Artificial Sequence: Synthetic oligonucleotide
cgagccgggcccaggaccc

SEQ ID NO: 2516197 - RNA, 19 nt, Artificial Sequence
  Description of Artificial Sequence: Synthetic oligonucleotide
gaacgggcaucagccucca

SEQ ID NO: 2516198 - RNA, 19 nt, Artificial Sequence
  Description of Artificial Sequence: Synthetic oligonucleotide
gggcacgguaucgggcacg

SEQ ID NO: 2516199 - RNA, 19 nt, Artificial Sequence
  Description of Artificial Sequence: Synthetic oligonucleotide
caggaccccggagcuucgg

SEQ ID NO: 2516200 - RNA, 19 nt, Artificial Sequence
  Description of Artificial Sequence: Synthetic oligonucleotide
caaccaugaaagugagcuu

SEQ ID NO: 2516201 - RNA, 19 nt, Artificial Sequence
  Description of Artificial Sequence: Synthetic oligonucleotide
ucccugacucgggcuuuga

SEQ ID NO: 2516202 - RNA, 19 nt, Artificial Sequence
  Description of Artificial Sequence: Synthetic oligonucleotide
acucgaccccggggccugc

SEQ ID NO: 2516203 - RNA, 19 nt, Artificial Sequence
  Description of Artificial Sequence: Synthetic oligonucleotide
ggccugcuguuaaaaccgc

SEQ ID NO: 2516204 - RNA, 19 nt, Artificial Sequence
  Description of Artificial Sequence: Synthetic oligonucleotide
ccggggucggccucgacca

SEQ ID NO: 2516205 - RNA, 19 nt, Artificial Sequence
  Description of Artificial Sequence: Synthetic oligonucleotide
cucccugacucgggcuuug

SEQ ID NO: 2516206 - RNA, 19 nt, Artificial Sequence
  Description of Artificial Sequence: Synthetic oligonucleotide
caucucccugacucgggcu

SEQ ID NO: 2516207 - RNA, 19 nt, Artificial Sequence
  Description of Artificial Sequence: Synthetic oligonucleotide
ggaauaccaugaugucgcu

SEQ ID NO: 2516208 - RNA, 19 nt, Artificial Sequence
  Description of Artificial Sequence: Synthetic oligonucleotide
ccucaauggcgccgucccc

SEQ ID NO: 2516209 - RNA, 19 nt, Artificial Sequence
  Description of Artificial Sequence: Synthetic oligonucleotide
ccacuaaauuugucacaga

SEQ ID NO: 2516210 - RNA, 19 nt, Artificial Sequence
  Description of Artificial Sequence: Synthetic oligonucleotide
gccucgaccagucccggcu

SEQ ID NO: 2516211 - RNA, 19 nt, Artificial Sequence
  Description of Artificial Sequence: Synthetic oligonucleotide
gccgggcggcuccucuucg

SEQ ID NO: 2516212 - RNA, 19 nt, Artificial Sequence
  Description of Artificial Sequence: Synthetic oligonucleotide
ucgcucuagcccggccccu

SEQ ID NO: 2516213 - RNA, 19 nt, Artificial Sequence
  Description of Artificial Sequence: Synthetic oligonucleotide
gcuccggcagcagcucucc

SEQ ID NO: 2516214 - RNA, 19 nt, Artificial Sequence
  Description of Artificial Sequence: Synthetic oligonucleotide
ucgaccagucccggcucuu

SEQ ID NO: 2516215 - RNA, 19 nt, Artificial Sequence
  Description of Artificial Sequence: Synthetic oligonucleotide
gguaucgggcacgcgggaa

SEQ ID NO: 2516216 - RNA, 19 nt, Artificial Sequence
  Description of Artificial Sequence: Synthetic oligonucleotide
ccaggaccccggagcuucg

SEQ ID NO: 2516217 - RNA, 19 nt, Artificial Sequence
  Description of Artificial Sequence: Synthetic oligonucleotide
gguaguccgggcacgguau

SEQ ID NO: 2516218 - RNA, 19 nt, Artificial Sequence
  Description of Artificial Sequence: Synthetic oligonucleotide
cuagcuccggguccucaau

SEQ ID NO: 2516219 - RNA, 19 nt, Artificial Sequence
  Description of Artificial Sequence: Synthetic oligonucleotide
gcuucuagcuccggguccu

SEQ ID NO: 2516220 - RNA, 19 nt, Artificial Sequence
  Description of Artificial Sequence: Synthetic oligonucleotide
gcccggccccuguagacuc

SEQ ID NO: 2516221 - RNA, 19 nt, Artificial Sequence
  Description of Artificial Sequence: Synthetic oligonucleotide
ggccucgaccagucccggc

SEQ ID NO: 2516222 - RNA, 19 nt, Artificial Sequence
  Description of Artificial Sequence: Synthetic oligonucleotide
cgguugacugaaccacaac

SEQ ID NO: 2516223 - RNA, 19 nt, Artificial Sequence
  Description of Artificial Sequence: Synthetic oligonucleotide
ggucggccucgaccagucc

SEQ ID NO: 2516224 - RNA, 19 nt, Artificial Sequence
  Description of Artificial Sequence: Synthetic oligonucleotide
ccgggcggcuccucuucgg

SEQ ID NO: 2516225 - RNA, 19 nt, Artificial Sequence
  Description of Artificial Sequence: Synthetic oligonucleotide
gcaaacccuuuaggauggc

SEQ ID NO: 2516226 - RNA, 19 nt, Artificial Sequence
  Description of Artificial Sequence: Synthetic oligonucleotide
cuggucuguugguucguuu

SEQ ID NO: 2516227 - RNA, 19 nt, Artificial Sequence
  Description of Artificial Sequence: Synthetic oligonucleotide
cggggccugcuguuaaaac

SEQ ID NO: 2516228 - RNA, 19 nt, Artificial Sequence
  Description of Artificial Sequence: Synthetic oligonucleotide
ccaugaaagugagcuucca

SEQ ID NO: 2516229 - RNA, 19 nt, Artificial Sequence
  Description of Artificial Sequence: Synthetic oligonucleotide
ccucgaccagucccggcuc

SEQ ID NO: 2516230 - RNA, 19 nt, Artificial Sequence
  Description of Artificial Sequence: Synthetic oligonucleotide
ccggguccucaauggcgcc

SEQ ID NO: 2516231 - RNA, 19 nt, Artificial Sequence
  Description of Artificial Sequence: Synthetic oligonucleotide
cucgaccagucccggcucu

SEQ ID NO: 2516232 - RNA, 19 nt, Artificial Sequence
  Description of Artificial Sequence: Synthetic oligonucleotide
cccuuuaggauggccacua

SEQ ID NO: 2516233 - RNA, 19 nt, Artificial Sequence
  Description of Artificial Sequence: Synthetic oligonucleotide
ccucuaaacagggacucau

SEQ ID NO: 2516234 - RNA, 19 nt, Artificial Sequence
  Description of Artificial Sequence: Synthetic oligonucleotide
cccggccccuguagacucg

SEQ ID NO: 2516235 - RNA, 19 nt, Artificial Sequence
  Description of Artificial Sequence: Synthetic oligonucleotide
uggcgccguccccgggguc

SEQ ID NO: 2516236 - RNA, 19 nt, Artificial Sequence
  Description of Artificial Sequence: Synthetic oligonucleotide
cgggcacgcgggaaacccc

SEQ ID NO: 2516237 - RNA, 19 nt, Artificial Sequence
  Description of Artificial Sequence: Synthetic oligonucleotide
cucuagcccggccccugua

SEQ ID NO: 2516238 - RNA, 19 nt, Artificial Sequence
  Description of Artificial Sequence: Synthetic oligonucleotide
ggccagggaaguccucacu

SEQ ID NO: 2516239 - RNA, 19 nt, Artificial Sequence
  Description of Artificial Sequence: Synthetic oligonucleotide
cgcgggaaaccccggucug

SEQ ID NO: 2516240 - RNA, 19 nt, Artificial Sequence
  Description of Artificial Sequence: Synthetic oligonucleotide
gcacgguaucgggcacgcg

SEQ ID NO: 2516241 - RNA, 19 nt, Artificial Sequence
  Description of Artificial Sequence: Synthetic oligonucleotide
ccuuuaggauggccacuaa

SEQ ID NO: 2516242 - RNA, 19 nt, Artificial Sequence
  Description of Artificial Sequence: Synthetic oligonucleotide
gaccccggggccugcuguu

SEQ ID NO: 2516243 - RNA, 19 nt, Artificial Sequence
  Description of Artificial Sequence: Synthetic oligonucleotide
uccccggggucggccucga

SEQ ID NO: 2516244 - RNA, 19 nt, Artificial Sequence
  Description of Artificial Sequence: Synthetic oligonucleotide
cgaucgggagcuguuguaa

SEQ ID NO: 2516245 - RNA, 19 nt, Artificial Sequence
  Description of Artificial Sequence: Synthetic oligonucleotide
ggguccucaauggcgccgu

SEQ ID NO: 2516246 - RNA, 19 nt, Artificial Sequence
  Description of Artificial Sequence: Synthetic oligonucleotide
gggcacggggccgggcggc

SEQ ID NO: 2516247 - RNA, 19 nt, Artificial Sequence
  Description of Artificial Sequence: Synthetic oligonucleotide
gccugcuguuaaaaccgcu

SEQ ID NO: 2516248 - RNA, 19 nt, Artificial Sequence
  Description of Artificial Sequence: Synthetic oligonucleotide
accccggggccugcuguua

SEQ ID NO: 2516249 - RNA, 19 nt, Artificial Sequence
  Description of Artificial Sequence: Synthetic oligonucleotide
gccguccccggggucggcc

SEQ ID NO: 2516250 - RNA, 19 nt, Artificial Sequence
  Description of Artificial Sequence: Synthetic oligonucleotide
gcacgcgggaaaccccggu

SEQ ID NO: 2516251 - RNA, 19 nt, Artificial Sequence
  Description of Artificial Sequence: Synthetic oligonucleotide
gcgccguccccggggucgg

SEQ ID NO: 2516252 - RNA, 19 nt, Artificial Sequence
  Description of Artificial Sequence: Synthetic oligonucleotide
ccccggucuguuguacuga

SEQ ID NO: 2516253 - RNA, 19 nt, Artificial Sequence
  Description of Artificial Sequence: Synthetic oligonucleotide
acggggccgggcggcuccu

SEQ ID NO: 2516254 - RNA, 19 nt, Artificial Sequence
  Description of Artificial Sequence: Synthetic oligonucleotide
gcucuagcccggccccugu

SEQ ID NO: 2516255 - RNA, 19 nt, Artificial Sequence
  Description of Artificial Sequence: Synthetic oligonucleotide
cgggcccaggaccccggag

SEQ ID NO: 2516256 - RNA, 19 nt, Artificial Sequence
  Description of Artificial Sequence: Synthetic oligonucleotide
ggggucggccucgaccagu

SEQ ID NO: 2516257 - RNA, 19 nt, Artificial Sequence
  Description of Artificial Sequence: Synthetic oligonucleotide
cccggucuguuguacugau

SEQ ID NO: 2516258 - RNA, 19 nt, Artificial Sequence
  Description of Artificial Sequence: Synthetic oligonucleotide
cgaccagucccggcucuuc

SEQ ID NO: 2516259 - RNA, 19 nt, Artificial Sequence
  Description of Artificial Sequence: Synthetic oligonucleotide
ccggggccugcuguuaaaa

SEQ ID NO: 2516260 - RNA, 19 nt, Artificial Sequence
  Description of Artificial Sequence: Synthetic oligonucleotide
ggcucccgagccgggccca

SEQ ID NO: 2516261 - RNA, 19 nt, Artificial Sequence
  Description of Artificial Sequence: Synthetic oligonucleotide
cggccucgaccagucccgg

SEQ ID NO: 2516262 - RNA, 19 nt, Artificial Sequence
  Description of Artificial Sequence: Synthetic oligonucleotide
cgguaucgggcacgcggga

SEQ ID NO: 2516263 - RNA, 19 nt, Artificial Sequence
  Description of Artificial Sequence: Synthetic oligonucleotide
gggcaucagccuccaucuu

SEQ ID NO: 2516264 - RNA, 19 nt, Artificial Sequence
  Description of Artificial Sequence: Synthetic oligonucleotide
cggggucggccucgaccag

SEQ ID NO: 2516265 - RNA, 19 nt, Artificial Sequence
  Description of Artificial Sequence: Synthetic oligonucleotide
cccugacucgggcuuugau

SEQ ID NO: 2516266 - RNA, 19 nt, Artificial Sequence
  Description of Artificial Sequence: Synthetic oligonucleotide
cucgaccccggggccugcu

SEQ ID NO: 2516267 - RNA, 19 nt, Artificial Sequence
  Description of Artificial Sequence: Synthetic oligonucleotide
cggccccuguagacucgac

SEQ ID NO: 2516268 - RNA, 19 nt, Artificial Sequence
  Description of Artificial Sequence: Synthetic oligonucleotide
ccucguuuuguagcuccuu

SEQ ID NO: 2516269 - RNA, 19 nt, Artificial Sequence
  Description of Artificial Sequence: Synthetic oligonucleotide
gcacggggccgggcggcuc

SEQ ID NO: 2516270 - RNA, 19 nt, Artificial Sequence
  Description of Artificial Sequence: Synthetic oligonucleotide
cgaccccggggccugcugu

SEQ ID NO: 2516271 - RNA, 19 nt, Artificial Sequence
  Description of Artificial Sequence: Synthetic oligonucleotide
ccccggggucggccucgac

SEQ ID NO: 2516272 - RNA, 19 nt, Artificial Sequence
  Description of Artificial Sequence: Synthetic oligonucleotide
cgggaaaccccggucuguu

SEQ ID NO: 2516273 - RNA, 19 nt, Artificial Sequence
  Description of Artificial Sequence: Synthetic oligonucleotide
ccucagacuccaggccguu

SEQ ID NO: 2516274 - RNA, 19 nt, Artificial Sequence
  Description of Artificial Sequence: Synthetic oligonucleotide
aacacauguaaauaaaggg

SEQ ID NO: 2516275 - RNA, 19 nt, Artificial Sequence
  Description of Artificial Sequence: Synthetic oligonucleotide
uuuuauucuaguuagacca

SEQ ID NO: 2516276 - RNA, 19 nt, Artificial Sequence
  Description of Artificial Sequence: Synthetic oligonucleotide
auuuacuagauauaacucc

SEQ ID NO: 2516277 - RNA, 19 nt, Artificial Sequence
  Description of Artificial Sequence: Synthetic oligonucleotide
ucuaguuagaccaagcaag

SEQ ID NO: 2516278 - RNA, 19 nt, Artificial Sequence
  Description of Artificial Sequence: Synthetic oligonucleotide
uuauuuacuagauauaacu

SEQ ID NO: 2516279 - RNA, 19 nt, Artificial Sequence
  Description of Artificial Sequence: Synthetic oligonucleotide
uuaauguuuucauuaaggg

SEQ ID NO: 2516280 - RNA, 19 nt, Artificial Sequence
  Description of Artificial Sequence: Synthetic oligonucleotide
aguguuaaggaacuugugc

SEQ ID NO: 2516281 - RNA, 19 nt, Artificial Sequence
  Description of Artificial Sequence: Synthetic oligonucleotide
uguaguuuagccuuuuggg

SEQ ID NO: 2516282 - RNA, 19 nt, Artificial Sequence
  Description of Artificial Sequence: Synthetic oligonucleotide
aaagacaugauguagcuaa

SEQ ID NO: 2516283 - RNA, 19 nt, Artificial Sequence
  Description of Artificial Sequence: Synthetic oligonucleotide
uguuucaaagacaugaugu

SEQ ID NO: 2516284 - RNA, 19 nt, Artificial Sequence
  Description of Artificial Sequence: Synthetic oligonucleotide
uuuacuagauauaacuccc

SEQ ID NO: 2516285 - RNA, 19 nt, Artificial Sequence
  Description of Artificial Sequence: Synthetic oligonucleotide
guuuaugaaaugcugaacc

SEQ ID NO: 2516286 - RNA, 19 nt, Artificial Sequence
  Description of Artificial Sequence: Synthetic oligonucleotide
acacuaagaauucugcagc

SEQ ID NO: 2516287 - RNA, 19 nt, Artificial Sequence
  Description of Artificial Sequence: Synthetic oligonucleotide
uguuuguacacuaagaauu

SEQ ID NO: 2516288 - RNA, 19 nt, Artificial Sequence
  Description of Artificial Sequence: Synthetic oligonucleotide
auguaauugacccaaaaca

SEQ ID NO: 2516289 - RNA, 19 nt, Artificial Sequence
  Description of Artificial Sequence: Synthetic oligonucleotide
ugaaccucagguuucauag

SEQ ID NO: 2516290 - RNA, 19 nt, Artificial Sequence
  Description of Artificial Sequence: Synthetic oligonucleotide
aaacacauguaaauaaagg

SEQ ID NO: 2516291 - RNA, 19 nt, Artificial Sequence
  Description of Artificial Sequence: Synthetic oligonucleotide
gauguagcuaagaacaugg

SEQ ID NO: 2516292 - RNA, 19 nt, Artificial Sequence
  Description of Artificial Sequence: Synthetic oligonucleotide
aaaacacgugccuuuuagc

SEQ ID NO: 2516293 - RNA, 19 nt, Artificial Sequence
  Description of Artificial Sequence: Synthetic oligonucleotide
uauuuaauugcuauuuuaa

SEQ ID NO: 2516294 - RNA, 19 nt, Artificial Sequence
  Description of Artificial Sequence: Synthetic oligonucleotide
acacauguaaauaaagggc

SEQ ID NO: 2516295 - RNA, 19 nt, Artificial Sequence
  Description of Artificial Sequence: Synthetic oligonucleotide
guuaauguuuucauuaagg

SEQ ID NO: 2516296 - RNA, 19 nt, Artificial Sequence
  Description of Artificial Sequence: Synthetic oligonucleotide
aaccucagguuucauagac

SEQ ID NO: 2516297 - RNA, 19 nt, Artificial Sequence
  Description of Artificial Sequence: Synthetic oligonucleotide
uuguaguuuagccuuuugg

SEQ ID NO: 2516298 - RNA, 19 nt, Artificial Sequence
  Description of Artificial Sequence: Synthetic oligonucleotide
uucaaagacaugauguagc

SEQ ID NO: 2516299 - RNA, 19 nt, Artificial Sequence
  Description of Artificial Sequence: Synthetic oligonucleotide
guguuaaggaacuugugcg

SEQ ID NO: 2516300 - RNA, 19 nt, Artificial Sequence
  Description of Artificial Sequence: Synthetic oligonucleotide
ucauuaagggcacacauuc

SEQ ID NO: 2516301 - RNA, 19 nt, Artificial Sequence
  Description of Artificial Sequence: Synthetic oligonucleotide
uguacacuaagaauucugc

SEQ ID NO: 2516302 - RNA, 19 nt, Artificial Sequence
  Description of Artificial Sequence: Synthetic oligonucleotide
aaacacgugccuuuuagcu

SEQ ID NO: 2516303 - RNA, 19 nt, Artificial Sequence
  Description of Artificial Sequence: Synthetic oligonucleotide
uuagucuuguaguuuagcc

SEQ ID NO: 2516304 - RNA, 19 nt, Artificial Sequence
  Description of Artificial Sequence: Synthetic oligonucleotide
agcuuuagaacccaaguug

SEQ ID NO: 2516305 - RNA, 19 nt, Artificial Sequence
  Description of Artificial Sequence: Synthetic oligonucleotide
cauguucagcuuuagaacc

SEQ ID NO: 2516306 - RNA, 19 nt, Artificial Sequence
  Description of Artificial Sequence: Synthetic oligonucleotide
guagcuaagaacauggccc

SEQ ID NO: 2516307 - RNA, 19 nt, Artificial Sequence
  Description of Artificial Sequence: Synthetic oligonucleotide
uguuaaggaacuugugcgg

SEQ ID NO: 2516308 - RNA, 19 nt, Artificial Sequence
  Description of Artificial Sequence: Synthetic oligonucleotide
guaguuuagccuuuugggg

SEQ ID NO: 2516309 - RNA, 19 nt, Artificial Sequence
  Description of Artificial Sequence: Synthetic oligonucleotide
aaugcugaaccucagguuu

SEQ ID NO: 2516310 - RNA, 19 nt, Artificial Sequence
  Description of Artificial Sequence: Synthetic oligonucleotide
acacgugccuuuuagcugc

SEQ ID NO: 2516311 - RNA, 19 nt, Artificial Sequence
  Description of Artificial Sequence: Synthetic oligonucleotide
gaaaacacgugccuuuuag

SEQ ID NO: 2516312 - RNA, 19 nt, Artificial Sequence
  Description of Artificial Sequence: Synthetic oligonucleotide
cuuuuauucuaguuagacc

SEQ ID NO: 2516313 - RNA, 19 nt, Artificial Sequence
  Description of Artificial Sequence: Synthetic oligonucleotide
agaccaagcaaguauccac

SEQ ID NO: 2516314 - RNA, 19 nt, Artificial Sequence
  Description of Artificial Sequence: Synthetic oligonucleotide
caagcaaguauccacauuc

SEQ ID NO: 2516315 - RNA, 19 nt, Artificial Sequence
  Description of Artificial Sequence: Synthetic oligonucleotide
uaguuuagccuuuuggggc

SEQ ID NO: 2516316 - RNA, 19 nt, Artificial Sequence
  Description of Artificial Sequence: Synthetic oligonucleotide
uuagaacccaaguugcugc

SEQ ID NO: 2516317 - RNA, 19 nt, Artificial Sequence
  Description of Artificial Sequence: Synthetic oligonucleotide
uaauugacccaaaacacau

SEQ ID NO: 2516318 - RNA, 19 nt, Artificial Sequence
  Description of Artificial Sequence: Synthetic oligonucleotide
uugacucucaggaaauugc

SEQ ID NO: 2516319 - RNA, 19 nt, Artificial Sequence
  Description of Artificial Sequence: Synthetic oligonucleotide
uuuaugaaaugcugaaccu

SEQ ID NO: 2516320 - RNA, 19 nt, Artificial Sequence
  Description of Artificial Sequence: Synthetic oligonucleotide
auugacccaaaacacaugu

SEQ ID NO: 2516321 - RNA, 19 nt, Artificial Sequence
  Description of Artificial Sequence: Synthetic oligonucleotide
ugacccaaaacacauguaa

SEQ ID NO: 2516322 - RNA, 19 nt, Artificial Sequence
  Description of Artificial Sequence: Synthetic oligonucleotide
uaauugcuauuuuaaaacu

SEQ ID NO: 2516323 - RNA, 19 nt, Artificial Sequence
  Description of Artificial Sequence: Synthetic oligonucleotide
aaagguuuaugaaaugcug

SEQ ID NO: 2516324 - RNA, 19 nt, Artificial Sequence
  Description of Artificial Sequence: Synthetic oligonucleotide
ucauguucagcuuuagaac

SEQ ID NO: 2516325 - RNA, 19 nt, Artificial Sequence
  Description of Artificial Sequence: Synthetic oligonucleotide
ucagcuuuagaacccaagu

SEQ ID NO: 2516326 - RNA, 19 nt, Artificial Sequence
  Description of Artificial Sequence: Synthetic oligonucleotide
gauuguguugacucucagg

SEQ ID NO: 2516327 - RNA, 19 nt, Artificial Sequence
  Description of Artificial Sequence: Synthetic oligonucleotide
acuugugcgguugacaugg

SEQ ID NO: 2516328 - RNA, 19 nt, Artificial Sequence
  Description of Artificial Sequence: Synthetic oligonucleotide
uucaacagcucaaggagug

SEQ ID NO: 2516329 - RNA, 19 nt, Artificial Sequence
  Description of Artificial Sequence: Synthetic oligonucleotide
uuucauuaagggcacacau

SEQ ID NO: 2516330 - RNA, 19 nt, Artificial Sequence
  Description of Artificial Sequence: Synthetic oligonucleotide
aaaagguuuaugaaaugcu

SEQ ID NO: 2516331 - RNA, 19 nt, Artificial Sequence
  Description of Artificial Sequence: Synthetic oligonucleotide
uuguacacuaagaauucug

SEQ ID NO: 2516332 - RNA, 19 nt, Artificial Sequence
  Description of Artificial Sequence: Synthetic oligonucleotide
uuugcuaaucacuuguuua

SEQ ID NO: 2516333 - RNA, 19 nt, Artificial Sequence
  Description of Artificial Sequence: Synthetic oligonucleotide
ucaaggagugcacccacgg

SEQ ID NO: 2516334 - RNA, 19 nt, Artificial Sequence
  Description of Artificial Sequence: Synthetic oligonucleotide
aaggagugcacccacggcu

SEQ ID NO: 2516335 - RNA, 19 nt, Artificial Sequence
  Description of Artificial Sequence: Synthetic oligonucleotide
aaauacaaccugguuaaug

SEQ ID NO: 2516336 - RNA, 19 nt, Artificial Sequence
  Description of Artificial Sequence: Synthetic oligonucleotide
gaugcuuuuauucuaguua

SEQ ID NO: 2516337 - RNA, 19 nt, Artificial Sequence
  Description of Artificial Sequence: Synthetic oligonucleotide
uauucuaguuagaccaagc

SEQ ID NO: 2516338 - RNA, 19 nt, Artificial Sequence
  Description of Artificial Sequence: Synthetic oligonucleotide
aguuagaccaagcaaguau

SEQ ID NO: 2516339 - RNA, 19 nt, Artificial Sequence
  Description of Artificial Sequence: Synthetic oligonucleotide
gagcauaugccagaagucg

SEQ ID NO: 2516340 - RNA, 19 nt, Artificial Sequence
  Description of Artificial Sequence: Synthetic oligonucleotide
aacaaaguccacagaugcc

SEQ ID NO: 2516341 - RNA, 19 nt, Artificial Sequence
  Description of Artificial Sequence: Synthetic oligonucleotide
uggcacuuuagucuuguag

SEQ ID NO: 2516342 - RNA, 19 nt, Artificial Sequence
  Description of Artificial Sequence: Synthetic oligonucleotide
uucuaguuagaccaagcaa

SEQ ID NO: 2516343 - RNA, 19 nt, Artificial Sequence
  Description of Artificial Sequence: Synthetic oligonucleotide
aucuucaacagcucaagga

SEQ ID NO: 2516344 - RNA, 19 nt, Artificial Sequence
  Description of Artificial Sequence: Synthetic oligonucleotide
ucaaagacaugauguagcu

SEQ ID NO: 2516345 - RNA, 19 nt, Artificial Sequence
  Description of Artificial Sequence: Synthetic oligonucleotide
uaagaauucugcagcagaa

SEQ ID NO: 2516346 - RNA, 19 nt, Artificial Sequence
  Description of Artificial Sequence: Synthetic oligonucleotide
uuagaccaagcaaguaucc

SEQ ID NO: 2516347 - RNA, 19 nt, Artificial Sequence
  Description of Artificial Sequence: Synthetic oligonucleotide
uuagcugccccuuggacca

SEQ ID NO: 2516348 - RNA, 19 nt, Artificial Sequence
  Description of Artificial Sequence: Synthetic oligonucleotide
uauccacauucuuaguucc

SEQ ID NO: 2516349 - RNA, 19 nt, Artificial Sequence
  Description of Artificial Sequence: Synthetic oligonucleotide
acuagauauaacucccuca

SEQ ID NO: 2516350 - RNA, 19 nt, Artificial Sequence
  Description of Artificial Sequence: Synthetic oligonucleotide
uuaagggcacacauucuug

SEQ ID NO: 2516351 - RNA, 19 nt, Artificial Sequence
  Description of Artificial Sequence: Synthetic oligonucleotide
aacaugcauguaauugacc

SEQ ID NO: 2516352 - RNA, 19 nt, Artificial Sequence
  Description of Artificial Sequence: Synthetic oligonucleotide
uuuagaacccaaguugcug

SEQ ID NO: 2516353 - RNA, 19 nt, Artificial Sequence
  Description of Artificial Sequence: Synthetic oligonucleotide
auucuaguuagaccaagca

SEQ ID NO: 2516354 - RNA, 19 nt, Artificial Sequence
  Description of Artificial Sequence: Synthetic oligonucleotide
acacauucuugcuauggag

SEQ ID NO: 2516355 - RNA, 19 nt, Artificial Sequence
  Description of Artificial Sequence: Synthetic oligonucleotide
uagucuuguaguuuagccu

SEQ ID NO: 2516356 - RNA, 19 nt, Artificial Sequence
  Description of Artificial Sequence: Synthetic oligonucleotide
uuggcgauuguguugacuc

SEQ ID NO: 2516357 - RNA, 19 nt, Artificial Sequence
  Description of Artificial Sequence: Synthetic oligonucleotide
uguauauuuaauugcuauu

SEQ ID NO: 2516358 - RNA, 19 nt, Artificial Sequence
  Description of Artificial Sequence: Synthetic oligonucleotide
uugccgacaaauacaaccu

SEQ ID NO: 2516359 - RNA, 19 nt, Artificial Sequence
  Description of Artificial Sequence: Synthetic oligonucleotide
aagguuuaugaaaugcuga

SEQ ID NO: 2516360 - RNA, 19 nt, Artificial Sequence
  Description of Artificial Sequence: Synthetic oligonucleotide
uuuggggcuuauuuacuag

SEQ ID NO: 2516361 - RNA, 19 nt, Artificial Sequence
  Description of Artificial Sequence: Synthetic oligonucleotide
uccacagaugccccugugg

SEQ ID NO: 2516362 - RNA, 19 nt, Artificial Sequence
  Description of Artificial Sequence: Synthetic oligonucleotide
uaagggcacacauucuugc

SEQ ID NO: 2516363 - RNA, 19 nt, Artificial Sequence
  Description of Artificial Sequence: Synthetic oligonucleotide
uugcuaaucacuuguuuaa

SEQ ID NO: 2516364 - RNA, 19 nt, Artificial Sequence
  Description of Artificial Sequence: Synthetic oligonucleotide
uuuguauauuuaauugcua

SEQ ID NO: 2516365 - RNA, 19 nt, Artificial Sequence
  Description of Artificial Sequence: Synthetic oligonucleotide
agucaggguaucuucaaca

SEQ ID NO: 2516366 - RNA, 19 nt, Artificial Sequence
  Description of Artificial Sequence: Synthetic oligonucleotide
ggaaauugccgacaaauac

SEQ ID NO: 2516367 - RNA, 19 nt, Artificial Sequence
  Description of Artificial Sequence: Synthetic oligonucleotide
aaauugccgacaaauacaa

SEQ ID NO: 2516368 - RNA, 19 nt, Artificial Sequence
  Description of Artificial Sequence: Synthetic oligonucleotide
agacuguuuguacacuaag

SEQ ID NO: 2516369 - RNA, 19 nt, Artificial Sequence
  Description of Artificial Sequence: Synthetic oligonucleotide
auuaagggcacacauucuu

SEQ ID NO: 2516370 - RNA, 19 nt, Artificial Sequence
  Description of Artificial Sequence: Synthetic oligonucleotide
cucuggguaacagucaggg

SEQ ID NO: 2516371 - RNA, 19 nt, Artificial Sequence
  Description of Artificial Sequence: Synthetic oligonucleotide
uuuauucuaguuagaccaa

SEQ ID NO: 2516372 - RNA, 19 nt, Artificial Sequence
  Description of Artificial Sequence: Synthetic oligonucleotide
agaacauggcccuaccagu

SEQ ID NO: 2516373 - RNA, 19 nt, Artificial Sequence
  Description of Artificial Sequence: Synthetic oligonucleotide
acuuuagucuuguaguuua

SEQ ID NO: 2516374 - RNA, 19 nt, Artificial Sequence
  Description of Artificial Sequence: Synthetic oligonucleotide
acagaugccccuguggagg

SEQ ID NO: 2516375 - RNA, 19 nt, Artificial Sequence
  Description of Artificial Sequence: Synthetic oligonucleotide
agaauucugcagcagaaua

SEQ ID NO: 2516376 - RNA, 19 nt, Artificial Sequence
  Description of Artificial Sequence: Synthetic oligonucleotide
uuaugaaaugcugaaccuc

SEQ ID NO: 2516377 - RNA, 19 nt, Artificial Sequence
  Description of Artificial Sequence: Synthetic oligonucleotide
uacuagauauaacucccuc

SEQ ID NO: 2516378 - RNA, 19 nt, Artificial Sequence
  Description of Artificial Sequence: Synthetic oligonucleotide
aauugcuauuuuaaaacuu

SEQ ID NO: 2516379 - RNA, 19 nt, Artificial Sequence
  Description of Artificial Sequence: Synthetic oligonucleotide
agcauaugccagaagucgc

SEQ ID NO: 2516380 - RNA, 19 nt, Artificial Sequence
  Description of Artificial Sequence: Synthetic oligonucleotide
guauccacauucuuaguuc

SEQ ID NO: 2516381 - RNA, 19 nt, Artificial Sequence
  Description of Artificial Sequence: Synthetic oligonucleotide
gacaugauguagcuaagaa

SEQ ID NO: 2516382 - RNA, 19 nt, Artificial Sequence
  Description of Artificial Sequence: Synthetic oligonucleotide
uuuugcuaaucacuuguuu

SEQ ID NO: 2516383 - RNA, 19 nt, Artificial Sequence
  Description of Artificial Sequence: Synthetic oligonucleotide
aauaaagggcagauuuuga

SEQ ID NO: 2516384 - RNA, 19 nt, Artificial Sequence
  Description of Artificial Sequence: Synthetic oligonucleotide
uuacuagauauaacucccu

SEQ ID NO: 2516385 - RNA, 19 nt, Artificial Sequence
  Description of Artificial Sequence: Synthetic oligonucleotide
cuagauauaacucccucaa

SEQ ID NO: 2516386 - RNA, 19 nt, Artificial Sequence
  Description of Artificial Sequence: Synthetic oligonucleotide
gucaggguaucuucaacag

SEQ ID NO: 2516387 - RNA, 19 nt, Artificial Sequence
  Description of Artificial Sequence: Synthetic oligonucleotide
gaacccaaguugcugcaag

SEQ ID NO: 2516388 - RNA, 19 nt, Artificial Sequence
  Description of Artificial Sequence: Synthetic oligonucleotide
uaagaacauggcccuacca

SEQ ID NO: 2516389 - RNA, 19 nt, Artificial Sequence
  Description of Artificial Sequence: Synthetic oligonucleotide
uuuucauuaagggcacaca

SEQ ID NO: 2516390 - RNA, 19 nt, Artificial Sequence
  Description of Artificial Sequence: Synthetic oligonucleotide
agguuucauagacuguuug

SEQ ID NO: 2516391 - RNA, 19 nt, Artificial Sequence
  Description of Artificial Sequence: Synthetic oligonucleotide
aguuuagccuuuuggggcu

SEQ ID NO: 2516392 - RNA, 19 nt, Artificial Sequence
  Description of Artificial Sequence: Synthetic oligonucleotide
agaacaccccugcuguuuc

SEQ ID NO: 2516393 - RNA, 19 nt, Artificial Sequence
  Description of Artificial Sequence: Synthetic oligonucleotide
auguucagcuuuagaaccc

SEQ ID NO: 2516394 - RNA, 19 nt, Artificial Sequence
  Description of Artificial Sequence: Synthetic oligonucleotide
cuaagaauucugcagcaga

SEQ ID NO: 2516395 - RNA, 19 nt, Artificial Sequence
  Description of Artificial Sequence: Synthetic oligonucleotide
uucauuaagggcacacauu

SEQ ID NO: 2516396 - RNA, 19 nt, Artificial Sequence
  Description of Artificial Sequence: Synthetic oligonucleotide
uagcuaagaacauggcccu

SEQ ID NO: 2516397 - RNA, 19 nt, Artificial Sequence
  Description of Artificial Sequence: Synthetic oligonucleotide
uaaaacuuuaaugcauuuu

SEQ ID NO: 2516398 - RNA, 19 nt, Artificial Sequence
  Description of Artificial Sequence: Synthetic oligonucleotide
uggguaacagucaggguau

SEQ ID NO: 2516399 - RNA, 19 nt, Artificial Sequence
  Description of Artificial Sequence: Synthetic oligonucleotide
agagcauaugccagaaguc

SEQ ID NO: 2516400 - RNA, 19 nt, Artificial Sequence
  Description of Artificial Sequence: Synthetic oligonucleotide
uuuuggggcuuauuuacua

SEQ ID NO: 2516401 - RNA, 19 nt, Artificial Sequence
  Description of Artificial Sequence: Synthetic oligonucleotide
aaguccucuggguaacagu

SEQ ID NO: 2516402 - RNA, 19 nt, Artificial Sequence
  Description of Artificial Sequence: Synthetic oligonucleotide
agggagaacaccccugcug

SEQ ID NO: 2516403 - RNA, 19 nt, Artificial Sequence
  Description of Artificial Sequence: Synthetic oligonucleotide
aacccucgugcucugaaaa

SEQ ID NO: 2516404 - RNA, 19 nt, Artificial Sequence
  Description of Artificial Sequence: Synthetic oligonucleotide
uguggagguuucaggaagu

SEQ ID NO: 2516405 - RNA, 19 nt, Artificial Sequence
  Description of Artificial Sequence: Synthetic oligonucleotide
guuagaccaagcaaguauc

SEQ ID NO: 2516406 - RNA, 19 nt, Artificial Sequence
  Description of Artificial Sequence: Synthetic oligonucleotide
aagggcacacauucuugcu

SEQ ID NO: 2516407 - RNA, 19 nt, Artificial Sequence
  Description of Artificial Sequence: Synthetic oligonucleotide
ggcccuaccaguguuaagg

SEQ ID NO: 2516408 - RNA, 19 nt, Artificial Sequence
  Description of Artificial Sequence: Synthetic oligonucleotide
cuuuagucuuguaguuuag

SEQ ID NO: 2516409 - RNA, 19 nt, Artificial Sequence
  Description of Artificial Sequence: Synthetic oligonucleotide
guaauccagagcauaugcc

SEQ ID NO: 2516410 - RNA, 19 nt, Artificial Sequence
  Description of Artificial Sequence: Synthetic oligonucleotide
aacccaaguugcugcaaga

SEQ ID NO: 2516411 - RNA, 19 nt, Artificial Sequence
  Description of Artificial Sequence: Synthetic oligonucleotide
ccuaccaguguuaaggaac

SEQ ID NO: 2516412 - RNA, 19 nt, Artificial Sequence
  Description of Artificial Sequence: Synthetic oligonucleotide
aauugacccaaaacacaug

SEQ ID NO: 2516413 - RNA, 19 nt, Artificial Sequence
  Description of Artificial Sequence: Synthetic oligonucleotide
acuaagaauucugcagcag

SEQ ID NO: 2516414 - RNA, 19 nt, Artificial Sequence
  Description of Artificial Sequence: Synthetic oligonucleotide
guacacuaagaauucugca

SEQ ID NO: 2516415 - RNA, 19 nt, Artificial Sequence
  Description of Artificial Sequence: Synthetic oligonucleotide
uagacuguuuguacacuaa

SEQ ID NO: 2516416 - RNA, 19 nt, Artificial Sequence
  Description of Artificial Sequence: Synthetic oligonucleotide
guuucaaagacaugaugua

SEQ ID NO: 2516417 - RNA, 19 nt, Artificial Sequence
  Description of Artificial Sequence: Synthetic oligonucleotide
guugacucucaggaaauug

SEQ ID NO: 2516418 - RNA, 19 nt, Artificial Sequence
  Description of Artificial Sequence: Synthetic oligonucleotide
ugcuuuuauucuaguuaga

SEQ ID NO: 2516419 - RNA, 19 nt, Artificial Sequence
  Description of Artificial Sequence: Synthetic oligonucleotide
guuuguacacuaagaauuc

SEQ ID NO: 2516420 - RNA, 19 nt, Artificial Sequence
  Description of Artificial Sequence: Synthetic oligonucleotide
aauugccgacaaauacaac

SEQ ID NO: 2516421 - RNA, 19 nt, Artificial Sequence
  Description of Artificial Sequence: Synthetic oligonucleotide
uagauauaacucccucaaa

SEQ ID NO: 2516422 - RNA, 19 nt, Artificial Sequence
  Description of Artificial Sequence: Synthetic oligonucleotide
ugccccuuggaccaguaau

SEQ ID NO: 2516423 - RNA, 19 nt, Artificial Sequence
  Description of Artificial Sequence: Synthetic oligonucleotide
ugccgacaaauacaaccug

SEQ ID NO: 2516424 - RNA, 19 nt, Artificial Sequence
  Description of Artificial Sequence: Synthetic oligonucleotide
cucgugcucugaaaacacg

SEQ ID NO: 2516425 - RNA, 19 nt, Artificial Sequence
  Description of Artificial Sequence: Synthetic oligonucleotide
gaacauggcccuaccagug

SEQ ID NO: 2516426 - RNA, 19 nt, Artificial Sequence
  Description of Artificial Sequence: Synthetic oligonucleotide
gacuguuuguacacuaaga

SEQ ID NO: 2516427 - RNA, 19 nt, Artificial Sequence
  Description of Artificial Sequence: Synthetic oligonucleotide
auguagcuaagaacauggc

SEQ ID NO: 2516428 - RNA, 19 nt, Artificial Sequence
  Description of Artificial Sequence: Synthetic oligonucleotide
uggggcuuauuuacuagau

SEQ ID NO: 2516429 - RNA, 19 nt, Artificial Sequence
  Description of Artificial Sequence: Synthetic oligonucleotide
ccuuuuggggcuuauuuac

SEQ ID NO: 2516430 - RNA, 19 nt, Artificial Sequence
  Description of Artificial Sequence: Synthetic oligonucleotide
aagacaugauguagcuaag

SEQ ID NO: 2516431 - RNA, 19 nt, Artificial Sequence
  Description of Artificial Sequence: Synthetic oligonucleotide
gcuuuagaacccaaguugc

SEQ ID NO: 2516432 - RNA, 19 nt, Artificial Sequence
  Description of Artificial Sequence: Synthetic oligonucleotide
gcuuuuauucuaguuagac

SEQ ID NO: 2516433 - RNA, 19 nt, Artificial Sequence
  Description of Artificial Sequence: Synthetic oligonucleotide
accugguuaauguuuucau

SEQ ID NO: 2516434 - RNA, 19 nt, Artificial Sequence
  Description of Artificial Sequence: Synthetic oligonucleotide
uagaccaagcaaguaucca

SEQ ID NO: 2516435 - RNA, 19 nt, Artificial Sequence
  Description of Artificial Sequence: Synthetic oligonucleotide
aaggaacuugugcgguuga

SEQ ID NO: 2516436 - RNA, 19 nt, Artificial Sequence
  Description of Artificial Sequence: Synthetic oligonucleotide
gaagucgcauuggcgauug

SEQ ID NO: 2516437 - RNA, 19 nt, Artificial Sequence
  Description of Artificial Sequence: Synthetic oligonucleotide
uagaacccaaguugcugca

SEQ ID NO: 2516438 - RNA, 19 nt, Artificial Sequence
  Description of Artificial Sequence: Synthetic oligonucleotide
caccccugcuguuucaaag

SEQ ID NO: 2516439 - RNA, 19 nt, Artificial Sequence
  Description of Artificial Sequence: Synthetic oligonucleotide
cagagcauaugccagaagu

SEQ ID NO: 2516440 - RNA, 19 nt, Artificial Sequence
  Description of Artificial Sequence: Synthetic oligonucleotide
cucucaggaaauugccgac

SEQ ID NO: 2516441 - RNA, 19 nt, Artificial Sequence
  Description of Artificial Sequence: Synthetic oligonucleotide
ucucaggaaauugccgaca

SEQ ID NO: 2516442 - RNA, 19 nt, Artificial Sequence
  Description of Artificial Sequence: Synthetic oligonucleotide
gaacuugugcgguugacau

SEQ ID NO: 2516443 - RNA, 19 nt, Artificial Sequence
  Description of Artificial Sequence: Synthetic oligonucleotide
gaaguccucuggguaacag

SEQ ID NO: 2516444 - RNA, 19 nt, Artificial Sequence
  Description of Artificial Sequence: Synthetic oligonucleotide
aagcaaguauccacauucu

SEQ ID NO: 2516445 - RNA, 19 nt, Artificial Sequence
  Description of Artificial Sequence: Synthetic oligonucleotide
aggaaguccucuggguaac

SEQ ID NO: 2516446 - RNA, 19 nt, Artificial Sequence
  Description of Artificial Sequence: Synthetic oligonucleotide
uaguuccuuuguucacagg

SEQ ID NO: 2516447 - RNA, 19 nt, Artificial Sequence
  Description of Artificial Sequence: Synthetic oligonucleotide
caguguuaaggaacuugug

SEQ ID NO: 2516448 - RNA, 19 nt, Artificial Sequence
  Description of Artificial Sequence: Synthetic oligonucleotide
agucgcauuggcgauugug

SEQ ID NO: 2516449 - RNA, 19 nt, Artificial Sequence
  Description of Artificial Sequence: Synthetic oligonucleotide
caugcauguaauugaccca

SEQ ID NO: 2516450 - RNA, 19 nt, Artificial Sequence
  Description of Artificial Sequence: Synthetic oligonucleotide
uuaaggaacuugugcgguu

SEQ ID NO: 2516451 - RNA, 19 nt, Artificial Sequence
  Description of Artificial Sequence: Synthetic oligonucleotide
cauguaaauaaagggcaga

SEQ ID NO: 2516452 - RNA, 19 nt, Artificial Sequence
  Description of Artificial Sequence: Synthetic oligonucleotide
gccgacaaauacaaccugg

SEQ ID NO: 2516453 - RNA, 19 nt, Artificial Sequence
  Description of Artificial Sequence: Synthetic oligonucleotide
uuguguugacucucaggaa

SEQ ID NO: 2516454 - RNA, 19 nt, Artificial Sequence
  Description of Artificial Sequence: Synthetic oligonucleotide
cacagaugccccuguggag

SEQ ID NO: 2516455 - RNA, 19 nt, Artificial Sequence
  Description of Artificial Sequence: Synthetic oligonucleotide
auaacccucgugcucugaa

SEQ ID NO: 2516456 - RNA, 19 nt, Artificial Sequence
  Description of Artificial Sequence: Synthetic oligonucleotide
ugcuaaucacuuguuuaaa

SEQ ID NO: 2516457 - RNA, 19 nt, Artificial Sequence
  Description of Artificial Sequence: Synthetic oligonucleotide
uugacccaaaacacaugua

SEQ ID NO: 2516458 - RNA, 19 nt, Artificial Sequence
  Description of Artificial Sequence: Synthetic oligonucleotide
gggcuuauuuacuagauau

SEQ ID NO: 2516459 - RNA, 19 nt, Artificial Sequence
  Description of Artificial Sequence: Synthetic oligonucleotide
agcaaguauccacauucuu

SEQ ID NO: 2516460 - RNA, 19 nt, Artificial Sequence
  Description of Artificial Sequence: Synthetic oligonucleotide
caaggagugcacccacggc

SEQ ID NO: 2516461 - RNA, 19 nt, Artificial Sequence
  Description of Artificial Sequence: Synthetic oligonucleotide
agacaugauguagcuaaga

SEQ ID NO: 2516462 - RNA, 19 nt, Artificial Sequence
  Description of Artificial Sequence: Synthetic oligonucleotide
uugacauggccaggaaagu

SEQ ID NO: 2516463 - RNA, 19 nt, Artificial Sequence
  Description of Artificial Sequence: Synthetic oligonucleotide
gacccaaaacacauguaaa

SEQ ID NO: 2516464 - RNA, 19 nt, Artificial Sequence
  Description of Artificial Sequence: Synthetic oligonucleotide
aggaacuugugcgguugac

SEQ ID NO: 2516465 - RNA, 19 nt, Artificial Sequence
  Description of Artificial Sequence: Synthetic oligonucleotide
accaagcaaguauccacau

SEQ ID NO: 2516466 - RNA, 19 nt, Artificial Sequence
  Description of Artificial Sequence: Synthetic oligonucleotide
cacacauucuugcuaugga

SEQ ID NO: 2516467 - RNA, 19 nt, Artificial Sequence
  Description of Artificial Sequence: Synthetic oligonucleotide
gcacacauucuugcuaugg

SEQ ID NO: 2516468 - RNA, 19 nt, Artificial Sequence
  Description of Artificial Sequence: Synthetic oligonucleotide
cuaguuagaccaagcaagu

SEQ ID NO: 2516469 - RNA, 19 nt, Artificial Sequence
  Description of Artificial Sequence: Synthetic oligonucleotide
gaaccucagguuucauaga

SEQ ID NO: 2516470 - RNA, 19 nt, Artificial Sequence
  Description of Artificial Sequence: Synthetic oligonucleotide
ugcauguaauugacccaaa

SEQ ID NO: 2516471 - RNA, 19 nt, Artificial Sequence
  Description of Artificial Sequence: Synthetic oligonucleotide
augaaaugcugaaccucag

SEQ ID NO: 2516472 - RNA, 19 nt, Artificial Sequence
  Description of Artificial Sequence: Synthetic oligonucleotide
caguaauccagagcauaug

SEQ ID NO: 2516473 - RNA, 19 nt, Artificial Sequence
  Description of Artificial Sequence: Synthetic oligonucleotide
agggcacacauucuugcua

SEQ ID NO: 2516474 - RNA, 19 nt, Artificial Sequence
  Description of Artificial Sequence: Synthetic oligonucleotide
gcuaaucacuuguuuaaaa

SEQ ID NO: 2516475 - RNA, 19 nt, Artificial Sequence
  Description of Artificial Sequence: Synthetic oligonucleotide
uaacccucgugcucugaaa

SEQ ID NO: 2516476 - RNA, 19 nt, Artificial Sequence
  Description of Artificial Sequence: Synthetic oligonucleotide
augcugaaccucagguuuc

SEQ ID NO: 2516477 - RNA, 19 nt, Artificial Sequence
  Description of Artificial Sequence: Synthetic oligonucleotide
aauaacccucgugcucuga

SEQ ID NO: 2516478 - RNA, 19 nt, Artificial Sequence
  Description of Artificial Sequence: Synthetic oligonucleotide
ucgcauuggcgauuguguu

SEQ ID NO: 2516479 - RNA, 19 nt, Artificial Sequence
  Description of Artificial Sequence: Synthetic oligonucleotide
gggaguggcacuuuagucu

SEQ ID NO: 2516480 - RNA, 19 nt, Artificial Sequence
  Description of Artificial Sequence: Synthetic oligonucleotide
cuguuuguacacuaagaau

SEQ ID NO: 2516481 - RNA, 19 nt, Artificial Sequence
  Description of Artificial Sequence: Synthetic oligonucleotide
cuaccaguguuaaggaacu

SEQ ID NO: 2516482 - RNA, 19 nt, Artificial Sequence
  Description of Artificial Sequence: Synthetic oligonucleotide
uaguuagaccaagcaagua

SEQ ID NO: 2516483 - RNA, 19 nt, Artificial Sequence
  Description of Artificial Sequence: Synthetic oligonucleotide
auaugccagaagucgcauu

SEQ ID NO: 2516484 - RNA, 19 nt, Artificial Sequence
  Description of Artificial Sequence: Synthetic oligonucleotide
aggaaauugccgacaaaua

SEQ ID NO: 2516485 - RNA, 19 nt, Artificial Sequence
  Description of Artificial Sequence: Synthetic oligonucleotide
gguuucauagacuguuugu

SEQ ID NO: 2516486 - RNA, 19 nt, Artificial Sequence
  Description of Artificial Sequence: Synthetic oligonucleotide
caggaaguccucuggguaa

SEQ ID NO: 2516487 - RNA, 19 nt, Artificial Sequence
  Description of Artificial Sequence: Synthetic oligonucleotide
guuaaggaacuugugcggu

SEQ ID NO: 2516488 - RNA, 19 nt, Artificial Sequence
  Description of Artificial Sequence: Synthetic oligonucleotide
ugcgguugacauggccagg

SEQ ID NO: 2516489 - RNA, 19 nt, Artificial Sequence
  Description of Artificial Sequence: Synthetic oligonucleotide
ggguaucuucaacagcuca

SEQ ID NO: 2516490 - RNA, 19 nt, Artificial Sequence
  Description of Artificial Sequence: Synthetic oligonucleotide
gucagggagaacaccccug

SEQ ID NO: 2516491 - RNA, 19 nt, Artificial Sequence
  Description of Artificial Sequence: Synthetic oligonucleotide
cuucaacagcucaaggagu

SEQ ID NO: 2516492 - RNA, 19 nt, Artificial Sequence
  Description of Artificial Sequence: Synthetic oligonucleotide
ccacggcuccaaaauaacc

SEQ ID NO: 2516493 - RNA, 19 nt, Artificial Sequence
  Description of Artificial Sequence: Synthetic oligonucleotide
cuuuagaacccaaguugcu

SEQ ID NO: 2516494 - RNA, 19 nt, Artificial Sequence
  Description of Artificial Sequence: Synthetic oligonucleotide
augauguagcuaagaacau

SEQ ID NO: 2516495 - RNA, 19 nt, Artificial Sequence
  Description of Artificial Sequence: Synthetic oligonucleotide
gcauuggcgauuguguuga

SEQ ID NO: 2516496 - RNA, 19 nt, Artificial Sequence
  Description of Artificial Sequence: Synthetic oligonucleotide
gguaucuucaacagcucaa

SEQ ID NO: 2516497 - RNA, 19 nt, Artificial Sequence
  Description of Artificial Sequence: Synthetic oligonucleotide
ucuuguaguuuagccuuuu

SEQ ID NO: 2516498 - RNA, 19 nt, Artificial Sequence
  Description of Artificial Sequence: Synthetic oligonucleotide
gcagauuuugaaaauacuu

SEQ ID NO: 2516499 - RNA, 19 nt, Artificial Sequence
  Description of Artificial Sequence: Synthetic oligonucleotide
uguugacucucaggaaauu

SEQ ID NO: 2516500 - RNA, 19 nt, Artificial Sequence
  Description of Artificial Sequence: Synthetic oligonucleotide
cuuuuggggcuuauuuacu

SEQ ID NO: 2516501 - RNA, 19 nt, Artificial Sequence
  Description of Artificial Sequence: Synthetic oligonucleotide
uggcccuaccaguguuaag

SEQ ID NO: 2516502 - RNA, 19 nt, Artificial Sequence
  Description of Artificial Sequence: Synthetic oligonucleotide
gguugacauggccaggaaa

SEQ ID NO: 2516503 - RNA, 19 nt, Artificial Sequence
  Description of Artificial Sequence: Synthetic oligonucleotide
ccucgugcucugaaaacac

SEQ ID NO: 2516504 - RNA, 19 nt, Artificial Sequence
  Description of Artificial Sequence: Synthetic oligonucleotide
cuugugcgguugacauggc

SEQ ID NO: 2516505 - RNA, 19 nt, Artificial Sequence
  Description of Artificial Sequence: Synthetic oligonucleotide
cugcuguuucaaagacaug

SEQ ID NO: 2516506 - RNA, 19 nt, Artificial Sequence
  Description of Artificial Sequence: Synthetic oligonucleotide
ggaacuugugcgguugaca

SEQ ID NO: 2516507 - RNA, 19 nt, Artificial Sequence
  Description of Artificial Sequence: Synthetic oligonucleotide
accucagguuucauagacu

SEQ ID NO: 2516508 - RNA, 19 nt, Artificial Sequence
  Description of Artificial Sequence: Synthetic oligonucleotide
gggagaacaccccugcugu

SEQ ID NO: 2516509 - RNA, 19 nt, Artificial Sequence
  Description of Artificial Sequence: Synthetic oligonucleotide
cauuaagggcacacauucu

SEQ ID NO: 2516510 - RNA, 19 nt, Artificial Sequence
  Description of Artificial Sequence: Synthetic oligonucleotide
cauucuuaguuccuuuguu

SEQ ID NO: 2516511 - RNA, 19 nt, Artificial Sequence
  Description of Artificial Sequence: Synthetic oligonucleotide
cauucuugcuauggagcca

SEQ ID NO: 2516512 - RNA, 19 nt, Artificial Sequence
  Description of Artificial Sequence: Synthetic oligonucleotide
ugccuuuuagcugccccuu

SEQ ID NO: 2516513 - RNA, 19 nt, Artificial Sequence
  Description of Artificial Sequence: Synthetic oligonucleotide
acgugccuuuuagcugccc

SEQ ID NO: 2516514 - RNA, 19 nt, Artificial Sequence
  Description of Artificial Sequence: Synthetic oligonucleotide
agaagucgcauuggcgauu

SEQ ID NO: 2516515 - RNA, 19 nt, Artificial Sequence
  Description of Artificial Sequence: Synthetic oligonucleotide
ccaguguuaaggaacuugu

SEQ ID NO: 2516516 - RNA, 19 nt, Artificial Sequence
  Description of Artificial Sequence: Synthetic oligonucleotide
aagucgcauuggcgauugu

SEQ ID NO: 2516517 - RNA, 19 nt, Artificial Sequence
  Description of Artificial Sequence: Synthetic oligonucleotide
agaacccaaguugcugcaa

SEQ ID NO: 2516518 - RNA, 19 nt, Artificial Sequence
  Description of Artificial Sequence: Synthetic oligonucleotide
gcauaugccagaagucgca

SEQ ID NO: 2516519 - RNA, 19 nt, Artificial Sequence
  Description of Artificial Sequence: Synthetic oligonucleotide
gugccuuuuagcugccccu

SEQ ID NO: 2516520 - RNA, 19 nt, Artificial Sequence
  Description of Artificial Sequence: Synthetic oligonucleotide
auggcccuaccaguguuaa

SEQ ID NO: 2516521 - RNA, 19 nt, Artificial Sequence
  Description of Artificial Sequence: Synthetic oligonucleotide
cacgugccuuuuagcugcc

SEQ ID NO: 2516522 - RNA, 19 nt, Artificial Sequence
  Description of Artificial Sequence: Synthetic oligonucleotide
ccucuggguaacagucagg

SEQ ID NO: 2516523 - RNA, 19 nt, Artificial Sequence
  Description of Artificial Sequence: Synthetic oligonucleotide
cagcuuuagaacccaaguu

SEQ ID NO: 2516524 - RNA, 19 nt, Artificial Sequence
  Description of Artificial Sequence: Synthetic oligonucleotide
cgugccuuuuagcugcccc

SEQ ID NO: 2516525 - RNA, 19 nt, Artificial Sequence
  Description of Artificial Sequence: Synthetic oligonucleotide
guggagguuucaggaaguc

SEQ ID NO: 2516526 - RNA, 19 nt, Artificial Sequence
  Description of Artificial Sequence: Synthetic oligonucleotide
acaccccugcuguuucaaa

SEQ ID NO: 2516527 - RNA, 19 nt, Artificial Sequence
  Description of Artificial Sequence: Synthetic oligonucleotide
cgcauuggcgauuguguug

SEQ ID NO: 2516528 - RNA, 19 nt, Artificial Sequence
  Description of Artificial Sequence: Synthetic oligonucleotide
caaagacaugauguagcua

SEQ ID NO: 2516529 - RNA, 19 nt, Artificial Sequence
  Description of Artificial Sequence: Synthetic oligonucleotide
ccccuuggaccaguaaucc

SEQ ID NO: 2516530 - RNA, 19 nt, Artificial Sequence
  Description of Artificial Sequence: Synthetic oligonucleotide
cauagacuguuuguacacu

SEQ ID NO: 2516531 - RNA, 19 nt, Artificial Sequence
  Description of Artificial Sequence: Synthetic oligonucleotide
cccaaaacacauguaaaua

SEQ ID NO: 2516532 - RNA, 19 nt, Artificial Sequence
  Description of Artificial Sequence: Synthetic oligonucleotide
ggggcuuauuuacuagaua

SEQ ID NO: 2516533 - RNA, 19 nt, Artificial Sequence
  Description of Artificial Sequence: Synthetic oligonucleotide
ccccugcuguuucaaagac

SEQ ID NO: 2516534 - RNA, 19 nt, Artificial Sequence
  Description of Artificial Sequence: Synthetic oligonucleotide
cauggcccuaccaguguua

SEQ ID NO: 2516535 - RNA, 19 nt, Artificial Sequence
  Description of Artificial Sequence: Synthetic oligonucleotide
ggaguggcacuuuagucuu

SEQ ID NO: 2516536 - RNA, 19 nt, Artificial Sequence
  Description of Artificial Sequence: Synthetic oligonucleotide
gcccuaccaguguuaagga

SEQ ID NO: 2516537 - RNA, 19 nt, Artificial Sequence
  Description of Artificial Sequence: Synthetic oligonucleotide
gccccuuggaccaguaauc

SEQ ID NO: 2516538 - RNA, 19 nt, Artificial Sequence
  Description of Artificial Sequence: Synthetic oligonucleotide
guguugacucucaggaaau

SEQ ID NO: 2516539 - RNA, 19 nt, Artificial Sequence
  Description of Artificial Sequence: Synthetic oligonucleotide
cagaagucgcauuggcgau

SEQ ID NO: 2516540 - RNA, 19 nt, Artificial Sequence
  Description of Artificial Sequence: Synthetic oligonucleotide
uaccaguguuaaggaacuu

SEQ ID NO: 2516541 - RNA, 19 nt, Artificial Sequence
  Description of Artificial Sequence: Synthetic oligonucleotide
ccagagcauaugccagaag

SEQ ID NO: 2516542 - RNA, 19 nt, Artificial Sequence
  Description of Artificial Sequence: Synthetic oligonucleotide
gcgguugacauggccagga

SEQ ID NO: 2516543 - RNA, 19 nt, Artificial Sequence
  Description of Artificial Sequence: Synthetic oligonucleotide
gcacuuuagucuuguaguu

SEQ ID NO: 2516544 - RNA, 19 nt, Artificial Sequence
  Description of Artificial Sequence: Synthetic oligonucleotide
ccgacaaauacaaccuggu

SEQ ID NO: 2516545 - RNA, 19 nt, Artificial Sequence
  Description of Artificial Sequence: Synthetic oligonucleotide
cgauuguguugacucucag

SEQ ID NO: 2516546 - RNA, 19 nt, Artificial Sequence
  Description of Artificial Sequence: Synthetic oligonucleotide
gguaacagucaggguaucu

SEQ ID NO: 2516547 - RNA, 19 nt, Artificial Sequence
  Description of Artificial Sequence: Synthetic oligonucleotide
cacccacggcuccaaaaua

SEQ ID NO: 2516548 - RNA, 19 nt, Artificial Sequence
  Description of Artificial Sequence: Synthetic oligonucleotide
cacuuuagucuuguaguuu

SEQ ID NO: 2516549 - RNA, 19 nt, Artificial Sequence
  Description of Artificial Sequence: Synthetic oligonucleotide
cagguuucauagacuguuu

SEQ ID NO: 2516550 - RNA, 19 nt, Artificial Sequence
  Description of Artificial Sequence: Synthetic oligonucleotide
gcacccacggcuccaaaau

SEQ ID NO: 2516551 - RNA, 19 nt, Artificial Sequence
  Description of Artificial Sequence: Synthetic oligonucleotide
gcuguuucaaagacaugau

SEQ ID NO: 2516552 - RNA, 19 nt, Artificial Sequence
  Description of Artificial Sequence: Synthetic oligonucleotide
gaccaguaauccagagcau

SEQ ID NO: 2516553 - RNA, 19 nt, Artificial Sequence
  Description of Artificial Sequence: Synthetic oligonucleotide
guggcacuuuagucuugua

SEQ ID NO: 2516554 - RNA, 19 nt, Artificial Sequence
  Description of Artificial Sequence: Synthetic oligonucleotide
agcugccccuuggaccagu

SEQ ID NO: 2516555 - RNA, 19 nt, Artificial Sequence
  Description of Artificial Sequence: Synthetic oligonucleotide
cccuaccaguguuaaggaa

SEQ ID NO: 2516556 - RNA, 19 nt, Artificial Sequence
  Description of Artificial Sequence: Synthetic oligonucleotide
cagggagaacaccccugcu

SEQ ID NO: 2516557 - RNA, 19 nt, Artificial Sequence
  Description of Artificial Sequence: Synthetic oligonucleotide
gucuuguaguuuagccuuu

SEQ ID NO: 2516558 - RNA, 19 nt, Artificial Sequence
  Description of Artificial Sequence: Synthetic oligonucleotide
ggguaacagucaggguauc

SEQ ID NO: 2516559 - RNA, 19 nt, Artificial Sequence
  Description of Artificial Sequence: Synthetic oligonucleotide
gugcacccacggcuccaaa

SEQ ID NO: 2516560 - RNA, 19 nt, Artificial Sequence
  Description of Artificial Sequence: Synthetic oligonucleotide
guuuagccuuuuggggcuu

SEQ ID NO: 2516561 - RNA, 19 nt, Artificial Sequence
  Description of Artificial Sequence: Synthetic oligonucleotide
ggagaacaccccugcuguu

SEQ ID NO: 2516562 - RNA, 19 nt, Artificial Sequence
  Description of Artificial Sequence: Synthetic oligonucleotide
ccaagcaaguauccacauu

SEQ ID NO: 2516563 - RNA, 19 nt, Artificial Sequence
  Description of Artificial Sequence: Synthetic oligonucleotide
cgguugacauggccaggaa

SEQ ID NO: 2516564 - RNA, 19 nt, Artificial Sequence
  Description of Artificial Sequence: Synthetic oligonucleotide
gcugaaccucagguuucau

SEQ ID NO: 2516565 - RNA, 19 nt, Artificial Sequence
  Description of Artificial Sequence: Synthetic oligonucleotide
aaauagagaauuuugaaga

SEQ ID NO: 2516566 - RNA, 19 nt, Artificial Sequence
  Description of Artificial Sequence: Synthetic oligonucleotide
aaaauagagaauuuugaag

SEQ ID NO: 2516567 - RNA, 19 nt, Artificial Sequence
  Description of Artificial Sequence: Synthetic oligonucleotide
agugagaugaacuacaauc

SEQ ID NO: 2516568 - RNA, 19 nt, Artificial Sequence
  Description of Artificial Sequence: Synthetic oligonucleotide
uaaaauuucagcuggaucu

SEQ ID NO: 2516569 - RNA, 19 nt, Artificial Sequence
  Description of Artificial Sequence: Synthetic oligonucleotide
acuacaaucucuccgaggc

SEQ ID NO: 2516570 - RNA, 19 nt, Artificial Sequence
  Description of Artificial Sequence: Synthetic oligonucleotide
aauaguuucagguuuacau

SEQ ID NO: 2516571 - RNA, 19 nt, Artificial Sequence
  Description of Artificial Sequence: Synthetic oligonucleotide
ucuacagaaauauuuuagg

SEQ ID NO: 2516572 - RNA, 19 nt, Artificial Sequence
  Description of Artificial Sequence: Synthetic oligonucleotide
uucagguuuacauauaacc

SEQ ID NO: 2516573 - RNA, 19 nt, Artificial Sequence
  Description of Artificial Sequence: Synthetic oligonucleotide
uucacaaaaggacaucugg

SEQ ID NO: 2516574 - RNA, 19 nt, Artificial Sequence
  Description of Artificial Sequence: Synthetic oligonucleotide
auaaccuaaaauuucagcu

SEQ ID NO: 2516575 - RNA, 19 nt, Artificial Sequence
  Description of Artificial Sequence: Synthetic oligonucleotide
aaaagcgacuuccaccugc

SEQ ID NO: 2516576 - RNA, 19 nt, Artificial Sequence
  Description of Artificial Sequence: Synthetic oligonucleotide
aagguuacaauucauccug

SEQ ID NO: 2516577 - RNA, 19 nt, Artificial Sequence
  Description of Artificial Sequence: Synthetic oligonucleotide
uuuacauauaaccuaaaau

SEQ ID NO: 2516578 - RNA, 19 nt, Artificial Sequence
  Description of Artificial Sequence: Synthetic oligonucleotide
aagaagaacaaucaccacu

SEQ ID NO: 2516579 - RNA, 19 nt, Artificial Sequence
  Description of Artificial Sequence: Synthetic oligonucleotide
gaaauauugaugguuagag

SEQ ID NO: 2516580 - RNA, 19 nt, Artificial Sequence
  Description of Artificial Sequence: Synthetic oligonucleotide
uguauuaggguccuggaca

SEQ ID NO: 2516581 - RNA, 19 nt, Artificial Sequence
  Description of Artificial Sequence: Synthetic oligonucleotide
uugacuacggucauggaug

SEQ ID NO: 2516582 - RNA, 19 nt, Artificial Sequence
  Description of Artificial Sequence: Synthetic oligonucleotide
uguuuuaggcuuuagcuca

SEQ ID NO: 2516583 - RNA, 19 nt, Artificial Sequence
  Description of Artificial Sequence: Synthetic oligonucleotide
aauaucuuugaagaguuca

SEQ ID NO: 2516584 - RNA, 19 nt, Artificial Sequence
  Description of Artificial Sequence: Synthetic oligonucleotide
augaacuacaaucucuccg

SEQ ID NO: 2516585 - RNA, 19 nt, Artificial Sequence
  Description of Artificial Sequence: Synthetic oligonucleotide
ugaagaguucacaaaagga

SEQ ID NO: 2516586 - RNA, 19 nt, Artificial Sequence
  Description of Artificial Sequence: Synthetic oligonucleotide
uauaaccuaaaauuucagc

SEQ ID NO: 2516587 - RNA, 19 nt, Artificial Sequence
  Description of Artificial Sequence: Synthetic oligonucleotide
acagaaauauuuuaggaaa

SEQ ID NO: 2516588 - RNA, 19 nt, Artificial Sequence
  Description of Artificial Sequence: Synthetic oligonucleotide
agaaaauagaaaccuggag

SEQ ID NO: 2516589 - RNA, 19 nt, Artificial Sequence
  Description of Artificial Sequence: Synthetic oligonucleotide
cugaagguuguuaacagcc

SEQ ID NO: 2516590 - RNA, 19 nt, Artificial Sequence
  Description of Artificial Sequence: Synthetic oligonucleotide
uuagaaucuggccaccucc

SEQ ID NO: 2516591 - RNA, 19 nt, Artificial Sequence
  Description of Artificial Sequence: Synthetic oligonucleotide
uuuggaugaagagaaaagc

SEQ ID NO: 2516592 - RNA, 19 nt, Artificial Sequence
  Description of Artificial Sequence: Synthetic oligonucleotide
uacauauaaccuaaaauuu

SEQ ID NO: 2516593 - RNA, 19 nt, Artificial Sequence
  Description of Artificial Sequence: Synthetic oligonucleotide
agaaaagcgacuuccaccu

SEQ ID NO: 2516594 - RNA, 19 nt, Artificial Sequence
  Description of Artificial Sequence: Synthetic oligonucleotide
ugguuagcagagaaaauag

SEQ ID NO: 2516595 - RNA, 19 nt, Artificial Sequence
  Description of Artificial Sequence: Synthetic oligonucleotide
aacagcccgaaaguaaugc

SEQ ID NO: 2516596 - RNA, 19 nt, Artificial Sequence
  Description of Artificial Sequence: Synthetic oligonucleotide
uaaccuaaaauuucagcug

SEQ ID NO: 2516597 - RNA, 19 nt, Artificial Sequence
  Description of Artificial Sequence: Synthetic oligonucleotide
auauugcuagccuuuuggc

SEQ ID NO: 2516598 - RNA, 19 nt, Artificial Sequence
  Description of Artificial Sequence: Synthetic oligonucleotide
uacagaaauauuuuaggaa

SEQ ID NO: 2516599 - RNA, 19 nt, Artificial Sequence
  Description of Artificial Sequence: Synthetic oligonucleotide
ugaacuacaaucucuccga

SEQ ID NO: 2516600 - RNA, 19 nt, Artificial Sequence
  Description of Artificial Sequence: Synthetic oligonucleotide
aaggggucuuuucuaaaac

SEQ ID NO: 2516601 - RNA, 19 nt, Artificial Sequence
  Description of Artificial Sequence: Synthetic oligonucleotide
cuaacaugacuccagauuc

SEQ ID NO: 2516602 - RNA, 19 nt, Artificial Sequence
  Description of Artificial Sequence: Synthetic oligonucleotide
uauacaguacagcuuagaa

SEQ ID NO: 2516603 - RNA, 19 nt, Artificial Sequence
  Description of Artificial Sequence: Synthetic oligonucleotide
ucacaaaaggacaucuggc

SEQ ID NO: 2516604 - RNA, 19 nt, Artificial Sequence
  Description of Artificial Sequence: Synthetic oligonucleotide
uuagcagagaaaauagaaa

SEQ ID NO: 2516605 - RNA, 19 nt, Artificial Sequence
  Description of Artificial Sequence: Synthetic oligonucleotide
gaagguuguuaacagcccg

SEQ ID NO: 2516606 - RNA, 19 nt, Artificial Sequence
  Description of Artificial Sequence: Synthetic oligonucleotide
uuggccugcuacaaaauag

SEQ ID NO: 2516607 - RNA, 19 nt, Artificial Sequence
  Description of Artificial Sequence: Synthetic oligonucleotide
auugcuagccuuuuggccu

SEQ ID NO: 2516608 - RNA, 19 nt, Artificial Sequence
  Description of Artificial Sequence: Synthetic oligonucleotide
uauugaugguuagaguugg

SEQ ID NO: 2516609 - RNA, 19 nt, Artificial Sequence
  Description of Artificial Sequence: Synthetic oligonucleotide
aacuacaaucucuccgagg

SEQ ID NO: 2516610 - RNA, 19 nt, Artificial Sequence
  Description of Artificial Sequence: Synthetic oligonucleotide
uuagucaacaagcuaccac

SEQ ID NO: 2516611 - RNA, 19 nt, Artificial Sequence
  Description of Artificial Sequence: Synthetic oligonucleotide
acauauaaccuaaaauuuc

SEQ ID NO: 2516612 - RNA, 19 nt, Artificial Sequence
  Description of Artificial Sequence: Synthetic oligonucleotide
agcagagaaaauagaaacc

SEQ ID NO: 2516613 - RNA, 19 nt, Artificial Sequence
  Description of Artificial Sequence: Synthetic oligonucleotide
aaaauaguuucagguuuac

SEQ ID NO: 2516614 - RNA, 19 nt, Artificial Sequence
  Description of Artificial Sequence: Synthetic oligonucleotide
ugauagacuguguaguaga

SEQ ID NO: 2516615 - RNA, 19 nt, Artificial Sequence
  Description of Artificial Sequence: Synthetic oligonucleotide
aagaacaaucaccacuggu

SEQ ID NO: 2516616 - RNA, 19 nt, Artificial Sequence
  Description of Artificial Sequence: Synthetic oligonucleotide
uauugcuagccuuuuggcc

SEQ ID NO: 2516617 - RNA, 19 nt, Artificial Sequence
  Description of Artificial Sequence: Synthetic oligonucleotide
uacaauucauccuggaguc

SEQ ID NO: 2516618 - RNA, 19 nt, Artificial Sequence
  Description of Artificial Sequence: Synthetic oligonucleotide
uaacaugacuccagauucg

SEQ ID NO: 2516619 - RNA, 19 nt, Artificial Sequence
  Description of Artificial Sequence: Synthetic oligonucleotide
aacaaucaccacugguuag

SEQ ID NO: 2516620 - RNA, 19 nt, Artificial Sequence
  Description of Artificial Sequence: Synthetic oligonucleotide
aguaaugcgugccuaucuc

SEQ ID NO: 2516621 - RNA, 19 nt, Artificial Sequence
  Description of Artificial Sequence: Synthetic oligonucleotide
ucaacaagcuaccaccagu

SEQ ID NO: 2516622 - RNA, 19 nt, Artificial Sequence
  Description of Artificial Sequence: Synthetic oligonucleotide
uggaucuuguauuaggguc

SEQ ID NO: 2516623 - RNA, 19 nt, Artificial Sequence
  Description of Artificial Sequence: Synthetic oligonucleotide
uagaguugggcauccauug

SEQ ID NO: 2516624 - RNA, 19 nt, Artificial Sequence
  Description of Artificial Sequence: Synthetic oligonucleotide
uuaacagcccgaaaguaau

SEQ ID NO: 2516625 - RNA, 19 nt, Artificial Sequence
  Description of Artificial Sequence: Synthetic oligonucleotide
acaaucaccacugguuagc

SEQ ID NO: 2516626 - RNA, 19 nt, Artificial Sequence
  Description of Artificial Sequence: Synthetic oligonucleotide
acaaaaggacaucuggcug

SEQ ID NO: 2516627 - RNA, 19 nt, Artificial Sequence
  Description of Artificial Sequence: Synthetic oligonucleotide
ugcuacaaaauagagaauu

SEQ ID NO: 2516628 - RNA, 19 nt, Artificial Sequence
  Description of Artificial Sequence: Synthetic oligonucleotide
uacucaagguuacaauuca

SEQ ID NO: 2516629 - RNA, 19 nt, Artificial Sequence
  Description of Artificial Sequence: Synthetic oligonucleotide
ugggcauccauugacuacg

SEQ ID NO: 2516630 - RNA, 19 nt, Artificial Sequence
  Description of Artificial Sequence: Synthetic oligonucleotide
uuguuuuaggcuuuagcuc

SEQ ID NO: 2516631 - RNA, 19 nt, Artificial Sequence
  Description of Artificial Sequence: Synthetic oligonucleotide
guuguuuuaggcuuuagcu

SEQ ID NO: 2516632 - RNA, 19 nt, Artificial Sequence
  Description of Artificial Sequence: Synthetic oligonucleotide
aaguaaugcgugccuaucu

SEQ ID NO: 2516633 - RNA, 19 nt, Artificial Sequence
  Description of Artificial Sequence: Synthetic oligonucleotide
uuguuaacagcccgaaagu

SEQ ID NO: 2516634 - RNA, 19 nt, Artificial Sequence
  Description of Artificial Sequence: Synthetic oligonucleotide
aaaguaaugcgugccuauc

SEQ ID NO: 2516635 - RNA, 19 nt, Artificial Sequence
  Description of Artificial Sequence: Synthetic oligonucleotide
uagaaauauugaugguuag

SEQ ID NO: 2516636 - RNA, 19 nt, Artificial Sequence
  Description of Artificial Sequence: Synthetic oligonucleotide
gagaauuuugaagaagaac

SEQ ID NO: 2516637 - RNA, 19 nt, Artificial Sequence
  Description of Artificial Sequence: Synthetic oligonucleotide
uuagauauugcuagccuuu

SEQ ID NO: 2516638 - RNA, 19 nt, Artificial Sequence
  Description of Artificial Sequence: Synthetic oligonucleotide
uacaaucucuccgaggcag

SEQ ID NO: 2516639 - RNA, 19 nt, Artificial Sequence
  Description of Artificial Sequence: Synthetic oligonucleotide
cuaaaauuucagcuggauc

SEQ ID NO: 2516640 - RNA, 19 nt, Artificial Sequence
  Description of Artificial Sequence: Synthetic oligonucleotide
agaugaacuacaaucucuc

SEQ ID NO: 2516641 - RNA, 19 nt, Artificial Sequence
  Description of Artificial Sequence: Synthetic oligonucleotide
gucuacagaaauauuuuag

SEQ ID NO: 2516642 - RNA, 19 nt, Artificial Sequence
  Description of Artificial Sequence: Synthetic oligonucleotide
auucccuccagccagugcu

SEQ ID NO: 2516643 - RNA, 19 nt, Artificial Sequence
  Description of Artificial Sequence: Synthetic oligonucleotide
ugaagguuguuaacagccc

SEQ ID NO: 2516644 - RNA, 19 nt, Artificial Sequence
  Description of Artificial Sequence: Synthetic oligonucleotide
gaguuuauacaguacagcu

SEQ ID NO: 2516645 - RNA, 19 nt, Artificial Sequence
  Description of Artificial Sequence: Synthetic oligonucleotide
uuuauacaguacagcuuag

SEQ ID NO: 2516646 - RNA, 19 nt, Artificial Sequence
  Description of Artificial Sequence: Synthetic oligonucleotide
auugacuacggucauggau

SEQ ID NO: 2516647 - RNA, 19 nt, Artificial Sequence
  Description of Artificial Sequence: Synthetic oligonucleotide
cuacagaaauauuuuagga

SEQ ID NO: 2516648 - RNA, 19 nt, Artificial Sequence
  Description of Artificial Sequence: Synthetic oligonucleotide
ucuucagugagaugaacua

SEQ ID NO: 2516649 - RNA, 19 nt, Artificial Sequence
  Description of Artificial Sequence: Synthetic oligonucleotide
auaucuuugaagaguucac

SEQ ID NO: 2516650 - RNA, 19 nt, Artificial Sequence
  Description of Artificial Sequence: Synthetic oligonucleotide
cuucauuugucucugguga

SEQ ID NO: 2516651 - RNA, 19 nt, Artificial Sequence
  Description of Artificial Sequence: Synthetic oligonucleotide
uucagcauguacuuccuaa

SEQ ID NO: 2516652 - RNA, 19 nt, Artificial Sequence
  Description of Artificial Sequence: Synthetic oligonucleotide
ugagaugaacuacaaucuc

SEQ ID NO: 2516653 - RNA, 19 nt, Artificial Sequence
  Description of Artificial Sequence: Synthetic oligonucleotide
cauccauugacuacgguca

SEQ ID NO: 2516654 - RNA, 19 nt, Artificial Sequence
  Description of Artificial Sequence: Synthetic oligonucleotide
uuugucucuggugagauuu

SEQ ID NO: 2516655 - RNA, 19 nt, Artificial Sequence
  Description of Artificial Sequence: Synthetic oligonucleotide
cucagcauucccuccagcc

SEQ ID NO: 2516656 - RNA, 19 nt, Artificial Sequence
  Description of Artificial Sequence: Synthetic oligonucleotide
uugauagacuguguaguag

SEQ ID NO: 2516657 - RNA, 19 nt, Artificial Sequence
  Description of Artificial Sequence: Synthetic oligonucleotide
gaugaacuacaaucucucc

SEQ ID NO: 2516658 - RNA, 19 nt, Artificial Sequence
  Description of Artificial Sequence: Synthetic oligonucleotide
cuuccuaacaugacuccag

SEQ ID NO: 2516659 - RNA, 19 nt, Artificial Sequence
  Description of Artificial Sequence: Synthetic oligonucleotide
uuuaggcuuuagcucaugu

SEQ ID NO: 2516660 - RNA, 19 nt, Artificial Sequence
  Description of Artificial Sequence: Synthetic oligonucleotide
aacuguuccacgguugcug

SEQ ID NO: 2516661 - RNA, 19 nt, Artificial Sequence
  Description of Artificial Sequence: Synthetic oligonucleotide
uagccuuuuggccugcuac

SEQ ID NO: 2516662 - RNA, 19 nt, Artificial Sequence
  Description of Artificial Sequence: Synthetic oligonucleotide
aggaaaauaguuucagguu

SEQ ID NO: 2516663 - RNA, 19 nt, Artificial Sequence
  Description of Artificial Sequence: Synthetic oligonucleotide
uuugcggccaggccaacug

SEQ ID NO: 2516664 - RNA, 19 nt, Artificial Sequence
  Description of Artificial Sequence: Synthetic oligonucleotide
uugaugguuagaguugggc

SEQ ID NO: 2516665 - RNA, 19 nt, Artificial Sequence
  Description of Artificial Sequence: Synthetic oligonucleotide
gaagaacaaucaccacugg

SEQ ID NO: 2516666 - RNA, 19 nt, Artificial Sequence
  Description of Artificial Sequence: Synthetic oligonucleotide
uuagaguugggcauccauu

SEQ ID NO: 2516667 - RNA, 19 nt, Artificial Sequence
  Description of Artificial Sequence: Synthetic oligonucleotide
acacuaugaaugcuggcca

SEQ ID NO: 2516668 - RNA, 19 nt, Artificial Sequence
  Description of Artificial Sequence: Synthetic oligonucleotide
uccaccugcagucuacaga

SEQ ID NO: 2516669 - RNA, 19 nt, Artificial Sequence
  Description of Artificial Sequence: Synthetic oligonucleotide
acagcccgaaaguaaugcg

SEQ ID NO: 2516670 - RNA, 19 nt, Artificial Sequence
  Description of Artificial Sequence: Synthetic oligonucleotide
aguucacaaaaggacaucu

SEQ ID NO: 2516671 - RNA, 19 nt, Artificial Sequence
  Description of Artificial Sequence: Synthetic oligonucleotide
guuagcagagaaaauagaa

SEQ ID NO: 2516672 - RNA, 19 nt, Artificial Sequence
  Description of Artificial Sequence: Synthetic oligonucleotide
ucucuggugagauuuggau

SEQ ID NO: 2516673 - RNA, 19 nt, Artificial Sequence
  Description of Artificial Sequence: Synthetic oligonucleotide
aguacagcuuagaaucugg

SEQ ID NO: 2516674 - RNA, 19 nt, Artificial Sequence
  Description of Artificial Sequence: Synthetic oligonucleotide
aaugcgugccuaucucaug

SEQ ID NO: 2516675 - RNA, 19 nt, Artificial Sequence
  Description of Artificial Sequence: Synthetic oligonucleotide
ugccaauaucuuugaagag

SEQ ID NO: 2516676 - RNA, 19 nt, Artificial Sequence
  Description of Artificial Sequence: Synthetic oligonucleotide
aaucaccacugguuagcag

SEQ ID NO: 2516677 - RNA, 19 nt, Artificial Sequence
  Description of Artificial Sequence: Synthetic oligonucleotide
cagagaaaauagaaaccug

SEQ ID NO: 2516678 - RNA, 19 nt, Artificial Sequence
  Description of Artificial Sequence: Synthetic oligonucleotide
gaaagcaggucuucaguga

SEQ ID NO: 2516679 - RNA, 19 nt, Artificial Sequence
  Description of Artificial Sequence: Synthetic oligonucleotide
cuggaguuuauacaguaca

SEQ ID NO: 2516680 - RNA, 19 nt, Artificial Sequence
  Description of Artificial Sequence: Synthetic oligonucleotide
uggacaaacuugccaauau

SEQ ID NO: 2516681 - RNA, 19 nt, Artificial Sequence
  Description of Artificial Sequence: Synthetic oligonucleotide
auagacuguguaguagagg

SEQ ID NO: 2516682 - RNA, 19 nt, Artificial Sequence
  Description of Artificial Sequence: Synthetic oligonucleotide
cucuggugagauuuggaug

SEQ ID NO: 2516683 - RNA, 19 nt, Artificial Sequence
  Description of Artificial Sequence: Synthetic oligonucleotide
uacuuccuaacaugacucc

SEQ ID NO: 2516684 - RNA, 19 nt, Artificial Sequence
  Description of Artificial Sequence: Synthetic oligonucleotide
aacuugccaauaucuuuga

SEQ ID NO: 2516685 - RNA, 19 nt, Artificial Sequence
  Description of Artificial Sequence: Synthetic oligonucleotide
auauaaccuaaaauuucag

SEQ ID NO: 2516686 - RNA, 19 nt, Artificial Sequence
  Description of Artificial Sequence: Synthetic oligonucleotide
gaguugggcauccauugac

SEQ ID NO: 2516687 - RNA, 19 nt, Artificial Sequence
  Description of Artificial Sequence: Synthetic oligonucleotide
uuuggccugcuacaaaaua

SEQ ID NO: 2516688 - RNA, 19 nt, Artificial Sequence
  Description of Artificial Sequence: Synthetic oligonucleotide
cuaugaaugcuggccaggg

SEQ ID NO: 2516689 - RNA, 19 nt, Artificial Sequence
  Description of Artificial Sequence: Synthetic oligonucleotide
uguaguagaggagggcagc

SEQ ID NO: 2516690 - RNA, 19 nt, Artificial Sequence
  Description of Artificial Sequence: Synthetic oligonucleotide
ucagugagaugaacuacaa

SEQ ID NO: 2516691 - RNA, 19 nt, Artificial Sequence
  Description of Artificial Sequence: Synthetic oligonucleotide
aggggucuuuucuaaaaca

SEQ ID NO: 2516692 - RNA, 19 nt, Artificial Sequence
  Description of Artificial Sequence: Synthetic oligonucleotide
gaacuacaaucucuccgag

SEQ ID NO: 2516693 - RNA, 19 nt, Artificial Sequence
  Description of Artificial Sequence: Synthetic oligonucleotide
aauuucagcuggaucuugu

SEQ ID NO: 2516694 - RNA, 19 nt, Artificial Sequence
  Description of Artificial Sequence: Synthetic oligonucleotide
uguuccacgguugcugaag

SEQ ID NO: 2516695 - RNA, 19 nt, Artificial Sequence
  Description of Artificial Sequence: Synthetic oligonucleotide
guagaaauauugaugguua

SEQ ID NO: 2516696 - RNA, 19 nt, Artificial Sequence
  Description of Artificial Sequence: Synthetic oligonucleotide
uaaugcgugccuaucucau

SEQ ID NO: 2516697 - RNA, 19 nt, Artificial Sequence
  Description of Artificial Sequence: Synthetic oligonucleotide
acuaugaaugcuggccagg

SEQ ID NO: 2516698 - RNA, 19 nt, Artificial Sequence
  Description of Artificial Sequence: Synthetic oligonucleotide
ucucgagcaguagaaauau

SEQ ID NO: 2516699 - RNA, 19 nt, Artificial Sequence
  Description of Artificial Sequence: Synthetic oligonucleotide
gaacacuaugaaugcuggc

SEQ ID NO: 2516700 - RNA, 19 nt, Artificial Sequence
  Description of Artificial Sequence: Synthetic oligonucleotide
ugacuacggucauggaugc

SEQ ID NO: 2516701 - RNA, 19 nt, Artificial Sequence
  Description of Artificial Sequence: Synthetic oligonucleotide
uuuagucaacaagcuacca

SEQ ID NO: 2516702 - RNA, 19 nt, Artificial Sequence
  Description of Artificial Sequence: Synthetic oligonucleotide
agauauugcuagccuuuug

SEQ ID NO: 2516703 - RNA, 19 nt, Artificial Sequence
  Description of Artificial Sequence: Synthetic oligonucleotide
uccuggagucuucaucagc

SEQ ID NO: 2516704 - RNA, 19 nt, Artificial Sequence
  Description of Artificial Sequence: Synthetic oligonucleotide
gaaggggucuuuucuaaaa

SEQ ID NO: 2516705 - RNA, 19 nt, Artificial Sequence
  Description of Artificial Sequence: Synthetic oligonucleotide
guuccacgguugcugaagg

SEQ ID NO: 2516706 - RNA, 19 nt, Artificial Sequence
  Description of Artificial Sequence: Synthetic oligonucleotide
uaacagcccgaaaguaaug

SEQ ID NO: 2516707 - RNA, 19 nt, Artificial Sequence
  Description of Artificial Sequence: Synthetic oligonucleotide
cagcuuagaaucuggccac

SEQ ID NO: 2516708 - RNA, 19 nt, Artificial Sequence
  Description of Artificial Sequence: Synthetic oligonucleotide
acuguguaguagaggaggg

SEQ ID NO: 2516709 - RNA, 19 nt, Artificial Sequence
  Description of Artificial Sequence: Synthetic oligonucleotide
guacuuccuaacaugacuc

SEQ ID NO: 2516710 - RNA, 19 nt, Artificial Sequence
  Description of Artificial Sequence: Synthetic oligonucleotide
accacugguuagcagagaa

SEQ ID NO: 2516711 - RNA, 19 nt, Artificial Sequence
  Description of Artificial Sequence: Synthetic oligonucleotide
agcgacuuccaccugcagu

SEQ ID NO: 2516712 - RNA, 19 nt, Artificial Sequence
  Description of Artificial Sequence: Synthetic oligonucleotide
caugccucagcauucccuc

SEQ ID NO: 2516713 - RNA, 19 nt, Artificial Sequence
  Description of Artificial Sequence: Synthetic oligonucleotide
guugcugaagguuguuaac

SEQ ID NO: 2516714 - RNA, 19 nt, Artificial Sequence
  Description of Artificial Sequence: Synthetic oligonucleotide
ggaucuuguauuagggucc

SEQ ID NO: 2516715 - RNA, 19 nt, Artificial Sequence
  Description of Artificial Sequence: Synthetic oligonucleotide
uggcuugauagacugugua

SEQ ID NO: 2516716 - RNA, 19 nt, Artificial Sequence
  Description of Artificial Sequence: Synthetic oligonucleotide
ggcuugauagacuguguag

SEQ ID NO: 2516717 - RNA, 19 nt, Artificial Sequence
  Description of Artificial Sequence: Synthetic oligonucleotide
augguuagaguugggcauc

SEQ ID NO: 2516718 - RNA, 19 nt, Artificial Sequence
  Description of Artificial Sequence: Synthetic oligonucleotide
guacucaagguuacaauuc

SEQ ID NO: 2516719 - RNA, 19 nt, Artificial Sequence
  Description of Artificial Sequence: Synthetic oligonucleotide
accugcagucuacagaaau

SEQ ID NO: 2516720 - RNA, 19 nt, Artificial Sequence
  Description of Artificial Sequence: Synthetic oligonucleotide
uugggcauccauugacuac

SEQ ID NO: 2516721 - RNA, 19 nt, Artificial Sequence
  Description of Artificial Sequence: Synthetic oligonucleotide
ucauuugucucuggugaga

SEQ ID NO: 2516722 - RNA, 19 nt, Artificial Sequence
  Description of Artificial Sequence: Synthetic oligonucleotide
uguuaacagcccgaaagua

SEQ ID NO: 2516723 - RNA, 19 nt, Artificial Sequence
  Description of Artificial Sequence: Synthetic oligonucleotide
cacuaugaaugcuggccag

SEQ ID NO: 2516724 - RNA, 19 nt, Artificial Sequence
  Description of Artificial Sequence: Synthetic oligonucleotide
ggaugaagagaaaagcgac

SEQ ID NO: 2516725 - RNA, 19 nt, Artificial Sequence
  Description of Artificial Sequence: Synthetic oligonucleotide
gaaaauaguuucagguuua

SEQ ID NO: 2516726 - RNA, 19 nt, Artificial Sequence
  Description of Artificial Sequence: Synthetic oligonucleotide
gucaacaagcuaccaccag

SEQ ID NO: 2516727 - RNA, 19 nt, Artificial Sequence
  Description of Artificial Sequence: Synthetic oligonucleotide
gcuggaucuuguauuaggg

SEQ ID NO: 2516728 - RNA, 19 nt, Artificial Sequence
  Description of Artificial Sequence: Synthetic oligonucleotide
uuuuggccugcuacaaaau

SEQ ID NO: 2516729 - RNA, 19 nt, Artificial Sequence
  Description of Artificial Sequence: Synthetic oligonucleotide
ccauugacuacggucaugg

SEQ ID NO: 2516730 - RNA, 19 nt, Artificial Sequence
  Description of Artificial Sequence: Synthetic oligonucleotide
gcauccauugacuacgguc

SEQ ID NO: 2516731 - RNA, 19 nt, Artificial Sequence
  Description of Artificial Sequence: Synthetic oligonucleotide
ggggucuuuucuaaaacag

SEQ ID NO: 2516732 - RNA, 19 nt, Artificial Sequence
  Description of Artificial Sequence: Synthetic oligonucleotide
guaaugcgugccuaucuca

SEQ ID NO: 2516733 - RNA, 19 nt, Artificial Sequence
  Description of Artificial Sequence: Synthetic oligonucleotide
cuuagaaucuggccaccuc

SEQ ID NO: 2516734 - RNA, 19 nt, Artificial Sequence
  Description of Artificial Sequence: Synthetic oligonucleotide
guuaacagcccgaaaguaa

SEQ ID NO: 2516735 - RNA, 19 nt, Artificial Sequence
  Description of Artificial Sequence: Synthetic oligonucleotide
auguacuuccuaacaugac

SEQ ID NO: 2516736 - RNA, 19 nt, Artificial Sequence
  Description of Artificial Sequence: Synthetic oligonucleotide
gagaugaacuacaaucucu

SEQ ID NO: 2516737 - RNA, 19 nt, Artificial Sequence
  Description of Artificial Sequence: Synthetic oligonucleotide
uccgaggcagccuuccuuc

SEQ ID NO: 2516738 - RNA, 19 nt, Artificial Sequence
  Description of Artificial Sequence: Synthetic oligonucleotide
guauuaggguccuggacaa

SEQ ID NO: 2516739 - RNA, 19 nt, Artificial Sequence
  Description of Artificial Sequence: Synthetic oligonucleotide
aaagcgacuuccaccugca

SEQ ID NO: 2516740 - RNA, 19 nt, Artificial Sequence
  Description of Artificial Sequence: Synthetic oligonucleotide
caugacuccagauucgagu

SEQ ID NO: 2516741 - RNA, 19 nt, Artificial Sequence
  Description of Artificial Sequence: Synthetic oligonucleotide
cugguuagcagagaaaaua

SEQ ID NO: 2516742 - RNA, 19 nt, Artificial Sequence
  Description of Artificial Sequence: Synthetic oligonucleotide
auggaugcccuggaaagca

SEQ ID NO: 2516743 - RNA, 19 nt, Artificial Sequence
  Description of Artificial Sequence: Synthetic oligonucleotide
acaaucucuccgaggcagc

SEQ ID NO: 2516744 - RNA, 19 nt, Artificial Sequence
  Description of Artificial Sequence: Synthetic oligonucleotide
acggucauggaugcccugg

SEQ ID NO: 2516745 - RNA, 19 nt, Artificial Sequence
  Description of Artificial Sequence: Synthetic oligonucleotide
uggguacucaagguuacaa

SEQ ID NO: 2516746 - RNA, 19 nt, Artificial Sequence
  Description of Artificial Sequence: Synthetic oligonucleotide
ggucuuuucuaaaacagaa

SEQ ID NO: 2516747 - RNA, 19 nt, Artificial Sequence
  Description of Artificial Sequence: Synthetic oligonucleotide
agcuuagaaucuggccacc

SEQ ID NO: 2516748 - RNA, 19 nt, Artificial Sequence
  Description of Artificial Sequence: Synthetic oligonucleotide
agaguugggcauccauuga

SEQ ID NO: 2516749 - RNA, 19 nt, Artificial Sequence
  Description of Artificial Sequence: Synthetic oligonucleotide
acuuccuaacaugacucca

SEQ ID NO: 2516750 - RNA, 19 nt, Artificial Sequence
  Description of Artificial Sequence: Synthetic oligonucleotide
uugcuagccuuuuggccug

SEQ ID NO: 2516751 - RNA, 19 nt, Artificial Sequence
  Description of Artificial Sequence: Synthetic oligonucleotide
gugagaugaacuacaaucu

SEQ ID NO: 2516752 - RNA, 19 nt, Artificial Sequence
  Description of Artificial Sequence: Synthetic oligonucleotide
gagcaguagaaauauugau

SEQ ID NO: 2516753 - RNA, 19 nt, Artificial Sequence
  Description of Artificial Sequence: Synthetic oligonucleotide
cauggaugcccuggaaagc

SEQ ID NO: 2516754 - RNA, 19 nt, Artificial Sequence
  Description of Artificial Sequence: Synthetic oligonucleotide
gagggcagcccuccacagg

SEQ ID NO: 2516755 - RNA, 19 nt, Artificial Sequence
  Description of Artificial Sequence: Synthetic oligonucleotide
cuugauagacuguguagua

SEQ ID NO: 2516756 - RNA, 19 nt, Artificial Sequence
  Description of Artificial Sequence: Synthetic oligonucleotide
agagaauuuugaagaagaa

SEQ ID NO: 2516757 - RNA, 19 nt, Artificial Sequence
  Description of Artificial Sequence: Synthetic oligonucleotide
gucauggaugcccuggaaa

SEQ ID NO: 2516758 - RNA, 19 nt, Artificial Sequence
  Description of Artificial Sequence: Synthetic oligonucleotide
guacagcuuagaaucuggc

SEQ ID NO: 2516759 - RNA, 19 nt, Artificial Sequence
  Description of Artificial Sequence: Synthetic oligonucleotide
gaaaguaaugcgugccuau

SEQ ID NO: 2516760 - RNA, 19 nt, Artificial Sequence
  Description of Artificial Sequence: Synthetic oligonucleotide
gcgacuuccaccugcaguc

SEQ ID NO: 2516761 - RNA, 19 nt, Artificial Sequence
  Description of Artificial Sequence: Synthetic oligonucleotide
ugcagucuacagaaauauu

SEQ ID NO: 2516762 - RNA, 19 nt, Artificial Sequence
  Description of Artificial Sequence: Synthetic oligonucleotide
uuccaccugcagucuacag

SEQ ID NO: 2516763 - RNA, 19 nt, Artificial Sequence
  Description of Artificial Sequence: Synthetic oligonucleotide
guguaguagaggagggcag

SEQ ID NO: 2516764 - RNA, 19 nt, Artificial Sequence
  Description of Artificial Sequence: Synthetic oligonucleotide
uaguagaggagggcagccc

SEQ ID NO: 2516765 - RNA, 19 nt, Artificial Sequence
  Description of Artificial Sequence: Synthetic oligonucleotide
uggugagauuuggaugaag

SEQ ID NO: 2516766 - RNA, 19 nt, Artificial Sequence
  Description of Artificial Sequence: Synthetic oligonucleotide
gaaaagcgacuuccaccug

SEQ ID NO: 2516767 - RNA, 19 nt, Artificial Sequence
  Description of Artificial Sequence: Synthetic oligonucleotide
agcccgaaaguaaugcgug

SEQ ID NO: 2516768 - RNA, 19 nt, Artificial Sequence
  Description of Artificial Sequence: Synthetic oligonucleotide
caacaagcuaccaccagua

SEQ ID NO: 2516769 - RNA, 19 nt, Artificial Sequence
  Description of Artificial Sequence: Synthetic oligonucleotide
auuucagcuggaucuugua

SEQ ID NO: 2516770 - RNA, 19 nt, Artificial Sequence
  Description of Artificial Sequence: Synthetic oligonucleotide
auugaugguuagaguuggg

SEQ ID NO: 2516771 - RNA, 19 nt, Artificial Sequence
  Description of Artificial Sequence: Synthetic oligonucleotide
auccuggagucuucaucag

SEQ ID NO: 2516772 - RNA, 19 nt, Artificial Sequence
  Description of Artificial Sequence: Synthetic oligonucleotide
ugguuagaguugggcaucc

SEQ ID NO: 2516773 - RNA, 19 nt, Artificial Sequence
  Description of Artificial Sequence: Synthetic oligonucleotide
aagcgacuuccaccugcag

SEQ ID NO: 2516774 - RNA, 19 nt, Artificial Sequence
  Description of Artificial Sequence: Synthetic oligonucleotide
agucaacaagcuaccacca

SEQ ID NO: 2516775 - RNA, 19 nt, Artificial Sequence
  Description of Artificial Sequence: Synthetic oligonucleotide
uggccagggguuguuuuag

SEQ ID NO: 2516776 - RNA, 19 nt, Artificial Sequence
  Description of Artificial Sequence: Synthetic oligonucleotide
cuguguaguagaggagggc

SEQ ID NO: 2516777 - RNA, 19 nt, Artificial Sequence
  Description of Artificial Sequence: Synthetic oligonucleotide
cuuagauauugcuagccuu

SEQ ID NO: 2516778 - RNA, 19 nt, Artificial Sequence
  Description of Artificial Sequence: Synthetic oligonucleotide
aaucucuccgaggcagccu

SEQ ID NO: 2516779 - RNA, 19 nt, Artificial Sequence
  Description of Artificial Sequence: Synthetic oligonucleotide
aguugggcauccauugacu

SEQ ID NO: 2516780 - RNA, 19 nt, Artificial Sequence
  Description of Artificial Sequence: Synthetic oligonucleotide
aucucuccgaggcagccuu

SEQ ID NO: 2516781 - RNA, 19 nt, Artificial Sequence
  Description of Artificial Sequence: Synthetic oligonucleotide
cucucgagcaguagaaaua

SEQ ID NO: 2516782 - RNA, 19 nt, Artificial Sequence
  Description of Artificial Sequence: Synthetic oligonucleotide
cagcauguacuuccuaaca

SEQ ID NO: 2516783 - RNA, 19 nt, Artificial Sequence
  Description of Artificial Sequence: Synthetic oligonucleotide
ggacaaacuugccaauauc

SEQ ID NO: 2516784 - RNA, 19 nt, Artificial Sequence
  Description of Artificial Sequence: Synthetic oligonucleotide
gguacucaagguuacaauu

SEQ ID NO: 2516785 - RNA, 19 nt, Artificial Sequence
  Description of Artificial Sequence: Synthetic oligonucleotide
ccaacuguuccacgguugc

SEQ ID NO: 2516786 - RNA, 19 nt, Artificial Sequence
  Description of Artificial Sequence: Synthetic oligonucleotide
uagauauugcuagccuuuu

SEQ ID NO: 2516787 - RNA, 19 nt, Artificial Sequence
  Description of Artificial Sequence: Synthetic oligonucleotide
acuugccaauaucuuugaa

SEQ ID NO: 2516788 - RNA, 19 nt, Artificial Sequence
  Description of Artificial Sequence: Synthetic oligonucleotide
gguuacaauucauccugga

SEQ ID NO: 2516789 - RNA, 19 nt, Artificial Sequence
  Description of Artificial Sequence: Synthetic oligonucleotide
guugggcauccauugacua

SEQ ID NO: 2516790 - RNA, 19 nt, Artificial Sequence
  Description of Artificial Sequence: Synthetic oligonucleotide
aggcagccuuccuucagca

SEQ ID NO: 2516791 - RNA, 19 nt, Artificial Sequence
  Description of Artificial Sequence: Synthetic oligonucleotide
cauucccuccagccagugc

SEQ ID NO: 2516792 - RNA, 19 nt, Artificial Sequence
  Description of Artificial Sequence: Synthetic oligonucleotide
gucuucagugagaugaacu

SEQ ID NO: 2516793 - RNA, 19 nt, Artificial Sequence
  Description of Artificial Sequence: Synthetic oligonucleotide
auagaaaccuggaguuuau

SEQ ID NO: 2516794 - RNA, 19 nt, Artificial Sequence
  Description of Artificial Sequence: Synthetic oligonucleotide
guuagaguugggcauccau

SEQ ID NO: 2516795 - RNA, 19 nt, Artificial Sequence
  Description of Artificial Sequence: Synthetic oligonucleotide
uugcggccaggccaacugu

SEQ ID NO: 2516796 - RNA, 19 nt, Artificial Sequence
  Description of Artificial Sequence: Synthetic oligonucleotide
auccauugacuacggucau

SEQ ID NO: 2516797 - RNA, 19 nt, Artificial Sequence
  Description of Artificial Sequence: Synthetic oligonucleotide
uuuugcggccaggccaacu

SEQ ID NO: 2516798 - RNA, 19 nt, Artificial Sequence
  Description of Artificial Sequence: Synthetic oligonucleotide
agguuguuaacagcccgaa

SEQ ID NO: 2516799 - RNA, 19 nt, Artificial Sequence
  Description of Artificial Sequence: Synthetic oligonucleotide
ggaugcccuggaaagcagg

SEQ ID NO: 2516800 - RNA, 19 nt, Artificial Sequence
  Description of Artificial Sequence: Synthetic oligonucleotide
ccacgguugcugaagguug

SEQ ID NO: 2516801 - RNA, 19 nt, Artificial Sequence
  Description of Artificial Sequence: Synthetic oligonucleotide
uacggucauggaugcccug

SEQ ID NO: 2516802 - RNA, 19 nt, Artificial Sequence
  Description of Artificial Sequence: Synthetic oligonucleotide
ucuccgaggcagccuuccu

SEQ ID NO: 2516803 - RNA, 19 nt, Artificial Sequence
  Description of Artificial Sequence: Synthetic oligonucleotide
cagugaucuucauuugucu

SEQ ID NO: 2516804 - RNA, 19 nt, Artificial Sequence
  Description of Artificial Sequence: Synthetic oligonucleotide
accuaaaauuucagcugga

SEQ ID NO: 2516805 - RNA, 19 nt, Artificial Sequence
  Description of Artificial Sequence: Synthetic oligonucleotide
cuggaucuuguauuagggu

SEQ ID NO: 2516806 - RNA, 19 nt, Artificial Sequence
  Description of Artificial Sequence: Synthetic oligonucleotide
ugcucucgagcaguagaaa

SEQ ID NO: 2516807 - RNA, 19 nt, Artificial Sequence
  Description of Artificial Sequence: Synthetic oligonucleotide
ggccugcuacaaaauagag

SEQ ID NO: 2516808 - RNA, 19 nt, Artificial Sequence
  Description of Artificial Sequence: Synthetic oligonucleotide
acucaagguuacaauucau

SEQ ID NO: 2516809 - RNA, 19 nt, Artificial Sequence
  Description of Artificial Sequence: Synthetic oligonucleotide
uagaaaccuggaguuuaua

SEQ ID NO: 2516810 - RNA, 19 nt, Artificial Sequence
  Description of Artificial Sequence: Synthetic oligonucleotide
cccgaaaguaaugcgugcc

SEQ ID NO: 2516811 - RNA, 19 nt, Artificial Sequence
  Description of Artificial Sequence: Synthetic oligonucleotide
ugcggccaggccaacuguu

SEQ ID NO: 2516812 - RNA, 19 nt, Artificial Sequence
  Description of Artificial Sequence: Synthetic oligonucleotide
gcuugauagacuguguagu

SEQ ID NO: 2516813 - RNA, 19 nt, Artificial Sequence
  Description of Artificial Sequence: Synthetic oligonucleotide
gaucuuguauuaggguccu

SEQ ID NO: 2516814 - RNA, 19 nt, Artificial Sequence
  Description of Artificial Sequence: Synthetic oligonucleotide
gggucuuuucuaaaacaga

SEQ ID NO: 2516815 - RNA, 19 nt, Artificial Sequence
  Description of Artificial Sequence: Synthetic oligonucleotide
caggaaggggucuuuucua

SEQ ID NO: 2516816 - RNA, 19 nt, Artificial Sequence
  Description of Artificial Sequence: Synthetic oligonucleotide
aguuucagguuuacauaua

SEQ ID NO: 2516817 - RNA, 19 nt, Artificial Sequence
  Description of Artificial Sequence: Synthetic oligonucleotide
cagcccgaaaguaaugcgu

SEQ ID NO: 2516818 - RNA, 19 nt, Artificial Sequence
  Description of Artificial Sequence: Synthetic oligonucleotide
agauuuggaugaagagaaa

SEQ ID NO: 2516819 - RNA, 19 nt, Artificial Sequence
  Description of Artificial Sequence: Synthetic oligonucleotide
gaugcccuggaaagcaggu

SEQ ID NO: 2516820 - RNA, 19 nt, Artificial Sequence
  Description of Artificial Sequence: Synthetic oligonucleotide
uauuaggguccuggacaaa

SEQ ID NO: 2516821 - RNA, 19 nt, Artificial Sequence
  Description of Artificial Sequence: Synthetic oligonucleotide
gccugcuacaaaauagaga

SEQ ID NO: 2516822 - RNA, 19 nt, Artificial Sequence
  Description of Artificial Sequence: Synthetic oligonucleotide
gcccgaaaguaaugcgugc

SEQ ID NO: 2516823 - RNA, 19 nt, Artificial Sequence
  Description of Artificial Sequence: Synthetic oligonucleotide
gucucuggugagauuugga

SEQ ID NO: 2516824 - RNA, 19 nt, Artificial Sequence
  Description of Artificial Sequence: Synthetic oligonucleotide
caguagaaauauugauggu

SEQ ID NO: 2516825 - RNA, 19 nt, Artificial Sequence
  Description of Artificial Sequence: Synthetic oligonucleotide
gacuacggucauggaugcc

SEQ ID NO: 2516826 - RNA, 19 nt, Artificial Sequence
  Description of Artificial Sequence: Synthetic oligonucleotide
ccaauaucuuugaagaguu

SEQ ID NO: 2516827 - RNA, 19 nt, Artificial Sequence
  Description of Artificial Sequence: Synthetic oligonucleotide
cauugacuacggucaugga

SEQ ID NO: 2516828 - RNA, 19 nt, Artificial Sequence
  Description of Artificial Sequence: Synthetic oligonucleotide
gugcucucgagcaguagaa

SEQ ID NO: 2516829 - RNA, 19 nt, Artificial Sequence
  Description of Artificial Sequence: Synthetic oligonucleotide
gccaacuguuccacgguug

SEQ ID NO: 2516830 - RNA, 19 nt, Artificial Sequence
  Description of Artificial Sequence: Synthetic oligonucleotide
gguuguuaacagcccgaaa

SEQ ID NO: 2516831 - RNA, 19 nt, Artificial Sequence
  Description of Artificial Sequence: Synthetic oligonucleotide
cagccuuccuucagcaugu

SEQ ID NO: 2516832 - RNA, 19 nt, Artificial Sequence
  Description of Artificial Sequence: Synthetic oligonucleotide
caccuccaagccagagcug

SEQ ID NO: 2516833 - RNA, 19 nt, Artificial Sequence
  Description of Artificial Sequence: Synthetic oligonucleotide
aggucuucagugagaugaa

SEQ ID NO: 2516834 - RNA, 19 nt, Artificial Sequence
  Description of Artificial Sequence: Synthetic oligonucleotide
cagugcucucgagcaguag

SEQ ID NO: 2516835 - RNA, 19 nt, Artificial Sequence
  Description of Artificial Sequence: Synthetic oligonucleotide
aucuuguauuaggguccug

SEQ ID NO: 2516836 - RNA, 19 nt, Artificial Sequence
  Description of Artificial Sequence: Synthetic oligonucleotide
gcucucgagcaguagaaau

SEQ ID NO: 2516837 - RNA, 19 nt, Artificial Sequence
  Description of Artificial Sequence: Synthetic oligonucleotide
cuacggucauggaugcccu

SEQ ID NO: 2516838 - RNA, 19 nt, Artificial Sequence
  Description of Artificial Sequence: Synthetic oligonucleotide
ccugcagucuacagaaaua

SEQ ID NO: 2516839 - RNA, 19 nt, Artificial Sequence
  Description of Artificial Sequence: Synthetic oligonucleotide
agcauucccuccagccagu

SEQ ID NO: 2516840 - RNA, 19 nt, Artificial Sequence
  Description of Artificial Sequence: Synthetic oligonucleotide
gguuuacauauaaccuaaa

SEQ ID NO: 2516841 - RNA, 19 nt, Artificial Sequence
  Description of Artificial Sequence: Synthetic oligonucleotide
cuggcuugauagacugugu

SEQ ID NO: 2516842 - RNA, 19 nt, Artificial Sequence
  Description of Artificial Sequence: Synthetic oligonucleotide
ggguacucaagguuacaau

SEQ ID NO: 2516843 - RNA, 19 nt, Artificial Sequence
  Description of Artificial Sequence: Synthetic oligonucleotide
cacgguugcugaagguugu

SEQ ID NO: 2516844 - RNA, 19 nt, Artificial Sequence
  Description of Artificial Sequence: Synthetic oligonucleotide
cuggguacucaagguuaca

SEQ ID NO: 2516845 - RNA, 19 nt, Artificial Sequence
  Description of Artificial Sequence: Synthetic oligonucleotide
gccuggguacucaagguua

SEQ ID NO: 2516846 - RNA, 19 nt, Artificial Sequence
  Description of Artificial Sequence: Synthetic oligonucleotide
guuuuaggcuuuagcucau

SEQ ID NO: 2516847 - RNA, 19 nt, Artificial Sequence
  Description of Artificial Sequence: Synthetic oligonucleotide
acgguugcugaagguuguu

SEQ ID NO: 2516848 - RNA, 19 nt, Artificial Sequence
  Description of Artificial Sequence: Synthetic oligonucleotide
cuccagccagugcucucga

SEQ ID NO: 2516849 - RNA, 19 nt, Artificial Sequence
  Description of Artificial Sequence: Synthetic oligonucleotide
cgaggcagccuuccuucag

SEQ ID NO: 2516850 - RNA, 19 nt, Artificial Sequence
  Description of Artificial Sequence: Synthetic oligonucleotide
caccugcagucuacagaaa

SEQ ID NO: 2516851 - RNA, 19 nt, Artificial Sequence
  Description of Artificial Sequence: Synthetic oligonucleotide
ccgaaaguaaugcgugccu

SEQ ID NO: 2516852 - RNA, 19 nt, Artificial Sequence
  Description of Artificial Sequence: Synthetic oligonucleotide
gguuagaguugggcaucca

SEQ ID NO: 2516853 - RNA, 19 nt, Artificial Sequence
  Description of Artificial Sequence: Synthetic oligonucleotide
gcauucccuccagccagug

SEQ ID NO: 2516854 - RNA, 19 nt, Artificial Sequence
  Description of Artificial Sequence: Synthetic oligonucleotide
gcuuagaaucuggccaccu

SEQ ID NO: 2516855 - RNA, 19 nt, Artificial Sequence
  Description of Artificial Sequence: Synthetic oligonucleotide
ggccuggguacucaagguu

SEQ ID NO: 2516856 - RNA, 19 nt, Artificial Sequence
  Description of Artificial Sequence: Synthetic oligonucleotide
caccacugguuagcagaga

SEQ ID NO: 2516857 - RNA, 19 nt, Artificial Sequence
  Description of Artificial Sequence: Synthetic oligonucleotide
gcgugccuaucucaugccu

SEQ ID NO: 2516858 - RNA, 19 nt, Artificial Sequence
  Description of Artificial Sequence: Synthetic oligonucleotide
cucgagcaguagaaauauu

SEQ ID NO: 2516859 - RNA, 19 nt, Artificial Sequence
  Description of Artificial Sequence: Synthetic oligonucleotide
caacuguuccacgguugcu

SEQ ID NO: 2516860 - RNA, 19 nt, Artificial Sequence
  Description of Artificial Sequence: Synthetic oligonucleotide
cuccgaggcagccuuccuu

SEQ ID NO: 2516861 - RNA, 19 nt, Artificial Sequence
  Description of Artificial Sequence: Synthetic oligonucleotide
cgaaaguaaugcgugccua

SEQ ID NO: 2516862 - RNA, 19 nt, Artificial Sequence
  Description of Artificial Sequence: Synthetic oligonucleotide
gcggccaggccaacuguuc

SEQ ID NO: 2516863 - RNA, 19 nt, Artificial Sequence
  Description of Artificial Sequence: Synthetic oligonucleotide
gacaucuggcuggcuugau

SEQ ID NO: 2516864 - RNA, 19 nt, Artificial Sequence
  Description of Artificial Sequence: Synthetic oligonucleotide
ggccaacuguuccacgguu

SEQ ID NO: 2516865 - RNA, 19 nt, Artificial Sequence
  Description of Artificial Sequence: Synthetic oligonucleotide
gcuggccagggguuguuuu

SEQ ID NO: 2516866 - RNA, 19 nt, Artificial Sequence
  Description of Artificial Sequence: Synthetic oligonucleotide
ccgaggcagccuuccuuca

SEQ ID NO: 2516867 - RNA, 19 nt, Artificial Sequence
  Description of Artificial Sequence: Synthetic oligonucleotide
gggcagcccuccacaggaa

SEQ ID NO: 2516868 - RNA, 19 nt, Artificial Sequence
  Description of Artificial Sequence: Synthetic oligonucleotide
gcuagccuuuuggccugcu

SEQ ID NO: 2516869 - RNA, 19 nt, Artificial Sequence
  Description of Artificial Sequence: Synthetic oligonucleotide
ccacaggaaggggucuuuu

SEQ ID NO: 2516870 - RNA, 19 nt, Artificial Sequence
  Description of Artificial Sequence: Synthetic oligonucleotide
aauaacaaaauacauuguu

SEQ ID NO: 2516871 - RNA, 19 nt, Artificial Sequence
  Description of Artificial Sequence: Synthetic oligonucleotide
acaggaaugcacuagggac

SEQ ID NO: 2516872 - RNA, 19 nt, Artificial Sequence
  Description of Artificial Sequence: Synthetic oligonucleotide
uugaucauggaguuguagg

SEQ ID NO: 2516873 - RNA, 19 nt, Artificial Sequence
  Description of Artificial Sequence: Synthetic oligonucleotide
gauagguguagagauaugg

SEQ ID NO: 2516874 - RNA, 19 nt, Artificial Sequence
  Description of Artificial Sequence: Synthetic oligonucleotide
uucucgguuauucagguga

SEQ ID NO: 2516875 - RNA, 19 nt, Artificial Sequence
  Description of Artificial Sequence: Synthetic oligonucleotide
aaaggcgccaagcaccacg

SEQ ID NO: 2516876 - RNA, 19 nt, Artificial Sequence
  Description of Artificial Sequence: Synthetic oligonucleotide
uuggagggcaaucugcugg

SEQ ID NO: 2516877 - RNA, 19 nt, Artificial Sequence
  Description of Artificial Sequence: Synthetic oligonucleotide
uagguguagagauauggag

SEQ ID NO: 2516878 - RNA, 19 nt, Artificial Sequence
  Description of Artificial Sequence: Synthetic oligonucleotide
aaugcggcagaucugggca

SEQ ID NO: 2516879 - RNA, 19 nt, Artificial Sequence
  Description of Artificial Sequence: Synthetic oligonucleotide
aaaaccagaggcuggugug

SEQ ID NO: 2516880 - RNA, 19 nt, Artificial Sequence
  Description of Artificial Sequence: Synthetic oligonucleotide
ucgguuauucaggugaugg

SEQ ID NO: 2516881 - RNA, 19 nt, Artificial Sequence
  Description of Artificial Sequence: Synthetic oligonucleotide
aauucucgguuauucaggu

SEQ ID NO: 2516882 - RNA, 19 nt, Artificial Sequence
  Description of Artificial Sequence: Synthetic oligonucleotide
uggacaggaaugcacuagg

SEQ ID NO: 2516883 - RNA, 19 nt, Artificial Sequence
  Description of Artificial Sequence: Synthetic oligonucleotide
uagagauauggagaguugg

SEQ ID NO: 2516884 - RNA, 19 nt, Artificial Sequence
  Description of Artificial Sequence: Synthetic oligonucleotide
guuucuaugaucucucuga

SEQ ID NO: 2516885 - RNA, 19 nt, Artificial Sequence
  Description of Artificial Sequence: Synthetic oligonucleotide
gaacugaggucagaaaugg

SEQ ID NO: 2516886 - RNA, 19 nt, Artificial Sequence
  Description of Artificial Sequence: Synthetic oligonucleotide
gacaaugcggcagaucugg

SEQ ID NO: 2516887 - RNA, 19 nt, Artificial Sequence
  Description of Artificial Sequence: Synthetic oligonucleotide
agcaaaggcgccaagcacc

SEQ ID NO: 2516888 - RNA, 19 nt, Artificial Sequence
  Description of Artificial Sequence: Synthetic oligonucleotide
gaauucucgguuauucagg

SEQ ID NO: 2516889 - RNA, 19 nt, Artificial Sequence
  Description of Artificial Sequence: Synthetic oligonucleotide
ugaucauggaguuguaggu

SEQ ID NO: 2516890 - RNA, 19 nt, Artificial Sequence
  Description of Artificial Sequence: Synthetic oligonucleotide
ugcacuagggaccguaccc

SEQ ID NO: 2516891 - RNA, 19 nt, Artificial Sequence
  Description of Artificial Sequence: Synthetic oligonucleotide
aacccgagcaaugcgggcc

SEQ ID NO: 2516892 - RNA, 19 nt, Artificial Sequence
  Description of Artificial Sequence: Synthetic oligonucleotide
gguguagagauauggagag

SEQ ID NO: 2516893 - RNA, 19 nt, Artificial Sequence
  Description of Artificial Sequence: Synthetic oligonucleotide
ucaggguaaggccuggccc

SEQ ID NO: 2516894 - RNA, 19 nt, Artificial Sequence
  Description of Artificial Sequence: Synthetic oligonucleotide
uaccccuauuggcagaggg

SEQ ID NO: 2516895 - RNA, 19 nt, Artificial Sequence
  Description of Artificial Sequence: Synthetic oligonucleotide
ucuuucuccauccccacuc

SEQ ID NO: 2516896 - RNA, 19 nt, Artificial Sequence
  Description of Artificial Sequence: Synthetic oligonucleotide
acagugaagggcaaccagc

SEQ ID NO: 2516897 - RNA, 19 nt, Artificial Sequence
  Description of Artificial Sequence: Synthetic oligonucleotide
ugcaaacccgagcaaugcg

SEQ ID NO: 2516898 - RNA, 19 nt, Artificial Sequence
  Description of Artificial Sequence: Synthetic oligonucleotide
aggcaguagacagugaagg

SEQ ID NO: 2516899 - RNA, 19 nt, Artificial Sequence
  Description of Artificial Sequence: Synthetic oligonucleotide
agagauauggagaguuggc

SEQ ID NO: 2516900 - RNA, 19 nt, Artificial Sequence
  Description of Artificial Sequence: Synthetic oligonucleotide
uguggcgaugcccuugcgg

SEQ ID NO: 2516901 - RNA, 19 nt, Artificial Sequence
  Description of Artificial Sequence: Synthetic oligonucleotide
gauauggagaguuggcauc

SEQ ID NO: 2516902 - RNA, 19 nt, Artificial Sequence
  Description of Artificial Sequence: Synthetic oligonucleotide
gaaggcguagaugacuggg

SEQ ID NO: 2516903 - RNA, 19 nt, Artificial Sequence
  Description of Artificial Sequence: Synthetic oligonucleotide
uguagagauauggagaguu

SEQ ID NO: 2516904 - RNA, 19 nt, Artificial Sequence
  Description of Artificial Sequence: Synthetic oligonucleotide
uucuccauccccacuccgg

SEQ ID NO: 2516905 - RNA, 19 nt, Artificial Sequence
  Description of Artificial Sequence: Synthetic oligonucleotide
auggagaguuggcaucucc

SEQ ID NO: 2516906 - RNA, 19 nt, Artificial Sequence
  Description of Artificial Sequence: Synthetic oligonucleotide
uguggcgcugaaauccagg

SEQ ID NO: 2516907 - RNA, 19 nt, Artificial Sequence
  Description of Artificial Sequence: Synthetic oligonucleotide
gucagaaauggggacaagg

SEQ ID NO: 2516908 - RNA, 19 nt, Artificial Sequence
  Description of Artificial Sequence: Synthetic oligonucleotide
guggcgaugcccuugcggg

SEQ ID NO: 2516909 - RNA, 19 nt, Artificial Sequence
  Description of Artificial Sequence: Synthetic oligonucleotide
ggaauucucgguuauucag

SEQ ID NO: 2516910 - RNA, 19 nt, Artificial Sequence
  Description of Artificial Sequence: Synthetic oligonucleotide
uggagaguuggcaucuccc

SEQ ID NO: 2516911 - RNA, 19 nt, Artificial Sequence
  Description of Artificial Sequence: Synthetic oligonucleotide
ggguauuuggcucuugucc

SEQ ID NO: 2516912 - RNA, 19 nt, Artificial Sequence
  Description of Artificial Sequence: Synthetic oligonucleotide
uccucuagggcaccucagg

SEQ ID NO: 2516913 - RNA, 19 nt, Artificial Sequence
  Description of Artificial Sequence: Synthetic oligonucleotide
agcgcagaggaauucucgg

SEQ ID NO: 2516914 - RNA, 19 nt, Artificial Sequence
  Description of Artificial Sequence: Synthetic oligonucleotide
uuuuacagucccgacuacc

SEQ ID NO: 2516915 - RNA, 19 nt, Artificial Sequence
  Description of Artificial Sequence: Synthetic oligonucleotide
ucuugguugcggaaggcgu

SEQ ID NO: 2516916 - RNA, 19 nt, Artificial Sequence
  Description of Artificial Sequence: Synthetic oligonucleotide
cauggcggcagacaaugcg

SEQ ID NO: 2516917 - RNA, 19 nt, Artificial Sequence
  Description of Artificial Sequence: Synthetic oligonucleotide
gaucugggcauagagcugc

SEQ ID NO: 2516918 - RNA, 19 nt, Artificial Sequence
  Description of Artificial Sequence: Synthetic oligonucleotide
agauauggagaguuggcau

SEQ ID NO: 2516919 - RNA, 19 nt, Artificial Sequence
  Description of Artificial Sequence: Synthetic oligonucleotide
ucuagggcaccucagggua

SEQ ID NO: 2516920 - RNA, 19 nt, Artificial Sequence
  Description of Artificial Sequence: Synthetic oligonucleotide
agcaaugcgggccugggga

SEQ ID NO: 2516921 - RNA, 19 nt, Artificial Sequence
  Description of Artificial Sequence: Synthetic oligonucleotide
ucguuggagggcaaucugc

SEQ ID NO: 2516922 - RNA, 19 nt, Artificial Sequence
  Description of Artificial Sequence: Synthetic oligonucleotide
ugucccgccuccucuaggg

SEQ ID NO: 2516923 - RNA, 19 nt, Artificial Sequence
  Description of Artificial Sequence: Synthetic oligonucleotide
auaacaaaauacauuguuu

SEQ ID NO: 2516924 - RNA, 19 nt, Artificial Sequence
  Description of Artificial Sequence: Synthetic oligonucleotide
aaugcacuagggaccguac

SEQ ID NO: 2516925 - RNA, 19 nt, Artificial Sequence
  Description of Artificial Sequence: Synthetic oligonucleotide
acuggguugaucauggagu

SEQ ID NO: 2516926 - RNA, 19 nt, Artificial Sequence
  Description of Artificial Sequence: Synthetic oligonucleotide
uagacagugaagggcaacc

SEQ ID NO: 2516927 - RNA, 19 nt, Artificial Sequence
  Description of Artificial Sequence: Synthetic oligonucleotide
augcacuagggaccguacc

SEQ ID NO: 2516928 - RNA, 19 nt, Artificial Sequence
  Description of Artificial Sequence: Synthetic oligonucleotide
guauuuggcucuugucccg

SEQ ID NO: 2516929 - RNA, 19 nt, Artificial Sequence
  Description of Artificial Sequence: Synthetic oligonucleotide
auuuuacagucccgacuac

SEQ ID NO: 2516930 - RNA, 19 nt, Artificial Sequence
  Description of Artificial Sequence: Synthetic oligonucleotide
uuucuaugaucucucugau

SEQ ID NO: 2516931 - RNA, 19 nt, Artificial Sequence
  Description of Artificial Sequence: Synthetic oligonucleotide
ugaggucagaaauggggac

SEQ ID NO: 2516932 - RNA, 19 nt, Artificial Sequence
  Description of Artificial Sequence: Synthetic oligonucleotide
gaucauggaguuguaggug

SEQ ID NO: 2516933 - RNA, 19 nt, Artificial Sequence
  Description of Artificial Sequence: Synthetic oligonucleotide
guuggcaucuccccaggag

SEQ ID NO: 2516934 - RNA, 19 nt, Artificial Sequence
  Description of Artificial Sequence: Synthetic oligonucleotide
aggaaugcacuagggaccg

SEQ ID NO: 2516935 - RNA, 19 nt, Artificial Sequence
  Description of Artificial Sequence: Synthetic oligonucleotide
uggggacacgucuugguug

SEQ ID NO: 2516936 - RNA, 19 nt, Artificial Sequence
  Description of Artificial Sequence: Synthetic oligonucleotide
guagguggcagggagcagg

SEQ ID NO: 2516937 - RNA, 19 nt, Artificial Sequence
  Description of Artificial Sequence: Synthetic oligonucleotide
ggcgcugaaauccaggcug

SEQ ID NO: 2516938 - RNA, 19 nt, Artificial Sequence
  Description of Artificial Sequence: Synthetic oligonucleotide
gaggaauucucgguuauuc

SEQ ID NO: 2516939 - RNA, 19 nt, Artificial Sequence
  Description of Artificial Sequence: Synthetic oligonucleotide
agucccgacuaccucgccg

SEQ ID NO: 2516940 - RNA, 19 nt, Artificial Sequence
  Description of Artificial Sequence: Synthetic oligonucleotide
gaggcucugguuucuauga

SEQ ID NO: 2516941 - RNA, 19 nt, Artificial Sequence
  Description of Artificial Sequence: Synthetic oligonucleotide
cagcaggcagcaaaggcgc

SEQ ID NO: 2516942 - RNA, 19 nt, Artificial Sequence
  Description of Artificial Sequence: Synthetic oligonucleotide
uuauucaggugauggcuuc

SEQ ID NO: 2516943 - RNA, 19 nt, Artificial Sequence
  Description of Artificial Sequence: Synthetic oligonucleotide
caggguaaggccuggcccc

SEQ ID NO: 2516944 - RNA, 19 nt, Artificial Sequence
  Description of Artificial Sequence: Synthetic oligonucleotide
acgucuugguugcggaagg

SEQ ID NO: 2516945 - RNA, 19 nt, Artificial Sequence
  Description of Artificial Sequence: Synthetic oligonucleotide
gagauauggagaguuggca

SEQ ID NO: 2516946 - RNA, 19 nt, Artificial Sequence
  Description of Artificial Sequence: Synthetic oligonucleotide
ugcauuuuacagucccgac

SEQ ID NO: 2516947 - RNA, 19 nt, Artificial Sequence
  Description of Artificial Sequence: Synthetic oligonucleotide
ucauggaguuguagguggc

SEQ ID NO: 2516948 - RNA, 19 nt, Artificial Sequence
  Description of Artificial Sequence: Synthetic oligonucleotide
gucccgacuaccucgccgg

SEQ ID NO: 2516949 - RNA, 19 nt, Artificial Sequence
  Description of Artificial Sequence: Synthetic oligonucleotide
agguguagagauauggaga

SEQ ID NO: 2516950 - RNA, 19 nt, Artificial Sequence
  Description of Artificial Sequence: Synthetic oligonucleotide
uccuccugcaaacccgagc

SEQ ID NO: 2516951 - RNA, 19 nt, Artificial Sequence
  Description of Artificial Sequence: Synthetic oligonucleotide
cugguuucuaugaucucuc

SEQ ID NO: 2516952 - RNA, 19 nt, Artificial Sequence
  Description of Artificial Sequence: Synthetic oligonucleotide
ugggguauuuggcucuugu

SEQ ID NO: 2516953 - RNA, 19 nt, Artificial Sequence
  Description of Artificial Sequence: Synthetic oligonucleotide
uggcaucuccccaggaggc

SEQ ID NO: 2516954 - RNA, 19 nt, Artificial Sequence
  Description of Artificial Sequence: Synthetic oligonucleotide
caaugcggcagaucugggc

SEQ ID NO: 2516955 - RNA, 19 nt, Artificial Sequence
  Description of Artificial Sequence: Synthetic oligonucleotide
acuccgggaacugagguca

SEQ ID NO: 2516956 - RNA, 19 nt, Artificial Sequence
  Description of Artificial Sequence: Synthetic oligonucleotide
caaccagcaggcagcaaag

SEQ ID NO: 2516957 - RNA, 19 nt, Artificial Sequence
  Description of Artificial Sequence: Synthetic oligonucleotide
gaggcugguguguuccucc

SEQ ID NO: 2516958 - RNA, 19 nt, Artificial Sequence
  Description of Artificial Sequence: Synthetic oligonucleotide
gugagauagguguagagau

SEQ ID NO: 2516959 - RNA, 19 nt, Artificial Sequence
  Description of Artificial Sequence: Synthetic oligonucleotide
ugggcauggcggcagacaa

SEQ ID NO: 2516960 - RNA, 19 nt, Artificial Sequence
  Description of Artificial Sequence: Synthetic oligonucleotide
aagcaccacggccaaugug

SEQ ID NO: 2516961 - RNA, 19 nt, Artificial Sequence
  Description of Artificial Sequence: Synthetic oligonucleotide
guugaucauggaguuguag

SEQ ID NO: 2516962 - RNA, 19 nt, Artificial Sequence
  Description of Artificial Sequence: Synthetic oligonucleotide
cagaucugggcauagagcu

SEQ ID NO: 2516963 - RNA, 19 nt, Artificial Sequence
  Description of Artificial Sequence: Synthetic oligonucleotide
aaggcgccaagcaccacgg

SEQ ID NO: 2516964 - RNA, 19 nt, Artificial Sequence
  Description of Artificial Sequence: Synthetic oligonucleotide
auauggagaguuggcaucu

SEQ ID NO: 2516965 - RNA, 19 nt, Artificial Sequence
  Description of Artificial Sequence: Synthetic oligonucleotide
cagcgcagaggaauucucg

SEQ ID NO: 2516966 - RNA, 19 nt, Artificial Sequence
  Description of Artificial Sequence: Synthetic oligonucleotide
gaggcaguagacagugaag

SEQ ID NO: 2516967 - RNA, 19 nt, Artificial Sequence
  Description of Artificial Sequence: Synthetic oligonucleotide
guggcgcugaaauccaggc

SEQ ID NO: 2516968 - RNA, 19 nt, Artificial Sequence
  Description of Artificial Sequence: Synthetic oligonucleotide
auggcggcagacaaugcgg

SEQ ID NO: 2516969 - RNA, 19 nt, Artificial Sequence
  Description of Artificial Sequence: Synthetic oligonucleotide
accguaccccuauuggcag

SEQ ID NO: 2516970 - RNA, 19 nt, Artificial Sequence
  Description of Artificial Sequence: Synthetic oligonucleotide
ggaguuguagguggcaggg

SEQ ID NO: 2516971 - RNA, 19 nt, Artificial Sequence
  Description of Artificial Sequence: Synthetic oligonucleotide
uuuuggggacuggacagga

SEQ ID NO: 2516972 - RNA, 19 nt, Artificial Sequence
  Description of Artificial Sequence: Synthetic oligonucleotide
cacguagugagaggcaggc

SEQ ID NO: 2516973 - RNA, 19 nt, Artificial Sequence
  Description of Artificial Sequence: Synthetic oligonucleotide
gaagccgggccucagcgca

SEQ ID NO: 2516974 - RNA, 19 nt, Artificial Sequence
  Description of Artificial Sequence: Synthetic oligonucleotide
aaaccagaggcuggugugu

SEQ ID NO: 2516975 - RNA, 19 nt, Artificial Sequence
  Description of Artificial Sequence: Synthetic oligonucleotide
cucaggguaaggccuggcc

SEQ ID NO: 2516976 - RNA, 19 nt, Artificial Sequence
  Description of Artificial Sequence: Synthetic oligonucleotide
uccauccccacuccgggaa

SEQ ID NO: 2516977 - RNA, 19 nt, Artificial Sequence
  Description of Artificial Sequence: Synthetic oligonucleotide
guguguuccuccugcaaac

SEQ ID NO: 2516978 - RNA, 19 nt, Artificial Sequence
  Description of Artificial Sequence: Synthetic oligonucleotide
gguuucuaugaucucucug

SEQ ID NO: 2516979 - RNA, 19 nt, Artificial Sequence
  Description of Artificial Sequence: Synthetic oligonucleotide
uuacagucccgacuaccuc

SEQ ID NO: 2516980 - RNA, 19 nt, Artificial Sequence
  Description of Artificial Sequence: Synthetic oligonucleotide
gagaguuggcaucucccca

SEQ ID NO: 2516981 - RNA, 19 nt, Artificial Sequence
  Description of Artificial Sequence: Synthetic oligonucleotide
ugucguuggagggcaaucu

SEQ ID NO: 2516982 - RNA, 19 nt, Artificial Sequence
  Description of Artificial Sequence: Synthetic oligonucleotide
ucgccgguugcaauucccc

SEQ ID NO: 2516983 - RNA, 19 nt, Artificial Sequence
  Description of Artificial Sequence: Synthetic oligonucleotide
gggaccguaccccuauugg

SEQ ID NO: 2516984 - RNA, 19 nt, Artificial Sequence
  Description of Artificial Sequence: Synthetic oligonucleotide
ucagcgcagaggaauucuc

SEQ ID NO: 2516985 - RNA, 19 nt, Artificial Sequence
  Description of Artificial Sequence: Synthetic oligonucleotide
gggugcauuuuacaguccc

SEQ ID NO: 2516986 - RNA, 19 nt, Artificial Sequence
  Description of Artificial Sequence: Synthetic oligonucleotide
gcaguagacagugaagggc

SEQ ID NO: 2516987 - RNA, 19 nt, Artificial Sequence
  Description of Artificial Sequence: Synthetic oligonucleotide
ggaacugaggucagaaaug

SEQ ID NO: 2516988 - RNA, 19 nt, Artificial Sequence
  Description of Artificial Sequence: Synthetic oligonucleotide
ggagaguuggcaucucccc

SEQ ID NO: 2516989 - RNA, 19 nt, Artificial Sequence
  Description of Artificial Sequence: Synthetic oligonucleotide
uguguuccuccugcaaacc

SEQ ID NO: 2516990 - RNA, 19 nt, Artificial Sequence
  Description of Artificial Sequence: Synthetic oligonucleotide
uggcggcagacaaugcggc

SEQ ID NO: 2516991 - RNA, 19 nt, Artificial Sequence
  Description of Artificial Sequence: Synthetic oligonucleotide
uauuuggcucuugucccgc

SEQ ID NO: 2516992 - RNA, 19 nt, Artificial Sequence
  Description of Artificial Sequence: Synthetic oligonucleotide
accacggccaauguggcga

SEQ ID NO: 2516993 - RNA, 19 nt, Artificial Sequence
  Description of Artificial Sequence: Synthetic oligonucleotide
uucuuucuccauccccacu

SEQ ID NO: 2516994 - RNA, 19 nt, Artificial Sequence
  Description of Artificial Sequence: Synthetic oligonucleotide
guagagauauggagaguug

SEQ ID NO: 2516995 - RNA, 19 nt, Artificial Sequence
  Description of Artificial Sequence: Synthetic oligonucleotide
gcaaacccgagcaaugcgg

SEQ ID NO: 2516996 - RNA, 19 nt, Artificial Sequence
  Description of Artificial Sequence: Synthetic oligonucleotide
agggcaaucugcugggcau

SEQ ID NO: 2516997 - RNA, 19 nt, Artificial Sequence
  Description of Artificial Sequence: Synthetic oligonucleotide
uugguugcggaaggcguag

SEQ ID NO: 2516998 - RNA, 19 nt, Artificial Sequence
  Description of Artificial Sequence: Synthetic oligonucleotide
uucuaugaucucucugaua

SEQ ID NO: 2516999 - RNA, 19 nt, Artificial Sequence
  Description of Artificial Sequence: Synthetic oligonucleotide
caggaggcaguagacagug

SEQ ID NO: 2517000 - RNA, 19 nt, Artificial Sequence
  Description of Artificial Sequence: Synthetic oligonucleotide
cuggacaggaaugcacuag

SEQ ID NO: 2517001 - RNA, 19 nt, Artificial Sequence
  Description of Artificial Sequence: Synthetic oligonucleotide
auggccaccagaggggaag

SEQ ID NO: 2517002 - RNA, 19 nt, Artificial Sequence
  Description of Artificial Sequence: Synthetic oligonucleotide
acagucccgacuaccucgc

SEQ ID NO: 2517003 - RNA, 19 nt, Artificial Sequence
  Description of Artificial Sequence: Synthetic oligonucleotide
gagauagguguagagauau

SEQ ID NO: 2517004 - RNA, 19 nt, Artificial Sequence
  Description of Artificial Sequence: Synthetic oligonucleotide
ggcuguggcgcugaaaucc

SEQ ID NO: 2517005 - RNA, 19 nt, Artificial Sequence
  Description of Artificial Sequence: Synthetic oligonucleotide
ucucgguuauucaggugau

SEQ ID NO: 2517006 - RNA, 19 nt, Artificial Sequence
  Description of Artificial Sequence: Synthetic oligonucleotide
gacacgucuugguugcgga

SEQ ID NO: 2517007 - RNA, 19 nt, Artificial Sequence
  Description of Artificial Sequence: Synthetic oligonucleotide
ggcaccucaggguaaggcc

SEQ ID NO: 2517008 - RNA, 19 nt, Artificial Sequence
  Description of Artificial Sequence: Synthetic oligonucleotide
uugucccgccuccucuagg

SEQ ID NO: 2517009 - RNA, 19 nt, Artificial Sequence
  Description of Artificial Sequence: Synthetic oligonucleotide
gguggcagggagcagggug

SEQ ID NO: 2517010 - RNA, 19 nt, Artificial Sequence
  Description of Artificial Sequence: Synthetic oligonucleotide
gaggucagaaauggggaca

SEQ ID NO: 2517011 - RNA, 19 nt, Artificial Sequence
  Description of Artificial Sequence: Synthetic oligonucleotide
gagcaaugcgggccugggg

SEQ ID NO: 2517012 - RNA, 19 nt, Artificial Sequence
  Description of Artificial Sequence: Synthetic oligonucleotide
cguagugagaggcaggcag

SEQ ID NO: 2517013 - RNA, 19 nt, Artificial Sequence
  Description of Artificial Sequence: Synthetic oligonucleotide
auucucgguuauucaggug

SEQ ID NO: 2517014 - RNA, 19 nt, Artificial Sequence
  Description of Artificial Sequence: Synthetic oligonucleotide
cagugaagggcaaccagca

SEQ ID NO: 2517015 - RNA, 19 nt, Artificial Sequence
  Description of Artificial Sequence: Synthetic oligonucleotide
gaccguaccccuauuggca

SEQ ID NO: 2517016 - RNA, 19 nt, Artificial Sequence
  Description of Artificial Sequence: Synthetic oligonucleotide
agggaccguaccccuauug

SEQ ID NO: 2517017 - RNA, 19 nt, Artificial Sequence
  Description of Artificial Sequence: Synthetic oligonucleotide
ugguuucuaugaucucucu

SEQ ID NO: 2517018 - RNA, 19 nt, Artificial Sequence
  Description of Artificial Sequence: Synthetic oligonucleotide
aaggcguagaugacugggu

SEQ ID NO: 2517019 - RNA, 19 nt, Artificial Sequence
  Description of Artificial Sequence: Synthetic oligonucleotide
cugcaaacccgagcaaugc

SEQ ID NO: 2517020 - RNA, 19 nt, Artificial Sequence
  Description of Artificial Sequence: Synthetic oligonucleotide
guagugagaggcaggcagc

SEQ ID NO: 2517021 - RNA, 19 nt, Artificial Sequence
  Description of Artificial Sequence: Synthetic oligonucleotide
gucguuggagggcaaucug

SEQ ID NO: 2517022 - RNA, 19 nt, Artificial Sequence
  Description of Artificial Sequence: Synthetic oligonucleotide
cacgucuugguugcggaag

SEQ ID NO: 2517023 - RNA, 19 nt, Artificial Sequence
  Description of Artificial Sequence: Synthetic oligonucleotide
ccccaaauggccaccagag

SEQ ID NO: 2517024 - RNA, 19 nt, Artificial Sequence
  Description of Artificial Sequence: Synthetic oligonucleotide
guugcggaaggcguagaug

SEQ ID NO: 2517025 - RNA, 19 nt, Artificial Sequence
  Description of Artificial Sequence: Synthetic oligonucleotide
cagcaaaggcgccaagcac

SEQ ID NO: 2517026 - RNA, 19 nt, Artificial Sequence
  Description of Artificial Sequence: Synthetic oligonucleotide
gggaagccgggccucagcg

SEQ ID NO: 2517027 - RNA, 19 nt, Artificial Sequence
  Description of Artificial Sequence: Synthetic oligonucleotide
ggugagauagguguagaga

SEQ ID NO: 2517028 - RNA, 19 nt, Artificial Sequence
  Description of Artificial Sequence: Synthetic oligonucleotide
ggaccguaccccuauuggc

SEQ ID NO: 2517029 - RNA, 19 nt, Artificial Sequence
  Description of Artificial Sequence: Synthetic oligonucleotide
gagggcaaucugcugggca

SEQ ID NO: 2517030 - RNA, 19 nt, Artificial Sequence
  Description of Artificial Sequence: Synthetic oligonucleotide
guuggagggcaaucugcug

SEQ ID NO: 2517031 - RNA, 19 nt, Artificial Sequence
  Description of Artificial Sequence: Synthetic oligonucleotide
uauucaggugauggcuucu

SEQ ID NO: 2517032 - RNA, 19 nt, Artificial Sequence
  Description of Artificial Sequence: Synthetic oligonucleotide
ucccgccuccucuagggca

SEQ ID NO: 2517033 - RNA, 19 nt, Artificial Sequence
  Description of Artificial Sequence: Synthetic oligonucleotide
uccugcaaacccgagcaau

SEQ ID NO: 2517034 - RNA, 19 nt, Artificial Sequence
  Description of Artificial Sequence: Synthetic oligonucleotide
ccuauuggcagaggggugg

SEQ ID NO: 2517035 - RNA, 19 nt, Artificial Sequence
  Description of Artificial Sequence: Synthetic oligonucleotide
uggcucuugucccgccucc

SEQ ID NO: 2517036 - RNA, 19 nt, Artificial Sequence
  Description of Artificial Sequence: Synthetic oligonucleotide
accccuauuggcagagggg

SEQ ID NO: 2517037 - RNA, 19 nt, Artificial Sequence
  Description of Artificial Sequence: Synthetic oligonucleotide
accagaggggaagccgggc

SEQ ID NO: 2517038 - RNA, 19 nt, Artificial Sequence
  Description of Artificial Sequence: Synthetic oligonucleotide
gugcauuuuacagucccga

SEQ ID NO: 2517039 - RNA, 19 nt, Artificial Sequence
  Description of Artificial Sequence: Synthetic oligonucleotide
ggugcauuuuacagucccg

SEQ ID NO: 2517040 - RNA, 19 nt, Artificial Sequence
  Description of Artificial Sequence: Synthetic oligonucleotide
uuuggggacuggacaggaa

SEQ ID NO: 2517041 - RNA, 19 nt, Artificial Sequence
  Description of Artificial Sequence: Synthetic oligonucleotide
ggaggcucugguuucuaug

SEQ ID NO: 2517042 - RNA, 19 nt, Artificial Sequence
  Description of Artificial Sequence: Synthetic oligonucleotide
aaugcgggccuggggagga

SEQ ID NO: 2517043 - RNA, 19 nt, Artificial Sequence
  Description of Artificial Sequence: Synthetic oligonucleotide
gggugagauagguguagag

SEQ ID NO: 2517044 - RNA, 19 nt, Artificial Sequence
  Description of Artificial Sequence: Synthetic oligonucleotide
cagggugagauagguguag

SEQ ID NO: 2517045 - RNA, 19 nt, Artificial Sequence
  Description of Artificial Sequence: Synthetic oligonucleotide
ggggacacgucuugguugc

SEQ ID NO: 2517046 - RNA, 19 nt, Artificial Sequence
  Description of Artificial Sequence: Synthetic oligonucleotide
cuauuggcagagggguggg

SEQ ID NO: 2517047 - RNA, 19 nt, Artificial Sequence
  Description of Artificial Sequence: Synthetic oligonucleotide
ggaggcaguagacagugaa

SEQ ID NO: 2517048 - RNA, 19 nt, Artificial Sequence
  Description of Artificial Sequence: Synthetic oligonucleotide
ggcguagaugacuggguug

SEQ ID NO: 2517049 - RNA, 19 nt, Artificial Sequence
  Description of Artificial Sequence: Synthetic oligonucleotide
ggcgccaagcaccacggcc

SEQ ID NO: 2517050 - RNA, 19 nt, Artificial Sequence
  Description of Artificial Sequence: Synthetic oligonucleotide
ggcauggcggcagacaaug

SEQ ID NO: 2517051 - RNA, 19 nt, Artificial Sequence
  Description of Artificial Sequence: Synthetic oligonucleotide
agaggcugguguguuccuc

SEQ ID NO: 2517052 - RNA, 19 nt, Artificial Sequence
  Description of Artificial Sequence: Synthetic oligonucleotide
gguggccacguagugagag

SEQ ID NO: 2517053 - RNA, 19 nt, Artificial Sequence
  Description of Artificial Sequence: Synthetic oligonucleotide
aggcguagaugacuggguu

SEQ ID NO: 2517054 - RNA, 19 nt, Artificial Sequence
  Description of Artificial Sequence: Synthetic oligonucleotide
ggacaggaaugcacuaggg

SEQ ID NO: 2517055 - RNA, 19 nt, Artificial Sequence
  Description of Artificial Sequence: Synthetic oligonucleotide
gaaugcacuagggaccgua

SEQ ID NO: 2517056 - RNA, 19 nt, Artificial Sequence
  Description of Artificial Sequence: Synthetic oligonucleotide
gguguguuccuccugcaaa

SEQ ID NO: 2517057 - RNA, 19 nt, Artificial Sequence
  Description of Artificial Sequence: Synthetic oligonucleotide
aggucagaaauggggacaa

SEQ ID NO: 2517058 - RNA, 19 nt, Artificial Sequence
  Description of Artificial Sequence: Synthetic oligonucleotide
gcagaucugggcauagagc

SEQ ID NO: 2517059 - RNA, 19 nt, Artificial Sequence
  Description of Artificial Sequence: Synthetic oligonucleotide
ccucuagggcaccucaggg

SEQ ID NO: 2517060 - RNA, 19 nt, Artificial Sequence
  Description of Artificial Sequence: Synthetic oligonucleotide
caccagaggggaagccggg

SEQ ID NO: 2517061 - RNA, 19 nt, Artificial Sequence
  Description of Artificial Sequence: Synthetic oligonucleotide
gggaacugaggucagaaau

SEQ ID NO: 2517062 - RNA, 19 nt, Artificial Sequence
  Description of Artificial Sequence: Synthetic oligonucleotide
ucuugucccgccuccucua

SEQ ID NO: 2517063 - RNA, 19 nt, Artificial Sequence
  Description of Artificial Sequence: Synthetic oligonucleotide
gguuauucaggugauggcu

SEQ ID NO: 2517064 - RNA, 19 nt, Artificial Sequence
  Description of Artificial Sequence: Synthetic oligonucleotide
ggaaggcguagaugacugg

SEQ ID NO: 2517065 - RNA, 19 nt, Artificial Sequence
  Description of Artificial Sequence: Synthetic oligonucleotide
caauguggcgaugcccuug

SEQ ID NO: 2517066 - RNA, 19 nt, Artificial Sequence
  Description of Artificial Sequence: Synthetic oligonucleotide
cacuccgggaacugagguc

SEQ ID NO: 2517067 - RNA, 19 nt, Artificial Sequence
  Description of Artificial Sequence: Synthetic oligonucleotide
cuugucccgccuccucuag

SEQ ID NO: 2517068 - RNA, 19 nt, Artificial Sequence
  Description of Artificial Sequence: Synthetic oligonucleotide
aguuggcaucuccccagga

SEQ ID NO: 2517069 - RNA, 19 nt, Artificial Sequence
  Description of Artificial Sequence: Synthetic oligonucleotide
ccugcaaacccgagcaaug

SEQ ID NO: 2517070 - RNA, 19 nt, Artificial Sequence
  Description of Artificial Sequence: Synthetic oligonucleotide
agugagaggcaggcagcag

SEQ ID NO: 2517071 - RNA, 19 nt, Artificial Sequence
  Description of Artificial Sequence: Synthetic oligonucleotide
uaccucgccgguugcaauu

SEQ ID NO: 2517072 - RNA, 19 nt, Artificial Sequence
  Description of Artificial Sequence: Synthetic oligonucleotide
caccacggccaauguggcg

SEQ ID NO: 2517073 - RNA, 19 nt, Artificial Sequence
  Description of Artificial Sequence: Synthetic oligonucleotide
ggcucugguuucuaugauc

SEQ ID NO: 2517074 - RNA, 19 nt, Artificial Sequence
  Description of Artificial Sequence: Synthetic oligonucleotide
accucgccgguugcaauuc

SEQ ID NO: 2517075 - RNA, 19 nt, Artificial Sequence
  Description of Artificial Sequence: Synthetic oligonucleotide
gcauuuuacagucccgacu

SEQ ID NO: 2517076 - RNA, 19 nt, Artificial Sequence
  Description of Artificial Sequence: Synthetic oligonucleotide
ccuccugcaaacccgagca

SEQ ID NO: 2517077 - RNA, 19 nt, Artificial Sequence
  Description of Artificial Sequence: Synthetic oligonucleotide
agauagguguagagauaug

SEQ ID NO: 2517078 - RNA, 19 nt, Artificial Sequence
  Description of Artificial Sequence: Synthetic oligonucleotide
ggggacuggacaggaaugc

SEQ ID NO: 2517079 - RNA, 19 nt, Artificial Sequence
  Description of Artificial Sequence: Synthetic oligonucleotide
acccgagcaaugcgggccu

SEQ ID NO: 2517080 - RNA, 19 nt, Artificial Sequence
  Description of Artificial Sequence: Synthetic oligonucleotide
cucugguuucuaugaucuc

SEQ ID NO: 2517081 - RNA, 19 nt, Artificial Sequence
  Description of Artificial Sequence: Synthetic oligonucleotide
aggcgccaagcaccacggc

SEQ ID NO: 2517082 - RNA, 19 nt, Artificial Sequence
  Description of Artificial Sequence: Synthetic oligonucleotide
agacaaugcggcagaucug

SEQ ID NO: 2517083 - RNA, 19 nt, Artificial Sequence
  Description of Artificial Sequence: Synthetic oligonucleotide
gccacguagugagaggcag

SEQ ID NO: 2517084 - RNA, 19 nt, Artificial Sequence
  Description of Artificial Sequence: Synthetic oligonucleotide
agggugagauagguguaga

SEQ ID NO: 2517085 - RNA, 19 nt, Artificial Sequence
  Description of Artificial Sequence: Synthetic oligonucleotide
ggacacgucuugguugcgg

SEQ ID NO: 2517086 - RNA, 19 nt, Artificial Sequence
  Description of Artificial Sequence: Synthetic oligonucleotide
gagcagggugagauaggug

SEQ ID NO: 2517087 - RNA, 19 nt, Artificial Sequence
  Description of Artificial Sequence: Synthetic oligonucleotide
ggcaaucugcugggcaugg

SEQ ID NO: 2517088 - RNA, 19 nt, Artificial Sequence
  Description of Artificial Sequence: Synthetic oligonucleotide
acuaccucgccgguugcaa

SEQ ID NO: 2517089 - RNA, 19 nt, Artificial Sequence
  Description of Artificial Sequence: Synthetic oligonucleotide
ccaagcaccacggccaaug

SEQ ID NO: 2517090 - RNA, 19 nt, Artificial Sequence
  Description of Artificial Sequence: Synthetic oligonucleotide
aggcucugguuucuaugau

SEQ ID NO: 2517091 - RNA, 19 nt, Artificial Sequence
  Description of Artificial Sequence: Synthetic oligonucleotide
gcaaugcgggccuggggag

SEQ ID NO: 2517092 - RNA, 19 nt, Artificial Sequence
  Description of Artificial Sequence: Synthetic oligonucleotide
gcguagaugacuggguuga

SEQ ID NO: 2517093 - RNA, 19 nt, Artificial Sequence
  Description of Artificial Sequence: Synthetic oligonucleotide
gggguauuuggcucuuguc

SEQ ID NO: 2517094 - RNA, 19 nt, Artificial Sequence
  Description of Artificial Sequence: Synthetic oligonucleotide
auguggcgaugcccuugcg

SEQ ID NO: 2517095 - RNA, 19 nt, Artificial Sequence
  Description of Artificial Sequence: Synthetic oligonucleotide
ccagaggcugguguguucc

SEQ ID NO: 2517096 - RNA, 19 nt, Artificial Sequence
  Description of Artificial Sequence: Synthetic oligonucleotide
acacgucuugguugcggaa

SEQ ID NO: 2517097 - RNA, 19 nt, Artificial Sequence
  Description of Artificial Sequence: Synthetic oligonucleotide
aggcugguguguuccuccu

SEQ ID NO: 2517098 - RNA, 19 nt, Artificial Sequence
  Description of Artificial Sequence: Synthetic oligonucleotide
uggcuguggcgcugaaauc

SEQ ID NO: 2517099 - RNA, 19 nt, Artificial Sequence
  Description of Artificial Sequence: Synthetic oligonucleotide
uggcgaugcccuugcgggu

SEQ ID NO: 2517100 - RNA, 19 nt, Artificial Sequence
  Description of Artificial Sequence: Synthetic oligonucleotide
uauggagaguuggcaucuc

SEQ ID NO: 2517101 - RNA, 19 nt, Artificial Sequence
  Description of Artificial Sequence: Synthetic oligonucleotide
gcggcagacaaugcggcag

SEQ ID NO: 2517102 - RNA, 19 nt, Artificial Sequence
  Description of Artificial Sequence: Synthetic oligonucleotide
cucgguuauucaggugaug

SEQ ID NO: 2517103 - RNA, 19 nt, Artificial Sequence
  Description of Artificial Sequence: Synthetic oligonucleotide
ccgacuaccucgccgguug

SEQ ID NO: 2517104 - RNA, 19 nt, Artificial Sequence
  Description of Artificial Sequence: Synthetic oligonucleotide
guuauucaggugauggcuu

SEQ ID NO: 2517105 - RNA, 19 nt, Artificial Sequence
  Description of Artificial Sequence: Synthetic oligonucleotide
ccacguagugagaggcagg

SEQ ID NO: 2517106 - RNA, 19 nt, Artificial Sequence
  Description of Artificial Sequence: Synthetic oligonucleotide
gcacuagggaccguacccc

SEQ ID NO: 2517107 - RNA, 19 nt, Artificial Sequence
  Description of Artificial Sequence: Synthetic oligonucleotide
uggcagggagcagggugag

SEQ ID NO: 2517108 - RNA, 19 nt, Artificial Sequence
  Description of Artificial Sequence: Synthetic oligonucleotide
uggggaggaggcucugguu

SEQ ID NO: 2517109 - RNA, 19 nt, Artificial Sequence
  Description of Artificial Sequence: Synthetic oligonucleotide
cggaaggcguagaugacug

SEQ ID NO: 2517110 - RNA, 19 nt, Artificial Sequence
  Description of Artificial Sequence: Synthetic oligonucleotide
ggggugggguauuuggcuc

SEQ ID NO: 2517111 - RNA, 19 nt, Artificial Sequence
  Description of Artificial Sequence: Synthetic oligonucleotide
cgguuauucaggugauggc

SEQ ID NO: 2517112 - RNA, 19 nt, Artificial Sequence
  Description of Artificial Sequence: Synthetic oligonucleotide
cucuagggcaccucagggu

SEQ ID NO: 2517113 - RNA, 19 nt, Artificial Sequence
  Description of Artificial Sequence: Synthetic oligonucleotide
gcaggugucguuggagggc

SEQ ID NO: 2517114 - RNA, 19 nt, Artificial Sequence
  Description of Artificial Sequence: Synthetic oligonucleotide
gaguuguagguggcaggga

SEQ ID NO: 2517115 - RNA, 19 nt, Artificial Sequence
  Description of Artificial Sequence: Synthetic oligonucleotide
gugucguuggagggcaauc

SEQ ID NO: 2517116 - RNA, 19 nt, Artificial Sequence
  Description of Artificial Sequence: Synthetic oligonucleotide
gcgcugaaauccaggcugg

SEQ ID NO: 2517117 - RNA, 19 nt, Artificial Sequence
  Description of Artificial Sequence: Synthetic oligonucleotide
caggugucguuggagggca

SEQ ID NO: 2517118 - RNA, 19 nt, Artificial Sequence
  Description of Artificial Sequence: Synthetic oligonucleotide
gcagaggaauucucgguua

SEQ ID NO: 2517119 - RNA, 19 nt, Artificial Sequence
  Description of Artificial Sequence: Synthetic oligonucleotide
cccacuccgggaacugagg

SEQ ID NO: 2517120 - RNA, 19 nt, Artificial Sequence
  Description of Artificial Sequence: Synthetic oligonucleotide
cuccgggaacugaggucag

SEQ ID NO: 2517121 - RNA, 19 nt, Artificial Sequence
  Description of Artificial Sequence: Synthetic oligonucleotide
gggaggaggcucugguuuc

SEQ ID NO: 2517122 - RNA, 19 nt, Artificial Sequence
  Description of Artificial Sequence: Synthetic oligonucleotide
guaccccuauuggcagagg

SEQ ID NO: 2517123 - RNA, 19 nt, Artificial Sequence
  Description of Artificial Sequence: Synthetic oligonucleotide
cugguguguuccuccugca

SEQ ID NO: 2517124 - RNA, 19 nt, Artificial Sequence
  Description of Artificial Sequence: Synthetic oligonucleotide
gggcaccucaggguaaggc

SEQ ID NO: 2517125 - RNA, 19 nt, Artificial Sequence
  Description of Artificial Sequence: Synthetic oligonucleotide
cuggguugaucauggaguu

SEQ ID NO: 2517126 - RNA, 19 nt, Artificial Sequence
  Description of Artificial Sequence: Synthetic oligonucleotide
ucccgacuaccucgccggu

SEQ ID NO: 2517127 - RNA, 19 nt, Artificial Sequence
  Description of Artificial Sequence: Synthetic oligonucleotide
gacuaccucgccgguugca

SEQ ID NO: 2517128 - RNA, 19 nt, Artificial Sequence
  Description of Artificial Sequence: Synthetic oligonucleotide
gucccgccuccucuagggc

SEQ ID NO: 2517129 - RNA, 19 nt, Artificial Sequence
  Description of Artificial Sequence: Synthetic oligonucleotide
cuagggcaccucaggguaa

SEQ ID NO: 2517130 - RNA, 19 nt, Artificial Sequence
  Description of Artificial Sequence: Synthetic oligonucleotide
ugguugcggaaggcguaga

SEQ ID NO: 2517131 - RNA, 19 nt, Artificial Sequence
  Description of Artificial Sequence: Synthetic oligonucleotide
acguagugagaggcaggca

SEQ ID NO: 2517132 - RNA, 19 nt, Artificial Sequence
  Description of Artificial Sequence: Synthetic oligonucleotide
ccccacuccgggaacugag

SEQ ID NO: 2517133 - RNA, 19 nt, Artificial Sequence
  Description of Artificial Sequence: Synthetic oligonucleotide
agggcaccucaggguaagg

SEQ ID NO: 2517134 - RNA, 19 nt, Artificial Sequence
  Description of Artificial Sequence: Synthetic oligonucleotide
gcaaaggcgccaagcacca

SEQ ID NO: 2517135 - RNA, 19 nt, Artificial Sequence
  Description of Artificial Sequence: Synthetic oligonucleotide
gaagggcaaccagcaggca

SEQ ID NO: 2517136 - RNA, 19 nt, Artificial Sequence
  Description of Artificial Sequence: Synthetic oligonucleotide
cccuauuggcagaggggug

SEQ ID NO: 2517137 - RNA, 19 nt, Artificial Sequence
  Description of Artificial Sequence: Synthetic oligonucleotide
uagggaccguaccccuauu

SEQ ID NO: 2517138 - RNA, 19 nt, Artificial Sequence
  Description of Artificial Sequence: Synthetic oligonucleotide
cuagggaccguaccccuau

SEQ ID NO: 2517139 - RNA, 19 nt, Artificial Sequence
  Description of Artificial Sequence: Synthetic oligonucleotide
cuccauccccacuccggga

SEQ ID NO: 2517140 - RNA, 19 nt, Artificial Sequence
  Description of Artificial Sequence: Synthetic oligonucleotide
ggagcagggugagauaggu

SEQ ID NO: 2517141 - RNA, 19 nt, Artificial Sequence
  Description of Artificial Sequence: Synthetic oligonucleotide
ggucagaaauggggacaag

SEQ ID NO: 2517142 - RNA, 19 nt, Artificial Sequence
  Description of Artificial Sequence: Synthetic oligonucleotide
gcgccaagcaccacggcca

SEQ ID NO: 2517143 - RNA, 19 nt, Artificial Sequence
  Description of Artificial Sequence: Synthetic oligonucleotide
ggggaagccgggccucagc

SEQ ID NO: 2517144 - RNA, 19 nt, Artificial Sequence
  Description of Artificial Sequence: Synthetic oligonucleotide
cagucccgacuaccucgcc

SEQ ID NO: 2517145 - RNA, 19 nt, Artificial Sequence
  Description of Artificial Sequence: Synthetic oligonucleotide
cucagcgcagaggaauucu

SEQ ID NO: 2517146 - RNA, 19 nt, Artificial Sequence
  Description of Artificial Sequence: Synthetic oligonucleotide
acuagggaccguaccccua

SEQ ID NO: 2517147 - RNA, 19 nt, Artificial Sequence
  Description of Artificial Sequence: Synthetic oligonucleotide
cacuagggaccguaccccu

SEQ ID NO: 2517148 - RNA, 19 nt, Artificial Sequence
  Description of Artificial Sequence: Synthetic oligonucleotide
gggacuggacaggaaugca

SEQ ID NO: 2517149 - RNA, 19 nt, Artificial Sequence
  Description of Artificial Sequence: Synthetic oligonucleotide
cccgccuccucuagggcac

SEQ ID NO: 2517150 - RNA, 19 nt, Artificial Sequence
  Description of Artificial Sequence: Synthetic oligonucleotide
cguaccccuauuggcagag

SEQ ID NO: 2517151 - RNA, 19 nt, Artificial Sequence
  Description of Artificial Sequence: Synthetic oligonucleotide
gugggguauuuggcucuug

SEQ ID NO: 2517152 - RNA, 19 nt, Artificial Sequence
  Description of Artificial Sequence: Synthetic oligonucleotide
gcagacaaugcggcagauc

SEQ ID NO: 2517153 - RNA, 19 nt, Artificial Sequence
  Description of Artificial Sequence: Synthetic oligonucleotide
gaggggaagccgggccuca

SEQ ID NO: 2517154 - RNA, 19 nt, Artificial Sequence
  Description of Artificial Sequence: Synthetic oligonucleotide
ggcggcagacaaugcggca

SEQ ID NO: 2517155 - RNA, 19 nt, Artificial Sequence
  Description of Artificial Sequence: Synthetic oligonucleotide
cgggccucagcgcagagga

SEQ ID NO: 2517156 - RNA, 19 nt, Artificial Sequence
  Description of Artificial Sequence: Synthetic oligonucleotide
guguagagauauggagagu

SEQ ID NO: 2517157 - RNA, 19 nt, Artificial Sequence
  Description of Artificial Sequence: Synthetic oligonucleotide
caaaggcgccaagcaccac

SEQ ID NO: 2517158 - RNA, 19 nt, Artificial Sequence
  Description of Artificial Sequence: Synthetic oligonucleotide
cuccugcaaacccgagcaa

SEQ ID NO: 2517159 - RNA, 19 nt, Artificial Sequence
  Description of Artificial Sequence: Synthetic oligonucleotide
gggugggguauuuggcucu

SEQ ID NO: 2517160 - RNA, 19 nt, Artificial Sequence
  Description of Artificial Sequence: Synthetic oligonucleotide
aggaggcaguagacaguga

SEQ ID NO: 2517161 - RNA, 19 nt, Artificial Sequence
  Description of Artificial Sequence: Synthetic oligonucleotide
gcaccucaggguaaggccu

SEQ ID NO: 2517162 - RNA, 19 nt, Artificial Sequence
  Description of Artificial Sequence: Synthetic oligonucleotide
gcuggggacacgucuuggu

SEQ ID NO: 2517163 - RNA, 19 nt, Artificial Sequence
  Description of Artificial Sequence: Synthetic oligonucleotide
gguugcggaaggcguagau

SEQ ID NO: 2517164 - RNA, 19 nt, Artificial Sequence
  Description of Artificial Sequence: Synthetic oligonucleotide
gcgcagaggaauucucggu

SEQ ID NO: 2517165 - RNA, 19 nt, Artificial Sequence
  Description of Artificial Sequence: Synthetic oligonucleotide
cgagcaaugcgggccuggg

SEQ ID NO: 2517166 - RNA, 19 nt, Artificial Sequence
  Description of Artificial Sequence: Synthetic oligonucleotide
cauggcuguggcgcugaaa

SEQ ID NO: 2517167 - RNA, 19 nt, Artificial Sequence
  Description of Artificial Sequence: Synthetic oligonucleotide
gggacacgucuugguugcg

SEQ ID NO: 2517168 - RNA, 19 nt, Artificial Sequence
  Description of Artificial Sequence: Synthetic oligonucleotide
ccgagcaaugcgggccugg

SEQ ID NO: 2517169 - RNA, 19 nt, Artificial Sequence
  Description of Artificial Sequence: Synthetic oligonucleotide
ccccaggccauggcugugg

SEQ ID NO: 2517170 - RNA, 19 nt, Artificial Sequence
  Description of Artificial Sequence: Synthetic oligonucleotide
ccucgccgguugcaauucc

SEQ ID NO: 2517171 - RNA, 19 nt, Artificial Sequence
  Description of Artificial Sequence: Synthetic oligonucleotide
gcccuugcggguggccacg

SEQ ID NO: 2517172 - RNA, 19 nt, Artificial Sequence
  Description of Artificial Sequence: Synthetic oligonucleotide
gcauggcggcagacaaugc

SEQ ID NO: 2517173 - RNA, 19 nt, Artificial Sequence
  Description of Artificial Sequence: Synthetic oligonucleotide
ggccaccagaggggaagcc

SEQ ID NO: 2517174 - RNA, 19 nt, Artificial Sequence
  Description of Artificial Sequence: Synthetic oligonucleotide
agccgggccucagcgcaga

SEQ ID NO: 2517175 - RNA, 19 nt, Artificial Sequence
  Description of Artificial Sequence: Synthetic oligonucleotide
cuaccucgccgguugcaau

SEQ ID NO: 2517176 - RNA, 19 nt, Artificial Sequence
  Description of Artificial Sequence: Synthetic oligonucleotide
gcggaaggcguagaugacu

SEQ ID NO: 2517177 - RNA, 19 nt, Artificial Sequence
  Description of Artificial Sequence: Synthetic oligonucleotide
ccauccccacuccgggaac

SEQ ID NO: 2517178 - RNA, 19 nt, Artificial Sequence
  Description of Artificial Sequence: Synthetic oligonucleotide
ggccucagcgcagaggaau

SEQ ID NO: 2517179 - RNA, 19 nt, Artificial Sequence
  Description of Artificial Sequence: Synthetic oligonucleotide
ccccuauuggcagaggggu

SEQ ID NO: 2517180 - RNA, 19 nt, Artificial Sequence
  Description of Artificial Sequence: Synthetic oligonucleotide
cguuggagggcaaucugcu

SEQ ID NO: 2517181 - RNA, 19 nt, Artificial Sequence
  Description of Artificial Sequence: Synthetic oligonucleotide
ccucagcgcagaggaauuc

SEQ ID NO: 2517182 - RNA, 19 nt, Artificial Sequence
  Description of Artificial Sequence: Synthetic oligonucleotide
cacggccaauguggcgaug

SEQ ID NO: 2517183 - RNA, 19 nt, Artificial Sequence
  Description of Artificial Sequence: Synthetic oligonucleotide
ggccacguagugagaggca

SEQ ID NO: 2517184 - RNA, 19 nt, Artificial Sequence
  Description of Artificial Sequence: Synthetic oligonucleotide
gcagggugagauaggugua

SEQ ID NO: 2517185 - RNA, 19 nt, Artificial Sequence
  Description of Artificial Sequence: Synthetic oligonucleotide
cgucuugguugcggaaggc

SEQ ID NO: 2517186 - RNA, 19 nt, Artificial Sequence
  Description of Artificial Sequence: Synthetic oligonucleotide
ccucaggguaaggccuggc

SEQ ID NO: 2517187 - RNA, 19 nt, Artificial Sequence
  Description of Artificial Sequence: Synthetic oligonucleotide
cagaggcugguguguuccu

SEQ ID NO: 2517188 - RNA, 19 nt, Artificial Sequence
  Description of Artificial Sequence: Synthetic oligonucleotide
gggcaaccagcaggcagca

SEQ ID NO: 2517189 - RNA, 19 nt, Artificial Sequence
  Description of Artificial Sequence: Synthetic oligonucleotide
ccacuccgggaacugaggu

SEQ ID NO: 2517190 - RNA, 19 nt, Artificial Sequence
  Description of Artificial Sequence: Synthetic oligonucleotide
cgacuaccucgccgguugc

SEQ ID NO: 2517191 - RNA, 19 nt, Artificial Sequence
  Description of Artificial Sequence: Synthetic oligonucleotide
ggugucguuggagggcaau

SEQ ID NO: 2517192 - RNA, 19 nt, Artificial Sequence
  Description of Artificial Sequence: Synthetic oligonucleotide
ccguaccccuauuggcaga

SEQ ID NO: 2517193 - RNA, 19 nt, Artificial Sequence
  Description of Artificial Sequence: Synthetic oligonucleotide
aggugucguuggagggcaa

SEQ ID NO: 2517194 - RNA, 19 nt, Artificial Sequence
  Description of Artificial Sequence: Synthetic oligonucleotide
cggcagacaaugcggcaga

SEQ ID NO: 2517195 - RNA, 19 nt, Artificial Sequence
  Description of Artificial Sequence: Synthetic oligonucleotide
gccgggccucagcgcagag

SEQ ID NO: 2517196 - RNA, 19 nt, Artificial Sequence
  Description of Artificial Sequence: Synthetic oligonucleotide
cgggaacugaggucagaaa

SEQ ID NO: 2517197 - RNA, 19 nt, Artificial Sequence
  Description of Artificial Sequence: Synthetic oligonucleotide
cgcagaggaauucucgguu

SEQ ID NO: 2517198 - RNA, 19 nt, Artificial Sequence
  Description of Artificial Sequence: Synthetic oligonucleotide
gccuccucuagggcaccuc

SEQ ID NO: 2517199 - RNA, 19 nt, Artificial Sequence
  Description of Artificial Sequence: Synthetic oligonucleotide
ggcagggagcagggugaga

SEQ ID NO: 2517200 - RNA, 19 nt, Artificial Sequence
  Description of Artificial Sequence: Synthetic oligonucleotide
ggcagacaaugcggcagau

SEQ ID NO: 2517201 - RNA, 19 nt, Artificial Sequence
  Description of Artificial Sequence: Synthetic oligonucleotide
ggcaaccagcaggcagcaa

SEQ ID NO: 2517202 - RNA, 19 nt, Artificial Sequence
  Description of Artificial Sequence: Synthetic oligonucleotide
gccucagcgcagaggaauu

SEQ ID NO: 2517203 - RNA, 19 nt, Artificial Sequence
  Description of Artificial Sequence: Synthetic oligonucleotide
cccgagcaaugcgggccug

SEQ ID NO: 2517204 - RNA, 19 nt, Artificial Sequence
  Description of Artificial Sequence: Synthetic oligonucleotide
ggaaugcacuagggaccgu

SEQ ID NO: 2517205 - RNA, 19 nt, Artificial Sequence
  Description of Artificial Sequence: Synthetic oligonucleotide
ccgccuccucuagggcacc

SEQ ID NO: 2517206 - RNA, 19 nt, Artificial Sequence
  Description of Artificial Sequence: Synthetic oligonucleotide
ccaauguggcgaugcccuu

SEQ ID NO: 2517207 - RNA, 19 nt, Artificial Sequence
  Description of Artificial Sequence: Synthetic oligonucleotide
gggcauggcggcagacaau

SEQ ID NO: 2517208 - RNA, 19 nt, Artificial Sequence
  Description of Artificial Sequence: Synthetic oligonucleotide
gggccucagcgcagaggaa

SEQ ID NO: 2517209 - RNA, 19 nt, Artificial Sequence
  Description of Artificial Sequence: Synthetic oligonucleotide
cgccaagcaccacggccaa

SEQ ID NO: 2517210 - RNA, 19 nt, Artificial Sequence
  Description of Artificial Sequence: Synthetic oligonucleotide
ccacggccaauguggcgau

SEQ ID NO: 2517211 - RNA, 19 nt, Artificial Sequence
  Description of Artificial Sequence: Synthetic oligonucleotide
gccaagcaccacggccaau

SEQ ID NO: 2517212 - RNA, 19 nt, Artificial Sequence
  Description of Artificial Sequence: Synthetic oligonucleotide
cccgacuaccucgccgguu

SEQ ID NO: 2517213 - RNA, 19 nt, Artificial Sequence
  Description of Artificial Sequence: Synthetic oligonucleotide
cgccuccucuagggcaccu

SEQ ID NO: 2517214 - RNA, 19 nt, Artificial Sequence
  Description of Artificial Sequence: Synthetic oligonucleotide
aaacaucuccgucagaccc

SEQ ID NO: 2517215 - RNA, 19 nt, Artificial Sequence
  Description of Artificial Sequence: Synthetic oligonucleotide
uucugagccacgaagagcg

SEQ ID NO: 2517216 - RNA, 19 nt, Artificial Sequence
  Description of Artificial Sequence: Synthetic oligonucleotide
ucuagcaucagauugagaa

SEQ ID NO: 2517217 - RNA, 19 nt, Artificial Sequence
  Description of Artificial Sequence: Synthetic oligonucleotide
uaaaaguccaaacaaucag

SEQ ID NO: 2517218 - RNA, 19 nt, Artificial Sequence
  Description of Artificial Sequence: Synthetic oligonucleotide
aauuucgaaguucuccuac

SEQ ID NO: 2517219 - RNA, 19 nt, Artificial Sequence
  Description of Artificial Sequence: Synthetic oligonucleotide
cuuuauaggaacaauuuac

SEQ ID NO: 2517220 - RNA, 19 nt, Artificial Sequence
  Description of Artificial Sequence: Synthetic oligonucleotide
aaaaguccaaacaaucagc

SEQ ID NO: 2517221 - RNA, 19 nt, Artificial Sequence
  Description of Artificial Sequence: Synthetic oligonucleotide
ggaacaauuuacuaaaggg

SEQ ID NO: 2517222 - RNA, 19 nt, Artificial Sequence
  Description of Artificial Sequence: Synthetic oligonucleotide
aaucuguacaucuucugag

SEQ ID NO: 2517223 - RNA, 19 nt, Artificial Sequence
  Description of Artificial Sequence: Synthetic oligonucleotide
uuuaaauagauggaugugc

SEQ ID NO: 2517224 - RNA, 19 nt, Artificial Sequence
  Description of Artificial Sequence: Synthetic oligonucleotide
uuaaauagauggaugugcc

SEQ ID NO: 2517225 - RNA, 19 nt, Artificial Sequence
  Description of Artificial Sequence: Synthetic oligonucleotide
uccauuugcaacuuuuccg

SEQ ID NO: 2517226 - RNA, 19 nt, Artificial Sequence
  Description of Artificial Sequence: Synthetic oligonucleotide
cuuacuucuucccacaagg

SEQ ID NO: 2517227 - RNA, 19 nt, Artificial Sequence
  Description of Artificial Sequence: Synthetic oligonucleotide
uaagugagaacucauuaug

SEQ ID NO: 2517228 - RNA, 19 nt, Artificial Sequence
  Description of Artificial Sequence: Synthetic oligonucleotide
uuuauaggaacaauuuacu

SEQ ID NO: 2517229 - RNA, 19 nt, Artificial Sequence
  Description of Artificial Sequence: Synthetic oligonucleotide
auuuacuaaagggauagcg

SEQ ID NO: 2517230 - RNA, 19 nt, Artificial Sequence
  Description of Artificial Sequence: Synthetic oligonucleotide
aauaagugagaacucauua

SEQ ID NO: 2517231 - RNA, 19 nt, Artificial Sequence
  Description of Artificial Sequence: Synthetic oligonucleotide
caugugagaacuuuauagg

SEQ ID NO: 2517232 - RNA, 19 nt, Artificial Sequence
  Description of Artificial Sequence: Synthetic oligonucleotide
uuuacuaaagggauagcgu

SEQ ID NO: 2517233 - RNA, 19 nt, Artificial Sequence
  Description of Artificial Sequence: Synthetic oligonucleotide
uuacuaaagggauagcgug

SEQ ID NO: 2517234 - RNA, 19 nt, Artificial Sequence
  Description of Artificial Sequence: Synthetic oligonucleotide
uacuucaauagucagggga

SEQ ID NO: 2517235 - RNA, 19 nt, Artificial Sequence
  Description of Artificial Sequence: Synthetic oligonucleotide
acagguguuaacuggaguc

SEQ ID NO: 2517236 - RNA, 19 nt, Artificial Sequence
  Description of Artificial Sequence: Synthetic oligonucleotide
uacccaagaaacaaucuag

SEQ ID NO: 2517237 - RNA, 19 nt, Artificial Sequence
  Description of Artificial Sequence: Synthetic oligonucleotide
acaaucuagaucuuuccag

SEQ ID NO: 2517238 - RNA, 19 nt, Artificial Sequence
  Description of Artificial Sequence: Synthetic oligonucleotide
uucaacugaauuucgaagu

SEQ ID NO: 2517239 - RNA, 19 nt, Artificial Sequence
  Description of Artificial Sequence: Synthetic oligonucleotide
ucaaagguggcuccggcgg

SEQ ID NO: 2517240 - RNA, 19 nt, Artificial Sequence
  Description of Artificial Sequence: Synthetic oligonucleotide
aguccaaacaaucagcagu

SEQ ID NO: 2517241 - RNA, 19 nt, Artificial Sequence
  Description of Artificial Sequence: Synthetic oligonucleotide
aggaacaauuuacuaaagg

SEQ ID NO: 2517242 - RNA, 19 nt, Artificial Sequence
  Description of Artificial Sequence: Synthetic oligonucleotide
aaguaccaggaucauaaag

SEQ ID NO: 2517243 - RNA, 19 nt, Artificial Sequence
  Description of Artificial Sequence: Synthetic oligonucleotide
acuuuuccgucucaaagac

SEQ ID NO: 2517244 - RNA, 19 nt, Artificial Sequence
  Description of Artificial Sequence: Synthetic oligonucleotide
aaaaucuguacaucuucug

SEQ ID NO: 2517245 - RNA, 19 nt, Artificial Sequence
  Description of Artificial Sequence: Synthetic oligonucleotide
auaggaacaauuuacuaaa

SEQ ID NO: 2517246 - RNA, 19 nt, Artificial Sequence
  Description of Artificial Sequence: Synthetic oligonucleotide
aacuuuuccgucucaaaga

SEQ ID NO: 2517247 - RNA, 19 nt, Artificial Sequence
  Description of Artificial Sequence: Synthetic oligonucleotide
ucgaaguucuccuaccagg

SEQ ID NO: 2517248 - RNA, 19 nt, Artificial Sequence
  Description of Artificial Sequence: Synthetic oligonucleotide
uacuucuucccacaagggg

SEQ ID NO: 2517249 - RNA, 19 nt, Artificial Sequence
  Description of Artificial Sequence: Synthetic oligonucleotide
gacaacuggaaguaccagg

SEQ ID NO: 2517250 - RNA, 19 nt, Artificial Sequence
  Description of Artificial Sequence: Synthetic oligonucleotide
ugaauuucgaaguucuccu

SEQ ID NO: 2517251 - RNA, 19 nt, Artificial Sequence
  Description of Artificial Sequence: Synthetic oligonucleotide
ucagauugagaacaggaaa

SEQ ID NO: 2517252 - RNA, 19 nt, Artificial Sequence
  Description of Artificial Sequence: Synthetic oligonucleotide
uuauggagggcacaggugu

SEQ ID NO: 2517253 - RNA, 19 nt, Artificial Sequence
  Description of Artificial Sequence: Synthetic oligonucleotide
auuucgaaguucuccuacc

SEQ ID NO: 2517254 - RNA, 19 nt, Artificial Sequence
  Description of Artificial Sequence: Synthetic oligonucleotide
aaacaaucagcaguucaac

SEQ ID NO: 2517255 - RNA, 19 nt, Artificial Sequence
  Description of Artificial Sequence: Synthetic oligonucleotide
ugagaacaggaaauaagug

SEQ ID NO: 2517256 - RNA, 19 nt, Artificial Sequence
  Description of Artificial Sequence: Synthetic oligonucleotide
gauuuaaauagauggaugu

SEQ ID NO: 2517257 - RNA, 19 nt, Artificial Sequence
  Description of Artificial Sequence: Synthetic oligonucleotide
aagugagaacucauuaugg

SEQ ID NO: 2517258 - RNA, 19 nt, Artificial Sequence
  Description of Artificial Sequence: Synthetic oligonucleotide
caauuuacuaaagggauag

SEQ ID NO: 2517259 - RNA, 19 nt, Artificial Sequence
  Description of Artificial Sequence: Synthetic oligonucleotide
uucgggagcaauucguccg

SEQ ID NO: 2517260 - RNA, 19 nt, Artificial Sequence
  Description of Artificial Sequence: Synthetic oligonucleotide
agagcgagagaucaaaggu

SEQ ID NO: 2517261 - RNA, 19 nt, Artificial Sequence
  Description of Artificial Sequence: Synthetic oligonucleotide
aaauagauggaugugccaa

SEQ ID NO: 2517262 - RNA, 19 nt, Artificial Sequence
  Description of Artificial Sequence: Synthetic oligonucleotide
guacucuagcaucagauug

SEQ ID NO: 2517263 - RNA, 19 nt, Artificial Sequence
  Description of Artificial Sequence: Synthetic oligonucleotide
aaagggauagcguggaaua

SEQ ID NO: 2517264 - RNA, 19 nt, Artificial Sequence
  Description of Artificial Sequence: Synthetic oligonucleotide
ccuaccaggacaaauaccc

SEQ ID NO: 2517265 - RNA, 19 nt, Artificial Sequence
  Description of Artificial Sequence: Synthetic oligonucleotide
auugagaacaggaaauaag

SEQ ID NO: 2517266 - RNA, 19 nt, Artificial Sequence
  Description of Artificial Sequence: Synthetic oligonucleotide
uuacuucuucccacaaggg

SEQ ID NO: 2517267 - RNA, 19 nt, Artificial Sequence
  Description of Artificial Sequence: Synthetic oligonucleotide
gugagaacucauuauggag

SEQ ID NO: 2517268 - RNA, 19 nt, Artificial Sequence
  Description of Artificial Sequence: Synthetic oligonucleotide
uguugcuccauuugcaacu

SEQ ID NO: 2517269 - RNA, 19 nt, Artificial Sequence
  Description of Artificial Sequence: Synthetic oligonucleotide
aaucuagaucuuuccagga

SEQ ID NO: 2517270 - RNA, 19 nt, Artificial Sequence
  Description of Artificial Sequence: Synthetic oligonucleotide
aaguccaaacaaucagcag

SEQ ID NO: 2517271 - RNA, 19 nt, Artificial Sequence
  Description of Artificial Sequence: Synthetic oligonucleotide
uacucuagcaucagauuga

SEQ ID NO: 2517272 - RNA, 19 nt, Artificial Sequence
  Description of Artificial Sequence: Synthetic oligonucleotide
agaucuuuccaggaagugg

SEQ ID NO: 2517273 - RNA, 19 nt, Artificial Sequence
  Description of Artificial Sequence: Synthetic oligonucleotide
aacaggaaauaagugagaa

SEQ ID NO: 2517274 - RNA, 19 nt, Artificial Sequence
  Description of Artificial Sequence: Synthetic oligonucleotide
auaagugagaacucauuau

SEQ ID NO: 2517275 - RNA, 19 nt, Artificial Sequence
  Description of Artificial Sequence: Synthetic oligonucleotide
ugagaacuuuauaggaaca

SEQ ID NO: 2517276 - RNA, 19 nt, Artificial Sequence
  Description of Artificial Sequence: Synthetic oligonucleotide
agugagaacucauuaugga

SEQ ID NO: 2517277 - RNA, 19 nt, Artificial Sequence
  Description of Artificial Sequence: Synthetic oligonucleotide
uuauaggaacaauuuacua

SEQ ID NO: 2517278 - RNA, 19 nt, Artificial Sequence
  Description of Artificial Sequence: Synthetic oligonucleotide
uagcaucagauugagaaca

SEQ ID NO: 2517279 - RNA, 19 nt, Artificial Sequence
  Description of Artificial Sequence: Synthetic oligonucleotide
aacuuuauaggaacaauuu

SEQ ID NO: 2517280 - RNA, 19 nt, Artificial Sequence
  Description of Artificial Sequence: Synthetic oligonucleotide
uggagucucuccaugagaa

SEQ ID NO: 2517281 - RNA, 19 nt, Artificial Sequence
  Description of Artificial Sequence: Synthetic oligonucleotide
uucgaaguucuccuaccag

SEQ ID NO: 2517282 - RNA, 19 nt, Artificial Sequence
  Description of Artificial Sequence: Synthetic oligonucleotide
aauagauggaugugccaaa

SEQ ID NO: 2517283 - RNA, 19 nt, Artificial Sequence
  Description of Artificial Sequence: Synthetic oligonucleotide
agaaacagagaaaguuccc

SEQ ID NO: 2517284 - RNA, 19 nt, Artificial Sequence
  Description of Artificial Sequence: Synthetic oligonucleotide
gaaaguucccaccagauuu

SEQ ID NO: 2517285 - RNA, 19 nt, Artificial Sequence
  Description of Artificial Sequence: Synthetic oligonucleotide
uuucgaaguucuccuacca

SEQ ID NO: 2517286 - RNA, 19 nt, Artificial Sequence
  Description of Artificial Sequence: Synthetic oligonucleotide
uaaauagauggaugugcca

SEQ ID NO: 2517287 - RNA, 19 nt, Artificial Sequence
  Description of Artificial Sequence: Synthetic oligonucleotide
ucaggggacgcuuacuucu

SEQ ID NO: 2517288 - RNA, 19 nt, Artificial Sequence
  Description of Artificial Sequence: Synthetic oligonucleotide
ucaaagacaacuggaagua

SEQ ID NO: 2517289 - RNA, 19 nt, Artificial Sequence
  Description of Artificial Sequence: Synthetic oligonucleotide
agcgagagaucaaaggugg

SEQ ID NO: 2517290 - RNA, 19 nt, Artificial Sequence
  Description of Artificial Sequence: Synthetic oligonucleotide
uguacaucuucugagccac

SEQ ID NO: 2517291 - RNA, 19 nt, Artificial Sequence
  Description of Artificial Sequence: Synthetic oligonucleotide
caucagauugagaacagga

SEQ ID NO: 2517292 - RNA, 19 nt, Artificial Sequence
  Description of Artificial Sequence: Synthetic oligonucleotide
ucuccuaccaggacaaaua

SEQ ID NO: 2517293 - RNA, 19 nt, Artificial Sequence
  Description of Artificial Sequence: Synthetic oligonucleotide
uccgucucaaagacaacug

SEQ ID NO: 2517294 - RNA, 19 nt, Artificial Sequence
  Description of Artificial Sequence: Synthetic oligonucleotide
gaacucauuauggagggca

SEQ ID NO: 2517295 - RNA, 19 nt, Artificial Sequence
  Description of Artificial Sequence: Synthetic oligonucleotide
guuaacuggagucucucca

SEQ ID NO: 2517296 - RNA, 19 nt, Artificial Sequence
  Description of Artificial Sequence: Synthetic oligonucleotide
agggauagcguggaauagc

SEQ ID NO: 2517297 - RNA, 19 nt, Artificial Sequence
  Description of Artificial Sequence: Synthetic oligonucleotide
aucaaagguggcuccggcg

SEQ ID NO: 2517298 - RNA, 19 nt, Artificial Sequence
  Description of Artificial Sequence: Synthetic oligonucleotide
auagucaggggacgcuuac

SEQ ID NO: 2517299 - RNA, 19 nt, Artificial Sequence
  Description of Artificial Sequence: Synthetic oligonucleotide
cucuccggaaacaucuccg

SEQ ID NO: 2517300 - RNA, 19 nt, Artificial Sequence
  Description of Artificial Sequence: Synthetic oligonucleotide
acuggaaguaccaggauca

SEQ ID NO: 2517301 - RNA, 19 nt, Artificial Sequence
  Description of Artificial Sequence: Synthetic oligonucleotide
uuucgggagcaauucgucc

SEQ ID NO: 2517302 - RNA, 19 nt, Artificial Sequence
  Description of Artificial Sequence: Synthetic oligonucleotide
cuagcaucagauugagaac

SEQ ID NO: 2517303 - RNA, 19 nt, Artificial Sequence
  Description of Artificial Sequence: Synthetic oligonucleotide
uguuaacuggagucucucc

SEQ ID NO: 2517304 - RNA, 19 nt, Artificial Sequence
  Description of Artificial Sequence: Synthetic oligonucleotide
guggucccaauccacaaag

SEQ ID NO: 2517305 - RNA, 19 nt, Artificial Sequence
  Description of Artificial Sequence: Synthetic oligonucleotide
aagacaacuggaaguacca

SEQ ID NO: 2517306 - RNA, 19 nt, Artificial Sequence
  Description of Artificial Sequence: Synthetic oligonucleotide
auacccaagaaacaaucua

SEQ ID NO: 2517307 - RNA, 19 nt, Artificial Sequence
  Description of Artificial Sequence: Synthetic oligonucleotide
uccgucagaccccacaguc

SEQ ID NO: 2517308 - RNA, 19 nt, Artificial Sequence
  Description of Artificial Sequence: Synthetic oligonucleotide
gacgcuuacuucuucccac

SEQ ID NO: 2517309 - RNA, 19 nt, Artificial Sequence
  Description of Artificial Sequence: Synthetic oligonucleotide
uccuaccaggacaaauacc

SEQ ID NO: 2517310 - RNA, 19 nt, Artificial Sequence
  Description of Artificial Sequence: Synthetic oligonucleotide
gagucucuccaugagaaac

SEQ ID NO: 2517311 - RNA, 19 nt, Artificial Sequence
  Description of Artificial Sequence: Synthetic oligonucleotide
uuccgucucaaagacaacu

SEQ ID NO: 2517312 - RNA, 19 nt, Artificial Sequence
  Description of Artificial Sequence: Synthetic oligonucleotide
ugagccacgaagagcgaga

SEQ ID NO: 2517313 - RNA, 19 nt, Artificial Sequence
  Description of Artificial Sequence: Synthetic oligonucleotide
ucgggagcaauucguccgg

SEQ ID NO: 2517314 - RNA, 19 nt, Artificial Sequence
  Description of Artificial Sequence: Synthetic oligonucleotide
guaccaggaucauaaagga

SEQ ID NO: 2517315 - RNA, 19 nt, Artificial Sequence
  Description of Artificial Sequence: Synthetic oligonucleotide
ucaucuagcucgucguccu

SEQ ID NO: 2517316 - RNA, 19 nt, Artificial Sequence
  Description of Artificial Sequence: Synthetic oligonucleotide
uucaauagucaggggacgc

SEQ ID NO: 2517317 - RNA, 19 nt, Artificial Sequence
  Description of Artificial Sequence: Synthetic oligonucleotide
acaacuggaaguaccagga

SEQ ID NO: 2517318 - RNA, 19 nt, Artificial Sequence
  Description of Artificial Sequence: Synthetic oligonucleotide
uaccaggacaaauacccaa

SEQ ID NO: 2517319 - RNA, 19 nt, Artificial Sequence
  Description of Artificial Sequence: Synthetic oligonucleotide
ggaaacaucuccgucagac

SEQ ID NO: 2517320 - RNA, 19 nt, Artificial Sequence
  Description of Artificial Sequence: Synthetic oligonucleotide
uuaacuggagucucuccau

SEQ ID NO: 2517321 - RNA, 19 nt, Artificial Sequence
  Description of Artificial Sequence: Synthetic oligonucleotide
uaaagggauagcguggaau

SEQ ID NO: 2517322 - RNA, 19 nt, Artificial Sequence
  Description of Artificial Sequence: Synthetic oligonucleotide
aagggauagcguggaauag

SEQ ID NO: 2517323 - RNA, 19 nt, Artificial Sequence
  Description of Artificial Sequence: Synthetic oligonucleotide
ucccacaaggggcauguga

SEQ ID NO: 2517324 - RNA, 19 nt, Artificial Sequence
  Description of Artificial Sequence: Synthetic oligonucleotide
aggaaauaagugagaacuc

SEQ ID NO: 2517325 - RNA, 19 nt, Artificial Sequence
  Description of Artificial Sequence: Synthetic oligonucleotide
gaucaaagguggcuccggc

SEQ ID NO: 2517326 - RNA, 19 nt, Artificial Sequence
  Description of Artificial Sequence: Synthetic oligonucleotide
uggaaaaucuguacaucuu

SEQ ID NO: 2517327 - RNA, 19 nt, Artificial Sequence
  Description of Artificial Sequence: Synthetic oligonucleotide
gagcgagagaucaaaggug

SEQ ID NO: 2517328 - RNA, 19 nt, Artificial Sequence
  Description of Artificial Sequence: Synthetic oligonucleotide
ggucucaucuagcucgucg

SEQ ID NO: 2517329 - RNA, 19 nt, Artificial Sequence
  Description of Artificial Sequence: Synthetic oligonucleotide
uuccacauggcuguacucu

SEQ ID NO: 2517330 - RNA, 19 nt, Artificial Sequence
  Description of Artificial Sequence: Synthetic oligonucleotide
uguacucuagcaucagauu

SEQ ID NO: 2517331 - RNA, 19 nt, Artificial Sequence
  Description of Artificial Sequence: Synthetic oligonucleotide
gaagagcgagagaucaaag

SEQ ID NO: 2517332 - RNA, 19 nt, Artificial Sequence
  Description of Artificial Sequence: Synthetic oligonucleotide
gagcaauucguccggggac

SEQ ID NO: 2517333 - RNA, 19 nt, Artificial Sequence
  Description of Artificial Sequence: Synthetic oligonucleotide
cuucaauagucaggggacg

SEQ ID NO: 2517334 - RNA, 19 nt, Artificial Sequence
  Description of Artificial Sequence: Synthetic oligonucleotide
ggaaguaccaggaucauaa

SEQ ID NO: 2517335 - RNA, 19 nt, Artificial Sequence
  Description of Artificial Sequence: Synthetic oligonucleotide
gauagcguggaauagccuu

SEQ ID NO: 2517336 - RNA, 19 nt, Artificial Sequence
  Description of Artificial Sequence: Synthetic oligonucleotide
acaaagcugcccuggaaaa

SEQ ID NO: 2517337 - RNA, 19 nt, Artificial Sequence
  Description of Artificial Sequence: Synthetic oligonucleotide
aucuagaucuuuccaggaa

SEQ ID NO: 2517338 - RNA, 19 nt, Artificial Sequence
  Description of Artificial Sequence: Synthetic oligonucleotide
uucguccggggacaggggc

SEQ ID NO: 2517339 - RNA, 19 nt, Artificial Sequence
  Description of Artificial Sequence: Synthetic oligonucleotide
cuccuaccaggacaaauac

SEQ ID NO: 2517340 - RNA, 19 nt, Artificial Sequence
  Description of Artificial Sequence: Synthetic oligonucleotide
cucaucuagcucgucgucc

SEQ ID NO: 2517341 - RNA, 19 nt, Artificial Sequence
  Description of Artificial Sequence: Synthetic oligonucleotide
ggaaauaagugagaacuca

SEQ ID NO: 2517342 - RNA, 19 nt, Artificial Sequence
  Description of Artificial Sequence: Synthetic oligonucleotide
uagaucuuuccaggaagug

SEQ ID NO: 2517343 - RNA, 19 nt, Artificial Sequence
  Description of Artificial Sequence: Synthetic oligonucleotide
uaccaggaucauaaaggaa

SEQ ID NO: 2517344 - RNA, 19 nt, Artificial Sequence
  Description of Artificial Sequence: Synthetic oligonucleotide
uguuaggccccaacaguau

SEQ ID NO: 2517345 - RNA, 19 nt, Artificial Sequence
  Description of Artificial Sequence: Synthetic oligonucleotide
ucaauagucaggggacgcu

SEQ ID NO: 2517346 - RNA, 19 nt, Artificial Sequence
  Description of Artificial Sequence: Synthetic oligonucleotide
ucuccggaaacaucuccgu

SEQ ID NO: 2517347 - RNA, 19 nt, Artificial Sequence
  Description of Artificial Sequence: Synthetic oligonucleotide
agaaaguucccaccagauu

SEQ ID NO: 2517348 - RNA, 19 nt, Artificial Sequence
  Description of Artificial Sequence: Synthetic oligonucleotide
agggcacagguguuaacug

SEQ ID NO: 2517349 - RNA, 19 nt, Artificial Sequence
  Description of Artificial Sequence: Synthetic oligonucleotide
gagaacuuuauaggaacaa

SEQ ID NO: 2517350 - RNA, 19 nt, Artificial Sequence
  Description of Artificial Sequence: Synthetic oligonucleotide
cuggaaaaucuguacaucu

SEQ ID NO: 2517351 - RNA, 19 nt, Artificial Sequence
  Description of Artificial Sequence: Synthetic oligonucleotide
accaggacaaauacccaag

SEQ ID NO: 2517352 - RNA, 19 nt, Artificial Sequence
  Description of Artificial Sequence: Synthetic oligonucleotide
agguguuaacuggagucuc

SEQ ID NO: 2517353 - RNA, 19 nt, Artificial Sequence
  Description of Artificial Sequence: Synthetic oligonucleotide
cacauggcuguacucuagc

SEQ ID NO: 2517354 - RNA, 19 nt, Artificial Sequence
  Description of Artificial Sequence: Synthetic oligonucleotide
caguaucugccgcugcugc

SEQ ID NO: 2517355 - RNA, 19 nt, Artificial Sequence
  Description of Artificial Sequence: Synthetic oligonucleotide
auuauggagggcacaggug

SEQ ID NO: 2517356 - RNA, 19 nt, Artificial Sequence
  Description of Artificial Sequence: Synthetic oligonucleotide
guuguugcuccauuugcaa

SEQ ID NO: 2517357 - RNA, 19 nt, Artificial Sequence
  Description of Artificial Sequence: Synthetic oligonucleotide
cagagaaaguucccaccag

SEQ ID NO: 2517358 - RNA, 19 nt, Artificial Sequence
  Description of Artificial Sequence: Synthetic oligonucleotide
auggaugugccaaaguuua

SEQ ID NO: 2517359 - RNA, 19 nt, Artificial Sequence
  Description of Artificial Sequence: Synthetic oligonucleotide
uggucccaauccacaaagc

SEQ ID NO: 2517360 - RNA, 19 nt, Artificial Sequence
  Description of Artificial Sequence: Synthetic oligonucleotide
acauggcuguacucuagca

SEQ ID NO: 2517361 - RNA, 19 nt, Artificial Sequence
  Description of Artificial Sequence: Synthetic oligonucleotide
agucaggggacgcuuacuu

SEQ ID NO: 2517362 - RNA, 19 nt, Artificial Sequence
  Description of Artificial Sequence: Synthetic oligonucleotide
uucuccaccucggcuuucg

SEQ ID NO: 2517363 - RNA, 19 nt, Artificial Sequence
  Description of Artificial Sequence: Synthetic oligonucleotide
gaaguggucccaauccaca

SEQ ID NO: 2517364 - RNA, 19 nt, Artificial Sequence
  Description of Artificial Sequence: Synthetic oligonucleotide
uccggcggcagaccggacc

SEQ ID NO: 2517365 - RNA, 19 nt, Artificial Sequence
  Description of Artificial Sequence: Synthetic oligonucleotide
cacgaagagcgagagauca

SEQ ID NO: 2517366 - RNA, 19 nt, Artificial Sequence
  Description of Artificial Sequence: Synthetic oligonucleotide
gaacuuuauaggaacaauu

SEQ ID NO: 2517367 - RNA, 19 nt, Artificial Sequence
  Description of Artificial Sequence: Synthetic oligonucleotide
aaaguucccaccagauuua

SEQ ID NO: 2517368 - RNA, 19 nt, Artificial Sequence
  Description of Artificial Sequence: Synthetic oligonucleotide
agauugagaacaggaaaua

SEQ ID NO: 2517369 - RNA, 19 nt, Artificial Sequence
  Description of Artificial Sequence: Synthetic oligonucleotide
uaaaggaaguggucccaau

SEQ ID NO: 2517370 - RNA, 19 nt, Artificial Sequence
  Description of Artificial Sequence: Synthetic oligonucleotide
ucucuccaugagaaacaga

SEQ ID NO: 2517371 - RNA, 19 nt, Artificial Sequence
  Description of Artificial Sequence: Synthetic oligonucleotide
cauuugcaacuuuuccguc

SEQ ID NO: 2517372 - RNA, 19 nt, Artificial Sequence
  Description of Artificial Sequence: Synthetic oligonucleotide
ucggcuuucgggagcaauu

SEQ ID NO: 2517373 - RNA, 19 nt, Artificial Sequence
  Description of Artificial Sequence: Synthetic oligonucleotide
cccacaaggggcaugugag

SEQ ID NO: 2517374 - RNA, 19 nt, Artificial Sequence
  Description of Artificial Sequence: Synthetic oligonucleotide
gaacaggaaauaagugaga

SEQ ID NO: 2517375 - RNA, 19 nt, Artificial Sequence
  Description of Artificial Sequence: Synthetic oligonucleotide
uucuccuaccaggacaaau

SEQ ID NO: 2517376 - RNA, 19 nt, Artificial Sequence
  Description of Artificial Sequence: Synthetic oligonucleotide
guuaggccccaacaguauc

SEQ ID NO: 2517377 - RNA, 19 nt, Artificial Sequence
  Description of Artificial Sequence: Synthetic oligonucleotide
uggcuccggcggcagaccg

SEQ ID NO: 2517378 - RNA, 19 nt, Artificial Sequence
  Description of Artificial Sequence: Synthetic oligonucleotide
agacaacuggaaguaccag

SEQ ID NO: 2517379 - RNA, 19 nt, Artificial Sequence
  Description of Artificial Sequence: Synthetic oligonucleotide
acaauuuacuaaagggaua

SEQ ID NO: 2517380 - RNA, 19 nt, Artificial Sequence
  Description of Artificial Sequence: Synthetic oligonucleotide
cugacagcccuguguuagg

SEQ ID NO: 2517381 - RNA, 19 nt, Artificial Sequence
  Description of Artificial Sequence: Synthetic oligonucleotide
acccucuccggaaacaucu

SEQ ID NO: 2517382 - RNA, 19 nt, Artificial Sequence
  Description of Artificial Sequence: Synthetic oligonucleotide
gaauuucgaaguucuccua

SEQ ID NO: 2517383 - RNA, 19 nt, Artificial Sequence
  Description of Artificial Sequence: Synthetic oligonucleotide
uccacauggcuguacucua

SEQ ID NO: 2517384 - RNA, 19 nt, Artificial Sequence
  Description of Artificial Sequence: Synthetic oligonucleotide
ucuagcucgucguccucgu

SEQ ID NO: 2517385 - RNA, 19 nt, Artificial Sequence
  Description of Artificial Sequence: Synthetic oligonucleotide
agcaauucguccggggaca

SEQ ID NO: 2517386 - RNA, 19 nt, Artificial Sequence
  Description of Artificial Sequence: Synthetic oligonucleotide
gggauagcguggaauagcc

SEQ ID NO: 2517387 - RNA, 19 nt, Artificial Sequence
  Description of Artificial Sequence: Synthetic oligonucleotide
caaagacaacuggaaguac

SEQ ID NO: 2517388 - RNA, 19 nt, Artificial Sequence
  Description of Artificial Sequence: Synthetic oligonucleotide
uuuccgucucaaagacaac

SEQ ID NO: 2517389 - RNA, 19 nt, Artificial Sequence
  Description of Artificial Sequence: Synthetic oligonucleotide
gcuuacuucuucccacaag

SEQ ID NO: 2517390 - RNA, 19 nt, Artificial Sequence
  Description of Artificial Sequence: Synthetic oligonucleotide
acgcuuacuucuucccaca

SEQ ID NO: 2517391 - RNA, 19 nt, Artificial Sequence
  Description of Artificial Sequence: Synthetic oligonucleotide
uggaugugccaaaguuuaa

SEQ ID NO: 2517392 - RNA, 19 nt, Artificial Sequence
  Description of Artificial Sequence: Synthetic oligonucleotide
auaaaggaaguggucccaa

SEQ ID NO: 2517393 - RNA, 19 nt, Artificial Sequence
  Description of Artificial Sequence: Synthetic oligonucleotide
aauagucaggggacgcuua

SEQ ID NO: 2517394 - RNA, 19 nt, Artificial Sequence
  Description of Artificial Sequence: Synthetic oligonucleotide
gagccacgaagagcgagag

SEQ ID NO: 2517395 - RNA, 19 nt, Artificial Sequence
  Description of Artificial Sequence: Synthetic oligonucleotide
agcucgucguccucguccu

SEQ ID NO: 2517396 - RNA, 19 nt, Artificial Sequence
  Description of Artificial Sequence: Synthetic oligonucleotide
acaguaucugccgcugcug

SEQ ID NO: 2517397 - RNA, 19 nt, Artificial Sequence
  Description of Artificial Sequence: Synthetic oligonucleotide
caacaguaucugccgcugc

SEQ ID NO: 2517398 - RNA, 19 nt, Artificial Sequence
  Description of Artificial Sequence: Synthetic oligonucleotide
ggcuuucgggagcaauucg

SEQ ID NO: 2517399 - RNA, 19 nt, Artificial Sequence
  Description of Artificial Sequence: Synthetic oligonucleotide
cuguacucuagcaucagau

SEQ ID NO: 2517400 - RNA, 19 nt, Artificial Sequence
  Description of Artificial Sequence: Synthetic oligonucleotide
aggggacgcuuacuucuuc

SEQ ID NO: 2517401 - RNA, 19 nt, Artificial Sequence
  Description of Artificial Sequence: Synthetic oligonucleotide
uauggagggcacagguguu

SEQ ID NO: 2517402 - RNA, 19 nt, Artificial Sequence
  Description of Artificial Sequence: Synthetic oligonucleotide
ccgucucaaagacaacugg

SEQ ID NO: 2517403 - RNA, 19 nt, Artificial Sequence
  Description of Artificial Sequence: Synthetic oligonucleotide
gccccaacaguaucugccg

SEQ ID NO: 2517404 - RNA, 19 nt, Artificial Sequence
  Description of Artificial Sequence: Synthetic oligonucleotide
cugagccacgaagagcgag

SEQ ID NO: 2517405 - RNA, 19 nt, Artificial Sequence
  Description of Artificial Sequence: Synthetic oligonucleotide
gaaguaccaggaucauaaa

SEQ ID NO: 2517406 - RNA, 19 nt, Artificial Sequence
  Description of Artificial Sequence: Synthetic oligonucleotide
agucucuccgacagggucu

SEQ ID NO: 2517407 - RNA, 19 nt, Artificial Sequence
  Description of Artificial Sequence: Synthetic oligonucleotide
acggcagcggccauggcug

SEQ ID NO: 2517408 - RNA, 19 nt, Artificial Sequence
  Description of Artificial Sequence: Synthetic oligonucleotide
ggagcaauucguccgggga

SEQ ID NO: 2517409 - RNA, 19 nt, Artificial Sequence
  Description of Artificial Sequence: Synthetic oligonucleotide
ucagaccccacagucucuc

SEQ ID NO: 2517410 - RNA, 19 nt, Artificial Sequence
  Description of Artificial Sequence: Synthetic oligonucleotide
gcaguucaacugaauuucg

SEQ ID NO: 2517411 - RNA, 19 nt, Artificial Sequence
  Description of Artificial Sequence: Synthetic oligonucleotide
caggaucauaaaggaagug

SEQ ID NO: 2517412 - RNA, 19 nt, Artificial Sequence
  Description of Artificial Sequence: Synthetic oligonucleotide
agaccggacccucuccgga

SEQ ID NO: 2517413 - RNA, 19 nt, Artificial Sequence
  Description of Artificial Sequence: Synthetic oligonucleotide
cagaccggacccucuccgg

SEQ ID NO: 2517414 - RNA, 19 nt, Artificial Sequence
  Description of Artificial Sequence: Synthetic oligonucleotide
ucguccggggacaggggcu

SEQ ID NO: 2517415 - RNA, 19 nt, Artificial Sequence
  Description of Artificial Sequence: Synthetic oligonucleotide
cuuuuccgucucaaagaca

SEQ ID NO: 2517416 - RNA, 19 nt, Artificial Sequence
  Description of Artificial Sequence: Synthetic oligonucleotide
gcagaccggacccucuccg

SEQ ID NO: 2517417 - RNA, 19 nt, Artificial Sequence
  Description of Artificial Sequence: Synthetic oligonucleotide
uccgacagggucucaucua

SEQ ID NO: 2517418 - RNA, 19 nt, Artificial Sequence
  Description of Artificial Sequence: Synthetic oligonucleotide
ggaucauaaaggaaguggu

SEQ ID NO: 2517419 - RNA, 19 nt, Artificial Sequence
  Description of Artificial Sequence: Synthetic oligonucleotide
caggacaaauacccaagaa

SEQ ID NO: 2517420 - RNA, 19 nt, Artificial Sequence
  Description of Artificial Sequence: Synthetic oligonucleotide
ggccccaacaguaucugcc

SEQ ID NO: 2517421 - RNA, 19 nt, Artificial Sequence
  Description of Artificial Sequence: Synthetic oligonucleotide
ucugagccacgaagagcga

SEQ ID NO: 2517422 - RNA, 19 nt, Artificial Sequence
  Description of Artificial Sequence: Synthetic oligonucleotide
aguugcuguuguugcucca

SEQ ID NO: 2517423 - RNA, 19 nt, Artificial Sequence
  Description of Artificial Sequence: Synthetic oligonucleotide
gacggcagcggccauggcu

SEQ ID NO: 2517424 - RNA, 19 nt, Artificial Sequence
  Description of Artificial Sequence: Synthetic oligonucleotide
gggacgcuuacuucuuccc

SEQ ID NO: 2517425 - RNA, 19 nt, Artificial Sequence
  Description of Artificial Sequence: Synthetic oligonucleotide
gggagcaauucguccgggg

SEQ ID NO: 2517426 - RNA, 19 nt, Artificial Sequence
  Description of Artificial Sequence: Synthetic oligonucleotide
ggggacgcuuacuucuucc

SEQ ID NO: 2517427 - RNA, 19 nt, Artificial Sequence
  Description of Artificial Sequence: Synthetic oligonucleotide
ccugacagcccuguguuag

SEQ ID NO: 2517428 - RNA, 19 nt, Artificial Sequence
  Description of Artificial Sequence: Synthetic oligonucleotide
cuccggaaacaucuccguc

SEQ ID NO: 2517429 - RNA, 19 nt, Artificial Sequence
  Description of Artificial Sequence: Synthetic oligonucleotide
gucaggggacgcuuacuuc

SEQ ID NO: 2517430 - RNA, 19 nt, Artificial Sequence
  Description of Artificial Sequence: Synthetic oligonucleotide
uggaaguaccaggaucaua

SEQ ID NO: 2517431 - RNA, 19 nt, Artificial Sequence
  Description of Artificial Sequence: Synthetic oligonucleotide
guguuaacuggagucucuc

SEQ ID NO: 2517432 - RNA, 19 nt, Artificial Sequence
  Description of Artificial Sequence: Synthetic oligonucleotide
cguggaauagccuuccaca

SEQ ID NO: 2517433 - RNA, 19 nt, Artificial Sequence
  Description of Artificial Sequence: Synthetic oligonucleotide
gagaaaguucccaccagau

SEQ ID NO: 2517434 - RNA, 19 nt, Artificial Sequence
  Description of Artificial Sequence: Synthetic oligonucleotide
guguuaggccccaacagua

SEQ ID NO: 2517435 - RNA, 19 nt, Artificial Sequence
  Description of Artificial Sequence: Synthetic oligonucleotide
ggucccaauccacaaagcu

SEQ ID NO: 2517436 - RNA, 19 nt, Artificial Sequence
  Description of Artificial Sequence: Synthetic oligonucleotide
acaucuccgucagacccca

SEQ ID NO: 2517437 - RNA, 19 nt, Artificial Sequence
  Description of Artificial Sequence: Synthetic oligonucleotide
ccgacagggucucaucuag

SEQ ID NO: 2517438 - RNA, 19 nt, Artificial Sequence
  Description of Artificial Sequence: Synthetic oligonucleotide
ccggaaacaucuccgucag

SEQ ID NO: 2517439 - RNA, 19 nt, Artificial Sequence
  Description of Artificial Sequence: Synthetic oligonucleotide
gcguggaauagccuuccac

SEQ ID NO: 2517440 - RNA, 19 nt, Artificial Sequence
  Description of Artificial Sequence: Synthetic oligonucleotide
guacaucuucugagccacg

SEQ ID NO: 2517441 - RNA, 19 nt, Artificial Sequence
  Description of Artificial Sequence: Synthetic oligonucleotide
ccauuugcaacuuuuccgu

SEQ ID NO: 2517442 - RNA, 19 nt, Artificial Sequence
  Description of Artificial Sequence: Synthetic oligonucleotide
caaggggcaugugagaacu

SEQ ID NO: 2517443 - RNA, 19 nt, Artificial Sequence
  Description of Artificial Sequence: Synthetic oligonucleotide
cagaccccacagucucucc

SEQ ID NO: 2517444 - RNA, 19 nt, Artificial Sequence
  Description of Artificial Sequence: Synthetic oligonucleotide
gccacgaagagcgagagau

SEQ ID NO: 2517445 - RNA, 19 nt, Artificial Sequence
  Description of Artificial Sequence: Synthetic oligonucleotide
ggacgcuuacuucuuccca

SEQ ID NO: 2517446 - RNA, 19 nt, Artificial Sequence
  Description of Artificial Sequence: Synthetic oligonucleotide
aggggcaugugagaacuuu

SEQ ID NO: 2517447 - RNA, 19 nt, Artificial Sequence
  Description of Artificial Sequence: Synthetic oligonucleotide
caauucguccggggacagg

SEQ ID NO: 2517448 - RNA, 19 nt, Artificial Sequence
  Description of Artificial Sequence: Synthetic oligonucleotide
auucguccggggacagggg

SEQ ID NO: 2517449 - RNA, 19 nt, Artificial Sequence
  Description of Artificial Sequence: Synthetic oligonucleotide
caccucggcuuucgggagc

SEQ ID NO: 2517450 - RNA, 19 nt, Artificial Sequence
  Description of Artificial Sequence: Synthetic oligonucleotide
ccuguguuaggccccaaca

SEQ ID NO: 2517451 - RNA, 19 nt, Artificial Sequence
  Description of Artificial Sequence: Synthetic oligonucleotide
ccuggaaaaucuguacauc

SEQ ID NO: 2517452 - RNA, 19 nt, Artificial Sequence
  Description of Artificial Sequence: Synthetic oligonucleotide
agcguggaauagccuucca

SEQ ID NO: 2517453 - RNA, 19 nt, Artificial Sequence
  Description of Artificial Sequence: Synthetic oligonucleotide
ggggacaggggcuccccag

SEQ ID NO: 2517454 - RNA, 19 nt, Artificial Sequence
  Description of Artificial Sequence: Synthetic oligonucleotide
gggacaggggcuccccagc

SEQ ID NO: 2517455 - RNA, 19 nt, Artificial Sequence
  Description of Artificial Sequence: Synthetic oligonucleotide
agccacgaagagcgagaga

SEQ ID NO: 2517456 - RNA, 19 nt, Artificial Sequence
  Description of Artificial Sequence: Synthetic oligonucleotide
ccacauggcuguacucuag

SEQ ID NO: 2517457 - RNA, 19 nt, Artificial Sequence
  Description of Artificial Sequence: Synthetic oligonucleotide
gaccggacccucuccggaa

SEQ ID NO: 2517458 - RNA, 19 nt, Artificial Sequence
  Description of Artificial Sequence: Synthetic oligonucleotide
gcggccauggcuguaggac

SEQ ID NO: 2517459 - RNA, 19 nt, Artificial Sequence
  Description of Artificial Sequence: Synthetic oligonucleotide
accucggcuuucgggagca

SEQ ID NO: 2517460 - RNA, 19 nt, Artificial Sequence
  Description of Artificial Sequence: Synthetic oligonucleotide
cuaaagggauagcguggaa

SEQ ID NO: 2517461 - RNA, 19 nt, Artificial Sequence
  Description of Artificial Sequence: Synthetic oligonucleotide
ccaacaguaucugccgcug

SEQ ID NO: 2517462 - RNA, 19 nt, Artificial Sequence
  Description of Artificial Sequence: Synthetic oligonucleotide
gacccucuccggaaacauc

SEQ ID NO: 2517463 - RNA, 19 nt, Artificial Sequence
  Description of Artificial Sequence: Synthetic oligonucleotide
caucuagcucgucguccuc

SEQ ID NO: 2517464 - RNA, 19 nt, Artificial Sequence
  Description of Artificial Sequence: Synthetic oligonucleotide
cagguguuaacuggagucu

SEQ ID NO: 2517465 - RNA, 19 nt, Artificial Sequence
  Description of Artificial Sequence: Synthetic oligonucleotide
cacagguguuaacuggagu

SEQ ID NO: 2517466 - RNA, 19 nt, Artificial Sequence
  Description of Artificial Sequence: Synthetic oligonucleotide
auggagggcacagguguua

SEQ ID NO: 2517467 - RNA, 19 nt, Artificial Sequence
  Description of Artificial Sequence: Synthetic oligonucleotide
gcgacggcagcggccaugg

SEQ ID NO: 2517468 - RNA, 19 nt, Artificial Sequence
  Description of Artificial Sequence: Synthetic oligonucleotide
gucucuccgacagggucuc

SEQ ID NO: 2517469 - RNA, 19 nt, Artificial Sequence
  Description of Artificial Sequence: Synthetic oligonucleotide
cuagcucgucguccucguc

SEQ ID NO: 2517470 - RNA, 19 nt, Artificial Sequence
  Description of Artificial Sequence: Synthetic oligonucleotide
cuccgacagggucucaucu

SEQ ID NO: 2517471 - RNA, 19 nt, Artificial Sequence
  Description of Artificial Sequence: Synthetic oligonucleotide
cccaauccacaaagcugcc

SEQ ID NO: 2517472 - RNA, 19 nt, Artificial Sequence
  Description of Artificial Sequence: Synthetic oligonucleotide
agcgccggcugcagcgacg

SEQ ID NO: 2517473 - RNA, 19 nt, Artificial Sequence
  Description of Artificial Sequence: Synthetic oligonucleotide
aguucccaccagauuuaaa

SEQ ID NO: 2517474 - RNA, 19 nt, Artificial Sequence
  Description of Artificial Sequence: Synthetic oligonucleotide
cuccugacagcccuguguu

SEQ ID NO: 2517475 - RNA, 19 nt, Artificial Sequence
  Description of Artificial Sequence: Synthetic oligonucleotide
ccccaacaguaucugccgc

SEQ ID NO: 2517476 - RNA, 19 nt, Artificial Sequence
  Description of Artificial Sequence: Synthetic oligonucleotide
gcaauucguccggggacag

SEQ ID NO: 2517477 - RNA, 19 nt, Artificial Sequence
  Description of Artificial Sequence: Synthetic oligonucleotide
uucccacaaggggcaugug

SEQ ID NO: 2517478 - RNA, 19 nt, Artificial Sequence
  Description of Artificial Sequence: Synthetic oligonucleotide
ccaggaucauaaaggaagu

SEQ ID NO: 2517479 - RNA, 19 nt, Artificial Sequence
  Description of Artificial Sequence: Synthetic oligonucleotide
aucugccgcugcugcaguu

SEQ ID NO: 2517480 - RNA, 19 nt, Artificial Sequence
  Description of Artificial Sequence: Synthetic oligonucleotide
gcuuucgggagcaauucgu

SEQ ID NO: 2517481 - RNA, 19 nt, Artificial Sequence
  Description of Artificial Sequence: Synthetic oligonucleotide
gcgagagaucaaagguggc

SEQ ID NO: 2517482 - RNA, 19 nt, Artificial Sequence
  Description of Artificial Sequence: Synthetic oligonucleotide
ccacgaagagcgagagauc

SEQ ID NO: 2517483 - RNA, 19 nt, Artificial Sequence
  Description of Artificial Sequence: Synthetic oligonucleotide
aaggggcaugugagaacuu

SEQ ID NO: 2517484 - RNA, 19 nt, Artificial Sequence
  Description of Artificial Sequence: Synthetic oligonucleotide
guggcuccggcggcagacc

SEQ ID NO: 2517485 - RNA, 19 nt, Artificial Sequence
  Description of Artificial Sequence: Synthetic oligonucleotide
cccuguguuaggccccaac

SEQ ID NO: 2517486 - RNA, 19 nt, Artificial Sequence
  Description of Artificial Sequence: Synthetic oligonucleotide
caauagucaggggacgcuu

SEQ ID NO: 2517487 - RNA, 19 nt, Artificial Sequence
  Description of Artificial Sequence: Synthetic oligonucleotide
caaagcugcccuggaaaau

SEQ ID NO: 2517488 - RNA, 19 nt, Artificial Sequence
  Description of Artificial Sequence: Synthetic oligonucleotide
caacuggaaguaccaggau

SEQ ID NO: 2517489 - RNA, 19 nt, Artificial Sequence
  Description of Artificial Sequence: Synthetic oligonucleotide
ccacaaggggcaugugaga

SEQ ID NO: 2517490 - RNA, 19 nt, Artificial Sequence
  Description of Artificial Sequence: Synthetic oligonucleotide
caucuccgucagaccccac

SEQ ID NO: 2517491 - RNA, 19 nt, Artificial Sequence
  Description of Artificial Sequence: Synthetic oligonucleotide
cgaagagcgagagaucaaa

SEQ ID NO: 2517492 - RNA, 19 nt, Artificial Sequence
  Description of Artificial Sequence: Synthetic oligonucleotide
cagcgccggcugcagcgac

SEQ ID NO: 2517493 - RNA, 19 nt, Artificial Sequence
  Description of Artificial Sequence: Synthetic oligonucleotide
ggcuccccagcgccggcug

SEQ ID NO: 2517494 - RNA, 19 nt, Artificial Sequence
  Description of Artificial Sequence: Synthetic oligonucleotide
ccucuucggccuucuccac

SEQ ID NO: 2517495 - RNA, 19 nt, Artificial Sequence
  Description of Artificial Sequence: Synthetic oligonucleotide
cuccgucagaccccacagu

SEQ ID NO: 2517496 - RNA, 19 nt, Artificial Sequence
  Description of Artificial Sequence: Synthetic oligonucleotide
gcuccggcggcagaccgga

SEQ ID NO: 2517497 - RNA, 19 nt, Artificial Sequence
  Description of Artificial Sequence: Synthetic oligonucleotide
cuccccagcgccggcugca

SEQ ID NO: 2517498 - RNA, 19 nt, Artificial Sequence
  Description of Artificial Sequence: Synthetic oligonucleotide
guucuccuaccaggacaaa

SEQ ID NO: 2517499 - RNA, 19 nt, Artificial Sequence
  Description of Artificial Sequence: Synthetic oligonucleotide
ggauagcguggaauagccu

SEQ ID NO: 2517500 - RNA, 19 nt, Artificial Sequence
  Description of Artificial Sequence: Synthetic oligonucleotide
ccggacccucuccggaaac

SEQ ID NO: 2517501 - RNA, 19 nt, Artificial Sequence
  Description of Artificial Sequence: Synthetic oligonucleotide
guccggggacaggggcucc

SEQ ID NO: 2517502 - RNA, 19 nt, Artificial Sequence
  Description of Artificial Sequence: Synthetic oligonucleotide
cucuccgacagggucucau

SEQ ID NO: 2517503 - RNA, 19 nt, Artificial Sequence
  Description of Artificial Sequence: Synthetic oligonucleotide
cggccauggcuguaggaca

SEQ ID NO: 2517504 - RNA, 19 nt, Artificial Sequence
  Description of Artificial Sequence: Synthetic oligonucleotide
cggcuuucgggagcaauuc

SEQ ID NO: 2517505 - RNA, 19 nt, Artificial Sequence
  Description of Artificial Sequence: Synthetic oligonucleotide
caggggacgcuuacuucuu

SEQ ID NO: 2517506 - RNA, 19 nt, Artificial Sequence
  Description of Artificial Sequence: Synthetic oligonucleotide
cucggcuuucgggagcaau

SEQ ID NO: 2517507 - RNA, 19 nt, Artificial Sequence
  Description of Artificial Sequence: Synthetic oligonucleotide
cuccggcggcagaccggac

SEQ ID NO: 2517508 - RNA, 19 nt, Artificial Sequence
  Description of Artificial Sequence: Synthetic oligonucleotide
ggacccucuccggaaacau

SEQ ID NO: 2517509 - RNA, 19 nt, Artificial Sequence
  Description of Artificial Sequence: Synthetic oligonucleotide
ccccuggcauuccuccuga

SEQ ID NO: 2517510 - RNA, 19 nt, Artificial Sequence
  Description of Artificial Sequence: Synthetic oligonucleotide
cgggagcaauucguccggg

SEQ ID NO: 2517511 - RNA, 19 nt, Artificial Sequence
  Description of Artificial Sequence: Synthetic oligonucleotide
cgcuuacuucuucccacaa

SEQ ID NO: 2517512 - RNA, 19 nt, Artificial Sequence
  Description of Artificial Sequence: Synthetic oligonucleotide
cggcagaccggacccucuc

SEQ ID NO: 2517513 - RNA, 19 nt, Artificial Sequence
  Description of Artificial Sequence: Synthetic oligonucleotide
cggacccucuccggaaaca

SEQ ID NO: 2517514 - RNA, 19 nt, Artificial Sequence
  Description of Artificial Sequence: Synthetic oligonucleotide
gcggcagaccggacccucu

SEQ ID NO: 2517515 - RNA, 19 nt, Artificial Sequence
  Description of Artificial Sequence: Synthetic oligonucleotide
ccucggcuuucgggagcaa

SEQ ID NO: 2517516 - RNA, 19 nt, Artificial Sequence
  Description of Artificial Sequence: Synthetic oligonucleotide
ugaaguaacagucaggcgu

SEQ ID NO: 2517517 - RNA, 19 nt, Artificial Sequence
  Description of Artificial Sequence: Synthetic oligonucleotide
aggaauuuggguuccaggc

SEQ ID NO: 2517518 - RNA, 19 nt, Artificial Sequence
  Description of Artificial Sequence: Synthetic oligonucleotide
uggguaaucuuuaagcagg

SEQ ID NO: 2517519 - RNA, 19 nt, Artificial Sequence
  Description of Artificial Sequence: Synthetic oligonucleotide
ucuuuaagcagguagucag

SEQ ID NO: 2517520 - RNA, 19 nt, Artificial Sequence
  Description of Artificial Sequence: Synthetic oligonucleotide
guaaucuuuaagcagguag

SEQ ID NO: 2517521 - RNA, 19 nt, Artificial Sequence
  Description of Artificial Sequence: Synthetic oligonucleotide
ucguccugaagauugaugg

SEQ ID NO: 2517522 - RNA, 19 nt, Artificial Sequence
  Description of Artificial Sequence: Synthetic oligonucleotide
agcuuuugcauuucagacc

SEQ ID NO: 2517523 - RNA, 19 nt, Artificial Sequence
  Description of Artificial Sequence: Synthetic oligonucleotide
gacuggguaaucuuuaagc

SEQ ID NO: 2517524 - RNA, 19 nt, Artificial Sequence
  Description of Artificial Sequence: Synthetic oligonucleotide
ugucauauccuagggaugg

SEQ ID NO: 2517525 - RNA, 19 nt, Artificial Sequence
  Description of Artificial Sequence: Synthetic oligonucleotide
uggaaguuggaggagauag

SEQ ID NO: 2517526 - RNA, 19 nt, Artificial Sequence
  Description of Artificial Sequence: Synthetic oligonucleotide
aguuggaggagauaggacu

SEQ ID NO: 2517527 - RNA, 19 nt, Artificial Sequence
  Description of Artificial Sequence: Synthetic oligonucleotide
uguaucuccguguugacaa

SEQ ID NO: 2517528 - RNA, 19 nt, Artificial Sequence
  Description of Artificial Sequence: Synthetic oligonucleotide
agugucauauccuagggau

SEQ ID NO: 2517529 - RNA, 19 nt, Artificial Sequence
  Description of Artificial Sequence: Synthetic oligonucleotide
aaucuuuaagcagguaguc

SEQ ID NO: 2517530 - RNA, 19 nt, Artificial Sequence
  Description of Artificial Sequence: Synthetic oligonucleotide
gaagcgaaggcacucuggg

SEQ ID NO: 2517531 - RNA, 19 nt, Artificial Sequence
  Description of Artificial Sequence: Synthetic oligonucleotide
cagguagucagucaacucg

SEQ ID NO: 2517532 - RNA, 19 nt, Artificial Sequence
  Description of Artificial Sequence: Synthetic oligonucleotide
ugaggggcaccccaggucg

SEQ ID NO: 2517533 - RNA, 19 nt, Artificial Sequence
  Description of Artificial Sequence: Synthetic oligonucleotide
agcagcacaagugugagag

SEQ ID NO: 2517534 - RNA, 19 nt, Artificial Sequence
  Description of Artificial Sequence: Synthetic oligonucleotide
gaauuuggguuccaggcug

SEQ ID NO: 2517535 - RNA, 19 nt, Artificial Sequence
  Description of Artificial Sequence: Synthetic oligonucleotide
gaggagauaggacuguggc

SEQ ID NO: 2517536 - RNA, 19 nt, Artificial Sequence
  Description of Artificial Sequence: Synthetic oligonucleotide
ugaagauugauggccacag

SEQ ID NO: 2517537 - RNA, 19 nt, Artificial Sequence
  Description of Artificial Sequence: Synthetic oligonucleotide
cucacguggaaguuggagg

SEQ ID NO: 2517538 - RNA, 19 nt, Artificial Sequence
  Description of Artificial Sequence: Synthetic oligonucleotide
agcgaaggcacucugggag

SEQ ID NO: 2517539 - RNA, 19 nt, Artificial Sequence
  Description of Artificial Sequence: Synthetic oligonucleotide
uccauaaagccuugcagug

SEQ ID NO: 2517540 - RNA, 19 nt, Artificial Sequence
  Description of Artificial Sequence: Synthetic oligonucleotide
aaggcacucugggagaggc

SEQ ID NO: 2517541 - RNA, 19 nt, Artificial Sequence
  Description of Artificial Sequence: Synthetic oligonucleotide
cuugcaguguuucucgucc

SEQ ID NO: 2517542 - RNA, 19 nt, Artificial Sequence
  Description of Artificial Sequence: Synthetic oligonucleotide
gacgaaauguaucuccgug

SEQ ID NO: 2517543 - RNA, 19 nt, Artificial Sequence
  Description of Artificial Sequence: Synthetic oligonucleotide
gagcuuuugcauuucagac

SEQ ID NO: 2517544 - RNA, 19 nt, Artificial Sequence
  Description of Artificial Sequence: Synthetic oligonucleotide
cauacacggcuucagagcc

SEQ ID NO: 2517545 - RNA, 19 nt, Artificial Sequence
  Description of Artificial Sequence: Synthetic oligonucleotide
aacgcugcugcccaagugu

SEQ ID NO: 2517546 - RNA, 19 nt, Artificial Sequence
  Description of Artificial Sequence: Synthetic oligonucleotide
aacucgcugauccucacgu

SEQ ID NO: 2517547 - RNA, 19 nt, Artificial Sequence
  Description of Artificial Sequence: Synthetic oligonucleotide
acuggguaaucuuuaagca

SEQ ID NO: 2517548 - RNA, 19 nt, Artificial Sequence
  Description of Artificial Sequence: Synthetic oligonucleotide
auauccuagggaugggagg

SEQ ID NO: 2517549 - RNA, 19 nt, Artificial Sequence
  Description of Artificial Sequence: Synthetic oligonucleotide
ggagauguuggucuggacg

SEQ ID NO: 2517550 - RNA, 19 nt, Artificial Sequence
  Description of Artificial Sequence: Synthetic oligonucleotide
gaggaauuuggguuccagg

SEQ ID NO: 2517551 - RNA, 19 nt, Artificial Sequence
  Description of Artificial Sequence: Synthetic oligonucleotide
aggccuuccccauacacgg

SEQ ID NO: 2517552 - RNA, 19 nt, Artificial Sequence
  Description of Artificial Sequence: Synthetic oligonucleotide
auaagacccuggcugaguc

SEQ ID NO: 2517553 - RNA, 19 nt, Artificial Sequence
  Description of Artificial Sequence: Synthetic oligonucleotide
uguuggucuggacgaagcg

SEQ ID NO: 2517554 - RNA, 19 nt, Artificial Sequence
  Description of Artificial Sequence: Synthetic oligonucleotide
gcuuuugcauuucagaccc

SEQ ID NO: 2517555 - RNA, 19 nt, Artificial Sequence
  Description of Artificial Sequence: Synthetic oligonucleotide
aacagcugugugcaggugu

SEQ ID NO: 2517556 - RNA, 19 nt, Artificial Sequence
  Description of Artificial Sequence: Synthetic oligonucleotide
ugugagaggcagcagcagc

SEQ ID NO: 2517557 - RNA, 19 nt, Artificial Sequence
  Description of Artificial Sequence: Synthetic oligonucleotide
gauugauggccacagugac

SEQ ID NO: 2517558 - RNA, 19 nt, Artificial Sequence
  Description of Artificial Sequence: Synthetic oligonucleotide
gagauguuggucuggacga

SEQ ID NO: 2517559 - RNA, 19 nt, Artificial Sequence
  Description of Artificial Sequence: Synthetic oligonucleotide
ugcaccuccaggcaccgag

SEQ ID NO: 2517560 - RNA, 19 nt, Artificial Sequence
  Description of Artificial Sequence: Synthetic oligonucleotide
caagugucauauccuaggg

SEQ ID NO: 2517561 - RNA, 19 nt, Artificial Sequence
  Description of Artificial Sequence: Synthetic oligonucleotide
uggcugaaguaacagucag

SEQ ID NO: 2517562 - RNA, 19 nt, Artificial Sequence
  Description of Artificial Sequence: Synthetic oligonucleotide
uuggguuccaggcuggcac

SEQ ID NO: 2517563 - RNA, 19 nt, Artificial Sequence
  Description of Artificial Sequence: Synthetic oligonucleotide
ugacuggguaaucuuuaag

SEQ ID NO: 2517564 - RNA, 19 nt, Artificial Sequence
  Description of Artificial Sequence: Synthetic oligonucleotide
aagugucauauccuaggga

SEQ ID NO: 2517565 - RNA, 19 nt, Artificial Sequence
  Description of Artificial Sequence: Synthetic oligonucleotide
cauauccuagggaugggag

SEQ ID NO: 2517566 - RNA, 19 nt, Artificial Sequence
  Description of Artificial Sequence: Synthetic oligonucleotide
cugcccaagugucauaucc

SEQ ID NO: 2517567 - RNA, 19 nt, Artificial Sequence
  Description of Artificial Sequence: Synthetic oligonucleotide
agaggaguccggcuggcac

SEQ ID NO: 2517568 - RNA, 19 nt, Artificial Sequence
  Description of Artificial Sequence: Synthetic oligonucleotide
ucagucgcuccauccagcg

SEQ ID NO: 2517569 - RNA, 19 nt, Artificial Sequence
  Description of Artificial Sequence: Synthetic oligonucleotide
ggugacgaaauguaucucc

SEQ ID NO: 2517570 - RNA, 19 nt, Artificial Sequence
  Description of Artificial Sequence: Synthetic oligonucleotide
uagggaugggaggugaggg

SEQ ID NO: 2517571 - RNA, 19 nt, Artificial Sequence
  Description of Artificial Sequence: Synthetic oligonucleotide
agucgcuccauccagcgcu

SEQ ID NO: 2517572 - RNA, 19 nt, Artificial Sequence
  Description of Artificial Sequence: Synthetic oligonucleotide
aaccuccaggagcuuuugc

SEQ ID NO: 2517573 - RNA, 19 nt, Artificial Sequence
  Description of Artificial Sequence: Synthetic oligonucleotide
agagaaauucuggcaggcc

SEQ ID NO: 2517574 - RNA, 19 nt, Artificial Sequence
  Description of Artificial Sequence: Synthetic oligonucleotide
cucgcugauccucacgugg

SEQ ID NO: 2517575 - RNA, 19 nt, Artificial Sequence
  Description of Artificial Sequence: Synthetic oligonucleotide
uuggucuggacgaagcgaa

SEQ ID NO: 2517576 - RNA, 19 nt, Artificial Sequence
  Description of Artificial Sequence: Synthetic oligonucleotide
agguagucagucaacucgc

SEQ ID NO: 2517577 - RNA, 19 nt, Artificial Sequence
  Description of Artificial Sequence: Synthetic oligonucleotide
uuaagcagguagucaguca

SEQ ID NO: 2517578 - RNA, 19 nt, Artificial Sequence
  Description of Artificial Sequence: Synthetic oligonucleotide
gcugaaguaacagucaggc

SEQ ID NO: 2517579 - RNA, 19 nt, Artificial Sequence
  Description of Artificial Sequence: Synthetic oligonucleotide
acgaaauguaucuccgugu

SEQ ID NO: 2517580 - RNA, 19 nt, Artificial Sequence
  Description of Artificial Sequence: Synthetic oligonucleotide
agccuugcaguguuucucg

SEQ ID NO: 2517581 - RNA, 19 nt, Artificial Sequence
  Description of Artificial Sequence: Synthetic oligonucleotide
cucgagauaagacccuggc

SEQ ID NO: 2517582 - RNA, 19 nt, Artificial Sequence
  Description of Artificial Sequence: Synthetic oligonucleotide
guaacagucaggcgugccc

SEQ ID NO: 2517583 - RNA, 19 nt, Artificial Sequence
  Description of Artificial Sequence: Synthetic oligonucleotide
ggagauaggacuguggcug

SEQ ID NO: 2517584 - RNA, 19 nt, Artificial Sequence
  Description of Artificial Sequence: Synthetic oligonucleotide
aaauucuggcaggccuucc

SEQ ID NO: 2517585 - RNA, 19 nt, Artificial Sequence
  Description of Artificial Sequence: Synthetic oligonucleotide
agggcuacaggacuccuug

SEQ ID NO: 2517586 - RNA, 19 nt, Artificial Sequence
  Description of Artificial Sequence: Synthetic oligonucleotide
uauccuagggaugggaggu

SEQ ID NO: 2517587 - RNA, 19 nt, Artificial Sequence
  Description of Artificial Sequence: Synthetic oligonucleotide
agagaggaauuuggguucc

SEQ ID NO: 2517588 - RNA, 19 nt, Artificial Sequence
  Description of Artificial Sequence: Synthetic oligonucleotide
gugacgaaauguaucuccg

SEQ ID NO: 2517589 - RNA, 19 nt, Artificial Sequence
  Description of Artificial Sequence: Synthetic oligonucleotide
accgagagaaauucuggca

SEQ ID NO: 2517590 - RNA, 19 nt, Artificial Sequence
  Description of Artificial Sequence: Synthetic oligonucleotide
uuuaagcagguagucaguc

SEQ ID NO: 2517591 - RNA, 19 nt, Artificial Sequence
  Description of Artificial Sequence: Synthetic oligonucleotide
guguuucucguccugaaga

SEQ ID NO: 2517592 - RNA, 19 nt, Artificial Sequence
  Description of Artificial Sequence: Synthetic oligonucleotide
aguguuucucguccugaag

SEQ ID NO: 2517593 - RNA, 19 nt, Artificial Sequence
  Description of Artificial Sequence: Synthetic oligonucleotide
ugcccuuugccagcgaagg

SEQ ID NO: 2517594 - RNA, 19 nt, Artificial Sequence
  Description of Artificial Sequence: Synthetic oligonucleotide
ucgagauaagacccuggcu

SEQ ID NO: 2517595 - RNA, 19 nt, Artificial Sequence
  Description of Artificial Sequence: Synthetic oligonucleotide
auaggacuguggcugaagu

SEQ ID NO: 2517596 - RNA, 19 nt, Artificial Sequence
  Description of Artificial Sequence: Synthetic oligonucleotide
ugccacagucuucagucgc

SEQ ID NO: 2517597 - RNA, 19 nt, Artificial Sequence
  Description of Artificial Sequence: Synthetic oligonucleotide
cagcacaagugugagaggc

SEQ ID NO: 2517598 - RNA, 19 nt, Artificial Sequence
  Description of Artificial Sequence: Synthetic oligonucleotide
ccaagugucauauccuagg

SEQ ID NO: 2517599 - RNA, 19 nt, Artificial Sequence
  Description of Artificial Sequence: Synthetic oligonucleotide
gagauaagacccuggcuga

SEQ ID NO: 2517600 - RNA, 19 nt, Artificial Sequence
  Description of Artificial Sequence: Synthetic oligonucleotide
caccgagagaaauucuggc

SEQ ID NO: 2517601 - RNA, 19 nt, Artificial Sequence
  Description of Artificial Sequence: Synthetic oligonucleotide
caggccuuccccauacacg

SEQ ID NO: 2517602 - RNA, 19 nt, Artificial Sequence
  Description of Artificial Sequence: Synthetic oligonucleotide
uucagacccugccacaguc

SEQ ID NO: 2517603 - RNA, 19 nt, Artificial Sequence
  Description of Artificial Sequence: Synthetic oligonucleotide
cuggacgaagcgaaggcac

SEQ ID NO: 2517604 - RNA, 19 nt, Artificial Sequence
  Description of Artificial Sequence: Synthetic oligonucleotide
gagaaauucuggcaggccu

SEQ ID NO: 2517605 - RNA, 19 nt, Artificial Sequence
  Description of Artificial Sequence: Synthetic oligonucleotide
auuucagacccugccacag

SEQ ID NO: 2517606 - RNA, 19 nt, Artificial Sequence
  Description of Artificial Sequence: Synthetic oligonucleotide
ugagucaacgcugcugccc

SEQ ID NO: 2517607 - RNA, 19 nt, Artificial Sequence
  Description of Artificial Sequence: Synthetic oligonucleotide
aaguaacagucaggcgugc

SEQ ID NO: 2517608 - RNA, 19 nt, Artificial Sequence
  Description of Artificial Sequence: Synthetic oligonucleotide
uguuucucguccugaagau

SEQ ID NO: 2517609 - RNA, 19 nt, Artificial Sequence
  Description of Artificial Sequence: Synthetic oligonucleotide
gaggugacgaaauguaucu

SEQ ID NO: 2517610 - RNA, 19 nt, Artificial Sequence
  Description of Artificial Sequence: Synthetic oligonucleotide
agcacugcccuccuucuug

SEQ ID NO: 2517611 - RNA, 19 nt, Artificial Sequence
  Description of Artificial Sequence: Synthetic oligonucleotide
uucagucgcuccauccagc

SEQ ID NO: 2517612 - RNA, 19 nt, Artificial Sequence
  Description of Artificial Sequence: Synthetic oligonucleotide
agucaacucgcugauccuc

SEQ ID NO: 2517613 - RNA, 19 nt, Artificial Sequence
  Description of Artificial Sequence: Synthetic oligonucleotide
cgagauaagacccuggcug

SEQ ID NO: 2517614 - RNA, 19 nt, Artificial Sequence
  Description of Artificial Sequence: Synthetic oligonucleotide
gcugagucaacgcugcugc

SEQ ID NO: 2517615 - RNA, 19 nt, Artificial Sequence
  Description of Artificial Sequence: Synthetic oligonucleotide
acggcuucagagccaacag

SEQ ID NO: 2517616 - RNA, 19 nt, Artificial Sequence
  Description of Artificial Sequence: Synthetic oligonucleotide
agauugauggccacaguga

SEQ ID NO: 2517617 - RNA, 19 nt, Artificial Sequence
  Description of Artificial Sequence: Synthetic oligonucleotide
agcaacagcuggcugggcu

SEQ ID NO: 2517618 - RNA, 19 nt, Artificial Sequence
  Description of Artificial Sequence: Synthetic oligonucleotide
cuucagucgcuccauccag

SEQ ID NO: 2517619 - RNA, 19 nt, Artificial Sequence
  Description of Artificial Sequence: Synthetic oligonucleotide
gcuccauaaagccuugcag

SEQ ID NO: 2517620 - RNA, 19 nt, Artificial Sequence
  Description of Artificial Sequence: Synthetic oligonucleotide
ucaggcgugccccgcaggc

SEQ ID NO: 2517621 - RNA, 19 nt, Artificial Sequence
  Description of Artificial Sequence: Synthetic oligonucleotide
ucauauccuagggauggga

SEQ ID NO: 2517622 - RNA, 19 nt, Artificial Sequence
  Description of Artificial Sequence: Synthetic oligonucleotide
ugcccaagugucauauccu

SEQ ID NO: 2517623 - RNA, 19 nt, Artificial Sequence
  Description of Artificial Sequence: Synthetic oligonucleotide
uucuagggcuacaggacuc

SEQ ID NO: 2517624 - RNA, 19 nt, Artificial Sequence
  Description of Artificial Sequence: Synthetic oligonucleotide
gucuggacgaagcgaaggc

SEQ ID NO: 2517625 - RNA, 19 nt, Artificial Sequence
  Description of Artificial Sequence: Synthetic oligonucleotide
ugacgaaauguaucuccgu

SEQ ID NO: 2517626 - RNA, 19 nt, Artificial Sequence
  Description of Artificial Sequence: Synthetic oligonucleotide
guagucagucaacucgcug

SEQ ID NO: 2517627 - RNA, 19 nt, Artificial Sequence
  Description of Artificial Sequence: Synthetic oligonucleotide
ugcaguguuucucguccug

SEQ ID NO: 2517628 - RNA, 19 nt, Artificial Sequence
  Description of Artificial Sequence: Synthetic oligonucleotide
aagcagguagucagucaac

SEQ ID NO: 2517629 - RNA, 19 nt, Artificial Sequence
  Description of Artificial Sequence: Synthetic oligonucleotide
ugucaucucggccggggac

SEQ ID NO: 2517630 - RNA, 19 nt, Artificial Sequence
  Description of Artificial Sequence: Synthetic oligonucleotide
uugcccuuugccagcgaag

SEQ ID NO: 2517631 - RNA, 19 nt, Artificial Sequence
  Description of Artificial Sequence: Synthetic oligonucleotide
ggagcuuuugcauuucaga

SEQ ID NO: 2517632 - RNA, 19 nt, Artificial Sequence
  Description of Artificial Sequence: Synthetic oligonucleotide
gauaggacuguggcugaag

SEQ ID NO: 2517633 - RNA, 19 nt, Artificial Sequence
  Description of Artificial Sequence: Synthetic oligonucleotide
aucuuuaagcagguaguca

SEQ ID NO: 2517634 - RNA, 19 nt, Artificial Sequence
  Description of Artificial Sequence: Synthetic oligonucleotide
ugccccgcaggcaaggacu

SEQ ID NO: 2517635 - RNA, 19 nt, Artificial Sequence
  Description of Artificial Sequence: Synthetic oligonucleotide
aagacccuggcugagucaa

SEQ ID NO: 2517636 - RNA, 19 nt, Artificial Sequence
  Description of Artificial Sequence: Synthetic oligonucleotide
gguagaggaguccggcugg

SEQ ID NO: 2517637 - RNA, 19 nt, Artificial Sequence
  Description of Artificial Sequence: Synthetic oligonucleotide
auccucacguggaaguugg

SEQ ID NO: 2517638 - RNA, 19 nt, Artificial Sequence
  Description of Artificial Sequence: Synthetic oligonucleotide
ucuggacgaagcgaaggca

SEQ ID NO: 2517639 - RNA, 19 nt, Artificial Sequence
  Description of Artificial Sequence: Synthetic oligonucleotide
gcuacaggacuccuugggg

SEQ ID NO: 2517640 - RNA, 19 nt, Artificial Sequence
  Description of Artificial Sequence: Synthetic oligonucleotide
aagcgaaggcacucuggga

SEQ ID NO: 2517641 - RNA, 19 nt, Artificial Sequence
  Description of Artificial Sequence: Synthetic oligonucleotide
cucguccugaagauugaug

SEQ ID NO: 2517642 - RNA, 19 nt, Artificial Sequence
  Description of Artificial Sequence: Synthetic oligonucleotide
ucuagggcuacaggacucc

SEQ ID NO: 2517643 - RNA, 19 nt, Artificial Sequence
  Description of Artificial Sequence: Synthetic oligonucleotide
ccgagagaaauucuggcag

SEQ ID NO: 2517644 - RNA, 19 nt, Artificial Sequence
  Description of Artificial Sequence: Synthetic oligonucleotide
ucuggaagugcuguggcuu

SEQ ID NO: 2517645 - RNA, 19 nt, Artificial Sequence
  Description of Artificial Sequence: Synthetic oligonucleotide
cuucuugcccuuugccagc

SEQ ID NO: 2517646 - RNA, 19 nt, Artificial Sequence
  Description of Artificial Sequence: Synthetic oligonucleotide
uggacgaagcgaaggcacu

SEQ ID NO: 2517647 - RNA, 19 nt, Artificial Sequence
  Description of Artificial Sequence: Synthetic oligonucleotide
gaggccggaaggcacacga

SEQ ID NO: 2517648 - RNA, 19 nt, Artificial Sequence
  Description of Artificial Sequence: Synthetic oligonucleotide
gagucaacgcugcugccca

SEQ ID NO: 2517649 - RNA, 19 nt, Artificial Sequence
  Description of Artificial Sequence: Synthetic oligonucleotide
cuagggaugggaggugagg

SEQ ID NO: 2517650 - RNA, 19 nt, Artificial Sequence
  Description of Artificial Sequence: Synthetic oligonucleotide
gaccccucaugccuguggc

SEQ ID NO: 2517651 - RNA, 19 nt, Artificial Sequence
  Description of Artificial Sequence: Synthetic oligonucleotide
gauccucacguggaaguug

SEQ ID NO: 2517652 - RNA, 19 nt, Artificial Sequence
  Description of Artificial Sequence: Synthetic oligonucleotide
agaggaauuuggguuccag

SEQ ID NO: 2517653 - RNA, 19 nt, Artificial Sequence
  Description of Artificial Sequence: Synthetic oligonucleotide
acugucaucucggccgggg

SEQ ID NO: 2517654 - RNA, 19 nt, Artificial Sequence
  Description of Artificial Sequence: Synthetic oligonucleotide
cuccauaaagccuugcagu

SEQ ID NO: 2517655 - RNA, 19 nt, Artificial Sequence
  Description of Artificial Sequence: Synthetic oligonucleotide
uccaggagcuuuugcauuu

SEQ ID NO: 2517656 - RNA, 19 nt, Artificial Sequence
  Description of Artificial Sequence: Synthetic oligonucleotide
cagcgaaggccccaggcag

SEQ ID NO: 2517657 - RNA, 19 nt, Artificial Sequence
  Description of Artificial Sequence: Synthetic oligonucleotide
agucuucagucgcuccauc

SEQ ID NO: 2517658 - RNA, 19 nt, Artificial Sequence
  Description of Artificial Sequence: Synthetic oligonucleotide
agucagucaacucgcugau

SEQ ID NO: 2517659 - RNA, 19 nt, Artificial Sequence
  Description of Artificial Sequence: Synthetic oligonucleotide
uucucguccugaagauuga

SEQ ID NO: 2517660 - RNA, 19 nt, Artificial Sequence
  Description of Artificial Sequence: Synthetic oligonucleotide
cguguugacaaccuccagg

SEQ ID NO: 2517661 - RNA, 19 nt, Artificial Sequence
  Description of Artificial Sequence: Synthetic oligonucleotide
agaggcuccauaaagccuu

SEQ ID NO: 2517662 - RNA, 19 nt, Artificial Sequence
  Description of Artificial Sequence: Synthetic oligonucleotide
acagcugugugcagguguc

SEQ ID NO: 2517663 - RNA, 19 nt, Artificial Sequence
  Description of Artificial Sequence: Synthetic oligonucleotide
cacugcaccuccaggcacc

SEQ ID NO: 2517664 - RNA, 19 nt, Artificial Sequence
  Description of Artificial Sequence: Synthetic oligonucleotide
acagugacuggguaaucuu

SEQ ID NO: 2517665 - RNA, 19 nt, Artificial Sequence
  Description of Artificial Sequence: Synthetic oligonucleotide
ccauacacggcuucagagc

SEQ ID NO: 2517666 - RNA, 19 nt, Artificial Sequence
  Description of Artificial Sequence: Synthetic oligonucleotide
uuucagacccugccacagu

SEQ ID NO: 2517667 - RNA, 19 nt, Artificial Sequence
  Description of Artificial Sequence: Synthetic oligonucleotide
uaagacccuggcugaguca

SEQ ID NO: 2517668 - RNA, 19 nt, Artificial Sequence
  Description of Artificial Sequence: Synthetic oligonucleotide
acacgaggugacgaaaugu

SEQ ID NO: 2517669 - RNA, 19 nt, Artificial Sequence
  Description of Artificial Sequence: Synthetic oligonucleotide
ucaacgcugcugcccaagu

SEQ ID NO: 2517670 - RNA, 19 nt, Artificial Sequence
  Description of Artificial Sequence: Synthetic oligonucleotide
gcauuucagacccugccac

SEQ ID NO: 2517671 - RNA, 19 nt, Artificial Sequence
  Description of Artificial Sequence: Synthetic oligonucleotide
cacagucuucagucgcucc

SEQ ID NO: 2517672 - RNA, 19 nt, Artificial Sequence
  Description of Artificial Sequence: Synthetic oligonucleotide
cuccauccagcgcugggcc

SEQ ID NO: 2517673 - RNA, 19 nt, Artificial Sequence
  Description of Artificial Sequence: Synthetic oligonucleotide
uggucuggacgaagcgaag

SEQ ID NO: 2517674 - RNA, 19 nt, Artificial Sequence
  Description of Artificial Sequence: Synthetic oligonucleotide
cugugugcagguguccugc

SEQ ID NO: 2517675 - RNA, 19 nt, Artificial Sequence
  Description of Artificial Sequence: Synthetic oligonucleotide
ggccggaaggcacacgagg

SEQ ID NO: 2517676 - RNA, 19 nt, Artificial Sequence
  Description of Artificial Sequence: Synthetic oligonucleotide
caggaggugggagauguug

SEQ ID NO: 2517677 - RNA, 19 nt, Artificial Sequence
  Description of Artificial Sequence: Synthetic oligonucleotide
cugccacagucuucagucg

SEQ ID NO: 2517678 - RNA, 19 nt, Artificial Sequence
  Description of Artificial Sequence: Synthetic oligonucleotide
agauaagacccuggcugag

SEQ ID NO: 2517679 - RNA, 19 nt, Artificial Sequence
  Description of Artificial Sequence: Synthetic oligonucleotide
caacucgcugauccucacg

SEQ ID NO: 2517680 - RNA, 19 nt, Artificial Sequence
  Description of Artificial Sequence: Synthetic oligonucleotide
cacacgaggugacgaaaug

SEQ ID NO: 2517681 - RNA, 19 nt, Artificial Sequence
  Description of Artificial Sequence: Synthetic oligonucleotide
guggcuucuagggcuacag

SEQ ID NO: 2517682 - RNA, 19 nt, Artificial Sequence
  Description of Artificial Sequence: Synthetic oligonucleotide
aggagcuuuugcauuucag

SEQ ID NO: 2517683 - RNA, 19 nt, Artificial Sequence
  Description of Artificial Sequence: Synthetic oligonucleotide
acgaagcgaaggcacucug

SEQ ID NO: 2517684 - RNA, 19 nt, Artificial Sequence
  Description of Artificial Sequence: Synthetic oligonucleotide
cccauacacggcuucagag

SEQ ID NO: 2517685 - RNA, 19 nt, Artificial Sequence
  Description of Artificial Sequence: Synthetic oligonucleotide
uggcaggccuuccccauac

SEQ ID NO: 2517686 - RNA, 19 nt, Artificial Sequence
  Description of Artificial Sequence: Synthetic oligonucleotide
uggaggagauaggacugug

SEQ ID NO: 2517687 - RNA, 19 nt, Artificial Sequence
  Description of Artificial Sequence: Synthetic oligonucleotide
aggugacgaaauguaucuc

SEQ ID NO: 2517688 - RNA, 19 nt, Artificial Sequence
  Description of Artificial Sequence: Synthetic oligonucleotide
ugggaggugaggggcaccc

SEQ ID NO: 2517689 - RNA, 19 nt, Artificial Sequence
  Description of Artificial Sequence: Synthetic oligonucleotide
uuugccagcgaaggcccca

SEQ ID NO: 2517690 - RNA, 19 nt, Artificial Sequence
  Description of Artificial Sequence: Synthetic oligonucleotide
aggugaggggcaccccagg

SEQ ID NO: 2517691 - RNA, 19 nt, Artificial Sequence
  Description of Artificial Sequence: Synthetic oligonucleotide
ucuccguguugacaaccuc

SEQ ID NO: 2517692 - RNA, 19 nt, Artificial Sequence
  Description of Artificial Sequence: Synthetic oligonucleotide
guuggucuggacgaagcga

SEQ ID NO: 2517693 - RNA, 19 nt, Artificial Sequence
  Description of Artificial Sequence: Synthetic oligonucleotide
uacacggcuucagagccaa

SEQ ID NO: 2517694 - RNA, 19 nt, Artificial Sequence
  Description of Artificial Sequence: Synthetic oligonucleotide
cuggaagugcuguggcuuc

SEQ ID NO: 2517695 - RNA, 19 nt, Artificial Sequence
  Description of Artificial Sequence: Synthetic oligonucleotide
acagucaggcgugccccgc

SEQ ID NO: 2517696 - RNA, 19 nt, Artificial Sequence
  Description of Artificial Sequence: Synthetic oligonucleotide
cacgaggugacgaaaugua

SEQ ID NO: 2517697 - RNA, 19 nt, Artificial Sequence
  Description of Artificial Sequence: Synthetic oligonucleotide
auguaucuccguguugaca

SEQ ID NO: 2517698 - RNA, 19 nt, Artificial Sequence
  Description of Artificial Sequence: Synthetic oligonucleotide
uccuagggaugggagguga

SEQ ID NO: 2517699 - RNA, 19 nt, Artificial Sequence
  Description of Artificial Sequence: Synthetic oligonucleotide
ugcugcccaagugucauau

SEQ ID NO: 2517700 - RNA, 19 nt, Artificial Sequence
  Description of Artificial Sequence: Synthetic oligonucleotide
ggaggagauaggacugugg

SEQ ID NO: 2517701 - RNA, 19 nt, Artificial Sequence
  Description of Artificial Sequence: Synthetic oligonucleotide
ggcaccgagagaaauucug

SEQ ID NO: 2517702 - RNA, 19 nt, Artificial Sequence
  Description of Artificial Sequence: Synthetic oligonucleotide
gcaccgagagaaauucugg

SEQ ID NO: 2517703 - RNA, 19 nt, Artificial Sequence
  Description of Artificial Sequence: Synthetic oligonucleotide
gugucauauccuagggaug

SEQ ID NO: 2517704 - RNA, 19 nt, Artificial Sequence
  Description of Artificial Sequence: Synthetic oligonucleotide
uccccauacacggcuucag

SEQ ID NO: 2517705 - RNA, 19 nt, Artificial Sequence
  Description of Artificial Sequence: Synthetic oligonucleotide
gucauauccuagggauggg

SEQ ID NO: 2517706 - RNA, 19 nt, Artificial Sequence
  Description of Artificial Sequence: Synthetic oligonucleotide
gaaggcacucugggagagg

SEQ ID NO: 2517707 - RNA, 19 nt, Artificial Sequence
  Description of Artificial Sequence: Synthetic oligonucleotide
agaaauucuggcaggccuu

SEQ ID NO: 2517708 - RNA, 19 nt, Artificial Sequence
  Description of Artificial Sequence: Synthetic oligonucleotide
cauuucagacccugccaca

SEQ ID NO: 2517709 - RNA, 19 nt, Artificial Sequence
  Description of Artificial Sequence: Synthetic oligonucleotide
agugacuggguaaucuuua

SEQ ID NO: 2517710 - RNA, 19 nt, Artificial Sequence
  Description of Artificial Sequence: Synthetic oligonucleotide
gugagaggcagcagcagca

SEQ ID NO: 2517711 - RNA, 19 nt, Artificial Sequence
  Description of Artificial Sequence: Synthetic oligonucleotide
cugagucaacgcugcugcc

SEQ ID NO: 2517712 - RNA, 19 nt, Artificial Sequence
  Description of Artificial Sequence: Synthetic oligonucleotide
ucuggcaggccuuccccau

SEQ ID NO: 2517713 - RNA, 19 nt, Artificial Sequence
  Description of Artificial Sequence: Synthetic oligonucleotide
agucaggcgugccccgcag

SEQ ID NO: 2517714 - RNA, 19 nt, Artificial Sequence
  Description of Artificial Sequence: Synthetic oligonucleotide
gguguccugcaggaggugg

SEQ ID NO: 2517715 - RNA, 19 nt, Artificial Sequence
  Description of Artificial Sequence: Synthetic oligonucleotide
cgagagaaauucuggcagg

SEQ ID NO: 2517716 - RNA, 19 nt, Artificial Sequence
  Description of Artificial Sequence: Synthetic oligonucleotide
acucgcugauccucacgug

SEQ ID NO: 2517717 - RNA, 19 nt, Artificial Sequence
  Description of Artificial Sequence: Synthetic oligonucleotide
ggcugaaguaacagucagg

SEQ ID NO: 2517718 - RNA, 19 nt, Artificial Sequence
  Description of Artificial Sequence: Synthetic oligonucleotide
acguggaaguuggaggaga

SEQ ID NO: 2517719 - RNA, 19 nt, Artificial Sequence
  Description of Artificial Sequence: Synthetic oligonucleotide
gugugcagguguccugcag

SEQ ID NO: 2517720 - RNA, 19 nt, Artificial Sequence
  Description of Artificial Sequence: Synthetic oligonucleotide
gaggugaggggcaccccag

SEQ ID NO: 2517721 - RNA, 19 nt, Artificial Sequence
  Description of Artificial Sequence: Synthetic oligonucleotide
cuuugccagcgaaggcccc

SEQ ID NO: 2517722 - RNA, 19 nt, Artificial Sequence
  Description of Artificial Sequence: Synthetic oligonucleotide
ggugggagauguuggucug

SEQ ID NO: 2517723 - RNA, 19 nt, Artificial Sequence
  Description of Artificial Sequence: Synthetic oligonucleotide
guaucuccguguugacaac

SEQ ID NO: 2517724 - RNA, 19 nt, Artificial Sequence
  Description of Artificial Sequence: Synthetic oligonucleotide
uccggcuggcacugcaccu

SEQ ID NO: 2517725 - RNA, 19 nt, Artificial Sequence
  Description of Artificial Sequence: Synthetic oligonucleotide
gcagagaggaauuuggguu

SEQ ID NO: 2517726 - RNA, 19 nt, Artificial Sequence
  Description of Artificial Sequence: Synthetic oligonucleotide
uccauccagcgcugggcca

SEQ ID NO: 2517727 - RNA, 19 nt, Artificial Sequence
  Description of Artificial Sequence: Synthetic oligonucleotide
gcuucuagggcuacaggac

SEQ ID NO: 2517728 - RNA, 19 nt, Artificial Sequence
  Description of Artificial Sequence: Synthetic oligonucleotide
agcugccagcagcacaagu

SEQ ID NO: 2517729 - RNA, 19 nt, Artificial Sequence
  Description of Artificial Sequence: Synthetic oligonucleotide
gacuguggcugaaguaaca

SEQ ID NO: 2517730 - RNA, 19 nt, Artificial Sequence
  Description of Artificial Sequence: Synthetic oligonucleotide
cugauccucacguggaagu

SEQ ID NO: 2517731 - RNA, 19 nt, Artificial Sequence
  Description of Artificial Sequence: Synthetic oligonucleotide
caacgcugcugcccaagug

SEQ ID NO: 2517732 - RNA, 19 nt, Artificial Sequence
  Description of Artificial Sequence: Synthetic oligonucleotide
gaggugggagauguugguc

SEQ ID NO: 2517733 - RNA, 19 nt, Artificial Sequence
  Description of Artificial Sequence: Synthetic oligonucleotide
guccggcuggcacugcacc

SEQ ID NO: 2517734 - RNA, 19 nt, Artificial Sequence
  Description of Artificial Sequence: Synthetic oligonucleotide
aggucggagcacugcccuc

SEQ ID NO: 2517735 - RNA, 19 nt, Artificial Sequence
  Description of Artificial Sequence: Synthetic oligonucleotide
gaugggaggugaggggcac

SEQ ID NO: 2517736 - RNA, 19 nt, Artificial Sequence
  Description of Artificial Sequence: Synthetic oligonucleotide
gugacuggguaaucuuuaa

SEQ ID NO: 2517737 - RNA, 19 nt, Artificial Sequence
  Description of Artificial Sequence: Synthetic oligonucleotide
ggaccccucaugccugugg

SEQ ID NO: 2517738 - RNA, 19 nt, Artificial Sequence
  Description of Artificial Sequence: Synthetic oligonucleotide
cuuuaagcagguagucagu

SEQ ID NO: 2517739 - RNA, 19 nt, Artificial Sequence
  Description of Artificial Sequence: Synthetic oligonucleotide
cuuccccauacacggcuuc

SEQ ID NO: 2517740 - RNA, 19 nt, Artificial Sequence
  Description of Artificial Sequence: Synthetic oligonucleotide
cccaagugucauauccuag

SEQ ID NO: 2517741 - RNA, 19 nt, Artificial Sequence
  Description of Artificial Sequence: Synthetic oligonucleotide
gucaacucgcugauccuca

SEQ ID NO: 2517742 - RNA, 19 nt, Artificial Sequence
  Description of Artificial Sequence: Synthetic oligonucleotide
augggaggugaggggcacc

SEQ ID NO: 2517743 - RNA, 19 nt, Artificial Sequence
  Description of Artificial Sequence: Synthetic oligonucleotide
ugcagguguccugcaggag

SEQ ID NO: 2517744 - RNA, 19 nt, Artificial Sequence
  Description of Artificial Sequence: Synthetic oligonucleotide
uagggcuacaggacuccuu

SEQ ID NO: 2517745 - RNA, 19 nt, Artificial Sequence
  Description of Artificial Sequence: Synthetic oligonucleotide
gcucuggaagugcuguggc

SEQ ID NO: 2517746 - RNA, 19 nt, Artificial Sequence
  Description of Artificial Sequence: Synthetic oligonucleotide
ggcuccauaaagccuugca

SEQ ID NO: 2517747 - RNA, 19 nt, Artificial Sequence
  Description of Artificial Sequence: Synthetic oligonucleotide
aggcuccauaaagccuugc

SEQ ID NO: 2517748 - RNA, 19 nt, Artificial Sequence
  Description of Artificial Sequence: Synthetic oligonucleotide
cuucuagggcuacaggacu

SEQ ID NO: 2517749 - RNA, 19 nt, Artificial Sequence
  Description of Artificial Sequence: Synthetic oligonucleotide
cacggcuucagagccaaca

SEQ ID NO: 2517750 - RNA, 19 nt, Artificial Sequence
  Description of Artificial Sequence: Synthetic oligonucleotide
gugaggggcaccccagguc

SEQ ID NO: 2517751 - RNA, 19 nt, Artificial Sequence
  Description of Artificial Sequence: Synthetic oligonucleotide
gucaacgcugcugcccaag

SEQ ID NO: 2517752 - RNA, 19 nt, Artificial Sequence
  Description of Artificial Sequence: Synthetic oligonucleotide
ugauccucacguggaaguu

SEQ ID NO: 2517753 - RNA, 19 nt, Artificial Sequence
  Description of Artificial Sequence: Synthetic oligonucleotide
cugaagauugauggccaca

SEQ ID NO: 2517754 - RNA, 19 nt, Artificial Sequence
  Description of Artificial Sequence: Synthetic oligonucleotide
cgaggugacgaaauguauc

SEQ ID NO: 2517755 - RNA, 19 nt, Artificial Sequence
  Description of Artificial Sequence: Synthetic oligonucleotide
uguggcuucuagggcuaca

SEQ ID NO: 2517756 - RNA, 19 nt, Artificial Sequence
  Description of Artificial Sequence: Synthetic oligonucleotide
aucuccguguugacaaccu

SEQ ID NO: 2517757 - RNA, 19 nt, Artificial Sequence
  Description of Artificial Sequence: Synthetic oligonucleotide
aguccggcuggcacugcac

SEQ ID NO: 2517758 - RNA, 19 nt, Artificial Sequence
  Description of Artificial Sequence: Synthetic oligonucleotide
gaagauugauggccacagu

SEQ ID NO: 2517759 - RNA, 19 nt, Artificial Sequence
  Description of Artificial Sequence: Synthetic oligonucleotide
gucaggcgugccccgcagg

SEQ ID NO: 2517760 - RNA, 19 nt, Artificial Sequence
  Description of Artificial Sequence: Synthetic oligonucleotide
ugccagcgaaggccccagg

SEQ ID NO: 2517761 - RNA, 19 nt, Artificial Sequence
  Description of Artificial Sequence: Synthetic oligonucleotide
acgcugcugcccaaguguc

SEQ ID NO: 2517762 - RNA, 19 nt, Artificial Sequence
  Description of Artificial Sequence: Synthetic oligonucleotide
uugccagcgaaggccccag

SEQ ID NO: 2517763 - RNA, 19 nt, Artificial Sequence
  Description of Artificial Sequence: Synthetic oligonucleotide
agcgcugggccaggaagag

SEQ ID NO: 2517764 - RNA, 19 nt, Artificial Sequence
  Description of Artificial Sequence: Synthetic oligonucleotide
aacagcuggcugggcugag

SEQ ID NO: 2517765 - RNA, 19 nt, Artificial Sequence
  Description of Artificial Sequence: Synthetic oligonucleotide
uggaagugcuguggcuucu

SEQ ID NO: 2517766 - RNA, 19 nt, Artificial Sequence
  Description of Artificial Sequence: Synthetic oligonucleotide
gcagcacaagugugagagg

SEQ ID NO: 2517767 - RNA, 19 nt, Artificial Sequence
  Description of Artificial Sequence: Synthetic oligonucleotide
gauaagacccuggcugagu

SEQ ID NO: 2517768 - RNA, 19 nt, Artificial Sequence
  Description of Artificial Sequence: Synthetic oligonucleotide
cuugcccuuugccagcgaa

SEQ ID NO: 2517769 - RNA, 19 nt, Artificial Sequence
  Description of Artificial Sequence: Synthetic oligonucleotide
uggccacagugacugggua

SEQ ID NO: 2517770 - RNA, 19 nt, Artificial Sequence
  Description of Artificial Sequence: Synthetic oligonucleotide
acgaggugacgaaauguau

SEQ ID NO: 2517771 - RNA, 19 nt, Artificial Sequence
  Description of Artificial Sequence: Synthetic oligonucleotide
cacguggaaguuggaggag

SEQ ID NO: 2517772 - RNA, 19 nt, Artificial Sequence
  Description of Artificial Sequence: Synthetic oligonucleotide
aggcgugccccgcaggcaa

SEQ ID NO: 2517773 - RNA, 19 nt, Artificial Sequence
  Description of Artificial Sequence: Synthetic oligonucleotide
aggcacacgaggugacgaa

SEQ ID NO: 2517774 - RNA, 19 nt, Artificial Sequence
  Description of Artificial Sequence: Synthetic oligonucleotide
gaguccggcuggcacugca

SEQ ID NO: 2517775 - RNA, 19 nt, Artificial Sequence
  Description of Artificial Sequence: Synthetic oligonucleotide
gcugauccucacguggaag

SEQ ID NO: 2517776 - RNA, 19 nt, Artificial Sequence
  Description of Artificial Sequence: Synthetic oligonucleotide
ggaggugaggggcacccca

SEQ ID NO: 2517777 - RNA, 19 nt, Artificial Sequence
  Description of Artificial Sequence: Synthetic oligonucleotide
gcagguagucagucaacuc

SEQ ID NO: 2517778 - RNA, 19 nt, Artificial Sequence
  Description of Artificial Sequence: Synthetic oligonucleotide
uccucacguggaaguugga

SEQ ID NO: 2517779 - RNA, 19 nt, Artificial Sequence
  Description of Artificial Sequence: Synthetic oligonucleotide
gggcuacaggacuccuugg

SEQ ID NO: 2517780 - RNA, 19 nt, Artificial Sequence
  Description of Artificial Sequence: Synthetic oligonucleotide
ggucggagcacugcccucc

SEQ ID NO: 2517781 - RNA, 19 nt, Artificial Sequence
  Description of Artificial Sequence: Synthetic oligonucleotide
gccagcgaaggccccaggc

SEQ ID NO: 2517782 - RNA, 19 nt, Artificial Sequence
  Description of Artificial Sequence: Synthetic oligonucleotide
acaaccuccaggagcuuuu

SEQ ID NO: 2517783 - RNA, 19 nt, Artificial Sequence
  Description of Artificial Sequence: Synthetic oligonucleotide
ucuugcccuuugccagcga

SEQ ID NO: 2517784 - RNA, 19 nt, Artificial Sequence
  Description of Artificial Sequence: Synthetic oligonucleotide
ccaggaagaggcuccauaa

SEQ ID NO: 2517785 - RNA, 19 nt, Artificial Sequence
  Description of Artificial Sequence: Synthetic oligonucleotide
ccugaagauugauggccac

SEQ ID NO: 2517786 - RNA, 19 nt, Artificial Sequence
  Description of Artificial Sequence: Synthetic oligonucleotide
caguguuucucguccugaa

SEQ ID NO: 2517787 - RNA, 19 nt, Artificial Sequence
  Description of Artificial Sequence: Synthetic oligonucleotide
caggaagaggcuccauaaa

SEQ ID NO: 2517788 - RNA, 19 nt, Artificial Sequence
  Description of Artificial Sequence: Synthetic oligonucleotide
uccagcgcugggccaggaa

SEQ ID NO: 2517789 - RNA, 19 nt, Artificial Sequence
  Description of Artificial Sequence: Synthetic oligonucleotide
cugccagcagcacaagugu

SEQ ID NO: 2517790 - RNA, 19 nt, Artificial Sequence
  Description of Artificial Sequence: Synthetic oligonucleotide
cagcgcugggccaggaaga

SEQ ID NO: 2517791 - RNA, 19 nt, Artificial Sequence
  Description of Artificial Sequence: Synthetic oligonucleotide
uggcugagucaacgcugcu

SEQ ID NO: 2517792 - RNA, 19 nt, Artificial Sequence
  Description of Artificial Sequence: Synthetic oligonucleotide
ccucacguggaaguuggag

SEQ ID NO: 2517793 - RNA, 19 nt, Artificial Sequence
  Description of Artificial Sequence: Synthetic oligonucleotide
accccucaugccuguggca

SEQ ID NO: 2517794 - RNA, 19 nt, Artificial Sequence
  Description of Artificial Sequence: Synthetic oligonucleotide
gcugugugcagguguccug

SEQ ID NO: 2517795 - RNA, 19 nt, Artificial Sequence
  Description of Artificial Sequence: Synthetic oligonucleotide
agauguuggucuggacgaa

SEQ ID NO: 2517796 - RNA, 19 nt, Artificial Sequence
  Description of Artificial Sequence: Synthetic oligonucleotide
cguccugaagauugauggc

SEQ ID NO: 2517797 - RNA, 19 nt, Artificial Sequence
  Description of Artificial Sequence: Synthetic oligonucleotide
agaggccggaaggcacacg

SEQ ID NO: 2517798 - RNA, 19 nt, Artificial Sequence
  Description of Artificial Sequence: Synthetic oligonucleotide
cccaggucggagcacugcc

SEQ ID NO: 2517799 - RNA, 19 nt, Artificial Sequence
  Description of Artificial Sequence: Synthetic oligonucleotide
auccuagggaugggaggug

SEQ ID NO: 2517800 - RNA, 19 nt, Artificial Sequence
  Description of Artificial Sequence: Synthetic oligonucleotide
caggagcuuuugcauuuca

SEQ ID NO: 2517801 - RNA, 19 nt, Artificial Sequence
  Description of Artificial Sequence: Synthetic oligonucleotide
ggccggggaccccucaugc

SEQ ID NO: 2517802 - RNA, 19 nt, Artificial Sequence
  Description of Artificial Sequence: Synthetic oligonucleotide
cacagugacuggguaaucu

SEQ ID NO: 2517803 - RNA, 19 nt, Artificial Sequence
  Description of Artificial Sequence: Synthetic oligonucleotide
cuguggcugaaguaacagu

SEQ ID NO: 2517804 - RNA, 19 nt, Artificial Sequence
  Description of Artificial Sequence: Synthetic oligonucleotide
ccaggucggagcacugccc

SEQ ID NO: 2517805 - RNA, 19 nt, Artificial Sequence
  Description of Artificial Sequence: Synthetic oligonucleotide
gagaggccggaaggcacac

SEQ ID NO: 2517806 - RNA, 19 nt, Artificial Sequence
  Description of Artificial Sequence: Synthetic oligonucleotide
gacgaagcgaaggcacucu

SEQ ID NO: 2517807 - RNA, 19 nt, Artificial Sequence
  Description of Artificial Sequence: Synthetic oligonucleotide
auacacggcuucagagcca

SEQ ID NO: 2517808 - RNA, 19 nt, Artificial Sequence
  Description of Artificial Sequence: Synthetic oligonucleotide
aggcaaggacucagcagca

SEQ ID NO: 2517809 - RNA, 19 nt, Artificial Sequence
  Description of Artificial Sequence: Synthetic oligonucleotide
ccuugcaguguuucucguc

SEQ ID NO: 2517810 - RNA, 19 nt, Artificial Sequence
  Description of Artificial Sequence: Synthetic oligonucleotide
ccuagggaugggaggugag

SEQ ID NO: 2517811 - RNA, 19 nt, Artificial Sequence
  Description of Artificial Sequence: Synthetic oligonucleotide
ggcaaggacucagcagcag

SEQ ID NO: 2517812 - RNA, 19 nt, Artificial Sequence
  Description of Artificial Sequence: Synthetic oligonucleotide
caaccuccaggagcuuuug

SEQ ID NO: 2517813 - RNA, 19 nt, Artificial Sequence
  Description of Artificial Sequence: Synthetic oligonucleotide
agauaggacuguggcugaa

SEQ ID NO: 2517814 - RNA, 19 nt, Artificial Sequence
  Description of Artificial Sequence: Synthetic oligonucleotide
cagguguccugcaggaggu

SEQ ID NO: 2517815 - RNA, 19 nt, Artificial Sequence
  Description of Artificial Sequence: Synthetic oligonucleotide
gugccccgcaggcaaggac

SEQ ID NO: 2517816 - RNA, 19 nt, Artificial Sequence
  Description of Artificial Sequence: Synthetic oligonucleotide
ccccucaugccuguggcag

SEQ ID NO: 2517817 - RNA, 19 nt, Artificial Sequence
  Description of Artificial Sequence: Synthetic oligonucleotide
cagcugugugcaggugucc

SEQ ID NO: 2517818 - RNA, 19 nt, Artificial Sequence
  Description of Artificial Sequence: Synthetic oligonucleotide
gagaggaauuuggguucca

SEQ ID NO: 2517819 - RNA, 19 nt, Artificial Sequence
  Description of Artificial Sequence: Synthetic oligonucleotide
cugucaucucggccgggga

SEQ ID NO: 2517820 - RNA, 19 nt, Artificial Sequence
  Description of Artificial Sequence: Synthetic oligonucleotide
gggagaggccggaaggcac

SEQ ID NO: 2517821 - RNA, 19 nt, Artificial Sequence
  Description of Artificial Sequence: Synthetic oligonucleotide
agucaacgcugcugcccaa

SEQ ID NO: 2517822 - RNA, 19 nt, Artificial Sequence
  Description of Artificial Sequence: Synthetic oligonucleotide
ggccacagugacuggguaa

SEQ ID NO: 2517823 - RNA, 19 nt, Artificial Sequence
  Description of Artificial Sequence: Synthetic oligonucleotide
ggacgaagcgaaggcacuc

SEQ ID NO: 2517824 - RNA, 19 nt, Artificial Sequence
  Description of Artificial Sequence: Synthetic oligonucleotide
gcccaagugucauauccua

SEQ ID NO: 2517825 - RNA, 19 nt, Artificial Sequence
  Description of Artificial Sequence: Synthetic oligonucleotide
auaaagccuugcaguguuu

SEQ ID NO: 2517826 - RNA, 19 nt, Artificial Sequence
  Description of Artificial Sequence: Synthetic oligonucleotide
cccucaugccuguggcagg

SEQ ID NO: 2517827 - RNA, 19 nt, Artificial Sequence
  Description of Artificial Sequence: Synthetic oligonucleotide
gcaguguuucucguccuga

SEQ ID NO: 2517828 - RNA, 19 nt, Artificial Sequence
  Description of Artificial Sequence: Synthetic oligonucleotide
cauccagcgcugggccagg

SEQ ID NO: 2517829 - RNA, 19 nt, Artificial Sequence
  Description of Artificial Sequence: Synthetic oligonucleotide
cagugacuggguaaucuuu

SEQ ID NO: 2517830 - RNA, 19 nt, Artificial Sequence
  Description of Artificial Sequence: Synthetic oligonucleotide
cucuggaagugcuguggcu

SEQ ID NO: 2517831 - RNA, 19 nt, Artificial Sequence
  Description of Artificial Sequence: Synthetic oligonucleotide
ccggaaggcacacgaggug

SEQ ID NO: 2517832 - RNA, 19 nt, Artificial Sequence
  Description of Artificial Sequence: Synthetic oligonucleotide
aggcaccgagagaaauucu

SEQ ID NO: 2517833 - RNA, 19 nt, Artificial Sequence
  Description of Artificial Sequence: Synthetic oligonucleotide
aggccggaaggcacacgag

SEQ ID NO: 2517834 - RNA, 19 nt, Artificial Sequence
  Description of Artificial Sequence: Synthetic oligonucleotide
gucagucaacucgcugauc

SEQ ID NO: 2517835 - RNA, 19 nt, Artificial Sequence
  Description of Artificial Sequence: Synthetic oligonucleotide
ccauccagcgcugggccag

SEQ ID NO: 2517836 - RNA, 19 nt, Artificial Sequence
  Description of Artificial Sequence: Synthetic oligonucleotide
caggucggagcacugcccu

SEQ ID NO: 2517837 - RNA, 19 nt, Artificial Sequence
  Description of Artificial Sequence: Synthetic oligonucleotide
cagcagcacaagugugaga

SEQ ID NO: 2517838 - RNA, 19 nt, Artificial Sequence
  Description of Artificial Sequence: Synthetic oligonucleotide
acccugccacagucuucag

SEQ ID NO: 2517839 - RNA, 19 nt, Artificial Sequence
  Description of Artificial Sequence: Synthetic oligonucleotide
ggagaggccggaaggcaca

SEQ ID NO: 2517840 - RNA, 19 nt, Artificial Sequence
  Description of Artificial Sequence: Synthetic oligonucleotide
ccagcgaaggccccaggca

SEQ ID NO: 2517841 - RNA, 19 nt, Artificial Sequence
  Description of Artificial Sequence: Synthetic oligonucleotide
cccgcaggcaaggacucag

SEQ ID NO: 2517842 - RNA, 19 nt, Artificial Sequence
  Description of Artificial Sequence: Synthetic oligonucleotide
cacugucaucucggccggg

SEQ ID NO: 2517843 - RNA, 19 nt, Artificial Sequence
  Description of Artificial Sequence: Synthetic oligonucleotide
gguaaucuuuaagcaggua

SEQ ID NO: 2517844 - RNA, 19 nt, Artificial Sequence
  Description of Artificial Sequence: Synthetic oligonucleotide
gcacucugggagaggccgg

SEQ ID NO: 2517845 - RNA, 19 nt, Artificial Sequence
  Description of Artificial Sequence: Synthetic oligonucleotide
cagucaacucgcugauccu

SEQ ID NO: 2517846 - RNA, 19 nt, Artificial Sequence
  Description of Artificial Sequence: Synthetic oligonucleotide
guggaaguuggaggagaua

SEQ ID NO: 2517847 - RNA, 19 nt, Artificial Sequence
  Description of Artificial Sequence: Synthetic oligonucleotide
ggaugggaggugaggggca

SEQ ID NO: 2517848 - RNA, 19 nt, Artificial Sequence
  Description of Artificial Sequence: Synthetic oligonucleotide
cacucugggagaggccgga

SEQ ID NO: 2517849 - RNA, 19 nt, Artificial Sequence
  Description of Artificial Sequence: Synthetic oligonucleotide
cagucaggcgugccccgca

SEQ ID NO: 2517850 - RNA, 19 nt, Artificial Sequence
  Description of Artificial Sequence: Synthetic oligonucleotide
gccuuccccauacacggcu

SEQ ID NO: 2517851 - RNA, 19 nt, Artificial Sequence
  Description of Artificial Sequence: Synthetic oligonucleotide
ccguguugacaaccuccag

SEQ ID NO: 2517852 - RNA, 19 nt, Artificial Sequence
  Description of Artificial Sequence: Synthetic oligonucleotide
ggugaggggcaccccaggu

SEQ ID NO: 2517853 - RNA, 19 nt, Artificial Sequence
  Description of Artificial Sequence: Synthetic oligonucleotide
cuuuugcauuucagacccu

SEQ ID NO: 2517854 - RNA, 19 nt, Artificial Sequence
  Description of Artificial Sequence: Synthetic oligonucleotide
ccgcaggcaaggacucagc

SEQ ID NO: 2517855 - RNA, 19 nt, Artificial Sequence
  Description of Artificial Sequence: Synthetic oligonucleotide
ggguaaucuuuaagcaggu

SEQ ID NO: 2517856 - RNA, 19 nt, Artificial Sequence
  Description of Artificial Sequence: Synthetic oligonucleotide
guuucucguccugaagauu

SEQ ID NO: 2517857 - RNA, 19 nt, Artificial Sequence
  Description of Artificial Sequence: Synthetic oligonucleotide
ggcacacgaggugacgaaa

SEQ ID NO: 2517858 - RNA, 19 nt, Artificial Sequence
  Description of Artificial Sequence: Synthetic oligonucleotide
acucugggagaggccggaa

SEQ ID NO: 2517859 - RNA, 19 nt, Artificial Sequence
  Description of Artificial Sequence: Synthetic oligonucleotide
aggcuggcaccagcacugu

SEQ ID NO: 2517860 - RNA, 19 nt, Artificial Sequence
  Description of Artificial Sequence: Synthetic oligonucleotide
ccaacagcugugugcaggu

SEQ ID NO: 2517861 - RNA, 19 nt, Artificial Sequence
  Description of Artificial Sequence: Synthetic oligonucleotide
gccacagugacuggguaau

SEQ ID NO: 2517862 - RNA, 19 nt, Artificial Sequence
  Description of Artificial Sequence: Synthetic oligonucleotide
ugacaaccuccaggagcuu

SEQ ID NO: 2517863 - RNA, 19 nt, Artificial Sequence
  Description of Artificial Sequence: Synthetic oligonucleotide
gcaccagcacugucaucuc

SEQ ID NO: 2517864 - RNA, 19 nt, Artificial Sequence
  Description of Artificial Sequence: Synthetic oligonucleotide
ccacagucuucagucgcuc

SEQ ID NO: 2517865 - RNA, 19 nt, Artificial Sequence
  Description of Artificial Sequence: Synthetic oligonucleotide
gguagucagucaacucgcu

SEQ ID NO: 2517866 - RNA, 19 nt, Artificial Sequence
  Description of Artificial Sequence: Synthetic oligonucleotide
caucucggccggggacccc

SEQ ID NO: 2517867 - RNA, 19 nt, Artificial Sequence
  Description of Artificial Sequence: Synthetic oligonucleotide
ccccauacacggcuucaga

SEQ ID NO: 2517868 - RNA, 19 nt, Artificial Sequence
  Description of Artificial Sequence: Synthetic oligonucleotide
gcgcugggccaggaagagg

SEQ ID NO: 2517869 - RNA, 19 nt, Artificial Sequence
  Description of Artificial Sequence: Synthetic oligonucleotide
cuggcaggccuuccccaua

SEQ ID NO: 2517870 - RNA, 19 nt, Artificial Sequence
  Description of Artificial Sequence: Synthetic oligonucleotide
accccaggucggagcacug

SEQ ID NO: 2517871 - RNA, 19 nt, Artificial Sequence
  Description of Artificial Sequence: Synthetic oligonucleotide
gcgugccccgcaggcaagg

SEQ ID NO: 2517872 - RNA, 19 nt, Artificial Sequence
  Description of Artificial Sequence: Synthetic oligonucleotide
cgaaauguaucuccguguu

SEQ ID NO: 2517873 - RNA, 19 nt, Artificial Sequence
  Description of Artificial Sequence: Synthetic oligonucleotide
ggccuuccccauacacggc

SEQ ID NO: 2517874 - RNA, 19 nt, Artificial Sequence
  Description of Artificial Sequence: Synthetic oligonucleotide
gagcacugcccuccuucuu

SEQ ID NO: 2517875 - RNA, 19 nt, Artificial Sequence
  Description of Artificial Sequence: Synthetic oligonucleotide
ccaggagcuuuugcauuuc

SEQ ID NO: 2517876 - RNA, 19 nt, Artificial Sequence
  Description of Artificial Sequence: Synthetic oligonucleotide
ggggcaccccaggucggag

SEQ ID NO: 2517877 - RNA, 19 nt, Artificial Sequence
  Description of Artificial Sequence: Synthetic oligonucleotide
cuagggcuacaggacuccu

SEQ ID NO: 2517878 - RNA, 19 nt, Artificial Sequence
  Description of Artificial Sequence: Synthetic oligonucleotide
auccagcgcugggccagga

SEQ ID NO: 2517879 - RNA, 19 nt, Artificial Sequence
  Description of Artificial Sequence: Synthetic oligonucleotide
ccauaaagccuugcagugu

SEQ ID NO: 2517880 - RNA, 19 nt, Artificial Sequence
  Description of Artificial Sequence: Synthetic oligonucleotide
ccccaggucggagcacugc

SEQ ID NO: 2517881 - RNA, 19 nt, Artificial Sequence
  Description of Artificial Sequence: Synthetic oligonucleotide
caccccaggucggagcacu

SEQ ID NO: 2517882 - RNA, 19 nt, Artificial Sequence
  Description of Artificial Sequence: Synthetic oligonucleotide
gcacacgaggugacgaaau

SEQ ID NO: 2517883 - RNA, 19 nt, Artificial Sequence
  Description of Artificial Sequence: Synthetic oligonucleotide
cucggccggggaccccuca

SEQ ID NO: 2517884 - RNA, 19 nt, Artificial Sequence
  Description of Artificial Sequence: Synthetic oligonucleotide
ggcaggccuuccccauaca

SEQ ID NO: 2517885 - RNA, 19 nt, Artificial Sequence
  Description of Artificial Sequence: Synthetic oligonucleotide
ggcgugccccgcaggcaag

SEQ ID NO: 2517886 - RNA, 19 nt, Artificial Sequence
  Description of Artificial Sequence: Synthetic oligonucleotide
gcaccuccaggcaccgaga

SEQ ID NO: 2517887 - RNA, 19 nt, Artificial Sequence
  Description of Artificial Sequence: Synthetic oligonucleotide
ccacagugacuggguaauc

SEQ ID NO: 2517888 - RNA, 19 nt, Artificial Sequence
  Description of Artificial Sequence: Synthetic oligonucleotide
gccuugcaguguuucucgu

SEQ ID NO: 2517889 - RNA, 19 nt, Artificial Sequence
  Description of Artificial Sequence: Synthetic oligonucleotide
ggaguccggcuggcacugc

SEQ ID NO: 2517890 - RNA, 19 nt, Artificial Sequence
  Description of Artificial Sequence: Synthetic oligonucleotide
gccccgcaggcaaggacuc

SEQ ID NO: 2517891 - RNA, 19 nt, Artificial Sequence
  Description of Artificial Sequence: Synthetic oligonucleotide
cguggaaguuggaggagau

SEQ ID NO: 2517892 - RNA, 19 nt, Artificial Sequence
  Description of Artificial Sequence: Synthetic oligonucleotide
gcgaaggccccaggcagcu

SEQ ID NO: 2517893 - RNA, 19 nt, Artificial Sequence
  Description of Artificial Sequence: Synthetic oligonucleotide
cagcagcagagaggaauuu

SEQ ID NO: 2517894 - RNA, 19 nt, Artificial Sequence
  Description of Artificial Sequence: Synthetic oligonucleotide
cgcugcugcccaaguguca

SEQ ID NO: 2517895 - RNA, 19 nt, Artificial Sequence
  Description of Artificial Sequence: Synthetic oligonucleotide
gcaccccaggucggagcac

SEQ ID NO: 2517896 - RNA, 19 nt, Artificial Sequence
  Description of Artificial Sequence: Synthetic oligonucleotide
cggccggggaccccucaug

SEQ ID NO: 2517897 - RNA, 19 nt, Artificial Sequence
  Description of Artificial Sequence: Synthetic oligonucleotide
ccuuccccauacacggcuu

SEQ ID NO: 2517898 - RNA, 19 nt, Artificial Sequence
  Description of Artificial Sequence: Synthetic oligonucleotide
cgaaggccccaggcagcug

SEQ ID NO: 2517899 - RNA, 19 nt, Artificial Sequence
  Description of Artificial Sequence: Synthetic oligonucleotide
ccccgcaggcaaggacuca

SEQ ID NO: 2517900 - RNA, 19 nt, Artificial Sequence
  Description of Artificial Sequence: Synthetic oligonucleotide
uauuuauucucuaagacag

SEQ ID NO: 2517901 - RNA, 19 nt, Artificial Sequence
  Description of Artificial Sequence: Synthetic oligonucleotide
cuaaucuaaacaaagaggc

SEQ ID NO: 2517902 - RNA, 19 nt, Artificial Sequence
  Description of Artificial Sequence: Synthetic oligonucleotide
ucuaaucuaaacaaagagg

SEQ ID NO: 2517903 - RNA, 19 nt, Artificial Sequence
  Description of Artificial Sequence: Synthetic oligonucleotide
aaagguacuauuaacacac

SEQ ID NO: 2517904 - RNA, 19 nt, Artificial Sequence
  Description of Artificial Sequence: Synthetic oligonucleotide
aaugcuauccaguaucuac

SEQ ID NO: 2517905 - RNA, 19 nt, Artificial Sequence
  Description of Artificial Sequence: Synthetic oligonucleotide
aaguuucuaacucagggac

SEQ ID NO: 2517906 - RNA, 19 nt, Artificial Sequence
  Description of Artificial Sequence: Synthetic oligonucleotide
aacguaauauguuagaagu

SEQ ID NO: 2517907 - RNA, 19 nt, Artificial Sequence
  Description of Artificial Sequence: Synthetic oligonucleotide
gauucuauaacccaacgcc

SEQ ID NO: 2517908 - RNA, 19 nt, Artificial Sequence
  Description of Artificial Sequence: Synthetic oligonucleotide
uaaacuuuuacaaaaucca

SEQ ID NO: 2517909 - RNA, 19 nt, Artificial Sequence
  Description of Artificial Sequence: Synthetic oligonucleotide
gauucuagauucuauaacc

SEQ ID NO: 2517910 - RNA, 19 nt, Artificial Sequence
  Description of Artificial Sequence: Synthetic oligonucleotide
auacaagguacuuugauuc

SEQ ID NO: 2517911 - RNA, 19 nt, Artificial Sequence
  Description of Artificial Sequence: Synthetic oligonucleotide
auaaagguacuauuaacac

SEQ ID NO: 2517912 - RNA, 19 nt, Artificial Sequence
  Description of Artificial Sequence: Synthetic oligonucleotide
uaucuuguuauuuauauaa

SEQ ID NO: 2517913 - RNA, 19 nt, Artificial Sequence
  Description of Artificial Sequence: Synthetic oligonucleotide
cucauaacuucaaacaucg

SEQ ID NO: 2517914 - RNA, 19 nt, Artificial Sequence
  Description of Artificial Sequence: Synthetic oligonucleotide
uuaacaugaaacauguacu

SEQ ID NO: 2517915 - RNA, 19 nt, Artificial Sequence
  Description of Artificial Sequence: Synthetic oligonucleotide
aaacguaauauguuagaag

SEQ ID NO: 2517916 - RNA, 19 nt, Artificial Sequence
  Description of Artificial Sequence: Synthetic oligonucleotide
auauaaagguacuauuaac

SEQ ID NO: 2517917 - RNA, 19 nt, Artificial Sequence
  Description of Artificial Sequence: Synthetic oligonucleotide
guacuauuaacacacacag

SEQ ID NO: 2517918 - RNA, 19 nt, Artificial Sequence
  Description of Artificial Sequence: Synthetic oligonucleotide
aaaagauugcacuguggac

SEQ ID NO: 2517919 - RNA, 19 nt, Artificial Sequence
  Description of Artificial Sequence: Synthetic oligonucleotide
caauuucaaauauaaaagc

SEQ ID NO: 2517920 - RNA, 19 nt, Artificial Sequence
  Description of Artificial Sequence: Synthetic oligonucleotide
ucuuguuauuuauauaaag

SEQ ID NO: 2517921 - RNA, 19 nt, Artificial Sequence
  Description of Artificial Sequence: Synthetic oligonucleotide
aaucuaaacaaagaggcca

SEQ ID NO: 2517922 - RNA, 19 nt, Artificial Sequence
  Description of Artificial Sequence: Synthetic oligonucleotide
uauuaacacacacagcucu

SEQ ID NO: 2517923 - RNA, 19 nt, Artificial Sequence
  Description of Artificial Sequence: Synthetic oligonucleotide
agauucuauaacccaacgc

SEQ ID NO: 2517924 - RNA, 19 nt, Artificial Sequence
  Description of Artificial Sequence: Synthetic oligonucleotide
uauauaaagguacuauuaa

SEQ ID NO: 2517925 - RNA, 19 nt, Artificial Sequence
  Description of Artificial Sequence: Synthetic oligonucleotide
uauguuagaaguuucuaac

SEQ ID NO: 2517926 - RNA, 19 nt, Artificial Sequence
  Description of Artificial Sequence: Synthetic oligonucleotide
aacucagggacacuugaac

SEQ ID NO: 2517927 - RNA, 19 nt, Artificial Sequence
  Description of Artificial Sequence: Synthetic oligonucleotide
auaacuucaaacaucguuc

SEQ ID NO: 2517928 - RNA, 19 nt, Artificial Sequence
  Description of Artificial Sequence: Synthetic oligonucleotide
uauucucuaagacaggaac

SEQ ID NO: 2517929 - RNA, 19 nt, Artificial Sequence
  Description of Artificial Sequence: Synthetic oligonucleotide
uuagaaguuucuaacucag

SEQ ID NO: 2517930 - RNA, 19 nt, Artificial Sequence
  Description of Artificial Sequence: Synthetic oligonucleotide
cauagaacuggcauggagg

SEQ ID NO: 2517931 - RNA, 19 nt, Artificial Sequence
  Description of Artificial Sequence: Synthetic oligonucleotide
auauucuaaacuuuuacaa

SEQ ID NO: 2517932 - RNA, 19 nt, Artificial Sequence
  Description of Artificial Sequence: Synthetic oligonucleotide
aacaugaaacauguacugc

SEQ ID NO: 2517933 - RNA, 19 nt, Artificial Sequence
  Description of Artificial Sequence: Synthetic oligonucleotide
uguuauuuauauaaaggua

SEQ ID NO: 2517934 - RNA, 19 nt, Artificial Sequence
  Description of Artificial Sequence: Synthetic oligonucleotide
auuugcauaucccucaucu

SEQ ID NO: 2517935 - RNA, 19 nt, Artificial Sequence
  Description of Artificial Sequence: Synthetic oligonucleotide
uuccuuacaauguauuugc

SEQ ID NO: 2517936 - RNA, 19 nt, Artificial Sequence
  Description of Artificial Sequence: Synthetic oligonucleotide
aagucuaaucuaaacaaag

SEQ ID NO: 2517937 - RNA, 19 nt, Artificial Sequence
  Description of Artificial Sequence: Synthetic oligonucleotide
agcuucuacuaauacaggg

SEQ ID NO: 2517938 - RNA, 19 nt, Artificial Sequence
  Description of Artificial Sequence: Synthetic oligonucleotide
uaacaugaaacauguacug

SEQ ID NO: 2517939 - RNA, 19 nt, Artificial Sequence
  Description of Artificial Sequence: Synthetic oligonucleotide
uugaacagcagacaauaca

SEQ ID NO: 2517940 - RNA, 19 nt, Artificial Sequence
  Description of Artificial Sequence: Synthetic oligonucleotide
ugugcuccgacaaauggag

SEQ ID NO: 2517941 - RNA, 19 nt, Artificial Sequence
  Description of Artificial Sequence: Synthetic oligonucleotide
ggagguuaaugcuagaccg

SEQ ID NO: 2517942 - RNA, 19 nt, Artificial Sequence
  Description of Artificial Sequence: Synthetic oligonucleotide
aauacaagguacuuugauu

SEQ ID NO: 2517943 - RNA, 19 nt, Artificial Sequence
  Description of Artificial Sequence: Synthetic oligonucleotide
uguuagaaguuucuaacuc

SEQ ID NO: 2517944 - RNA, 19 nt, Artificial Sequence
  Description of Artificial Sequence: Synthetic oligonucleotide
uuuacuaucuuguuauuua

SEQ ID NO: 2517945 - RNA, 19 nt, Artificial Sequence
  Description of Artificial Sequence: Synthetic oligonucleotide
acuaucuuguuauuuauau

SEQ ID NO: 2517946 - RNA, 19 nt, Artificial Sequence
  Description of Artificial Sequence: Synthetic oligonucleotide
acauguacugcuuuccauc

SEQ ID NO: 2517947 - RNA, 19 nt, Artificial Sequence
  Description of Artificial Sequence: Synthetic oligonucleotide
ucuagauucuauaacccaa

SEQ ID NO: 2517948 - RNA, 19 nt, Artificial Sequence
  Description of Artificial Sequence: Synthetic oligonucleotide
uagauucuauaacccaacg

SEQ ID NO: 2517949 - RNA, 19 nt, Artificial Sequence
  Description of Artificial Sequence: Synthetic oligonucleotide
ugauucuagauucuauaac

SEQ ID NO: 2517950 - RNA, 19 nt, Artificial Sequence
  Description of Artificial Sequence: Synthetic oligonucleotide
uaaucuaaacaaagaggcc

SEQ ID NO: 2517951 - RNA, 19 nt, Artificial Sequence
  Description of Artificial Sequence: Synthetic oligonucleotide
uaauauguuagaaguuucu

SEQ ID NO: 2517952 - RNA, 19 nt, Artificial Sequence
  Description of Artificial Sequence: Synthetic oligonucleotide
uuuaugaagucaauuucaa

SEQ ID NO: 2517953 - RNA, 19 nt, Artificial Sequence
  Description of Artificial Sequence: Synthetic oligonucleotide
uuuauucucuaagacagga

SEQ ID NO: 2517954 - RNA, 19 nt, Artificial Sequence
  Description of Artificial Sequence: Synthetic oligonucleotide
auaaaagcacuuuaccagu

SEQ ID NO: 2517955 - RNA, 19 nt, Artificial Sequence
  Description of Artificial Sequence: Synthetic oligonucleotide
agguacuauuaacacacac

SEQ ID NO: 2517956 - RNA, 19 nt, Artificial Sequence
  Description of Artificial Sequence: Synthetic oligonucleotide
uugcauaucccucaucugu

SEQ ID NO: 2517957 - RNA, 19 nt, Artificial Sequence
  Description of Artificial Sequence: Synthetic oligonucleotide
uauaacccaacgccauucg

SEQ ID NO: 2517958 - RNA, 19 nt, Artificial Sequence
  Description of Artificial Sequence: Synthetic oligonucleotide
ugcuagaccguccucagca

SEQ ID NO: 2517959 - RNA, 19 nt, Artificial Sequence
  Description of Artificial Sequence: Synthetic oligonucleotide
ugacaaugcaucauagcac

SEQ ID NO: 2517960 - RNA, 19 nt, Artificial Sequence
  Description of Artificial Sequence: Synthetic oligonucleotide
uuugauucuagauucuaua

SEQ ID NO: 2517961 - RNA, 19 nt, Artificial Sequence
  Description of Artificial Sequence: Synthetic oligonucleotide
uggagguuaaugcuagacc

SEQ ID NO: 2517962 - RNA, 19 nt, Artificial Sequence
  Description of Artificial Sequence: Synthetic oligonucleotide
uccaugaaaugcuauccag

SEQ ID NO: 2517963 - RNA, 19 nt, Artificial Sequence
  Description of Artificial Sequence: Synthetic oligonucleotide
aagacaggaacaucacuca

SEQ ID NO: 2517964 - RNA, 19 nt, Artificial Sequence
  Description of Artificial Sequence: Synthetic oligonucleotide
uuaccagucaagaucugca

SEQ ID NO: 2517965 - RNA, 19 nt, Artificial Sequence
  Description of Artificial Sequence: Synthetic oligonucleotide
aaaacguaauauguuagaa

SEQ ID NO: 2517966 - RNA, 19 nt, Artificial Sequence
  Description of Artificial Sequence: Synthetic oligonucleotide
uuaccagucacagucagac

SEQ ID NO: 2517967 - RNA, 19 nt, Artificial Sequence
  Description of Artificial Sequence: Synthetic oligonucleotide
aaugcuagaccguccucag

SEQ ID NO: 2517968 - RNA, 19 nt, Artificial Sequence
  Description of Artificial Sequence: Synthetic oligonucleotide
acuguggacucauaacuuc

SEQ ID NO: 2517969 - RNA, 19 nt, Artificial Sequence
  Description of Artificial Sequence: Synthetic oligonucleotide
auauguuagaaguuucuaa

SEQ ID NO: 2517970 - RNA, 19 nt, Artificial Sequence
  Description of Artificial Sequence: Synthetic oligonucleotide
uucuagauucuauaaccca

SEQ ID NO: 2517971 - RNA, 19 nt, Artificial Sequence
  Description of Artificial Sequence: Synthetic oligonucleotide
uuccucuuaacaugaaaca

SEQ ID NO: 2517972 - RNA, 19 nt, Artificial Sequence
  Description of Artificial Sequence: Synthetic oligonucleotide
cacuuuaccagucaagauc

SEQ ID NO: 2517973 - RNA, 19 nt, Artificial Sequence
  Description of Artificial Sequence: Synthetic oligonucleotide
uugauucuagauucuauaa

SEQ ID NO: 2517974 - RNA, 19 nt, Artificial Sequence
  Description of Artificial Sequence: Synthetic oligonucleotide
agucaagaucugcaguuac

SEQ ID NO: 2517975 - RNA, 19 nt, Artificial Sequence
  Description of Artificial Sequence: Synthetic oligonucleotide
aguugccugagcuuuuccg

SEQ ID NO: 2517976 - RNA, 19 nt, Artificial Sequence
  Description of Artificial Sequence: Synthetic oligonucleotide
agcaacaaggugacaaugc

SEQ ID NO: 2517977 - RNA, 19 nt, Artificial Sequence
  Description of Artificial Sequence: Synthetic oligonucleotide
aguuacacugguuaccagu

SEQ ID NO: 2517978 - RNA, 19 nt, Artificial Sequence
  Description of Artificial Sequence: Synthetic oligonucleotide
gaaguuucuaacucaggga

SEQ ID NO: 2517979 - RNA, 19 nt, Artificial Sequence
  Description of Artificial Sequence: Synthetic oligonucleotide
aacaucacucauuugcaua

SEQ ID NO: 2517980 - RNA, 19 nt, Artificial Sequence
  Description of Artificial Sequence: Synthetic oligonucleotide
auuccuuacaauguauuug

SEQ ID NO: 2517981 - RNA, 19 nt, Artificial Sequence
  Description of Artificial Sequence: Synthetic oligonucleotide
auagaacuggcauggaggu

SEQ ID NO: 2517982 - RNA, 19 nt, Artificial Sequence
  Description of Artificial Sequence: Synthetic oligonucleotide
caugugcuccgacaaaugg

SEQ ID NO: 2517983 - RNA, 19 nt, Artificial Sequence
  Description of Artificial Sequence: Synthetic oligonucleotide
caaauggagaugcagcuuc

SEQ ID NO: 2517984 - RNA, 19 nt, Artificial Sequence
  Description of Artificial Sequence: Synthetic oligonucleotide
uggugaaugguuaugcaua

SEQ ID NO: 2517985 - RNA, 19 nt, Artificial Sequence
  Description of Artificial Sequence: Synthetic oligonucleotide
agcacauacauauucuaaa

SEQ ID NO: 2517986 - RNA, 19 nt, Artificial Sequence
  Description of Artificial Sequence: Synthetic oligonucleotide
auguuagaaguuucuaacu

SEQ ID NO: 2517987 - RNA, 19 nt, Artificial Sequence
  Description of Artificial Sequence: Synthetic oligonucleotide
uucuaaacuuuuacaaaau

SEQ ID NO: 2517988 - RNA, 19 nt, Artificial Sequence
  Description of Artificial Sequence: Synthetic oligonucleotide
acucauaacuucaaacauc

SEQ ID NO: 2517989 - RNA, 19 nt, Artificial Sequence
  Description of Artificial Sequence: Synthetic oligonucleotide
uaacccaacgccauucgac

SEQ ID NO: 2517990 - RNA, 19 nt, Artificial Sequence
  Description of Artificial Sequence: Synthetic oligonucleotide
aacccaacgccauucgaca

SEQ ID NO: 2517991 - RNA, 19 nt, Artificial Sequence
  Description of Artificial Sequence: Synthetic oligonucleotide
ucaagaucugcaguuacac

SEQ ID NO: 2517992 - RNA, 19 nt, Artificial Sequence
  Description of Artificial Sequence: Synthetic oligonucleotide
aauggucaagucuaaucua

SEQ ID NO: 2517993 - RNA, 19 nt, Artificial Sequence
  Description of Artificial Sequence: Synthetic oligonucleotide
uuuaccagucaagaucugc

SEQ ID NO: 2517994 - RNA, 19 nt, Artificial Sequence
  Description of Artificial Sequence: Synthetic oligonucleotide
uacuauuaacacacacagc

SEQ ID NO: 2517995 - RNA, 19 nt, Artificial Sequence
  Description of Artificial Sequence: Synthetic oligonucleotide
acuuuaccagucaagaucu

SEQ ID NO: 2517996 - RNA, 19 nt, Artificial Sequence
  Description of Artificial Sequence: Synthetic oligonucleotide
gcucuaauuccuuacaaug

SEQ ID NO: 2517997 - RNA, 19 nt, Artificial Sequence
  Description of Artificial Sequence: Synthetic oligonucleotide
ucuacuaauacaggguaaa

SEQ ID NO: 2517998 - RNA, 19 nt, Artificial Sequence
  Description of Artificial Sequence: Synthetic oligonucleotide
auggagguuaaugcuagac

SEQ ID NO: 2517999 - RNA, 19 nt, Artificial Sequence
  Description of Artificial Sequence: Synthetic oligonucleotide
aaauccauuuugaaauggu

SEQ ID NO: 2518000 - RNA, 19 nt, Artificial Sequence
  Description of Artificial Sequence: Synthetic oligonucleotide
uaaugcuagaccguccuca

SEQ ID NO: 2518001 - RNA, 19 nt, Artificial Sequence
  Description of Artificial Sequence: Synthetic oligonucleotide
uccuguuagaaaccacagc

SEQ ID NO: 2518002 - RNA, 19 nt, Artificial Sequence
  Description of Artificial Sequence: Synthetic oligonucleotide
aaacaucguuccucuuaac

SEQ ID NO: 2518003 - RNA, 19 nt, Artificial Sequence
  Description of Artificial Sequence: Synthetic oligonucleotide
gacgucagcacauacauau

SEQ ID NO: 2518004 - RNA, 19 nt, Artificial Sequence
  Description of Artificial Sequence: Synthetic oligonucleotide
uuuggugaaugguuaugca

SEQ ID NO: 2518005 - RNA, 19 nt, Artificial Sequence
  Description of Artificial Sequence: Synthetic oligonucleotide
acaucacucauuugcauau

SEQ ID NO: 2518006 - RNA, 19 nt, Artificial Sequence
  Description of Artificial Sequence: Synthetic oligonucleotide
caagguacuuugauucuag

SEQ ID NO: 2518007 - RNA, 19 nt, Artificial Sequence
  Description of Artificial Sequence: Synthetic oligonucleotide
uuacuaucuuguuauuuau

SEQ ID NO: 2518008 - RNA, 19 nt, Artificial Sequence
  Description of Artificial Sequence: Synthetic oligonucleotide
uucuauaacccaacgccau

SEQ ID NO: 2518009 - RNA, 19 nt, Artificial Sequence
  Description of Artificial Sequence: Synthetic oligonucleotide
ucauagcacaggacagagg

SEQ ID NO: 2518010 - RNA, 19 nt, Artificial Sequence
  Description of Artificial Sequence: Synthetic oligonucleotide
guuuggugaaugguuaugc

SEQ ID NO: 2518011 - RNA, 19 nt, Artificial Sequence
  Description of Artificial Sequence: Synthetic oligonucleotide
uuggugaaugguuaugcau

SEQ ID NO: 2518012 - RNA, 19 nt, Artificial Sequence
  Description of Artificial Sequence: Synthetic oligonucleotide
uuaugaagucaauuucaaa

SEQ ID NO: 2518013 - RNA, 19 nt, Artificial Sequence
  Description of Artificial Sequence: Synthetic oligonucleotide
uuugcauaucccucaucug

SEQ ID NO: 2518014 - RNA, 19 nt, Artificial Sequence
  Description of Artificial Sequence: Synthetic oligonucleotide
ggacucauaacuucaaaca

SEQ ID NO: 2518015 - RNA, 19 nt, Artificial Sequence
  Description of Artificial Sequence: Synthetic oligonucleotide
uuauucucuaagacaggaa

SEQ ID NO: 2518016 - RNA, 19 nt, Artificial Sequence
  Description of Artificial Sequence: Synthetic oligonucleotide
uagaccguccucagcaggc

SEQ ID NO: 2518017 - RNA, 19 nt, Artificial Sequence
  Description of Artificial Sequence: Synthetic oligonucleotide
gucacagucagacaccguc

SEQ ID NO: 2518018 - RNA, 19 nt, Artificial Sequence
  Description of Artificial Sequence: Synthetic oligonucleotide
uaccagucaagaucugcag

SEQ ID NO: 2518019 - RNA, 19 nt, Artificial Sequence
  Description of Artificial Sequence: Synthetic oligonucleotide
agcacuuuaccagucaaga

SEQ ID NO: 2518020 - RNA, 19 nt, Artificial Sequence
  Description of Artificial Sequence: Synthetic oligonucleotide
uucuacuaauacaggguaa

SEQ ID NO: 2518021 - RNA, 19 nt, Artificial Sequence
  Description of Artificial Sequence: Synthetic oligonucleotide
agguuaaugcuagaccguc

SEQ ID NO: 2518022 - RNA, 19 nt, Artificial Sequence
  Description of Artificial Sequence: Synthetic oligonucleotide
gaaugguuaugcauagaac

SEQ ID NO: 2518023 - RNA, 19 nt, Artificial Sequence
  Description of Artificial Sequence: Synthetic oligonucleotide
acuggcauggagguuaaug

SEQ ID NO: 2518024 - RNA, 19 nt, Artificial Sequence
  Description of Artificial Sequence: Synthetic oligonucleotide
acuugaacagcagacaaua

SEQ ID NO: 2518025 - RNA, 19 nt, Artificial Sequence
  Description of Artificial Sequence: Synthetic oligonucleotide
ugcuccgacaaauggagau

SEQ ID NO: 2518026 - RNA, 19 nt, Artificial Sequence
  Description of Artificial Sequence: Synthetic oligonucleotide
agaucugcaguuacacugg

SEQ ID NO: 2518027 - RNA, 19 nt, Artificial Sequence
  Description of Artificial Sequence: Synthetic oligonucleotide
uccuuacaauguauuugcc

SEQ ID NO: 2518028 - RNA, 19 nt, Artificial Sequence
  Description of Artificial Sequence: Synthetic oligonucleotide
auaucccucaucuguauuu

SEQ ID NO: 2518029 - RNA, 19 nt, Artificial Sequence
  Description of Artificial Sequence: Synthetic oligonucleotide
agguacuuugauucuagau

SEQ ID NO: 2518030 - RNA, 19 nt, Artificial Sequence
  Description of Artificial Sequence: Synthetic oligonucleotide
ucagcacauacauauucua

SEQ ID NO: 2518031 - RNA, 19 nt, Artificial Sequence
  Description of Artificial Sequence: Synthetic oligonucleotide
acaaggugacaaugcauca

SEQ ID NO: 2518032 - RNA, 19 nt, Artificial Sequence
  Description of Artificial Sequence: Synthetic oligonucleotide
acagcucuaauuccuuaca

SEQ ID NO: 2518033 - RNA, 19 nt, Artificial Sequence
  Description of Artificial Sequence: Synthetic oligonucleotide
uuuccgagcucagaggacu

SEQ ID NO: 2518034 - RNA, 19 nt, Artificial Sequence
  Description of Artificial Sequence: Synthetic oligonucleotide
agucuaaucuaaacaaaga

SEQ ID NO: 2518035 - RNA, 19 nt, Artificial Sequence
  Description of Artificial Sequence: Synthetic oligonucleotide
aagguacuuugauucuaga

SEQ ID NO: 2518036 - RNA, 19 nt, Artificial Sequence
  Description of Artificial Sequence: Synthetic oligonucleotide
cuuuuccgagcucagagga

SEQ ID NO: 2518037 - RNA, 19 nt, Artificial Sequence
  Description of Artificial Sequence: Synthetic oligonucleotide
uguuuggugaaugguuaug

SEQ ID NO: 2518038 - RNA, 19 nt, Artificial Sequence
  Description of Artificial Sequence: Synthetic oligonucleotide
uacuaucuuguuauuuaua

SEQ ID NO: 2518039 - RNA, 19 nt, Artificial Sequence
  Description of Artificial Sequence: Synthetic oligonucleotide
guaauauguuagaaguuuc

SEQ ID NO: 2518040 - RNA, 19 nt, Artificial Sequence
  Description of Artificial Sequence: Synthetic oligonucleotide
uggcauggagguuaaugcu

SEQ ID NO: 2518041 - RNA, 19 nt, Artificial Sequence
  Description of Artificial Sequence: Synthetic oligonucleotide
auuuauucucuaagacagg

SEQ ID NO: 2518042 - RNA, 19 nt, Artificial Sequence
  Description of Artificial Sequence: Synthetic oligonucleotide
cucuuaacaugaaacaugu

SEQ ID NO: 2518043 - RNA, 19 nt, Artificial Sequence
  Description of Artificial Sequence: Synthetic oligonucleotide
ugcauaucccucaucugua

SEQ ID NO: 2518044 - RNA, 19 nt, Artificial Sequence
  Description of Artificial Sequence: Synthetic oligonucleotide
ucuaaacaaagaggccaag

SEQ ID NO: 2518045 - RNA, 19 nt, Artificial Sequence
  Description of Artificial Sequence: Synthetic oligonucleotide
auucuauaacccaacgcca

SEQ ID NO: 2518046 - RNA, 19 nt, Artificial Sequence
  Description of Artificial Sequence: Synthetic oligonucleotide
acaauguauuugccaagca

SEQ ID NO: 2518047 - RNA, 19 nt, Artificial Sequence
  Description of Artificial Sequence: Synthetic oligonucleotide
cacagcucuaauuccuuac

SEQ ID NO: 2518048 - RNA, 19 nt, Artificial Sequence
  Description of Artificial Sequence: Synthetic oligonucleotide
agaugcagcuucuacuaau

SEQ ID NO: 2518049 - RNA, 19 nt, Artificial Sequence
  Description of Artificial Sequence: Synthetic oligonucleotide
agucagacaccgucucagg

SEQ ID NO: 2518050 - RNA, 19 nt, Artificial Sequence
  Description of Artificial Sequence: Synthetic oligonucleotide
aagcacuuuaccagucaag

SEQ ID NO: 2518051 - RNA, 19 nt, Artificial Sequence
  Description of Artificial Sequence: Synthetic oligonucleotide
auccaguaucuacuuccac

SEQ ID NO: 2518052 - RNA, 19 nt, Artificial Sequence
  Description of Artificial Sequence: Synthetic oligonucleotide
cuccgacaaauggagaugc

SEQ ID NO: 2518053 - RNA, 19 nt, Artificial Sequence
  Description of Artificial Sequence: Synthetic oligonucleotide
ccucuuaacaugaaacaug

SEQ ID NO: 2518054 - RNA, 19 nt, Artificial Sequence
  Description of Artificial Sequence: Synthetic oligonucleotide
gguacuauuaacacacaca

SEQ ID NO: 2518055 - RNA, 19 nt, Artificial Sequence
  Description of Artificial Sequence: Synthetic oligonucleotide
gacucauaacuucaaacau

SEQ ID NO: 2518056 - RNA, 19 nt, Artificial Sequence
  Description of Artificial Sequence: Synthetic oligonucleotide
caauguauuugccaagcaa

SEQ ID NO: 2518057 - RNA, 19 nt, Artificial Sequence
  Description of Artificial Sequence: Synthetic oligonucleotide
ucuauaacccaacgccauu

SEQ ID NO: 2518058 - RNA, 19 nt, Artificial Sequence
  Description of Artificial Sequence: Synthetic oligonucleotide
cuagaccguccucagcagg

SEQ ID NO: 2518059 - RNA, 19 nt, Artificial Sequence
  Description of Artificial Sequence: Synthetic oligonucleotide
cuucuacuaauacagggua

SEQ ID NO: 2518060 - RNA, 19 nt, Artificial Sequence
  Description of Artificial Sequence: Synthetic oligonucleotide
cuauaacccaacgccauuc

SEQ ID NO: 2518061 - RNA, 19 nt, Artificial Sequence
  Description of Artificial Sequence: Synthetic oligonucleotide
cauguacugcuuuccauca

SEQ ID NO: 2518062 - RNA, 19 nt, Artificial Sequence
  Description of Artificial Sequence: Synthetic oligonucleotide
ucauuugcauaucccucau

SEQ ID NO: 2518063 - RNA, 19 nt, Artificial Sequence
  Description of Artificial Sequence: Synthetic oligonucleotide
augcuagaccguccucagc

SEQ ID NO: 2518064 - RNA, 19 nt, Artificial Sequence
  Description of Artificial Sequence: Synthetic oligonucleotide
ggucaagucuaaucuaaac

SEQ ID NO: 2518065 - RNA, 19 nt, Artificial Sequence
  Description of Artificial Sequence: Synthetic oligonucleotide
ggugacaaugcaucauagc

SEQ ID NO: 2518066 - RNA, 19 nt, Artificial Sequence
  Description of Artificial Sequence: Synthetic oligonucleotide
uuaaugcuagaccguccuc

SEQ ID NO: 2518067 - RNA, 19 nt, Artificial Sequence
  Description of Artificial Sequence: Synthetic oligonucleotide
uggucaagucuaaucuaaa

SEQ ID NO: 2518068 - RNA, 19 nt, Artificial Sequence
  Description of Artificial Sequence: Synthetic oligonucleotide
auaacccaacgccauucga

SEQ ID NO: 2518069 - RNA, 19 nt, Artificial Sequence
  Description of Artificial Sequence: Synthetic oligonucleotide
augaaacauguacugcuuu

SEQ ID NO: 2518070 - RNA, 19 nt, Artificial Sequence
  Description of Artificial Sequence: Synthetic oligonucleotide
gcauagaacuggcauggag

SEQ ID NO: 2518071 - RNA, 19 nt, Artificial Sequence
  Description of Artificial Sequence: Synthetic oligonucleotide
uccagacgucagcacauac

SEQ ID NO: 2518072 - RNA, 19 nt, Artificial Sequence
  Description of Artificial Sequence: Synthetic oligonucleotide
gguacuuugauucuagauu

SEQ ID NO: 2518073 - RNA, 19 nt, Artificial Sequence
  Description of Artificial Sequence: Synthetic oligonucleotide
cacugguuaccagucacag

SEQ ID NO: 2518074 - RNA, 19 nt, Artificial Sequence
  Description of Artificial Sequence: Synthetic oligonucleotide
cagucacagucagacaccg

SEQ ID NO: 2518075 - RNA, 19 nt, Artificial Sequence
  Description of Artificial Sequence: Synthetic oligonucleotide
auucgacaguugccugagc

SEQ ID NO: 2518076 - RNA, 19 nt, Artificial Sequence
  Description of Artificial Sequence: Synthetic oligonucleotide
gcuuuuccgagcucagagg

SEQ ID NO: 2518077 - RNA, 19 nt, Artificial Sequence
  Description of Artificial Sequence: Synthetic oligonucleotide
cucuaauuccuuacaaugu

SEQ ID NO: 2518078 - RNA, 19 nt, Artificial Sequence
  Description of Artificial Sequence: Synthetic oligonucleotide
caaacaucguuccucuuaa

SEQ ID NO: 2518079 - RNA, 19 nt, Artificial Sequence
  Description of Artificial Sequence: Synthetic oligonucleotide
aaauggagaugcagcuucu

SEQ ID NO: 2518080 - RNA, 19 nt, Artificial Sequence
  Description of Artificial Sequence: Synthetic oligonucleotide
cauucgacaguugccugag

SEQ ID NO: 2518081 - RNA, 19 nt, Artificial Sequence
  Description of Artificial Sequence: Synthetic oligonucleotide
aguguuuggugaaugguua

SEQ ID NO: 2518082 - RNA, 19 nt, Artificial Sequence
  Description of Artificial Sequence: Synthetic oligonucleotide
aucguuccucuuaacauga

SEQ ID NO: 2518083 - RNA, 19 nt, Artificial Sequence
  Description of Artificial Sequence: Synthetic oligonucleotide
acgccauucgacaguugcc

SEQ ID NO: 2518084 - RNA, 19 nt, Artificial Sequence
  Description of Artificial Sequence: Synthetic oligonucleotide
auggucaagucuaaucuaa

SEQ ID NO: 2518085 - RNA, 19 nt, Artificial Sequence
  Description of Artificial Sequence: Synthetic oligonucleotide
cuguggacucauaacuuca

SEQ ID NO: 2518086 - RNA, 19 nt, Artificial Sequence
  Description of Artificial Sequence: Synthetic oligonucleotide
agacaggaacaucacucau

SEQ ID NO: 2518087 - RNA, 19 nt, Artificial Sequence
  Description of Artificial Sequence: Synthetic oligonucleotide
cgacaaauggagaugcagc

SEQ ID NO: 2518088 - RNA, 19 nt, Artificial Sequence
  Description of Artificial Sequence: Synthetic oligonucleotide
acugguuaccagucacagu

SEQ ID NO: 2518089 - RNA, 19 nt, Artificial Sequence
  Description of Artificial Sequence: Synthetic oligonucleotide
ugaaauggucaagucuaau

SEQ ID NO: 2518090 - RNA, 19 nt, Artificial Sequence
  Description of Artificial Sequence: Synthetic oligonucleotide
acccaacgccauucgacag

SEQ ID NO: 2518091 - RNA, 19 nt, Artificial Sequence
  Description of Artificial Sequence: Synthetic oligonucleotide
ugccugagcuuuuccgagc

SEQ ID NO: 2518092 - RNA, 19 nt, Artificial Sequence
  Description of Artificial Sequence: Synthetic oligonucleotide
aggugacaaugcaucauag

SEQ ID NO: 2518093 - RNA, 19 nt, Artificial Sequence
  Description of Artificial Sequence: Synthetic oligonucleotide
uccgacaaauggagaugca

SEQ ID NO: 2518094 - RNA, 19 nt, Artificial Sequence
  Description of Artificial Sequence: Synthetic oligonucleotide
cuaucuuguuauuuauaua

SEQ ID NO: 2518095 - RNA, 19 nt, Artificial Sequence
  Description of Artificial Sequence: Synthetic oligonucleotide
gacaccgucucaggaaaac

SEQ ID NO: 2518096 - RNA, 19 nt, Artificial Sequence
  Description of Artificial Sequence: Synthetic oligonucleotide
aguuucuaacucagggaca

SEQ ID NO: 2518097 - RNA, 19 nt, Artificial Sequence
  Description of Artificial Sequence: Synthetic oligonucleotide
acaguugccugagcuuuuc

SEQ ID NO: 2518098 - RNA, 19 nt, Artificial Sequence
  Description of Artificial Sequence: Synthetic oligonucleotide
gcaacaaggugacaaugca

SEQ ID NO: 2518099 - RNA, 19 nt, Artificial Sequence
  Description of Artificial Sequence: Synthetic oligonucleotide
aucuuguuauuuauauaaa

SEQ ID NO: 2518100 - RNA, 19 nt, Artificial Sequence
  Description of Artificial Sequence: Synthetic oligonucleotide
aaaugcuauccaguaucua

SEQ ID NO: 2518101 - RNA, 19 nt, Artificial Sequence
  Description of Artificial Sequence: Synthetic oligonucleotide
ucgacaguugccugagcuu

SEQ ID NO: 2518102 - RNA, 19 nt, Artificial Sequence
  Description of Artificial Sequence: Synthetic oligonucleotide
cagcacauacauauucuaa

SEQ ID NO: 2518103 - RNA, 19 nt, Artificial Sequence
  Description of Artificial Sequence: Synthetic oligonucleotide
augugcuccgacaaaugga

SEQ ID NO: 2518104 - RNA, 19 nt, Artificial Sequence
  Description of Artificial Sequence: Synthetic oligonucleotide
gaaaccacagcagcagugu

SEQ ID NO: 2518105 - RNA, 19 nt, Artificial Sequence
  Description of Artificial Sequence: Synthetic oligonucleotide
cugagcuuuuccgagcuca

SEQ ID NO: 2518106 - RNA, 19 nt, Artificial Sequence
  Description of Artificial Sequence: Synthetic oligonucleotide
auuugccaagcaacaaggu

SEQ ID NO: 2518107 - RNA, 19 nt, Artificial Sequence
  Description of Artificial Sequence: Synthetic oligonucleotide
accgucucaggaaaacuga

SEQ ID NO: 2518108 - RNA, 19 nt, Artificial Sequence
  Description of Artificial Sequence: Synthetic oligonucleotide
cuuuaccagucaagaucug

SEQ ID NO: 2518109 - RNA, 19 nt, Artificial Sequence
  Description of Artificial Sequence: Synthetic oligonucleotide
aagguacuauuaacacaca

SEQ ID NO: 2518110 - RNA, 19 nt, Artificial Sequence
  Description of Artificial Sequence: Synthetic oligonucleotide
acaagguacuuugauucua

SEQ ID NO: 2518111 - RNA, 19 nt, Artificial Sequence
  Description of Artificial Sequence: Synthetic oligonucleotide
gaccguccucagcaggcag

SEQ ID NO: 2518112 - RNA, 19 nt, Artificial Sequence
  Description of Artificial Sequence: Synthetic oligonucleotide
ugcuuuccaucauguucca

SEQ ID NO: 2518113 - RNA, 19 nt, Artificial Sequence
  Description of Artificial Sequence: Synthetic oligonucleotide
acaaugcaucauagcacag

SEQ ID NO: 2518114 - RNA, 19 nt, Artificial Sequence
  Description of Artificial Sequence: Synthetic oligonucleotide
caguuacacugguuaccag

SEQ ID NO: 2518115 - RNA, 19 nt, Artificial Sequence
  Description of Artificial Sequence: Synthetic oligonucleotide
cauuugcauaucccucauc

SEQ ID NO: 2518116 - RNA, 19 nt, Artificial Sequence
  Description of Artificial Sequence: Synthetic oligonucleotide
gguuaaugcuagaccgucc

SEQ ID NO: 2518117 - RNA, 19 nt, Artificial Sequence
  Description of Artificial Sequence: Synthetic oligonucleotide
acacagcucuaauuccuua

SEQ ID NO: 2518118 - RNA, 19 nt, Artificial Sequence
  Description of Artificial Sequence: Synthetic oligonucleotide
cagacgucagcacauacau

SEQ ID NO: 2518119 - RNA, 19 nt, Artificial Sequence
  Description of Artificial Sequence: Synthetic oligonucleotide
ccagucacagucagacacc

SEQ ID NO: 2518120 - RNA, 19 nt, Artificial Sequence
  Description of Artificial Sequence: Synthetic oligonucleotide
cuaagacaggaacaucacu

SEQ ID NO: 2518121 - RNA, 19 nt, Artificial Sequence
  Description of Artificial Sequence: Synthetic oligonucleotide
acaccgucucaggaaaacu

SEQ ID NO: 2518122 - RNA, 19 nt, Artificial Sequence
  Description of Artificial Sequence: Synthetic oligonucleotide
acguaauauguuagaaguu

SEQ ID NO: 2518123 - RNA, 19 nt, Artificial Sequence
  Description of Artificial Sequence: Synthetic oligonucleotide
cagacaccgucucaggaaa

SEQ ID NO: 2518124 - RNA, 19 nt, Artificial Sequence
  Description of Artificial Sequence: Synthetic oligonucleotide
gcaguuacacugguuacca

SEQ ID NO: 2518125 - RNA, 19 nt, Artificial Sequence
  Description of Artificial Sequence: Synthetic oligonucleotide
gcuccuguuagaaaccaca

SEQ ID NO: 2518126 - RNA, 19 nt, Artificial Sequence
  Description of Artificial Sequence: Synthetic oligonucleotide
caguugccugagcuuuucc

SEQ ID NO: 2518127 - RNA, 19 nt, Artificial Sequence
  Description of Artificial Sequence: Synthetic oligonucleotide
auguacugcuuuccaucau

SEQ ID NO: 2518128 - RNA, 19 nt, Artificial Sequence
  Description of Artificial Sequence: Synthetic oligonucleotide
agaggggcuccuguuagaa

SEQ ID NO: 2518129 - RNA, 19 nt, Artificial Sequence
  Description of Artificial Sequence: Synthetic oligonucleotide
ccgacaaauggagaugcag

SEQ ID NO: 2518130 - RNA, 19 nt, Artificial Sequence
  Description of Artificial Sequence: Synthetic oligonucleotide
uccgagcucagaggacugc

SEQ ID NO: 2518131 - RNA, 19 nt, Artificial Sequence
  Description of Artificial Sequence: Synthetic oligonucleotide
cauuggcuuuaugaaguca

SEQ ID NO: 2518132 - RNA, 19 nt, Artificial Sequence
  Description of Artificial Sequence: Synthetic oligonucleotide
ccaagcaacaaggugacaa

SEQ ID NO: 2518133 - RNA, 19 nt, Artificial Sequence
  Description of Artificial Sequence: Synthetic oligonucleotide
cagcucuaauuccuuacaa

SEQ ID NO: 2518134 - RNA, 19 nt, Artificial Sequence
  Description of Artificial Sequence: Synthetic oligonucleotide
ucguuccucuuaacaugaa

SEQ ID NO: 2518135 - RNA, 19 nt, Artificial Sequence
  Description of Artificial Sequence: Synthetic oligonucleotide
cgucagcacauacauauuc

SEQ ID NO: 2518136 - RNA, 19 nt, Artificial Sequence
  Description of Artificial Sequence: Synthetic oligonucleotide
cuacuaauacaggguaaaa

SEQ ID NO: 2518137 - RNA, 19 nt, Artificial Sequence
  Description of Artificial Sequence: Synthetic oligonucleotide
gcuagaccguccucagcag

SEQ ID NO: 2518138 - RNA, 19 nt, Artificial Sequence
  Description of Artificial Sequence: Synthetic oligonucleotide
guuaccagucacagucaga

SEQ ID NO: 2518139 - RNA, 19 nt, Artificial Sequence
  Description of Artificial Sequence: Synthetic oligonucleotide
caagaucugcaguuacacu

SEQ ID NO: 2518140 - RNA, 19 nt, Artificial Sequence
  Description of Artificial Sequence: Synthetic oligonucleotide
caacaaggugacaaugcau

SEQ ID NO: 2518141 - RNA, 19 nt, Artificial Sequence
  Description of Artificial Sequence: Synthetic oligonucleotide
caguguuuggugaaugguu

SEQ ID NO: 2518142 - RNA, 19 nt, Artificial Sequence
  Description of Artificial Sequence: Synthetic oligonucleotide
gacaggaacaucacucauu

SEQ ID NO: 2518143 - RNA, 19 nt, Artificial Sequence
  Description of Artificial Sequence: Synthetic oligonucleotide
caagcaacaaggugacaau

SEQ ID NO: 2518144 - RNA, 19 nt, Artificial Sequence
  Description of Artificial Sequence: Synthetic oligonucleotide
gcuucuacuaauacagggu

SEQ ID NO: 2518145 - RNA, 19 nt, Artificial Sequence
  Description of Artificial Sequence: Synthetic oligonucleotide
aucccucaucuguauuuua

SEQ ID NO: 2518146 - RNA, 19 nt, Artificial Sequence
  Description of Artificial Sequence: Synthetic oligonucleotide
cauggagguuaaugcuaga

SEQ ID NO: 2518147 - RNA, 19 nt, Artificial Sequence
  Description of Artificial Sequence: Synthetic oligonucleotide
ccagacgucagcacauaca

SEQ ID NO: 2518148 - RNA, 19 nt, Artificial Sequence
  Description of Artificial Sequence: Synthetic oligonucleotide
gcuccgacaaauggagaug

SEQ ID NO: 2518149 - RNA, 19 nt, Artificial Sequence
  Description of Artificial Sequence: Synthetic oligonucleotide
ggccaagauguccaugaaa

SEQ ID NO: 2518150 - RNA, 19 nt, Artificial Sequence
  Description of Artificial Sequence: Synthetic oligonucleotide
gauugcacuguggacucau

SEQ ID NO: 2518151 - RNA, 19 nt, Artificial Sequence
  Description of Artificial Sequence: Synthetic oligonucleotide
ccgucucaggaaaacugac

SEQ ID NO: 2518152 - RNA, 19 nt, Artificial Sequence
  Description of Artificial Sequence: Synthetic oligonucleotide
gagcuuuuccgagcucaga

SEQ ID NO: 2518153 - RNA, 19 nt, Artificial Sequence
  Description of Artificial Sequence: Synthetic oligonucleotide
agcacaggacagaggggcu

SEQ ID NO: 2518154 - RNA, 19 nt, Artificial Sequence
  Description of Artificial Sequence: Synthetic oligonucleotide
guguuuggugaaugguuau

SEQ ID NO: 2518155 - RNA, 19 nt, Artificial Sequence
  Description of Artificial Sequence: Synthetic oligonucleotide
cacuugaacagcagacaau

SEQ ID NO: 2518156 - RNA, 19 nt, Artificial Sequence
  Description of Artificial Sequence: Synthetic oligonucleotide
cacagcagcaguguuuggu

SEQ ID NO: 2518157 - RNA, 19 nt, Artificial Sequence
  Description of Artificial Sequence: Synthetic oligonucleotide
ccauucgacaguugccuga

SEQ ID NO: 2518158 - RNA, 19 nt, Artificial Sequence
  Description of Artificial Sequence: Synthetic oligonucleotide
ccaugaaaugcuauccagu

SEQ ID NO: 2518159 - RNA, 19 nt, Artificial Sequence
  Description of Artificial Sequence: Synthetic oligonucleotide
gcagacaauacaagguacu

SEQ ID NO: 2518160 - RNA, 19 nt, Artificial Sequence
  Description of Artificial Sequence: Synthetic oligonucleotide
uuccagacgucagcacaua

SEQ ID NO: 2518161 - RNA, 19 nt, Artificial Sequence
  Description of Artificial Sequence: Synthetic oligonucleotide
caacgccauucgacaguug

SEQ ID NO: 2518162 - RNA, 19 nt, Artificial Sequence
  Description of Artificial Sequence: Synthetic oligonucleotide
guuccagacgucagcacau

SEQ ID NO: 2518163 - RNA, 19 nt, Artificial Sequence
  Description of Artificial Sequence: Synthetic oligonucleotide
cagucaagaucugcaguua

SEQ ID NO: 2518164 - RNA, 19 nt, Artificial Sequence
  Description of Artificial Sequence: Synthetic oligonucleotide
ccgagcucagaggacugcc

SEQ ID NO: 2518165 - RNA, 19 nt, Artificial Sequence
  Description of Artificial Sequence: Synthetic oligonucleotide
ccaucauguuccagacguc

SEQ ID NO: 2518166 - RNA, 19 nt, Artificial Sequence
  Description of Artificial Sequence: Synthetic oligonucleotide
cguaauauguuagaaguuu

SEQ ID NO: 2518167 - RNA, 19 nt, Artificial Sequence
  Description of Artificial Sequence: Synthetic oligonucleotide
cauaucccucaucuguauu

SEQ ID NO: 2518168 - RNA, 19 nt, Artificial Sequence
  Description of Artificial Sequence: Synthetic oligonucleotide
agacgucagcacauacaua

SEQ ID NO: 2518169 - RNA, 19 nt, Artificial Sequence
  Description of Artificial Sequence: Synthetic oligonucleotide
aacuggcauggagguuaau

SEQ ID NO: 2518170 - RNA, 19 nt, Artificial Sequence
  Description of Artificial Sequence: Synthetic oligonucleotide
cagcaugugcuccgacaaa

SEQ ID NO: 2518171 - RNA, 19 nt, Artificial Sequence
  Description of Artificial Sequence: Synthetic oligonucleotide
auugcacuguggacucaua

SEQ ID NO: 2518172 - RNA, 19 nt, Artificial Sequence
  Description of Artificial Sequence: Synthetic oligonucleotide
acgucagcacauacauauu

SEQ ID NO: 2518173 - RNA, 19 nt, Artificial Sequence
  Description of Artificial Sequence: Synthetic oligonucleotide
gugcuccgacaaauggaga

SEQ ID NO: 2518174 - RNA, 19 nt, Artificial Sequence
  Description of Artificial Sequence: Synthetic oligonucleotide
cccucaucuguauuuuacu

SEQ ID NO: 2518175 - RNA, 19 nt, Artificial Sequence
  Description of Artificial Sequence: Synthetic oligonucleotide
gcauaucccucaucuguau

SEQ ID NO: 2518176 - RNA, 19 nt, Artificial Sequence
  Description of Artificial Sequence: Synthetic oligonucleotide
cguuccucuuaacaugaaa

SEQ ID NO: 2518177 - RNA, 19 nt, Artificial Sequence
  Description of Artificial Sequence: Synthetic oligonucleotide
gacaguugccugagcuuuu

SEQ ID NO: 2518178 - RNA, 19 nt, Artificial Sequence
  Description of Artificial Sequence: Synthetic oligonucleotide
ccugagcuuuuccgagcuc

SEQ ID NO: 2518179 - RNA, 19 nt, Artificial Sequence
  Description of Artificial Sequence: Synthetic oligonucleotide
ggacagaggggcuccuguu

SEQ ID NO: 2518180 - RNA, 19 nt, Artificial Sequence
  Description of Artificial Sequence: Synthetic oligonucleotide
cccaacgccauucgacagu

SEQ ID NO: 2518181 - RNA, 19 nt, Artificial Sequence
  Description of Artificial Sequence: Synthetic oligonucleotide
ggacugcccauuggcuuua

SEQ ID NO: 2518182 - RNA, 19 nt, Artificial Sequence
  Description of Artificial Sequence: Synthetic oligonucleotide
cgccauucgacaguugccu

SEQ ID NO: 2518183 - RNA, 19 nt, Artificial Sequence
  Description of Artificial Sequence: Synthetic oligonucleotide
ccaacgccauucgacaguu

SEQ ID NO: 2518184 - RNA, 19 nt, Artificial Sequence
  Description of Artificial Sequence: Synthetic oligonucleotide
cguccucagcaggcagcau

SEQ ID NO: 2518185 - RNA, 19 nt, Artificial Sequence
  Description of Artificial Sequence: Synthetic oligonucleotide
uuaaacauggcaaacaugg

SEQ ID NO: 2518186 - RNA, 19 nt, Artificial Sequence
  Description of Artificial Sequence: Synthetic oligonucleotide
aaugaugggcaucaaagcc

SEQ ID NO: 2518187 - RNA, 19 nt, Artificial Sequence
  Description of Artificial Sequence: Synthetic oligonucleotide
aaauuuccaacuuccaugc

SEQ ID NO: 2518188 - RNA, 19 nt, Artificial Sequence
  Description of Artificial Sequence: Synthetic oligonucleotide
aaacauggcaaacauggcc

SEQ ID NO: 2518189 - RNA, 19 nt, Artificial Sequence
  Description of Artificial Sequence: Synthetic oligonucleotide
aaaacaagcccauaagcac

SEQ ID NO: 2518190 - RNA, 19 nt, Artificial Sequence
  Description of Artificial Sequence: Synthetic oligonucleotide
aaaacauuacugucaaagg

SEQ ID NO: 2518191 - RNA, 19 nt, Artificial Sequence
  Description of Artificial Sequence: Synthetic oligonucleotide
aacaguaaaacauuacugu

SEQ ID NO: 2518192 - RNA, 19 nt, Artificial Sequence
  Description of Artificial Sequence: Synthetic oligonucleotide
uguuacaucugccuggucg

SEQ ID NO: 2518193 - RNA, 19 nt, Artificial Sequence
  Description of Artificial Sequence: Synthetic oligonucleotide
  modified_base (5)..(5): a, c, u, g, unknown or other
aaagnuauucaauccagca

SEQ ID NO: 2518194 - RNA, 19 nt, Artificial Sequence
  Description of Artificial Sequence: Synthetic oligonucleotide
uguaagacacaaaagauau

SEQ ID NO: 2518195 - RNA, 19 nt, Artificial Sequence
  Description of Artificial Sequence: Synthetic oligonucleotide
uccagcauaaaucuggcag

SEQ ID NO: 2518196 - RNA, 19 nt, Artificial Sequence
  Description of Artificial Sequence: Synthetic oligonucleotide
aacaauggaaauucaccac

SEQ ID NO: 2518197 - RNA, 19 nt, Artificial Sequence
  Description of Artificial Sequence: Synthetic oligonucleotide
ugguguaagacacaaaaga

SEQ ID NO: 2518198 - RNA, 19 nt, Artificial Sequence
  Description of Artificial Sequence: Synthetic oligonucleotide
aaggcaacaauggaaauuc

SEQ ID NO: 2518199 - RNA, 19 nt, Artificial Sequence
  Description of Artificial Sequence: Synthetic oligonucleotide
agacacaaaagauauauca

SEQ ID NO: 2518200 - RNA, 19 nt, Artificial Sequence
  Description of Artificial Sequence: Synthetic oligonucleotide
augguaauaacaguaaaac

SEQ ID NO: 2518201 - RNA, 19 nt, Artificial Sequence
  Description of Artificial Sequence: Synthetic oligonucleotide
agcaugaagucucauagac

SEQ ID NO: 2518202 - RNA, 19 nt, Artificial Sequence
  Description of Artificial Sequence: Synthetic oligonucleotide
caguuuaugguacaggugg

SEQ ID NO: 2518203 - RNA, 19 nt, Artificial Sequence
  Description of Artificial Sequence: Synthetic oligonucleotide
caugaagucucauagacug

SEQ ID NO: 2518204 - RNA, 19 nt, Artificial Sequence
  Description of Artificial Sequence: Synthetic oligonucleotide
auaacaguaaaacauuacu

SEQ ID NO: 2518205 - RNA, 19 nt, Artificial Sequence
  Description of Artificial Sequence: Synthetic oligonucleotide
aauaacaguaaaacauuac

SEQ ID NO: 2518206 - RNA, 19 nt, Artificial Sequence
  Description of Artificial Sequence: Synthetic oligonucleotide
cuuauuagcagcaacauaa

SEQ ID NO: 2518207 - RNA, 19 nt, Artificial Sequence
  Description of Artificial Sequence: Synthetic oligonucleotide
  modified_base (6)..(6): a, c, u, g, unknown or other
aaaagnuauucaauccagc

SEQ ID NO: 2518208 - RNA, 19 nt, Artificial Sequence
  Description of Artificial Sequence: Synthetic oligonucleotide
aauguagaggauuuggcaa

SEQ ID NO: 2518209 - RNA, 19 nt, Artificial Sequence
  Description of Artificial Sequence: Synthetic oligonucleotide
uucaccacaauaaccauca

SEQ ID NO: 2518210 - RNA, 19 nt, Artificial Sequence
  Description of Artificial Sequence: Synthetic oligonucleotide
aaaucuggcagccugaaua

SEQ ID NO: 2518211 - RNA, 19 nt, Artificial Sequence
  Description of Artificial Sequence: Synthetic oligonucleotide
ucucuguuaagauaugcag

SEQ ID NO: 2518212 - RNA, 19 nt, Artificial Sequence
  Description of Artificial Sequence: Synthetic oligonucleotide
auaucauuaucacagacau

SEQ ID NO: 2518213 - RNA, 19 nt, Artificial Sequence
  Description of Artificial Sequence: Synthetic oligonucleotide
ucuuccuauaucaggacag

SEQ ID NO: 2518214 - RNA, 19 nt, Artificial Sequence
  Description of Artificial Sequence: Synthetic oligonucleotide
uucaauccagcauaaaucu

SEQ ID NO: 2518215 - RNA, 19 nt, Artificial Sequence
  Description of Artificial Sequence: Synthetic oligonucleotide
uguuaagauaugcagugca

SEQ ID NO: 2518216 - RNA, 19 nt, Artificial Sequence
  Description of Artificial Sequence: Synthetic oligonucleotide
cuaugauggccauugaagg

SEQ ID NO: 2518217 - RNA, 19 nt, Artificial Sequence
  Description of Artificial Sequence: Synthetic oligonucleotide
uauucaauccagcauaaau

SEQ ID NO: 2518218 - RNA, 19 nt, Artificial Sequence
  Description of Artificial Sequence: Synthetic oligonucleotide
caaaacaggccauuggucc

SEQ ID NO: 2518219 - RNA, 19 nt, Artificial Sequence
  Description of Artificial Sequence: Synthetic oligonucleotide
aauaaggggaccaugccag

SEQ ID NO: 2518220 - RNA, 19 nt, Artificial Sequence
  Description of Artificial Sequence: Synthetic oligonucleotide
aagucucauagacugagug

SEQ ID NO: 2518221 - RNA, 19 nt, Artificial Sequence
  Description of Artificial Sequence: Synthetic oligonucleotide
aacauggccuuccgaaacc

SEQ ID NO: 2518222 - RNA, 19 nt, Artificial Sequence
  Description of Artificial Sequence: Synthetic oligonucleotide
cauagacugagugacaugg

SEQ ID NO: 2518223 - RNA, 19 nt, Artificial Sequence
  Description of Artificial Sequence: Synthetic oligonucleotide
  modified_base (4)..(4): a, c, u, g, unknown or other
aagnuauucaauccagcau

SEQ ID NO: 2518224 - RNA, 19 nt, Artificial Sequence
  Description of Artificial Sequence: Synthetic oligonucleotide
aauaucauuaucacagaca

SEQ ID NO: 2518225 - RNA, 19 nt, Artificial Sequence
  Description of Artificial Sequence: Synthetic oligonucleotide
uagccaaugcuacugaccc

SEQ ID NO: 2518226 - RNA, 19 nt, Artificial Sequence
  Description of Artificial Sequence: Synthetic oligonucleotide
uggaauaaggggaccaugc

SEQ ID NO: 2518227 - RNA, 19 nt, Artificial Sequence
  Description of Artificial Sequence: Synthetic oligonucleotide
uagaauguagaggauuugg

SEQ ID NO: 2518228 - RNA, 19 nt, Artificial Sequence
  Description of Artificial Sequence: Synthetic oligonucleotide
  modified_base (3)..(3): a, c, u, g, unknown or other
agnuauucaauccagcaua

SEQ ID NO: 2518229 - RNA, 19 nt, Artificial Sequence
  Description of Artificial Sequence: Synthetic oligonucleotide
auaaccaucaugguguaag

SEQ ID NO: 2518230 - RNA, 19 nt, Artificial Sequence
  Description of Artificial Sequence: Synthetic oligonucleotide
uccuauaucaggacagcag

SEQ ID NO: 2518231 - RNA, 19 nt, Artificial Sequence
  Description of Artificial Sequence: Synthetic oligonucleotide
uuuaaacauggcaaacaug

SEQ ID NO: 2518232 - RNA, 19 nt, Artificial Sequence
  Description of Artificial Sequence: Synthetic oligonucleotide
agugacaugguaauaacag

SEQ ID NO: 2518233 - RNA, 19 nt, Artificial Sequence
  Description of Artificial Sequence: Synthetic oligonucleotide
aggccauugguccaggcgc

SEQ ID NO: 2518234 - RNA, 19 nt, Artificial Sequence
  Description of Artificial Sequence: Synthetic oligonucleotide
agcagcaacauaaauacag

SEQ ID NO: 2518235 - RNA, 19 nt, Artificial Sequence
  Description of Artificial Sequence: Synthetic oligonucleotide
uucacaucaccgcauuggg

SEQ ID NO: 2518236 - RNA, 19 nt, Artificial Sequence
  Description of Artificial Sequence: Synthetic oligonucleotide
uccgaaaccucuuauuagc

SEQ ID NO: 2518237 - RNA, 19 nt, Artificial Sequence
  Description of Artificial Sequence: Synthetic oligonucleotide
auaaauacagggguuguag

SEQ ID NO: 2518238 - RNA, 19 nt, Artificial Sequence
  Description of Artificial Sequence: Synthetic oligonucleotide
ugacaugguaauaacagua

SEQ ID NO: 2518239 - RNA, 19 nt, Artificial Sequence
  Description of Artificial Sequence: Synthetic oligonucleotide
uuuggggucuccaaaacaa

SEQ ID NO: 2518240 - RNA, 19 nt, Artificial Sequence
  Description of Artificial Sequence: Synthetic oligonucleotide
ugcuacugacccuaugucg

SEQ ID NO: 2518241 - RNA, 19 nt, Artificial Sequence
  Description of Artificial Sequence: Synthetic oligonucleotide
aaauacagggguuguagaa

SEQ ID NO: 2518242 - RNA, 19 nt, Artificial Sequence
  Description of Artificial Sequence: Synthetic oligonucleotide
auuuaaacauggcaaacau

SEQ ID NO: 2518243 - RNA, 19 nt, Artificial Sequence
  Description of Artificial Sequence: Synthetic oligonucleotide
ugguaauaacaguaaaaca

SEQ ID NO: 2518244 - RNA, 19 nt, Artificial Sequence
  Description of Artificial Sequence: Synthetic oligonucleotide
acaauggaaauucaccaca

SEQ ID NO: 2518245 - RNA, 19 nt, Artificial Sequence
  Description of Artificial Sequence: Synthetic oligonucleotide
auaacuagcccacccaaug

SEQ ID NO: 2518246 - RNA, 19 nt, Artificial Sequence
  Description of Artificial Sequence: Synthetic oligonucleotide
cacaauaaccaucauggug

SEQ ID NO: 2518247 - RNA, 19 nt, Artificial Sequence
  Description of Artificial Sequence: Synthetic oligonucleotide
aagauaugcagugcaguuc

SEQ ID NO: 2518248 - RNA, 19 nt, Artificial Sequence
  Description of Artificial Sequence: Synthetic oligonucleotide
aauccagcauaaaucuggc

SEQ ID NO: 2518249 - RNA, 19 nt, Artificial Sequence
  Description of Artificial Sequence: Synthetic oligonucleotide
uuuccaacuuccaugcaga

SEQ ID NO: 2518250 - RNA, 19 nt, Artificial Sequence
  Description of Artificial Sequence: Synthetic oligonucleotide
caucaaagcccaaaacagg

SEQ ID NO: 2518251 - RNA, 19 nt, Artificial Sequence
  Description of Artificial Sequence: Synthetic oligonucleotide
gaauguagaggauuuggca

SEQ ID NO: 2518252 - RNA, 19 nt, Artificial Sequence
  Description of Artificial Sequence: Synthetic oligonucleotide
guuacaucugccuggucgg

SEQ ID NO: 2518253 - RNA, 19 nt, Artificial Sequence
  Description of Artificial Sequence: Synthetic oligonucleotide
uuuuccgccaguuuauggu

SEQ ID NO: 2518254 - RNA, 19 nt, Artificial Sequence
  Description of Artificial Sequence: Synthetic oligonucleotide
aacauggcaaacauggccu

SEQ ID NO: 2518255 - RNA, 19 nt, Artificial Sequence
  Description of Artificial Sequence: Synthetic oligonucleotide
uacagguggccccaguagg

SEQ ID NO: 2518256 - RNA, 19 nt, Artificial Sequence
  Description of Artificial Sequence: Synthetic oligonucleotide
cagcaacauaaauacaggg

SEQ ID NO: 2518257 - RNA, 19 nt, Artificial Sequence
  Description of Artificial Sequence: Synthetic oligonucleotide
cacaucaccgcauugggug

SEQ ID NO: 2518258 - RNA, 19 nt, Artificial Sequence
  Description of Artificial Sequence: Synthetic oligonucleotide
caggaucugacguaagugc

SEQ ID NO: 2518259 - RNA, 19 nt, Artificial Sequence
  Description of Artificial Sequence: Synthetic oligonucleotide
uccauagccacaacuguga

SEQ ID NO: 2518260 - RNA, 19 nt, Artificial Sequence
  Description of Artificial Sequence: Synthetic oligonucleotide
accaucaugguguaagaca

SEQ ID NO: 2518261 - RNA, 19 nt, Artificial Sequence
  Description of Artificial Sequence: Synthetic oligonucleotide
acugucaaaggcaacaaug

SEQ ID NO: 2518262 - RNA, 19 nt, Artificial Sequence
  Description of Artificial Sequence: Synthetic oligonucleotide
uauccaaauuuccaacuuc

SEQ ID NO: 2518263 - RNA, 19 nt, Artificial Sequence
  Description of Artificial Sequence: Synthetic oligonucleotide
uaugauggccauugaagga

SEQ ID NO: 2518264 - RNA, 19 nt, Artificial Sequence
  Description of Artificial Sequence: Synthetic oligonucleotide
uuuuggggucuccaaaaca

SEQ ID NO: 2518265 - RNA, 19 nt, Artificial Sequence
  Description of Artificial Sequence: Synthetic oligonucleotide
uuccgaaaccucuuauuag

SEQ ID NO: 2518266 - RNA, 19 nt, Artificial Sequence
  Description of Artificial Sequence: Synthetic oligonucleotide
caacaauggaaauucacca

SEQ ID NO: 2518267 - RNA, 19 nt, Artificial Sequence
  Description of Artificial Sequence: Synthetic oligonucleotide
ucaaagcccaaaacaggcc

SEQ ID NO: 2518268 - RNA, 19 nt, Artificial Sequence
  Description of Artificial Sequence: Synthetic oligonucleotide
cugacguaagugcuggugg

SEQ ID NO: 2518269 - RNA, 19 nt, Artificial Sequence
  Description of Artificial Sequence: Synthetic oligonucleotide
agcccauaagcacacaaug

SEQ ID NO: 2518270 - RNA, 19 nt, Artificial Sequence
  Description of Artificial Sequence: Synthetic oligonucleotide
accucuuauuagcagcaac

SEQ ID NO: 2518271 - RNA, 19 nt, Artificial Sequence
  Description of Artificial Sequence: Synthetic oligonucleotide
aacaagcccauaagcacac

SEQ ID NO: 2518272 - RNA, 19 nt, Artificial Sequence
  Description of Artificial Sequence: Synthetic oligonucleotide
caauaucauuaucacagac

SEQ ID NO: 2518273 - RNA, 19 nt, Artificial Sequence
  Description of Artificial Sequence: Synthetic oligonucleotide
uuaagauaugcagugcagu

SEQ ID NO: 2518274 - RNA, 19 nt, Artificial Sequence
  Description of Artificial Sequence: Synthetic oligonucleotide
uaaauacagggguuguaga

SEQ ID NO: 2518275 - RNA, 19 nt, Artificial Sequence
  Description of Artificial Sequence: Synthetic oligonucleotide
uaaacauggcaaacauggc

SEQ ID NO: 2518276 - RNA, 19 nt, Artificial Sequence
  Description of Artificial Sequence: Synthetic oligonucleotide
auggaaauucaccacaaua

SEQ ID NO: 2518277 - RNA, 19 nt, Artificial Sequence
  Description of Artificial Sequence: Synthetic oligonucleotide
uuuaugguacagguggccc

SEQ ID NO: 2518278 - RNA, 19 nt, Artificial Sequence
  Description of Artificial Sequence: Synthetic oligonucleotide
acaacugugaguaagccaa

SEQ ID NO: 2518279 - RNA, 19 nt, Artificial Sequence
  Description of Artificial Sequence: Synthetic oligonucleotide
uuuggcaaacaguggagcu

SEQ ID NO: 2518280 - RNA, 19 nt, Artificial Sequence
  Description of Artificial Sequence: Synthetic oligonucleotide
aguaagccaaugcucacca

SEQ ID NO: 2518281 - RNA, 19 nt, Artificial Sequence
  Description of Artificial Sequence: Synthetic oligonucleotide
gaauaaggggaccaugcca

SEQ ID NO: 2518282 - RNA, 19 nt, Artificial Sequence
  Description of Artificial Sequence: Synthetic oligonucleotide
gaucugacguaagugcugg

SEQ ID NO: 2518283 - RNA, 19 nt, Artificial Sequence
  Description of Artificial Sequence: Synthetic oligonucleotide
guucacaucaccgcauugg

SEQ ID NO: 2518284 - RNA, 19 nt, Artificial Sequence
  Description of Artificial Sequence: Synthetic oligonucleotide
aagacacaaaagauauauc

SEQ ID NO: 2518285 - RNA, 19 nt, Artificial Sequence
  Description of Artificial Sequence: Synthetic oligonucleotide
gacccuaugucggugagag

SEQ ID NO: 2518286 - RNA, 19 nt, Artificial Sequence
  Description of Artificial Sequence: Synthetic oligonucleotide
acaucugccuggucggccc

SEQ ID NO: 2518287 - RNA, 19 nt, Artificial Sequence
  Description of Artificial Sequence: Synthetic oligonucleotide
caguaaaacauuacuguca

SEQ ID NO: 2518288 - RNA, 19 nt, Artificial Sequence
  Description of Artificial Sequence: Synthetic oligonucleotide
uaagauaugcagugcaguu

SEQ ID NO: 2518289 - RNA, 19 nt, Artificial Sequence
  Description of Artificial Sequence: Synthetic oligonucleotide
augauggccauugaaggag

SEQ ID NO: 2518290 - RNA, 19 nt, Artificial Sequence
  Description of Artificial Sequence: Synthetic oligonucleotide
uuaucacagacaucuuugu

SEQ ID NO: 2518291 - RNA, 19 nt, Artificial Sequence
  Description of Artificial Sequence: Synthetic oligonucleotide
aucaggacagcagaugguc

SEQ ID NO: 2518292 - RNA, 19 nt, Artificial Sequence
  Description of Artificial Sequence: Synthetic oligonucleotide
aauacagggguuguagaau

SEQ ID NO: 2518293 - RNA, 19 nt, Artificial Sequence
  Description of Artificial Sequence: Synthetic oligonucleotide
uaacuagcccacccaauga

SEQ ID NO: 2518294 - RNA, 19 nt, Artificial Sequence
  Description of Artificial Sequence: Synthetic oligonucleotide
agccugaauauccaaauuu

SEQ ID NO: 2518295 - RNA, 19 nt, Artificial Sequence
  Description of Artificial Sequence: Synthetic oligonucleotide
ucuuauuagcagcaacaua

SEQ ID NO: 2518296 - RNA, 19 nt, Artificial Sequence
  Description of Artificial Sequence: Synthetic oligonucleotide
gauuuggcaaacaguggag

SEQ ID NO: 2518297 - RNA, 19 nt, Artificial Sequence
  Description of Artificial Sequence: Synthetic oligonucleotide
uuauuagcagcaacauaaa

SEQ ID NO: 2518298 - RNA, 19 nt, Artificial Sequence
  Description of Artificial Sequence: Synthetic oligonucleotide
ugagugacaugguaauaac

SEQ ID NO: 2518299 - RNA, 19 nt, Artificial Sequence
  Description of Artificial Sequence: Synthetic oligonucleotide
uccaugcagaucugaagcc

SEQ ID NO: 2518300 - RNA, 19 nt, Artificial Sequence
  Description of Artificial Sequence: Synthetic oligonucleotide
aauggaaauucaccacaau

SEQ ID NO: 2518301 - RNA, 19 nt, Artificial Sequence
  Description of Artificial Sequence: Synthetic oligonucleotide
agucucauagacugaguga

SEQ ID NO: 2518302 - RNA, 19 nt, Artificial Sequence
  Description of Artificial Sequence: Synthetic oligonucleotide
gucucauagacugagugac

SEQ ID NO: 2518303 - RNA, 19 nt, Artificial Sequence
  Description of Artificial Sequence: Synthetic oligonucleotide
guuaagauaugcagugcag

SEQ ID NO: 2518304 - RNA, 19 nt, Artificial Sequence
  Description of Artificial Sequence: Synthetic oligonucleotide
cuuccaugcagaucugaag

SEQ ID NO: 2518305 - RNA, 19 nt, Artificial Sequence
  Description of Artificial Sequence: Synthetic oligonucleotide
aacuagcccacccaaugau

SEQ ID NO: 2518306 - RNA, 19 nt, Artificial Sequence
  Description of Artificial Sequence: Synthetic oligonucleotide
ugaagccgcagacauggga

SEQ ID NO: 2518307 - RNA, 19 nt, Artificial Sequence
  Description of Artificial Sequence: Synthetic oligonucleotide
augcuacugacccuauguc

SEQ ID NO: 2518308 - RNA, 19 nt, Artificial Sequence
  Description of Artificial Sequence: Synthetic oligonucleotide
aaaccucuuauuagcagca

SEQ ID NO: 2518309 - RNA, 19 nt, Artificial Sequence
  Description of Artificial Sequence: Synthetic oligonucleotide
caugcagaucugaagccgc

SEQ ID NO: 2518310 - RNA, 19 nt, Artificial Sequence
  Description of Artificial Sequence: Synthetic oligonucleotide
acaauggaauaaggggacc

SEQ ID NO: 2518311 - RNA, 19 nt, Artificial Sequence
  Description of Artificial Sequence: Synthetic oligonucleotide
auaaggggaccaugccagc

SEQ ID NO: 2518312 - RNA, 19 nt, Artificial Sequence
  Description of Artificial Sequence: Synthetic oligonucleotide
ucuggggcauaacuagccc

SEQ ID NO: 2518313 - RNA, 19 nt, Artificial Sequence
  Description of Artificial Sequence: Synthetic oligonucleotide
ggaucuggggcauaacuag

SEQ ID NO: 2518314 - RNA, 19 nt, Artificial Sequence
  Description of Artificial Sequence: Synthetic oligonucleotide
gcuaugauggccauugaag

SEQ ID NO: 2518315 - RNA, 19 nt, Artificial Sequence
  Description of Artificial Sequence: Synthetic oligonucleotide
ucugacguaagugcuggug

SEQ ID NO: 2518316 - RNA, 19 nt, Artificial Sequence
  Description of Artificial Sequence: Synthetic oligonucleotide
acaugggauagccaaugcu

SEQ ID NO: 2518317 - RNA, 19 nt, Artificial Sequence
  Description of Artificial Sequence: Synthetic oligonucleotide
gagagccagguucacauca

SEQ ID NO: 2518318 - RNA, 19 nt, Artificial Sequence
  Description of Artificial Sequence: Synthetic oligonucleotide
gcaacaauggaaauucacc

SEQ ID NO: 2518319 - RNA, 19 nt, Artificial Sequence
  Description of Artificial Sequence: Synthetic oligonucleotide
acaucaccgcauugggugg

SEQ ID NO: 2518320 - RNA, 19 nt, Artificial Sequence
  Description of Artificial Sequence: Synthetic oligonucleotide
ugguggucauucuucuucc

SEQ ID NO: 2518321 - RNA, 19 nt, Artificial Sequence
  Description of Artificial Sequence: Synthetic oligonucleotide
uuuguuacaucugccuggu

SEQ ID NO: 2518322 - RNA, 19 nt, Artificial Sequence
  Description of Artificial Sequence: Synthetic oligonucleotide
ggauuuggcaaacagugga

SEQ ID NO: 2518323 - RNA, 19 nt, Artificial Sequence
  Description of Artificial Sequence: Synthetic oligonucleotide
cagguaccgguccauagcc

SEQ ID NO: 2518324 - RNA, 19 nt, Artificial Sequence
  Description of Artificial Sequence: Synthetic oligonucleotide
uggggcauaacuagcccac

SEQ ID NO: 2518325 - RNA, 19 nt, Artificial Sequence
  Description of Artificial Sequence: Synthetic oligonucleotide
cugguggucauucuucuuc

SEQ ID NO: 2518326 - RNA, 19 nt, Artificial Sequence
  Description of Artificial Sequence: Synthetic oligonucleotide
ccugaauauccaaauuucc

SEQ ID NO: 2518327 - RNA, 19 nt, Artificial Sequence
  Description of Artificial Sequence: Synthetic oligonucleotide
auguagaggauuuggcaaa

SEQ ID NO: 2518328 - RNA, 19 nt, Artificial Sequence
  Description of Artificial Sequence: Synthetic oligonucleotide
gcauaaaucuggcagccug

SEQ ID NO: 2518329 - RNA, 19 nt, Artificial Sequence
  Description of Artificial Sequence: Synthetic oligonucleotide
gcuacugacccuaugucgg

SEQ ID NO: 2518330 - RNA, 19 nt, Artificial Sequence
  Description of Artificial Sequence: Synthetic oligonucleotide
ucggugagagccagguuca

SEQ ID NO: 2518331 - RNA, 19 nt, Artificial Sequence
  Description of Artificial Sequence: Synthetic oligonucleotide
aauuuccaacuuccaugca

SEQ ID NO: 2518332 - RNA, 19 nt, Artificial Sequence
  Description of Artificial Sequence: Synthetic oligonucleotide
aauggaauaaggggaccau

SEQ ID NO: 2518333 - RNA, 19 nt, Artificial Sequence
  Description of Artificial Sequence: Synthetic oligonucleotide
aacugugaguaagccaaug

SEQ ID NO: 2518334 - RNA, 19 nt, Artificial Sequence
  Description of Artificial Sequence: Synthetic oligonucleotide
caugggauagccaaugcua

SEQ ID NO: 2518335 - RNA, 19 nt, Artificial Sequence
  Description of Artificial Sequence: Synthetic oligonucleotide
ggagcuaugauggccauug

SEQ ID NO: 2518336 - RNA, 19 nt, Artificial Sequence
  Description of Artificial Sequence: Synthetic oligonucleotide
ucucauagacugagugaca

SEQ ID NO: 2518337 - RNA, 19 nt, Artificial Sequence
  Description of Artificial Sequence: Synthetic oligonucleotide
ucauagacugagugacaug

SEQ ID NO: 2518338 - RNA, 19 nt, Artificial Sequence
  Description of Artificial Sequence: Synthetic oligonucleotide
accgcauuggguggugucc

SEQ ID NO: 2518339 - RNA, 19 nt, Artificial Sequence
  Description of Artificial Sequence: Synthetic oligonucleotide
gggguuguagaauguagag

SEQ ID NO: 2518340 - RNA, 19 nt, Artificial Sequence
  Description of Artificial Sequence: Synthetic oligonucleotide
gugaguaagccaaugcuca

SEQ ID NO: 2518341 - RNA, 19 nt, Artificial Sequence
  Description of Artificial Sequence: Synthetic oligonucleotide
gacaugggauagccaaugc

SEQ ID NO: 2518342 - RNA, 19 nt, Artificial Sequence
  Description of Artificial Sequence: Synthetic oligonucleotide
agcacacaauggaauaagg

SEQ ID NO: 2518343 - RNA, 19 nt, Artificial Sequence
  Description of Artificial Sequence: Synthetic oligonucleotide
gcaacauaaauacaggggu

SEQ ID NO: 2518344 - RNA, 19 nt, Artificial Sequence
  Description of Artificial Sequence: Synthetic oligonucleotide
caaagcccaaaacaggcca

SEQ ID NO: 2518345 - RNA, 19 nt, Artificial Sequence
  Description of Artificial Sequence: Synthetic oligonucleotide
guacagguggccccaguag

SEQ ID NO: 2518346 - RNA, 19 nt, Artificial Sequence
  Description of Artificial Sequence: Synthetic oligonucleotide
gaguaagccaaugcucacc

SEQ ID NO: 2518347 - RNA, 19 nt, Artificial Sequence
  Description of Artificial Sequence: Synthetic oligonucleotide
ugacguaagugcugguggu

SEQ ID NO: 2518348 - RNA, 19 nt, Artificial Sequence
  Description of Artificial Sequence: Synthetic oligonucleotide
ugaguaagccaaugcucac

SEQ ID NO: 2518349 - RNA, 19 nt, Artificial Sequence
  Description of Artificial Sequence: Synthetic oligonucleotide
  modified_base (2)..(2): a, c, u, g, unknown or other
gnuauucaauccagcauaa

SEQ ID NO: 2518350 - RNA, 19 nt, Artificial Sequence
  Description of Artificial Sequence: Synthetic oligonucleotide
uaugucggugagagccagg

SEQ ID NO: 2518351 - RNA, 19 nt, Artificial Sequence
  Description of Artificial Sequence: Synthetic oligonucleotide
gcacacaauggaauaaggg

SEQ ID NO: 2518352 - RNA, 19 nt, Artificial Sequence
  Description of Artificial Sequence: Synthetic oligonucleotide
cccuaugucggugagagcc

SEQ ID NO: 2518353 - RNA, 19 nt, Artificial Sequence
  Description of Artificial Sequence: Synthetic oligonucleotide
agcuaugauggccauugaa

SEQ ID NO: 2518354 - RNA, 19 nt, Artificial Sequence
  Description of Artificial Sequence: Synthetic oligonucleotide
guuuaugguacagguggcc

SEQ ID NO: 2518355 - RNA, 19 nt, Artificial Sequence
  Description of Artificial Sequence: Synthetic oligonucleotide
agacaugggauagccaaug

SEQ ID NO: 2518356 - RNA, 19 nt, Artificial Sequence
  Description of Artificial Sequence: Synthetic oligonucleotide
uuccuauaucaggacagca

SEQ ID NO: 2518357 - RNA, 19 nt, Artificial Sequence
  Description of Artificial Sequence: Synthetic oligonucleotide
caggccauugguccaggcg

SEQ ID NO: 2518358 - RNA, 19 nt, Artificial Sequence
  Description of Artificial Sequence: Synthetic oligonucleotide
ucacaucaccgcauugggu

SEQ ID NO: 2518359 - RNA, 19 nt, Artificial Sequence
  Description of Artificial Sequence: Synthetic oligonucleotide
aucaugguguaagacacaa

SEQ ID NO: 2518360 - RNA, 19 nt, Artificial Sequence
  Description of Artificial Sequence: Synthetic oligonucleotide
aguggagcuaugauggcca

SEQ ID NO: 2518361 - RNA, 19 nt, Artificial Sequence
  Description of Artificial Sequence: Synthetic oligonucleotide
uggccauugaaggaggaau

SEQ ID NO: 2518362 - RNA, 19 nt, Artificial Sequence
  Description of Artificial Sequence: Synthetic oligonucleotide
ggaauaaggggaccaugcc

SEQ ID NO: 2518363 - RNA, 19 nt, Artificial Sequence
  Description of Artificial Sequence: Synthetic oligonucleotide
gaucugaagccgcagacau

SEQ ID NO: 2518364 - RNA, 19 nt, Artificial Sequence
  Description of Artificial Sequence: Synthetic oligonucleotide
cauaaaucuggcagccuga

SEQ ID NO: 2518365 - RNA, 19 nt, Artificial Sequence
  Description of Artificial Sequence: Synthetic oligonucleotide
uuuccgccaguuuauggua

SEQ ID NO: 2518366 - RNA, 19 nt, Artificial Sequence
  Description of Artificial Sequence: Synthetic oligonucleotide
cuuccuauaucaggacagc

SEQ ID NO: 2518367 - RNA, 19 nt, Artificial Sequence
  Description of Artificial Sequence: Synthetic oligonucleotide
gcagcaacauaaauacagg

SEQ ID NO: 2518368 - RNA, 19 nt, Artificial Sequence
  Description of Artificial Sequence: Synthetic oligonucleotide
acauaaauacagggguugu

SEQ ID NO: 2518369 - RNA, 19 nt, Artificial Sequence
  Description of Artificial Sequence: Synthetic oligonucleotide
cacaaaagauauaucauuu

SEQ ID NO: 2518370 - RNA, 19 nt, Artificial Sequence
  Description of Artificial Sequence: Synthetic oligonucleotide
cuguuaagauaugcagugc

SEQ ID NO: 2518371 - RNA, 19 nt, Artificial Sequence
  Description of Artificial Sequence: Synthetic oligonucleotide
uuacugucaaaggcaacaa

SEQ ID NO: 2518372 - RNA, 19 nt, Artificial Sequence
  Description of Artificial Sequence: Synthetic oligonucleotide
gaucuggggcauaacuagc

SEQ ID NO: 2518373 - RNA, 19 nt, Artificial Sequence
  Description of Artificial Sequence: Synthetic oligonucleotide
gagugacaugguaauaaca

SEQ ID NO: 2518374 - RNA, 19 nt, Artificial Sequence
  Description of Artificial Sequence: Synthetic oligonucleotide
uagcccacccaaugauggg

SEQ ID NO: 2518375 - RNA, 19 nt, Artificial Sequence
  Description of Artificial Sequence: Synthetic oligonucleotide
acugacccuaugucgguga

SEQ ID NO: 2518376 - RNA, 19 nt, Artificial Sequence
  Description of Artificial Sequence: Synthetic oligonucleotide
guguaagacacaaaagaua

SEQ ID NO: 2518377 - RNA, 19 nt, Artificial Sequence
  Description of Artificial Sequence: Synthetic oligonucleotide
cauugggugguguccgcag

SEQ ID NO: 2518378 - RNA, 19 nt, Artificial Sequence
  Description of Artificial Sequence: Synthetic oligonucleotide
agcagauggucagguaccg

SEQ ID NO: 2518379 - RNA, 19 nt, Artificial Sequence
  Description of Artificial Sequence: Synthetic oligonucleotide
ccaacuuccaugcagaucu

SEQ ID NO: 2518380 - RNA, 19 nt, Artificial Sequence
  Description of Artificial Sequence: Synthetic oligonucleotide
ugggauagccaaugcuacu

SEQ ID NO: 2518381 - RNA, 19 nt, Artificial Sequence
  Description of Artificial Sequence: Synthetic oligonucleotide
acaggccauugguccaggc

SEQ ID NO: 2518382 - RNA, 19 nt, Artificial Sequence
  Description of Artificial Sequence: Synthetic oligonucleotide
uuccgccaguuuaugguac

SEQ ID NO: 2518383 - RNA, 19 nt, Artificial Sequence
  Description of Artificial Sequence: Synthetic oligonucleotide
cauaagcacacaauggaau

SEQ ID NO: 2518384 - RNA, 19 nt, Artificial Sequence
  Description of Artificial Sequence: Synthetic oligonucleotide
agugcugguggucauucuu

SEQ ID NO: 2518385 - RNA, 19 nt, Artificial Sequence
  Description of Artificial Sequence: Synthetic oligonucleotide
guccauagccacaacugug

SEQ ID NO: 2518386 - RNA, 19 nt, Artificial Sequence
  Description of Artificial Sequence: Synthetic oligonucleotide
cugagugacaugguaauaa

SEQ ID NO: 2518387 - RNA, 19 nt, Artificial Sequence
  Description of Artificial Sequence: Synthetic oligonucleotide
acauuacugucaaaggcaa

SEQ ID NO: 2518388 - RNA, 19 nt, Artificial Sequence
  Description of Artificial Sequence: Synthetic oligonucleotide
guagaauguagaggauuug

SEQ ID NO: 2518389 - RNA, 19 nt, Artificial Sequence
  Description of Artificial Sequence: Synthetic oligonucleotide
gucucuguuaagauaugca

SEQ ID NO: 2518390 - RNA, 19 nt, Artificial Sequence
  Description of Artificial Sequence: Synthetic oligonucleotide
caauggaaauucaccacaa

SEQ ID NO: 2518391 - RNA, 19 nt, Artificial Sequence
  Description of Artificial Sequence: Synthetic oligonucleotide
aacuuccaugcagaucuga

SEQ ID NO: 2518392 - RNA, 19 nt, Artificial Sequence
  Description of Artificial Sequence: Synthetic oligonucleotide
uaaggggaccaugccagca

SEQ ID NO: 2518393 - RNA, 19 nt, Artificial Sequence
  Description of Artificial Sequence: Synthetic oligonucleotide
ugcagaucugaagccgcag

SEQ ID NO: 2518394 - RNA, 19 nt, Artificial Sequence
  Description of Artificial Sequence: Synthetic oligonucleotide
aggaucugacguaagugcu

SEQ ID NO: 2518395 - RNA, 19 nt, Artificial Sequence
  Description of Artificial Sequence: Synthetic oligonucleotide
agagccagguucacaucac

SEQ ID NO: 2518396 - RNA, 19 nt, Artificial Sequence
  Description of Artificial Sequence: Synthetic oligonucleotide
gcccauaagcacacaaugg

SEQ ID NO: 2518397 - RNA, 19 nt, Artificial Sequence
  Description of Artificial Sequence: Synthetic oligonucleotide
agguggccccaguaggauc

SEQ ID NO: 2518398 - RNA, 19 nt, Artificial Sequence
  Description of Artificial Sequence: Synthetic oligonucleotide
uguccgcagcuccuuguac

SEQ ID NO: 2518399 - RNA, 19 nt, Artificial Sequence
  Description of Artificial Sequence: Synthetic oligonucleotide
ccucuuauuagcagcaaca

SEQ ID NO: 2518400 - RNA, 19 nt, Artificial Sequence
  Description of Artificial Sequence: Synthetic oligonucleotide
ccuauaucaggacagcaga

SEQ ID NO: 2518401 - RNA, 19 nt, Artificial Sequence
  Description of Artificial Sequence: Synthetic oligonucleotide
caauggaauaaggggacca

SEQ ID NO: 2518402 - RNA, 19 nt, Artificial Sequence
  Description of Artificial Sequence: Synthetic oligonucleotide
augucggugagagccaggu

SEQ ID NO: 2518403 - RNA, 19 nt, Artificial Sequence
  Description of Artificial Sequence: Synthetic oligonucleotide
aauaaccaucaugguguaa

SEQ ID NO: 2518404 - RNA, 19 nt, Artificial Sequence
  Description of Artificial Sequence: Synthetic oligonucleotide
ggcaacaauggaaauucac

SEQ ID NO: 2518405 - RNA, 19 nt, Artificial Sequence
  Description of Artificial Sequence: Synthetic oligonucleotide
aguaggaucuggggcauaa

SEQ ID NO: 2518406 - RNA, 19 nt, Artificial Sequence
  Description of Artificial Sequence: Synthetic oligonucleotide
gcccaaaacaggccauugg

SEQ ID NO: 2518407 - RNA, 19 nt, Artificial Sequence
  Description of Artificial Sequence: Synthetic oligonucleotide
gccagguucacaucaccgc

SEQ ID NO: 2518408 - RNA, 19 nt, Artificial Sequence
  Description of Artificial Sequence: Synthetic oligonucleotide
uccaacuuccaugcagauc

SEQ ID NO: 2518409 - RNA, 19 nt, Artificial Sequence
  Description of Artificial Sequence: Synthetic oligonucleotide
cugugaguaagccaaugcu

SEQ ID NO: 2518410 - RNA, 19 nt, Artificial Sequence
  Description of Artificial Sequence: Synthetic oligonucleotide
ucggcccagucucuguuaa

SEQ ID NO: 2518411 - RNA, 19 nt, Artificial Sequence
  Description of Artificial Sequence: Synthetic oligonucleotide
gugacaugguaauaacagu

SEQ ID NO: 2518412 - RNA, 19 nt, Artificial Sequence
  Description of Artificial Sequence: Synthetic oligonucleotide
acuagcccacccaaugaug

SEQ ID NO: 2518413 - RNA, 19 nt, Artificial Sequence
  Description of Artificial Sequence: Synthetic oligonucleotide
cagugcaguuccuggcagc

SEQ ID NO: 2518414 - RNA, 19 nt, Artificial Sequence
  Description of Artificial Sequence: Synthetic oligonucleotide
cuaugucggugagagccag

SEQ ID NO: 2518415 - RNA, 19 nt, Artificial Sequence
  Description of Artificial Sequence: Synthetic oligonucleotide
aagccgcagacaugggaua

SEQ ID NO: 2518416 - RNA, 19 nt, Artificial Sequence
  Description of Artificial Sequence: Synthetic oligonucleotide
cauugaaggaggaaucuuu

SEQ ID NO: 2518417 - RNA, 19 nt, Artificial Sequence
  Description of Artificial Sequence: Synthetic oligonucleotide
acccuaugucggugagagc

SEQ ID NO: 2518418 - RNA, 19 nt, Artificial Sequence
  Description of Artificial Sequence: Synthetic oligonucleotide
ccaaaacaggccauugguc

SEQ ID NO: 2518419 - RNA, 19 nt, Artificial Sequence
  Description of Artificial Sequence: Synthetic oligonucleotide
uuacaucugccuggucggc

SEQ ID NO: 2518420 - RNA, 19 nt, Artificial Sequence
  Description of Artificial Sequence: Synthetic oligonucleotide
gggcauaacuagcccaccc

SEQ ID NO: 2518421 - RNA, 19 nt, Artificial Sequence
  Description of Artificial Sequence: Synthetic oligonucleotide
uacugacccuaugucggug

SEQ ID NO: 2518422 - RNA, 19 nt, Artificial Sequence
  Description of Artificial Sequence: Synthetic oligonucleotide
gguccaggcgcccaggauc

SEQ ID NO: 2518423 - RNA, 19 nt, Artificial Sequence
  Description of Artificial Sequence: Synthetic oligonucleotide
caagcccauaagcacacaa

SEQ ID NO: 2518424 - RNA, 19 nt, Artificial Sequence
  Description of Artificial Sequence: Synthetic oligonucleotide
gccugaauauccaaauuuc

SEQ ID NO: 2518425 - RNA, 19 nt, Artificial Sequence
  Description of Artificial Sequence: Synthetic oligonucleotide
acuuccaugcagaucugaa

SEQ ID NO: 2518426 - RNA, 19 nt, Artificial Sequence
  Description of Artificial Sequence: Synthetic oligonucleotide
ccaguuuaugguacaggug

SEQ ID NO: 2518427 - RNA, 19 nt, Artificial Sequence
  Description of Artificial Sequence: Synthetic oligonucleotide
agccgcagacaugggauag

SEQ ID NO: 2518428 - RNA, 19 nt, Artificial Sequence
  Description of Artificial Sequence: Synthetic oligonucleotide
ggcauaacuagcccaccca

SEQ ID NO: 2518429 - RNA, 19 nt, Artificial Sequence
  Description of Artificial Sequence: Synthetic oligonucleotide
auugguccaggcgcccagg

SEQ ID NO: 2518430 - RNA, 19 nt, Artificial Sequence
  Description of Artificial Sequence: Synthetic oligonucleotide
cugacccuaugucggugag

SEQ ID NO: 2518431 - RNA, 19 nt, Artificial Sequence
  Description of Artificial Sequence: Synthetic oligonucleotide
ccaugcagaucugaagccg

SEQ ID NO: 2518432 - RNA, 19 nt, Artificial Sequence
  Description of Artificial Sequence: Synthetic oligonucleotide
cacccaaugaugggcauca

SEQ ID NO: 2518433 - RNA, 19 nt, Artificial Sequence
  Description of Artificial Sequence: Synthetic oligonucleotide
aggaucuggggcauaacua

SEQ ID NO: 2518434 - RNA, 19 nt, Artificial Sequence
  Description of Artificial Sequence: Synthetic oligonucleotide
ugguguccgcagcuccuug

SEQ ID NO: 2518435 - RNA, 19 nt, Artificial Sequence
  Description of Artificial Sequence: Synthetic oligonucleotide
agcccaaaacaggccauug

SEQ ID NO: 2518436 - RNA, 19 nt, Artificial Sequence
  Description of Artificial Sequence: Synthetic oligonucleotide
uaccgguccauagccacaa

SEQ ID NO: 2518437 - RNA, 19 nt, Artificial Sequence
  Description of Artificial Sequence: Synthetic oligonucleotide
gaagccgcagacaugggau

SEQ ID NO: 2518438 - RNA, 19 nt, Artificial Sequence
  Description of Artificial Sequence: Synthetic oligonucleotide
gccaguuuaugguacaggu

SEQ ID NO: 2518439 - RNA, 19 nt, Artificial Sequence
  Description of Artificial Sequence: Synthetic oligonucleotide
gacguaagugcuggugguc

SEQ ID NO: 2518440 - RNA, 19 nt, Artificial Sequence
  Description of Artificial Sequence: Synthetic oligonucleotide
aucuggcagccugaauauc

SEQ ID NO: 2518441 - RNA, 19 nt, Artificial Sequence
  Description of Artificial Sequence: Synthetic oligonucleotide
aaccucuuauuagcagcaa

SEQ ID NO: 2518442 - RNA, 19 nt, Artificial Sequence
  Description of Artificial Sequence: Synthetic oligonucleotide
augggcaucaaagcccaaa

SEQ ID NO: 2518443 - RNA, 19 nt, Artificial Sequence
  Description of Artificial Sequence: Synthetic oligonucleotide
cgaaaccucuuauuagcag

SEQ ID NO: 2518444 - RNA, 19 nt, Artificial Sequence
  Description of Artificial Sequence: Synthetic oligonucleotide
agccaaugcuacugacccu

SEQ ID NO: 2518445 - RNA, 19 nt, Artificial Sequence
  Description of Artificial Sequence: Synthetic oligonucleotide
auagacugagugacauggu

SEQ ID NO: 2518446 - RNA, 19 nt, Artificial Sequence
  Description of Artificial Sequence: Synthetic oligonucleotide
gguucacaucaccgcauug

SEQ ID NO: 2518447 - RNA, 19 nt, Artificial Sequence
  Description of Artificial Sequence: Synthetic oligonucleotide
ggaucugacguaagugcug

SEQ ID NO: 2518448 - RNA, 19 nt, Artificial Sequence
  Description of Artificial Sequence: Synthetic oligonucleotide
aagcccaaaacaggccauu

SEQ ID NO: 2518449 - RNA, 19 nt, Artificial Sequence
  Description of Artificial Sequence: Synthetic oligonucleotide
guggucauucuucuuccua

SEQ ID NO: 2518450 - RNA, 19 nt, Artificial Sequence
  Description of Artificial Sequence: Synthetic oligonucleotide
ccccaguaggaucuggggc

SEQ ID NO: 2518451 - RNA, 19 nt, Artificial Sequence
  Description of Artificial Sequence: Synthetic oligonucleotide
gccccaguaggaucugggg

SEQ ID NO: 2518452 - RNA, 19 nt, Artificial Sequence
  Description of Artificial Sequence: Synthetic oligonucleotide
caucaugguguaagacaca

SEQ ID NO: 2518453 - RNA, 19 nt, Artificial Sequence
  Description of Artificial Sequence: Synthetic oligonucleotide
uggccuuccgaaaccucuu

SEQ ID NO: 2518454 - RNA, 19 nt, Artificial Sequence
  Description of Artificial Sequence: Synthetic oligonucleotide
ggucuccaaaacaagccca

SEQ ID NO: 2518455 - RNA, 19 nt, Artificial Sequence
  Description of Artificial Sequence: Synthetic oligonucleotide
gccacaacugugaguaagc

SEQ ID NO: 2518456 - RNA, 19 nt, Artificial Sequence
  Description of Artificial Sequence: Synthetic oligonucleotide
acagguggccccaguagga

SEQ ID NO: 2518457 - RNA, 19 nt, Artificial Sequence
  Description of Artificial Sequence: Synthetic oligonucleotide
ugacccuaugucggugaga

SEQ ID NO: 2518458 - RNA, 19 nt, Artificial Sequence
  Description of Artificial Sequence: Synthetic oligonucleotide
caacauaaauacagggguu

SEQ ID NO: 2518459 - RNA, 19 nt, Artificial Sequence
  Description of Artificial Sequence: Synthetic oligonucleotide
uggcagccugaauauccaa

SEQ ID NO: 2518460 - RNA, 19 nt, Artificial Sequence
  Description of Artificial Sequence: Synthetic oligonucleotide
cauaaauacagggguugua

SEQ ID NO: 2518461 - RNA, 19 nt, Artificial Sequence
  Description of Artificial Sequence: Synthetic oligonucleotide
gcauaacuagcccacccaa

SEQ ID NO: 2518462 - RNA, 19 nt, Artificial Sequence
  Description of Artificial Sequence: Synthetic oligonucleotide
accgguccauagccacaac

SEQ ID NO: 2518463 - RNA, 19 nt, Artificial Sequence
  Description of Artificial Sequence: Synthetic oligonucleotide
cgguccauagccacaacug

SEQ ID NO: 2518464 - RNA, 19 nt, Artificial Sequence
  Description of Artificial Sequence: Synthetic oligonucleotide
caggcgcccaggaucugac

SEQ ID NO: 2518465 - RNA, 19 nt, Artificial Sequence
  Description of Artificial Sequence: Synthetic oligonucleotide
aggcgcccaggaucugacg

SEQ ID NO: 2518466 - RNA, 19 nt, Artificial Sequence
  Description of Artificial Sequence: Synthetic oligonucleotide
ccauaagcacacaauggaa

SEQ ID NO: 2518467 - RNA, 19 nt, Artificial Sequence
  Description of Artificial Sequence: Synthetic oligonucleotide
acugagugacaugguaaua

SEQ ID NO: 2518468 - RNA, 19 nt, Artificial Sequence
  Description of Artificial Sequence: Synthetic oligonucleotide
cucauagacugagugacau

SEQ ID NO: 2518469 - RNA, 19 nt, Artificial Sequence
  Description of Artificial Sequence: Synthetic oligonucleotide
gcagaucugaagccgcaga

SEQ ID NO: 2518470 - RNA, 19 nt, Artificial Sequence
  Description of Artificial Sequence: Synthetic oligonucleotide
guagaggauuuggcaaaca

SEQ ID NO: 2518471 - RNA, 19 nt, Artificial Sequence
  Description of Artificial Sequence: Synthetic oligonucleotide
uuguuacaucugccugguc

SEQ ID NO: 2518472 - RNA, 19 nt, Artificial Sequence
  Description of Artificial Sequence: Synthetic oligonucleotide
auggccauugaaggaggaa

SEQ ID NO: 2518473 - RNA, 19 nt, Artificial Sequence
  Description of Artificial Sequence: Synthetic oligonucleotide
caccgcauugggugguguc

SEQ ID NO: 2518474 - RNA, 19 nt, Artificial Sequence
  Description of Artificial Sequence: Synthetic oligonucleotide
ugucggugagagccagguu

SEQ ID NO: 2518475 - RNA, 19 nt, Artificial Sequence
  Description of Artificial Sequence: Synthetic oligonucleotide
ggcagcaugaagucucaua

SEQ ID NO: 2518476 - RNA, 19 nt, Artificial Sequence
  Description of Artificial Sequence: Synthetic oligonucleotide
gagcuaugauggccauuga

SEQ ID NO: 2518477 - RNA, 19 nt, Artificial Sequence
  Description of Artificial Sequence: Synthetic oligonucleotide
gguccauagccacaacugu

SEQ ID NO: 2518478 - RNA, 19 nt, Artificial Sequence
  Description of Artificial Sequence: Synthetic oligonucleotide
gggugguguccgcagcucc

SEQ ID NO: 2518479 - RNA, 19 nt, Artificial Sequence
  Description of Artificial Sequence: Synthetic oligonucleotide
cauaacuagcccacccaau

SEQ ID NO: 2518480 - RNA, 19 nt, Artificial Sequence
  Description of Artificial Sequence: Synthetic oligonucleotide
cucuuauuagcagcaacau

SEQ ID NO: 2518481 - RNA, 19 nt, Artificial Sequence
  Description of Artificial Sequence: Synthetic oligonucleotide
augcagaucugaagccgca

SEQ ID NO: 2518482 - RNA, 19 nt, Artificial Sequence
  Description of Artificial Sequence: Synthetic oligonucleotide
ggccccaguaggaucuggg

SEQ ID NO: 2518483 - RNA, 19 nt, Artificial Sequence
  Description of Artificial Sequence: Synthetic oligonucleotide
gguacagguggccccagua

SEQ ID NO: 2518484 - RNA, 19 nt, Artificial Sequence
  Description of Artificial Sequence: Synthetic oligonucleotide
ccagguucacaucaccgca

SEQ ID NO: 2518485 - RNA, 19 nt, Artificial Sequence
  Description of Artificial Sequence: Synthetic oligonucleotide
gccuggucggcccagucuc

SEQ ID NO: 2518486 - RNA, 19 nt, Artificial Sequence
  Description of Artificial Sequence: Synthetic oligonucleotide
aggcaacaauggaaauuca

SEQ ID NO: 2518487 - RNA, 19 nt, Artificial Sequence
  Description of Artificial Sequence: Synthetic oligonucleotide
gcagauggucagguaccgg

SEQ ID NO: 2518488 - RNA, 19 nt, Artificial Sequence
  Description of Artificial Sequence: Synthetic oligonucleotide
ucaccgcauuggguggugu

SEQ ID NO: 2518489 - RNA, 19 nt, Artificial Sequence
  Description of Artificial Sequence: Synthetic oligonucleotide
aucaccgcauuggguggug

SEQ ID NO: 2518490 - RNA, 19 nt, Artificial Sequence
  Description of Artificial Sequence: Synthetic oligonucleotide
gccaaugcuacugacccua

SEQ ID NO: 2518491 - RNA, 19 nt, Artificial Sequence
  Description of Artificial Sequence: Synthetic oligonucleotide
ccgcagacaugggauagcc

SEQ ID NO: 2518492 - RNA, 19 nt, Artificial Sequence
  Description of Artificial Sequence: Synthetic oligonucleotide
ccaaauuuccaacuuccau

SEQ ID NO: 2518493 - RNA, 19 nt, Artificial Sequence
  Description of Artificial Sequence: Synthetic oligonucleotide
ucugccuggucggcccagu

SEQ ID NO: 2518494 - RNA, 19 nt, Artificial Sequence
  Description of Artificial Sequence: Synthetic oligonucleotide
guaccgguccauagccaca

SEQ ID NO: 2518495 - RNA, 19 nt, Artificial Sequence
  Description of Artificial Sequence: Synthetic oligonucleotide
uggagcuaugauggccauu

SEQ ID NO: 2518496 - RNA, 19 nt, Artificial Sequence
  Description of Artificial Sequence: Synthetic oligonucleotide
ccgcauugggugguguccg

SEQ ID NO: 2518497 - RNA, 19 nt, Artificial Sequence
  Description of Artificial Sequence: Synthetic oligonucleotide
gauaugcagugcaguuccu

SEQ ID NO: 2518498 - RNA, 19 nt, Artificial Sequence
  Description of Artificial Sequence: Synthetic oligonucleotide
aucugccuggucggcccag

SEQ ID NO: 2518499 - RNA, 19 nt, Artificial Sequence
  Description of Artificial Sequence: Synthetic oligonucleotide
ccuaugucggugagagcca

SEQ ID NO: 2518500 - RNA, 19 nt, Artificial Sequence
  Description of Artificial Sequence: Synthetic oligonucleotide
ggcgcccaggaucugacgu

SEQ ID NO: 2518501 - RNA, 19 nt, Artificial Sequence
  Description of Artificial Sequence: Synthetic oligonucleotide
gguggccccaguaggaucu

SEQ ID NO: 2518502 - RNA, 19 nt, Artificial Sequence
  Description of Artificial Sequence: Synthetic oligonucleotide
ggggcauaacuagcccacc

SEQ ID NO: 2518503 - RNA, 19 nt, Artificial Sequence
  Description of Artificial Sequence: Synthetic oligonucleotide
gcaugaagucucauagacu

SEQ ID NO: 2518504 - RNA, 19 nt, Artificial Sequence
  Description of Artificial Sequence: Synthetic oligonucleotide
cugccuggucggcccaguc

SEQ ID NO: 2518505 - RNA, 19 nt, Artificial Sequence
  Description of Artificial Sequence: Synthetic oligonucleotide
gccauugaaggaggaaucu

SEQ ID NO: 2518506 - RNA, 19 nt, Artificial Sequence
  Description of Artificial Sequence: Synthetic oligonucleotide
gucggcccagucucuguua

SEQ ID NO: 2518507 - RNA, 19 nt, Artificial Sequence
  Description of Artificial Sequence: Synthetic oligonucleotide
guaagccaaugcucaccau

SEQ ID NO: 2518508 - RNA, 19 nt, Artificial Sequence
  Description of Artificial Sequence: Synthetic oligonucleotide
gggaccaugccagcagaaa

SEQ ID NO: 2518509 - RNA, 19 nt, Artificial Sequence
  Description of Artificial Sequence: Synthetic oligonucleotide
caucugccuggucggccca

SEQ ID NO: 2518510 - RNA, 19 nt, Artificial Sequence
  Description of Artificial Sequence: Synthetic oligonucleotide
cagccugaauauccaaauu

SEQ ID NO: 2518511 - RNA, 19 nt, Artificial Sequence
  Description of Artificial Sequence: Synthetic oligonucleotide
gguggucauucuucuuccu

SEQ ID NO: 2518512 - RNA, 19 nt, Artificial Sequence
  Description of Artificial Sequence: Synthetic oligonucleotide
ccaugccagcagaaacauc

SEQ ID NO: 2518513 - RNA, 19 nt, Artificial Sequence
  Description of Artificial Sequence: Synthetic oligonucleotide
caacugugaguaagccaau

SEQ ID NO: 2518514 - RNA, 19 nt, Artificial Sequence
  Description of Artificial Sequence: Synthetic oligonucleotide
gcauugggugguguccgca

SEQ ID NO: 2518515 - RNA, 19 nt, Artificial Sequence
  Description of Artificial Sequence: Synthetic oligonucleotide
gcccacccaaugaugggca

SEQ ID NO: 2518516 - RNA, 19 nt, Artificial Sequence
  Description of Artificial Sequence: Synthetic oligonucleotide
ggcaaacaguggagcuaug

SEQ ID NO: 2518517 - RNA, 19 nt, Artificial Sequence
  Description of Artificial Sequence: Synthetic oligonucleotide
gccauugguccaggcgccc

SEQ ID NO: 2518518 - RNA, 19 nt, Artificial Sequence
  Description of Artificial Sequence: Synthetic oligonucleotide
guggagcuaugauggccau

SEQ ID NO: 2518519 - RNA, 19 nt, Artificial Sequence
  Description of Artificial Sequence: Synthetic oligonucleotide
ggccuuccgaaaccucuua

SEQ ID NO: 2518520 - RNA, 19 nt, Artificial Sequence
  Description of Artificial Sequence: Synthetic oligonucleotide
ccacaauaaccaucauggu

SEQ ID NO: 2518521 - RNA, 19 nt, Artificial Sequence
  Description of Artificial Sequence: Synthetic oligonucleotide
cccaggaucugacguaagu

SEQ ID NO: 2518522 - RNA, 19 nt, Artificial Sequence
  Description of Artificial Sequence: Synthetic oligonucleotide
cgcauugggugguguccgc

SEQ ID NO: 2518523 - RNA, 19 nt, Artificial Sequence
  Description of Artificial Sequence: Synthetic oligonucleotide
ccgguccauagccacaacu

SEQ ID NO: 2518524 - RNA, 19 nt, Artificial Sequence
  Description of Artificial Sequence: Synthetic oligonucleotide
caucaccgcauuggguggu

SEQ ID NO: 2518525 - RNA, 19 nt, Artificial Sequence
  Description of Artificial Sequence: Synthetic oligonucleotide
caguuccuggcagcaugaa

SEQ ID NO: 2518526 - RNA, 19 nt, Artificial Sequence
  Description of Artificial Sequence: Synthetic oligonucleotide
ggugguguccgcagcuccu

SEQ ID NO: 2518527 - RNA, 19 nt, Artificial Sequence
  Description of Artificial Sequence: Synthetic oligonucleotide
gcccaggaucugacguaag

SEQ ID NO: 2518528 - RNA, 19 nt, Artificial Sequence
  Description of Artificial Sequence: Synthetic oligonucleotide
ggucagguaccgguccaua

SEQ ID NO: 2518529 - RNA, 19 nt, Artificial Sequence
  Description of Artificial Sequence: Synthetic oligonucleotide
cagguggccccaguaggau

SEQ ID NO: 2518530 - RNA, 19 nt, Artificial Sequence
  Description of Artificial Sequence: Synthetic oligonucleotide
gcugguggucauucuucuu

SEQ ID NO: 2518531 - RNA, 19 nt, Artificial Sequence
  Description of Artificial Sequence: Synthetic oligonucleotide
ccauugguccaggcgccca

SEQ ID NO: 2518532 - RNA, 19 nt, Artificial Sequence
  Description of Artificial Sequence: Synthetic oligonucleotide
caguaggaucuggggcaua

SEQ ID NO: 2518533 - RNA, 19 nt, Artificial Sequence
  Description of Artificial Sequence: Synthetic oligonucleotide
ccaaugcuacugacccuau

SEQ ID NO: 2518534 - RNA, 19 nt, Artificial Sequence
  Description of Artificial Sequence: Synthetic oligonucleotide
cguaagugcugguggucau

SEQ ID NO: 2518535 - RNA, 19 nt, Artificial Sequence
  Description of Artificial Sequence: Synthetic oligonucleotide
cgcccaggaucugacguaa

SEQ ID NO: 2518536 - RNA, 19 nt, Artificial Sequence
  Description of Artificial Sequence: Synthetic oligonucleotide
ccuggucggcccagucucu

SEQ ID NO: 2518537 - RNA, 19 nt, Artificial Sequence
  Description of Artificial Sequence: Synthetic oligonucleotide
ccaguaggaucuggggcau

SEQ ID NO: 2518538 - RNA, 19 nt, Artificial Sequence
  Description of Artificial Sequence: Synthetic oligonucleotide
cccacccaaugaugggcau

SEQ ID NO: 2518539 - RNA, 19 nt, Artificial Sequence
  Description of Artificial Sequence: Synthetic oligonucleotide
  modified_base (1)..(1): a, c, u, g, unknown or other
nuauucaauccagcauaaa

SEQ ID NO: 2518540 - RNA, 19 nt, Artificial Sequence
  Description of Artificial Sequence: Synthetic oligonucleotide
acuagauacacccaggagg

SEQ ID NO: 2518541 - RNA, 19 nt, Artificial Sequence
  Description of Artificial Sequence: Synthetic oligonucleotide
aguacaggcaagaagaccc

SEQ ID NO: 2518542 - RNA, 19 nt, Artificial Sequence
  Description of Artificial Sequence: Synthetic oligonucleotide
aagguugacauuuccaaag

SEQ ID NO: 2518543 - RNA, 19 nt, Artificial Sequence
  Description of Artificial Sequence: Synthetic oligonucleotide
aagacccucauguugaaag

SEQ ID NO: 2518544 - RNA, 19 nt, Artificial Sequence
  Description of Artificial Sequence: Synthetic oligonucleotide
augugggugaauuuagugc

SEQ ID NO: 2518545 - RNA, 19 nt, Artificial Sequence
  Description of Artificial Sequence: Synthetic oligonucleotide
acuucaacagagcagaugu

SEQ ID NO: 2518546 - RNA, 19 nt, Artificial Sequence
  Description of Artificial Sequence: Synthetic oligonucleotide
uagugcuuagcccugaugc

SEQ ID NO: 2518547 - RNA, 19 nt, Artificial Sequence
  Description of Artificial Sequence: Synthetic oligonucleotide
uugacauuuccaaagccag

SEQ ID NO: 2518548 - RNA, 19 nt, Artificial Sequence
  Description of Artificial Sequence: Synthetic oligonucleotide
uauugcagaaggaauguug

SEQ ID NO: 2518549 - RNA, 19 nt, Artificial Sequence
  Description of Artificial Sequence: Synthetic oligonucleotide
ugaauuuagugcuuagccc

SEQ ID NO: 2518550 - RNA, 19 nt, Artificial Sequence
  Description of Artificial Sequence: Synthetic oligonucleotide
aagcauaucagggaauggg

SEQ ID NO: 2518551 - RNA, 19 nt, Artificial Sequence
  Description of Artificial Sequence: Synthetic oligonucleotide
gugaauuuagugcuuagcc

SEQ ID NO: 2518552 - RNA, 19 nt, Artificial Sequence
  Description of Artificial Sequence: Synthetic oligonucleotide
ucugagacuccaaggaagg

SEQ ID NO: 2518553 - RNA, 19 nt, Artificial Sequence
  Description of Artificial Sequence: Synthetic oligonucleotide
uucaacagagcagaugugg

SEQ ID NO: 2518554 - RNA, 19 nt, Artificial Sequence
  Description of Artificial Sequence: Synthetic oligonucleotide
cacaagaguagcuaguccc

SEQ ID NO: 2518555 - RNA, 19 nt, Artificial Sequence
  Description of Artificial Sequence: Synthetic oligonucleotide
ugugggugaauuuagugcu

SEQ ID NO: 2518556 - RNA, 19 nt, Artificial Sequence
  Description of Artificial Sequence: Synthetic oligonucleotide
uucggaacagcccuuauuc

SEQ ID NO: 2518557 - RNA, 19 nt, Artificial Sequence
  Description of Artificial Sequence: Synthetic oligonucleotide
uugacauugauguucucac

SEQ ID NO: 2518558 - RNA, 19 nt, Artificial Sequence
  Description of Artificial Sequence: Synthetic oligonucleotide
auuggcucuagacacaaga

SEQ ID NO: 2518559 - RNA, 19 nt, Artificial Sequence
  Description of Artificial Sequence: Synthetic oligonucleotide
agguugacauuuccaaagc

SEQ ID NO: 2518560 - RNA, 19 nt, Artificial Sequence
  Description of Artificial Sequence: Synthetic oligonucleotide
aauggcagcaggaagccag

SEQ ID NO: 2518561 - RNA, 19 nt, Artificial Sequence
  Description of Artificial Sequence: Synthetic oligonucleotide
gugcugauauugcagaagg

SEQ ID NO: 2518562 - RNA, 19 nt, Artificial Sequence
  Description of Artificial Sequence: Synthetic oligonucleotide
gaugugggugaauuuagug

SEQ ID NO: 2518563 - RNA, 19 nt, Artificial Sequence
  Description of Artificial Sequence: Synthetic oligonucleotide
cagggaaugggcuugcucc

SEQ ID NO: 2518564 - RNA, 19 nt, Artificial Sequence
  Description of Artificial Sequence: Synthetic oligonucleotide
acacaagaguagcuagucc

SEQ ID NO: 2518565 - RNA, 19 nt, Artificial Sequence
  Description of Artificial Sequence: Synthetic oligonucleotide
cagcaguagcuauugaugg

SEQ ID NO: 2518566 - RNA, 19 nt, Artificial Sequence
  Description of Artificial Sequence: Synthetic oligonucleotide
gaauuuagugcuuagcccu

SEQ ID NO: 2518567 - RNA, 19 nt, Artificial Sequence
  Description of Artificial Sequence: Synthetic oligonucleotide
caggauuggcucuagacac

SEQ ID NO: 2518568 - RNA, 19 nt, Artificial Sequence
  Description of Artificial Sequence: Synthetic oligonucleotide
gacauugauguucucacga

SEQ ID NO: 2518569 - RNA, 19 nt, Artificial Sequence
  Description of Artificial Sequence: Synthetic oligonucleotide
aagccaaagaagccuccgg

SEQ ID NO: 2518570 - RNA, 19 nt, Artificial Sequence
  Description of Artificial Sequence: Synthetic oligonucleotide
gaccuagguacucugagac

SEQ ID NO: 2518571 - RNA, 19 nt, Artificial Sequence
  Description of Artificial Sequence: Synthetic oligonucleotide
uuggcucuagacacaagag

SEQ ID NO: 2518572 - RNA, 19 nt, Artificial Sequence
  Description of Artificial Sequence: Synthetic oligonucleotide
aauguuggcagcaguagcu

SEQ ID NO: 2518573 - RNA, 19 nt, Artificial Sequence
  Description of Artificial Sequence: Synthetic oligonucleotide
acuguaacacaguaauugu

SEQ ID NO: 2518574 - RNA, 19 nt, Artificial Sequence
  Description of Artificial Sequence: Synthetic oligonucleotide
cucauguugaaaguggcag

SEQ ID NO: 2518575 - RNA, 19 nt, Artificial Sequence
  Description of Artificial Sequence: Synthetic oligonucleotide
uuuccugguuccccaaggg

SEQ ID NO: 2518576 - RNA, 19 nt, Artificial Sequence
  Description of Artificial Sequence: Synthetic oligonucleotide
uuauucaggguguagccaa

SEQ ID NO: 2518577 - RNA, 19 nt, Artificial Sequence
  Description of Artificial Sequence: Synthetic oligonucleotide
agcauaucagggaaugggc

SEQ ID NO: 2518578 - RNA, 19 nt, Artificial Sequence
  Description of Artificial Sequence: Synthetic oligonucleotide
uaauugucugagcuugggc

SEQ ID NO: 2518579 - RNA, 19 nt, Artificial Sequence
  Description of Artificial Sequence: Synthetic oligonucleotide
uucugaucggugcaggaga

SEQ ID NO: 2518580 - RNA, 19 nt, Artificial Sequence
  Description of Artificial Sequence: Synthetic oligonucleotide
agccaaagaagccuccggg

SEQ ID NO: 2518581 - RNA, 19 nt, Artificial Sequence
  Description of Artificial Sequence: Synthetic oligonucleotide
caagaagacccucauguug

SEQ ID NO: 2518582 - RNA, 19 nt, Artificial Sequence
  Description of Artificial Sequence: Synthetic oligonucleotide
cucugagacuccaaggaag

SEQ ID NO: 2518583 - RNA, 19 nt, Artificial Sequence
  Description of Artificial Sequence: Synthetic oligonucleotide
ugauggaugccacaccuaa

SEQ ID NO: 2518584 - RNA, 19 nt, Artificial Sequence
  Description of Artificial Sequence: Synthetic oligonucleotide
aguagcuagucccacuuca

SEQ ID NO: 2518585 - RNA, 19 nt, Artificial Sequence
  Description of Artificial Sequence: Synthetic oligonucleotide
ugacauugauguucucacg

SEQ ID NO: 2518586 - RNA, 19 nt, Artificial Sequence
  Description of Artificial Sequence: Synthetic oligonucleotide
uucauauugcucuucugau

SEQ ID NO: 2518587 - RNA, 19 nt, Artificial Sequence
  Description of Artificial Sequence: Synthetic oligonucleotide
cagacaucugcugagggcg

SEQ ID NO: 2518588 - RNA, 19 nt, Artificial Sequence
  Description of Artificial Sequence: Synthetic oligonucleotide
aggagugggaugcuagcac

SEQ ID NO: 2518589 - RNA, 19 nt, Artificial Sequence
  Description of Artificial Sequence: Synthetic oligonucleotide
cuagauacacccaggagga

SEQ ID NO: 2518590 - RNA, 19 nt, Artificial Sequence
  Description of Artificial Sequence: Synthetic oligonucleotide
ucuagacacaagaguagcu

SEQ ID NO: 2518591 - RNA, 19 nt, Artificial Sequence
  Description of Artificial Sequence: Synthetic oligonucleotide
gaugccacaccuaaguuga

SEQ ID NO: 2518592 - RNA, 19 nt, Artificial Sequence
  Description of Artificial Sequence: Synthetic oligonucleotide
guacucugagacuccaagg

SEQ ID NO: 2518593 - RNA, 19 nt, Artificial Sequence
  Description of Artificial Sequence: Synthetic oligonucleotide
gacuagauacacccaggag

SEQ ID NO: 2518594 - RNA, 19 nt, Artificial Sequence
  Description of Artificial Sequence: Synthetic oligonucleotide
cacaccuaaguugacauug

SEQ ID NO: 2518595 - RNA, 19 nt, Artificial Sequence
  Description of Artificial Sequence: Synthetic oligonucleotide
cuagcacgaaguccgaggc

SEQ ID NO: 2518596 - RNA, 19 nt, Artificial Sequence
  Description of Artificial Sequence: Synthetic oligonucleotide
ucccacuucaacagagcag

SEQ ID NO: 2518597 - RNA, 19 nt, Artificial Sequence
  Description of Artificial Sequence: Synthetic oligonucleotide
agaagcauaucagggaaug

SEQ ID NO: 2518598 - RNA, 19 nt, Artificial Sequence
  Description of Artificial Sequence: Synthetic oligonucleotide
uugauguucucacgagggc

SEQ ID NO: 2518599 - RNA, 19 nt, Artificial Sequence
  Description of Artificial Sequence: Synthetic oligonucleotide
agcuccggaaaccacaggu

SEQ ID NO: 2518600 - RNA, 19 nt, Artificial Sequence
  Description of Artificial Sequence: Synthetic oligonucleotide
agcuagucccacuucaaca

SEQ ID NO: 2518601 - RNA, 19 nt, Artificial Sequence
  Description of Artificial Sequence: Synthetic oligonucleotide
ugacauuuccaaagccagc

SEQ ID NO: 2518602 - RNA, 19 nt, Artificial Sequence
  Description of Artificial Sequence: Synthetic oligonucleotide
gaagccuccgggcgaagcg

SEQ ID NO: 2518603 - RNA, 19 nt, Artificial Sequence
  Description of Artificial Sequence: Synthetic oligonucleotide
cuauugauggaugccacac

SEQ ID NO: 2518604 - RNA, 19 nt, Artificial Sequence
  Description of Artificial Sequence: Synthetic oligonucleotide
guccaguugcagcagagcc

SEQ ID NO: 2518605 - RNA, 19 nt, Artificial Sequence
  Description of Artificial Sequence: Synthetic oligonucleotide
cucacgagggcagauuucg

SEQ ID NO: 2518606 - RNA, 19 nt, Artificial Sequence
  Description of Artificial Sequence: Synthetic oligonucleotide
caguaauugucugagcuug

SEQ ID NO: 2518607 - RNA, 19 nt, Artificial Sequence
  Description of Artificial Sequence: Synthetic oligonucleotide
ggagauauggggaacacac

SEQ ID NO: 2518608 - RNA, 19 nt, Artificial Sequence
  Description of Artificial Sequence: Synthetic oligonucleotide
acccaaaagggcugccagc

SEQ ID NO: 2518609 - RNA, 19 nt, Artificial Sequence
  Description of Artificial Sequence: Synthetic oligonucleotide
cuccggaaaccacaggucc

SEQ ID NO: 2518610 - RNA, 19 nt, Artificial Sequence
  Description of Artificial Sequence: Synthetic oligonucleotide
uugggcauacgguuggcca

SEQ ID NO: 2518611 - RNA, 19 nt, Artificial Sequence
  Description of Artificial Sequence: Synthetic oligonucleotide
cuguaacacaguaauuguc

SEQ ID NO: 2518612 - RNA, 19 nt, Artificial Sequence
  Description of Artificial Sequence: Synthetic oligonucleotide
guugacauuuccaaagcca

SEQ ID NO: 2518613 - RNA, 19 nt, Artificial Sequence
  Description of Artificial Sequence: Synthetic oligonucleotide
ugagacuccaaggaagggu

SEQ ID NO: 2518614 - RNA, 19 nt, Artificial Sequence
  Description of Artificial Sequence: Synthetic oligonucleotide
uuagugcuuagcccugaug

SEQ ID NO: 2518615 - RNA, 19 nt, Artificial Sequence
  Description of Artificial Sequence: Synthetic oligonucleotide
ugugcgcagacugaccuag

SEQ ID NO: 2518616 - RNA, 19 nt, Artificial Sequence
  Description of Artificial Sequence: Synthetic oligonucleotide
auggggaacacacggagau

SEQ ID NO: 2518617 - RNA, 19 nt, Artificial Sequence
  Description of Artificial Sequence: Synthetic oligonucleotide
cagaugugggugaauuuag

SEQ ID NO: 2518618 - RNA, 19 nt, Artificial Sequence
  Description of Artificial Sequence: Synthetic oligonucleotide
uagcuauugauggaugcca

SEQ ID NO: 2518619 - RNA, 19 nt, Artificial Sequence
  Description of Artificial Sequence: Synthetic oligonucleotide
gaagcauaucagggaaugg

SEQ ID NO: 2518620 - RNA, 19 nt, Artificial Sequence
  Description of Artificial Sequence: Synthetic oligonucleotide
ccuaaguugacauugaugu

SEQ ID NO: 2518621 - RNA, 19 nt, Artificial Sequence
  Description of Artificial Sequence: Synthetic oligonucleotide
aaagccagcagcagcagau

SEQ ID NO: 2518622 - RNA, 19 nt, Artificial Sequence
  Description of Artificial Sequence: Synthetic oligonucleotide
gcagaaggaauguuggcag

SEQ ID NO: 2518623 - RNA, 19 nt, Artificial Sequence
  Description of Artificial Sequence: Synthetic oligonucleotide
guaauugucugagcuuggg

SEQ ID NO: 2518624 - RNA, 19 nt, Artificial Sequence
  Description of Artificial Sequence: Synthetic oligonucleotide
aauuuagugcuuagcccug

SEQ ID NO: 2518625 - RNA, 19 nt, Artificial Sequence
  Description of Artificial Sequence: Synthetic oligonucleotide
gcuagucccacuucaacag

SEQ ID NO: 2518626 - RNA, 19 nt, Artificial Sequence
  Description of Artificial Sequence: Synthetic oligonucleotide
gaacacacggagaugguca

SEQ ID NO: 2518627 - RNA, 19 nt, Artificial Sequence
  Description of Artificial Sequence: Synthetic oligonucleotide
uauucaggguguagccaag

SEQ ID NO: 2518628 - RNA, 19 nt, Artificial Sequence
  Description of Artificial Sequence: Synthetic oligonucleotide
gagauauggggaacacacg

SEQ ID NO: 2518629 - RNA, 19 nt, Artificial Sequence
  Description of Artificial Sequence: Synthetic oligonucleotide
ugcuuagcccugaugcuga

SEQ ID NO: 2518630 - RNA, 19 nt, Artificial Sequence
  Description of Artificial Sequence: Synthetic oligonucleotide
cugaccuagguacucugag

SEQ ID NO: 2518631 - RNA, 19 nt, Artificial Sequence
  Description of Artificial Sequence: Synthetic oligonucleotide
ugaccuagguacucugaga

SEQ ID NO: 2518632 - RNA, 19 nt, Artificial Sequence
  Description of Artificial Sequence: Synthetic oligonucleotide
guagcuauugauggaugcc

SEQ ID NO: 2518633 - RNA, 19 nt, Artificial Sequence
  Description of Artificial Sequence: Synthetic oligonucleotide
ggagugggaugcuagcacg

SEQ ID NO: 2518634 - RNA, 19 nt, Artificial Sequence
  Description of Artificial Sequence: Synthetic oligonucleotide
ugcugauauugcagaagga

SEQ ID NO: 2518635 - RNA, 19 nt, Artificial Sequence
  Description of Artificial Sequence: Synthetic oligonucleotide
gcuagcacgaaguccgagg

SEQ ID NO: 2518636 - RNA, 19 nt, Artificial Sequence
  Description of Artificial Sequence: Synthetic oligonucleotide
aagggcugccagcaguaca

SEQ ID NO: 2518637 - RNA, 19 nt, Artificial Sequence
  Description of Artificial Sequence: Synthetic oligonucleotide
gacacaagaguagcuaguc

SEQ ID NO: 2518638 - RNA, 19 nt, Artificial Sequence
  Description of Artificial Sequence: Synthetic oligonucleotide
acaguaauugucugagcuu

SEQ ID NO: 2518639 - RNA, 19 nt, Artificial Sequence
  Description of Artificial Sequence: Synthetic oligonucleotide
agcgaccccgaagagcucc

SEQ ID NO: 2518640 - RNA, 19 nt, Artificial Sequence
  Description of Artificial Sequence: Synthetic oligonucleotide
ucaggguguagccaagguu

SEQ ID NO: 2518641 - RNA, 19 nt, Artificial Sequence
  Description of Artificial Sequence: Synthetic oligonucleotide
agugcuuagcccugaugcu

SEQ ID NO: 2518642 - RNA, 19 nt, Artificial Sequence
  Description of Artificial Sequence: Synthetic oligonucleotide
uucucacgagggcagauuu

SEQ ID NO: 2518643 - RNA, 19 nt, Artificial Sequence
  Description of Artificial Sequence: Synthetic oligonucleotide
cuagguacucugagacucc

SEQ ID NO: 2518644 - RNA, 19 nt, Artificial Sequence
  Description of Artificial Sequence: Synthetic oligonucleotide
agaguagcuagucccacuu

SEQ ID NO: 2518645 - RNA, 19 nt, Artificial Sequence
  Description of Artificial Sequence: Synthetic oligonucleotide
uucaggguguagccaaggu

SEQ ID NO: 2518646 - RNA, 19 nt, Artificial Sequence
  Description of Artificial Sequence: Synthetic oligonucleotide
uagcuagucccacuucaac

SEQ ID NO: 2518647 - RNA, 19 nt, Artificial Sequence
  Description of Artificial Sequence: Synthetic oligonucleotide
ucacgagggcagauuucgg

SEQ ID NO: 2518648 - RNA, 19 nt, Artificial Sequence
  Description of Artificial Sequence: Synthetic oligonucleotide
agcuauugauggaugccac

SEQ ID NO: 2518649 - RNA, 19 nt, Artificial Sequence
  Description of Artificial Sequence: Synthetic oligonucleotide
ucugaucggugcaggagaa

SEQ ID NO: 2518650 - RNA, 19 nt, Artificial Sequence
  Description of Artificial Sequence: Synthetic oligonucleotide
agcacgaaguccgaggcca

SEQ ID NO: 2518651 - RNA, 19 nt, Artificial Sequence
  Description of Artificial Sequence: Synthetic oligonucleotide
gguugacauuuccaaagcc

SEQ ID NO: 2518652 - RNA, 19 nt, Artificial Sequence
  Description of Artificial Sequence: Synthetic oligonucleotide
aaagggcugccagcaguac

SEQ ID NO: 2518653 - RNA, 19 nt, Artificial Sequence
  Description of Artificial Sequence: Synthetic oligonucleotide
cagaaggaauguuggcagc

SEQ ID NO: 2518654 - RNA, 19 nt, Artificial Sequence
  Description of Artificial Sequence: Synthetic oligonucleotide
accuaaguugacauugaug

SEQ ID NO: 2518655 - RNA, 19 nt, Artificial Sequence
  Description of Artificial Sequence: Synthetic oligonucleotide
gaagcgaccccgaagagcu

SEQ ID NO: 2518656 - RNA, 19 nt, Artificial Sequence
  Description of Artificial Sequence: Synthetic oligonucleotide
agcaguagcuauugaugga

SEQ ID NO: 2518657 - RNA, 19 nt, Artificial Sequence
  Description of Artificial Sequence: Synthetic oligonucleotide
uuucggaacagcccuuauu

SEQ ID NO: 2518658 - RNA, 19 nt, Artificial Sequence
  Description of Artificial Sequence: Synthetic oligonucleotide
ggggacuagauacacccag

SEQ ID NO: 2518659 - RNA, 19 nt, Artificial Sequence
  Description of Artificial Sequence: Synthetic oligonucleotide
ucggaacagcccuuauuca

SEQ ID NO: 2518660 - RNA, 19 nt, Artificial Sequence
  Description of Artificial Sequence: Synthetic oligonucleotide
aguaauugucugagcuugg

SEQ ID NO: 2518661 - RNA, 19 nt, Artificial Sequence
  Description of Artificial Sequence: Synthetic oligonucleotide
cuaggguccccgcuuuucc

SEQ ID NO: 2518662 - RNA, 19 nt, Artificial Sequence
  Description of Artificial Sequence: Synthetic oligonucleotide
gacugaccuagguacucug

SEQ ID NO: 2518663 - RNA, 19 nt, Artificial Sequence
  Description of Artificial Sequence: Synthetic oligonucleotide
gaaugggcuugcuccacac

SEQ ID NO: 2518664 - RNA, 19 nt, Artificial Sequence
  Description of Artificial Sequence: Synthetic oligonucleotide
gaagccagugugcgcagac

SEQ ID NO: 2518665 - RNA, 19 nt, Artificial Sequence
  Description of Artificial Sequence: Synthetic oligonucleotide
ugcugagggcgcacaagcc

SEQ ID NO: 2518666 - RNA, 19 nt, Artificial Sequence
  Description of Artificial Sequence: Synthetic oligonucleotide
acggagauggucagggguc

SEQ ID NO: 2518667 - RNA, 19 nt, Artificial Sequence
  Description of Artificial Sequence: Synthetic oligonucleotide
ugcgcagacugaccuaggu

SEQ ID NO: 2518668 - RNA, 19 nt, Artificial Sequence
  Description of Artificial Sequence: Synthetic oligonucleotide
agucccacuucaacagagc

SEQ ID NO: 2518669 - RNA, 19 nt, Artificial Sequence
  Description of Artificial Sequence: Synthetic oligonucleotide
gauauggggaacacacgga

SEQ ID NO: 2518670 - RNA, 19 nt, Artificial Sequence
  Description of Artificial Sequence: Synthetic oligonucleotide
ugggcauacgguuggccac

SEQ ID NO: 2518671 - RNA, 19 nt, Artificial Sequence
  Description of Artificial Sequence: Synthetic oligonucleotide
cacccaaaagggcugccag

SEQ ID NO: 2518672 - RNA, 19 nt, Artificial Sequence
  Description of Artificial Sequence: Synthetic oligonucleotide
cuucugaucggugcaggag

SEQ ID NO: 2518673 - RNA, 19 nt, Artificial Sequence
  Description of Artificial Sequence: Synthetic oligonucleotide
gauggaugccacaccuaag

SEQ ID NO: 2518674 - RNA, 19 nt, Artificial Sequence
  Description of Artificial Sequence: Synthetic oligonucleotide
agcugaaggcuccuagggu

SEQ ID NO: 2518675 - RNA, 19 nt, Artificial Sequence
  Description of Artificial Sequence: Synthetic oligonucleotide
agacccucauguugaaagu

SEQ ID NO: 2518676 - RNA, 19 nt, Artificial Sequence
  Description of Artificial Sequence: Synthetic oligonucleotide
aaggcuccuaggguccccg

SEQ ID NO: 2518677 - RNA, 19 nt, Artificial Sequence
  Description of Artificial Sequence: Synthetic oligonucleotide
ggugaauuuagugcuuagc

SEQ ID NO: 2518678 - RNA, 19 nt, Artificial Sequence
  Description of Artificial Sequence: Synthetic oligonucleotide
caguacaggcaagaagacc

SEQ ID NO: 2518679 - RNA, 19 nt, Artificial Sequence
  Description of Artificial Sequence: Synthetic oligonucleotide
auucaggguguagccaagg

SEQ ID NO: 2518680 - RNA, 19 nt, Artificial Sequence
  Description of Artificial Sequence: Synthetic oligonucleotide
uuuuaacccuuuccugguu

SEQ ID NO: 2518681 - RNA, 19 nt, Artificial Sequence
  Description of Artificial Sequence: Synthetic oligonucleotide
agcugugcugauauugcag

SEQ ID NO: 2518682 - RNA, 19 nt, Artificial Sequence
  Description of Artificial Sequence: Synthetic oligonucleotide
ggagaagcauaucagggaa

SEQ ID NO: 2518683 - RNA, 19 nt, Artificial Sequence
  Description of Artificial Sequence: Synthetic oligonucleotide
uuuagugcuuagcccugau

SEQ ID NO: 2518684 - RNA, 19 nt, Artificial Sequence
  Description of Artificial Sequence: Synthetic oligonucleotide
uccccgcuuuuccugagcu

SEQ ID NO: 2518685 - RNA, 19 nt, Artificial Sequence
  Description of Artificial Sequence: Synthetic oligonucleotide
ggaauguuggcagcaguag

SEQ ID NO: 2518686 - RNA, 19 nt, Artificial Sequence
  Description of Artificial Sequence: Synthetic oligonucleotide
gugggaugcuagcacgaag

SEQ ID NO: 2518687 - RNA, 19 nt, Artificial Sequence
  Description of Artificial Sequence: Synthetic oligonucleotide
aaagaagccuccgggcgaa

SEQ ID NO: 2518688 - RNA, 19 nt, Artificial Sequence
  Description of Artificial Sequence: Synthetic oligonucleotide
gcugaaggcuccuaggguc

SEQ ID NO: 2518689 - RNA, 19 nt, Artificial Sequence
  Description of Artificial Sequence: Synthetic oligonucleotide
gcagcaguagcuauugaug

SEQ ID NO: 2518690 - RNA, 19 nt, Artificial Sequence
  Description of Artificial Sequence: Synthetic oligonucleotide
aguccgaggccagcugugc

SEQ ID NO: 2518691 - RNA, 19 nt, Artificial Sequence
  Description of Artificial Sequence: Synthetic oligonucleotide
acaagaguagcuaguccca

SEQ ID NO: 2518692 - RNA, 19 nt, Artificial Sequence
  Description of Artificial Sequence: Synthetic oligonucleotide
aggccagcugugcugauau

SEQ ID NO: 2518693 - RNA, 19 nt, Artificial Sequence
  Description of Artificial Sequence: Synthetic oligonucleotide
cagauuucggaacagcccu

SEQ ID NO: 2518694 - RNA, 19 nt, Artificial Sequence
  Description of Artificial Sequence: Synthetic oligonucleotide
cgcagacugaccuagguac

SEQ ID NO: 2518695 - RNA, 19 nt, Artificial Sequence
  Description of Artificial Sequence: Synthetic oligonucleotide
agagcuccggaaaccacag

SEQ ID NO: 2518696 - RNA, 19 nt, Artificial Sequence
  Description of Artificial Sequence: Synthetic oligonucleotide
cuuauucaggguguagcca

SEQ ID NO: 2518697 - RNA, 19 nt, Artificial Sequence
  Description of Artificial Sequence: Synthetic oligonucleotide
cugauauugcagaaggaau

SEQ ID NO: 2518698 - RNA, 19 nt, Artificial Sequence
  Description of Artificial Sequence: Synthetic oligonucleotide
aggaguccaaggcccagga

SEQ ID NO: 2518699 - RNA, 19 nt, Artificial Sequence
  Description of Artificial Sequence: Synthetic oligonucleotide
ucucacgagggcagauuuc

SEQ ID NO: 2518700 - RNA, 19 nt, Artificial Sequence
  Description of Artificial Sequence: Synthetic oligonucleotide
caagguugacauuuccaaa

SEQ ID NO: 2518701 - RNA, 19 nt, Artificial Sequence
  Description of Artificial Sequence: Synthetic oligonucleotide
uacacccaggaggagcuga

SEQ ID NO: 2518702 - RNA, 19 nt, Artificial Sequence
  Description of Artificial Sequence: Synthetic oligonucleotide
gcugauauugcagaaggaa

SEQ ID NO: 2518703 - RNA, 19 nt, Artificial Sequence
  Description of Artificial Sequence: Synthetic oligonucleotide
gcagauuucggaacagccc

SEQ ID NO: 2518704 - RNA, 19 nt, Artificial Sequence
  Description of Artificial Sequence: Synthetic oligonucleotide
gugcuuagcccugaugcug

SEQ ID NO: 2518705 - RNA, 19 nt, Artificial Sequence
  Description of Artificial Sequence: Synthetic oligonucleotide
agacaucugcugagggcgc

SEQ ID NO: 2518706 - RNA, 19 nt, Artificial Sequence
  Description of Artificial Sequence: Synthetic oligonucleotide
gcgcacaagccaaagaagc

SEQ ID NO: 2518707 - RNA, 19 nt, Artificial Sequence
  Description of Artificial Sequence: Synthetic oligonucleotide
agacacaagaguagcuagu

SEQ ID NO: 2518708 - RNA, 19 nt, Artificial Sequence
  Description of Artificial Sequence: Synthetic oligonucleotide
gccaaagaagccuccgggc

SEQ ID NO: 2518709 - RNA, 19 nt, Artificial Sequence
  Description of Artificial Sequence: Synthetic oligonucleotide
gagauggucagggguccag

SEQ ID NO: 2518710 - RNA, 19 nt, Artificial Sequence
  Description of Artificial Sequence: Synthetic oligonucleotide
cugagacuccaaggaaggg

SEQ ID NO: 2518711 - RNA, 19 nt, Artificial Sequence
  Description of Artificial Sequence: Synthetic oligonucleotide
ggacuagauacacccagga

SEQ ID NO: 2518712 - RNA, 19 nt, Artificial Sequence
  Description of Artificial Sequence: Synthetic oligonucleotide
uagguacucugagacucca

SEQ ID NO: 2518713 - RNA, 19 nt, Artificial Sequence
  Description of Artificial Sequence: Synthetic oligonucleotide
cuugggcauacgguuggcc

SEQ ID NO: 2518714 - RNA, 19 nt, Artificial Sequence
  Description of Artificial Sequence: Synthetic oligonucleotide
caagaguagcuagucccac

SEQ ID NO: 2518715 - RNA, 19 nt, Artificial Sequence
  Description of Artificial Sequence: Synthetic oligonucleotide
ugggugaauuuagugcuua

SEQ ID NO: 2518716 - RNA, 19 nt, Artificial Sequence
  Description of Artificial Sequence: Synthetic oligonucleotide
cacgagggcagauuucgga

SEQ ID NO: 2518717 - RNA, 19 nt, Artificial Sequence
  Description of Artificial Sequence: Synthetic oligonucleotide
gcucuagacacaagaguag

SEQ ID NO: 2518718 - RNA, 19 nt, Artificial Sequence
  Description of Artificial Sequence: Synthetic oligonucleotide
cccgcuuuuccugagcugg

SEQ ID NO: 2518719 - RNA, 19 nt, Artificial Sequence
  Description of Artificial Sequence: Synthetic oligonucleotide
gaguagcuagucccacuuc

SEQ ID NO: 2518720 - RNA, 19 nt, Artificial Sequence
  Description of Artificial Sequence: Synthetic oligonucleotide
cagugugcgcagacugacc

SEQ ID NO: 2518721 - RNA, 19 nt, Artificial Sequence
  Description of Artificial Sequence: Synthetic oligonucleotide
agaugugggugaauuuagu

SEQ ID NO: 2518722 - RNA, 19 nt, Artificial Sequence
  Description of Artificial Sequence: Synthetic oligonucleotide
cccuuauucaggguguagc

SEQ ID NO: 2518723 - RNA, 19 nt, Artificial Sequence
  Description of Artificial Sequence: Synthetic oligonucleotide
aggaauguuggcagcagua

SEQ ID NO: 2518724 - RNA, 19 nt, Artificial Sequence
  Description of Artificial Sequence: Synthetic oligonucleotide
uagccaagguugacauuuc

SEQ ID NO: 2518725 - RNA, 19 nt, Artificial Sequence
  Description of Artificial Sequence: Synthetic oligonucleotide
uccgggcgaagcgaccccg

SEQ ID NO: 2518726 - RNA, 19 nt, Artificial Sequence
  Description of Artificial Sequence: Synthetic oligonucleotide
cccugaugcugacagagug

SEQ ID NO: 2518727 - RNA, 19 nt, Artificial Sequence
  Description of Artificial Sequence: Synthetic oligonucleotide
gggugaauuuagugcuuag

SEQ ID NO: 2518728 - RNA, 19 nt, Artificial Sequence
  Description of Artificial Sequence: Synthetic oligonucleotide
ucggugcaggagaagcaua

SEQ ID NO: 2518729 - RNA, 19 nt, Artificial Sequence
  Description of Artificial Sequence: Synthetic oligonucleotide
auuucggaacagcccuuau

SEQ ID NO: 2518730 - RNA, 19 nt, Artificial Sequence
  Description of Artificial Sequence: Synthetic oligonucleotide
cccucauguugaaaguggc

SEQ ID NO: 2518731 - RNA, 19 nt, Artificial Sequence
  Description of Artificial Sequence: Synthetic oligonucleotide
ugaaggcuccuaggguccc

SEQ ID NO: 2518732 - RNA, 19 nt, Artificial Sequence
  Description of Artificial Sequence: Synthetic oligonucleotide
gauuggcucuagacacaag

SEQ ID NO: 2518733 - RNA, 19 nt, Artificial Sequence
  Description of Artificial Sequence: Synthetic oligonucleotide
agggcgcacaagccaaaga

SEQ ID NO: 2518734 - RNA, 19 nt, Artificial Sequence
  Description of Artificial Sequence: Synthetic oligonucleotide
auguugaaaguggcagaca

SEQ ID NO: 2518735 - RNA, 19 nt, Artificial Sequence
  Description of Artificial Sequence: Synthetic oligonucleotide
aagccuccgggcgaagcga

SEQ ID NO: 2518736 - RNA, 19 nt, Artificial Sequence
  Description of Artificial Sequence: Synthetic oligonucleotide
uggggaacacacggagaug

SEQ ID NO: 2518737 - RNA, 19 nt, Artificial Sequence
  Description of Artificial Sequence: Synthetic oligonucleotide
acgaaguccgaggccagcu

SEQ ID NO: 2518738 - RNA, 19 nt, Artificial Sequence
  Description of Artificial Sequence: Synthetic oligonucleotide
aagccagugugcgcagacu

SEQ ID NO: 2518739 - RNA, 19 nt, Artificial Sequence
  Description of Artificial Sequence: Synthetic oligonucleotide
cggaacagcccuuauucag

SEQ ID NO: 2518740 - RNA, 19 nt, Artificial Sequence
  Description of Artificial Sequence: Synthetic oligonucleotide
gagggcgcacaagccaaag

SEQ ID NO: 2518741 - RNA, 19 nt, Artificial Sequence
  Description of Artificial Sequence: Synthetic oligonucleotide
ggcgcacaagccaaagaag

SEQ ID NO: 2518742 - RNA, 19 nt, Artificial Sequence
  Description of Artificial Sequence: Synthetic oligonucleotide
cugccagcaguacaggcaa

SEQ ID NO: 2518743 - RNA, 19 nt, Artificial Sequence
  Description of Artificial Sequence: Synthetic oligonucleotide
acaccuaaguugacauuga

SEQ ID NO: 2518744 - RNA, 19 nt, Artificial Sequence
  Description of Artificial Sequence: Synthetic oligonucleotide
gauuucggaacagcccuua

SEQ ID NO: 2518745 - RNA, 19 nt, Artificial Sequence
  Description of Artificial Sequence: Synthetic oligonucleotide
caaaagggcugccagcagu

SEQ ID NO: 2518746 - RNA, 19 nt, Artificial Sequence
  Description of Artificial Sequence: Synthetic oligonucleotide
aggcuccuaggguccccgc

SEQ ID NO: 2518747 - RNA, 19 nt, Artificial Sequence
  Description of Artificial Sequence: Synthetic oligonucleotide
cuagucccacuucaacaga

SEQ ID NO: 2518748 - RNA, 19 nt, Artificial Sequence
  Description of Artificial Sequence: Synthetic oligonucleotide
uguucucacgagggcagau

SEQ ID NO: 2518749 - RNA, 19 nt, Artificial Sequence
  Description of Artificial Sequence: Synthetic oligonucleotide
cugagggcgcacaagccaa

SEQ ID NO: 2518750 - RNA, 19 nt, Artificial Sequence
  Description of Artificial Sequence: Synthetic oligonucleotide
ugagggcgcacaagccaaa

SEQ ID NO: 2518751 - RNA, 19 nt, Artificial Sequence
  Description of Artificial Sequence: Synthetic oligonucleotide
acugaccuagguacucuga

SEQ ID NO: 2518752 - RNA, 19 nt, Artificial Sequence
  Description of Artificial Sequence: Synthetic oligonucleotide
acacccaaaagggcugcca

SEQ ID NO: 2518753 - RNA, 19 nt, Artificial Sequence
  Description of Artificial Sequence: Synthetic oligonucleotide
cgcacaagccaaagaagcc

SEQ ID NO: 2518754 - RNA, 19 nt, Artificial Sequence
  Description of Artificial Sequence: Synthetic oligonucleotide
gcuauugauggaugccaca

SEQ ID NO: 2518755 - RNA, 19 nt, Artificial Sequence
  Description of Artificial Sequence: Synthetic oligonucleotide
gagugggaugcuagcacga

SEQ ID NO: 2518756 - RNA, 19 nt, Artificial Sequence
  Description of Artificial Sequence: Synthetic oligonucleotide
cccacuucaacagagcaga

SEQ ID NO: 2518757 - RNA, 19 nt, Artificial Sequence
  Description of Artificial Sequence: Synthetic oligonucleotide
gcugagggcgcacaagcca

SEQ ID NO: 2518758 - RNA, 19 nt, Artificial Sequence
  Description of Artificial Sequence: Synthetic oligonucleotide
cauaucagggaaugggcuu

SEQ ID NO: 2518759 - RNA, 19 nt, Artificial Sequence
  Description of Artificial Sequence: Synthetic oligonucleotide
gagacuccaaggaaggguu

SEQ ID NO: 2518760 - RNA, 19 nt, Artificial Sequence
  Description of Artificial Sequence: Synthetic oligonucleotide
auacuguaacacaguaauu

SEQ ID NO: 2518761 - RNA, 19 nt, Artificial Sequence
  Description of Artificial Sequence: Synthetic oligonucleotide
cccaggagugggaugcuag

SEQ ID NO: 2518762 - RNA, 19 nt, Artificial Sequence
  Description of Artificial Sequence: Synthetic oligonucleotide
cagcugugcugauauugca

SEQ ID NO: 2518763 - RNA, 19 nt, Artificial Sequence
  Description of Artificial Sequence: Synthetic oligonucleotide
aggauuggcucuagacaca

SEQ ID NO: 2518764 - RNA, 19 nt, Artificial Sequence
  Description of Artificial Sequence: Synthetic oligonucleotide
cugugcugauauugcagaa

SEQ ID NO: 2518765 - RNA, 19 nt, Artificial Sequence
  Description of Artificial Sequence: Synthetic oligonucleotide
gaccccgaagagcuccgga

SEQ ID NO: 2518766 - RNA, 19 nt, Artificial Sequence
  Description of Artificial Sequence: Synthetic oligonucleotide
uugucugagcuugggcaua

SEQ ID NO: 2518767 - RNA, 19 nt, Artificial Sequence
  Description of Artificial Sequence: Synthetic oligonucleotide
agugggaugcuagcacgaa

SEQ ID NO: 2518768 - RNA, 19 nt, Artificial Sequence
  Description of Artificial Sequence: Synthetic oligonucleotide
cacggagauggucaggggu

SEQ ID NO: 2518769 - RNA, 19 nt, Artificial Sequence
  Description of Artificial Sequence: Synthetic oligonucleotide
guagcuagucccacuucaa

SEQ ID NO: 2518770 - RNA, 19 nt, Artificial Sequence
  Description of Artificial Sequence: Synthetic oligonucleotide
uuccccaagggaggccaca

SEQ ID NO: 2518771 - RNA, 19 nt, Artificial Sequence
  Description of Artificial Sequence: Synthetic oligonucleotide
aggguguagccaagguuga

SEQ ID NO: 2518772 - RNA, 19 nt, Artificial Sequence
  Description of Artificial Sequence: Synthetic oligonucleotide
gaagacccucauguugaaa

SEQ ID NO: 2518773 - RNA, 19 nt, Artificial Sequence
  Description of Artificial Sequence: Synthetic oligonucleotide
cacgaaguccgaggccagc

SEQ ID NO: 2518774 - RNA, 19 nt, Artificial Sequence
  Description of Artificial Sequence: Synthetic oligonucleotide
agccuccgggcgaagcgac

SEQ ID NO: 2518775 - RNA, 19 nt, Artificial Sequence
  Description of Artificial Sequence: Synthetic oligonucleotide
aagaagccuccgggcgaag

SEQ ID NO: 2518776 - RNA, 19 nt, Artificial Sequence
  Description of Artificial Sequence: Synthetic oligonucleotide
gggcgaagcgaccccgaag

SEQ ID NO: 2518777 - RNA, 19 nt, Artificial Sequence
  Description of Artificial Sequence: Synthetic oligonucleotide
gauggucagggguccaguu

SEQ ID NO: 2518778 - RNA, 19 nt, Artificial Sequence
  Description of Artificial Sequence: Synthetic oligonucleotide
ggaaugggcuugcuccaca

SEQ ID NO: 2518779 - RNA, 19 nt, Artificial Sequence
  Description of Artificial Sequence: Synthetic oligonucleotide
cccgaagagcuccggaaac

SEQ ID NO: 2518780 - RNA, 19 nt, Artificial Sequence
  Description of Artificial Sequence: Synthetic oligonucleotide
cacacccaaaagggcugcc

SEQ ID NO: 2518781 - RNA, 19 nt, Artificial Sequence
  Description of Artificial Sequence: Synthetic oligonucleotide
gcaguacaggcaagaagac

SEQ ID NO: 2518782 - RNA, 19 nt, Artificial Sequence
  Description of Artificial Sequence: Synthetic oligonucleotide
aagcgaccccgaagagcuc

SEQ ID NO: 2518783 - RNA, 19 nt, Artificial Sequence
  Description of Artificial Sequence: Synthetic oligonucleotide
ccucauguugaaaguggca

SEQ ID NO: 2518784 - RNA, 19 nt, Artificial Sequence
  Description of Artificial Sequence: Synthetic oligonucleotide
gggcagauuucggaacagc

SEQ ID NO: 2518785 - RNA, 19 nt, Artificial Sequence
  Description of Artificial Sequence: Synthetic oligonucleotide
gguuccccaagggaggcca

SEQ ID NO: 2518786 - RNA, 19 nt, Artificial Sequence
  Description of Artificial Sequence: Synthetic oligonucleotide
ggauuggcucuagacacaa

SEQ ID NO: 2518787 - RNA, 19 nt, Artificial Sequence
  Description of Artificial Sequence: Synthetic oligonucleotide
augccacaccuaaguugac

SEQ ID NO: 2518788 - RNA, 19 nt, Artificial Sequence
  Description of Artificial Sequence: Synthetic oligonucleotide
gucugagcuugggcauacg

SEQ ID NO: 2518789 - RNA, 19 nt, Artificial Sequence
  Description of Artificial Sequence: Synthetic oligonucleotide
cuccgggcgaagcgacccc

SEQ ID NO: 2518790 - RNA, 19 nt, Artificial Sequence
  Description of Artificial Sequence: Synthetic oligonucleotide
gccacaccuaaguugacau

SEQ ID NO: 2518791 - RNA, 19 nt, Artificial Sequence
  Description of Artificial Sequence: Synthetic oligonucleotide
ccaaaagggcugccagcag

SEQ ID NO: 2518792 - RNA, 19 nt, Artificial Sequence
  Description of Artificial Sequence: Synthetic oligonucleotide
agauuucggaacagcccuu

SEQ ID NO: 2518793 - RNA, 19 nt, Artificial Sequence
  Description of Artificial Sequence: Synthetic oligonucleotide
ccagugugcgcagacugac

SEQ ID NO: 2518794 - RNA, 19 nt, Artificial Sequence
  Description of Artificial Sequence: Synthetic oligonucleotide
cgagggcagauuucggaac

SEQ ID NO: 2518795 - RNA, 19 nt, Artificial Sequence
  Description of Artificial Sequence: Synthetic oligonucleotide
gcauaucagggaaugggcu

SEQ ID NO: 2518796 - RNA, 19 nt, Artificial Sequence
  Description of Artificial Sequence: Synthetic oligonucleotide
auacacccaggaggagcug

SEQ ID NO: 2518797 - RNA, 19 nt, Artificial Sequence
  Description of Artificial Sequence: Synthetic oligonucleotide
gggagauauggggaacaca

SEQ ID NO: 2518798 - RNA, 19 nt, Artificial Sequence
  Description of Artificial Sequence: Synthetic oligonucleotide
ggggagauauggggaacac

SEQ ID NO: 2518799 - RNA, 19 nt, Artificial Sequence
  Description of Artificial Sequence: Synthetic oligonucleotide
cagcccuuauucagggugu

SEQ ID NO: 2518800 - RNA, 19 nt, Artificial Sequence
  Description of Artificial Sequence: Synthetic oligonucleotide
ccgcuuuuccugagcuggg

SEQ ID NO: 2518801 - RNA, 19 nt, Artificial Sequence
  Description of Artificial Sequence: Synthetic oligonucleotide
gcgaagcgaccccgaagag

SEQ ID NO: 2518802 - RNA, 19 nt, Artificial Sequence
  Description of Artificial Sequence: Synthetic oligonucleotide
gcauacgguuggccacagg

SEQ ID NO: 2518803 - RNA, 19 nt, Artificial Sequence
  Description of Artificial Sequence: Synthetic oligonucleotide
ccggaaaccacagguccug

SEQ ID NO: 2518804 - RNA, 19 nt, Artificial Sequence
  Description of Artificial Sequence: Synthetic oligonucleotide
guacaggcaagaagacccu

SEQ ID NO: 2518805 - RNA, 19 nt, Artificial Sequence
  Description of Artificial Sequence: Synthetic oligonucleotide
gguccccgcuuuuccugag

SEQ ID NO: 2518806 - RNA, 19 nt, Artificial Sequence
  Description of Artificial Sequence: Synthetic oligonucleotide
ggugcaggagaagcauauc

SEQ ID NO: 2518807 - RNA, 19 nt, Artificial Sequence
  Description of Artificial Sequence: Synthetic oligonucleotide
gcccuuauucaggguguag

SEQ ID NO: 2518808 - RNA, 19 nt, Artificial Sequence
  Description of Artificial Sequence: Synthetic oligonucleotide
ccuccgggcgaagcgaccc

SEQ ID NO: 2518809 - RNA, 19 nt, Artificial Sequence
  Description of Artificial Sequence: Synthetic oligonucleotide
agacuccaaggaaggguuu

SEQ ID NO: 2518810 - RNA, 19 nt, Artificial Sequence
  Description of Artificial Sequence: Synthetic oligonucleotide
caccuaaguugacauugau

SEQ ID NO: 2518811 - RNA, 19 nt, Artificial Sequence
  Description of Artificial Sequence: Synthetic oligonucleotide
agguacucugagacuccaa

SEQ ID NO: 2518812 - RNA, 19 nt, Artificial Sequence
  Description of Artificial Sequence: Synthetic oligonucleotide
gaggccagcugugcugaua

SEQ ID NO: 2518813 - RNA, 19 nt, Artificial Sequence
  Description of Artificial Sequence: Synthetic oligonucleotide
agcccuuauucagggugua

SEQ ID NO: 2518814 - RNA, 19 nt, Artificial Sequence
  Description of Artificial Sequence: Synthetic oligonucleotide
gggaaugggcuugcuccac

SEQ ID NO: 2518815 - RNA, 19 nt, Artificial Sequence
  Description of Artificial Sequence: Synthetic oligonucleotide
augcuagcacgaaguccga

SEQ ID NO: 2518816 - RNA, 19 nt, Artificial Sequence
  Description of Artificial Sequence: Synthetic oligonucleotide
ggguccccgcuuuuccuga

SEQ ID NO: 2518817 - RNA, 19 nt, Artificial Sequence
  Description of Artificial Sequence: Synthetic oligonucleotide
gcuuagcccugaugcugac

SEQ ID NO: 2518818 - RNA, 19 nt, Artificial Sequence
  Description of Artificial Sequence: Synthetic oligonucleotide
gcaagaagacccucauguu

SEQ ID NO: 2518819 - RNA, 19 nt, Artificial Sequence
  Description of Artificial Sequence: Synthetic oligonucleotide
gcgcagacugaccuaggua

SEQ ID NO: 2518820 - RNA, 19 nt, Artificial Sequence
  Description of Artificial Sequence: Synthetic oligonucleotide
ccugaugcugacagagugu

SEQ ID NO: 2518821 - RNA, 19 nt, Artificial Sequence
  Description of Artificial Sequence: Synthetic oligonucleotide
guuccccaagggaggccac

SEQ ID NO: 2518822 - RNA, 19 nt, Artificial Sequence
  Description of Artificial Sequence: Synthetic oligonucleotide
gggcauacgguuggccaca

SEQ ID NO: 2518823 - RNA, 19 nt, Artificial Sequence
  Description of Artificial Sequence: Synthetic oligonucleotide
ccuaggguccccgcuuuuc

SEQ ID NO: 2518824 - RNA, 19 nt, Artificial Sequence
  Description of Artificial Sequence: Synthetic oligonucleotide
gaggagcugaaggcuccua

SEQ ID NO: 2518825 - RNA, 19 nt, Artificial Sequence
  Description of Artificial Sequence: Synthetic oligonucleotide
acgguuggccacaggcauu

SEQ ID NO: 2518826 - RNA, 19 nt, Artificial Sequence
  Description of Artificial Sequence: Synthetic oligonucleotide
ggguguagccaagguugac

SEQ ID NO: 2518827 - RNA, 19 nt, Artificial Sequence
  Description of Artificial Sequence: Synthetic oligonucleotide
gccacaggauuggcucuag

SEQ ID NO: 2518828 - RNA, 19 nt, Artificial Sequence
  Description of Artificial Sequence: Synthetic oligonucleotide
gcgaccccgaagagcuccg

SEQ ID NO: 2518829 - RNA, 19 nt, Artificial Sequence
  Description of Artificial Sequence: Synthetic oligonucleotide
guucucacgagggcagauu

SEQ ID NO: 2518830 - RNA, 19 nt, Artificial Sequence
  Description of Artificial Sequence: Synthetic oligonucleotide
ggagauggucaggggucca

SEQ ID NO: 2518831 - RNA, 19 nt, Artificial Sequence
  Description of Artificial Sequence: Synthetic oligonucleotide
gcagacugaccuagguacu

SEQ ID NO: 2518832 - RNA, 19 nt, Artificial Sequence
  Description of Artificial Sequence: Synthetic oligonucleotide
ggcuccuaggguccccgcu

SEQ ID NO: 2518833 - RNA, 19 nt, Artificial Sequence
  Description of Artificial Sequence: Synthetic oligonucleotide
gugggugaauuuagugcuu

SEQ ID NO: 2518834 - RNA, 19 nt, Artificial Sequence
  Description of Artificial Sequence: Synthetic oligonucleotide
ccacaggauuggcucuaga

SEQ ID NO: 2518835 - RNA, 19 nt, Artificial Sequence
  Description of Artificial Sequence: Synthetic oligonucleotide
ccgaggccagcugugcuga

SEQ ID NO: 2518836 - RNA, 19 nt, Artificial Sequence
  Description of Artificial Sequence: Synthetic oligonucleotide
gccuccgggcgaagcgacc

SEQ ID NO: 2518837 - RNA, 19 nt, Artificial Sequence
  Description of Artificial Sequence: Synthetic oligonucleotide
gguuggccacaggcauuuc

SEQ ID NO: 2518838 - RNA, 19 nt, Artificial Sequence
  Description of Artificial Sequence: Synthetic oligonucleotide
cgaccccgaagagcuccgg

SEQ ID NO: 2518839 - RNA, 19 nt, Artificial Sequence
  Description of Artificial Sequence: Synthetic oligonucleotide
ccacaccuaaguugacauu

SEQ ID NO: 2518840 - RNA, 19 nt, Artificial Sequence
  Description of Artificial Sequence: Synthetic oligonucleotide
ccgggcgaagcgaccccga

SEQ ID NO: 2518841 - RNA, 19 nt, Artificial Sequence
  Description of Artificial Sequence: Synthetic oligonucleotide
ccacuucaacagagcagau

SEQ ID NO: 2518842 - RNA, 19 nt, Artificial Sequence
  Description of Artificial Sequence: Synthetic oligonucleotide
cgggcgaagcgaccccgaa

SEQ ID NO: 2518843 - RNA, 19 nt, Artificial Sequence
  Description of Artificial Sequence: Synthetic oligonucleotide
cgguuggccacaggcauuu

SEQ ID NO: 2518844 - RNA, 19 nt, Artificial Sequence
  Description of Artificial Sequence: Synthetic oligonucleotide
ucagacacaguuuucacgg

SEQ ID NO: 2518845 - RNA, 19 nt, Artificial Sequence
  Description of Artificial Sequence: Synthetic oligonucleotide
aaugucacacgccacguac

SEQ ID NO: 2518846 - RNA, 19 nt, Artificial Sequence
  Description of Artificial Sequence: Synthetic oligonucleotide
uuuguuuucgcucucugug

SEQ ID NO: 2518847 - RNA, 19 nt, Artificial Sequence
  Description of Artificial Sequence: Synthetic oligonucleotide
uaaaugaccguccuggucu

SEQ ID NO: 2518848 - RNA, 19 nt, Artificial Sequence
  Description of Artificial Sequence: Synthetic oligonucleotide
caaaucaggaaguuggccg

SEQ ID NO: 2518849 - RNA, 19 nt, Artificial Sequence
  Description of Artificial Sequence: Synthetic oligonucleotide
ugcgaauaggcacaggccg

SEQ ID NO: 2518850 - RNA, 19 nt, Artificial Sequence
  Description of Artificial Sequence: Synthetic oligonucleotide
uggucuugcaaacugcagg

SEQ ID NO: 2518851 - RNA, 19 nt, Artificial Sequence
  Description of Artificial Sequence: Synthetic oligonucleotide
ucguaaaugaccguccugg

SEQ ID NO: 2518852 - RNA, 19 nt, Artificial Sequence
  Description of Artificial Sequence: Synthetic oligonucleotide
aaagaccgcacgcacauug

SEQ ID NO: 2518853 - RNA, 19 nt, Artificial Sequence
  Description of Artificial Sequence: Synthetic oligonucleotide
acacugaacaaacggacac

SEQ ID NO: 2518854 - RNA, 19 nt, Artificial Sequence
  Description of Artificial Sequence: Synthetic oligonucleotide
auacauaguauguucagga

SEQ ID NO: 2518855 - RNA, 19 nt, Artificial Sequence
  Description of Artificial Sequence: Synthetic oligonucleotide
ucacacgccacguacaucc

SEQ ID NO: 2518856 - RNA, 19 nt, Artificial Sequence
  Description of Artificial Sequence: Synthetic oligonucleotide
uucacggaggagaacaaag

SEQ ID NO: 2518857 - RNA, 19 nt, Artificial Sequence
  Description of Artificial Sequence: Synthetic oligonucleotide
accucuuucaauuuuggcu

SEQ ID NO: 2518858 - RNA, 19 nt, Artificial Sequence
  Description of Artificial Sequence: Synthetic oligonucleotide
gagucuaucuccaagaguc

SEQ ID NO: 2518859 - RNA, 19 nt, Artificial Sequence
  Description of Artificial Sequence: Synthetic oligonucleotide
acaguacuugcuuugaugu

SEQ ID NO: 2518860 - RNA, 19 nt, Artificial Sequence
  Description of Artificial Sequence: Synthetic oligonucleotide
uccucaauacuucucuucc

SEQ ID NO: 2518861 - RNA, 19 nt, Artificial Sequence
  Description of Artificial Sequence: Synthetic oligonucleotide
ucgggcacaugcuuaaugg

SEQ ID NO: 2518862 - RNA, 19 nt, Artificial Sequence
  Description of Artificial Sequence: Synthetic oligonucleotide
uggcacuugacgcugcugg

SEQ ID NO: 2518863 - RNA, 19 nt, Artificial Sequence
  Description of Artificial Sequence: Synthetic oligonucleotide
aaaucaggaaguuggccga

SEQ ID NO: 2518864 - RNA, 19 nt, Artificial Sequence
  Description of Artificial Sequence: Synthetic oligonucleotide
cugacuucgagccagccgc

SEQ ID NO: 2518865 - RNA, 19 nt, Artificial Sequence
  Description of Artificial Sequence: Synthetic oligonucleotide
guggaucugacuucgagcc

SEQ ID NO: 2518866 - RNA, 19 nt, Artificial Sequence
  Description of Artificial Sequence: Synthetic oligonucleotide
aggaaugucacacgccacg

SEQ ID NO: 2518867 - RNA, 19 nt, Artificial Sequence
  Description of Artificial Sequence: Synthetic oligonucleotide
acauuggcaaugaagcacc

SEQ ID NO: 2518868 - RNA, 19 nt, Artificial Sequence
  Description of Artificial Sequence: Synthetic oligonucleotide
gguggugaacccuugaggg

SEQ ID NO: 2518869 - RNA, 19 nt, Artificial Sequence
  Description of Artificial Sequence: Synthetic oligonucleotide
aacccuugagggcuggcac

SEQ ID NO: 2518870 - RNA, 19 nt, Artificial Sequence
  Description of Artificial Sequence: Synthetic oligonucleotide
ugucucuuuguccucagac

SEQ ID NO: 2518871 - RNA, 19 nt, Artificial Sequence
  Description of Artificial Sequence: Synthetic oligonucleotide
ucuuccugcgaauaggcac

SEQ ID NO: 2518872 - RNA, 19 nt, Artificial Sequence
  Description of Artificial Sequence: Synthetic oligonucleotide
ucugacuucgagccagccg

SEQ ID NO: 2518873 - RNA, 19 nt, Artificial Sequence
  Description of Artificial Sequence: Synthetic oligonucleotide
gagaacaaagaccgcacgc

SEQ ID NO: 2518874 - RNA, 19 nt, Artificial Sequence
  Description of Artificial Sequence: Synthetic oligonucleotide
acuugcuuugaugucacac

SEQ ID NO: 2518875 - RNA, 19 nt, Artificial Sequence
  Description of Artificial Sequence: Synthetic oligonucleotide
uguucaggaaugucacacg

SEQ ID NO: 2518876 - RNA, 19 nt, Artificial Sequence
  Description of Artificial Sequence: Synthetic oligonucleotide
caauacuucucuuccugcg

SEQ ID NO: 2518877 - RNA, 19 nt, Artificial Sequence
  Description of Artificial Sequence: Synthetic oligonucleotide
uuuguugguuuuguuuucg

SEQ ID NO: 2518878 - RNA, 19 nt, Artificial Sequence
  Description of Artificial Sequence: Synthetic oligonucleotide
ugacaaggaagcuuucuca

SEQ ID NO: 2518879 - RNA, 19 nt, Artificial Sequence
  Description of Artificial Sequence: Synthetic oligonucleotide
acaguuuucacggaggaga

SEQ ID NO: 2518880 - RNA, 19 nt, Artificial Sequence
  Description of Artificial Sequence: Synthetic oligonucleotide
gguaucucguaaaugaccg

SEQ ID NO: 2518881 - RNA, 19 nt, Artificial Sequence
  Description of Artificial Sequence: Synthetic oligonucleotide
ugcuuaauggcgugggacc

SEQ ID NO: 2518882 - RNA, 19 nt, Artificial Sequence
  Description of Artificial Sequence: Synthetic oligonucleotide
agguaucucguaaaugacc

SEQ ID NO: 2518883 - RNA, 19 nt, Artificial Sequence
  Description of Artificial Sequence: Synthetic oligonucleotide
acggaggagaacaaagacc

SEQ ID NO: 2518884 - RNA, 19 nt, Artificial Sequence
  Description of Artificial Sequence: Synthetic oligonucleotide
acauaguauguucaggaau

SEQ ID NO: 2518885 - RNA, 19 nt, Artificial Sequence
  Description of Artificial Sequence: Synthetic oligonucleotide
cauacauaguauguucagg

SEQ ID NO: 2518886 - RNA, 19 nt, Artificial Sequence
  Description of Artificial Sequence: Synthetic oligonucleotide
gacaaggaagcuuucucac

SEQ ID NO: 2518887 - RNA, 19 nt, Artificial Sequence
  Description of Artificial Sequence: Synthetic oligonucleotide
acaugcacacuccaggugu

SEQ ID NO: 2518888 - RNA, 19 nt, Artificial Sequence
  Description of Artificial Sequence: Synthetic oligonucleotide
uucgcucucugugacaagg

SEQ ID NO: 2518889 - RNA, 19 nt, Artificial Sequence
  Description of Artificial Sequence: Synthetic oligonucleotide
cucacugucucuccgagug

SEQ ID NO: 2518890 - RNA, 19 nt, Artificial Sequence
  Description of Artificial Sequence: Synthetic oligonucleotide
ugagggcuggcacuugacg

SEQ ID NO: 2518891 - RNA, 19 nt, Artificial Sequence
  Description of Artificial Sequence: Synthetic oligonucleotide
caaggaagcuuucucacug

SEQ ID NO: 2518892 - RNA, 19 nt, Artificial Sequence
  Description of Artificial Sequence: Synthetic oligonucleotide
gacacugcgguggugaacc

SEQ ID NO: 2518893 - RNA, 19 nt, Artificial Sequence
  Description of Artificial Sequence: Synthetic oligonucleotide
guucaggaaugucacacgc

SEQ ID NO: 2518894 - RNA, 19 nt, Artificial Sequence
  Description of Artificial Sequence: Synthetic oligonucleotide
uucucuuccugcgaauagg

SEQ ID NO: 2518895 - RNA, 19 nt, Artificial Sequence
  Description of Artificial Sequence: Synthetic oligonucleotide
uggcaaugaagcaccauac

SEQ ID NO: 2518896 - RNA, 19 nt, Artificial Sequence
  Description of Artificial Sequence: Synthetic oligonucleotide
aaacugcaggaauggcuuc

SEQ ID NO: 2518897 - RNA, 19 nt, Artificial Sequence
  Description of Artificial Sequence: Synthetic oligonucleotide
uugcaaacugcaggaaugg

SEQ ID NO: 2518898 - RNA, 19 nt, Artificial Sequence
  Description of Artificial Sequence: Synthetic oligonucleotide
ggccaaaucaggaaguugg

SEQ ID NO: 2518899 - RNA, 19 nt, Artificial Sequence
  Description of Artificial Sequence: Synthetic oligonucleotide
agacacaguuuucacggag

SEQ ID NO: 2518900 - RNA, 19 nt, Artificial Sequence
  Description of Artificial Sequence: Synthetic oligonucleotide
ucuaucuccaagagucgcu

SEQ ID NO: 2518901 - RNA, 19 nt, Artificial Sequence
  Description of Artificial Sequence: Synthetic oligonucleotide
augcuuaauggcgugggac

SEQ ID NO: 2518902 - RNA, 19 nt, Artificial Sequence
  Description of Artificial Sequence: Synthetic oligonucleotide
cacauggaggccaaaucag

SEQ ID NO: 2518903 - RNA, 19 nt, Artificial Sequence
  Description of Artificial Sequence: Synthetic oligonucleotide
uguuuucgcucucugugac

SEQ ID NO: 2518904 - RNA, 19 nt, Artificial Sequence
  Description of Artificial Sequence: Synthetic oligonucleotide
cugguauugcagcagccgg

SEQ ID NO: 2518905 - RNA, 19 nt, Artificial Sequence
  Description of Artificial Sequence: Synthetic oligonucleotide
gaugcuguggaucugacuu

SEQ ID NO: 2518906 - RNA, 19 nt, Artificial Sequence
  Description of Artificial Sequence: Synthetic oligonucleotide
agugcuacaguacuugcuu

SEQ ID NO: 2518907 - RNA, 19 nt, Artificial Sequence
  Description of Artificial Sequence: Synthetic oligonucleotide
guuuucacggaggagaaca

SEQ ID NO: 2518908 - RNA, 19 nt, Artificial Sequence
  Description of Artificial Sequence: Synthetic oligonucleotide
aucucguaaaugaccgucc

SEQ ID NO: 2518909 - RNA, 19 nt, Artificial Sequence
  Description of Artificial Sequence: Synthetic oligonucleotide
gaacaaagaccgcacgcac

SEQ ID NO: 2518910 - RNA, 19 nt, Artificial Sequence
  Description of Artificial Sequence: Synthetic oligonucleotide
acaaagaccgcacgcacau

SEQ ID NO: 2518911 - RNA, 19 nt, Artificial Sequence
  Description of Artificial Sequence: Synthetic oligonucleotide
agaccgcacgcacauuggc

SEQ ID NO: 2518912 - RNA, 19 nt, Artificial Sequence
  Description of Artificial Sequence: Synthetic oligonucleotide
uaucucguaaaugaccguc

SEQ ID NO: 2518913 - RNA, 19 nt, Artificial Sequence
  Description of Artificial Sequence: Synthetic oligonucleotide
cacauuggcaaugaagcac

SEQ ID NO: 2518914 - RNA, 19 nt, Artificial Sequence
  Description of Artificial Sequence: Synthetic oligonucleotide
uuguuuucgcucucuguga

SEQ ID NO: 2518915 - RNA, 19 nt, Artificial Sequence
  Description of Artificial Sequence: Synthetic oligonucleotide
uacauaguauguucaggaa

SEQ ID NO: 2518916 - RNA, 19 nt, Artificial Sequence
  Description of Artificial Sequence: Synthetic oligonucleotide
agaacaaagaccgcacgca

SEQ ID NO: 2518917 - RNA, 19 nt, Artificial Sequence
  Description of Artificial Sequence: Synthetic oligonucleotide
cuggcuccgagguaucucg

SEQ ID NO: 2518918 - RNA, 19 nt, Artificial Sequence
  Description of Artificial Sequence: Synthetic oligonucleotide
aggucgcacaugcacacuc

SEQ ID NO: 2518919 - RNA, 19 nt, Artificial Sequence
  Description of Artificial Sequence: Synthetic oligonucleotide
cuuucucacugucucuccg

SEQ ID NO: 2518920 - RNA, 19 nt, Artificial Sequence
  Description of Artificial Sequence: Synthetic oligonucleotide
gaccugugggcucucaggc

SEQ ID NO: 2518921 - RNA, 19 nt, Artificial Sequence
  Description of Artificial Sequence: Synthetic oligonucleotide
caccauacauaguauguuc

SEQ ID NO: 2518922 - RNA, 19 nt, Artificial Sequence
  Description of Artificial Sequence: Synthetic oligonucleotide
ucucguaaaugaccguccu

SEQ ID NO: 2518923 - RNA, 19 nt, Artificial Sequence
  Description of Artificial Sequence: Synthetic oligonucleotide
uuuucgcucucugugacaa

SEQ ID NO: 2518924 - RNA, 19 nt, Artificial Sequence
  Description of Artificial Sequence: Synthetic oligonucleotide
ucucaccucacaucagucu

SEQ ID NO: 2518925 - RNA, 19 nt, Artificial Sequence
  Description of Artificial Sequence: Synthetic oligonucleotide
guauguucaggaaugucac

SEQ ID NO: 2518926 - RNA, 19 nt, Artificial Sequence
  Description of Artificial Sequence: Synthetic oligonucleotide
aggaagcuuucucacuguc

SEQ ID NO: 2518927 - RNA, 19 nt, Artificial Sequence
  Description of Artificial Sequence: Synthetic oligonucleotide
uggaggucgcacaugcaca

SEQ ID NO: 2518928 - RNA, 19 nt, Artificial Sequence
  Description of Artificial Sequence: Synthetic oligonucleotide
aggagaacaaagaccgcac

SEQ ID NO: 2518929 - RNA, 19 nt, Artificial Sequence
  Description of Artificial Sequence: Synthetic oligonucleotide
aaggaagcuuucucacugu

SEQ ID NO: 2518930 - RNA, 19 nt, Artificial Sequence
  Description of Artificial Sequence: Synthetic oligonucleotide
gaggagaacaaagaccgca

SEQ ID NO: 2518931 - RNA, 19 nt, Artificial Sequence
  Description of Artificial Sequence: Synthetic oligonucleotide
acaugcuuaauggcguggg

SEQ ID NO: 2518932 - RNA, 19 nt, Artificial Sequence
  Description of Artificial Sequence: Synthetic oligonucleotide
cacggaggagaacaaagac

SEQ ID NO: 2518933 - RNA, 19 nt, Artificial Sequence
  Description of Artificial Sequence: Synthetic oligonucleotide
aacggacacugucucuuug

SEQ ID NO: 2518934 - RNA, 19 nt, Artificial Sequence
  Description of Artificial Sequence: Synthetic oligonucleotide
acuucgagccagccgcucg

SEQ ID NO: 2518935 - RNA, 19 nt, Artificial Sequence
  Description of Artificial Sequence: Synthetic oligonucleotide
uccucagucccuacggagu

SEQ ID NO: 2518936 - RNA, 19 nt, Artificial Sequence
  Description of Artificial Sequence: Synthetic oligonucleotide
auccucagucccuacggag

SEQ ID NO: 2518937 - RNA, 19 nt, Artificial Sequence
  Description of Artificial Sequence: Synthetic oligonucleotide
ugcuuugaugucacacuga

SEQ ID NO: 2518938 - RNA, 19 nt, Artificial Sequence
  Description of Artificial Sequence: Synthetic oligonucleotide
aaguuggccgauguggggu

SEQ ID NO: 2518939 - RNA, 19 nt, Artificial Sequence
  Description of Artificial Sequence: Synthetic oligonucleotide
uccuggucuugcaaacugc

SEQ ID NO: 2518940 - RNA, 19 nt, Artificial Sequence
  Description of Artificial Sequence: Synthetic oligonucleotide
uauguucaggaaugucaca

SEQ ID NO: 2518941 - RNA, 19 nt, Artificial Sequence
  Description of Artificial Sequence: Synthetic oligonucleotide
cugcgaauaggcacaggcc

SEQ ID NO: 2518942 - RNA, 19 nt, Artificial Sequence
  Description of Artificial Sequence: Synthetic oligonucleotide
cucaggcuugucuccaagg

SEQ ID NO: 2518943 - RNA, 19 nt, Artificial Sequence
  Description of Artificial Sequence: Synthetic oligonucleotide
caccuugacacugcggugg

SEQ ID NO: 2518944 - RNA, 19 nt, Artificial Sequence
  Description of Artificial Sequence: Synthetic oligonucleotide
acacaguuuucacggagga

SEQ ID NO: 2518945 - RNA, 19 nt, Artificial Sequence
  Description of Artificial Sequence: Synthetic oligonucleotide
uuguugguuuuguuuucgc

SEQ ID NO: 2518946 - RNA, 19 nt, Artificial Sequence
  Description of Artificial Sequence: Synthetic oligonucleotide
cucaccucacaucagucuc

SEQ ID NO: 2518947 - RNA, 19 nt, Artificial Sequence
  Description of Artificial Sequence: Synthetic oligonucleotide
caaugaagcaccauacaua

SEQ ID NO: 2518948 - RNA, 19 nt, Artificial Sequence
  Description of Artificial Sequence: Synthetic oligonucleotide
aggaauggcuuccucaaua

SEQ ID NO: 2518949 - RNA, 19 nt, Artificial Sequence
  Description of Artificial Sequence: Synthetic oligonucleotide
gguuggaggucgcacaugc

SEQ ID NO: 2518950 - RNA, 19 nt, Artificial Sequence
  Description of Artificial Sequence: Synthetic oligonucleotide
ggagaacaaagaccgcacg

SEQ ID NO: 2518951 - RNA, 19 nt, Artificial Sequence
  Description of Artificial Sequence: Synthetic oligonucleotide
aacaaagaccgcacgcaca

SEQ ID NO: 2518952 - RNA, 19 nt, Artificial Sequence
  Description of Artificial Sequence: Synthetic oligonucleotide
cagcgcuucaccuccacac

SEQ ID NO: 2518953 - RNA, 19 nt, Artificial Sequence
  Description of Artificial Sequence: Synthetic oligonucleotide
ccugcgaauaggcacaggc

SEQ ID NO: 2518954 - RNA, 19 nt, Artificial Sequence
  Description of Artificial Sequence: Synthetic oligonucleotide
guaaaugaccguccugguc

SEQ ID NO: 2518955 - RNA, 19 nt, Artificial Sequence
  Description of Artificial Sequence: Synthetic oligonucleotide
agcaccauacauaguaugu

SEQ ID NO: 2518956 - RNA, 19 nt, Artificial Sequence
  Description of Artificial Sequence: Synthetic oligonucleotide
cuguggaucugacuucgag

SEQ ID NO: 2518957 - RNA, 19 nt, Artificial Sequence
  Description of Artificial Sequence: Synthetic oligonucleotide
accauacauaguauguuca

SEQ ID NO: 2518958 - RNA, 19 nt, Artificial Sequence
  Description of Artificial Sequence: Synthetic oligonucleotide
gcuucaccuccacacaugg

SEQ ID NO: 2518959 - RNA, 19 nt, Artificial Sequence
  Description of Artificial Sequence: Synthetic oligonucleotide
cagcucucgggguaucucg

SEQ ID NO: 2518960 - RNA, 19 nt, Artificial Sequence
  Description of Artificial Sequence: Synthetic oligonucleotide
ucgcacaugcacacuccag

SEQ ID NO: 2518961 - RNA, 19 nt, Artificial Sequence
  Description of Artificial Sequence: Synthetic oligonucleotide
ugcugguauugcagcagcc

SEQ ID NO: 2518962 - RNA, 19 nt, Artificial Sequence
  Description of Artificial Sequence: Synthetic oligonucleotide
aguuggccgaugugggguc

SEQ ID NO: 2518963 - RNA, 19 nt, Artificial Sequence
  Description of Artificial Sequence: Synthetic oligonucleotide
aagaccgcacgcacauugg

SEQ ID NO: 2518964 - RNA, 19 nt, Artificial Sequence
  Description of Artificial Sequence: Synthetic oligonucleotide
ugucacacgccacguacau

SEQ ID NO: 2518965 - RNA, 19 nt, Artificial Sequence
  Description of Artificial Sequence: Synthetic oligonucleotide
cuuccugcgaauaggcaca

SEQ ID NO: 2518966 - RNA, 19 nt, Artificial Sequence
  Description of Artificial Sequence: Synthetic oligonucleotide
uccgagguaucucguaaau

SEQ ID NO: 2518967 - RNA, 19 nt, Artificial Sequence
  Description of Artificial Sequence: Synthetic oligonucleotide
cucuaaccucaccuggacc

SEQ ID NO: 2518968 - RNA, 19 nt, Artificial Sequence
  Description of Artificial Sequence: Synthetic oligonucleotide
cauggaggccaaaucagga

SEQ ID NO: 2518969 - RNA, 19 nt, Artificial Sequence
  Description of Artificial Sequence: Synthetic oligonucleotide
acgcacauuggcaaugaag

SEQ ID NO: 2518970 - RNA, 19 nt, Artificial Sequence
  Description of Artificial Sequence: Synthetic oligonucleotide
cagguguuccucuaaccuc

SEQ ID NO: 2518971 - RNA, 19 nt, Artificial Sequence
  Description of Artificial Sequence: Synthetic oligonucleotide
acguacauccgugucccgg

SEQ ID NO: 2518972 - RNA, 19 nt, Artificial Sequence
  Description of Artificial Sequence: Synthetic oligonucleotide
auaggcacaggccgcuucu

SEQ ID NO: 2518973 - RNA, 19 nt, Artificial Sequence
  Description of Artificial Sequence: Synthetic oligonucleotide
uacauccgugucccgggag

SEQ ID NO: 2518974 - RNA, 19 nt, Artificial Sequence
  Description of Artificial Sequence: Synthetic oligonucleotide
gagguaucucguaaaugac

SEQ ID NO: 2518975 - RNA, 19 nt, Artificial Sequence
  Description of Artificial Sequence: Synthetic oligonucleotide
gggcacaugcuuaauggcg

SEQ ID NO: 2518976 - RNA, 19 nt, Artificial Sequence
  Description of Artificial Sequence: Synthetic oligonucleotide
cucccgauggucuggguuc

SEQ ID NO: 2518977 - RNA, 19 nt, Artificial Sequence
  Description of Artificial Sequence: Synthetic oligonucleotide
ccugacauacuccacuuug

SEQ ID NO: 2518978 - RNA, 19 nt, Artificial Sequence
  Description of Artificial Sequence: Synthetic oligonucleotide
auggaggccaaaucaggaa

SEQ ID NO: 2518979 - RNA, 19 nt, Artificial Sequence
  Description of Artificial Sequence: Synthetic oligonucleotide
acaaacggacacugucucu

SEQ ID NO: 2518980 - RNA, 19 nt, Artificial Sequence
  Description of Artificial Sequence: Synthetic oligonucleotide
gucuaucuccaagagucgc

SEQ ID NO: 2518981 - RNA, 19 nt, Artificial Sequence
  Description of Artificial Sequence: Synthetic oligonucleotide
uuaauggcgugggaccugu

SEQ ID NO: 2518982 - RNA, 19 nt, Artificial Sequence
  Description of Artificial Sequence: Synthetic oligonucleotide
ggucuugcaaacugcagga

SEQ ID NO: 2518983 - RNA, 19 nt, Artificial Sequence
  Description of Artificial Sequence: Synthetic oligonucleotide
guggugaacccuugagggc

SEQ ID NO: 2518984 - RNA, 19 nt, Artificial Sequence
  Description of Artificial Sequence: Synthetic oligonucleotide
agucuaucuccaagagucg

SEQ ID NO: 2518985 - RNA, 19 nt, Artificial Sequence
  Description of Artificial Sequence: Synthetic oligonucleotide
aggcacaggccgcuucucg

SEQ ID NO: 2518986 - RNA, 19 nt, Artificial Sequence
  Description of Artificial Sequence: Synthetic oligonucleotide
ggaucugacuucgagccag

SEQ ID NO: 2518987 - RNA, 19 nt, Artificial Sequence
  Description of Artificial Sequence: Synthetic oligonucleotide
cacacugaacaaacggaca

SEQ ID NO: 2518988 - RNA, 19 nt, Artificial Sequence
  Description of Artificial Sequence: Synthetic oligonucleotide
uggcuucuuccugacauac

SEQ ID NO: 2518989 - RNA, 19 nt, Artificial Sequence
  Description of Artificial Sequence: Synthetic oligonucleotide
cacgccacguacauccgug

SEQ ID NO: 2518990 - RNA, 19 nt, Artificial Sequence
  Description of Artificial Sequence: Synthetic oligonucleotide
ucgaucagcucucggggua

SEQ ID NO: 2518991 - RNA, 19 nt, Artificial Sequence
  Description of Artificial Sequence: Synthetic oligonucleotide
accgcacgcacauuggcaa

SEQ ID NO: 2518992 - RNA, 19 nt, Artificial Sequence
  Description of Artificial Sequence: Synthetic oligonucleotide
acauccgugucccgggaga

SEQ ID NO: 2518993 - RNA, 19 nt, Artificial Sequence
  Description of Artificial Sequence: Synthetic oligonucleotide
agucccuacggagucuauc

SEQ ID NO: 2518994 - RNA, 19 nt, Artificial Sequence
  Description of Artificial Sequence: Synthetic oligonucleotide
aaaugaccguccuggucuu

SEQ ID NO: 2518995 - RNA, 19 nt, Artificial Sequence
  Description of Artificial Sequence: Synthetic oligonucleotide
aucucaccucacaucaguc

SEQ ID NO: 2518996 - RNA, 19 nt, Artificial Sequence
  Description of Artificial Sequence: Synthetic oligonucleotide
cucgggcacaugcuuaaug

SEQ ID NO: 2518997 - RNA, 19 nt, Artificial Sequence
  Description of Artificial Sequence: Synthetic oligonucleotide
aagagucgcuggagguccc

SEQ ID NO: 2518998 - RNA, 19 nt, Artificial Sequence
  Description of Artificial Sequence: Synthetic oligonucleotide
uggccaccuugacacugcg

SEQ ID NO: 2518999 - RNA, 19 nt, Artificial Sequence
  Description of Artificial Sequence: Synthetic oligonucleotide
cacaugcuuaauggcgugg

SEQ ID NO: 2519000 - RNA, 19 nt, Artificial Sequence
  Description of Artificial Sequence: Synthetic oligonucleotide
cgagguaucucguaaauga

SEQ ID NO: 2519001 - RNA, 19 nt, Artificial Sequence
  Description of Artificial Sequence: Synthetic oligonucleotide
aaacggacacugucucuuu

SEQ ID NO: 2519002 - RNA, 19 nt, Artificial Sequence
  Description of Artificial Sequence: Synthetic oligonucleotide
uaguauguucaggaauguc

SEQ ID NO: 2519003 - RNA, 19 nt, Artificial Sequence
  Description of Artificial Sequence: Synthetic oligonucleotide
caucagucuccuccucccg

SEQ ID NO: 2519004 - RNA, 19 nt, Artificial Sequence
  Description of Artificial Sequence: Synthetic oligonucleotide
cacaugcacacuccaggug

SEQ ID NO: 2519005 - RNA, 19 nt, Artificial Sequence
  Description of Artificial Sequence: Synthetic oligonucleotide
gcugguauugcagcagccg

SEQ ID NO: 2519006 - RNA, 19 nt, Artificial Sequence
  Description of Artificial Sequence: Synthetic oligonucleotide
ugucucuccgagugcuaca

SEQ ID NO: 2519007 - RNA, 19 nt, Artificial Sequence
  Description of Artificial Sequence: Synthetic oligonucleotide
gucucuccgagugcuacag

SEQ ID NO: 2519008 - RNA, 19 nt, Artificial Sequence
  Description of Artificial Sequence: Synthetic oligonucleotide
ucgcucucugugacaagga

SEQ ID NO: 2519009 - RNA, 19 nt, Artificial Sequence
  Description of Artificial Sequence: Synthetic oligonucleotide
ucgcuggaggucccggaug

SEQ ID NO: 2519010 - RNA, 19 nt, Artificial Sequence
  Description of Artificial Sequence: Synthetic oligonucleotide
uugagggcuggcacuugac

SEQ ID NO: 2519011 - RNA, 19 nt, Artificial Sequence
  Description of Artificial Sequence: Synthetic oligonucleotide
ugcgguggugaacccuuga

SEQ ID NO: 2519012 - RNA, 19 nt, Artificial Sequence
  Description of Artificial Sequence: Synthetic oligonucleotide
gccacguacauccgugucc

SEQ ID NO: 2519013 - RNA, 19 nt, Artificial Sequence
  Description of Artificial Sequence: Synthetic oligonucleotide
acacugcgguggugaaccc

SEQ ID NO: 2519014 - RNA, 19 nt, Artificial Sequence
  Description of Artificial Sequence: Synthetic oligonucleotide
accguccuggucuugcaaa

SEQ ID NO: 2519015 - RNA, 19 nt, Artificial Sequence
  Description of Artificial Sequence: Synthetic oligonucleotide
caggaaugucacacgccac

SEQ ID NO: 2519016 - RNA, 19 nt, Artificial Sequence
  Description of Artificial Sequence: Synthetic oligonucleotide
cgauguggggucaaccugg

SEQ ID NO: 2519017 - RNA, 19 nt, Artificial Sequence
  Description of Artificial Sequence: Synthetic oligonucleotide
gauguggggucaaccuggc

SEQ ID NO: 2519018 - RNA, 19 nt, Artificial Sequence
  Description of Artificial Sequence: Synthetic oligonucleotide
cccuacggagucuaucucc

SEQ ID NO: 2519019 - RNA, 19 nt, Artificial Sequence
  Description of Artificial Sequence: Synthetic oligonucleotide
gcucucugugacaaggaag

SEQ ID NO: 2519020 - RNA, 19 nt, Artificial Sequence
  Description of Artificial Sequence: Synthetic oligonucleotide
uccgagugcuacaguacuu

SEQ ID NO: 2519021 - RNA, 19 nt, Artificial Sequence
  Description of Artificial Sequence: Synthetic oligonucleotide
aaucaggaaguuggccgau

SEQ ID NO: 2519022 - RNA, 19 nt, Artificial Sequence
  Description of Artificial Sequence: Synthetic oligonucleotide
ucccuacggagucuaucuc

SEQ ID NO: 2519023 - RNA, 19 nt, Artificial Sequence
  Description of Artificial Sequence: Synthetic oligonucleotide
gguauugcagcagccggug

SEQ ID NO: 2519024 - RNA, 19 nt, Artificial Sequence
  Description of Artificial Sequence: Synthetic oligonucleotide
aaggcauccucagucccua

SEQ ID NO: 2519025 - RNA, 19 nt, Artificial Sequence
  Description of Artificial Sequence: Synthetic oligonucleotide
ggaggucgcacaugcacac

SEQ ID NO: 2519026 - RNA, 19 nt, Artificial Sequence
  Description of Artificial Sequence: Synthetic oligonucleotide
gucccuacggagucuaucu

SEQ ID NO: 2519027 - RNA, 19 nt, Artificial Sequence
  Description of Artificial Sequence: Synthetic oligonucleotide
gcaaugaagcaccauacau

SEQ ID NO: 2519028 - RNA, 19 nt, Artificial Sequence
  Description of Artificial Sequence: Synthetic oligonucleotide
uugacgcugcugguauugc

SEQ ID NO: 2519029 - RNA, 19 nt, Artificial Sequence
  Description of Artificial Sequence: Synthetic oligonucleotide
ugacuucgagccagccgcu

SEQ ID NO: 2519030 - RNA, 19 nt, Artificial Sequence
  Description of Artificial Sequence: Synthetic oligonucleotide
cuuaauggcgugggaccug

SEQ ID NO: 2519031 - RNA, 19 nt, Artificial Sequence
  Description of Artificial Sequence: Synthetic oligonucleotide
cuggguucagguuggaggu

SEQ ID NO: 2519032 - RNA, 19 nt, Artificial Sequence
  Description of Artificial Sequence: Synthetic oligonucleotide
ucucgggguaucucggcuu

SEQ ID NO: 2519033 - RNA, 19 nt, Artificial Sequence
  Description of Artificial Sequence: Synthetic oligonucleotide
guuuucgcucucugugaca

SEQ ID NO: 2519034 - RNA, 19 nt, Artificial Sequence
  Description of Artificial Sequence: Synthetic oligonucleotide
agcucucgggguaucucgg

SEQ ID NO: 2519035 - RNA, 19 nt, Artificial Sequence
  Description of Artificial Sequence: Synthetic oligonucleotide
cacuuuggccaccuugaca

SEQ ID NO: 2519036 - RNA, 19 nt, Artificial Sequence
  Description of Artificial Sequence: Synthetic oligonucleotide
cugucucuccgagugcuac

SEQ ID NO: 2519037 - RNA, 19 nt, Artificial Sequence
  Description of Artificial Sequence: Synthetic oligonucleotide
cacacgccacguacauccg

SEQ ID NO: 2519038 - RNA, 19 nt, Artificial Sequence
  Description of Artificial Sequence: Synthetic oligonucleotide
uuccugcgaauaggcacag

SEQ ID NO: 2519039 - RNA, 19 nt, Artificial Sequence
  Description of Artificial Sequence: Synthetic oligonucleotide
gaacccuugagggcuggca

SEQ ID NO: 2519040 - RNA, 19 nt, Artificial Sequence
  Description of Artificial Sequence: Synthetic oligonucleotide
uaaccucaccuggaccucu

SEQ ID NO: 2519041 - RNA, 19 nt, Artificial Sequence
  Description of Artificial Sequence: Synthetic oligonucleotide
uugacacugcgguggugaa

SEQ ID NO: 2519042 - RNA, 19 nt, Artificial Sequence
  Description of Artificial Sequence: Synthetic oligonucleotide
ugaccguccuggucuugca

SEQ ID NO: 2519043 - RNA, 19 nt, Artificial Sequence
  Description of Artificial Sequence: Synthetic oligonucleotide
uacuccacuuuggccaccu

SEQ ID NO: 2519044 - RNA, 19 nt, Artificial Sequence
  Description of Artificial Sequence: Synthetic oligonucleotide
caguuuucacggaggagaa

SEQ ID NO: 2519045 - RNA, 19 nt, Artificial Sequence
  Description of Artificial Sequence: Synthetic oligonucleotide
auacuccacuuuggccacc

SEQ ID NO: 2519046 - RNA, 19 nt, Artificial Sequence
  Description of Artificial Sequence: Synthetic oligonucleotide
ucagucccuacggagucua

SEQ ID NO: 2519047 - RNA, 19 nt, Artificial Sequence
  Description of Artificial Sequence: Synthetic oligonucleotide
gaaugucacacgccacgua

SEQ ID NO: 2519048 - RNA, 19 nt, Artificial Sequence
  Description of Artificial Sequence: Synthetic oligonucleotide
acacgccacguacauccgu

SEQ ID NO: 2519049 - RNA, 19 nt, Artificial Sequence
  Description of Artificial Sequence: Synthetic oligonucleotide
ucucuccgagugcuacagu

SEQ ID NO: 2519050 - RNA, 19 nt, Artificial Sequence
  Description of Artificial Sequence: Synthetic oligonucleotide
aaugaccguccuggucuug

SEQ ID NO: 2519051 - RNA, 19 nt, Artificial Sequence
  Description of Artificial Sequence: Synthetic oligonucleotide
cacaggccgcuucucgggc

SEQ ID NO: 2519052 - RNA, 19 nt, Artificial Sequence
  Description of Artificial Sequence: Synthetic oligonucleotide
gucgcacaugcacacucca

SEQ ID NO: 2519053 - RNA, 19 nt, Artificial Sequence
  Description of Artificial Sequence: Synthetic oligonucleotide
gagucgcuggaggucccgg

SEQ ID NO: 2519054 - RNA, 19 nt, Artificial Sequence
  Description of Artificial Sequence: Synthetic oligonucleotide
gggucaaccuggcuccgag

SEQ ID NO: 2519055 - RNA, 19 nt, Artificial Sequence
  Description of Artificial Sequence: Synthetic oligonucleotide
gaccgcacgcacauuggca

SEQ ID NO: 2519056 - RNA, 19 nt, Artificial Sequence
  Description of Artificial Sequence: Synthetic oligonucleotide
ggucaaccuggcuccgagg

SEQ ID NO: 2519057 - RNA, 19 nt, Artificial Sequence
  Description of Artificial Sequence: Synthetic oligonucleotide
ugcagcgcuucaccuccac

SEQ ID NO: 2519058 - RNA, 19 nt, Artificial Sequence
  Description of Artificial Sequence: Synthetic oligonucleotide
agucgcuggaggucccgga

SEQ ID NO: 2519059 - RNA, 19 nt, Artificial Sequence
  Description of Artificial Sequence: Synthetic oligonucleotide
gcucaucucaccucacauc

SEQ ID NO: 2519060 - RNA, 19 nt, Artificial Sequence
  Description of Artificial Sequence: Synthetic oligonucleotide
caugcuuaauggcguggga

SEQ ID NO: 2519061 - RNA, 19 nt, Artificial Sequence
  Description of Artificial Sequence: Synthetic oligonucleotide
aggcauccucagucccuac

SEQ ID NO: 2519062 - RNA, 19 nt, Artificial Sequence
  Description of Artificial Sequence: Synthetic oligonucleotide
cauccgugucccgggagag

SEQ ID NO: 2519063 - RNA, 19 nt, Artificial Sequence
  Description of Artificial Sequence: Synthetic oligonucleotide
ugucccgggagagggcggc

SEQ ID NO: 2519064 - RNA, 19 nt, Artificial Sequence
  Description of Artificial Sequence: Synthetic oligonucleotide
agagucgcuggaggucccg

SEQ ID NO: 2519065 - RNA, 19 nt, Artificial Sequence
  Description of Artificial Sequence: Synthetic oligonucleotide
gcgguggugaacccuugag

SEQ ID NO: 2519066 - RNA, 19 nt, Artificial Sequence
  Description of Artificial Sequence: Synthetic oligonucleotide
ugacacugcgguggugaac

SEQ ID NO: 2519067 - RNA, 19 nt, Artificial Sequence
  Description of Artificial Sequence: Synthetic oligonucleotide
caucucaccucacaucagu

SEQ ID NO: 2519068 - RNA, 19 nt, Artificial Sequence
  Description of Artificial Sequence: Synthetic oligonucleotide
agccagccgcucgaucagc

SEQ ID NO: 2519069 - RNA, 19 nt, Artificial Sequence
  Description of Artificial Sequence: Synthetic oligonucleotide
ccaaggcauccucaguccc

SEQ ID NO: 2519070 - RNA, 19 nt, Artificial Sequence
  Description of Artificial Sequence: Synthetic oligonucleotide
augucacacgccacguaca

SEQ ID NO: 2519071 - RNA, 19 nt, Artificial Sequence
  Description of Artificial Sequence: Synthetic oligonucleotide
uaauggcgugggaccugug

SEQ ID NO: 2519072 - RNA, 19 nt, Artificial Sequence
  Description of Artificial Sequence: Synthetic oligonucleotide
gauggucuggguucagguu

SEQ ID NO: 2519073 - RNA, 19 nt, Artificial Sequence
  Description of Artificial Sequence: Synthetic oligonucleotide
gagugcuacaguacuugcu

SEQ ID NO: 2519074 - RNA, 19 nt, Artificial Sequence
  Description of Artificial Sequence: Synthetic oligonucleotide
uccugcgaauaggcacagg

SEQ ID NO: 2519075 - RNA, 19 nt, Artificial Sequence
  Description of Artificial Sequence: Synthetic oligonucleotide
gaagcaccauacauaguau

SEQ ID NO: 2519076 - RNA, 19 nt, Artificial Sequence
  Description of Artificial Sequence: Synthetic oligonucleotide
cugugacaaggaagcuuuc

SEQ ID NO: 2519077 - RNA, 19 nt, Artificial Sequence
  Description of Artificial Sequence: Synthetic oligonucleotide
ugaacccuugagggcuggc

SEQ ID NO: 2519078 - RNA, 19 nt, Artificial Sequence
  Description of Artificial Sequence: Synthetic oligonucleotide
acgccacguacauccgugu

SEQ ID NO: 2519079 - RNA, 19 nt, Artificial Sequence
  Description of Artificial Sequence: Synthetic oligonucleotide
uggcuccgagguaucucgu

SEQ ID NO: 2519080 - RNA, 19 nt, Artificial Sequence
  Description of Artificial Sequence: Synthetic oligonucleotide
cacguacauccgugucccg

SEQ ID NO: 2519081 - RNA, 19 nt, Artificial Sequence
  Description of Artificial Sequence: Synthetic oligonucleotide
ccgcuucucgggcacaugc

SEQ ID NO: 2519082 - RNA, 19 nt, Artificial Sequence
  Description of Artificial Sequence: Synthetic oligonucleotide
gccaaaucaggaaguuggc

SEQ ID NO: 2519083 - RNA, 19 nt, Artificial Sequence
  Description of Artificial Sequence: Synthetic oligonucleotide
ucccgauggucuggguuca

SEQ ID NO: 2519084 - RNA, 19 nt, Artificial Sequence
  Description of Artificial Sequence: Synthetic oligonucleotide
uggggucaaccuggcuccg

SEQ ID NO: 2519085 - RNA, 19 nt, Artificial Sequence
  Description of Artificial Sequence: Synthetic oligonucleotide
acugcgguggugaacccuu

SEQ ID NO: 2519086 - RNA, 19 nt, Artificial Sequence
  Description of Artificial Sequence: Synthetic oligonucleotide
agccggugcagcgcuucac

SEQ ID NO: 2519087 - RNA, 19 nt, Artificial Sequence
  Description of Artificial Sequence: Synthetic oligonucleotide
ccuacggagucuaucucca

SEQ ID NO: 2519088 - RNA, 19 nt, Artificial Sequence
  Description of Artificial Sequence: Synthetic oligonucleotide
cuucgagccagccgcucga

SEQ ID NO: 2519089 - RNA, 19 nt, Artificial Sequence
  Description of Artificial Sequence: Synthetic oligonucleotide
ccucuaaccucaccuggac

SEQ ID NO: 2519090 - RNA, 19 nt, Artificial Sequence
  Description of Artificial Sequence: Synthetic oligonucleotide
agccgcucgaucagcucuc

SEQ ID NO: 2519091 - RNA, 19 nt, Artificial Sequence
  Description of Artificial Sequence: Synthetic oligonucleotide
cagacacaguuuucacgga

SEQ ID NO: 2519092 - RNA, 19 nt, Artificial Sequence
  Description of Artificial Sequence: Synthetic oligonucleotide
gcgaauaggcacaggccgc

SEQ ID NO: 2519093 - RNA, 19 nt, Artificial Sequence
  Description of Artificial Sequence: Synthetic oligonucleotide
cuccgagguaucucguaaa

SEQ ID NO: 2519094 - RNA, 19 nt, Artificial Sequence
  Description of Artificial Sequence: Synthetic oligonucleotide
guaucucguaaaugaccgu

SEQ ID NO: 2519095 - RNA, 19 nt, Artificial Sequence
  Description of Artificial Sequence: Synthetic oligonucleotide
guacauccgugucccggga

SEQ ID NO: 2519096 - RNA, 19 nt, Artificial Sequence
  Description of Artificial Sequence: Synthetic oligonucleotide
ccgagugcuacaguacuug

SEQ ID NO: 2519097 - RNA, 19 nt, Artificial Sequence
  Description of Artificial Sequence: Synthetic oligonucleotide
cuccucccgauggucuggg

SEQ ID NO: 2519098 - RNA, 19 nt, Artificial Sequence
  Description of Artificial Sequence: Synthetic oligonucleotide
auguggggucaaccuggcu

SEQ ID NO: 2519099 - RNA, 19 nt, Artificial Sequence
  Description of Artificial Sequence: Synthetic oligonucleotide
cuccgagugcuacaguacu

SEQ ID NO: 2519100 - RNA, 19 nt, Artificial Sequence
  Description of Artificial Sequence: Synthetic oligonucleotide
gggaccugugggcucucag

SEQ ID NO: 2519101 - RNA, 19 nt, Artificial Sequence
  Description of Artificial Sequence: Synthetic oligonucleotide
gccggugcagcgcuucacc

SEQ ID NO: 2519102 - RNA, 19 nt, Artificial Sequence
  Description of Artificial Sequence: Synthetic oligonucleotide
gaccguccuggucuugcaa

SEQ ID NO: 2519103 - RNA, 19 nt, Artificial Sequence
  Description of Artificial Sequence: Synthetic oligonucleotide
caggccgcuucucgggcac

SEQ ID NO: 2519104 - RNA, 19 nt, Artificial Sequence
  Description of Artificial Sequence: Synthetic oligonucleotide
cgagugcuacaguacuugc

SEQ ID NO: 2519105 - RNA, 19 nt, Artificial Sequence
  Description of Artificial Sequence: Synthetic oligonucleotide
ggucgcacaugcacacucc

SEQ ID NO: 2519106 - RNA, 19 nt, Artificial Sequence
  Description of Artificial Sequence: Synthetic oligonucleotide
caaggcauccucagucccu

SEQ ID NO: 2519107 - RNA, 19 nt, Artificial Sequence
  Description of Artificial Sequence: Synthetic oligonucleotide
uggguucagguuggagguc

SEQ ID NO: 2519108 - RNA, 19 nt, Artificial Sequence
  Description of Artificial Sequence: Synthetic oligonucleotide
cagucuccuccucccgaug

SEQ ID NO: 2519109 - RNA, 19 nt, Artificial Sequence
  Description of Artificial Sequence: Synthetic oligonucleotide
gccggcucaucucaccuca

SEQ ID NO: 2519110 - RNA, 19 nt, Artificial Sequence
  Description of Artificial Sequence: Synthetic oligonucleotide
caaacggacacugucucuu

SEQ ID NO: 2519111 - RNA, 19 nt, Artificial Sequence
  Description of Artificial Sequence: Synthetic oligonucleotide
gcuccgagguaucucguaa

SEQ ID NO: 2519112 - RNA, 19 nt, Artificial Sequence
  Description of Artificial Sequence: Synthetic oligonucleotide
ggaggagaacaaagaccgc

SEQ ID NO: 2519113 - RNA, 19 nt, Artificial Sequence
  Description of Artificial Sequence: Synthetic oligonucleotide
ccucagucccuacggaguc

SEQ ID NO: 2519114 - RNA, 19 nt, Artificial Sequence
  Description of Artificial Sequence: Synthetic oligonucleotide
cgggcacaugcuuaauggc

SEQ ID NO: 2519115 - RNA, 19 nt, Artificial Sequence
  Description of Artificial Sequence: Synthetic oligonucleotide
cugcgguggugaacccuug

SEQ ID NO: 2519116 - RNA, 19 nt, Artificial Sequence
  Description of Artificial Sequence: Synthetic oligonucleotide
ggcacaugcuuaauggcgu

SEQ ID NO: 2519117 - RNA, 19 nt, Artificial Sequence
  Description of Artificial Sequence: Synthetic oligonucleotide
gacuucgagccagccgcuc

SEQ ID NO: 2519118 - RNA, 19 nt, Artificial Sequence
  Description of Artificial Sequence: Synthetic oligonucleotide
gcucucgggguaucucggc

SEQ ID NO: 2519119 - RNA, 19 nt, Artificial Sequence
  Description of Artificial Sequence: Synthetic oligonucleotide
ccaagagucgcuggagguc

SEQ ID NO: 2519120 - RNA, 19 nt, Artificial Sequence
  Description of Artificial Sequence: Synthetic oligonucleotide
ccguccuggucuugcaaac

SEQ ID NO: 2519121 - RNA, 19 nt, Artificial Sequence
  Description of Artificial Sequence: Synthetic oligonucleotide
ccgagguaucucguaaaug

SEQ ID NO: 2519122 - RNA, 19 nt, Artificial Sequence
  Description of Artificial Sequence: Synthetic oligonucleotide
cucgaucagcucucggggu

SEQ ID NO: 2519123 - RNA, 19 nt, Artificial Sequence
  Description of Artificial Sequence: Synthetic oligonucleotide
gcacaugcacacuccaggu

SEQ ID NO: 2519124 - RNA, 19 nt, Artificial Sequence
  Description of Artificial Sequence: Synthetic oligonucleotide
gucuugcaaacugcaggaa

SEQ ID NO: 2519125 - RNA, 19 nt, Artificial Sequence
  Description of Artificial Sequence: Synthetic oligonucleotide
guucagguuggaggucgca

SEQ ID NO: 2519126 - RNA, 19 nt, Artificial Sequence
  Description of Artificial Sequence: Synthetic oligonucleotide
uaggcacaggccgcuucuc

SEQ ID NO: 2519127 - RNA, 19 nt, Artificial Sequence
  Description of Artificial Sequence: Synthetic oligonucleotide
cugucucuuuguccucaga

SEQ ID NO: 2519128 - RNA, 19 nt, Artificial Sequence
  Description of Artificial Sequence: Synthetic oligonucleotide
caaccuggcuccgagguau

SEQ ID NO: 2519129 - RNA, 19 nt, Artificial Sequence
  Description of Artificial Sequence: Synthetic oligonucleotide
ccucaccuggaccucuuuc

SEQ ID NO: 2519130 - RNA, 19 nt, Artificial Sequence
  Description of Artificial Sequence: Synthetic oligonucleotide
ccaccuugacacugcggug

SEQ ID NO: 2519131 - RNA, 19 nt, Artificial Sequence
  Description of Artificial Sequence: Synthetic oligonucleotide
gccgauguggggucaaccu

SEQ ID NO: 2519132 - RNA, 19 nt, Artificial Sequence
  Description of Artificial Sequence: Synthetic oligonucleotide
guccucagacacaguuuuc

SEQ ID NO: 2519133 - RNA, 19 nt, Artificial Sequence
  Description of Artificial Sequence: Synthetic oligonucleotide
gucacacgccacguacauc

SEQ ID NO: 2519134 - RNA, 19 nt, Artificial Sequence
  Description of Artificial Sequence: Synthetic oligonucleotide
ggcucaucucaccucacau

SEQ ID NO: 2519135 - RNA, 19 nt, Artificial Sequence
  Description of Artificial Sequence: Synthetic oligonucleotide
ggccgauguggggucaacc

SEQ ID NO: 2519136 - RNA, 19 nt, Artificial Sequence
  Description of Artificial Sequence: Synthetic oligonucleotide
ucucgggcacaugcuuaau

SEQ ID NO: 2519137 - RNA, 19 nt, Artificial Sequence
  Description of Artificial Sequence: Synthetic oligonucleotide
uuggccgauguggggucaa

SEQ ID NO: 2519138 - RNA, 19 nt, Artificial Sequence
  Description of Artificial Sequence: Synthetic oligonucleotide
cuacaguacuugcuuugau

SEQ ID NO: 2519139 - RNA, 19 nt, Artificial Sequence
  Description of Artificial Sequence: Synthetic oligonucleotide
cacugucucuccgagugcu

SEQ ID NO: 2519140 - RNA, 19 nt, Artificial Sequence
  Description of Artificial Sequence: Synthetic oligonucleotide
aaccucaccuggaccucuu

SEQ ID NO: 2519141 - RNA, 19 nt, Artificial Sequence
  Description of Artificial Sequence: Synthetic oligonucleotide
uccucccgauggucugggu

SEQ ID NO: 2519142 - RNA, 19 nt, Artificial Sequence
  Description of Artificial Sequence: Synthetic oligonucleotide
ggaggccaaaucaggaagu

SEQ ID NO: 2519143 - RNA, 19 nt, Artificial Sequence
  Description of Artificial Sequence: Synthetic oligonucleotide
gguucagguuggaggucgc

SEQ ID NO: 2519144 - RNA, 19 nt, Artificial Sequence
  Description of Artificial Sequence: Synthetic oligonucleotide
uccacacauggaggccaaa

SEQ ID NO: 2519145 - RNA, 19 nt, Artificial Sequence
  Description of Artificial Sequence: Synthetic oligonucleotide
ggaaugucacacgccacgu

SEQ ID NO: 2519146 - RNA, 19 nt, Artificial Sequence
  Description of Artificial Sequence: Synthetic oligonucleotide
accucaccuggaccucuuu

SEQ ID NO: 2519147 - RNA, 19 nt, Artificial Sequence
  Description of Artificial Sequence: Synthetic oligonucleotide
ccgauggucuggguucagg

SEQ ID NO: 2519148 - RNA, 19 nt, Artificial Sequence
  Description of Artificial Sequence: Synthetic oligonucleotide
cucucgggguaucucggcu

SEQ ID NO: 2519149 - RNA, 19 nt, Artificial Sequence
  Description of Artificial Sequence: Synthetic oligonucleotide
ggccaccuugacacugcgg

SEQ ID NO: 2519150 - RNA, 19 nt, Artificial Sequence
  Description of Artificial Sequence: Synthetic oligonucleotide
ugggaccugugggcucuca

SEQ ID NO: 2519151 - RNA, 19 nt, Artificial Sequence
  Description of Artificial Sequence: Synthetic oligonucleotide
uggccgauguggggucaac

SEQ ID NO: 2519152 - RNA, 19 nt, Artificial Sequence
  Description of Artificial Sequence: Synthetic oligonucleotide
guuggccgaugugggguca

SEQ ID NO: 2519153 - RNA, 19 nt, Artificial Sequence
  Description of Artificial Sequence: Synthetic oligonucleotide
gcuuaauggcgugggaccu

SEQ ID NO: 2519154 - RNA, 19 nt, Artificial Sequence
  Description of Artificial Sequence: Synthetic oligonucleotide
cagguuggaggucgcacau

SEQ ID NO: 2519155 - RNA, 19 nt, Artificial Sequence
  Description of Artificial Sequence: Synthetic oligonucleotide
gucgcuggaggucccggau

SEQ ID NO: 2519156 - RNA, 19 nt, Artificial Sequence
  Description of Artificial Sequence: Synthetic oligonucleotide
gguguuccucuaaccucac

SEQ ID NO: 2519157 - RNA, 19 nt, Artificial Sequence
  Description of Artificial Sequence: Synthetic oligonucleotide
cacgcacauuggcaaugaa

SEQ ID NO: 2519158 - RNA, 19 nt, Artificial Sequence
  Description of Artificial Sequence: Synthetic oligonucleotide
gcagcgcuucaccuccaca

SEQ ID NO: 2519159 - RNA, 19 nt, Artificial Sequence
  Description of Artificial Sequence: Synthetic oligonucleotide
gcggccggcucaucucacc

SEQ ID NO: 2519160 - RNA, 19 nt, Artificial Sequence
  Description of Artificial Sequence: Synthetic oligonucleotide
caugcacacuccagguguu

SEQ ID NO: 2519161 - RNA, 19 nt, Artificial Sequence
  Description of Artificial Sequence: Synthetic oligonucleotide
ggccggcucaucucaccuc

SEQ ID NO: 2519162 - RNA, 19 nt, Artificial Sequence
  Description of Artificial Sequence: Synthetic oligonucleotide
ggcuccgagguaucucgua

SEQ ID NO: 2519163 - RNA, 19 nt, Artificial Sequence
  Description of Artificial Sequence: Synthetic oligonucleotide
ccucaauacuucucuuccu

SEQ ID NO: 2519164 - RNA, 19 nt, Artificial Sequence
  Description of Artificial Sequence: Synthetic oligonucleotide
gaggucgcacaugcacacu

SEQ ID NO: 2519165 - RNA, 19 nt, Artificial Sequence
  Description of Artificial Sequence: Synthetic oligonucleotide
gccgcucgaucagcucucg

SEQ ID NO: 2519166 - RNA, 19 nt, Artificial Sequence
  Description of Artificial Sequence: Synthetic oligonucleotide
agagggcggccggcucauc

SEQ ID NO: 2519167 - RNA, 19 nt, Artificial Sequence
  Description of Artificial Sequence: Synthetic oligonucleotide
cccgggagagggcggccgg

SEQ ID NO: 2519168 - RNA, 19 nt, Artificial Sequence
  Description of Artificial Sequence: Synthetic oligonucleotide
ccgcucgaucagcucucgg

SEQ ID NO: 2519169 - RNA, 19 nt, Artificial Sequence
  Description of Artificial Sequence: Synthetic oligonucleotide
cggaugcuguggaucugac

SEQ ID NO: 2519170 - RNA, 19 nt, Artificial Sequence
  Description of Artificial Sequence: Synthetic oligonucleotide
gucccgggagagggcggcc

SEQ ID NO: 2519171 - RNA, 19 nt, Artificial Sequence
  Description of Artificial Sequence: Synthetic oligonucleotide
cggugcagcgcuucaccuc

SEQ ID NO: 2519172 - RNA, 19 nt, Artificial Sequence
  Description of Artificial Sequence: Synthetic oligonucleotide
ccggaugcuguggaucuga

SEQ ID NO: 2519173 - RNA, 19 nt, Artificial Sequence
  Description of Artificial Sequence: Synthetic oligonucleotide
cagccggugcagcgcuuca

SEQ ID NO: 2519174 - RNA, 19 nt, Artificial Sequence
  Description of Artificial Sequence: Synthetic oligonucleotide
gcagccggugcagcgcuuc

SEQ ID NO: 2519175 - RNA, 19 nt, Artificial Sequence
  Description of Artificial Sequence: Synthetic oligonucleotide
ccgugucccgggagagggc

SEQ ID NO: 2519176 - RNA, 19 nt, Artificial Sequence
  Description of Artificial Sequence: Synthetic oligonucleotide
cucagucccuacggagucu

SEQ ID NO: 2519177 - RNA, 19 nt, Artificial Sequence
  Description of Artificial Sequence: Synthetic oligonucleotide
gcgcuucaccuccacacau

SEQ ID NO: 2519178 - RNA, 19 nt, Artificial Sequence
  Description of Artificial Sequence: Synthetic oligonucleotide
cacugcgguggugaacccu

SEQ ID NO: 2519179 - RNA, 19 nt, Artificial Sequence
  Description of Artificial Sequence: Synthetic oligonucleotide
ggcgugggaccugugggcu

SEQ ID NO: 2519180 - RNA, 19 nt, Artificial Sequence
  Description of Artificial Sequence: Synthetic oligonucleotide
ccggcucaucucaccucac

SEQ ID NO: 2519181 - RNA, 19 nt, Artificial Sequence
  Description of Artificial Sequence: Synthetic oligonucleotide
cgccacguacauccguguc

SEQ ID NO: 2519182 - RNA, 19 nt, Artificial Sequence
  Description of Artificial Sequence: Synthetic oligonucleotide
cguaaaugaccguccuggu

SEQ ID NO: 2519183 - RNA, 19 nt, Artificial Sequence
  Description of Artificial Sequence: Synthetic oligonucleotide
aggccgcuucucgggcaca

SEQ ID NO: 2519184 - RNA, 19 nt, Artificial Sequence
  Description of Artificial Sequence: Synthetic oligonucleotide
gagagggcggccggcucau

SEQ ID NO: 2519185 - RNA, 19 nt, Artificial Sequence
  Description of Artificial Sequence: Synthetic oligonucleotide
cgcucucugugacaaggaa

SEQ ID NO: 2519186 - RNA, 19 nt, Artificial Sequence
  Description of Artificial Sequence: Synthetic oligonucleotide
ggggucaaccuggcuccga

SEQ ID NO: 2519187 - RNA, 19 nt, Artificial Sequence
  Description of Artificial Sequence: Synthetic oligonucleotide
gccgcuucucgggcacaug

SEQ ID NO: 2519188 - RNA, 19 nt, Artificial Sequence
  Description of Artificial Sequence: Synthetic oligonucleotide
cggcucaucucaccucaca

SEQ ID NO: 2519189 - RNA, 19 nt, Artificial Sequence
  Description of Artificial Sequence: Synthetic oligonucleotide
cccggaugcuguggaucug

SEQ ID NO: 2519190 - RNA, 19 nt, Artificial Sequence
  Description of Artificial Sequence: Synthetic oligonucleotide
ccggugcagcgcuucaccu

SEQ ID NO: 2519191 - RNA, 19 nt, Artificial Sequence
  Description of Artificial Sequence: Synthetic oligonucleotide
ccucccgauggucuggguu

SEQ ID NO: 2519192 - RNA, 19 nt, Artificial Sequence
  Description of Artificial Sequence: Synthetic oligonucleotide
cccgauggucuggguucag

SEQ ID NO: 2519193 - RNA, 19 nt, Artificial Sequence
  Description of Artificial Sequence: Synthetic oligonucleotide
caaagaccgcacgcacauu

SEQ ID NO: 2519194 - RNA, 19 nt, Artificial Sequence
  Description of Artificial Sequence: Synthetic oligonucleotide
cgaauaggcacaggccgcu

SEQ ID NO: 2519195 - RNA, 19 nt, Artificial Sequence
  Description of Artificial Sequence: Synthetic oligonucleotide
cagucccuacggagucuau

SEQ ID NO: 2519196 - RNA, 19 nt, Artificial Sequence
  Description of Artificial Sequence: Synthetic oligonucleotide
ggccgcuucucgggcacau

SEQ ID NO: 2519197 - RNA, 19 nt, Artificial Sequence
  Description of Artificial Sequence: Synthetic oligonucleotide
cccuugagggcuggcacuu

SEQ ID NO: 2519198 - RNA, 19 nt, Artificial Sequence
  Description of Artificial Sequence: Synthetic oligonucleotide
cguccuggucuugcaaacu

SEQ ID NO: 2519199 - RNA, 19 nt, Artificial Sequence
  Description of Artificial Sequence: Synthetic oligonucleotide
ccgcacgcacauuggcaau

SEQ ID NO: 2519200 - RNA, 19 nt, Artificial Sequence
  Description of Artificial Sequence: Synthetic oligonucleotide
cggccggcucaucucaccu

SEQ ID NO: 2519201 - RNA, 19 nt, Artificial Sequence
  Description of Artificial Sequence: Synthetic oligonucleotide
auuauuguaaugaagagcg

SEQ ID NO: 2519202 - RNA, 19 nt, Artificial Sequence
  Description of Artificial Sequence: Synthetic oligonucleotide
uuuguauuggaccaggagc

SEQ ID NO: 2519203 - RNA, 19 nt, Artificial Sequence
  Description of Artificial Sequence: Synthetic oligonucleotide
agcacagagaccuaggggc

SEQ ID NO: 2519204 - RNA, 19 nt, Artificial Sequence
  Description of Artificial Sequence: Synthetic oligonucleotide
uuuacuuccucauaaagcu

SEQ ID NO: 2519205 - RNA, 19 nt, Artificial Sequence
  Description of Artificial Sequence: Synthetic oligonucleotide
ugcaguguacucauuaggg

SEQ ID NO: 2519206 - RNA, 19 nt, Artificial Sequence
  Description of Artificial Sequence: Synthetic oligonucleotide
uuauccauuauuguaauga

SEQ ID NO: 2519207 - RNA, 19 nt, Artificial Sequence
  Description of Artificial Sequence: Synthetic oligonucleotide
uuguauuggaccaggagcc

SEQ ID NO: 2519208 - RNA, 19 nt, Artificial Sequence
  Description of Artificial Sequence: Synthetic oligonucleotide
cuuuacuuccucauaaagc

SEQ ID NO: 2519209 - RNA, 19 nt, Artificial Sequence
  Description of Artificial Sequence: Synthetic oligonucleotide
uucaccaccgcaaacagcu

SEQ ID NO: 2519210 - RNA, 19 nt, Artificial Sequence
  Description of Artificial Sequence: Synthetic oligonucleotide
aacuacaucugcaauacag

SEQ ID NO: 2519211 - RNA, 19 nt, Artificial Sequence
  Description of Artificial Sequence: Synthetic oligonucleotide
agagcgaaacuacaucugc

SEQ ID NO: 2519212 - RNA, 19 nt, Artificial Sequence
  Description of Artificial Sequence: Synthetic oligonucleotide
ugcauugucuucaccaccg

SEQ ID NO: 2519213 - RNA, 19 nt, Artificial Sequence
  Description of Artificial Sequence: Synthetic oligonucleotide
agagucugcagccauuggc

SEQ ID NO: 2519214 - RNA, 19 nt, Artificial Sequence
  Description of Artificial Sequence: Synthetic oligonucleotide
uaaagcuccggcuuguucc

SEQ ID NO: 2519215 - RNA, 19 nt, Artificial Sequence
  Description of Artificial Sequence: Synthetic oligonucleotide
cuugauguaugcuuucucc

SEQ ID NO: 2519216 - RNA, 19 nt, Artificial Sequence
  Description of Artificial Sequence: Synthetic oligonucleotide
uuaggggugacacaguccu

SEQ ID NO: 2519217 - RNA, 19 nt, Artificial Sequence
  Description of Artificial Sequence: Synthetic oligonucleotide
ugagccuugaaccugucga

SEQ ID NO: 2519218 - RNA, 19 nt, Artificial Sequence
  Description of Artificial Sequence: Synthetic oligonucleotide
cuacaucugcaauacagcg

SEQ ID NO: 2519219 - RNA, 19 nt, Artificial Sequence
  Description of Artificial Sequence: Synthetic oligonucleotide
ugaaucucguccauggcgc

SEQ ID NO: 2519220 - RNA, 19 nt, Artificial Sequence
  Description of Artificial Sequence: Synthetic oligonucleotide
uacaucugcaauacagcgg

SEQ ID NO: 2519221 - RNA, 19 nt, Artificial Sequence
  Description of Artificial Sequence: Synthetic oligonucleotide
aaagcuccggcuuguuccc

SEQ ID NO: 2519222 - RNA, 19 nt, Artificial Sequence
  Description of Artificial Sequence: Synthetic oligonucleotide
uaaugaagagcgaaacuac

SEQ ID NO: 2519223 - RNA, 19 nt, Artificial Sequence
  Description of Artificial Sequence: Synthetic oligonucleotide
uuggcugacuguuuggcgg

SEQ ID NO: 2519224 - RNA, 19 nt, Artificial Sequence
  Description of Artificial Sequence: Synthetic oligonucleotide
cauuauuguaaugaagagc

SEQ ID NO: 2519225 - RNA, 19 nt, Artificial Sequence
  Description of Artificial Sequence: Synthetic oligonucleotide
uguaaugaagagcgaaacu

SEQ ID NO: 2519226 - RNA, 19 nt, Artificial Sequence
  Description of Artificial Sequence: Synthetic oligonucleotide
gcaaaauucaucaauggag

SEQ ID NO: 2519227 - RNA, 19 nt, Artificial Sequence
  Description of Artificial Sequence: Synthetic oligonucleotide
ugaaccugucgaaaggcag

SEQ ID NO: 2519228 - RNA, 19 nt, Artificial Sequence
  Description of Artificial Sequence: Synthetic oligonucleotide
uccagucugaacuugcggc

SEQ ID NO: 2519229 - RNA, 19 nt, Artificial Sequence
  Description of Artificial Sequence: Synthetic oligonucleotide
uuuggaggcccggagaugg

SEQ ID NO: 2519230 - RNA, 19 nt, Artificial Sequence
  Description of Artificial Sequence: Synthetic oligonucleotide
acuacaucugcaauacagc

SEQ ID NO: 2519231 - RNA, 19 nt, Artificial Sequence
  Description of Artificial Sequence: Synthetic oligonucleotide
aggcauuguaagcugacuc

SEQ ID NO: 2519232 - RNA, 19 nt, Artificial Sequence
  Description of Artificial Sequence: Synthetic oligonucleotide
cuugucauccuugauagug

SEQ ID NO: 2519233 - RNA, 19 nt, Artificial Sequence
  Description of Artificial Sequence: Synthetic oligonucleotide
uccaaugccagguguagcc

SEQ ID NO: 2519234 - RNA, 19 nt, Artificial Sequence
  Description of Artificial Sequence: Synthetic oligonucleotide
cuugcggcaaaauucauca

SEQ ID NO: 2519235 - RNA, 19 nt, Artificial Sequence
  Description of Artificial Sequence: Synthetic oligonucleotide
cuuguacaacuuuacuucc

SEQ ID NO: 2519236 - RNA, 19 nt, Artificial Sequence
  Description of Artificial Sequence: Synthetic oligonucleotide
cucauuaggggugacacag

SEQ ID NO: 2519237 - RNA, 19 nt, Artificial Sequence
  Description of Artificial Sequence: Synthetic oligonucleotide
ugaagagcgaaacuacauc

SEQ ID NO: 2519238 - RNA, 19 nt, Artificial Sequence
  Description of Artificial Sequence: Synthetic oligonucleotide
uauuguaaugaagagcgaa

SEQ ID NO: 2519239 - RNA, 19 nt, Artificial Sequence
  Description of Artificial Sequence: Synthetic oligonucleotide
uuccucauaaagcuccggc

SEQ ID NO: 2519240 - RNA, 19 nt, Artificial Sequence
  Description of Artificial Sequence: Synthetic oligonucleotide
ugaggcucacgcaugcagg

SEQ ID NO: 2519241 - RNA, 19 nt, Artificial Sequence
  Description of Artificial Sequence: Synthetic oligonucleotide
uccagaucaaagagcaucu

SEQ ID NO: 2519242 - RNA, 19 nt, Artificial Sequence
  Description of Artificial Sequence: Synthetic oligonucleotide
guaagcugacuccagauca

SEQ ID NO: 2519243 - RNA, 19 nt, Artificial Sequence
  Description of Artificial Sequence: Synthetic oligonucleotide
gaucccgugaaacauccug

SEQ ID NO: 2519244 - RNA, 19 nt, Artificial Sequence
  Description of Artificial Sequence: Synthetic oligonucleotide
cauuagcucccguaggucc

SEQ ID NO: 2519245 - RNA, 19 nt, Artificial Sequence
  Description of Artificial Sequence: Synthetic oligonucleotide
agcuacagcacagagaccu

SEQ ID NO: 2519246 - RNA, 19 nt, Artificial Sequence
  Description of Artificial Sequence: Synthetic oligonucleotide
uguacaacuuuacuuccuc

SEQ ID NO: 2519247 - RNA, 19 nt, Artificial Sequence
  Description of Artificial Sequence: Synthetic oligonucleotide
gagauugcccuugucaucc

SEQ ID NO: 2519248 - RNA, 19 nt, Artificial Sequence
  Description of Artificial Sequence: Synthetic oligonucleotide
uccuugauagugauggguc

SEQ ID NO: 2519249 - RNA, 19 nt, Artificial Sequence
  Description of Artificial Sequence: Synthetic oligonucleotide
aucaaagagcaucuggcga

SEQ ID NO: 2519250 - RNA, 19 nt, Artificial Sequence
  Description of Artificial Sequence: Synthetic oligonucleotide
guugucauacuucucccgc

SEQ ID NO: 2519251 - RNA, 19 nt, Artificial Sequence
  Description of Artificial Sequence: Synthetic oligonucleotide
gaugggucggucuuccuug

SEQ ID NO: 2519252 - RNA, 19 nt, Artificial Sequence
  Description of Artificial Sequence: Synthetic oligonucleotide
ucgaaaggcagcuuuguau

SEQ ID NO: 2519253 - RNA, 19 nt, Artificial Sequence
  Description of Artificial Sequence: Synthetic oligonucleotide
uaaaggcauuguaagcuga

SEQ ID NO: 2519254 - RNA, 19 nt, Artificial Sequence
  Description of Artificial Sequence: Synthetic oligonucleotide
ucugcaauacagcgguuga

SEQ ID NO: 2519255 - RNA, 19 nt, Artificial Sequence
  Description of Artificial Sequence: Synthetic oligonucleotide
guaugcuuucuccagugcc

SEQ ID NO: 2519256 - RNA, 19 nt, Artificial Sequence
  Description of Artificial Sequence: Synthetic oligonucleotide
uugagauugcccuugucau

SEQ ID NO: 2519257 - RNA, 19 nt, Artificial Sequence
  Description of Artificial Sequence: Synthetic oligonucleotide
aaugaagagcgaaacuaca

SEQ ID NO: 2519258 - RNA, 19 nt, Artificial Sequence
  Description of Artificial Sequence: Synthetic oligonucleotide
ugcggcaaaauucaucaau

SEQ ID NO: 2519259 - RNA, 19 nt, Artificial Sequence
  Description of Artificial Sequence: Synthetic oligonucleotide
uauccauuauuguaaugaa

SEQ ID NO: 2519260 - RNA, 19 nt, Artificial Sequence
  Description of Artificial Sequence: Synthetic oligonucleotide
uuuggcggcccucaaaguc

SEQ ID NO: 2519261 - RNA, 19 nt, Artificial Sequence
  Description of Artificial Sequence: Synthetic oligonucleotide
gaagagcgaaacuacaucu

SEQ ID NO: 2519262 - RNA, 19 nt, Artificial Sequence
  Description of Artificial Sequence: Synthetic oligonucleotide
uguaagcugacuccagauc

SEQ ID NO: 2519263 - RNA, 19 nt, Artificial Sequence
  Description of Artificial Sequence: Synthetic oligonucleotide
auaaagcuccggcuuguuc

SEQ ID NO: 2519264 - RNA, 19 nt, Artificial Sequence
  Description of Artificial Sequence: Synthetic oligonucleotide
gcaggaagcgguuaaaggc

SEQ ID NO: 2519265 - RNA, 19 nt, Artificial Sequence
  Description of Artificial Sequence: Synthetic oligonucleotide
aacuuuacuuccucauaaa

SEQ ID NO: 2519266 - RNA, 19 nt, Artificial Sequence
  Description of Artificial Sequence: Synthetic oligonucleotide
caucuggcgaaccugggag

SEQ ID NO: 2519267 - RNA, 19 nt, Artificial Sequence
  Description of Artificial Sequence: Synthetic oligonucleotide
aagagcaucuggcgaaccu

SEQ ID NO: 2519268 - RNA, 19 nt, Artificial Sequence
  Description of Artificial Sequence: Synthetic oligonucleotide
ugcaauacagcgguugaga

SEQ ID NO: 2519269 - RNA, 19 nt, Artificial Sequence
  Description of Artificial Sequence: Synthetic oligonucleotide
auuguaagcugacuccaga

SEQ ID NO: 2519270 - RNA, 19 nt, Artificial Sequence
  Description of Artificial Sequence: Synthetic oligonucleotide
uuggcggcccucaaagucc

SEQ ID NO: 2519271 - RNA, 19 nt, Artificial Sequence
  Description of Artificial Sequence: Synthetic oligonucleotide
uguaugcuuucuccagugc

SEQ ID NO: 2519272 - RNA, 19 nt, Artificial Sequence
  Description of Artificial Sequence: Synthetic oligonucleotide
cuugauagugaugggucgg

SEQ ID NO: 2519273 - RNA, 19 nt, Artificial Sequence
  Description of Artificial Sequence: Synthetic oligonucleotide
uugaaccugucgaaaggca

SEQ ID NO: 2519274 - RNA, 19 nt, Artificial Sequence
  Description of Artificial Sequence: Synthetic oligonucleotide
ucagaggccgacauuccac

SEQ ID NO: 2519275 - RNA, 19 nt, Artificial Sequence
  Description of Artificial Sequence: Synthetic oligonucleotide
uuauuguaaugaagagcga

SEQ ID NO: 2519276 - RNA, 19 nt, Artificial Sequence
  Description of Artificial Sequence: Synthetic oligonucleotide
agugaugggucggucuucc

SEQ ID NO: 2519277 - RNA, 19 nt, Artificial Sequence
  Description of Artificial Sequence: Synthetic oligonucleotide
auuaggggugacacagucc

SEQ ID NO: 2519278 - RNA, 19 nt, Artificial Sequence
  Description of Artificial Sequence: Synthetic oligonucleotide
uuguacaacuuuacuuccu

SEQ ID NO: 2519279 - RNA, 19 nt, Artificial Sequence
  Description of Artificial Sequence: Synthetic oligonucleotide
ucaauggagcugaucucug

SEQ ID NO: 2519280 - RNA, 19 nt, Artificial Sequence
  Description of Artificial Sequence: Synthetic oligonucleotide
uccucuccauggcaagugg

SEQ ID NO: 2519281 - RNA, 19 nt, Artificial Sequence
  Description of Artificial Sequence: Synthetic oligonucleotide
uugauccucuccauggcaa

SEQ ID NO: 2519282 - RNA, 19 nt, Artificial Sequence
  Description of Artificial Sequence: Synthetic oligonucleotide
accgcaaacagcucugcca

SEQ ID NO: 2519283 - RNA, 19 nt, Artificial Sequence
  Description of Artificial Sequence: Synthetic oligonucleotide
ggcugaaucucguccaugg

SEQ ID NO: 2519284 - RNA, 19 nt, Artificial Sequence
  Description of Artificial Sequence: Synthetic oligonucleotide
gaacuugcggcaaaauuca

SEQ ID NO: 2519285 - RNA, 19 nt, Artificial Sequence
  Description of Artificial Sequence: Synthetic oligonucleotide
ugccauguugucauacuuc

SEQ ID NO: 2519286 - RNA, 19 nt, Artificial Sequence
  Description of Artificial Sequence: Synthetic oligonucleotide
ggcagcuuuguauuggacc

SEQ ID NO: 2519287 - RNA, 19 nt, Artificial Sequence
  Description of Artificial Sequence: Synthetic oligonucleotide
agcgaaacuacaucugcaa

SEQ ID NO: 2519288 - RNA, 19 nt, Artificial Sequence
  Description of Artificial Sequence: Synthetic oligonucleotide
ggcauuguaagcugacucc

SEQ ID NO: 2519289 - RNA, 19 nt, Artificial Sequence
  Description of Artificial Sequence: Synthetic oligonucleotide
aagagcgaaacuacaucug

SEQ ID NO: 2519290 - RNA, 19 nt, Artificial Sequence
  Description of Artificial Sequence: Synthetic oligonucleotide
ggugacacaguccuugaug

SEQ ID NO: 2519291 - RNA, 19 nt, Artificial Sequence
  Description of Artificial Sequence: Synthetic oligonucleotide
ucguccagcucaucagagg

SEQ ID NO: 2519292 - RNA, 19 nt, Artificial Sequence
  Description of Artificial Sequence: Synthetic oligonucleotide
uuguaagcugacuccagau

SEQ ID NO: 2519293 - RNA, 19 nt, Artificial Sequence
  Description of Artificial Sequence: Synthetic oligonucleotide
acagcgguugagauugccc

SEQ ID NO: 2519294 - RNA, 19 nt, Artificial Sequence
  Description of Artificial Sequence: Synthetic oligonucleotide
cucccgagcauucuuguac

SEQ ID NO: 2519295 - RNA, 19 nt, Artificial Sequence
  Description of Artificial Sequence: Synthetic oligonucleotide
cucauaaagcuccggcuug

SEQ ID NO: 2519296 - RNA, 19 nt, Artificial Sequence
  Description of Artificial Sequence: Synthetic oligonucleotide
ggucggucuuccuugaucc

SEQ ID NO: 2519297 - RNA, 19 nt, Artificial Sequence
  Description of Artificial Sequence: Synthetic oligonucleotide
cuuauccauuauuguaaug

SEQ ID NO: 2519298 - RNA, 19 nt, Artificial Sequence
  Description of Artificial Sequence: Synthetic oligonucleotide
ucagagucugcagccauug

SEQ ID NO: 2519299 - RNA, 19 nt, Artificial Sequence
  Description of Artificial Sequence: Synthetic oligonucleotide
auggcgcggaucuccagac

SEQ ID NO: 2519300 - RNA, 19 nt, Artificial Sequence
  Description of Artificial Sequence: Synthetic oligonucleotide
caaugccagguguagccgg

SEQ ID NO: 2519301 - RNA, 19 nt, Artificial Sequence
  Description of Artificial Sequence: Synthetic oligonucleotide
agcuuauccauuauuguaa

SEQ ID NO: 2519302 - RNA, 19 nt, Artificial Sequence
  Description of Artificial Sequence: Synthetic oligonucleotide
auccauuauuguaaugaag

SEQ ID NO: 2519303 - RNA, 19 nt, Artificial Sequence
  Description of Artificial Sequence: Synthetic oligonucleotide
cauuaggggugacacaguc

SEQ ID NO: 2519304 - RNA, 19 nt, Artificial Sequence
  Description of Artificial Sequence: Synthetic oligonucleotide
gcaguguacucauuagggg

SEQ ID NO: 2519305 - RNA, 19 nt, Artificial Sequence
  Description of Artificial Sequence: Synthetic oligonucleotide
aaugccagguguagccggg

SEQ ID NO: 2519306 - RNA, 19 nt, Artificial Sequence
  Description of Artificial Sequence: Synthetic oligonucleotide
cauuguaagcugacuccag

SEQ ID NO: 2519307 - RNA, 19 nt, Artificial Sequence
  Description of Artificial Sequence: Synthetic oligonucleotide
gaaucucguccauggcgcg

SEQ ID NO: 2519308 - RNA, 19 nt, Artificial Sequence
  Description of Artificial Sequence: Synthetic oligonucleotide
ucacgcaugcaggaagcgg

SEQ ID NO: 2519309 - RNA, 19 nt, Artificial Sequence
  Description of Artificial Sequence: Synthetic oligonucleotide
gaaccugucgaaaggcagc

SEQ ID NO: 2519310 - RNA, 19 nt, Artificial Sequence
  Description of Artificial Sequence: Synthetic oligonucleotide
aguguacucauuaggggug

SEQ ID NO: 2519311 - RNA, 19 nt, Artificial Sequence
  Description of Artificial Sequence: Synthetic oligonucleotide
uccggcuuguucccagggg

SEQ ID NO: 2519312 - RNA, 19 nt, Artificial Sequence
  Description of Artificial Sequence: Synthetic oligonucleotide
uuacuuccucauaaagcuc

SEQ ID NO: 2519313 - RNA, 19 nt, Artificial Sequence
  Description of Artificial Sequence: Synthetic oligonucleotide
uggagcaugcugcagugua

SEQ ID NO: 2519314 - RNA, 19 nt, Artificial Sequence
  Description of Artificial Sequence: Synthetic oligonucleotide
auuguaaugaagagcgaaa

SEQ ID NO: 2519315 - RNA, 19 nt, Artificial Sequence
  Description of Artificial Sequence: Synthetic oligonucleotide
caacuuuacuuccucauaa

SEQ ID NO: 2519316 - RNA, 19 nt, Artificial Sequence
  Description of Artificial Sequence: Synthetic oligonucleotide
agcuuuguauuggaccagg

SEQ ID NO: 2519317 - RNA, 19 nt, Artificial Sequence
  Description of Artificial Sequence: Synthetic oligonucleotide
acucccgccucggugaggc

SEQ ID NO: 2519318 - RNA, 19 nt, Artificial Sequence
  Description of Artificial Sequence: Synthetic oligonucleotide
aaucucguccauggcgcgg

SEQ ID NO: 2519319 - RNA, 19 nt, Artificial Sequence
  Description of Artificial Sequence: Synthetic oligonucleotide
gugaggcucacgcaugcag

SEQ ID NO: 2519320 - RNA, 19 nt, Artificial Sequence
  Description of Artificial Sequence: Synthetic oligonucleotide
acuugcggcaaaauucauc

SEQ ID NO: 2519321 - RNA, 19 nt, Artificial Sequence
  Description of Artificial Sequence: Synthetic oligonucleotide
ccgugaaacauccugcagg

SEQ ID NO: 2519322 - RNA, 19 nt, Artificial Sequence
  Description of Artificial Sequence: Synthetic oligonucleotide
aucugcaauacagcgguug

SEQ ID NO: 2519323 - RNA, 19 nt, Artificial Sequence
  Description of Artificial Sequence: Synthetic oligonucleotide
auggcaagugggcagucca

SEQ ID NO: 2519324 - RNA, 19 nt, Artificial Sequence
  Description of Artificial Sequence: Synthetic oligonucleotide
gaccuaggggcguuuggag

SEQ ID NO: 2519325 - RNA, 19 nt, Artificial Sequence
  Description of Artificial Sequence: Synthetic oligonucleotide
uggcagcuacagcacagag

SEQ ID NO: 2519326 - RNA, 19 nt, Artificial Sequence
  Description of Artificial Sequence: Synthetic oligonucleotide
ccauuauuguaaugaagag

SEQ ID NO: 2519327 - RNA, 19 nt, Artificial Sequence
  Description of Artificial Sequence: Synthetic oligonucleotide
uaagcugacuccagaucaa

SEQ ID NO: 2519328 - RNA, 19 nt, Artificial Sequence
  Description of Artificial Sequence: Synthetic oligonucleotide
guccagucugaacuugcgg

SEQ ID NO: 2519329 - RNA, 19 nt, Artificial Sequence
  Description of Artificial Sequence: Synthetic oligonucleotide
guucccaggggcuccaaug

SEQ ID NO: 2519330 - RNA, 19 nt, Artificial Sequence
  Description of Artificial Sequence: Synthetic oligonucleotide
acaacuuuacuuccucaua

SEQ ID NO: 2519331 - RNA, 19 nt, Artificial Sequence
  Description of Artificial Sequence: Synthetic oligonucleotide
gagaccuaggggcguuugg

SEQ ID NO: 2519332 - RNA, 19 nt, Artificial Sequence
  Description of Artificial Sequence: Synthetic oligonucleotide
auagugaugggucggucuu

SEQ ID NO: 2519333 - RNA, 19 nt, Artificial Sequence
  Description of Artificial Sequence: Synthetic oligonucleotide
caggaagcgguuaaaggca

SEQ ID NO: 2519334 - RNA, 19 nt, Artificial Sequence
  Description of Artificial Sequence: Synthetic oligonucleotide
cauuggcugacuguuuggc

SEQ ID NO: 2519335 - RNA, 19 nt, Artificial Sequence
  Description of Artificial Sequence: Synthetic oligonucleotide
gauagugaugggucggucu

SEQ ID NO: 2519336 - RNA, 19 nt, Artificial Sequence
  Description of Artificial Sequence: Synthetic oligonucleotide
ugagauugcccuugucauc

SEQ ID NO: 2519337 - RNA, 19 nt, Artificial Sequence
  Description of Artificial Sequence: Synthetic oligonucleotide
ucccgagcauucuuguaca

SEQ ID NO: 2519338 - RNA, 19 nt, Artificial Sequence
  Description of Artificial Sequence: Synthetic oligonucleotide
auugucuucaccaccgcaa

SEQ ID NO: 2519339 - RNA, 19 nt, Artificial Sequence
  Description of Artificial Sequence: Synthetic oligonucleotide
aaccugucgaaaggcagcu

SEQ ID NO: 2519340 - RNA, 19 nt, Artificial Sequence
  Description of Artificial Sequence: Synthetic oligonucleotide
cugggagucguccagcuca

SEQ ID NO: 2519341 - RNA, 19 nt, Artificial Sequence
  Description of Artificial Sequence: Synthetic oligonucleotide
ugucauccuugauagugau

SEQ ID NO: 2519342 - RNA, 19 nt, Artificial Sequence
  Description of Artificial Sequence: Synthetic oligonucleotide
agcgguuaaaggcauugua

SEQ ID NO: 2519343 - RNA, 19 nt, Artificial Sequence
  Description of Artificial Sequence: Synthetic oligonucleotide
aggccgacauuccacucag

SEQ ID NO: 2519344 - RNA, 19 nt, Artificial Sequence
  Description of Artificial Sequence: Synthetic oligonucleotide
gccgacauuccacucagag

SEQ ID NO: 2519345 - RNA, 19 nt, Artificial Sequence
  Description of Artificial Sequence: Synthetic oligonucleotide
ugaugggucggucuuccuu

SEQ ID NO: 2519346 - RNA, 19 nt, Artificial Sequence
  Description of Artificial Sequence: Synthetic oligonucleotide
caucaauggagcugaucuc

SEQ ID NO: 2519347 - RNA, 19 nt, Artificial Sequence
  Description of Artificial Sequence: Synthetic oligonucleotide
cauccuugauagugauggg

SEQ ID NO: 2519348 - RNA, 19 nt, Artificial Sequence
  Description of Artificial Sequence: Synthetic oligonucleotide
cuucaccaccgcaaacagc

SEQ ID NO: 2519349 - RNA, 19 nt, Artificial Sequence
  Description of Artificial Sequence: Synthetic oligonucleotide
uggcaagugggcaguccag

SEQ ID NO: 2519350 - RNA, 19 nt, Artificial Sequence
  Description of Artificial Sequence: Synthetic oligonucleotide
uggcggcccucaaaguccg

SEQ ID NO: 2519351 - RNA, 19 nt, Artificial Sequence
  Description of Artificial Sequence: Synthetic oligonucleotide
gauguaugcuuucuccagu

SEQ ID NO: 2519352 - RNA, 19 nt, Artificial Sequence
  Description of Artificial Sequence: Synthetic oligonucleotide
aggggugacacaguccuug

SEQ ID NO: 2519353 - RNA, 19 nt, Artificial Sequence
  Description of Artificial Sequence: Synthetic oligonucleotide
ccuugauagugaugggucg

SEQ ID NO: 2519354 - RNA, 19 nt, Artificial Sequence
  Description of Artificial Sequence: Synthetic oligonucleotide
agcaugcugcaguguacuc

SEQ ID NO: 2519355 - RNA, 19 nt, Artificial Sequence
  Description of Artificial Sequence: Synthetic oligonucleotide
uggcugacuguuuggcggc

SEQ ID NO: 2519356 - RNA, 19 nt, Artificial Sequence
  Description of Artificial Sequence: Synthetic oligonucleotide
ucauaaagcuccggcuugu

SEQ ID NO: 2519357 - RNA, 19 nt, Artificial Sequence
  Description of Artificial Sequence: Synthetic oligonucleotide
cugucgaaaggcagcuuug

SEQ ID NO: 2519358 - RNA, 19 nt, Artificial Sequence
  Description of Artificial Sequence: Synthetic oligonucleotide
uguagccgggaucccguga

SEQ ID NO: 2519359 - RNA, 19 nt, Artificial Sequence
  Description of Artificial Sequence: Synthetic oligonucleotide
guacaacuuuacuuccuca

SEQ ID NO: 2519360 - RNA, 19 nt, Artificial Sequence
  Description of Artificial Sequence: Synthetic oligonucleotide
ugucgaaaggcagcuuugu

SEQ ID NO: 2519361 - RNA, 19 nt, Artificial Sequence
  Description of Artificial Sequence: Synthetic oligonucleotide
uugauagugaugggucggu

SEQ ID NO: 2519362 - RNA, 19 nt, Artificial Sequence
  Description of Artificial Sequence: Synthetic oligonucleotide
cagcuuauccauuauugua

SEQ ID NO: 2519363 - RNA, 19 nt, Artificial Sequence
  Description of Artificial Sequence: Synthetic oligonucleotide
uccuugauguaugcuuucu

SEQ ID NO: 2519364 - RNA, 19 nt, Artificial Sequence
  Description of Artificial Sequence: Synthetic oligonucleotide
cugagccuugaaccugucg

SEQ ID NO: 2519365 - RNA, 19 nt, Artificial Sequence
  Description of Artificial Sequence: Synthetic oligonucleotide
cgugaaacauccugcaggc

SEQ ID NO: 2519366 - RNA, 19 nt, Artificial Sequence
  Description of Artificial Sequence: Synthetic oligonucleotide
aguccagucugaacuugcg

SEQ ID NO: 2519367 - RNA, 19 nt, Artificial Sequence
  Description of Artificial Sequence: Synthetic oligonucleotide
gcugcaguguacucauuag

SEQ ID NO: 2519368 - RNA, 19 nt, Artificial Sequence
  Description of Artificial Sequence: Synthetic oligonucleotide
cgguuaaaggcauuguaag

SEQ ID NO: 2519369 - RNA, 19 nt, Artificial Sequence
  Description of Artificial Sequence: Synthetic oligonucleotide
uuagcucccguagguccgg

SEQ ID NO: 2519370 - RNA, 19 nt, Artificial Sequence
  Description of Artificial Sequence: Synthetic oligonucleotide
caucagucucacucccgcc

SEQ ID NO: 2519371 - RNA, 19 nt, Artificial Sequence
  Description of Artificial Sequence: Synthetic oligonucleotide
uguauuggaccaggagccu

SEQ ID NO: 2519372 - RNA, 19 nt, Artificial Sequence
  Description of Artificial Sequence: Synthetic oligonucleotide
caguguacucauuaggggu

SEQ ID NO: 2519373 - RNA, 19 nt, Artificial Sequence
  Description of Artificial Sequence: Synthetic oligonucleotide
gaggcucacgcaugcagga

SEQ ID NO: 2519374 - RNA, 19 nt, Artificial Sequence
  Description of Artificial Sequence: Synthetic oligonucleotide
cuugauccucuccauggca

SEQ ID NO: 2519375 - RNA, 19 nt, Artificial Sequence
  Description of Artificial Sequence: Synthetic oligonucleotide
ccuaggggcguuuggaggc

SEQ ID NO: 2519376 - RNA, 19 nt, Artificial Sequence
  Description of Artificial Sequence: Synthetic oligonucleotide
gccuugaaccugucgaaag

SEQ ID NO: 2519377 - RNA, 19 nt, Artificial Sequence
  Description of Artificial Sequence: Synthetic oligonucleotide
ggugcauggucuccauuag

SEQ ID NO: 2519378 - RNA, 19 nt, Artificial Sequence
  Description of Artificial Sequence: Synthetic oligonucleotide
agccgggaucccgugaaac

SEQ ID NO: 2519379 - RNA, 19 nt, Artificial Sequence
  Description of Artificial Sequence: Synthetic oligonucleotide
gcggcaaaauucaucaaug

SEQ ID NO: 2519380 - RNA, 19 nt, Artificial Sequence
  Description of Artificial Sequence: Synthetic oligonucleotide
aagcgguuaaaggcauugu

SEQ ID NO: 2519381 - RNA, 19 nt, Artificial Sequence
  Description of Artificial Sequence: Synthetic oligonucleotide
gagcgaaacuacaucugca

SEQ ID NO: 2519382 - RNA, 19 nt, Artificial Sequence
  Description of Artificial Sequence: Synthetic oligonucleotide
guauuggaccaggagccug

SEQ ID NO: 2519383 - RNA, 19 nt, Artificial Sequence
  Description of Artificial Sequence: Synthetic oligonucleotide
cgcagcuuauccauuauug

SEQ ID NO: 2519384 - RNA, 19 nt, Artificial Sequence
  Description of Artificial Sequence: Synthetic oligonucleotide
agguguagccgggaucccg

SEQ ID NO: 2519385 - RNA, 19 nt, Artificial Sequence
  Description of Artificial Sequence: Synthetic oligonucleotide
ggcucacgcaugcaggaag

SEQ ID NO: 2519386 - RNA, 19 nt, Artificial Sequence
  Description of Artificial Sequence: Synthetic oligonucleotide
ggcgcggaucuccagacgc

SEQ ID NO: 2519387 - RNA, 19 nt, Artificial Sequence
  Description of Artificial Sequence: Synthetic oligonucleotide
agaccuaggggcguuugga

SEQ ID NO: 2519388 - RNA, 19 nt, Artificial Sequence
  Description of Artificial Sequence: Synthetic oligonucleotide
uacagcgguugagauugcc

SEQ ID NO: 2519389 - RNA, 19 nt, Artificial Sequence
  Description of Artificial Sequence: Synthetic oligonucleotide
ccagguguagccgggaucc

SEQ ID NO: 2519390 - RNA, 19 nt, Artificial Sequence
  Description of Artificial Sequence: Synthetic oligonucleotide
ugggcaguccagucugaac

SEQ ID NO: 2519391 - RNA, 19 nt, Artificial Sequence
  Description of Artificial Sequence: Synthetic oligonucleotide
auacuucucccgcucccga

SEQ ID NO: 2519392 - RNA, 19 nt, Artificial Sequence
  Description of Artificial Sequence: Synthetic oligonucleotide
gacacaguccuugauguau

SEQ ID NO: 2519393 - RNA, 19 nt, Artificial Sequence
  Description of Artificial Sequence: Synthetic oligonucleotide
uggcgcggaucuccagacg

SEQ ID NO: 2519394 - RNA, 19 nt, Artificial Sequence
  Description of Artificial Sequence: Synthetic oligonucleotide
aucuggcgaaccugggagu

SEQ ID NO: 2519395 - RNA, 19 nt, Artificial Sequence
  Description of Artificial Sequence: Synthetic oligonucleotide
gagccuugaaccugucgaa

SEQ ID NO: 2519396 - RNA, 19 nt, Artificial Sequence
  Description of Artificial Sequence: Synthetic oligonucleotide
gucguccagcucaucagag

SEQ ID NO: 2519397 - RNA, 19 nt, Artificial Sequence
  Description of Artificial Sequence: Synthetic oligonucleotide
cugcaauacagcgguugag

SEQ ID NO: 2519398 - RNA, 19 nt, Artificial Sequence
  Description of Artificial Sequence: Synthetic oligonucleotide
aagcugacuccagaucaaa

SEQ ID NO: 2519399 - RNA, 19 nt, Artificial Sequence
  Description of Artificial Sequence: Synthetic oligonucleotide
aguccuugauguaugcuuu

SEQ ID NO: 2519400 - RNA, 19 nt, Artificial Sequence
  Description of Artificial Sequence: Synthetic oligonucleotide
cggcaaaauucaucaaugg

SEQ ID NO: 2519401 - RNA, 19 nt, Artificial Sequence
  Description of Artificial Sequence: Synthetic oligonucleotide
agcuccggcuuguucccag

SEQ ID NO: 2519402 - RNA, 19 nt, Artificial Sequence
  Description of Artificial Sequence: Synthetic oligonucleotide
ucacucccgccucggugag

SEQ ID NO: 2519403 - RNA, 19 nt, Artificial Sequence
  Description of Artificial Sequence: Synthetic oligonucleotide
cucacgcaugcaggaagcg

SEQ ID NO: 2519404 - RNA, 19 nt, Artificial Sequence
  Description of Artificial Sequence: Synthetic oligonucleotide
gagauggcgacagcagcuc

SEQ ID NO: 2519405 - RNA, 19 nt, Artificial Sequence
  Description of Artificial Sequence: Synthetic oligonucleotide
gucuccauuagcucccgua

SEQ ID NO: 2519406 - RNA, 19 nt, Artificial Sequence
  Description of Artificial Sequence: Synthetic oligonucleotide
caccgcaaacagcucugcc

SEQ ID NO: 2519407 - RNA, 19 nt, Artificial Sequence
  Description of Artificial Sequence: Synthetic oligonucleotide
cuccggcuuguucccaggg

SEQ ID NO: 2519408 - RNA, 19 nt, Artificial Sequence
  Description of Artificial Sequence: Synthetic oligonucleotide
ggaccaggagccuggagca

SEQ ID NO: 2519409 - RNA, 19 nt, Artificial Sequence
  Description of Artificial Sequence: Synthetic oligonucleotide
caauggagcugaucucuga

SEQ ID NO: 2519410 - RNA, 19 nt, Artificial Sequence
  Description of Artificial Sequence: Synthetic oligonucleotide
cuccaaugccagguguagc

SEQ ID NO: 2519411 - RNA, 19 nt, Artificial Sequence
  Description of Artificial Sequence: Synthetic oligonucleotide
agucugaacuugcggcaaa

SEQ ID NO: 2519412 - RNA, 19 nt, Artificial Sequence
  Description of Artificial Sequence: Synthetic oligonucleotide
guagccgggaucccgugaa

SEQ ID NO: 2519413 - RNA, 19 nt, Artificial Sequence
  Description of Artificial Sequence: Synthetic oligonucleotide
gucugcagccauuggcuga

SEQ ID NO: 2519414 - RNA, 19 nt, Artificial Sequence
  Description of Artificial Sequence: Synthetic oligonucleotide
cagucucacucccgccucg

SEQ ID NO: 2519415 - RNA, 19 nt, Artificial Sequence
  Description of Artificial Sequence: Synthetic oligonucleotide
ugccugcauugucuucacc

SEQ ID NO: 2519416 - RNA, 19 nt, Artificial Sequence
  Description of Artificial Sequence: Synthetic oligonucleotide
gggaucccgugaaacaucc

SEQ ID NO: 2519417 - RNA, 19 nt, Artificial Sequence
  Description of Artificial Sequence: Synthetic oligonucleotide
agucucacucccgccucgg

SEQ ID NO: 2519418 - RNA, 19 nt, Artificial Sequence
  Description of Artificial Sequence: Synthetic oligonucleotide
cauggcgcggaucuccaga

SEQ ID NO: 2519419 - RNA, 19 nt, Artificial Sequence
  Description of Artificial Sequence: Synthetic oligonucleotide
cacgcaugcaggaagcggu

SEQ ID NO: 2519420 - RNA, 19 nt, Artificial Sequence
  Description of Artificial Sequence: Synthetic oligonucleotide
uguucccaggggcuccaau

SEQ ID NO: 2519421 - RNA, 19 nt, Artificial Sequence
  Description of Artificial Sequence: Synthetic oligonucleotide
uugcggcaaaauucaucaa

SEQ ID NO: 2519422 - RNA, 19 nt, Artificial Sequence
  Description of Artificial Sequence: Synthetic oligonucleotide
guagguccggcugaaucuc

SEQ ID NO: 2519423 - RNA, 19 nt, Artificial Sequence
  Description of Artificial Sequence: Synthetic oligonucleotide
uguacucauuaggggugac

SEQ ID NO: 2519424 - RNA, 19 nt, Artificial Sequence
  Description of Artificial Sequence: Synthetic oligonucleotide
acgcagcuuauccauuauu

SEQ ID NO: 2519425 - RNA, 19 nt, Artificial Sequence
  Description of Artificial Sequence: Synthetic oligonucleotide
uggucuccauuagcucccg

SEQ ID NO: 2519426 - RNA, 19 nt, Artificial Sequence
  Description of Artificial Sequence: Synthetic oligonucleotide
uggcgaaccugggagucgu

SEQ ID NO: 2519427 - RNA, 19 nt, Artificial Sequence
  Description of Artificial Sequence: Synthetic oligonucleotide
ccucuccauggcaaguggg

SEQ ID NO: 2519428 - RNA, 19 nt, Artificial Sequence
  Description of Artificial Sequence: Synthetic oligonucleotide
gcacagagaccuaggggcg

SEQ ID NO: 2519429 - RNA, 19 nt, Artificial Sequence
  Description of Artificial Sequence: Synthetic oligonucleotide
accaccgcaaacagcucug

SEQ ID NO: 2519430 - RNA, 19 nt, Artificial Sequence
  Description of Artificial Sequence: Synthetic oligonucleotide
ggcguuuggaggcccggag

SEQ ID NO: 2519431 - RNA, 19 nt, Artificial Sequence
  Description of Artificial Sequence: Synthetic oligonucleotide
gcugaaucucguccauggc

SEQ ID NO: 2519432 - RNA, 19 nt, Artificial Sequence
  Description of Artificial Sequence: Synthetic oligonucleotide
agagaccuaggggcguuug

SEQ ID NO: 2519433 - RNA, 19 nt, Artificial Sequence
  Description of Artificial Sequence: Synthetic oligonucleotide
gcauuguaagcugacucca

SEQ ID NO: 2519434 - RNA, 19 nt, Artificial Sequence
  Description of Artificial Sequence: Synthetic oligonucleotide
cuggcgaaccugggagucg

SEQ ID NO: 2519435 - RNA, 19 nt, Artificial Sequence
  Description of Artificial Sequence: Synthetic oligonucleotide
augggucggucuuccuuga

SEQ ID NO: 2519436 - RNA, 19 nt, Artificial Sequence
  Description of Artificial Sequence: Synthetic oligonucleotide
ugggagucguccagcucau

SEQ ID NO: 2519437 - RNA, 19 nt, Artificial Sequence
  Description of Artificial Sequence: Synthetic oligonucleotide
ugccagguguagccgggau

SEQ ID NO: 2519438 - RNA, 19 nt, Artificial Sequence
  Description of Artificial Sequence: Synthetic oligonucleotide
cagcuuuguauuggaccag

SEQ ID NO: 2519439 - RNA, 19 nt, Artificial Sequence
  Description of Artificial Sequence: Synthetic oligonucleotide
gaggcccggagauggcgac

SEQ ID NO: 2519440 - RNA, 19 nt, Artificial Sequence
  Description of Artificial Sequence: Synthetic oligonucleotide
cagcgguugagauugcccu

SEQ ID NO: 2519441 - RNA, 19 nt, Artificial Sequence
  Description of Artificial Sequence: Synthetic oligonucleotide
agcgguugagauugcccuu

SEQ ID NO: 2519442 - RNA, 19 nt, Artificial Sequence
  Description of Artificial Sequence: Synthetic oligonucleotide
ucugagccuugaaccuguc

SEQ ID NO: 2519443 - RNA, 19 nt, Artificial Sequence
  Description of Artificial Sequence: Synthetic oligonucleotide
aacuugcggcaaaauucau

SEQ ID NO: 2519444 - RNA, 19 nt, Artificial Sequence
  Description of Artificial Sequence: Synthetic oligonucleotide
gcgguuaaaggcauuguaa

SEQ ID NO: 2519445 - RNA, 19 nt, Artificial Sequence
  Description of Artificial Sequence: Synthetic oligonucleotide
cuaggggcguuuggaggcc

SEQ ID NO: 2519446 - RNA, 19 nt, Artificial Sequence
  Description of Artificial Sequence: Synthetic oligonucleotide
agauugcccuugucauccu

SEQ ID NO: 2519447 - RNA, 19 nt, Artificial Sequence
  Description of Artificial Sequence: Synthetic oligonucleotide
guuuggaggcccggagaug

SEQ ID NO: 2519448 - RNA, 19 nt, Artificial Sequence
  Description of Artificial Sequence: Synthetic oligonucleotide
gucgaaaggcagcuuugua

SEQ ID NO: 2519449 - RNA, 19 nt, Artificial Sequence
  Description of Artificial Sequence: Synthetic oligonucleotide
cugaacuugcggcaaaauu

SEQ ID NO: 2519450 - RNA, 19 nt, Artificial Sequence
  Description of Artificial Sequence: Synthetic oligonucleotide
cagcucaucagaggccgac

SEQ ID NO: 2519451 - RNA, 19 nt, Artificial Sequence
  Description of Artificial Sequence: Synthetic oligonucleotide
cagcuacagcacagagacc

SEQ ID NO: 2519452 - RNA, 19 nt, Artificial Sequence
  Description of Artificial Sequence: Synthetic oligonucleotide
ccuugauguaugcuuucuc

SEQ ID NO: 2519453 - RNA, 19 nt, Artificial Sequence
  Description of Artificial Sequence: Synthetic oligonucleotide
agccuugaaccugucgaaa

SEQ ID NO: 2519454 - RNA, 19 nt, Artificial Sequence
  Description of Artificial Sequence: Synthetic oligonucleotide
auacagcgguugagauugc

SEQ ID NO: 2519455 - RNA, 19 nt, Artificial Sequence
  Description of Artificial Sequence: Synthetic oligonucleotide
uagugaugggucggucuuc

SEQ ID NO: 2519456 - RNA, 19 nt, Artificial Sequence
  Description of Artificial Sequence: Synthetic oligonucleotide
guguacucauuagggguga

SEQ ID NO: 2519457 - RNA, 19 nt, Artificial Sequence
  Description of Artificial Sequence: Synthetic oligonucleotide
agcucaucagaggccgaca

SEQ ID NO: 2519458 - RNA, 19 nt, Artificial Sequence
  Description of Artificial Sequence: Synthetic oligonucleotide
ccuggagcaugcugcagug

SEQ ID NO: 2519459 - RNA, 19 nt, Artificial Sequence
  Description of Artificial Sequence: Synthetic oligonucleotide
cgaaacuacaucugcaaua

SEQ ID NO: 2519460 - RNA, 19 nt, Artificial Sequence
  Description of Artificial Sequence: Synthetic oligonucleotide
caagugggcaguccagucu

SEQ ID NO: 2519461 - RNA, 19 nt, Artificial Sequence
  Description of Artificial Sequence: Synthetic oligonucleotide
ccggagauggcgacagcag

SEQ ID NO: 2519462 - RNA, 19 nt, Artificial Sequence
  Description of Artificial Sequence: Synthetic oligonucleotide
gggucggucuuccuugauc

SEQ ID NO: 2519463 - RNA, 19 nt, Artificial Sequence
  Description of Artificial Sequence: Synthetic oligonucleotide
ccaaugccagguguagccg

SEQ ID NO: 2519464 - RNA, 19 nt, Artificial Sequence
  Description of Artificial Sequence: Synthetic oligonucleotide
gcucacgcaugcaggaagc

SEQ ID NO: 2519465 - RNA, 19 nt, Artificial Sequence
  Description of Artificial Sequence: Synthetic oligonucleotide
guguagccgggaucccgug

SEQ ID NO: 2519466 - RNA, 19 nt, Artificial Sequence
  Description of Artificial Sequence: Synthetic oligonucleotide
auccggugcauggucucca

SEQ ID NO: 2519467 - RNA, 19 nt, Artificial Sequence
  Description of Artificial Sequence: Synthetic oligonucleotide
ucccgccucggugaggcuc

SEQ ID NO: 2519468 - RNA, 19 nt, Artificial Sequence
  Description of Artificial Sequence: Synthetic oligonucleotide
ggcagcuacagcacagaga

SEQ ID NO: 2519469 - RNA, 19 nt, Artificial Sequence
  Description of Artificial Sequence: Synthetic oligonucleotide
gcgguugagauugcccuug

SEQ ID NO: 2519470 - RNA, 19 nt, Artificial Sequence
  Description of Artificial Sequence: Synthetic oligonucleotide
auuggaccaggagccugga

SEQ ID NO: 2519471 - RNA, 19 nt, Artificial Sequence
  Description of Artificial Sequence: Synthetic oligonucleotide
caauacagcgguugagauu

SEQ ID NO: 2519472 - RNA, 19 nt, Artificial Sequence
  Description of Artificial Sequence: Synthetic oligonucleotide
uccggugcauggucuccau

SEQ ID NO: 2519473 - RNA, 19 nt, Artificial Sequence
  Description of Artificial Sequence: Synthetic oligonucleotide
ccguagguccggcugaauc

SEQ ID NO: 2519474 - RNA, 19 nt, Artificial Sequence
  Description of Artificial Sequence: Synthetic oligonucleotide
ugacuguuuggcggcccuc

SEQ ID NO: 2519475 - RNA, 19 nt, Artificial Sequence
  Description of Artificial Sequence: Synthetic oligonucleotide
uagccgggaucccgugaaa

SEQ ID NO: 2519476 - RNA, 19 nt, Artificial Sequence
  Description of Artificial Sequence: Synthetic oligonucleotide
ugggucggucuuccuugau

SEQ ID NO: 2519477 - RNA, 19 nt, Artificial Sequence
  Description of Artificial Sequence: Synthetic oligonucleotide
cccgugaaacauccugcag

SEQ ID NO: 2519478 - RNA, 19 nt, Artificial Sequence
  Description of Artificial Sequence: Synthetic oligonucleotide
gcaauacagcgguugagau

SEQ ID NO: 2519479 - RNA, 19 nt, Artificial Sequence
  Description of Artificial Sequence: Synthetic oligonucleotide
gcuuauccauuauuguaau

SEQ ID NO: 2519480 - RNA, 19 nt, Artificial Sequence
  Description of Artificial Sequence: Synthetic oligonucleotide
cagaggccgacauuccacu

SEQ ID NO: 2519481 - RNA, 19 nt, Artificial Sequence
  Description of Artificial Sequence: Synthetic oligonucleotide
gguugagauugcccuuguc

SEQ ID NO: 2519482 - RNA, 19 nt, Artificial Sequence
  Description of Artificial Sequence: Synthetic oligonucleotide
uaggggugacacaguccuu

SEQ ID NO: 2519483 - RNA, 19 nt, Artificial Sequence
  Description of Artificial Sequence: Synthetic oligonucleotide
ggcccggagauggcgacag

SEQ ID NO: 2519484 - RNA, 19 nt, Artificial Sequence
  Description of Artificial Sequence: Synthetic oligonucleotide
gccgggaucccgugaaaca

SEQ ID NO: 2519485 - RNA, 19 nt, Artificial Sequence
  Description of Artificial Sequence: Synthetic oligonucleotide
gcuccggcuuguucccagg

SEQ ID NO: 2519486 - RNA, 19 nt, Artificial Sequence
  Description of Artificial Sequence: Synthetic oligonucleotide
cucccgcucccgagcauuc

SEQ ID NO: 2519487 - RNA, 19 nt, Artificial Sequence
  Description of Artificial Sequence: Synthetic oligonucleotide
acagagaccuaggggcguu

SEQ ID NO: 2519488 - RNA, 19 nt, Artificial Sequence
  Description of Artificial Sequence: Synthetic oligonucleotide
ggagauggcgacagcagcu

SEQ ID NO: 2519489 - RNA, 19 nt, Artificial Sequence
  Description of Artificial Sequence: Synthetic oligonucleotide
guggcucauccggugcaug

SEQ ID NO: 2519490 - RNA, 19 nt, Artificial Sequence
  Description of Artificial Sequence: Synthetic oligonucleotide
guuuggcggcccucaaagu

SEQ ID NO: 2519491 - RNA, 19 nt, Artificial Sequence
  Description of Artificial Sequence: Synthetic oligonucleotide
aggggcguuuggaggcccg

SEQ ID NO: 2519492 - RNA, 19 nt, Artificial Sequence
  Description of Artificial Sequence: Synthetic oligonucleotide
cuguuuggcggcccucaaa

SEQ ID NO: 2519493 - RNA, 19 nt, Artificial Sequence
  Description of Artificial Sequence: Synthetic oligonucleotide
ccgagcauucuuguacaac

SEQ ID NO: 2519494 - RNA, 19 nt, Artificial Sequence
  Description of Artificial Sequence: Synthetic oligonucleotide
cagucugaacuugcggcaa

SEQ ID NO: 2519495 - RNA, 19 nt, Artificial Sequence
  Description of Artificial Sequence: Synthetic oligonucleotide
ucucguccauggcgcggau

SEQ ID NO: 2519496 - RNA, 19 nt, Artificial Sequence
  Description of Artificial Sequence: Synthetic oligonucleotide
agguccggcugaaucucgu

SEQ ID NO: 2519497 - RNA, 19 nt, Artificial Sequence
  Description of Artificial Sequence: Synthetic oligonucleotide
gcguuuggaggcccggaga

SEQ ID NO: 2519498 - RNA, 19 nt, Artificial Sequence
  Description of Artificial Sequence: Synthetic oligonucleotide
gccagguguagccgggauc

SEQ ID NO: 2519499 - RNA, 19 nt, Artificial Sequence
  Description of Artificial Sequence: Synthetic oligonucleotide
cagguguagccgggauccc

SEQ ID NO: 2519500 - RNA, 19 nt, Artificial Sequence
  Description of Artificial Sequence: Synthetic oligonucleotide
gguccggcugaaucucguc

SEQ ID NO: 2519501 - RNA, 19 nt, Artificial Sequence
  Description of Artificial Sequence: Synthetic oligonucleotide
ccauuagcucccguagguc

SEQ ID NO: 2519502 - RNA, 19 nt, Artificial Sequence
  Description of Artificial Sequence: Synthetic oligonucleotide
ggagcugaucucugagccu

SEQ ID NO: 2519503 - RNA, 19 nt, Artificial Sequence
  Description of Artificial Sequence: Synthetic oligonucleotide
augccagguguagccggga

SEQ ID NO: 2519504 - RNA, 19 nt, Artificial Sequence
  Description of Artificial Sequence: Synthetic oligonucleotide
aggcucacgcaugcaggaa

SEQ ID NO: 2519505 - RNA, 19 nt, Artificial Sequence
  Description of Artificial Sequence: Synthetic oligonucleotide
ggcuuguucccaggggcuc

SEQ ID NO: 2519506 - RNA, 19 nt, Artificial Sequence
  Description of Artificial Sequence: Synthetic oligonucleotide
gucggucuuccuugauccu

SEQ ID NO: 2519507 - RNA, 19 nt, Artificial Sequence
  Description of Artificial Sequence: Synthetic oligonucleotide
ggggcguuuggaggcccgg

SEQ ID NO: 2519508 - RNA, 19 nt, Artificial Sequence
  Description of Artificial Sequence: Synthetic oligonucleotide
gcucaucagaggccgacau

SEQ ID NO: 2519509 - RNA, 19 nt, Artificial Sequence
  Description of Artificial Sequence: Synthetic oligonucleotide
agccauuggcugacuguuu

SEQ ID NO: 2519510 - RNA, 19 nt, Artificial Sequence
  Description of Artificial Sequence: Synthetic oligonucleotide
cguagguccggcugaaucu

SEQ ID NO: 2519511 - RNA, 19 nt, Artificial Sequence
  Description of Artificial Sequence: Synthetic oligonucleotide
cagccauuggcugacuguu

SEQ ID NO: 2519512 - RNA, 19 nt, Artificial Sequence
  Description of Artificial Sequence: Synthetic oligonucleotide
acgcaugcaggaagcgguu

SEQ ID NO: 2519513 - RNA, 19 nt, Artificial Sequence
  Description of Artificial Sequence: Synthetic oligonucleotide
cccggagauggcgacagca

SEQ ID NO: 2519514 - RNA, 19 nt, Artificial Sequence
  Description of Artificial Sequence: Synthetic oligonucleotide
ggcugacuguuuggcggcc

SEQ ID NO: 2519515 - RNA, 19 nt, Artificial Sequence
  Description of Artificial Sequence: Synthetic oligonucleotide
ccgacauuccacucagagu

SEQ ID NO: 2519516 - RNA, 19 nt, Artificial Sequence
  Description of Artificial Sequence: Synthetic oligonucleotide
gguguagccgggaucccgu

SEQ ID NO: 2519517 - RNA, 19 nt, Artificial Sequence
  Description of Artificial Sequence: Synthetic oligonucleotide
ggcuccaaugccaggugua

SEQ ID NO: 2519518 - RNA, 19 nt, Artificial Sequence
  Description of Artificial Sequence: Synthetic oligonucleotide
uuguucccaggggcuccaa

SEQ ID NO: 2519519 - RNA, 19 nt, Artificial Sequence
  Description of Artificial Sequence: Synthetic oligonucleotide
aggcccggagauggcgaca

SEQ ID NO: 2519520 - RNA, 19 nt, Artificial Sequence
  Description of Artificial Sequence: Synthetic oligonucleotide
cgggaucccgugaaacauc

SEQ ID NO: 2519521 - RNA, 19 nt, Artificial Sequence
  Description of Artificial Sequence: Synthetic oligonucleotide
ccaccgcaaacagcucugc

SEQ ID NO: 2519522 - RNA, 19 nt, Artificial Sequence
  Description of Artificial Sequence: Synthetic oligonucleotide
ggcaagugggcaguccagu

SEQ ID NO: 2519523 - RNA, 19 nt, Artificial Sequence
  Description of Artificial Sequence: Synthetic oligonucleotide
accugucgaaaggcagcuu

SEQ ID NO: 2519524 - RNA, 19 nt, Artificial Sequence
  Description of Artificial Sequence: Synthetic oligonucleotide
cacagagaccuaggggcgu

SEQ ID NO: 2519525 - RNA, 19 nt, Artificial Sequence
  Description of Artificial Sequence: Synthetic oligonucleotide
ccgcaaacagcucugccau

SEQ ID NO: 2519526 - RNA, 19 nt, Artificial Sequence
  Description of Artificial Sequence: Synthetic oligonucleotide
gugaugggucggucuuccu

SEQ ID NO: 2519527 - RNA, 19 nt, Artificial Sequence
  Description of Artificial Sequence: Synthetic oligonucleotide
cagacgcagcuuauccauu

SEQ ID NO: 2519528 - RNA, 19 nt, Artificial Sequence
  Description of Artificial Sequence: Synthetic oligonucleotide
gucucacucccgccucggu

SEQ ID NO: 2519529 - RNA, 19 nt, Artificial Sequence
  Description of Artificial Sequence: Synthetic oligonucleotide
cgcaaacagcucugccaug

SEQ ID NO: 2519530 - RNA, 19 nt, Artificial Sequence
  Description of Artificial Sequence: Synthetic oligonucleotide
gcucccgagcauucuugua

SEQ ID NO: 2519531 - RNA, 19 nt, Artificial Sequence
  Description of Artificial Sequence: Synthetic oligonucleotide
gggugacacaguccuugau

SEQ ID NO: 2519532 - RNA, 19 nt, Artificial Sequence
  Description of Artificial Sequence: Synthetic oligonucleotide
gcuacagcacagagaccua

SEQ ID NO: 2519533 - RNA, 19 nt, Artificial Sequence
  Description of Artificial Sequence: Synthetic oligonucleotide
gggcguuuggaggcccgga

SEQ ID NO: 2519534 - RNA, 19 nt, Artificial Sequence
  Description of Artificial Sequence: Synthetic oligonucleotide
cguuuggaggcccggagau

SEQ ID NO: 2519535 - RNA, 19 nt, Artificial Sequence
  Description of Artificial Sequence: Synthetic oligonucleotide
cccgagcauucuuguacaa

SEQ ID NO: 2519536 - RNA, 19 nt, Artificial Sequence
  Description of Artificial Sequence: Synthetic oligonucleotide
ccagcucaucagaggccga

SEQ ID NO: 2519537 - RNA, 19 nt, Artificial Sequence
  Description of Artificial Sequence: Synthetic oligonucleotide
gcccggagauggcgacagc

SEQ ID NO: 2519538 - RNA, 19 nt, Artificial Sequence
  Description of Artificial Sequence: Synthetic oligonucleotide
cggcugaaucucguccaug

SEQ ID NO: 2519539 - RNA, 19 nt, Artificial Sequence
  Description of Artificial Sequence: Synthetic oligonucleotide
ccgggaucccgugaaacau

SEQ ID NO: 2519540 - RNA, 19 nt, Artificial Sequence
  Description of Artificial Sequence: Synthetic oligonucleotide
gguggcucauccggugcau

SEQ ID NO: 2519541 - RNA, 19 nt, Artificial Sequence
  Description of Artificial Sequence: Synthetic oligonucleotide
ggcgaaccugggagucguc

SEQ ID NO: 2519542 - RNA, 19 nt, Artificial Sequence
  Description of Artificial Sequence: Synthetic oligonucleotide
cagagaccuaggggcguuu

SEQ ID NO: 2519543 - RNA, 19 nt, Artificial Sequence
  Description of Artificial Sequence: Synthetic oligonucleotide
cguccauggcgcggaucuc

SEQ ID NO: 2519544 - RNA, 19 nt, Artificial Sequence
  Description of Artificial Sequence: Synthetic oligonucleotide
ccggcugaaucucguccau

SEQ ID NO: 2519545 - RNA, 19 nt, Artificial Sequence
  Description of Artificial Sequence: Synthetic oligonucleotide
cgcaugcaggaagcgguua

SEQ ID NO: 2519546 - RNA, 19 nt, Artificial Sequence
  Description of Artificial Sequence: Synthetic oligonucleotide
cucccgccucggugaggcu

SEQ ID NO: 2519547 - RNA, 19 nt, Artificial Sequence
  Description of Artificial Sequence: Synthetic oligonucleotide
ccggugcauggucuccauu

SEQ ID NO: 2519548 - RNA, 19 nt, Artificial Sequence
  Description of Artificial Sequence: Synthetic oligonucleotide
ccgccucggugaggcucac

SEQ ID NO: 2519549 - RNA, 19 nt, Artificial Sequence
  Description of Artificial Sequence: Synthetic oligonucleotide
cccguagguccggcugaau

SEQ ID NO: 2519550 - RNA, 19 nt, Artificial Sequence
  Description of Artificial Sequence: Synthetic oligonucleotide
acuaauacuaacuaaaagg

SEQ ID NO: 2519551 - RNA, 19 nt, Artificial Sequence
  Description of Artificial Sequence: Synthetic oligonucleotide
aaugcuaggagucauaguc

SEQ ID NO: 2519552 - RNA, 19 nt, Artificial Sequence
  Description of Artificial Sequence: Synthetic oligonucleotide
aauacuaacuaaaagggag

SEQ ID NO: 2519553 - RNA, 19 nt, Artificial Sequence
  Description of Artificial Sequence: Synthetic oligonucleotide
uucuccaucaguaucagug

SEQ ID NO: 2519554 - RNA, 19 nt, Artificial Sequence
  Description of Artificial Sequence: Synthetic oligonucleotide
caagaagucaaacugcugc

SEQ ID NO: 2519555 - RNA, 19 nt, Artificial Sequence
  Description of Artificial Sequence: Synthetic oligonucleotide
caagccuucuucaacaggg

SEQ ID NO: 2519556 - RNA, 19 nt, Artificial Sequence
  Description of Artificial Sequence: Synthetic oligonucleotide
acuaaaagggaguguggcc

SEQ ID NO: 2519557 - RNA, 19 nt, Artificial Sequence
  Description of Artificial Sequence: Synthetic oligonucleotide
aguaucaguguccucggac

SEQ ID NO: 2519558 - RNA, 19 nt, Artificial Sequence
  Description of Artificial Sequence: Synthetic oligonucleotide
uaauacuaacuaaaaggga

SEQ ID NO: 2519559 - RNA, 19 nt, Artificial Sequence
  Description of Artificial Sequence: Synthetic oligonucleotide
ucuuucaagaagucaaacu

SEQ ID NO: 2519560 - RNA, 19 nt, Artificial Sequence
  Description of Artificial Sequence: Synthetic oligonucleotide
cuaacuaaaagggagugug

SEQ ID NO: 2519561 - RNA, 19 nt, Artificial Sequence
  Description of Artificial Sequence: Synthetic oligonucleotide
uucaagaagucaaacugcu

SEQ ID NO: 2519562 - RNA, 19 nt, Artificial Sequence
  Description of Artificial Sequence: Synthetic oligonucleotide
uucccaaucucuucguccg

SEQ ID NO: 2519563 - RNA, 19 nt, Artificial Sequence
  Description of Artificial Sequence: Synthetic oligonucleotide
uuuggcuuuacuuccggug

SEQ ID NO: 2519564 - RNA, 19 nt, Artificial Sequence
  Description of Artificial Sequence: Synthetic oligonucleotide
ucaugguuuuggcauuucg

SEQ ID NO: 2519565 - RNA, 19 nt, Artificial Sequence
  Description of Artificial Sequence: Synthetic oligonucleotide
ugucuuuggcuuuacuucc

SEQ ID NO: 2519566 - RNA, 19 nt, Artificial Sequence
  Description of Artificial Sequence: Synthetic oligonucleotide
uuggcuuuacuuccggugc

SEQ ID NO: 2519567 - RNA, 19 nt, Artificial Sequence
  Description of Artificial Sequence: Synthetic oligonucleotide
uugucuuuggcuuuacuuc

SEQ ID NO: 2519568 - RNA, 19 nt, Artificial Sequence
  Description of Artificial Sequence: Synthetic oligonucleotide
cuuguccccauccaugugg

SEQ ID NO: 2519569 - RNA, 19 nt, Artificial Sequence
  Description of Artificial Sequence: Synthetic oligonucleotide
aaaggcagaggagagguga

SEQ ID NO: 2519570 - RNA, 19 nt, Artificial Sequence
  Description of Artificial Sequence: Synthetic oligonucleotide
ucgagacugggucaccugg

SEQ ID NO: 2519571 - RNA, 19 nt, Artificial Sequence
  Description of Artificial Sequence: Synthetic oligonucleotide
ugaaugcuaggagucauag

SEQ ID NO: 2519572 - RNA, 19 nt, Artificial Sequence
  Description of Artificial Sequence: Synthetic oligonucleotide
uuuggcauuucgagacugg

SEQ ID NO: 2519573 - RNA, 19 nt, Artificial Sequence
  Description of Artificial Sequence: Synthetic oligonucleotide
ucuugauccgcgccggcgg

SEQ ID NO: 2519574 - RNA, 19 nt, Artificial Sequence
  Description of Artificial Sequence: Synthetic oligonucleotide
ucguccgucugcaugaucu

SEQ ID NO: 2519575 - RNA, 19 nt, Artificial Sequence
  Description of Artificial Sequence: Synthetic oligonucleotide
cugagucugucccagacag

SEQ ID NO: 2519576 - RNA, 19 nt, Artificial Sequence
  Description of Artificial Sequence: Synthetic oligonucleotide
ucaguaucaguguccucgg

SEQ ID NO: 2519577 - RNA, 19 nt, Artificial Sequence
  Description of Artificial Sequence: Synthetic oligonucleotide
ucuucguccgucugcauga

SEQ ID NO: 2519578 - RNA, 19 nt, Artificial Sequence
  Description of Artificial Sequence: Synthetic oligonucleotide
gagaugaugacaggcacug

SEQ ID NO: 2519579 - RNA, 19 nt, Artificial Sequence
  Description of Artificial Sequence: Synthetic oligonucleotide
aagaguucgagcgcccgcg

SEQ ID NO: 2519580 - RNA, 19 nt, Artificial Sequence
  Description of Artificial Sequence: Synthetic oligonucleotide
agaggugaagggcaugaag

SEQ ID NO: 2519581 - RNA, 19 nt, Artificial Sequence
  Description of Artificial Sequence: Synthetic oligonucleotide
agagcaacuaauacuaacu

SEQ ID NO: 2519582 - RNA, 19 nt, Artificial Sequence
  Description of Artificial Sequence: Synthetic oligonucleotide
uacuaacuaaaagggagug

SEQ ID NO: 2519583 - RNA, 19 nt, Artificial Sequence
  Description of Artificial Sequence: Synthetic oligonucleotide
aggacccuuguccccaucc

SEQ ID NO: 2519584 - RNA, 19 nt, Artificial Sequence
  Description of Artificial Sequence: Synthetic oligonucleotide
gacugggucaccuggcaag

SEQ ID NO: 2519585 - RNA, 19 nt, Artificial Sequence
  Description of Artificial Sequence: Synthetic oligonucleotide
ugcaugucaggcacggaug

SEQ ID NO: 2519586 - RNA, 19 nt, Artificial Sequence
  Description of Artificial Sequence: Synthetic oligonucleotide
auccaugugguugucuucg

SEQ ID NO: 2519587 - RNA, 19 nt, Artificial Sequence
  Description of Artificial Sequence: Synthetic oligonucleotide
uugcaugucaggcacggau

SEQ ID NO: 2519588 - RNA, 19 nt, Artificial Sequence
  Description of Artificial Sequence: Synthetic oligonucleotide
gacguggucaugguuuugg

SEQ ID NO: 2519589 - RNA, 19 nt, Artificial Sequence
  Description of Artificial Sequence: Synthetic oligonucleotide
cagagcaacuaauacuaac

SEQ ID NO: 2519590 - RNA, 19 nt, Artificial Sequence
  Description of Artificial Sequence: Synthetic oligonucleotide
uucuugcuuggcaucucgg

SEQ ID NO: 2519591 - RNA, 19 nt, Artificial Sequence
  Description of Artificial Sequence: Synthetic oligonucleotide
ugcuaggagucauaguccu

SEQ ID NO: 2519592 - RNA, 19 nt, Artificial Sequence
  Description of Artificial Sequence: Synthetic oligonucleotide
aagucaaacugcugcucca

SEQ ID NO: 2519593 - RNA, 19 nt, Artificial Sequence
  Description of Artificial Sequence: Synthetic oligonucleotide
agccuucuucaacagggac

SEQ ID NO: 2519594 - RNA, 19 nt, Artificial Sequence
  Description of Artificial Sequence: Synthetic oligonucleotide
ugguuuuggcauuucgaga

SEQ ID NO: 2519595 - RNA, 19 nt, Artificial Sequence
  Description of Artificial Sequence: Synthetic oligonucleotide
uuuccggccccuucgagga

SEQ ID NO: 2519596 - RNA, 19 nt, Artificial Sequence
  Description of Artificial Sequence: Synthetic oligonucleotide
acugcugccugguuuccgg

SEQ ID NO: 2519597 - RNA, 19 nt, Artificial Sequence
  Description of Artificial Sequence: Synthetic oligonucleotide
augcuaggagucauagucc

SEQ ID NO: 2519598 - RNA, 19 nt, Artificial Sequence
  Description of Artificial Sequence: Synthetic oligonucleotide
uguucugagucugucccag

SEQ ID NO: 2519599 - RNA, 19 nt, Artificial Sequence
  Description of Artificial Sequence: Synthetic oligonucleotide
guuuccggccccuucgagg

SEQ ID NO: 2519600 - RNA, 19 nt, Artificial Sequence
  Description of Artificial Sequence: Synthetic oligonucleotide
caccaagucuuucaagaag

SEQ ID NO: 2519601 - RNA, 19 nt, Artificial Sequence
  Description of Artificial Sequence: Synthetic oligonucleotide
uuuacuuccggugccucca

SEQ ID NO: 2519602 - RNA, 19 nt, Artificial Sequence
  Description of Artificial Sequence: Synthetic oligonucleotide
uuuuggcauuucgagacug

SEQ ID NO: 2519603 - RNA, 19 nt, Artificial Sequence
  Description of Artificial Sequence: Synthetic oligonucleotide
ucuucuugauccgcgccgg

SEQ ID NO: 2519604 - RNA, 19 nt, Artificial Sequence
  Description of Artificial Sequence: Synthetic oligonucleotide
ugcaucaggugcugagggg

SEQ ID NO: 2519605 - RNA, 19 nt, Artificial Sequence
  Description of Artificial Sequence: Synthetic oligonucleotide
ucugagucugucccagaca

SEQ ID NO: 2519606 - RNA, 19 nt, Artificial Sequence
  Description of Artificial Sequence: Synthetic oligonucleotide
cuucgaggacccuuguccc

SEQ ID NO: 2519607 - RNA, 19 nt, Artificial Sequence
  Description of Artificial Sequence: Synthetic oligonucleotide
ugggacguggucaugguuu

SEQ ID NO: 2519608 - RNA, 19 nt, Artificial Sequence
  Description of Artificial Sequence: Synthetic oligonucleotide
uccgucugcaugaucuucu

SEQ ID NO: 2519609 - RNA, 19 nt, Artificial Sequence
  Description of Artificial Sequence: Synthetic oligonucleotide
caccuucccaaucucuucg

SEQ ID NO: 2519610 - RNA, 19 nt, Artificial Sequence
  Description of Artificial Sequence: Synthetic oligonucleotide
ucauccucugcaucaggug

SEQ ID NO: 2519611 - RNA, 19 nt, Artificial Sequence
  Description of Artificial Sequence: Synthetic oligonucleotide
cugcaucaggugcugaggg

SEQ ID NO: 2519612 - RNA, 19 nt, Artificial Sequence
  Description of Artificial Sequence: Synthetic oligonucleotide
agaagucaaacugcugcuc

SEQ ID NO: 2519613 - RNA, 19 nt, Artificial Sequence
  Description of Artificial Sequence: Synthetic oligonucleotide
aaaagggaguguggccugg

SEQ ID NO: 2519614 - RNA, 19 nt, Artificial Sequence
  Description of Artificial Sequence: Synthetic oligonucleotide
augacaggcacugcagccg

SEQ ID NO: 2519615 - RNA, 19 nt, Artificial Sequence
  Description of Artificial Sequence: Synthetic oligonucleotide
caugguuuuggcauuucga

SEQ ID NO: 2519616 - RNA, 19 nt, Artificial Sequence
  Description of Artificial Sequence: Synthetic oligonucleotide
ggcauuucgagacuggguc

SEQ ID NO: 2519617 - RNA, 19 nt, Artificial Sequence
  Description of Artificial Sequence: Synthetic oligonucleotide
auacuaacuaaaagggagu

SEQ ID NO: 2519618 - RNA, 19 nt, Artificial Sequence
  Description of Artificial Sequence: Synthetic oligonucleotide
acguggucaugguuuuggc

SEQ ID NO: 2519619 - RNA, 19 nt, Artificial Sequence
  Description of Artificial Sequence: Synthetic oligonucleotide
aucucggggccucucucgc

SEQ ID NO: 2519620 - RNA, 19 nt, Artificial Sequence
  Description of Artificial Sequence: Synthetic oligonucleotide
uucuugauccgcgccggcg

SEQ ID NO: 2519621 - RNA, 19 nt, Artificial Sequence
  Description of Artificial Sequence: Synthetic oligonucleotide
ugacaggcacugcagccgc

SEQ ID NO: 2519622 - RNA, 19 nt, Artificial Sequence
  Description of Artificial Sequence: Synthetic oligonucleotide
cugguuuccggccccuucg

SEQ ID NO: 2519623 - RNA, 19 nt, Artificial Sequence
  Description of Artificial Sequence: Synthetic oligonucleotide
cuggagggcucugaaaggg

SEQ ID NO: 2519624 - RNA, 19 nt, Artificial Sequence
  Description of Artificial Sequence: Synthetic oligonucleotide
caacagggacuccaggaag

SEQ ID NO: 2519625 - RNA, 19 nt, Artificial Sequence
  Description of Artificial Sequence: Synthetic oligonucleotide
aacagggacuccaggaaga

SEQ ID NO: 2519626 - RNA, 19 nt, Artificial Sequence
  Description of Artificial Sequence: Synthetic oligonucleotide
uaucaguguccucggacuc

SEQ ID NO: 2519627 - RNA, 19 nt, Artificial Sequence
  Description of Artificial Sequence: Synthetic oligonucleotide
ccuucgaggacccuugucc

SEQ ID NO: 2519628 - RNA, 19 nt, Artificial Sequence
  Description of Artificial Sequence: Synthetic oligonucleotide
gagcaacuaauacuaacua

SEQ ID NO: 2519629 - RNA, 19 nt, Artificial Sequence
  Description of Artificial Sequence: Synthetic oligonucleotide
uggcuuuacuuccggugcc

SEQ ID NO: 2519630 - RNA, 19 nt, Artificial Sequence
  Description of Artificial Sequence: Synthetic oligonucleotide
gcaacuaauacuaacuaaa

SEQ ID NO: 2519631 - RNA, 19 nt, Artificial Sequence
  Description of Artificial Sequence: Synthetic oligonucleotide
cagccuaccggcucggggc

SEQ ID NO: 2519632 - RNA, 19 nt, Artificial Sequence
  Description of Artificial Sequence: Synthetic oligonucleotide
acuaacuaaaagggagugu

SEQ ID NO: 2519633 - RNA, 19 nt, Artificial Sequence
  Description of Artificial Sequence: Synthetic oligonucleotide
uggcauuucgagacugggu

SEQ ID NO: 2519634 - RNA, 19 nt, Artificial Sequence
  Description of Artificial Sequence: Synthetic oligonucleotide
ucaggcacggaugccacca

SEQ ID NO: 2519635 - RNA, 19 nt, Artificial Sequence
  Description of Artificial Sequence: Synthetic oligonucleotide
ucgagcgcccgcgagauga

SEQ ID NO: 2519636 - RNA, 19 nt, Artificial Sequence
  Description of Artificial Sequence: Synthetic oligonucleotide
ugcuuggcaucucggggcc

SEQ ID NO: 2519637 - RNA, 19 nt, Artificial Sequence
  Description of Artificial Sequence: Synthetic oligonucleotide
ccuguucugagucuguccc

SEQ ID NO: 2519638 - RNA, 19 nt, Artificial Sequence
  Description of Artificial Sequence: Synthetic oligonucleotide
guggccuggggucaggggc

SEQ ID NO: 2519639 - RNA, 19 nt, Artificial Sequence
  Description of Artificial Sequence: Synthetic oligonucleotide
uguccucggacucuuccuc

SEQ ID NO: 2519640 - RNA, 19 nt, Artificial Sequence
  Description of Artificial Sequence: Synthetic oligonucleotide
ugggucaccuggcaagccu

SEQ ID NO: 2519641 - RNA, 19 nt, Artificial Sequence
  Description of Artificial Sequence: Synthetic oligonucleotide
aaagggaguguggccuggg

SEQ ID NO: 2519642 - RNA, 19 nt, Artificial Sequence
  Description of Artificial Sequence: Synthetic oligonucleotide
caucucggggccucucucg

SEQ ID NO: 2519643 - RNA, 19 nt, Artificial Sequence
  Description of Artificial Sequence: Synthetic oligonucleotide
aaccgcgcguuguacuucu

SEQ ID NO: 2519644 - RNA, 19 nt, Artificial Sequence
  Description of Artificial Sequence: Synthetic oligonucleotide
uggugucucuucuucucca

SEQ ID NO: 2519645 - RNA, 19 nt, Artificial Sequence
  Description of Artificial Sequence: Synthetic oligonucleotide
uccggugccuccauucuuc

SEQ ID NO: 2519646 - RNA, 19 nt, Artificial Sequence
  Description of Artificial Sequence: Synthetic oligonucleotide
gugguugucuucgccaucc

SEQ ID NO: 2519647 - RNA, 19 nt, Artificial Sequence
  Description of Artificial Sequence: Synthetic oligonucleotide
aaaccgcgcguuguacuuc

SEQ ID NO: 2519648 - RNA, 19 nt, Artificial Sequence
  Description of Artificial Sequence: Synthetic oligonucleotide
augaugacaggcacugcag

SEQ ID NO: 2519649 - RNA, 19 nt, Artificial Sequence
  Description of Artificial Sequence: Synthetic oligonucleotide
cucuucguccgucugcaug

SEQ ID NO: 2519650 - RNA, 19 nt, Artificial Sequence
  Description of Artificial Sequence: Synthetic oligonucleotide
uccccauccaugugguugu

SEQ ID NO: 2519651 - RNA, 19 nt, Artificial Sequence
  Description of Artificial Sequence: Synthetic oligonucleotide
ucuccccagagcaacuaau

SEQ ID NO: 2519652 - RNA, 19 nt, Artificial Sequence
  Description of Artificial Sequence: Synthetic oligonucleotide
ucaggggcagugaaugcua

SEQ ID NO: 2519653 - RNA, 19 nt, Artificial Sequence
  Description of Artificial Sequence: Synthetic oligonucleotide
agccuaccggcucggggcc

SEQ ID NO: 2519654 - RNA, 19 nt, Artificial Sequence
  Description of Artificial Sequence: Synthetic oligonucleotide
agucaaacugcugcuccag

SEQ ID NO: 2519655 - RNA, 19 nt, Artificial Sequence
  Description of Artificial Sequence: Synthetic oligonucleotide
uccccuugcaugucaggca

SEQ ID NO: 2519656 - RNA, 19 nt, Artificial Sequence
  Description of Artificial Sequence: Synthetic oligonucleotide
gucuucgccauccccuugc

SEQ ID NO: 2519657 - RNA, 19 nt, Artificial Sequence
  Description of Artificial Sequence: Synthetic oligonucleotide
uucgaggacccuugucccc

SEQ ID NO: 2519658 - RNA, 19 nt, Artificial Sequence
  Description of Artificial Sequence: Synthetic oligonucleotide
cauuucgagacugggucac

SEQ ID NO: 2519659 - RNA, 19 nt, Artificial Sequence
  Description of Artificial Sequence: Synthetic oligonucleotide
auuucgagacugggucacc

SEQ ID NO: 2519660 - RNA, 19 nt, Artificial Sequence
  Description of Artificial Sequence: Synthetic oligonucleotide
ggugaagggcaugaagggg

SEQ ID NO: 2519661 - RNA, 19 nt, Artificial Sequence
  Description of Artificial Sequence: Synthetic oligonucleotide
ucucucgccgcgccgggcc

SEQ ID NO: 2519662 - RNA, 19 nt, Artificial Sequence
  Description of Artificial Sequence: Synthetic oligonucleotide
ugucaggcacggaugccac

SEQ ID NO: 2519663 - RNA, 19 nt, Artificial Sequence
  Description of Artificial Sequence: Synthetic oligonucleotide
agaugaugacaggcacugc

SEQ ID NO: 2519664 - RNA, 19 nt, Artificial Sequence
  Description of Artificial Sequence: Synthetic oligonucleotide
aguucgagcgcccgcgaga

SEQ ID NO: 2519665 - RNA, 19 nt, Artificial Sequence
  Description of Artificial Sequence: Synthetic oligonucleotide
gucuuucaagaagucaaac

SEQ ID NO: 2519666 - RNA, 19 nt, Artificial Sequence
  Description of Artificial Sequence: Synthetic oligonucleotide
caucaggugcugaggggcc

SEQ ID NO: 2519667 - RNA, 19 nt, Artificial Sequence
  Description of Artificial Sequence: Synthetic oligonucleotide
guggucaugguuuuggcau

SEQ ID NO: 2519668 - RNA, 19 nt, Artificial Sequence
  Description of Artificial Sequence: Synthetic oligonucleotide
acggaugccaccaagucuu

SEQ ID NO: 2519669 - RNA, 19 nt, Artificial Sequence
  Description of Artificial Sequence: Synthetic oligonucleotide
guaucaguguccucggacu

SEQ ID NO: 2519670 - RNA, 19 nt, Artificial Sequence
  Description of Artificial Sequence: Synthetic oligonucleotide
aggggcagugaaugcuagg

SEQ ID NO: 2519671 - RNA, 19 nt, Artificial Sequence
  Description of Artificial Sequence: Synthetic oligonucleotide
cucggggccucucucgccg

SEQ ID NO: 2519672 - RNA, 19 nt, Artificial Sequence
  Description of Artificial Sequence: Synthetic oligonucleotide
uccuccuguucugagucug

SEQ ID NO: 2519673 - RNA, 19 nt, Artificial Sequence
  Description of Artificial Sequence: Synthetic oligonucleotide
agugaaugcuaggagucau

SEQ ID NO: 2519674 - RNA, 19 nt, Artificial Sequence
  Description of Artificial Sequence: Synthetic oligonucleotide
augugguugucuucgccau

SEQ ID NO: 2519675 - RNA, 19 nt, Artificial Sequence
  Description of Artificial Sequence: Synthetic oligonucleotide
augucaggcacggaugcca

SEQ ID NO: 2519676 - RNA, 19 nt, Artificial Sequence
  Description of Artificial Sequence: Synthetic oligonucleotide
ugcugccugguuuccggcc

SEQ ID NO: 2519677 - RNA, 19 nt, Artificial Sequence
  Description of Artificial Sequence: Synthetic oligonucleotide
uccaugugguugucuucgc

SEQ ID NO: 2519678 - RNA, 19 nt, Artificial Sequence
  Description of Artificial Sequence: Synthetic oligonucleotide
uccgcgccggcggaaaccg

SEQ ID NO: 2519679 - RNA, 19 nt, Artificial Sequence
  Description of Artificial Sequence: Synthetic oligonucleotide
aucucuucguccgucugca

SEQ ID NO: 2519680 - RNA, 19 nt, Artificial Sequence
  Description of Artificial Sequence: Synthetic oligonucleotide
gaguucgagcgcccgcgag

SEQ ID NO: 2519681 - RNA, 19 nt, Artificial Sequence
  Description of Artificial Sequence: Synthetic oligonucleotide
gagacugggucaccuggca

SEQ ID NO: 2519682 - RNA, 19 nt, Artificial Sequence
  Description of Artificial Sequence: Synthetic oligonucleotide
aggaagaguucgagcgccc

SEQ ID NO: 2519683 - RNA, 19 nt, Artificial Sequence
  Description of Artificial Sequence: Synthetic oligonucleotide
ugucuucgccauccccuug

SEQ ID NO: 2519684 - RNA, 19 nt, Artificial Sequence
  Description of Artificial Sequence: Synthetic oligonucleotide
gcaagccuucuucaacagg

SEQ ID NO: 2519685 - RNA, 19 nt, Artificial Sequence
  Description of Artificial Sequence: Synthetic oligonucleotide
ucgaggacccuugucccca

SEQ ID NO: 2519686 - RNA, 19 nt, Artificial Sequence
  Description of Artificial Sequence: Synthetic oligonucleotide
ugugguugucuucgccauc

SEQ ID NO: 2519687 - RNA, 19 nt, Artificial Sequence
  Description of Artificial Sequence: Synthetic oligonucleotide
caaucucuucguccgucug

SEQ ID NO: 2519688 - RNA, 19 nt, Artificial Sequence
  Description of Artificial Sequence: Synthetic oligonucleotide
cauccaugugguugucuuc

SEQ ID NO: 2519689 - RNA, 19 nt, Artificial Sequence
  Description of Artificial Sequence: Synthetic oligonucleotide
caccuggcaagccuucuuc

SEQ ID NO: 2519690 - RNA, 19 nt, Artificial Sequence
  Description of Artificial Sequence: Synthetic oligonucleotide
cccagagcaacuaauacua

SEQ ID NO: 2519691 - RNA, 19 nt, Artificial Sequence
  Description of Artificial Sequence: Synthetic oligonucleotide
ggacuccaggaagaguucg

SEQ ID NO: 2519692 - RNA, 19 nt, Artificial Sequence
  Description of Artificial Sequence: Synthetic oligonucleotide
aagccuucuucaacaggga

SEQ ID NO: 2519693 - RNA, 19 nt, Artificial Sequence
  Description of Artificial Sequence: Synthetic oligonucleotide
guugucuucgccauccccu

SEQ ID NO: 2519694 - RNA, 19 nt, Artificial Sequence
  Description of Artificial Sequence: Synthetic oligonucleotide
cuaggagucauaguccucu

SEQ ID NO: 2519695 - RNA, 19 nt, Artificial Sequence
  Description of Artificial Sequence: Synthetic oligonucleotide
caggggcagugaaugcuag

SEQ ID NO: 2519696 - RNA, 19 nt, Artificial Sequence
  Description of Artificial Sequence: Synthetic oligonucleotide
agucuuucaagaagucaaa

SEQ ID NO: 2519697 - RNA, 19 nt, Artificial Sequence
  Description of Artificial Sequence: Synthetic oligonucleotide
auccgcgccggcggaaacc

SEQ ID NO: 2519698 - RNA, 19 nt, Artificial Sequence
  Description of Artificial Sequence: Synthetic oligonucleotide
uugucuucgccauccccuu

SEQ ID NO: 2519699 - RNA, 19 nt, Artificial Sequence
  Description of Artificial Sequence: Synthetic oligonucleotide
accuucccaaucucuucgu

SEQ ID NO: 2519700 - RNA, 19 nt, Artificial Sequence
  Description of Artificial Sequence: Synthetic oligonucleotide
gcgagaugaugacaggcac

SEQ ID NO: 2519701 - RNA, 19 nt, Artificial Sequence
  Description of Artificial Sequence: Synthetic oligonucleotide
gggcagugaaugcuaggag

SEQ ID NO: 2519702 - RNA, 19 nt, Artificial Sequence
  Description of Artificial Sequence: Synthetic oligonucleotide
gcagugaaugcuaggaguc

SEQ ID NO: 2519703 - RNA, 19 nt, Artificial Sequence
  Description of Artificial Sequence: Synthetic oligonucleotide
ggcaagccuucuucaacag

SEQ ID NO: 2519704 - RNA, 19 nt, Artificial Sequence
  Description of Artificial Sequence: Synthetic oligonucleotide
gggucaggggcagugaaug

SEQ ID NO: 2519705 - RNA, 19 nt, Artificial Sequence
  Description of Artificial Sequence: Synthetic oligonucleotide
gggaguguggccugggguc

SEQ ID NO: 2519706 - RNA, 19 nt, Artificial Sequence
  Description of Artificial Sequence: Synthetic oligonucleotide
ggcaaaggcagaggagagg

SEQ ID NO: 2519707 - RNA, 19 nt, Artificial Sequence
  Description of Artificial Sequence: Synthetic oligonucleotide
ccuccauucuuccugccac

SEQ ID NO: 2519708 - RNA, 19 nt, Artificial Sequence
  Description of Artificial Sequence: Synthetic oligonucleotide
uggucaugguuuuggcauu

SEQ ID NO: 2519709 - RNA, 19 nt, Artificial Sequence
  Description of Artificial Sequence: Synthetic oligonucleotide
ggcagugaaugcuaggagu

SEQ ID NO: 2519710 - RNA, 19 nt, Artificial Sequence
  Description of Artificial Sequence: Synthetic oligonucleotide
ggaagaguucgagcgcccg

SEQ ID NO: 2519711 - RNA, 19 nt, Artificial Sequence
  Description of Artificial Sequence: Synthetic oligonucleotide
cucggggccuguucgccgc

SEQ ID NO: 2519712 - RNA, 19 nt, Artificial Sequence
  Description of Artificial Sequence: Synthetic oligonucleotide
aggcuguggugucucuucu

SEQ ID NO: 2519713 - RNA, 19 nt, Artificial Sequence
  Description of Artificial Sequence: Synthetic oligonucleotide
gcuguggugucucuucuuc

SEQ ID NO: 2519714 - RNA, 19 nt, Artificial Sequence
  Description of Artificial Sequence: Synthetic oligonucleotide
gaaugcuaggagucauagu

SEQ ID NO: 2519715 - RNA, 19 nt, Artificial Sequence
  Description of Artificial Sequence: Synthetic oligonucleotide
accggcucggggccuguuc

SEQ ID NO: 2519716 - RNA, 19 nt, Artificial Sequence
  Description of Artificial Sequence: Synthetic oligonucleotide
agacugggucaccuggcaa

SEQ ID NO: 2519717 - RNA, 19 nt, Artificial Sequence
  Description of Artificial Sequence: Synthetic oligonucleotide
uuccuccuguucugagucu

SEQ ID NO: 2519718 - RNA, 19 nt, Artificial Sequence
  Description of Artificial Sequence: Synthetic oligonucleotide
acccuuguccccauccaug

SEQ ID NO: 2519719 - RNA, 19 nt, Artificial Sequence
  Description of Artificial Sequence: Synthetic oligonucleotide
ucucggggccucucucgcc

SEQ ID NO: 2519720 - RNA, 19 nt, Artificial Sequence
  Description of Artificial Sequence: Synthetic oligonucleotide
ucccaaucucuucguccgu

SEQ ID NO: 2519721 - RNA, 19 nt, Artificial Sequence
  Description of Artificial Sequence: Synthetic oligonucleotide
cuccagcucaaugcacugc

SEQ ID NO: 2519722 - RNA, 19 nt, Artificial Sequence
  Description of Artificial Sequence: Synthetic oligonucleotide
uccggccccuucgaggacc

SEQ ID NO: 2519723 - RNA, 19 nt, Artificial Sequence
  Description of Artificial Sequence: Synthetic oligonucleotide
cuucuugauccgcgccggc

SEQ ID NO: 2519724 - RNA, 19 nt, Artificial Sequence
  Description of Artificial Sequence: Synthetic oligonucleotide
ugcagccgccaccuuccca

SEQ ID NO: 2519725 - RNA, 19 nt, Artificial Sequence
  Description of Artificial Sequence: Synthetic oligonucleotide
ccuugcaugucaggcacgg

SEQ ID NO: 2519726 - RNA, 19 nt, Artificial Sequence
  Description of Artificial Sequence: Synthetic oligonucleotide
auccucugcaucaggugcu

SEQ ID NO: 2519727 - RNA, 19 nt, Artificial Sequence
  Description of Artificial Sequence: Synthetic oligonucleotide
gcagccuaccggcucgggg

SEQ ID NO: 2519728 - RNA, 19 nt, Artificial Sequence
  Description of Artificial Sequence: Synthetic oligonucleotide
agaguucgagcgcccgcga

SEQ ID NO: 2519729 - RNA, 19 nt, Artificial Sequence
  Description of Artificial Sequence: Synthetic oligonucleotide
gaaaccgcgcguuguacuu

SEQ ID NO: 2519730 - RNA, 19 nt, Artificial Sequence
  Description of Artificial Sequence: Synthetic oligonucleotide
ccaggaagaguucgagcgc

SEQ ID NO: 2519731 - RNA, 19 nt, Artificial Sequence
  Description of Artificial Sequence: Synthetic oligonucleotide
uuccggugccuccauucuu

SEQ ID NO: 2519732 - RNA, 19 nt, Artificial Sequence
  Description of Artificial Sequence: Synthetic oligonucleotide
agccgccaccuucccaauc

SEQ ID NO: 2519733 - RNA, 19 nt, Artificial Sequence
  Description of Artificial Sequence: Synthetic oligonucleotide
ggggcagugaaugcuagga

SEQ ID NO: 2519734 - RNA, 19 nt, Artificial Sequence
  Description of Artificial Sequence: Synthetic oligonucleotide
uuacuuccggugccuccau

SEQ ID NO: 2519735 - RNA, 19 nt, Artificial Sequence
  Description of Artificial Sequence: Synthetic oligonucleotide
ucuucuugcuuggcaucuc

SEQ ID NO: 2519736 - RNA, 19 nt, Artificial Sequence
  Description of Artificial Sequence: Synthetic oligonucleotide
ggagaggugaagggcauga

SEQ ID NO: 2519737 - RNA, 19 nt, Artificial Sequence
  Description of Artificial Sequence: Synthetic oligonucleotide
gcccgcgagaugaugacag

SEQ ID NO: 2519738 - RNA, 19 nt, Artificial Sequence
  Description of Artificial Sequence: Synthetic oligonucleotide
gcauuucgagacuggguca

SEQ ID NO: 2519739 - RNA, 19 nt, Artificial Sequence
  Description of Artificial Sequence: Synthetic oligonucleotide
cuuggcaucucggggccuc

SEQ ID NO: 2519740 - RNA, 19 nt, Artificial Sequence
  Description of Artificial Sequence: Synthetic oligonucleotide
gcugccugguuuccggccc

SEQ ID NO: 2519741 - RNA, 19 nt, Artificial Sequence
  Description of Artificial Sequence: Synthetic oligonucleotide
ggucaggggcagugaaugc

SEQ ID NO: 2519742 - RNA, 19 nt, Artificial Sequence
  Description of Artificial Sequence: Synthetic oligonucleotide
agcgcccgcgagaugauga

SEQ ID NO: 2519743 - RNA, 19 nt, Artificial Sequence
  Description of Artificial Sequence: Synthetic oligonucleotide
cuguucugagucuguccca

SEQ ID NO: 2519744 - RNA, 19 nt, Artificial Sequence
  Description of Artificial Sequence: Synthetic oligonucleotide
cuccccagagcaacuaaua

SEQ ID NO: 2519745 - RNA, 19 nt, Artificial Sequence
  Description of Artificial Sequence: Synthetic oligonucleotide
gucaggcacggaugccacc

SEQ ID NO: 2519746 - RNA, 19 nt, Artificial Sequence
  Description of Artificial Sequence: Synthetic oligonucleotide
uaggagucauaguccucuu

SEQ ID NO: 2519747 - RNA, 19 nt, Artificial Sequence
  Description of Artificial Sequence: Synthetic oligonucleotide
ugccuccauucuuccugcc

SEQ ID NO: 2519748 - RNA, 19 nt, Artificial Sequence
  Description of Artificial Sequence: Synthetic oligonucleotide
caucaguaucaguguccuc

SEQ ID NO: 2519749 - RNA, 19 nt, Artificial Sequence
  Description of Artificial Sequence: Synthetic oligonucleotide
ccaugugguugucuucgcc

SEQ ID NO: 2519750 - RNA, 19 nt, Artificial Sequence
  Description of Artificial Sequence: Synthetic oligonucleotide
guuuuggcauuucgagacu

SEQ ID NO: 2519751 - RNA, 19 nt, Artificial Sequence
  Description of Artificial Sequence: Synthetic oligonucleotide
ucggacucuuccuccuguu

SEQ ID NO: 2519752 - RNA, 19 nt, Artificial Sequence
  Description of Artificial Sequence: Synthetic oligonucleotide
cacugcugccugguuuccg

SEQ ID NO: 2519753 - RNA, 19 nt, Artificial Sequence
  Description of Artificial Sequence: Synthetic oligonucleotide
gguuuccggccccuucgag

SEQ ID NO: 2519754 - RNA, 19 nt, Artificial Sequence
  Description of Artificial Sequence: Synthetic oligonucleotide
cagugaaugcuaggaguca

SEQ ID NO: 2519755 - RNA, 19 nt, Artificial Sequence
  Description of Artificial Sequence: Synthetic oligonucleotide
aggagaggugaagggcaug

SEQ ID NO: 2519756 - RNA, 19 nt, Artificial Sequence
  Description of Artificial Sequence: Synthetic oligonucleotide
cuccuguucugagucuguc

SEQ ID NO: 2519757 - RNA, 19 nt, Artificial Sequence
  Description of Artificial Sequence: Synthetic oligonucleotide
gcacggaugccaccaaguc

SEQ ID NO: 2519758 - RNA, 19 nt, Artificial Sequence
  Description of Artificial Sequence: Synthetic oligonucleotide
cugccugguuuccggcccc

SEQ ID NO: 2519759 - RNA, 19 nt, Artificial Sequence
  Description of Artificial Sequence: Synthetic oligonucleotide
ccccuugcaugucaggcac

SEQ ID NO: 2519760 - RNA, 19 nt, Artificial Sequence
  Description of Artificial Sequence: Synthetic oligonucleotide
cacggaugccaccaagucu

SEQ ID NO: 2519761 - RNA, 19 nt, Artificial Sequence
  Description of Artificial Sequence: Synthetic oligonucleotide
gauccgcgccggcggaaac

SEQ ID NO: 2519762 - RNA, 19 nt, Artificial Sequence
  Description of Artificial Sequence: Synthetic oligonucleotide
gucaggggcagugaaugcu

SEQ ID NO: 2519763 - RNA, 19 nt, Artificial Sequence
  Description of Artificial Sequence: Synthetic oligonucleotide
uucgagcgcccgcgagaug

SEQ ID NO: 2519764 - RNA, 19 nt, Artificial Sequence
  Description of Artificial Sequence: Synthetic oligonucleotide
cugggucaccuggcaagcc

SEQ ID NO: 2519765 - RNA, 19 nt, Artificial Sequence
  Description of Artificial Sequence: Synthetic oligonucleotide
ugauccgcgccggcggaaa

SEQ ID NO: 2519766 - RNA, 19 nt, Artificial Sequence
  Description of Artificial Sequence: Synthetic oligonucleotide
cuugauccgcgccggcgga

SEQ ID NO: 2519767 - RNA, 19 nt, Artificial Sequence
  Description of Artificial Sequence: Synthetic oligonucleotide
ccgcgagaugaugacaggc

SEQ ID NO: 2519768 - RNA, 19 nt, Artificial Sequence
  Description of Artificial Sequence: Synthetic oligonucleotide
uacuuccggugccuccauu

SEQ ID NO: 2519769 - RNA, 19 nt, Artificial Sequence
  Description of Artificial Sequence: Synthetic oligonucleotide
gcucggggccuguucgccg

SEQ ID NO: 2519770 - RNA, 19 nt, Artificial Sequence
  Description of Artificial Sequence: Synthetic oligonucleotide
ggaaaccgcgcguuguacu

SEQ ID NO: 2519771 - RNA, 19 nt, Artificial Sequence
  Description of Artificial Sequence: Synthetic oligonucleotide
ccggcucggggccuguucg

SEQ ID NO: 2519772 - RNA, 19 nt, Artificial Sequence
  Description of Artificial Sequence: Synthetic oligonucleotide
gacaggcacugcagccgcc

SEQ ID NO: 2519773 - RNA, 19 nt, Artificial Sequence
  Description of Artificial Sequence: Synthetic oligonucleotide
guguccucggacucuuccu

SEQ ID NO: 2519774 - RNA, 19 nt, Artificial Sequence
  Description of Artificial Sequence: Synthetic oligonucleotide
ucucuucguccgucugcau

SEQ ID NO: 2519775 - RNA, 19 nt, Artificial Sequence
  Description of Artificial Sequence: Synthetic oligonucleotide
gagaggugaagggcaugaa

SEQ ID NO: 2519776 - RNA, 19 nt, Artificial Sequence
  Description of Artificial Sequence: Synthetic oligonucleotide
cgcguuguacuucuucuuc

SEQ ID NO: 2519777 - RNA, 19 nt, Artificial Sequence
  Description of Artificial Sequence: Synthetic oligonucleotide
gugaaugcuaggagucaua

SEQ ID NO: 2519778 - RNA, 19 nt, Artificial Sequence
  Description of Artificial Sequence: Synthetic oligonucleotide
ugacuggcuugggguggag

SEQ ID NO: 2519779 - RNA, 19 nt, Artificial Sequence
  Description of Artificial Sequence: Synthetic oligonucleotide
gucaugguuuuggcauuuc

SEQ ID NO: 2519780 - RNA, 19 nt, Artificial Sequence
  Description of Artificial Sequence: Synthetic oligonucleotide
cgagacugggucaccuggc

SEQ ID NO: 2519781 - RNA, 19 nt, Artificial Sequence
  Description of Artificial Sequence: Synthetic oligonucleotide
cccgcagccuaccggcucg

SEQ ID NO: 2519782 - RNA, 19 nt, Artificial Sequence
  Description of Artificial Sequence: Synthetic oligonucleotide
ggacccuuguccccaucca

SEQ ID NO: 2519783 - RNA, 19 nt, Artificial Sequence
  Description of Artificial Sequence: Synthetic oligonucleotide
cuguucgccgccggcccgc

SEQ ID NO: 2519784 - RNA, 19 nt, Artificial Sequence
  Description of Artificial Sequence: Synthetic oligonucleotide
cuguggugucucuucuucu

SEQ ID NO: 2519785 - RNA, 19 nt, Artificial Sequence
  Description of Artificial Sequence: Synthetic oligonucleotide
caguaucaguguccucgga

SEQ ID NO: 2519786 - RNA, 19 nt, Artificial Sequence
  Description of Artificial Sequence: Synthetic oligonucleotide
gccuguucgccgccggccc

SEQ ID NO: 2519787 - RNA, 19 nt, Artificial Sequence
  Description of Artificial Sequence: Synthetic oligonucleotide
gccgcccgcagccuaccgg

SEQ ID NO: 2519788 - RNA, 19 nt, Artificial Sequence
  Description of Artificial Sequence: Synthetic oligonucleotide
gccuccauucuuccugcca

SEQ ID NO: 2519789 - RNA, 19 nt, Artificial Sequence
  Description of Artificial Sequence: Synthetic oligonucleotide
gcguuguacuucuucuucu

SEQ ID NO: 2519790 - RNA, 19 nt, Artificial Sequence
  Description of Artificial Sequence: Synthetic oligonucleotide
uuggcaucucggggccucu

SEQ ID NO: 2519791 - RNA, 19 nt, Artificial Sequence
  Description of Artificial Sequence: Synthetic oligonucleotide
uuccggccccuucgaggac

SEQ ID NO: 2519792 - RNA, 19 nt, Artificial Sequence
  Description of Artificial Sequence: Synthetic oligonucleotide
ccgcccgcagccuaccggc

SEQ ID NO: 2519793 - RNA, 19 nt, Artificial Sequence
  Description of Artificial Sequence: Synthetic oligonucleotide
cucucgccgcgccgggccc

SEQ ID NO: 2519794 - RNA, 19 nt, Artificial Sequence
  Description of Artificial Sequence: Synthetic oligonucleotide
cccgcgagaugaugacagg

SEQ ID NO: 2519795 - RNA, 19 nt, Artificial Sequence
  Description of Artificial Sequence: Synthetic oligonucleotide
uugauccgcgccggcggaa

SEQ ID NO: 2519796 - RNA, 19 nt, Artificial Sequence
  Description of Artificial Sequence: Synthetic oligonucleotide
cuuccggugccuccauucu

SEQ ID NO: 2519797 - RNA, 19 nt, Artificial Sequence
  Description of Artificial Sequence: Synthetic oligonucleotide
gccucucucgccgcgccgg

SEQ ID NO: 2519798 - RNA, 19 nt, Artificial Sequence
  Description of Artificial Sequence: Synthetic oligonucleotide
ccaccaagucuuucaagaa

SEQ ID NO: 2519799 - RNA, 19 nt, Artificial Sequence
  Description of Artificial Sequence: Synthetic oligonucleotide
cccuugcaugucaggcacg

SEQ ID NO: 2519800 - RNA, 19 nt, Artificial Sequence
  Description of Artificial Sequence: Synthetic oligonucleotide
ccccagagcaacuaauacu

SEQ ID NO: 2519801 - RNA, 19 nt, Artificial Sequence
  Description of Artificial Sequence: Synthetic oligonucleotide
gaggacccuuguccccauc

SEQ ID NO: 2519802 - RNA, 19 nt, Artificial Sequence
  Description of Artificial Sequence: Synthetic oligonucleotide
cgcgagaugaugacaggca

SEQ ID NO: 2519803 - RNA, 19 nt, Artificial Sequence
  Description of Artificial Sequence: Synthetic oligonucleotide
ccuucccaaucucuucguc

SEQ ID NO: 2519804 - RNA, 19 nt, Artificial Sequence
  Description of Artificial Sequence: Synthetic oligonucleotide
gccauccccuugcauguca

SEQ ID NO: 2519805 - RNA, 19 nt, Artificial Sequence
  Description of Artificial Sequence: Synthetic oligonucleotide
gcaucucggggccucucuc

SEQ ID NO: 2519806 - RNA, 19 nt, Artificial Sequence
  Description of Artificial Sequence: Synthetic oligonucleotide
cugcagccgccaccuuccc

SEQ ID NO: 2519807 - RNA, 19 nt, Artificial Sequence
  Description of Artificial Sequence: Synthetic oligonucleotide
gagcgcccgcgagaugaug

SEQ ID NO: 2519808 - RNA, 19 nt, Artificial Sequence
  Description of Artificial Sequence: Synthetic oligonucleotide
gugacuggcuuggggugga

SEQ ID NO: 2519809 - RNA, 19 nt, Artificial Sequence
  Description of Artificial Sequence: Synthetic oligonucleotide
ggccuguucgccgccggcc

SEQ ID NO: 2519810 - RNA, 19 nt, Artificial Sequence
  Description of Artificial Sequence: Synthetic oligonucleotide
ggggccuguucgccgccgg

SEQ ID NO: 2519811 - RNA, 19 nt, Artificial Sequence
  Description of Artificial Sequence: Synthetic oligonucleotide
uguucgccgccggcccgcc

SEQ ID NO: 2519812 - RNA, 19 nt, Artificial Sequence
  Description of Artificial Sequence: Synthetic oligonucleotide
ccugguuuccggccccuuc

SEQ ID NO: 2519813 - RNA, 19 nt, Artificial Sequence
  Description of Artificial Sequence: Synthetic oligonucleotide
gaggagaggugaagggcau

SEQ ID NO: 2519814 - RNA, 19 nt, Artificial Sequence
  Description of Artificial Sequence: Synthetic oligonucleotide
cguggucaugguuuuggca

SEQ ID NO: 2519815 - RNA, 19 nt, Artificial Sequence
  Description of Artificial Sequence: Synthetic oligonucleotide
ccggugccuccauucuucc

SEQ ID NO: 2519816 - RNA, 19 nt, Artificial Sequence
  Description of Artificial Sequence: Synthetic oligonucleotide
cuugcaugucaggcacgga

SEQ ID NO: 2519817 - RNA, 19 nt, Artificial Sequence
  Description of Artificial Sequence: Synthetic oligonucleotide
caguguccucggacucuuc

SEQ ID NO: 2519818 - RNA, 19 nt, Artificial Sequence
  Description of Artificial Sequence: Synthetic oligonucleotide
ccuguucgccgccggcccg

SEQ ID NO: 2519819 - RNA, 19 nt, Artificial Sequence
  Description of Artificial Sequence: Synthetic oligonucleotide
ugccugguuuccggccccu

SEQ ID NO: 2519820 - RNA, 19 nt, Artificial Sequence
  Description of Artificial Sequence: Synthetic oligonucleotide
cccaaucucuucguccguc

SEQ ID NO: 2519821 - RNA, 19 nt, Artificial Sequence
  Description of Artificial Sequence: Synthetic oligonucleotide
guucgccgccggcccgccg

SEQ ID NO: 2519822 - RNA, 19 nt, Artificial Sequence
  Description of Artificial Sequence: Synthetic oligonucleotide
guucgagcgcccgcgagau

SEQ ID NO: 2519823 - RNA, 19 nt, Artificial Sequence
  Description of Artificial Sequence: Synthetic oligonucleotide
ggccucucucgccgcgccg

SEQ ID NO: 2519824 - RNA, 19 nt, Artificial Sequence
  Description of Artificial Sequence: Synthetic oligonucleotide
ccuuguccccauccaugug

SEQ ID NO: 2519825 - RNA, 19 nt, Artificial Sequence
  Description of Artificial Sequence: Synthetic oligonucleotide
gccccuucgaggacccuug

SEQ ID NO: 2519826 - RNA, 19 nt, Artificial Sequence
  Description of Artificial Sequence: Synthetic oligonucleotide
ucucgccgcgccgggccca

SEQ ID NO: 2519827 - RNA, 19 nt, Artificial Sequence
  Description of Artificial Sequence: Synthetic oligonucleotide
ccuggcaagccuucuucaa

SEQ ID NO: 2519828 - RNA, 19 nt, Artificial Sequence
  Description of Artificial Sequence: Synthetic oligonucleotide
gcuaggagucauaguccuc

SEQ ID NO: 2519829 - RNA, 19 nt, Artificial Sequence
  Description of Artificial Sequence: Synthetic oligonucleotide
ccagagcaacuaauacuaa

SEQ ID NO: 2519830 - RNA, 19 nt, Artificial Sequence
  Description of Artificial Sequence: Synthetic oligonucleotide
ccaucaguaucaguguccu

SEQ ID NO: 2519831 - RNA, 19 nt, Artificial Sequence
  Description of Artificial Sequence: Synthetic oligonucleotide
ggcacggaugccaccaagu

SEQ ID NO: 2519832 - RNA, 19 nt, Artificial Sequence
  Description of Artificial Sequence: Synthetic oligonucleotide
ggacguggucaugguuuug

SEQ ID NO: 2519833 - RNA, 19 nt, Artificial Sequence
  Description of Artificial Sequence: Synthetic oligonucleotide
gggccuguucgccgccggc

SEQ ID NO: 2519834 - RNA, 19 nt, Artificial Sequence
  Description of Artificial Sequence: Synthetic oligonucleotide
gcgcccgcgagaugaugac

SEQ ID NO: 2519835 - RNA, 19 nt, Artificial Sequence
  Description of Artificial Sequence: Synthetic oligonucleotide
ccucggacucuuccuccug

SEQ ID NO: 2519836 - RNA, 19 nt, Artificial Sequence
  Description of Artificial Sequence: Synthetic oligonucleotide
ccgcgcguuguacuucuuc

SEQ ID NO: 2519837 - RNA, 19 nt, Artificial Sequence
  Description of Artificial Sequence: Synthetic oligonucleotide
cccuucgaggacccuuguc

SEQ ID NO: 2519838 - RNA, 19 nt, Artificial Sequence
  Description of Artificial Sequence: Synthetic oligonucleotide
ccauccaugugguugucuu

SEQ ID NO: 2519839 - RNA, 19 nt, Artificial Sequence
  Description of Artificial Sequence: Synthetic oligonucleotide
gucaccuggcaagccuucu

SEQ ID NO: 2519840 - RNA, 19 nt, Artificial Sequence
  Description of Artificial Sequence: Synthetic oligonucleotide
cugcuucaggugggacgug

SEQ ID NO: 2519841 - RNA, 19 nt, Artificial Sequence
  Description of Artificial Sequence: Synthetic oligonucleotide
gcggaaaccgcgcguugua

SEQ ID NO: 2519842 - RNA, 19 nt, Artificial Sequence
  Description of Artificial Sequence: Synthetic oligonucleotide
ccucucucgccgcgccggg

SEQ ID NO: 2519843 - RNA, 19 nt, Artificial Sequence
  Description of Artificial Sequence: Synthetic oligonucleotide
cgagaugaugacaggcacu

SEQ ID NO: 2519844 - RNA, 19 nt, Artificial Sequence
  Description of Artificial Sequence: Synthetic oligonucleotide
cggacucuuccuccuguuc

SEQ ID NO: 2519845 - RNA, 19 nt, Artificial Sequence
  Description of Artificial Sequence: Synthetic oligonucleotide
ccggccccuucgaggaccc

SEQ ID NO: 2519846 - RNA, 19 nt, Artificial Sequence
  Description of Artificial Sequence: Synthetic oligonucleotide
caggcacggaugccaccaa

SEQ ID NO: 2519847 - RNA, 19 nt, Artificial Sequence
  Description of Artificial Sequence: Synthetic oligonucleotide
ggcuuuacuuccggugccu

SEQ ID NO: 2519848 - RNA, 19 nt, Artificial Sequence
  Description of Artificial Sequence: Synthetic oligonucleotide
gggacguggucaugguuuu

SEQ ID NO: 2519849 - RNA, 19 nt, Artificial Sequence
  Description of Artificial Sequence: Synthetic oligonucleotide
ggcggaaaccgcgcguugu

SEQ ID NO: 2519850 - RNA, 19 nt, Artificial Sequence
  Description of Artificial Sequence: Synthetic oligonucleotide
cggaaaccgcgcguuguac

SEQ ID NO: 2519851 - RNA, 19 nt, Artificial Sequence
  Description of Artificial Sequence: Synthetic oligonucleotide
cucgccgcgccgggcccag

SEQ ID NO: 2519852 - RNA, 19 nt, Artificial Sequence
  Description of Artificial Sequence: Synthetic oligonucleotide
gcccgcagccuaccggcuc

SEQ ID NO: 2519853 - RNA, 19 nt, Artificial Sequence
  Description of Artificial Sequence: Synthetic oligonucleotide
cgcgcguuguacuucuucu

SEQ ID NO: 2519854 - RNA, 19 nt, Artificial Sequence
  Description of Artificial Sequence: Synthetic oligonucleotide
cuucgccauccccuugcau

SEQ ID NO: 2519855 - RNA, 19 nt, Artificial Sequence
  Description of Artificial Sequence: Synthetic oligonucleotide
ggucaugguuuuggcauuu

SEQ ID NO: 2519856 - RNA, 19 nt, Artificial Sequence
  Description of Artificial Sequence: Synthetic oligonucleotide
ccuaccggcucggggccug

SEQ ID NO: 2519857 - RNA, 19 nt, Artificial Sequence
  Description of Artificial Sequence: Synthetic oligonucleotide
ccgccaccuucccaaucuc

SEQ ID NO: 2519858 - RNA, 19 nt, Artificial Sequence
  Description of Artificial Sequence: Synthetic oligonucleotide
gcgcguuguacuucuucuu

SEQ ID NO: 2519859 - RNA, 19 nt, Artificial Sequence
  Description of Artificial Sequence: Synthetic oligonucleotide
gcuucaggugggacguggu

SEQ ID NO: 2519860 - RNA, 19 nt, Artificial Sequence
  Description of Artificial Sequence: Synthetic oligonucleotide
ggcuguggugucucuucuu

SEQ ID NO: 2519861 - RNA, 19 nt, Artificial Sequence
  Description of Artificial Sequence: Synthetic oligonucleotide
cguuguacuucuucuucuu

SEQ ID NO: 2519862 - RNA, 19 nt, Artificial Sequence
  Description of Artificial Sequence: Synthetic oligonucleotide
cgccggcggaaaccgcgcg

SEQ ID NO: 2519863 - RNA, 19 nt, Artificial Sequence
  Description of Artificial Sequence: Synthetic oligonucleotide
uaccggcucggggccuguu

SEQ ID NO: 2519864 - RNA, 19 nt, Artificial Sequence
  Description of Artificial Sequence: Synthetic oligonucleotide
cgccgcgccgggcccagcg

SEQ ID NO: 2519865 - RNA, 19 nt, Artificial Sequence
  Description of Artificial Sequence: Synthetic oligonucleotide
cggcucggggccuguucgc

SEQ ID NO: 2519866 - RNA, 19 nt, Artificial Sequence
  Description of Artificial Sequence: Synthetic oligonucleotide
cuucguccgucugcaugau

SEQ ID NO: 2519867 - RNA, 19 nt, Artificial Sequence
  Description of Artificial Sequence: Synthetic oligonucleotide
gccggcggaaaccgcgcgu

SEQ ID NO: 2519868 - RNA, 19 nt, Artificial Sequence
  Description of Artificial Sequence: Synthetic oligonucleotide
ccuccuguucugagucugu

SEQ ID NO: 2519869 - RNA, 19 nt, Artificial Sequence
  Description of Artificial Sequence: Synthetic oligonucleotide
ggaggcuguggugucucuu

SEQ ID NO: 2519870 - RNA, 19 nt, Artificial Sequence
  Description of Artificial Sequence: Synthetic oligonucleotide
ggggucaggggcagugaau

SEQ ID NO: 2519871 - RNA, 19 nt, Artificial Sequence
  Description of Artificial Sequence: Synthetic oligonucleotide
ccgcagccuaccggcucgg

SEQ ID NO: 2519872 - RNA, 19 nt, Artificial Sequence
  Description of Artificial Sequence: Synthetic oligonucleotide
ccgggcccagcgccgccgc

SEQ ID NO: 2519873 - RNA, 19 nt, Artificial Sequence
  Description of Artificial Sequence: Synthetic oligonucleotide
cggcggaaaccgcgcguug

SEQ ID NO: 2519874 - RNA, 19 nt, Artificial Sequence
  Description of Artificial Sequence: Synthetic oligonucleotide
accgcgcguuguacuucuu

SEQ ID NO: 2519875 - RNA, 19 nt, Artificial Sequence
  Description of Artificial Sequence: Synthetic oligonucleotide
gccggcccgccgcgguccc

SEQ ID NO: 2519876 - RNA, 19 nt, Artificial Sequence
  Description of Artificial Sequence: Synthetic oligonucleotide
ccgcgccggcggaaaccgc

SEQ ID NO: 2519877 - RNA, 19 nt, Artificial Sequence
  Description of Artificial Sequence: Synthetic oligonucleotide
ggccccuucgaggacccuu

SEQ ID NO: 2519878 - RNA, 19 nt, Artificial Sequence
  Description of Artificial Sequence: Synthetic oligonucleotide
cgcagccuaccggcucggg

SEQ ID NO: 2519879 - RNA, 19 nt, Artificial Sequence
  Description of Artificial Sequence: Synthetic oligonucleotide
cagccgccaccuucccaau

SEQ ID NO: 2519880 - RNA, 19 nt, Artificial Sequence
  Description of Artificial Sequence: Synthetic oligonucleotide
cgccgcccgcagccuaccg

SEQ ID NO: 2519881 - RNA, 19 nt, Artificial Sequence
  Description of Artificial Sequence: Synthetic oligonucleotide
ggcuugggguggaggcugu

SEQ ID NO: 2519882 - RNA, 19 nt, Artificial Sequence
  Description of Artificial Sequence: Synthetic oligonucleotide
gcgccgggcccagcgccgc

SEQ ID NO: 2519883 - RNA, 19 nt, Artificial Sequence
  Description of Artificial Sequence: Synthetic oligonucleotide
ccccauccaugugguuguc

SEQ ID NO: 2519884 - RNA, 19 nt, Artificial Sequence
  Description of Artificial Sequence: Synthetic oligonucleotide
ccgucugcaugaucuucuu

SEQ ID NO: 2519885 - RNA, 19 nt, Artificial Sequence
  Description of Artificial Sequence: Synthetic oligonucleotide
gcuuggcaucucggggccu

SEQ ID NO: 2519886 - RNA, 19 nt, Artificial Sequence
  Description of Artificial Sequence: Synthetic oligonucleotide
cgccggcccgccgcggucc

SEQ ID NO: 2519887 - RNA, 19 nt, Artificial Sequence
  Description of Artificial Sequence: Synthetic oligonucleotide
cgcccgcgagaugaugaca

SEQ ID NO: 2519888 - RNA, 19 nt, Artificial Sequence
  Description of Artificial Sequence: Synthetic oligonucleotide
cuaccggcucggggccugu

SEQ ID NO: 2519889 - RNA, 19 nt, Artificial Sequence
  Description of Artificial Sequence: Synthetic oligonucleotide
ccggcggaaaccgcgcguu

SEQ ID NO: 2519890 - RNA, 19 nt, Artificial Sequence
  Description of Artificial Sequence: Synthetic oligonucleotide
ccccuucgaggacccuugu

SEQ ID NO: 2519891 - RNA, 19 nt, Artificial Sequence
  Description of Artificial Sequence: Synthetic oligonucleotide
gccuaccggcucggggccu

SEQ ID NO: 2519892 - RNA, 19 nt, Artificial Sequence
  Description of Artificial Sequence: Synthetic oligonucleotide
ccggcccgccgcggucccc

SEQ ID NO: 2519893 - RNA, 19 nt, Artificial Sequence
  Description of Artificial Sequence: Synthetic oligonucleotide
cgaggacccuuguccccau

SEQ ID NO: 2519894 - RNA, 19 nt, Artificial Sequence
  Description of Artificial Sequence: Synthetic oligonucleotide
cggaugccaccaagucuuu

SEQ ID NO: 2519895 - RNA, 19 nt, Artificial Sequence
  Description of Artificial Sequence: Synthetic oligonucleotide
gccugguuuccggccccuu

SEQ ID NO: 2519896 - RNA, 19 nt, Artificial Sequence
  Description of Artificial Sequence: Synthetic oligonucleotide
cgagcgcccgcgagaugau

SEQ ID NO: 2519897 - RNA, 19 nt, Artificial Sequence
  Description of Artificial Sequence: Synthetic oligonucleotide
cgccgccggcccgccgcgg

SEQ ID NO: 2519898 - RNA, 19 nt, Artificial Sequence
  Description of Artificial Sequence: Synthetic oligonucleotide
ucugauaaaauuuauuggc

SEQ ID NO: 2519899 - RNA, 19 nt, Artificial Sequence
  Description of Artificial Sequence: Synthetic oligonucleotide
uuuuaugguaaccaaguag

SEQ ID NO: 2519900 - RNA, 19 nt, Artificial Sequence
  Description of Artificial Sequence: Synthetic oligonucleotide
uguaauuacuggcugaaug

SEQ ID NO: 2519901 - RNA, 19 nt, Artificial Sequence
  Description of Artificial Sequence: Synthetic oligonucleotide
augguaaccaaguagaaca

SEQ ID NO: 2519902 - RNA, 19 nt, Artificial Sequence
  Description of Artificial Sequence: Synthetic oligonucleotide
acugauaggaguucuuggc

SEQ ID NO: 2519903 - RNA, 19 nt, Artificial Sequence
  Description of Artificial Sequence: Synthetic oligonucleotide
ugaauguggacucuguuac

SEQ ID NO: 2519904 - RNA, 19 nt, Artificial Sequence
  Description of Artificial Sequence: Synthetic oligonucleotide
uuuauuguuuucuuuuaug

SEQ ID NO: 2519905 - RNA, 19 nt, Artificial Sequence
  Description of Artificial Sequence: Synthetic oligonucleotide
ugauaaaauuuauuggcca

SEQ ID NO: 2519906 - RNA, 19 nt, Artificial Sequence
  Description of Artificial Sequence: Synthetic oligonucleotide
uguggacucuguuacagcg

SEQ ID NO: 2519907 - RNA, 19 nt, Artificial Sequence
  Description of Artificial Sequence: Synthetic oligonucleotide
ucagugcacaugaacaagg

SEQ ID NO: 2519908 - RNA, 19 nt, Artificial Sequence
  Description of Artificial Sequence: Synthetic oligonucleotide
acaaauuucugauaaaauu

SEQ ID NO: 2519909 - RNA, 19 nt, Artificial Sequence
  Description of Artificial Sequence: Synthetic oligonucleotide
uucucggguacuuuggugg

SEQ ID NO: 2519910 - RNA, 19 nt, Artificial Sequence
  Description of Artificial Sequence: Synthetic oligonucleotide
cugauaaaauuuauuggcc

SEQ ID NO: 2519911 - RNA, 19 nt, Artificial Sequence
  Description of Artificial Sequence: Synthetic oligonucleotide
caaaucuguaauuacuggc

SEQ ID NO: 2519912 - RNA, 19 nt, Artificial Sequence
  Description of Artificial Sequence: Synthetic oligonucleotide
uacuucaaggcauaucucc

SEQ ID NO: 2519913 - RNA, 19 nt, Artificial Sequence
  Description of Artificial Sequence: Synthetic oligonucleotide
aaaccuacugagcgcauuc

SEQ ID NO: 2519914 - RNA, 19 nt, Artificial Sequence
  Description of Artificial Sequence: Synthetic oligonucleotide
uuauuggccaagaauggca

SEQ ID NO: 2519915 - RNA, 19 nt, Artificial Sequence
  Description of Artificial Sequence: Synthetic oligonucleotide
aaguagaacaguccucuug

SEQ ID NO: 2519916 - RNA, 19 nt, Artificial Sequence
  Description of Artificial Sequence: Synthetic oligonucleotide
aaaucuguaauuacuggcu

SEQ ID NO: 2519917 - RNA, 19 nt, Artificial Sequence
  Description of Artificial Sequence: Synthetic oligonucleotide
agugcacaugaacaaggcc

SEQ ID NO: 2519918 - RNA, 19 nt, Artificial Sequence
  Description of Artificial Sequence: Synthetic oligonucleotide
uggacucuguuacagcgcg

SEQ ID NO: 2519919 - RNA, 19 nt, Artificial Sequence
  Description of Artificial Sequence: Synthetic oligonucleotide
uauuccgugacuuccuacc

SEQ ID NO: 2519920 - RNA, 19 nt, Artificial Sequence
  Description of Artificial Sequence: Synthetic oligonucleotide
aauuacuggcugaaugugg

SEQ ID NO: 2519921 - RNA, 19 nt, Artificial Sequence
  Description of Artificial Sequence: Synthetic oligonucleotide
augaacaaggccugaggac

SEQ ID NO: 2519922 - RNA, 19 nt, Artificial Sequence
  Description of Artificial Sequence: Synthetic oligonucleotide
uaugauggaggccaggaau

SEQ ID NO: 2519923 - RNA, 19 nt, Artificial Sequence
  Description of Artificial Sequence: Synthetic oligonucleotide
agagggaagaaucugucca

SEQ ID NO: 2519924 - RNA, 19 nt, Artificial Sequence
  Description of Artificial Sequence: Synthetic oligonucleotide
gacugauaggaguucuugg

SEQ ID NO: 2519925 - RNA, 19 nt, Artificial Sequence
  Description of Artificial Sequence: Synthetic oligonucleotide
ugaggaccuaugauggagg

SEQ ID NO: 2519926 - RNA, 19 nt, Artificial Sequence
  Description of Artificial Sequence: Synthetic oligonucleotide
acugagcgcauucagcuuc

SEQ ID NO: 2519927 - RNA, 19 nt, Artificial Sequence
  Description of Artificial Sequence: Synthetic oligonucleotide
gauaggaguucuuggcccg

SEQ ID NO: 2519928 - RNA, 19 nt, Artificial Sequence
  Description of Artificial Sequence: Synthetic oligonucleotide
uuaaacaccagcagaucaa

SEQ ID NO: 2519929 - RNA, 19 nt, Artificial Sequence
  Description of Artificial Sequence: Synthetic oligonucleotide
gaaucuguccaugacuucc

SEQ ID NO: 2519930 - RNA, 19 nt, Artificial Sequence
  Description of Artificial Sequence: Synthetic oligonucleotide
aacaccagcagaucaacuu

SEQ ID NO: 2519931 - RNA, 19 nt, Artificial Sequence
  Description of Artificial Sequence: Synthetic oligonucleotide
agcagaucaacuuuccccu

SEQ ID NO: 2519932 - RNA, 19 nt, Artificial Sequence
  Description of Artificial Sequence: Synthetic oligonucleotide
gaugucagugcacaugaac

SEQ ID NO: 2519933 - RNA, 19 nt, Artificial Sequence
  Description of Artificial Sequence: Synthetic oligonucleotide
uucaaucugggcagcaagc

SEQ ID NO: 2519934 - RNA, 19 nt, Artificial Sequence
  Description of Artificial Sequence: Synthetic oligonucleotide
acaugaacaaggccugagg

SEQ ID NO: 2519935 - RNA, 19 nt, Artificial Sequence
  Description of Artificial Sequence: Synthetic oligonucleotide
guuaaacaccagcagauca

SEQ ID NO: 2519936 - RNA, 19 nt, Artificial Sequence
  Description of Artificial Sequence: Synthetic oligonucleotide
uuuauuggccaagaauggc

SEQ ID NO: 2519937 - RNA, 19 nt, Artificial Sequence
  Description of Artificial Sequence: Synthetic oligonucleotide
aucagucucaaaccuacug

SEQ ID NO: 2519938 - RNA, 19 nt, Artificial Sequence
  Description of Artificial Sequence: Synthetic oligonucleotide
ugguaaccaaguagaacag

SEQ ID NO: 2519939 - RNA, 19 nt, Artificial Sequence
  Description of Artificial Sequence: Synthetic oligonucleotide
uccaggagcaggaacgugu

SEQ ID NO: 2519940 - RNA, 19 nt, Artificial Sequence
  Description of Artificial Sequence: Synthetic oligonucleotide
cugauaggaguucuuggcc

SEQ ID NO: 2519941 - RNA, 19 nt, Artificial Sequence
  Description of Artificial Sequence: Synthetic oligonucleotide
gaaccugaggacugauagg

SEQ ID NO: 2519942 - RNA, 19 nt, Artificial Sequence
  Description of Artificial Sequence: Synthetic oligonucleotide
uaauuacuggcugaaugug

SEQ ID NO: 2519943 - RNA, 19 nt, Artificial Sequence
  Description of Artificial Sequence: Synthetic oligonucleotide
uguuacagcgcgcugucuc

SEQ ID NO: 2519944 - RNA, 19 nt, Artificial Sequence
  Description of Artificial Sequence: Synthetic oligonucleotide
uggggaaagaaguucugac

SEQ ID NO: 2519945 - RNA, 19 nt, Artificial Sequence
  Description of Artificial Sequence: Synthetic oligonucleotide
uuccuaccucuucaggagg

SEQ ID NO: 2519946 - RNA, 19 nt, Artificial Sequence
  Description of Artificial Sequence: Synthetic oligonucleotide
ucucaaaccuacugagcgc

SEQ ID NO: 2519947 - RNA, 19 nt, Artificial Sequence
  Description of Artificial Sequence: Synthetic oligonucleotide
cuucuauuccgugacuucc

SEQ ID NO: 2519948 - RNA, 19 nt, Artificial Sequence
  Description of Artificial Sequence: Synthetic oligonucleotide
uuggccaagaauggcauca

SEQ ID NO: 2519949 - RNA, 19 nt, Artificial Sequence
  Description of Artificial Sequence: Synthetic oligonucleotide
cuucaaucugggcagcaag

SEQ ID NO: 2519950 - RNA, 19 nt, Artificial Sequence
  Description of Artificial Sequence: Synthetic oligonucleotide
guaaccaaguagaacaguc

SEQ ID NO: 2519951 - RNA, 19 nt, Artificial Sequence
  Description of Artificial Sequence: Synthetic oligonucleotide
uacuuugguggcucugggg

SEQ ID NO: 2519952 - RNA, 19 nt, Artificial Sequence
  Description of Artificial Sequence: Synthetic oligonucleotide
uauuggccaagaauggcau

SEQ ID NO: 2519953 - RNA, 19 nt, Artificial Sequence
  Description of Artificial Sequence: Synthetic oligonucleotide
guaauuacuggcugaaugu

SEQ ID NO: 2519954 - RNA, 19 nt, Artificial Sequence
  Description of Artificial Sequence: Synthetic oligonucleotide
ugacuucccgaccauuucu

SEQ ID NO: 2519955 - RNA, 19 nt, Artificial Sequence
  Description of Artificial Sequence: Synthetic oligonucleotide
cuucccgaccauuucuucc

SEQ ID NO: 2519956 - RNA, 19 nt, Artificial Sequence
  Description of Artificial Sequence: Synthetic oligonucleotide
cauacagcggcguggggag

SEQ ID NO: 2519957 - RNA, 19 nt, Artificial Sequence
  Description of Artificial Sequence: Synthetic oligonucleotide
gaacguguccuccgaaggc

SEQ ID NO: 2519958 - RNA, 19 nt, Artificial Sequence
  Description of Artificial Sequence: Synthetic oligonucleotide
gaaagaaguucugacgcca

SEQ ID NO: 2519959 - RNA, 19 nt, Artificial Sequence
  Description of Artificial Sequence: Synthetic oligonucleotide
gacacuaggacuugcugaa

SEQ ID NO: 2519960 - RNA, 19 nt, Artificial Sequence
  Description of Artificial Sequence: Synthetic oligonucleotide
ugcuccuacuucaaggcau

SEQ ID NO: 2519961 - RNA, 19 nt, Artificial Sequence
  Description of Artificial Sequence: Synthetic oligonucleotide
ucuguaauuacuggcugaa

SEQ ID NO: 2519962 - RNA, 19 nt, Artificial Sequence
  Description of Artificial Sequence: Synthetic oligonucleotide
agucucaaaccuacugagc

SEQ ID NO: 2519963 - RNA, 19 nt, Artificial Sequence
  Description of Artificial Sequence: Synthetic oligonucleotide
uggcaucagucucaaaccu

SEQ ID NO: 2519964 - RNA, 19 nt, Artificial Sequence
  Description of Artificial Sequence: Synthetic oligonucleotide
uccgugacuuccuaccucu

SEQ ID NO: 2519965 - RNA, 19 nt, Artificial Sequence
  Description of Artificial Sequence: Synthetic oligonucleotide
gacuuccuaccucuucagg

SEQ ID NO: 2519966 - RNA, 19 nt, Artificial Sequence
  Description of Artificial Sequence: Synthetic oligonucleotide
uggaccaaaucuguaauua

SEQ ID NO: 2519967 - RNA, 19 nt, Artificial Sequence
  Description of Artificial Sequence: Synthetic oligonucleotide
acuccggcuagcucggccg

SEQ ID NO: 2519968 - RNA, 19 nt, Artificial Sequence
  Description of Artificial Sequence: Synthetic oligonucleotide
aucuguaauuacuggcuga

SEQ ID NO: 2519969 - RNA, 19 nt, Artificial Sequence
  Description of Artificial Sequence: Synthetic oligonucleotide
agaaucuguccaugacuuc

SEQ ID NO: 2519970 - RNA, 19 nt, Artificial Sequence
  Description of Artificial Sequence: Synthetic oligonucleotide
uucuauuccgugacuuccu

SEQ ID NO: 2519971 - RNA, 19 nt, Artificial Sequence
  Description of Artificial Sequence: Synthetic oligonucleotide
uucccgaccauuucuucca

SEQ ID NO: 2519972 - RNA, 19 nt, Artificial Sequence
  Description of Artificial Sequence: Synthetic oligonucleotide
uccgaaggcucguacacgu

SEQ ID NO: 2519973 - RNA, 19 nt, Artificial Sequence
  Description of Artificial Sequence: Synthetic oligonucleotide
guugaugucagugcacaug

SEQ ID NO: 2519974 - RNA, 19 nt, Artificial Sequence
  Description of Artificial Sequence: Synthetic oligonucleotide
uacacgucgcugaaggcuc

SEQ ID NO: 2519975 - RNA, 19 nt, Artificial Sequence
  Description of Artificial Sequence: Synthetic oligonucleotide
caugaacaaggccugagga

SEQ ID NO: 2519976 - RNA, 19 nt, Artificial Sequence
  Description of Artificial Sequence: Synthetic oligonucleotide
ccaaaucuguaauuacugg

SEQ ID NO: 2519977 - RNA, 19 nt, Artificial Sequence
  Description of Artificial Sequence: Synthetic oligonucleotide
aggaacguguccuccgaag

SEQ ID NO: 2519978 - RNA, 19 nt, Artificial Sequence
  Description of Artificial Sequence: Synthetic oligonucleotide
ugacuuccuaccucuucag

SEQ ID NO: 2519979 - RNA, 19 nt, Artificial Sequence
  Description of Artificial Sequence: Synthetic oligonucleotide
cagagggaagaaucugucc

SEQ ID NO: 2519980 - RNA, 19 nt, Artificial Sequence
  Description of Artificial Sequence: Synthetic oligonucleotide
ggaacguguccuccgaagg

SEQ ID NO: 2519981 - RNA, 19 nt, Artificial Sequence
  Description of Artificial Sequence: Synthetic oligonucleotide
auuacuggcugaaugugga

SEQ ID NO: 2519982 - RNA, 19 nt, Artificial Sequence
  Description of Artificial Sequence: Synthetic oligonucleotide
agaucaacuuuccccuuca

SEQ ID NO: 2519983 - RNA, 19 nt, Artificial Sequence
  Description of Artificial Sequence: Synthetic oligonucleotide
gaggaccuaugauggaggc

SEQ ID NO: 2519984 - RNA, 19 nt, Artificial Sequence
  Description of Artificial Sequence: Synthetic oligonucleotide
gacgccagagggaagaauc

SEQ ID NO: 2519985 - RNA, 19 nt, Artificial Sequence
  Description of Artificial Sequence: Synthetic oligonucleotide
aacguguccuccgaaggcu

SEQ ID NO: 2519986 - RNA, 19 nt, Artificial Sequence
  Description of Artificial Sequence: Synthetic oligonucleotide
uguccaugacuucccgacc

SEQ ID NO: 2519987 - RNA, 19 nt, Artificial Sequence
  Description of Artificial Sequence: Synthetic oligonucleotide
ucuguuacagcgcgcuguc

SEQ ID NO: 2519988 - RNA, 19 nt, Artificial Sequence
  Description of Artificial Sequence: Synthetic oligonucleotide
cagugcacaugaacaaggc

SEQ ID NO: 2519989 - RNA, 19 nt, Artificial Sequence
  Description of Artificial Sequence: Synthetic oligonucleotide
accuacugagcgcauucag

SEQ ID NO: 2519990 - RNA, 19 nt, Artificial Sequence
  Description of Artificial Sequence: Synthetic oligonucleotide
uccuaccucuucaggagga

SEQ ID NO: 2519991 - RNA, 19 nt, Artificial Sequence
  Description of Artificial Sequence: Synthetic oligonucleotide
caguucucggguacuuugg

SEQ ID NO: 2519992 - RNA, 19 nt, Artificial Sequence
  Description of Artificial Sequence: Synthetic oligonucleotide
aucaacuuuccccuucaau

SEQ ID NO: 2519993 - RNA, 19 nt, Artificial Sequence
  Description of Artificial Sequence: Synthetic oligonucleotide
cugaggaccuaugauggag

SEQ ID NO: 2519994 - RNA, 19 nt, Artificial Sequence
  Description of Artificial Sequence: Synthetic oligonucleotide
guuacagcgcgcugucucc

SEQ ID NO: 2519995 - RNA, 19 nt, Artificial Sequence
  Description of Artificial Sequence: Synthetic oligonucleotide
agacccugcuccuacuuca

SEQ ID NO: 2519996 - RNA, 19 nt, Artificial Sequence
  Description of Artificial Sequence: Synthetic oligonucleotide
auaucuccacuccggcuag

SEQ ID NO: 2519997 - RNA, 19 nt, Artificial Sequence
  Description of Artificial Sequence: Synthetic oligonucleotide
ucgagcgcguccaggagca

SEQ ID NO: 2519998 - RNA, 19 nt, Artificial Sequence
  Description of Artificial Sequence: Synthetic oligonucleotide
gacccacgugcccauacag

SEQ ID NO: 2519999 - RNA, 19 nt, Artificial Sequence
  Description of Artificial Sequence: Synthetic oligonucleotide
acuucccgaccauuucuuc

SEQ ID NO: 2520000 - RNA, 19 nt, Artificial Sequence
  Description of Artificial Sequence: Synthetic oligonucleotide
aaucugggcagcaagccuu

SEQ ID NO: 2520001 - RNA, 19 nt, Artificial Sequence
  Description of Artificial Sequence: Synthetic oligonucleotide
cacgugcccauacagcggc

SEQ ID NO: 2520002 - RNA, 19 nt, Artificial Sequence
  Description of Artificial Sequence: Synthetic oligonucleotide
augauggaggccaggaaug

SEQ ID NO: 2520003 - RNA, 19 nt, Artificial Sequence
  Description of Artificial Sequence: Synthetic oligonucleotide
aggaccuaugauggaggcc

SEQ ID NO: 2520004 - RNA, 19 nt, Artificial Sequence
  Description of Artificial Sequence: Synthetic oligonucleotide
ucucggguacuuugguggc

SEQ ID NO: 2520005 - RNA, 19 nt, Artificial Sequence
  Description of Artificial Sequence: Synthetic oligonucleotide
cuuggggaaagaaguucug

SEQ ID NO: 2520006 - RNA, 19 nt, Artificial Sequence
  Description of Artificial Sequence: Synthetic oligonucleotide
gagcgcauucagcuucagg

SEQ ID NO: 2520007 - RNA, 19 nt, Artificial Sequence
  Description of Artificial Sequence: Synthetic oligonucleotide
cauaucuccacuccggcua

SEQ ID NO: 2520008 - RNA, 19 nt, Artificial Sequence
  Description of Artificial Sequence: Synthetic oligonucleotide
auuccgugacuuccuaccu

SEQ ID NO: 2520009 - RNA, 19 nt, Artificial Sequence
  Description of Artificial Sequence: Synthetic oligonucleotide
ugauggaggccaggaaugc

SEQ ID NO: 2520010 - RNA, 19 nt, Artificial Sequence
  Description of Artificial Sequence: Synthetic oligonucleotide
ugcccauacagcggcgugg

SEQ ID NO: 2520011 - RNA, 19 nt, Artificial Sequence
  Description of Artificial Sequence: Synthetic oligonucleotide
ggccugaggaccuaugaug

SEQ ID NO: 2520012 - RNA, 19 nt, Artificial Sequence
  Description of Artificial Sequence: Synthetic oligonucleotide
gguacuuugguggcucugg

SEQ ID NO: 2520013 - RNA, 19 nt, Artificial Sequence
  Description of Artificial Sequence: Synthetic oligonucleotide
aguucucggguacuuuggu

SEQ ID NO: 2520014 - RNA, 19 nt, Artificial Sequence
  Description of Artificial Sequence: Synthetic oligonucleotide
augcagacaccacaccaga

SEQ ID NO: 2520015 - RNA, 19 nt, Artificial Sequence
  Description of Artificial Sequence: Synthetic oligonucleotide
guucucggguacuuuggug

SEQ ID NO: 2520016 - RNA, 19 nt, Artificial Sequence
  Description of Artificial Sequence: Synthetic oligonucleotide
ggaccuaugauggaggcca

SEQ ID NO: 2520017 - RNA, 19 nt, Artificial Sequence
  Description of Artificial Sequence: Synthetic oligonucleotide
cuauuccgugacuuccuac

SEQ ID NO: 2520018 - RNA, 19 nt, Artificial Sequence
  Description of Artificial Sequence: Synthetic oligonucleotide
gugcacaugaacaaggccu

SEQ ID NO: 2520019 - RNA, 19 nt, Artificial Sequence
  Description of Artificial Sequence: Synthetic oligonucleotide
uccuccgaaggcucguaca

SEQ ID NO: 2520020 - RNA, 19 nt, Artificial Sequence
  Description of Artificial Sequence: Synthetic oligonucleotide
cuacuucaaggcauaucuc

SEQ ID NO: 2520021 - RNA, 19 nt, Artificial Sequence
  Description of Artificial Sequence: Synthetic oligonucleotide
uuggaccaaaucuguaauu

SEQ ID NO: 2520022 - RNA, 19 nt, Artificial Sequence
  Description of Artificial Sequence: Synthetic oligonucleotide
ucgcugaaggcuccgcgac

SEQ ID NO: 2520023 - RNA, 19 nt, Artificial Sequence
  Description of Artificial Sequence: Synthetic oligonucleotide
cuacugagcgcauucagcu

SEQ ID NO: 2520024 - RNA, 19 nt, Artificial Sequence
  Description of Artificial Sequence: Synthetic oligonucleotide
cucgagcgcguccaggagc

SEQ ID NO: 2520025 - RNA, 19 nt, Artificial Sequence
  Description of Artificial Sequence: Synthetic oligonucleotide
gaacaguccucuuggggaa

SEQ ID NO: 2520026 - RNA, 19 nt, Artificial Sequence
  Description of Artificial Sequence: Synthetic oligonucleotide
ggacacuaggacuugcuga

SEQ ID NO: 2520027 - RNA, 19 nt, Artificial Sequence
  Description of Artificial Sequence: Synthetic oligonucleotide
gaaggcucguacacgucgc

SEQ ID NO: 2520028 - RNA, 19 nt, Artificial Sequence
  Description of Artificial Sequence: Synthetic oligonucleotide
gggguuaaacaccagcaga

SEQ ID NO: 2520029 - RNA, 19 nt, Artificial Sequence
  Description of Artificial Sequence: Synthetic oligonucleotide
cucaaaccuacugagcgca

SEQ ID NO: 2520030 - RNA, 19 nt, Artificial Sequence
  Description of Artificial Sequence: Synthetic oligonucleotide
cacaugaacaaggccugag

SEQ ID NO: 2520031 - RNA, 19 nt, Artificial Sequence
  Description of Artificial Sequence: Synthetic oligonucleotide
ggaccaaaucuguaauuac

SEQ ID NO: 2520032 - RNA, 19 nt, Artificial Sequence
  Description of Artificial Sequence: Synthetic oligonucleotide
ggcuccgcgacccacgugc

SEQ ID NO: 2520033 - RNA, 19 nt, Artificial Sequence
  Description of Artificial Sequence: Synthetic oligonucleotide
guccaugacuucccgacca

SEQ ID NO: 2520034 - RNA, 19 nt, Artificial Sequence
  Description of Artificial Sequence: Synthetic oligonucleotide
aaggcucguacacgucgcu

SEQ ID NO: 2520035 - RNA, 19 nt, Artificial Sequence
  Description of Artificial Sequence: Synthetic oligonucleotide
cagaucaacuuuccccuuc

SEQ ID NO: 2520036 - RNA, 19 nt, Artificial Sequence
  Description of Artificial Sequence: Synthetic oligonucleotide
cuucaggaggagucacuac

SEQ ID NO: 2520037 - RNA, 19 nt, Artificial Sequence
  Description of Artificial Sequence: Synthetic oligonucleotide
guccucuuggggaaagaag

SEQ ID NO: 2520038 - RNA, 19 nt, Artificial Sequence
  Description of Artificial Sequence: Synthetic oligonucleotide
uuccgugacuuccuaccuc

SEQ ID NO: 2520039 - RNA, 19 nt, Artificial Sequence
  Description of Artificial Sequence: Synthetic oligonucleotide
ugcuucuauuccgugacuu

SEQ ID NO: 2520040 - RNA, 19 nt, Artificial Sequence
  Description of Artificial Sequence: Synthetic oligonucleotide
acccacgugcccauacagc

SEQ ID NO: 2520041 - RNA, 19 nt, Artificial Sequence
  Description of Artificial Sequence: Synthetic oligonucleotide
uugcagaccuuuugucuuc

SEQ ID NO: 2520042 - RNA, 19 nt, Artificial Sequence
  Description of Artificial Sequence: Synthetic oligonucleotide
ccuacuucaaggcauaucu

SEQ ID NO: 2520043 - RNA, 19 nt, Artificial Sequence
  Description of Artificial Sequence: Synthetic oligonucleotide
caacuuuccccuucaaucu

SEQ ID NO: 2520044 - RNA, 19 nt, Artificial Sequence
  Description of Artificial Sequence: Synthetic oligonucleotide
aaccuacugagcgcauuca

SEQ ID NO: 2520045 - RNA, 19 nt, Artificial Sequence
  Description of Artificial Sequence: Synthetic oligonucleotide
aguucugacgccagaggga

SEQ ID NO: 2520046 - RNA, 19 nt, Artificial Sequence
  Description of Artificial Sequence: Synthetic oligonucleotide
ggacuugcugaaccugagg

SEQ ID NO: 2520047 - RNA, 19 nt, Artificial Sequence
  Description of Artificial Sequence: Synthetic oligonucleotide
gcguccaggagcaggaacg

SEQ ID NO: 2520048 - RNA, 19 nt, Artificial Sequence
  Description of Artificial Sequence: Synthetic oligonucleotide
ggcagcaagccuuggacca

SEQ ID NO: 2520049 - RNA, 19 nt, Artificial Sequence
  Description of Artificial Sequence: Synthetic oligonucleotide
ggaaugcagacaccacacc

SEQ ID NO: 2520050 - RNA, 19 nt, Artificial Sequence
  Description of Artificial Sequence: Synthetic oligonucleotide
gcaucagucucaaaccuac

SEQ ID NO: 2520051 - RNA, 19 nt, Artificial Sequence
  Description of Artificial Sequence: Synthetic oligonucleotide
ugaugucagugcacaugaa

SEQ ID NO: 2520052 - RNA, 19 nt, Artificial Sequence
  Description of Artificial Sequence: Synthetic oligonucleotide
uccgcgacccacgugccca

SEQ ID NO: 2520053 - RNA, 19 nt, Artificial Sequence
  Description of Artificial Sequence: Synthetic oligonucleotide
uccuacuucaaggcauauc

SEQ ID NO: 2520054 - RNA, 19 nt, Artificial Sequence
  Description of Artificial Sequence: Synthetic oligonucleotide
cuugcugaaccugaggacu

SEQ ID NO: 2520055 - RNA, 19 nt, Artificial Sequence
  Description of Artificial Sequence: Synthetic oligonucleotide
gaccuuuugucuucaguau

SEQ ID NO: 2520056 - RNA, 19 nt, Artificial Sequence
  Description of Artificial Sequence: Synthetic oligonucleotide
uucugacgccagagggaag

SEQ ID NO: 2520057 - RNA, 19 nt, Artificial Sequence
  Description of Artificial Sequence: Synthetic oligonucleotide
gccaagaauggcaucaguc

SEQ ID NO: 2520058 - RNA, 19 nt, Artificial Sequence
  Description of Artificial Sequence: Synthetic oligonucleotide
guucugacgccagagggaa

SEQ ID NO: 2520059 - RNA, 19 nt, Artificial Sequence
  Description of Artificial Sequence: Synthetic oligonucleotide
ucaaaccuacugagcgcau

SEQ ID NO: 2520060 - RNA, 19 nt, Artificial Sequence
  Description of Artificial Sequence: Synthetic oligonucleotide
cuccgaaggcucguacacg

SEQ ID NO: 2520061 - RNA, 19 nt, Artificial Sequence
  Description of Artificial Sequence: Synthetic oligonucleotide
acucuguuacagcgcgcug

SEQ ID NO: 2520062 - RNA, 19 nt, Artificial Sequence
  Description of Artificial Sequence: Synthetic oligonucleotide
uggcugaauguggacucug

SEQ ID NO: 2520063 - RNA, 19 nt, Artificial Sequence
  Description of Artificial Sequence: Synthetic oligonucleotide
cgaaggcucguacacgucg

SEQ ID NO: 2520064 - RNA, 19 nt, Artificial Sequence
  Description of Artificial Sequence: Synthetic oligonucleotide
ugcagaccuuuugucuuca

SEQ ID NO: 2520065 - RNA, 19 nt, Artificial Sequence
  Description of Artificial Sequence: Synthetic oligonucleotide
ucggguacuuugguggcuc

SEQ ID NO: 2520066 - RNA, 19 nt, Artificial Sequence
  Description of Artificial Sequence: Synthetic oligonucleotide
guggacucuguuacagcgc

SEQ ID NO: 2520067 - RNA, 19 nt, Artificial Sequence
  Description of Artificial Sequence: Synthetic oligonucleotide
aggacuugcugaaccugag

SEQ ID NO: 2520068 - RNA, 19 nt, Artificial Sequence
  Description of Artificial Sequence: Synthetic oligonucleotide
gucgcugaaggcuccgcga

SEQ ID NO: 2520069 - RNA, 19 nt, Artificial Sequence
  Description of Artificial Sequence: Synthetic oligonucleotide
accuaugauggaggccagg

SEQ ID NO: 2520070 - RNA, 19 nt, Artificial Sequence
  Description of Artificial Sequence: Synthetic oligonucleotide
gacucuguuacagcgcgcu

SEQ ID NO: 2520071 - RNA, 19 nt, Artificial Sequence
  Description of Artificial Sequence: Synthetic oligonucleotide
uuacagcgcgcugucucca

SEQ ID NO: 2520072 - RNA, 19 nt, Artificial Sequence
  Description of Artificial Sequence: Synthetic oligonucleotide
uacugagcgcauucagcuu

SEQ ID NO: 2520073 - RNA, 19 nt, Artificial Sequence
  Description of Artificial Sequence: Synthetic oligonucleotide
cuuggaccaaaucuguaau

SEQ ID NO: 2520074 - RNA, 19 nt, Artificial Sequence
  Description of Artificial Sequence: Synthetic oligonucleotide
cuugccugcaaagugcugu

SEQ ID NO: 2520075 - RNA, 19 nt, Artificial Sequence
  Description of Artificial Sequence: Synthetic oligonucleotide
caccagacccugcuccuac

SEQ ID NO: 2520076 - RNA, 19 nt, Artificial Sequence
  Description of Artificial Sequence: Synthetic oligonucleotide
guacacgucgcugaaggcu

SEQ ID NO: 2520077 - RNA, 19 nt, Artificial Sequence
  Description of Artificial Sequence: Synthetic oligonucleotide
ugcugaaccugaggacuga

SEQ ID NO: 2520078 - RNA, 19 nt, Artificial Sequence
  Description of Artificial Sequence: Synthetic oligonucleotide
cacuccggcuagcucggcc

SEQ ID NO: 2520079 - RNA, 19 nt, Artificial Sequence
  Description of Artificial Sequence: Synthetic oligonucleotide
accucuucaggaggaguca

SEQ ID NO: 2520080 - RNA, 19 nt, Artificial Sequence
  Description of Artificial Sequence: Synthetic oligonucleotide
gcuucuauuccgugacuuc

SEQ ID NO: 2520081 - RNA, 19 nt, Artificial Sequence
  Description of Artificial Sequence: Synthetic oligonucleotide
ucccgaccauuucuuccac

SEQ ID NO: 2520082 - RNA, 19 nt, Artificial Sequence
  Description of Artificial Sequence: Synthetic oligonucleotide
gcugaaggcuccgcgaccc

SEQ ID NO: 2520083 - RNA, 19 nt, Artificial Sequence
  Description of Artificial Sequence: Synthetic oligonucleotide
acacgucgcugaaggcucc

SEQ ID NO: 2520084 - RNA, 19 nt, Artificial Sequence
  Description of Artificial Sequence: Synthetic oligonucleotide
ccagagggaagaaucuguc

SEQ ID NO: 2520085 - RNA, 19 nt, Artificial Sequence
  Description of Artificial Sequence: Synthetic oligonucleotide
cagacccugcuccuacuuc

SEQ ID NO: 2520086 - RNA, 19 nt, Artificial Sequence
  Description of Artificial Sequence: Synthetic oligonucleotide
cuaugauggaggccaggaa

SEQ ID NO: 2520087 - RNA, 19 nt, Artificial Sequence
  Description of Artificial Sequence: Synthetic oligonucleotide
ggcucguacacgucgcuga

SEQ ID NO: 2520088 - RNA, 19 nt, Artificial Sequence
  Description of Artificial Sequence: Synthetic oligonucleotide
gaucaacuuuccccuucaa

SEQ ID NO: 2520089 - RNA, 19 nt, Artificial Sequence
  Description of Artificial Sequence: Synthetic oligonucleotide
uuccccuuccacguccuau

SEQ ID NO: 2520090 - RNA, 19 nt, Artificial Sequence
  Description of Artificial Sequence: Synthetic oligonucleotide
ccgcuugccugcaaagugc

SEQ ID NO: 2520091 - RNA, 19 nt, Artificial Sequence
  Description of Artificial Sequence: Synthetic oligonucleotide
gguuaaacaccagcagauc

SEQ ID NO: 2520092 - RNA, 19 nt, Artificial Sequence
  Description of Artificial Sequence: Synthetic oligonucleotide
aacaguccucuuggggaaa

SEQ ID NO: 2520093 - RNA, 19 nt, Artificial Sequence
  Description of Artificial Sequence: Synthetic oligonucleotide
acgucgcugaaggcuccgc

SEQ ID NO: 2520094 - RNA, 19 nt, Artificial Sequence
  Description of Artificial Sequence: Synthetic oligonucleotide
gaccuaugauggaggccag

SEQ ID NO: 2520095 - RNA, 19 nt, Artificial Sequence
  Description of Artificial Sequence: Synthetic oligonucleotide
ccuuggaccaaaucuguaa

SEQ ID NO: 2520096 - RNA, 19 nt, Artificial Sequence
  Description of Artificial Sequence: Synthetic oligonucleotide
gugcccauacagcggcgug

SEQ ID NO: 2520097 - RNA, 19 nt, Artificial Sequence
  Description of Artificial Sequence: Synthetic oligonucleotide
cucguacacgucgcugaag

SEQ ID NO: 2520098 - RNA, 19 nt, Artificial Sequence
  Description of Artificial Sequence: Synthetic oligonucleotide
caugacuucccgaccauuu

SEQ ID NO: 2520099 - RNA, 19 nt, Artificial Sequence
  Description of Artificial Sequence: Synthetic oligonucleotide
uggcccgcuugccugcaaa

SEQ ID NO: 2520100 - RNA, 19 nt, Artificial Sequence
  Description of Artificial Sequence: Synthetic oligonucleotide
gaggacugauaggaguucu

SEQ ID NO: 2520101 - RNA, 19 nt, Artificial Sequence
  Description of Artificial Sequence: Synthetic oligonucleotide
acagcggcguggggaggcc

SEQ ID NO: 2520102 - RNA, 19 nt, Artificial Sequence
  Description of Artificial Sequence: Synthetic oligonucleotide
acgccagagggaagaaucu

SEQ ID NO: 2520103 - RNA, 19 nt, Artificial Sequence
  Description of Artificial Sequence: Synthetic oligonucleotide
uccaggguacaggcagcug

SEQ ID NO: 2520104 - RNA, 19 nt, Artificial Sequence
  Description of Artificial Sequence: Synthetic oligonucleotide
gcuagcucggccgccgccg

SEQ ID NO: 2520105 - RNA, 19 nt, Artificial Sequence
  Description of Artificial Sequence: Synthetic oligonucleotide
cccgcuugccugcaaagug

SEQ ID NO: 2520106 - RNA, 19 nt, Artificial Sequence
  Description of Artificial Sequence: Synthetic oligonucleotide
cugcuccuacuucaaggca

SEQ ID NO: 2520107 - RNA, 19 nt, Artificial Sequence
  Description of Artificial Sequence: Synthetic oligonucleotide
cugagcgcauucagcuuca

SEQ ID NO: 2520108 - RNA, 19 nt, Artificial Sequence
  Description of Artificial Sequence: Synthetic oligonucleotide
cuagcucggccgccgccgc

SEQ ID NO: 2520109 - RNA, 19 nt, Artificial Sequence
  Description of Artificial Sequence: Synthetic oligonucleotide
ugagcgcauucagcuucag

SEQ ID NO: 2520110 - RNA, 19 nt, Artificial Sequence
  Description of Artificial Sequence: Synthetic oligonucleotide
gcgcauucagcuucaggca

SEQ ID NO: 2520111 - RNA, 19 nt, Artificial Sequence
  Description of Artificial Sequence: Synthetic oligonucleotide
guccuccgaaggcucguac

SEQ ID NO: 2520112 - RNA, 19 nt, Artificial Sequence
  Description of Artificial Sequence: Synthetic oligonucleotide
ugacgccagagggaagaau

SEQ ID NO: 2520113 - RNA, 19 nt, Artificial Sequence
  Description of Artificial Sequence: Synthetic oligonucleotide
gaacaaggccugaggaccu

SEQ ID NO: 2520114 - RNA, 19 nt, Artificial Sequence
  Description of Artificial Sequence: Synthetic oligonucleotide
ccacgugcccauacagcgg

SEQ ID NO: 2520115 - RNA, 19 nt, Artificial Sequence
  Description of Artificial Sequence: Synthetic oligonucleotide
agcgcgcugucuccagggu

SEQ ID NO: 2520116 - RNA, 19 nt, Artificial Sequence
  Description of Artificial Sequence: Synthetic oligonucleotide
ggguuaaacaccagcagau

SEQ ID NO: 2520117 - RNA, 19 nt, Artificial Sequence
  Description of Artificial Sequence: Synthetic oligonucleotide
gcccauacagcggcguggg

SEQ ID NO: 2520118 - RNA, 19 nt, Artificial Sequence
  Description of Artificial Sequence: Synthetic oligonucleotide
cugaaccugaggacugaua

SEQ ID NO: 2520119 - RNA, 19 nt, Artificial Sequence
  Description of Artificial Sequence: Synthetic oligonucleotide
cucuguuacagcgcgcugu

SEQ ID NO: 2520120 - RNA, 19 nt, Artificial Sequence
  Description of Artificial Sequence: Synthetic oligonucleotide
aacaaggccugaggaccua

SEQ ID NO: 2520121 - RNA, 19 nt, Artificial Sequence
  Description of Artificial Sequence: Synthetic oligonucleotide
cagaccuuuugucuucagu

SEQ ID NO: 2520122 - RNA, 19 nt, Artificial Sequence
  Description of Artificial Sequence: Synthetic oligonucleotide
ccuaugauggaggccagga

SEQ ID NO: 2520123 - RNA, 19 nt, Artificial Sequence
  Description of Artificial Sequence: Synthetic oligonucleotide
cacgucgcugaaggcuccg

SEQ ID NO: 2520124 - RNA, 19 nt, Artificial Sequence
  Description of Artificial Sequence: Synthetic oligonucleotide
ggcguggggaggcccggcg

SEQ ID NO: 2520125 - RNA, 19 nt, Artificial Sequence
  Description of Artificial Sequence: Synthetic oligonucleotide
acaaggccugaggaccuau

SEQ ID NO: 2520126 - RNA, 19 nt, Artificial Sequence
  Description of Artificial Sequence: Synthetic oligonucleotide
cuccgcgacccacgugccc

SEQ ID NO: 2520127 - RNA, 19 nt, Artificial Sequence
  Description of Artificial Sequence: Synthetic oligonucleotide
cuggggacacuaggacuug

SEQ ID NO: 2520128 - RNA, 19 nt, Artificial Sequence
  Description of Artificial Sequence: Synthetic oligonucleotide
cgcgcugucuccaggguac

SEQ ID NO: 2520129 - RNA, 19 nt, Artificial Sequence
  Description of Artificial Sequence: Synthetic oligonucleotide
uccggcuagcucggccgcc

SEQ ID NO: 2520130 - RNA, 19 nt, Artificial Sequence
  Description of Artificial Sequence: Synthetic oligonucleotide
gcaggaacguguccuccga

SEQ ID NO: 2520131 - RNA, 19 nt, Artificial Sequence
  Description of Artificial Sequence: Synthetic oligonucleotide
aggacugauaggaguucuu

SEQ ID NO: 2520132 - RNA, 19 nt, Artificial Sequence
  Description of Artificial Sequence: Synthetic oligonucleotide
gccucgagcgcguccagga

SEQ ID NO: 2520133 - RNA, 19 nt, Artificial Sequence
  Description of Artificial Sequence: Synthetic oligonucleotide
guggggaggcccggcgccg

SEQ ID NO: 2520134 - RNA, 19 nt, Artificial Sequence
  Description of Artificial Sequence: Synthetic oligonucleotide
ccauacagcggcgugggga

SEQ ID NO: 2520135 - RNA, 19 nt, Artificial Sequence
  Description of Artificial Sequence: Synthetic oligonucleotide
aggguacaggcagcugccu

SEQ ID NO: 2520136 - RNA, 19 nt, Artificial Sequence
  Description of Artificial Sequence: Synthetic oligonucleotide
uguccuccgaaggcucgua

SEQ ID NO: 2520137 - RNA, 19 nt, Artificial Sequence
  Description of Artificial Sequence: Synthetic oligonucleotide
gguaaccaaguagaacagu

SEQ ID NO: 2520138 - RNA, 19 nt, Artificial Sequence
  Description of Artificial Sequence: Synthetic oligonucleotide
cguacacgucgcugaaggc

SEQ ID NO: 2520139 - RNA, 19 nt, Artificial Sequence
  Description of Artificial Sequence: Synthetic oligonucleotide
cgucgcugaaggcuccgcg

SEQ ID NO: 2520140 - RNA, 19 nt, Artificial Sequence
  Description of Artificial Sequence: Synthetic oligonucleotide
cccgaccauuucuuccacc

SEQ ID NO: 2520141 - RNA, 19 nt, Artificial Sequence
  Description of Artificial Sequence: Synthetic oligonucleotide
gggguugaugucagugcac

SEQ ID NO: 2520142 - RNA, 19 nt, Artificial Sequence
  Description of Artificial Sequence: Synthetic oligonucleotide
caucagucucaaaccuacu

SEQ ID NO: 2520143 - RNA, 19 nt, Artificial Sequence
  Description of Artificial Sequence: Synthetic oligonucleotide
acgugcccauacagcggcg

SEQ ID NO: 2520144 - RNA, 19 nt, Artificial Sequence
  Description of Artificial Sequence: Synthetic oligonucleotide
gacuucccgaccauuucuu

SEQ ID NO: 2520145 - RNA, 19 nt, Artificial Sequence
  Description of Artificial Sequence: Synthetic oligonucleotide
gcauaucuccacuccggcu

SEQ ID NO: 2520146 - RNA, 19 nt, Artificial Sequence
  Description of Artificial Sequence: Synthetic oligonucleotide
cgugacuuccuaccucuuc

SEQ ID NO: 2520147 - RNA, 19 nt, Artificial Sequence
  Description of Artificial Sequence: Synthetic oligonucleotide
ccuaccucuucaggaggag

SEQ ID NO: 2520148 - RNA, 19 nt, Artificial Sequence
  Description of Artificial Sequence: Synthetic oligonucleotide
ggguacuuugguggcucug

SEQ ID NO: 2520149 - RNA, 19 nt, Artificial Sequence
  Description of Artificial Sequence: Synthetic oligonucleotide
ggcaucagucucaaaccua

SEQ ID NO: 2520150 - RNA, 19 nt, Artificial Sequence
  Description of Artificial Sequence: Synthetic oligonucleotide
gcgacccacgugcccauac

SEQ ID NO: 2520151 - RNA, 19 nt, Artificial Sequence
  Description of Artificial Sequence: Synthetic oligonucleotide
caggaacguguccuccgaa

SEQ ID NO: 2520152 - RNA, 19 nt, Artificial Sequence
  Description of Artificial Sequence: Synthetic oligonucleotide
cgaccauuucuuccaccag

SEQ ID NO: 2520153 - RNA, 19 nt, Artificial Sequence
  Description of Artificial Sequence: Synthetic oligonucleotide
ggcuagcucggccgccgcc

SEQ ID NO: 2520154 - RNA, 19 nt, Artificial Sequence
  Description of Artificial Sequence: Synthetic oligonucleotide
cuaccucuucaggaggagu

SEQ ID NO: 2520155 - RNA, 19 nt, Artificial Sequence
  Description of Artificial Sequence: Synthetic oligonucleotide
ggacucuguuacagcgcgc

SEQ ID NO: 2520156 - RNA, 19 nt, Artificial Sequence
  Description of Artificial Sequence: Synthetic oligonucleotide
agcaagccuuggaccaaau

SEQ ID NO: 2520157 - RNA, 19 nt, Artificial Sequence
  Description of Artificial Sequence: Synthetic oligonucleotide
ccucgagcgcguccaggag

SEQ ID NO: 2520158 - RNA, 19 nt, Artificial Sequence
  Description of Artificial Sequence: Synthetic oligonucleotide
cugaaggcuccgcgaccca

SEQ ID NO: 2520159 - RNA, 19 nt, Artificial Sequence
  Description of Artificial Sequence: Synthetic oligonucleotide
gcugaauguggacucuguu

SEQ ID NO: 2520160 - RNA, 19 nt, Artificial Sequence
  Description of Artificial Sequence: Synthetic oligonucleotide
gcucguacacgucgcugaa

SEQ ID NO: 2520161 - RNA, 19 nt, Artificial Sequence
  Description of Artificial Sequence: Synthetic oligonucleotide
gcguggggaggcccggcgc

SEQ ID NO: 2520162 - RNA, 19 nt, Artificial Sequence
  Description of Artificial Sequence: Synthetic oligonucleotide
cagcaagccuuggaccaaa

SEQ ID NO: 2520163 - RNA, 19 nt, Artificial Sequence
  Description of Artificial Sequence: Synthetic oligonucleotide
ggccaagaauggcaucagu

SEQ ID NO: 2520164 - RNA, 19 nt, Artificial Sequence
  Description of Artificial Sequence: Synthetic oligonucleotide
cuguaauuacuggcugaau

SEQ ID NO: 2520165 - RNA, 19 nt, Artificial Sequence
  Description of Artificial Sequence: Synthetic oligonucleotide
cagcggcguggggaggccc

SEQ ID NO: 2520166 - RNA, 19 nt, Artificial Sequence
  Description of Artificial Sequence: Synthetic oligonucleotide
gcuccuacuucaaggcaua

SEQ ID NO: 2520167 - RNA, 19 nt, Artificial Sequence
  Description of Artificial Sequence: Synthetic oligonucleotide
gcuugccugcaaagugcug

SEQ ID NO: 2520168 - RNA, 19 nt, Artificial Sequence
  Description of Artificial Sequence: Synthetic oligonucleotide
ggccaggaaugcagacacc

SEQ ID NO: 2520169 - RNA, 19 nt, Artificial Sequence
  Description of Artificial Sequence: Synthetic oligonucleotide
cugcuucuauuccgugacu

SEQ ID NO: 2520170 - RNA, 19 nt, Artificial Sequence
  Description of Artificial Sequence: Synthetic oligonucleotide
ccgaaggcucguacacguc

SEQ ID NO: 2520171 - RNA, 19 nt, Artificial Sequence
  Description of Artificial Sequence: Synthetic oligonucleotide
cgcugaaggcuccgcgacc

SEQ ID NO: 2520172 - RNA, 19 nt, Artificial Sequence
  Description of Artificial Sequence: Synthetic oligonucleotide
cauucagcuucaggcaguu

SEQ ID NO: 2520173 - RNA, 19 nt, Artificial Sequence
  Description of Artificial Sequence: Synthetic oligonucleotide
ccggcuagcucggccgccg

SEQ ID NO: 2520174 - RNA, 19 nt, Artificial Sequence
  Description of Artificial Sequence: Synthetic oligonucleotide
cuggcugaauguggacucu

SEQ ID NO: 2520175 - RNA, 19 nt, Artificial Sequence
  Description of Artificial Sequence: Synthetic oligonucleotide
ggcugaauguggacucugu

SEQ ID NO: 2520176 - RNA, 19 nt, Artificial Sequence
  Description of Artificial Sequence: Synthetic oligonucleotide
ggggacacuaggacuugcu

SEQ ID NO: 2520177 - RNA, 19 nt, Artificial Sequence
  Description of Artificial Sequence: Synthetic oligonucleotide
gcagcaagccuuggaccaa

SEQ ID NO: 2520178 - RNA, 19 nt, Artificial Sequence
  Description of Artificial Sequence: Synthetic oligonucleotide
cucggguacuuugguggcu

SEQ ID NO: 2520179 - RNA, 19 nt, Artificial Sequence
  Description of Artificial Sequence: Synthetic oligonucleotide
gccuuggaccaaaucugua

SEQ ID NO: 2520180 - RNA, 19 nt, Artificial Sequence
  Description of Artificial Sequence: Synthetic oligonucleotide
gcuccgcgacccacgugcc

SEQ ID NO: 2520181 - RNA, 19 nt, Artificial Sequence
  Description of Artificial Sequence: Synthetic oligonucleotide
ccccuucaaucugggcagc

SEQ ID NO: 2520182 - RNA, 19 nt, Artificial Sequence
  Description of Artificial Sequence: Synthetic oligonucleotide
gcagaucaacuuuccccuu

SEQ ID NO: 2520183 - RNA, 19 nt, Artificial Sequence
  Description of Artificial Sequence: Synthetic oligonucleotide
cuuccccuuccacguccua

SEQ ID NO: 2520184 - RNA, 19 nt, Artificial Sequence
  Description of Artificial Sequence: Synthetic oligonucleotide
gcgcgcugucuccagggua

SEQ ID NO: 2520185 - RNA, 19 nt, Artificial Sequence
  Description of Artificial Sequence: Synthetic oligonucleotide
ccucuuggggaaagaaguu

SEQ ID NO: 2520186 - RNA, 19 nt, Artificial Sequence
  Description of Artificial Sequence: Synthetic oligonucleotide
cuccuacuucaaggcauau

SEQ ID NO: 2520187 - RNA, 19 nt, Artificial Sequence
  Description of Artificial Sequence: Synthetic oligonucleotide
cccuucaaucugggcagca

SEQ ID NO: 2520188 - RNA, 19 nt, Artificial Sequence
  Description of Artificial Sequence: Synthetic oligonucleotide
gcugaaccugaggacugau

SEQ ID NO: 2520189 - RNA, 19 nt, Artificial Sequence
  Description of Artificial Sequence: Synthetic oligonucleotide
cgacccacgugcccauaca

SEQ ID NO: 2520190 - RNA, 19 nt, Artificial Sequence
  Description of Artificial Sequence: Synthetic oligonucleotide
ggcaguucucggguacuuu

SEQ ID NO: 2520191 - RNA, 19 nt, Artificial Sequence
  Description of Artificial Sequence: Synthetic oligonucleotide
gcccggcgccgccaucuuc

SEQ ID NO: 2520192 - RNA, 19 nt, Artificial Sequence
  Description of Artificial Sequence: Synthetic oligonucleotide
ccacuccggcuagcucggc

SEQ ID NO: 2520193 - RNA, 19 nt, Artificial Sequence
  Description of Artificial Sequence: Synthetic oligonucleotide
ccaugacuucccgaccauu

SEQ ID NO: 2520194 - RNA, 19 nt, Artificial Sequence
  Description of Artificial Sequence: Synthetic oligonucleotide
cgagcgcguccaggagcag

SEQ ID NO: 2520195 - RNA, 19 nt, Artificial Sequence
  Description of Artificial Sequence: Synthetic oligonucleotide
ccgugacuuccuaccucuu

SEQ ID NO: 2520196 - RNA, 19 nt, Artificial Sequence
  Description of Artificial Sequence: Synthetic oligonucleotide
ggcccggcgccgccaucuu

SEQ ID NO: 2520197 - RNA, 19 nt, Artificial Sequence
  Description of Artificial Sequence: Synthetic oligonucleotide
ccgccgccucgagcgcguc

SEQ ID NO: 2520198 - RNA, 19 nt, Artificial Sequence
  Description of Artificial Sequence: Synthetic oligonucleotide
cgcgacccacgugcccaua

SEQ ID NO: 2520199 - RNA, 19 nt, Artificial Sequence
  Description of Artificial Sequence: Synthetic oligonucleotide
uguaacuaaaaucagugag

SEQ ID NO: 2520200 - RNA, 19 nt, Artificial Sequence
  Description of Artificial Sequence: Synthetic oligonucleotide
uauauuugcuaaaagcgcg

SEQ ID NO: 2520201 - RNA, 19 nt, Artificial Sequence
  Description of Artificial Sequence: Synthetic oligonucleotide
uugacauuguauaagcccg

SEQ ID NO: 2520202 - RNA, 19 nt, Artificial Sequence
  Description of Artificial Sequence: Synthetic oligonucleotide
acuaaaaucagugagucuc

SEQ ID NO: 2520203 - RNA, 19 nt, Artificial Sequence
  Description of Artificial Sequence: Synthetic oligonucleotide
aaaucagugagucucuuaa

SEQ ID NO: 2520204 - RNA, 19 nt, Artificial Sequence
  Description of Artificial Sequence: Synthetic oligonucleotide
caaaggagcaagaagucgg

SEQ ID NO: 2520205 - RNA, 19 nt, Artificial Sequence
  Description of Artificial Sequence: Synthetic oligonucleotide
guugacauuguauaagccc

SEQ ID NO: 2520206 - RNA, 19 nt, Artificial Sequence
  Description of Artificial Sequence: Synthetic oligonucleotide
uuuuggaagagagaggccc

SEQ ID NO: 2520207 - RNA, 19 nt, Artificial Sequence
  Description of Artificial Sequence: Synthetic oligonucleotide
cauuuuggaagagagaggc

SEQ ID NO: 2520208 - RNA, 19 nt, Artificial Sequence
  Description of Artificial Sequence: Synthetic oligonucleotide
auuguauaagcccggcacg

SEQ ID NO: 2520209 - RNA, 19 nt, Artificial Sequence
  Description of Artificial Sequence: Synthetic oligonucleotide
uuuucgacuguccugugca

SEQ ID NO: 2520210 - RNA, 19 nt, Artificial Sequence
  Description of Artificial Sequence: Synthetic oligonucleotide
ucggcauuuuggaagagag

SEQ ID NO: 2520211 - RNA, 19 nt, Artificial Sequence
  Description of Artificial Sequence: Synthetic oligonucleotide
cguauauuugcuaaaagcg

SEQ ID NO: 2520212 - RNA, 19 nt, Artificial Sequence
  Description of Artificial Sequence: Synthetic oligonucleotide
gauguuuuggucguaggag

SEQ ID NO: 2520213 - RNA, 19 nt, Artificial Sequence
  Description of Artificial Sequence: Synthetic oligonucleotide
uuugcuaaaagcgcguuca

SEQ ID NO: 2520214 - RNA, 19 nt, Artificial Sequence
  Description of Artificial Sequence: Synthetic oligonucleotide
cauuguauaagcccggcac

SEQ ID NO: 2520215 - RNA, 19 nt, Artificial Sequence
  Description of Artificial Sequence: Synthetic oligonucleotide
uauaagcccggcacggugg

SEQ ID NO: 2520216 - RNA, 19 nt, Artificial Sequence
  Description of Artificial Sequence: Synthetic oligonucleotide
uaaaagcgcguucacauaa

SEQ ID NO: 2520217 - RNA, 19 nt, Artificial Sequence
  Description of Artificial Sequence: Synthetic oligonucleotide
uaugccugggccuuuauuc

SEQ ID NO: 2520218 - RNA, 19 nt, Artificial Sequence
  Description of Artificial Sequence: Synthetic oligonucleotide
uguagcacgcccucguccg

SEQ ID NO: 2520219 - RNA, 19 nt, Artificial Sequence
  Description of Artificial Sequence: Synthetic oligonucleotide
cuugucagcagcuaccgug

SEQ ID NO: 2520220 - RNA, 19 nt, Artificial Sequence
  Description of Artificial Sequence: Synthetic oligonucleotide
cuguugacauuguauaagc

SEQ ID NO: 2520221 - RNA, 19 nt, Artificial Sequence
  Description of Artificial Sequence: Synthetic oligonucleotide
ugaacugcgcauccagggg

SEQ ID NO: 2520222 - RNA, 19 nt, Artificial Sequence
  Description of Artificial Sequence: Synthetic oligonucleotide
aaaggagcaagaagucggc

SEQ ID NO: 2520223 - RNA, 19 nt, Artificial Sequence
  Description of Artificial Sequence: Synthetic oligonucleotide
uugucagcagcuaccgugg

SEQ ID NO: 2520224 - RNA, 19 nt, Artificial Sequence
  Description of Artificial Sequence: Synthetic oligonucleotide
cagugagucucuuaaagac

SEQ ID NO: 2520225 - RNA, 19 nt, Artificial Sequence
  Description of Artificial Sequence: Synthetic oligonucleotide
uguugacauuguauaagcc

SEQ ID NO: 2520226 - RNA, 19 nt, Artificial Sequence
  Description of Artificial Sequence: Synthetic oligonucleotide
uaacuaaaaucagugaguc

SEQ ID NO: 2520227 - RNA, 19 nt, Artificial Sequence
  Description of Artificial Sequence: Synthetic oligonucleotide
ggcauuuuggaagagagag

SEQ ID NO: 2520228 - RNA, 19 nt, Artificial Sequence
  Description of Artificial Sequence: Synthetic oligonucleotide
ugacauuguauaagcccgg

SEQ ID NO: 2520229 - RNA, 19 nt, Artificial Sequence
  Description of Artificial Sequence: Synthetic oligonucleotide
uguuuuggucguaggaggc

SEQ ID NO: 2520230 - RNA, 19 nt, Artificial Sequence
  Description of Artificial Sequence: Synthetic oligonucleotide
uuguaacuaaaaucaguga

SEQ ID NO: 2520231 - RNA, 19 nt, Artificial Sequence
  Description of Artificial Sequence: Synthetic oligonucleotide
aggagcaagaagucggcuc

SEQ ID NO: 2520232 - RNA, 19 nt, Artificial Sequence
  Description of Artificial Sequence: Synthetic oligonucleotide
augccugggccuuuauucc

SEQ ID NO: 2520233 - RNA, 19 nt, Artificial Sequence
  Description of Artificial Sequence: Synthetic oligonucleotide
uuguauaagcccggcacgg

SEQ ID NO: 2520234 - RNA, 19 nt, Artificial Sequence
  Description of Artificial Sequence: Synthetic oligonucleotide
aacuaaaaucagugagucu

SEQ ID NO: 2520235 - RNA, 19 nt, Artificial Sequence
  Description of Artificial Sequence: Synthetic oligonucleotide
uaucggguccugaacugcg

SEQ ID NO: 2520236 - RNA, 19 nt, Artificial Sequence
  Description of Artificial Sequence: Synthetic oligonucleotide
gaagagagaggccccgccg

SEQ ID NO: 2520237 - RNA, 19 nt, Artificial Sequence
  Description of Artificial Sequence: Synthetic oligonucleotide
uccuaucggguccugaacu

SEQ ID NO: 2520238 - RNA, 19 nt, Artificial Sequence
  Description of Artificial Sequence: Synthetic oligonucleotide
agugagucucuuaaagacg

SEQ ID NO: 2520239 - RNA, 19 nt, Artificial Sequence
  Description of Artificial Sequence: Synthetic oligonucleotide
aagcgcguucacauaauac

SEQ ID NO: 2520240 - RNA, 19 nt, Artificial Sequence
  Description of Artificial Sequence: Synthetic oligonucleotide
ccguauauuugcuaaaagc

SEQ ID NO: 2520241 - RNA, 19 nt, Artificial Sequence
  Description of Artificial Sequence: Synthetic oligonucleotide
ggagcaagaagucggcucg

SEQ ID NO: 2520242 - RNA, 19 nt, Artificial Sequence
  Description of Artificial Sequence: Synthetic oligonucleotide
uccugaacugcgcauccag

SEQ ID NO: 2520243 - RNA, 19 nt, Artificial Sequence
  Description of Artificial Sequence: Synthetic oligonucleotide
uuuggcgaggucacugcag

SEQ ID NO: 2520244 - RNA, 19 nt, Artificial Sequence
  Description of Artificial Sequence: Synthetic oligonucleotide
agguuguaggcgucggcgc

SEQ ID NO: 2520245 - RNA, 19 nt, Artificial Sequence
  Description of Artificial Sequence: Synthetic oligonucleotide
uugggugcaaaggagcaag

SEQ ID NO: 2520246 - RNA, 19 nt, Artificial Sequence
  Description of Artificial Sequence: Synthetic oligonucleotide
gaggucacugcagagcccg

SEQ ID NO: 2520247 - RNA, 19 nt, Artificial Sequence
  Description of Artificial Sequence: Synthetic oligonucleotide
ucagcagcuaccguggaga

SEQ ID NO: 2520248 - RNA, 19 nt, Artificial Sequence
  Description of Artificial Sequence: Synthetic oligonucleotide
ggugcaaaggagcaagaag

SEQ ID NO: 2520249 - RNA, 19 nt, Artificial Sequence
  Description of Artificial Sequence: Synthetic oligonucleotide
aaaaucagugagucucuua

SEQ ID NO: 2520250 - RNA, 19 nt, Artificial Sequence
  Description of Artificial Sequence: Synthetic oligonucleotide
gaugcggaaacuggccucg

SEQ ID NO: 2520251 - RNA, 19 nt, Artificial Sequence
  Description of Artificial Sequence: Synthetic oligonucleotide
cuaccguggagacggaggg

SEQ ID NO: 2520252 - RNA, 19 nt, Artificial Sequence
  Description of Artificial Sequence: Synthetic oligonucleotide
uagaugcggaaacuggccu

SEQ ID NO: 2520253 - RNA, 19 nt, Artificial Sequence
  Description of Artificial Sequence: Synthetic oligonucleotide
agaugcggaaacuggccuc

SEQ ID NO: 2520254 - RNA, 19 nt, Artificial Sequence
  Description of Artificial Sequence: Synthetic oligonucleotide
ucguaggaggcgcagggca

SEQ ID NO: 2520255 - RNA, 19 nt, Artificial Sequence
  Description of Artificial Sequence: Synthetic oligonucleotide
uuuaugcucuuucuuccau

SEQ ID NO: 2520256 - RNA, 19 nt, Artificial Sequence
  Description of Artificial Sequence: Synthetic oligonucleotide
gcagcuaccguggagacgg

SEQ ID NO: 2520257 - RNA, 19 nt, Artificial Sequence
  Description of Artificial Sequence: Synthetic oligonucleotide
ucgacuguccugugcagcc

SEQ ID NO: 2520258 - RNA, 19 nt, Artificial Sequence
  Description of Artificial Sequence: Synthetic oligonucleotide
aaucagugagucucuuaaa

SEQ ID NO: 2520259 - RNA, 19 nt, Artificial Sequence
  Description of Artificial Sequence: Synthetic oligonucleotide
uuggcgaggucacugcaga

SEQ ID NO: 2520260 - RNA, 19 nt, Artificial Sequence
  Description of Artificial Sequence: Synthetic oligonucleotide
uaugcucuuucuuccauuu

SEQ ID NO: 2520261 - RNA, 19 nt, Artificial Sequence
  Description of Artificial Sequence: Synthetic oligonucleotide
uccucaccggccuugucag

SEQ ID NO: 2520262 - RNA, 19 nt, Artificial Sequence
  Description of Artificial Sequence: Synthetic oligonucleotide
uagcccgacgcgaaggggc

SEQ ID NO: 2520263 - RNA, 19 nt, Artificial Sequence
  Description of Artificial Sequence: Synthetic oligonucleotide
gugaguugggugcaaagga

SEQ ID NO: 2520264 - RNA, 19 nt, Artificial Sequence
  Description of Artificial Sequence: Synthetic oligonucleotide
guagccgcuucucugugag

SEQ ID NO: 2520265 - RNA, 19 nt, Artificial Sequence
  Description of Artificial Sequence: Synthetic oligonucleotide
gaguugggugcaaaggagc

SEQ ID NO: 2520266 - RNA, 19 nt, Artificial Sequence
  Description of Artificial Sequence: Synthetic oligonucleotide
uugaucuggcgcucgguga

SEQ ID NO: 2520267 - RNA, 19 nt, Artificial Sequence
  Description of Artificial Sequence: Synthetic oligonucleotide
aaagcgcguucacauaaua

SEQ ID NO: 2520268 - RNA, 19 nt, Artificial Sequence
  Description of Artificial Sequence: Synthetic oligonucleotide
cuucucugugaguugggug

SEQ ID NO: 2520269 - RNA, 19 nt, Artificial Sequence
  Description of Artificial Sequence: Synthetic oligonucleotide
guauaagcccggcacggug

SEQ ID NO: 2520270 - RNA, 19 nt, Artificial Sequence
  Description of Artificial Sequence: Synthetic oligonucleotide
cagggcuuaugccugggcc

SEQ ID NO: 2520271 - RNA, 19 nt, Artificial Sequence
  Description of Artificial Sequence: Synthetic oligonucleotide
guagaugcggaaacuggcc

SEQ ID NO: 2520272 - RNA, 19 nt, Artificial Sequence
  Description of Artificial Sequence: Synthetic oligonucleotide
cauagcccgacgcgaaggg

SEQ ID NO: 2520273 - RNA, 19 nt, Artificial Sequence
  Description of Artificial Sequence: Synthetic oligonucleotide
ugggccuuuauuccucuuc

SEQ ID NO: 2520274 - RNA, 19 nt, Artificial Sequence
  Description of Artificial Sequence: Synthetic oligonucleotide
acauuguauaagcccggca

SEQ ID NO: 2520275 - RNA, 19 nt, Artificial Sequence
  Description of Artificial Sequence: Synthetic oligonucleotide
guuuuggucguaggaggcg

SEQ ID NO: 2520276 - RNA, 19 nt, Artificial Sequence
  Description of Artificial Sequence: Synthetic oligonucleotide
aagucggcucggcauuuug

SEQ ID NO: 2520277 - RNA, 19 nt, Artificial Sequence
  Description of Artificial Sequence: Synthetic oligonucleotide
ugcuaaaagcgcguucaca

SEQ ID NO: 2520278 - RNA, 19 nt, Artificial Sequence
  Description of Artificial Sequence: Synthetic oligonucleotide
gcuguugacauuguauaag

SEQ ID NO: 2520279 - RNA, 19 nt, Artificial Sequence
  Description of Artificial Sequence: Synthetic oligonucleotide
uuucgacuguccugugcag

SEQ ID NO: 2520280 - RNA, 19 nt, Artificial Sequence
  Description of Artificial Sequence: Synthetic oligonucleotide
gucacugcagagcccgggg

SEQ ID NO: 2520281 - RNA, 19 nt, Artificial Sequence
  Description of Artificial Sequence: Synthetic oligonucleotide
gacauuguauaagcccggc

SEQ ID NO: 2520282 - RNA, 19 nt, Artificial Sequence
  Description of Artificial Sequence: Synthetic oligonucleotide
gagggcaccgcgucuucgg

SEQ ID NO: 2520283 - RNA, 19 nt, Artificial Sequence
  Description of Artificial Sequence: Synthetic oligonucleotide
gugcaaaggagcaagaagu

SEQ ID NO: 2520284 - RNA, 19 nt, Artificial Sequence
  Description of Artificial Sequence: Synthetic oligonucleotide
agggcuuaugccugggccu

SEQ ID NO: 2520285 - RNA, 19 nt, Artificial Sequence
  Description of Artificial Sequence: Synthetic oligonucleotide
uuccuaucggguccugaac

SEQ ID NO: 2520286 - RNA, 19 nt, Artificial Sequence
  Description of Artificial Sequence: Synthetic oligonucleotide
agcgccuggaccguagccg

SEQ ID NO: 2520287 - RNA, 19 nt, Artificial Sequence
  Description of Artificial Sequence: Synthetic oligonucleotide
caggccauagcccgacgcg

SEQ ID NO: 2520288 - RNA, 19 nt, Artificial Sequence
  Description of Artificial Sequence: Synthetic oligonucleotide
gaccguagccgcuucucug

SEQ ID NO: 2520289 - RNA, 19 nt, Artificial Sequence
  Description of Artificial Sequence: Synthetic oligonucleotide
uaggcgucggcgcccaggc

SEQ ID NO: 2520290 - RNA, 19 nt, Artificial Sequence
  Description of Artificial Sequence: Synthetic oligonucleotide
cugugaguugggugcaaag

SEQ ID NO: 2520291 - RNA, 19 nt, Artificial Sequence
  Description of Artificial Sequence: Synthetic oligonucleotide
agacggagggcaccgcguc

SEQ ID NO: 2520292 - RNA, 19 nt, Artificial Sequence
  Description of Artificial Sequence: Synthetic oligonucleotide
augcucuuucuuccauuuc

SEQ ID NO: 2520293 - RNA, 19 nt, Artificial Sequence
  Description of Artificial Sequence: Synthetic oligonucleotide
uggcucucaucuuuaugcu

SEQ ID NO: 2520294 - RNA, 19 nt, Artificial Sequence
  Description of Artificial Sequence: Synthetic oligonucleotide
gguagaugcggaaacuggc

SEQ ID NO: 2520295 - RNA, 19 nt, Artificial Sequence
  Description of Artificial Sequence: Synthetic oligonucleotide
ggcgccagcgccuggaccg

SEQ ID NO: 2520296 - RNA, 19 nt, Artificial Sequence
  Description of Artificial Sequence: Synthetic oligonucleotide
ggucguaggaggcgcaggg

SEQ ID NO: 2520297 - RNA, 19 nt, Artificial Sequence
  Description of Artificial Sequence: Synthetic oligonucleotide
agcaagaagucggcucggc

SEQ ID NO: 2520298 - RNA, 19 nt, Artificial Sequence
  Description of Artificial Sequence: Synthetic oligonucleotide
aaacuggccucggccgggc

SEQ ID NO: 2520299 - RNA, 19 nt, Artificial Sequence
  Description of Artificial Sequence: Synthetic oligonucleotide
uuaugcucuuucuuccauu

SEQ ID NO: 2520300 - RNA, 19 nt, Artificial Sequence
  Description of Artificial Sequence: Synthetic oligonucleotide
uugcuaaaagcgcguucac

SEQ ID NO: 2520301 - RNA, 19 nt, Artificial Sequence
  Description of Artificial Sequence: Synthetic oligonucleotide
uucgacuguccugugcagc

SEQ ID NO: 2520302 - RNA, 19 nt, Artificial Sequence
  Description of Artificial Sequence: Synthetic oligonucleotide
ugagucucuuaaagacgcu

SEQ ID NO: 2520303 - RNA, 19 nt, Artificial Sequence
  Description of Artificial Sequence: Synthetic oligonucleotide
guguagcacgcccucgucc

SEQ ID NO: 2520304 - RNA, 19 nt, Artificial Sequence
  Description of Artificial Sequence: Synthetic oligonucleotide
cuuuaugcucuuucuucca

SEQ ID NO: 2520305 - RNA, 19 nt, Artificial Sequence
  Description of Artificial Sequence: Synthetic oligonucleotide
aaggcgccagcgccuggac

SEQ ID NO: 2520306 - RNA, 19 nt, Artificial Sequence
  Description of Artificial Sequence: Synthetic oligonucleotide
gaaacuggccucggccggg

SEQ ID NO: 2520307 - RNA, 19 nt, Artificial Sequence
  Description of Artificial Sequence: Synthetic oligonucleotide
ucacugcagagcccgggga

SEQ ID NO: 2520308 - RNA, 19 nt, Artificial Sequence
  Description of Artificial Sequence: Synthetic oligonucleotide
accguagccgcuucucugu

SEQ ID NO: 2520309 - RNA, 19 nt, Artificial Sequence
  Description of Artificial Sequence: Synthetic oligonucleotide
ucggguccugaacugcgca

SEQ ID NO: 2520310 - RNA, 19 nt, Artificial Sequence
  Description of Artificial Sequence: Synthetic oligonucleotide
aacuggccucggccgggcc

SEQ ID NO: 2520311 - RNA, 19 nt, Artificial Sequence
  Description of Artificial Sequence: Synthetic oligonucleotide
acuggccucggccgggccg

SEQ ID NO: 2520312 - RNA, 19 nt, Artificial Sequence
  Description of Artificial Sequence: Synthetic oligonucleotide
cacgguggaggcgaaggcg

SEQ ID NO: 2520313 - RNA, 19 nt, Artificial Sequence
  Description of Artificial Sequence: Synthetic oligonucleotide
ggauguuuuggucguagga

SEQ ID NO: 2520314 - RNA, 19 nt, Artificial Sequence
  Description of Artificial Sequence: Synthetic oligonucleotide
guccccgcuuccuaucggg

SEQ ID NO: 2520315 - RNA, 19 nt, Artificial Sequence
  Description of Artificial Sequence: Synthetic oligonucleotide
agcccggcacgguggaggc

SEQ ID NO: 2520316 - RNA, 19 nt, Artificial Sequence
  Description of Artificial Sequence: Synthetic oligonucleotide
uugucgcaggcgccuuugg

SEQ ID NO: 2520317 - RNA, 19 nt, Artificial Sequence
  Description of Artificial Sequence: Synthetic oligonucleotide
uuaugccugggccuuuauu

SEQ ID NO: 2520318 - RNA, 19 nt, Artificial Sequence
  Description of Artificial Sequence: Synthetic oligonucleotide
aguugggugcaaaggagca

SEQ ID NO: 2520319 - RNA, 19 nt, Artificial Sequence
  Description of Artificial Sequence: Synthetic oligonucleotide
aaggagcaagaagucggcu

SEQ ID NO: 2520320 - RNA, 19 nt, Artificial Sequence
  Description of Artificial Sequence: Synthetic oligonucleotide
ggaaacuggccucggccgg

SEQ ID NO: 2520321 - RNA, 19 nt, Artificial Sequence
  Description of Artificial Sequence: Synthetic oligonucleotide
cuaucggguccugaacugc

SEQ ID NO: 2520322 - RNA, 19 nt, Artificial Sequence
  Description of Artificial Sequence: Synthetic oligonucleotide
ucguccgccuugucgcagg

SEQ ID NO: 2520323 - RNA, 19 nt, Artificial Sequence
  Description of Artificial Sequence: Synthetic oligonucleotide
ggguagaugcggaaacugg

SEQ ID NO: 2520324 - RNA, 19 nt, Artificial Sequence
  Description of Artificial Sequence: Synthetic oligonucleotide
gaggcgaaggcgccagcgc

SEQ ID NO: 2520325 - RNA, 19 nt, Artificial Sequence
  Description of Artificial Sequence: Synthetic oligonucleotide
ugcggaaacuggccucggc

SEQ ID NO: 2520326 - RNA, 19 nt, Artificial Sequence
  Description of Artificial Sequence: Synthetic oligonucleotide
ugugcagccagggcuuaug

SEQ ID NO: 2520327 - RNA, 19 nt, Artificial Sequence
  Description of Artificial Sequence: Synthetic oligonucleotide
gccguauauuugcuaaaag

SEQ ID NO: 2520328 - RNA, 19 nt, Artificial Sequence
  Description of Artificial Sequence: Synthetic oligonucleotide
ugggugcaaaggagcaaga

SEQ ID NO: 2520329 - RNA, 19 nt, Artificial Sequence
  Description of Artificial Sequence: Synthetic oligonucleotide
uauuugcuaaaagcgcguu

SEQ ID NO: 2520330 - RNA, 19 nt, Artificial Sequence
  Description of Artificial Sequence: Synthetic oligonucleotide
gucagcagcuaccguggag

SEQ ID NO: 2520331 - RNA, 19 nt, Artificial Sequence
  Description of Artificial Sequence: Synthetic oligonucleotide
uguauaagcccggcacggu

SEQ ID NO: 2520332 - RNA, 19 nt, Artificial Sequence
  Description of Artificial Sequence: Synthetic oligonucleotide
accguggagacggagggca

SEQ ID NO: 2520333 - RNA, 19 nt, Artificial Sequence
  Description of Artificial Sequence: Synthetic oligonucleotide
gggauguuuuggucguagg

SEQ ID NO: 2520334 - RNA, 19 nt, Artificial Sequence
  Description of Artificial Sequence: Synthetic oligonucleotide
cgcucggugaggcagagcg

SEQ ID NO: 2520335 - RNA, 19 nt, Artificial Sequence
  Description of Artificial Sequence: Synthetic oligonucleotide
agucggcucggcauuuugg

SEQ ID NO: 2520336 - RNA, 19 nt, Artificial Sequence
  Description of Artificial Sequence: Synthetic oligonucleotide
cccggggauguuuuggucg

SEQ ID NO: 2520337 - RNA, 19 nt, Artificial Sequence
  Description of Artificial Sequence: Synthetic oligonucleotide
gccuuuauuccucuucuuc

SEQ ID NO: 2520338 - RNA, 19 nt, Artificial Sequence
  Description of Artificial Sequence: Synthetic oligonucleotide
cuaaaaucagugagucucu

SEQ ID NO: 2520339 - RNA, 19 nt, Artificial Sequence
  Description of Artificial Sequence: Synthetic oligonucleotide
guggagacggagggcaccg

SEQ ID NO: 2520340 - RNA, 19 nt, Artificial Sequence
  Description of Artificial Sequence: Synthetic oligonucleotide
gaacugcgcauccaggggu

SEQ ID NO: 2520341 - RNA, 19 nt, Artificial Sequence
  Description of Artificial Sequence: Synthetic oligonucleotide
ggagacggagggcaccgcg

SEQ ID NO: 2520342 - RNA, 19 nt, Artificial Sequence
  Description of Artificial Sequence: Synthetic oligonucleotide
ugcggcggcgccgagucag

SEQ ID NO: 2520343 - RNA, 19 nt, Artificial Sequence
  Description of Artificial Sequence: Synthetic oligonucleotide
aaaagcgcguucacauaau

SEQ ID NO: 2520344 - RNA, 19 nt, Artificial Sequence
  Description of Artificial Sequence: Synthetic oligonucleotide
uggucguaggaggcgcagg

SEQ ID NO: 2520345 - RNA, 19 nt, Artificial Sequence
  Description of Artificial Sequence: Synthetic oligonucleotide
auaagcccggcacggugga

SEQ ID NO: 2520346 - RNA, 19 nt, Artificial Sequence
  Description of Artificial Sequence: Synthetic oligonucleotide
aggcgccagcgccuggacc

SEQ ID NO: 2520347 - RNA, 19 nt, Artificial Sequence
  Description of Artificial Sequence: Synthetic oligonucleotide
gucggcucggcauuuugga

SEQ ID NO: 2520348 - RNA, 19 nt, Artificial Sequence
  Description of Artificial Sequence: Synthetic oligonucleotide
ggaggcgcagggcagguug

SEQ ID NO: 2520349 - RNA, 19 nt, Artificial Sequence
  Description of Artificial Sequence: Synthetic oligonucleotide
cuuccuaucggguccugaa

SEQ ID NO: 2520350 - RNA, 19 nt, Artificial Sequence
  Description of Artificial Sequence: Synthetic oligonucleotide
gcuaccguggagacggagg

SEQ ID NO: 2520351 - RNA, 19 nt, Artificial Sequence
  Description of Artificial Sequence: Synthetic oligonucleotide
aucggguccugaacugcgc

SEQ ID NO: 2520352 - RNA, 19 nt, Artificial Sequence
  Description of Artificial Sequence: Synthetic oligonucleotide
ucucugugaguugggugca

SEQ ID NO: 2520353 - RNA, 19 nt, Artificial Sequence
  Description of Artificial Sequence: Synthetic oligonucleotide
gagcaagaagucggcucgg

SEQ ID NO: 2520354 - RNA, 19 nt, Artificial Sequence
  Description of Artificial Sequence: Synthetic oligonucleotide
gguuguaggcgucggcgcc

SEQ ID NO: 2520355 - RNA, 19 nt, Artificial Sequence
  Description of Artificial Sequence: Synthetic oligonucleotide
cgcgaaggggcucugauag

SEQ ID NO: 2520356 - RNA, 19 nt, Artificial Sequence
  Description of Artificial Sequence: Synthetic oligonucleotide
ggaagagagaggccccgcc

SEQ ID NO: 2520357 - RNA, 19 nt, Artificial Sequence
  Description of Artificial Sequence: Synthetic oligonucleotide
auagcccgacgcgaagggg

SEQ ID NO: 2520358 - RNA, 19 nt, Artificial Sequence
  Description of Artificial Sequence: Synthetic oligonucleotide
gcggaaacuggccucggcc

SEQ ID NO: 2520359 - RNA, 19 nt, Artificial Sequence
  Description of Artificial Sequence: Synthetic oligonucleotide
ucaccggccuugucagcag

SEQ ID NO: 2520360 - RNA, 19 nt, Artificial Sequence
  Description of Artificial Sequence: Synthetic oligonucleotide
agucucuuaaagacgcuuu

SEQ ID NO: 2520361 - RNA, 19 nt, Artificial Sequence
  Description of Artificial Sequence: Synthetic oligonucleotide
cuggcgcucggugaggcag

SEQ ID NO: 2520362 - RNA, 19 nt, Artificial Sequence
  Description of Artificial Sequence: Synthetic oligonucleotide
ucugugaguugggugcaaa

SEQ ID NO: 2520363 - RNA, 19 nt, Artificial Sequence
  Description of Artificial Sequence: Synthetic oligonucleotide
ucggcucggcauuuuggaa

SEQ ID NO: 2520364 - RNA, 19 nt, Artificial Sequence
  Description of Artificial Sequence: Synthetic oligonucleotide
agcagcuaccguggagacg

SEQ ID NO: 2520365 - RNA, 19 nt, Artificial Sequence
  Description of Artificial Sequence: Synthetic oligonucleotide
cuaaaagcgcguucacaua

SEQ ID NO: 2520366 - RNA, 19 nt, Artificial Sequence
  Description of Artificial Sequence: Synthetic oligonucleotide
gguccugaacugcgcaucc

SEQ ID NO: 2520367 - RNA, 19 nt, Artificial Sequence
  Description of Artificial Sequence: Synthetic oligonucleotide
uggaagagagaggccccgc

SEQ ID NO: 2520368 - RNA, 19 nt, Artificial Sequence
  Description of Artificial Sequence: Synthetic oligonucleotide
caagaagucggcucggcau

SEQ ID NO: 2520369 - RNA, 19 nt, Artificial Sequence
  Description of Artificial Sequence: Synthetic oligonucleotide
ggccccgccguauauuugc

SEQ ID NO: 2520370 - RNA, 19 nt, Artificial Sequence
  Description of Artificial Sequence: Synthetic oligonucleotide
cccucguccgccuugucgc

SEQ ID NO: 2520371 - RNA, 19 nt, Artificial Sequence
  Description of Artificial Sequence: Synthetic oligonucleotide
guuguaggcgucggcgccc

SEQ ID NO: 2520372 - RNA, 19 nt, Artificial Sequence
  Description of Artificial Sequence: Synthetic oligonucleotide
guaggcgucggcgcccagg

SEQ ID NO: 2520373 - RNA, 19 nt, Artificial Sequence
  Description of Artificial Sequence: Synthetic oligonucleotide
gggcuguugacauuguaua

SEQ ID NO: 2520374 - RNA, 19 nt, Artificial Sequence
  Description of Artificial Sequence: Synthetic oligonucleotide
gcgcccaggccauagcccg

SEQ ID NO: 2520375 - RNA, 19 nt, Artificial Sequence
  Description of Artificial Sequence: Synthetic oligonucleotide
ggccgggccguguagcacg

SEQ ID NO: 2520376 - RNA, 19 nt, Artificial Sequence
  Description of Artificial Sequence: Synthetic oligonucleotide
agggguagaugcggaaacu

SEQ ID NO: 2520377 - RNA, 19 nt, Artificial Sequence
  Description of Artificial Sequence: Synthetic oligonucleotide
cuugucgcaggcgccuuug

SEQ ID NO: 2520378 - RNA, 19 nt, Artificial Sequence
  Description of Artificial Sequence: Synthetic oligonucleotide
gggguagaugcggaaacug

SEQ ID NO: 2520379 - RNA, 19 nt, Artificial Sequence
  Description of Artificial Sequence: Synthetic oligonucleotide
ggaggcgaaggcgccagcg

SEQ ID NO: 2520380 - RNA, 19 nt, Artificial Sequence
  Description of Artificial Sequence: Synthetic oligonucleotide
uccccgcuuccuaucgggu

SEQ ID NO: 2520381 - RNA, 19 nt, Artificial Sequence
  Description of Artificial Sequence: Synthetic oligonucleotide
gccuugucagcagcuaccg

SEQ ID NO: 2520382 - RNA, 19 nt, Artificial Sequence
  Description of Artificial Sequence: Synthetic oligonucleotide
aggggcucugauagagggg

SEQ ID NO: 2520383 - RNA, 19 nt, Artificial Sequence
  Description of Artificial Sequence: Synthetic oligonucleotide
cuuuggcgaggucacugca

SEQ ID NO: 2520384 - RNA, 19 nt, Artificial Sequence
  Description of Artificial Sequence: Synthetic oligonucleotide
cggaaacuggccucggccg

SEQ ID NO: 2520385 - RNA, 19 nt, Artificial Sequence
  Description of Artificial Sequence: Synthetic oligonucleotide
ccuaucggguccugaacug

SEQ ID NO: 2520386 - RNA, 19 nt, Artificial Sequence
  Description of Artificial Sequence: Synthetic oligonucleotide
ggggauguuuuggucguag

SEQ ID NO: 2520387 - RNA, 19 nt, Artificial Sequence
  Description of Artificial Sequence: Synthetic oligonucleotide
ggcgaggucacugcagagc

SEQ ID NO: 2520388 - RNA, 19 nt, Artificial Sequence
  Description of Artificial Sequence: Synthetic oligonucleotide
gcccucguccgccuugucg

SEQ ID NO: 2520389 - RNA, 19 nt, Artificial Sequence
  Description of Artificial Sequence: Synthetic oligonucleotide
uggaccguagccgcuucuc

SEQ ID NO: 2520390 - RNA, 19 nt, Artificial Sequence
  Description of Artificial Sequence: Synthetic oligonucleotide
cucaccggccuugucagca

SEQ ID NO: 2520391 - RNA, 19 nt, Artificial Sequence
  Description of Artificial Sequence: Synthetic oligonucleotide
ucuggcguccccgcuuccu

SEQ ID NO: 2520392 - RNA, 19 nt, Artificial Sequence
  Description of Artificial Sequence: Synthetic oligonucleotide
ggcucggcauuuuggaaga

SEQ ID NO: 2520393 - RNA, 19 nt, Artificial Sequence
  Description of Artificial Sequence: Synthetic oligonucleotide
aggccauagcccgacgcga

SEQ ID NO: 2520394 - RNA, 19 nt, Artificial Sequence
  Description of Artificial Sequence: Synthetic oligonucleotide
ucuggcgcucggugaggca

SEQ ID NO: 2520395 - RNA, 19 nt, Artificial Sequence
  Description of Artificial Sequence: Synthetic oligonucleotide
gaaggcgccagcgccugga

SEQ ID NO: 2520396 - RNA, 19 nt, Artificial Sequence
  Description of Artificial Sequence: Synthetic oligonucleotide
uaccguggagacggagggc

SEQ ID NO: 2520397 - RNA, 19 nt, Artificial Sequence
  Description of Artificial Sequence: Synthetic oligonucleotide
ggcgccuuuggcgagguca

SEQ ID NO: 2520398 - RNA, 19 nt, Artificial Sequence
  Description of Artificial Sequence: Synthetic oligonucleotide
agcuaccguggagacggag

SEQ ID NO: 2520399 - RNA, 19 nt, Artificial Sequence
  Description of Artificial Sequence: Synthetic oligonucleotide
cagcgccuggaccguagcc

SEQ ID NO: 2520400 - RNA, 19 nt, Artificial Sequence
  Description of Artificial Sequence: Synthetic oligonucleotide
uggcgcucggugaggcaga

SEQ ID NO: 2520401 - RNA, 19 nt, Artificial Sequence
  Description of Artificial Sequence: Synthetic oligonucleotide
ucggcgcccaggccauagc

SEQ ID NO: 2520402 - RNA, 19 nt, Artificial Sequence
  Description of Artificial Sequence: Synthetic oligonucleotide
ggucacugcagagcccggg

SEQ ID NO: 2520403 - RNA, 19 nt, Artificial Sequence
  Description of Artificial Sequence: Synthetic oligonucleotide
aacugcgcauccaggggua

SEQ ID NO: 2520404 - RNA, 19 nt, Artificial Sequence
  Description of Artificial Sequence: Synthetic oligonucleotide
cucggcauuuuggaagaga

SEQ ID NO: 2520405 - RNA, 19 nt, Artificial Sequence
  Description of Artificial Sequence: Synthetic oligonucleotide
ggccuugucagcagcuacc

SEQ ID NO: 2520406 - RNA, 19 nt, Artificial Sequence
  Description of Artificial Sequence: Synthetic oligonucleotide
agagaggccccgccguaua

SEQ ID NO: 2520407 - RNA, 19 nt, Artificial Sequence
  Description of Artificial Sequence: Synthetic oligonucleotide
aggcgucggcgcccaggcc

SEQ ID NO: 2520408 - RNA, 19 nt, Artificial Sequence
  Description of Artificial Sequence: Synthetic oligonucleotide
ggcgucggcgcccaggcca

SEQ ID NO: 2520409 - RNA, 19 nt, Artificial Sequence
  Description of Artificial Sequence: Synthetic oligonucleotide
guagcacgcccucguccgc

SEQ ID NO: 2520410 - RNA, 19 nt, Artificial Sequence
  Description of Artificial Sequence: Synthetic oligonucleotide
cggcucggcauuuuggaag

SEQ ID NO: 2520411 - RNA, 19 nt, Artificial Sequence
  Description of Artificial Sequence: Synthetic oligonucleotide
gucguaggaggcgcagggc

SEQ ID NO: 2520412 - RNA, 19 nt, Artificial Sequence
  Description of Artificial Sequence: Synthetic oligonucleotide
gcaagaagucggcucggca

SEQ ID NO: 2520413 - RNA, 19 nt, Artificial Sequence
  Description of Artificial Sequence: Synthetic oligonucleotide
ccaggccauagcccgacgc

SEQ ID NO: 2520414 - RNA, 19 nt, Artificial Sequence
  Description of Artificial Sequence: Synthetic oligonucleotide
ccauagcccgacgcgaagg

SEQ ID NO: 2520415 - RNA, 19 nt, Artificial Sequence
  Description of Artificial Sequence: Synthetic oligonucleotide
gagucucuuaaagacgcuu

SEQ ID NO: 2520416 - RNA, 19 nt, Artificial Sequence
  Description of Artificial Sequence: Synthetic oligonucleotide
caccggccuugucagcagc

SEQ ID NO: 2520417 - RNA, 19 nt, Artificial Sequence
  Description of Artificial Sequence: Synthetic oligonucleotide
acgcgaaggggcucugaua

SEQ ID NO: 2520418 - RNA, 19 nt, Artificial Sequence
  Description of Artificial Sequence: Synthetic oligonucleotide
agggcagguuguaggcguc

SEQ ID NO: 2520419 - RNA, 19 nt, Artificial Sequence
  Description of Artificial Sequence: Synthetic oligonucleotide
gggagccuggcucucaucu

SEQ ID NO: 2520420 - RNA, 19 nt, Artificial Sequence
  Description of Artificial Sequence: Synthetic oligonucleotide
ggcagguuguaggcgucgg

SEQ ID NO: 2520421 - RNA, 19 nt, Artificial Sequence
  Description of Artificial Sequence: Synthetic oligonucleotide
gacgcgaaggggcucugau

SEQ ID NO: 2520422 - RNA, 19 nt, Artificial Sequence
  Description of Artificial Sequence: Synthetic oligonucleotide
guugggugcaaaggagcaa

SEQ ID NO: 2520423 - RNA, 19 nt, Artificial Sequence
  Description of Artificial Sequence: Synthetic oligonucleotide
gcguccccgcuuccuaucg

SEQ ID NO: 2520424 - RNA, 19 nt, Artificial Sequence
  Description of Artificial Sequence: Synthetic oligonucleotide
uaagcccggcacgguggag

SEQ ID NO: 2520425 - RNA, 19 nt, Artificial Sequence
  Description of Artificial Sequence: Synthetic oligonucleotide
ccuggcucucaucuuuaug

SEQ ID NO: 2520426 - RNA, 19 nt, Artificial Sequence
  Description of Artificial Sequence: Synthetic oligonucleotide
augcggaaacuggccucgg

SEQ ID NO: 2520427 - RNA, 19 nt, Artificial Sequence
  Description of Artificial Sequence: Synthetic oligonucleotide
cucggccgggccguguagc

SEQ ID NO: 2520428 - RNA, 19 nt, Artificial Sequence
  Description of Artificial Sequence: Synthetic oligonucleotide
uaggaggcgcagggcaggu

SEQ ID NO: 2520429 - RNA, 19 nt, Artificial Sequence
  Description of Artificial Sequence: Synthetic oligonucleotide
uguaggcgucggcgcccag

SEQ ID NO: 2520430 - RNA, 19 nt, Artificial Sequence
  Description of Artificial Sequence: Synthetic oligonucleotide
gccauagcccgacgcgaag

SEQ ID NO: 2520431 - RNA, 19 nt, Artificial Sequence
  Description of Artificial Sequence: Synthetic oligonucleotide
gggccuuuauuccucuucu

SEQ ID NO: 2520432 - RNA, 19 nt, Artificial Sequence
  Description of Artificial Sequence: Synthetic oligonucleotide
gucggcgcccaggccauag

SEQ ID NO: 2520433 - RNA, 19 nt, Artificial Sequence
  Description of Artificial Sequence: Synthetic oligonucleotide
agcacgcccucguccgccu

SEQ ID NO: 2520434 - RNA, 19 nt, Artificial Sequence
  Description of Artificial Sequence: Synthetic oligonucleotide
uagccgcuucucugugagu

SEQ ID NO: 2520435 - RNA, 19 nt, Artificial Sequence
  Description of Artificial Sequence: Synthetic oligonucleotide
gcgccuggaccguagccgc

SEQ ID NO: 2520436 - RNA, 19 nt, Artificial Sequence
  Description of Artificial Sequence: Synthetic oligonucleotide
uggagacggagggcaccgc

SEQ ID NO: 2520437 - RNA, 19 nt, Artificial Sequence
  Description of Artificial Sequence: Synthetic oligonucleotide
cguaggaggcgcagggcag

SEQ ID NO: 2520438 - RNA, 19 nt, Artificial Sequence
  Description of Artificial Sequence: Synthetic oligonucleotide
ugggagccuggcucucauc

SEQ ID NO: 2520439 - RNA, 19 nt, Artificial Sequence
  Description of Artificial Sequence: Synthetic oligonucleotide
gaggccccgccguauauuu

SEQ ID NO: 2520440 - RNA, 19 nt, Artificial Sequence
  Description of Artificial Sequence: Synthetic oligonucleotide
ggagggcaccgcgucuucg

SEQ ID NO: 2520441 - RNA, 19 nt, Artificial Sequence
  Description of Artificial Sequence: Synthetic oligonucleotide
cccgccguauauuugcuaa

SEQ ID NO: 2520442 - RNA, 19 nt, Artificial Sequence
  Description of Artificial Sequence: Synthetic oligonucleotide
gccgcuucucugugaguug

SEQ ID NO: 2520443 - RNA, 19 nt, Artificial Sequence
  Description of Artificial Sequence: Synthetic oligonucleotide
gggcagguuguaggcgucg

SEQ ID NO: 2520444 - RNA, 19 nt, Artificial Sequence
  Description of Artificial Sequence: Synthetic oligonucleotide
aggucacugcagagcccgg

SEQ ID NO: 2520445 - RNA, 19 nt, Artificial Sequence
  Description of Artificial Sequence: Synthetic oligonucleotide
accggccuugucagcagcu

SEQ ID NO: 2520446 - RNA, 19 nt, Artificial Sequence
  Description of Artificial Sequence: Synthetic oligonucleotide
guccgccuugucgcaggcg

SEQ ID NO: 2520447 - RNA, 19 nt, Artificial Sequence
  Description of Artificial Sequence: Synthetic oligonucleotide
ggcgcccaggccauagccc

SEQ ID NO: 2520448 - RNA, 19 nt, Artificial Sequence
  Description of Artificial Sequence: Synthetic oligonucleotide
ggcgcagggcagguuguag

SEQ ID NO: 2520449 - RNA, 19 nt, Artificial Sequence
  Description of Artificial Sequence: Synthetic oligonucleotide
acggagggcaccgcgucuu

SEQ ID NO: 2520450 - RNA, 19 nt, Artificial Sequence
  Description of Artificial Sequence: Synthetic oligonucleotide
agcccgacgcgaaggggcu

SEQ ID NO: 2520451 - RNA, 19 nt, Artificial Sequence
  Description of Artificial Sequence: Synthetic oligonucleotide
gagacggagggcaccgcgu

SEQ ID NO: 2520452 - RNA, 19 nt, Artificial Sequence
  Description of Artificial Sequence: Synthetic oligonucleotide
agaggccccgccguauauu

SEQ ID NO: 2520453 - RNA, 19 nt, Artificial Sequence
  Description of Artificial Sequence: Synthetic oligonucleotide
gacggagggcaccgcgucu

SEQ ID NO: 2520454 - RNA, 19 nt, Artificial Sequence
  Description of Artificial Sequence: Synthetic oligonucleotide
ccagggcuuaugccugggc

SEQ ID NO: 2520455 - RNA, 19 nt, Artificial Sequence
  Description of Artificial Sequence: Synthetic oligonucleotide
ggggcuguugacauuguau

SEQ ID NO: 2520456 - RNA, 19 nt, Artificial Sequence
  Description of Artificial Sequence: Synthetic oligonucleotide
gggugcaaaggagcaagaa

SEQ ID NO: 2520457 - RNA, 19 nt, Artificial Sequence
  Description of Artificial Sequence: Synthetic oligonucleotide
gccguguagcacgcccucg

SEQ ID NO: 2520458 - RNA, 19 nt, Artificial Sequence
  Description of Artificial Sequence: Synthetic oligonucleotide
gcaggcgccuuuggcgagg

SEQ ID NO: 2520459 - RNA, 19 nt, Artificial Sequence
  Description of Artificial Sequence: Synthetic oligonucleotide
gucuggcguccccgcuucc

SEQ ID NO: 2520460 - RNA, 19 nt, Artificial Sequence
  Description of Artificial Sequence: Synthetic oligonucleotide
aggcgccuuuggcgagguc

SEQ ID NO: 2520461 - RNA, 19 nt, Artificial Sequence
  Description of Artificial Sequence: Synthetic oligonucleotide
gagaggccccgccguauau

SEQ ID NO: 2520462 - RNA, 19 nt, Artificial Sequence
  Description of Artificial Sequence: Synthetic oligonucleotide
ggccguguagcacgcccuc

SEQ ID NO: 2520463 - RNA, 19 nt, Artificial Sequence
  Description of Artificial Sequence: Synthetic oligonucleotide
ccccgcuuccuaucggguc

SEQ ID NO: 2520464 - RNA, 19 nt, Artificial Sequence
  Description of Artificial Sequence: Synthetic oligonucleotide
cacugcagagcccggggau

SEQ ID NO: 2520465 - RNA, 19 nt, Artificial Sequence
  Description of Artificial Sequence: Synthetic oligonucleotide
aggccccgccguauauuug

SEQ ID NO: 2520466 - RNA, 19 nt, Artificial Sequence
  Description of Artificial Sequence: Synthetic oligonucleotide
cgggccguguagcacgccc

SEQ ID NO: 2520467 - RNA, 19 nt, Artificial Sequence
  Description of Artificial Sequence: Synthetic oligonucleotide
gccagggcuuaugccuggg

SEQ ID NO: 2520468 - RNA, 19 nt, Artificial Sequence
  Description of Artificial Sequence: Synthetic oligonucleotide
agccuggcucucaucuuua

SEQ ID NO: 2520469 - RNA, 19 nt, Artificial Sequence
  Description of Artificial Sequence: Synthetic oligonucleotide
ggaccguagccgcuucucu

SEQ ID NO: 2520470 - RNA, 19 nt, Artificial Sequence
  Description of Artificial Sequence: Synthetic oligonucleotide
gcgccuuuggcgaggucac

SEQ ID NO: 2520471 - RNA, 19 nt, Artificial Sequence
  Description of Artificial Sequence: Synthetic oligonucleotide
cuggcguccccgcuuccua

SEQ ID NO: 2520472 - RNA, 19 nt, Artificial Sequence
  Description of Artificial Sequence: Synthetic oligonucleotide
gagagaggccccgccguau

SEQ ID NO: 2520473 - RNA, 19 nt, Artificial Sequence
  Description of Artificial Sequence: Synthetic oligonucleotide
cguggagacggagggcacc

SEQ ID NO: 2520474 - RNA, 19 nt, Artificial Sequence
  Description of Artificial Sequence: Synthetic oligonucleotide
ccagcgccuggaccguagc

SEQ ID NO: 2520475 - RNA, 19 nt, Artificial Sequence
  Description of Artificial Sequence: Synthetic oligonucleotide
gcgaaggggcucugauaga

SEQ ID NO: 2520476 - RNA, 19 nt, Artificial Sequence
  Description of Artificial Sequence: Synthetic oligonucleotide
gcccggggauguuuugguc

SEQ ID NO: 2520477 - RNA, 19 nt, Artificial Sequence
  Description of Artificial Sequence: Synthetic oligonucleotide
cgccgugggagccuggcuc

SEQ ID NO: 2520478 - RNA, 19 nt, Artificial Sequence
  Description of Artificial Sequence: Synthetic oligonucleotide
gcuuccuaucggguccuga

SEQ ID NO: 2520479 - RNA, 19 nt, Artificial Sequence
  Description of Artificial Sequence: Synthetic oligonucleotide
ccgccuugucgcaggcgcc

SEQ ID NO: 2520480 - RNA, 19 nt, Artificial Sequence
  Description of Artificial Sequence: Synthetic oligonucleotide
ugcagagcccggggauguu

SEQ ID NO: 2520481 - RNA, 19 nt, Artificial Sequence
  Description of Artificial Sequence: Synthetic oligonucleotide
gcucggcauuuuggaagag

SEQ ID NO: 2520482 - RNA, 19 nt, Artificial Sequence
  Description of Artificial Sequence: Synthetic oligonucleotide
gccagcgccuggaccguag

SEQ ID NO: 2520483 - RNA, 19 nt, Artificial Sequence
  Description of Artificial Sequence: Synthetic oligonucleotide
cggcgcccaggccauagcc

SEQ ID NO: 2520484 - RNA, 19 nt, Artificial Sequence
  Description of Artificial Sequence: Synthetic oligonucleotide
ggcgcucggugaggcagag

SEQ ID NO: 2520485 - RNA, 19 nt, Artificial Sequence
  Description of Artificial Sequence: Synthetic oligonucleotide
gcgaaggcgccagcgccug

SEQ ID NO: 2520486 - RNA, 19 nt, Artificial Sequence
  Description of Artificial Sequence: Synthetic oligonucleotide
ccguagccgcuucucugug

SEQ ID NO: 2520487 - RNA, 19 nt, Artificial Sequence
  Description of Artificial Sequence: Synthetic oligonucleotide
cuuaugccugggccuuuau

SEQ ID NO: 2520488 - RNA, 19 nt, Artificial Sequence
  Description of Artificial Sequence: Synthetic oligonucleotide
ccguggagacggagggcac

SEQ ID NO: 2520489 - RNA, 19 nt, Artificial Sequence
  Description of Artificial Sequence: Synthetic oligonucleotide
cagagcccggggauguuuu

SEQ ID NO: 2520490 - RNA, 19 nt, Artificial Sequence
  Description of Artificial Sequence: Synthetic oligonucleotide
cggcauuuuggaagagaga

SEQ ID NO: 2520491 - RNA, 19 nt, Artificial Sequence
  Description of Artificial Sequence: Synthetic oligonucleotide
ggccauagcccgacgcgaa

SEQ ID NO: 2520492 - RNA, 19 nt, Artificial Sequence
  Description of Artificial Sequence: Synthetic oligonucleotide
cguguagcacgcccucguc

SEQ ID NO: 2520493 - RNA, 19 nt, Artificial Sequence
  Description of Artificial Sequence: Synthetic oligonucleotide
cccaggccauagcccgacg

SEQ ID NO: 2520494 - RNA, 19 nt, Artificial Sequence
  Description of Artificial Sequence: Synthetic oligonucleotide
cguccccgcuuccuaucgg

SEQ ID NO: 2520495 - RNA, 19 nt, Artificial Sequence
  Description of Artificial Sequence: Synthetic oligonucleotide
ccuggaccguagccgcuuc

SEQ ID NO: 2520496 - RNA, 19 nt, Artificial Sequence
  Description of Artificial Sequence: Synthetic oligonucleotide
gccgugggagccuggcucu

SEQ ID NO: 2520497 - RNA, 19 nt, Artificial Sequence
  Description of Artificial Sequence: Synthetic oligonucleotide
gaagucggcucggcauuuu

SEQ ID NO: 2520498 - RNA, 19 nt, Artificial Sequence
  Description of Artificial Sequence: Synthetic oligonucleotide
gccgccgugggagccuggc

SEQ ID NO: 2520499 - RNA, 19 nt, Artificial Sequence
  Description of Artificial Sequence: Synthetic oligonucleotide
aggcgcagggcagguugua

SEQ ID NO: 2520500 - RNA, 19 nt, Artificial Sequence
  Description of Artificial Sequence: Synthetic oligonucleotide
cuggaccguagccgcuucu

SEQ ID NO: 2520501 - RNA, 19 nt, Artificial Sequence
  Description of Artificial Sequence: Synthetic oligonucleotide
gcccaggccauagcccgac

SEQ ID NO: 2520502 - RNA, 19 nt, Artificial Sequence
  Description of Artificial Sequence: Synthetic oligonucleotide
ccgccguauauuugcuaaa

SEQ ID NO: 2520503 - RNA, 19 nt, Artificial Sequence
  Description of Artificial Sequence: Synthetic oligonucleotide
gcuuaugccugggccuuua

SEQ ID NO: 2520504 - RNA, 19 nt, Artificial Sequence
  Description of Artificial Sequence: Synthetic oligonucleotide
ggccuuuauuccucuucuu

SEQ ID NO: 2520505 - RNA, 19 nt, Artificial Sequence
  Description of Artificial Sequence: Synthetic oligonucleotide
cgccguauauuugcuaaaa

SEQ ID NO: 2520506 - RNA, 19 nt, Artificial Sequence
  Description of Artificial Sequence: Synthetic oligonucleotide
ccggggauguuuuggucgu

SEQ ID NO: 2520507 - RNA, 19 nt, Artificial Sequence
  Description of Artificial Sequence: Synthetic oligonucleotide
ccucggccgggccguguag

SEQ ID NO: 2520508 - RNA, 19 nt, Artificial Sequence
  Description of Artificial Sequence: Synthetic oligonucleotide
ggcggcgccgagucaggua

SEQ ID NO: 2520509 - RNA, 19 nt, Artificial Sequence
  Description of Artificial Sequence: Synthetic oligonucleotide
cguagccgcuucucuguga

SEQ ID NO: 2520510 - RNA, 19 nt, Artificial Sequence
  Description of Artificial Sequence: Synthetic oligonucleotide
cagcuaccguggagacgga

SEQ ID NO: 2520511 - RNA, 19 nt, Artificial Sequence
  Description of Artificial Sequence: Synthetic oligonucleotide
ggcgaaggcgccagcgccu

SEQ ID NO: 2520512 - RNA, 19 nt, Artificial Sequence
  Description of Artificial Sequence: Synthetic oligonucleotide
cgcaggcgccuuuggcgag

SEQ ID NO: 2520513 - RNA, 19 nt, Artificial Sequence
  Description of Artificial Sequence: Synthetic oligonucleotide
cguccgccuugucgcaggc

SEQ ID NO: 2520514 - RNA, 19 nt, Artificial Sequence
  Description of Artificial Sequence: Synthetic oligonucleotide
gccgggccguguagcacgc

SEQ ID NO: 2520515 - RNA, 19 nt, Artificial Sequence
  Description of Artificial Sequence: Synthetic oligonucleotide
gcggcggcgccgagucagg

SEQ ID NO: 2520516 - RNA, 19 nt, Artificial Sequence
  Description of Artificial Sequence: Synthetic oligonucleotide
ccucguccgccuugucgca

SEQ ID NO: 2520517 - RNA, 19 nt, Artificial Sequence
  Description of Artificial Sequence: Synthetic oligonucleotide
uggccucggccgggccgug

SEQ ID NO: 2520518 - RNA, 19 nt, Artificial Sequence
  Description of Artificial Sequence: Synthetic oligonucleotide
ccguguagcacgcccucgu

SEQ ID NO: 2520519 - RNA, 19 nt, Artificial Sequence
  Description of Artificial Sequence: Synthetic oligonucleotide
gggcuuaugccugggccuu

SEQ ID NO: 2520520 - RNA, 19 nt, Artificial Sequence
  Description of Artificial Sequence: Synthetic oligonucleotide
cugggccuuuauuccucuu

SEQ ID NO: 2520521 - RNA, 19 nt, Artificial Sequence
  Description of Artificial Sequence: Synthetic oligonucleotide
ccuccucaccggccuuguc

SEQ ID NO: 2520522 - RNA, 19 nt, Artificial Sequence
  Description of Artificial Sequence: Synthetic oligonucleotide
gggccguguagcacgcccu

SEQ ID NO: 2520523 - RNA, 19 nt, Artificial Sequence
  Description of Artificial Sequence: Synthetic oligonucleotide
gccuggcucucaucuuuau

SEQ ID NO: 2520524 - RNA, 19 nt, Artificial Sequence
  Description of Artificial Sequence: Synthetic oligonucleotide
gccucggccgggccgugua

SEQ ID NO: 2520525 - RNA, 19 nt, Artificial Sequence
  Description of Artificial Sequence: Synthetic oligonucleotide
gcgcucggugaggcagagc

SEQ ID NO: 2520526 - RNA, 19 nt, Artificial Sequence
  Description of Artificial Sequence: Synthetic oligonucleotide
ccccgccguauauuugcua

SEQ ID NO: 2520527 - RNA, 19 nt, Artificial Sequence
  Description of Artificial Sequence: Synthetic oligonucleotide
gcagagcccggggauguuu

SEQ ID NO: 2520528 - RNA, 19 nt, Artificial Sequence
  Description of Artificial Sequence: Synthetic oligonucleotide
caggcgccuuuggcgaggu

SEQ ID NO: 2520529 - RNA, 19 nt, Artificial Sequence
  Description of Artificial Sequence: Synthetic oligonucleotide
ggccgccgugggagccugg

SEQ ID NO: 2520530 - RNA, 19 nt, Artificial Sequence
  Description of Artificial Sequence: Synthetic oligonucleotide
cggagggcaccgcgucuuc

SEQ ID NO: 2520531 - RNA, 19 nt, Artificial Sequence
  Description of Artificial Sequence: Synthetic oligonucleotide
ccgacgcgaaggggcucug

SEQ ID NO: 2520532 - RNA, 19 nt, Artificial Sequence
  Description of Artificial Sequence: Synthetic oligonucleotide
cgugggagccuggcucuca

SEQ ID NO: 2520533 - RNA, 19 nt, Artificial Sequence
  Description of Artificial Sequence: Synthetic oligonucleotide
ccggccuugucagcagcua

SEQ ID NO: 2520534 - RNA, 19 nt, Artificial Sequence
  Description of Artificial Sequence: Synthetic oligonucleotide
cccgacgcgaaggggcucu

SEQ ID NO: 2520535 - RNA, 19 nt, Artificial Sequence
  Description of Artificial Sequence: Synthetic oligonucleotide
gccccgccguauauuugcu

SEQ ID NO: 2520536 - RNA, 19 nt, Artificial Sequence
  Description of Artificial Sequence: Synthetic oligonucleotide
gcccgacgcgaaggggcuc

SEQ ID NO: 2520537 - RNA, 19 nt, Artificial Sequence
  Description of Artificial Sequence: Synthetic oligonucleotide
gccuggaccguagccgcuu

SEQ ID NO: 2520538 - RNA, 19 nt, Artificial Sequence
  Description of Artificial Sequence: Synthetic oligonucleotide
ccgggccguguagcacgcc

SEQ ID NO: 2520539 - RNA, 19 nt, Artificial Sequence
  Description of Artificial Sequence: Synthetic oligonucleotide
ggcuuaugccugggccuuu

SEQ ID NO: 2520540 - RNA, 19 nt, Artificial Sequence
  Description of Artificial Sequence: Synthetic oligonucleotide
cggcacgguggaggcgaag

SEQ ID NO: 2520541 - RNA, 19 nt, Artificial Sequence
  Description of Artificial Sequence: Synthetic oligonucleotide
ccuugucgcaggcgccuuu

SEQ ID NO: 2520542 - RNA, 19 nt, Artificial Sequence
  Description of Artificial Sequence: Synthetic oligonucleotide
ccggcacgguggaggcgaa

SEQ ID NO: 2520543 - RNA, 19 nt, Artificial Sequence
  Description of Artificial Sequence: Synthetic oligonucleotide
cgacgcgaaggggcucuga

SEQ ID NO: 2520544 - RNA, 19 nt, Artificial Sequence
  Description of Artificial Sequence: Synthetic oligonucleotide
ccgcuuccuaucggguccu

SEQ ID NO: 2520545 - RNA, 19 nt, Artificial Sequence
  Description of Artificial Sequence: Synthetic oligonucleotide
cgccuugucgcaggcgccu

SEQ ID NO: 2520546 - RNA, 19 nt, Artificial Sequence
  Description of Artificial Sequence: Synthetic oligonucleotide
gccuugucgcaggcgccuu

SEQ ID NO: 2520547 - RNA, 19 nt, Artificial Sequence
  Description of Artificial Sequence: Synthetic oligonucleotide
ccgccgugggagccuggcu

SEQ ID NO: 2520548 - RNA, 19 nt, Artificial Sequence
  Description of Artificial Sequence: Synthetic oligonucleotide
gcgccagcgccuggaccgu

SEQ ID NO: 2520549 - RNA, 19 nt, Artificial Sequence
  Description of Artificial Sequence: Synthetic oligonucleotide
cgcccucguccgccuuguc

SEQ ID NO: 2520550 - RNA, 19 nt, Artificial Sequence
  Description of Artificial Sequence: Synthetic oligonucleotide
ggccucggccgggccgugu

SEQ ID NO: 2520551 - RNA, 19 nt, Artificial Sequence
  Description of Artificial Sequence: Synthetic oligonucleotide
cgccuggaccguagccgcu

SEQ ID NO: 2520552 - RNA, 19 nt, Artificial Sequence
  Description of Artificial Sequence: Synthetic oligonucleotide
cgccagcgccuggaccgua

SEQ ID NO: 2520553 - RNA, 19 nt, Artificial Sequence
  Description of Artificial Sequence: Synthetic oligonucleotide
cggcggcgccgagucaggu

SEQ ID NO: 2520554 - RNA, 19 nt, Artificial Sequence
  Description of Artificial Sequence: Synthetic oligonucleotide
cgucggcgcccaggccaua

SEQ ID NO: 2520555 - RNA, 19 nt, Artificial Sequence
  Description of Artificial Sequence: Synthetic oligonucleotide
ugauaauuuacuuaguacu

SEQ ID NO: 2520556 - RNA, 19 nt, Artificial Sequence
  Description of Artificial Sequence: Synthetic oligonucleotide
auugucucaaguuuguucg

SEQ ID NO: 2520557 - RNA, 19 nt, Artificial Sequence
  Description of Artificial Sequence: Synthetic oligonucleotide
cauuugauaauuuacuuag

SEQ ID NO: 2520558 - RNA, 19 nt, Artificial Sequence
  Description of Artificial Sequence: Synthetic oligonucleotide
aaguuaauuuucuuuguuc

SEQ ID NO: 2520559 - RNA, 19 nt, Artificial Sequence
  Description of Artificial Sequence: Synthetic oligonucleotide
ucuaauucaauuuucauuu

SEQ ID NO: 2520560 - RNA, 19 nt, Artificial Sequence
  Description of Artificial Sequence: Synthetic oligonucleotide
aaugcuauugccaagcaag

SEQ ID NO: 2520561 - RNA, 19 nt, Artificial Sequence
  Description of Artificial Sequence: Synthetic oligonucleotide
uucuaaaggaguuacgucc

SEQ ID NO: 2520562 - RNA, 19 nt, Artificial Sequence
  Description of Artificial Sequence: Synthetic oligonucleotide
auagauaguauccaggcug

SEQ ID NO: 2520563 - RNA, 19 nt, Artificial Sequence
  Description of Artificial Sequence: Synthetic oligonucleotide
uuuuaaggaagcaauuuca

SEQ ID NO: 2520564 - RNA, 19 nt, Artificial Sequence
  Description of Artificial Sequence: Synthetic oligonucleotide
uuauagauaguauccaggc

SEQ ID NO: 2520565 - RNA, 19 nt, Artificial Sequence
  Description of Artificial Sequence: Synthetic oligonucleotide
aaaaccccaaugcuauugc

SEQ ID NO: 2520566 - RNA, 19 nt, Artificial Sequence
  Description of Artificial Sequence: Synthetic oligonucleotide
ugcaaauucacuuuucucu

SEQ ID NO: 2520567 - RNA, 19 nt, Artificial Sequence
  Description of Artificial Sequence: Synthetic oligonucleotide
agcaagugaacaccgaggc

SEQ ID NO: 2520568 - RNA, 19 nt, Artificial Sequence
  Description of Artificial Sequence: Synthetic oligonucleotide
aguuaauuuucuuuguucu

SEQ ID NO: 2520569 - RNA, 19 nt, Artificial Sequence
  Description of Artificial Sequence: Synthetic oligonucleotide
ugacauuugauaauuuacu

SEQ ID NO: 2520570 - RNA, 19 nt, Artificial Sequence
  Description of Artificial Sequence: Synthetic oligonucleotide
aauaauacuuuugguuugg

SEQ ID NO: 2520571 - RNA, 19 nt, Artificial Sequence
  Description of Artificial Sequence: Synthetic oligonucleotide
aaaggaguuacguccacug

SEQ ID NO: 2520572 - RNA, 19 nt, Artificial Sequence
  Description of Artificial Sequence: Synthetic oligonucleotide
uuugauaauuuacuuagua

SEQ ID NO: 2520573 - RNA, 19 nt, Artificial Sequence
  Description of Artificial Sequence: Synthetic oligonucleotide
ugucuugucaaauccauga

SEQ ID NO: 2520574 - RNA, 19 nt, Artificial Sequence
  Description of Artificial Sequence: Synthetic oligonucleotide
uggucaagaaaccucuccg

SEQ ID NO: 2520575 - RNA, 19 nt, Artificial Sequence
  Description of Artificial Sequence: Synthetic oligonucleotide
aggaguuacguccacuggc

SEQ ID NO: 2520576 - RNA, 19 nt, Artificial Sequence
  Description of Artificial Sequence: Synthetic oligonucleotide
uuuauuacuggucucugaa

SEQ ID NO: 2520577 - RNA, 19 nt, Artificial Sequence
  Description of Artificial Sequence: Synthetic oligonucleotide
aagauaucgaauugucuca

SEQ ID NO: 2520578 - RNA, 19 nt, Artificial Sequence
  Description of Artificial Sequence: Synthetic oligonucleotide
ucacuuuucucuaggauga

SEQ ID NO: 2520579 - RNA, 19 nt, Artificial Sequence
  Description of Artificial Sequence: Synthetic oligonucleotide
uugguaaauucauugguug

SEQ ID NO: 2520580 - RNA, 19 nt, Artificial Sequence
  Description of Artificial Sequence: Synthetic oligonucleotide
agcuuuagucaccauuucc

SEQ ID NO: 2520581 - RNA, 19 nt, Artificial Sequence
  Description of Artificial Sequence: Synthetic oligonucleotide
uuuccuuauagauaguauc

SEQ ID NO: 2520582 - RNA, 19 nt, Artificial Sequence
  Description of Artificial Sequence: Synthetic oligonucleotide
uuaacuugaucuaauucaa

SEQ ID NO: 2520583 - RNA, 19 nt, Artificial Sequence
  Description of Artificial Sequence: Synthetic oligonucleotide
accaugucuuuccugaugg

SEQ ID NO: 2520584 - RNA, 19 nt, Artificial Sequence
  Description of Artificial Sequence: Synthetic oligonucleotide
aacuugaucuaauucaauu

SEQ ID NO: 2520585 - RNA, 19 nt, Artificial Sequence
  Description of Artificial Sequence: Synthetic oligonucleotide
aaaccccaaugcuauugcc

SEQ ID NO: 2520586 - RNA, 19 nt, Artificial Sequence
  Description of Artificial Sequence: Synthetic oligonucleotide
gaaaccucuccgcaggacg

SEQ ID NO: 2520587 - RNA, 19 nt, Artificial Sequence
  Description of Artificial Sequence: Synthetic oligonucleotide
cugacauuugauaauuuac

SEQ ID NO: 2520588 - RNA, 19 nt, Artificial Sequence
  Description of Artificial Sequence: Synthetic oligonucleotide
ucgaauugucucaaguuug

SEQ ID NO: 2520589 - RNA, 19 nt, Artificial Sequence
  Description of Artificial Sequence: Synthetic oligonucleotide
uuaguacugacacaacagu

SEQ ID NO: 2520590 - RNA, 19 nt, Artificial Sequence
  Description of Artificial Sequence: Synthetic oligonucleotide
cuugugucuugucaaaucc

SEQ ID NO: 2520591 - RNA, 19 nt, Artificial Sequence
  Description of Artificial Sequence: Synthetic oligonucleotide
ucauaacucgucuuuguug

SEQ ID NO: 2520592 - RNA, 19 nt, Artificial Sequence
  Description of Artificial Sequence: Synthetic oligonucleotide
auaguauccaggcugacau

SEQ ID NO: 2520593 - RNA, 19 nt, Artificial Sequence
  Description of Artificial Sequence: Synthetic oligonucleotide
aaccgauaaaaccccaaug

SEQ ID NO: 2520594 - RNA, 19 nt, Artificial Sequence
  Description of Artificial Sequence: Synthetic oligonucleotide
aguuuguucgacuccauca

SEQ ID NO: 2520595 - RNA, 19 nt, Artificial Sequence
  Description of Artificial Sequence: Synthetic oligonucleotide
uuacuuaguacugacacaa

SEQ ID NO: 2520596 - RNA, 19 nt, Artificial Sequence
  Description of Artificial Sequence: Synthetic oligonucleotide
aaaguuaauuuucuuuguu

SEQ ID NO: 2520597 - RNA, 19 nt, Artificial Sequence
  Description of Artificial Sequence: Synthetic oligonucleotide
auuuuccaaguccuucacc

SEQ ID NO: 2520598 - RNA, 19 nt, Artificial Sequence
  Description of Artificial Sequence: Synthetic oligonucleotide
uguucuaaaggaguuacgu

SEQ ID NO: 2520599 - RNA, 19 nt, Artificial Sequence
  Description of Artificial Sequence: Synthetic oligonucleotide
ucuaaaggaguuacgucca

SEQ ID NO: 2520600 - RNA, 19 nt, Artificial Sequence
  Description of Artificial Sequence: Synthetic oligonucleotide
uaauuuacuuaguacugac

SEQ ID NO: 2520601 - RNA, 19 nt, Artificial Sequence
  Description of Artificial Sequence: Synthetic oligonucleotide
ucuaucauaacucgucuuu

SEQ ID NO: 2520602 - RNA, 19 nt, Artificial Sequence
  Description of Artificial Sequence: Synthetic oligonucleotide
uauuaucugcucugauucg

SEQ ID NO: 2520603 - RNA, 19 nt, Artificial Sequence
  Description of Artificial Sequence: Synthetic oligonucleotide
aauccaaaugagccauuag

SEQ ID NO: 2520604 - RNA, 19 nt, Artificial Sequence
  Description of Artificial Sequence: Synthetic oligonucleotide
aaguuuguucgacuccauc

SEQ ID NO: 2520605 - RNA, 19 nt, Artificial Sequence
  Description of Artificial Sequence: Synthetic oligonucleotide
ugucaauuuuauuacuggu

SEQ ID NO: 2520606 - RNA, 19 nt, Artificial Sequence
  Description of Artificial Sequence: Synthetic oligonucleotide
uuugguaaauucauugguu

SEQ ID NO: 2520607 - RNA, 19 nt, Artificial Sequence
  Description of Artificial Sequence: Synthetic oligonucleotide
uuagcuguuggacuguuau

SEQ ID NO: 2520608 - RNA, 19 nt, Artificial Sequence
  Description of Artificial Sequence: Synthetic oligonucleotide
agugcauggguaucaaaag

SEQ ID NO: 2520609 - RNA, 19 nt, Artificial Sequence
  Description of Artificial Sequence: Synthetic oligonucleotide
ucaagaaaccucuccgcag

SEQ ID NO: 2520610 - RNA, 19 nt, Artificial Sequence
  Description of Artificial Sequence: Synthetic oligonucleotide
ugagcuuuagucaccauuu

SEQ ID NO: 2520611 - RNA, 19 nt, Artificial Sequence
  Description of Artificial Sequence: Synthetic oligonucleotide
uuccuguugagcuuuaguc

SEQ ID NO: 2520612 - RNA, 19 nt, Artificial Sequence
  Description of Artificial Sequence: Synthetic oligonucleotide
uuaaggaagcaauuucagu

SEQ ID NO: 2520613 - RNA, 19 nt, Artificial Sequence
  Description of Artificial Sequence: Synthetic oligonucleotide
uauagauaguauccaggcu

SEQ ID NO: 2520614 - RNA, 19 nt, Artificial Sequence
  Description of Artificial Sequence: Synthetic oligonucleotide
ugguaaauucauugguugc

SEQ ID NO: 2520615 - RNA, 19 nt, Artificial Sequence
  Description of Artificial Sequence: Synthetic oligonucleotide
auaucgaauugucucaagu

SEQ ID NO: 2520616 - RNA, 19 nt, Artificial Sequence
  Description of Artificial Sequence: Synthetic oligonucleotide
uuguucgacuccaucagug

SEQ ID NO: 2520617 - RNA, 19 nt, Artificial Sequence
  Description of Artificial Sequence: Synthetic oligonucleotide
uugaucuaauucaauuuuc

SEQ ID NO: 2520618 - RNA, 19 nt, Artificial Sequence
  Description of Artificial Sequence: Synthetic oligonucleotide
cucagauuugcaaauucac

SEQ ID NO: 2520619 - RNA, 19 nt, Artificial Sequence
  Description of Artificial Sequence: Synthetic oligonucleotide
ugaacaccgaggcugcaag

SEQ ID NO: 2520620 - RNA, 19 nt, Artificial Sequence
  Description of Artificial Sequence: Synthetic oligonucleotide
uuagucaccauuuccuuau

SEQ ID NO: 2520621 - RNA, 19 nt, Artificial Sequence
  Description of Artificial Sequence: Synthetic oligonucleotide
caagugaacaccgaggcug

SEQ ID NO: 2520622 - RNA, 19 nt, Artificial Sequence
  Description of Artificial Sequence: Synthetic oligonucleotide
uccugauggaauccaaaug

SEQ ID NO: 2520623 - RNA, 19 nt, Artificial Sequence
  Description of Artificial Sequence: Synthetic oligonucleotide
ugcaagauaucgaauuguc

SEQ ID NO: 2520624 - RNA, 19 nt, Artificial Sequence
  Description of Artificial Sequence: Synthetic oligonucleotide
uguuacucugcuccuuucc

SEQ ID NO: 2520625 - RNA, 19 nt, Artificial Sequence
  Description of Artificial Sequence: Synthetic oligonucleotide
ucgacugcuuucaugaguc

SEQ ID NO: 2520626 - RNA, 19 nt, Artificial Sequence
  Description of Artificial Sequence: Synthetic oligonucleotide
guuuguucgacuccaucag

SEQ ID NO: 2520627 - RNA, 19 nt, Artificial Sequence
  Description of Artificial Sequence: Synthetic oligonucleotide
aaaccgauaaaaccccaau

SEQ ID NO: 2520628 - RNA, 19 nt, Artificial Sequence
  Description of Artificial Sequence: Synthetic oligonucleotide
uagauaguauccaggcuga

SEQ ID NO: 2520629 - RNA, 19 nt, Artificial Sequence
  Description of Artificial Sequence: Synthetic oligonucleotide
uaaaaccccaaugcuauug

SEQ ID NO: 2520630 - RNA, 19 nt, Artificial Sequence
  Description of Artificial Sequence: Synthetic oligonucleotide
uuguucuaaaggaguuacg

SEQ ID NO: 2520631 - RNA, 19 nt, Artificial Sequence
  Description of Artificial Sequence: Synthetic oligonucleotide
auacuuuugguuuggguau

SEQ ID NO: 2520632 - RNA, 19 nt, Artificial Sequence
  Description of Artificial Sequence: Synthetic oligonucleotide
acuugaucuaauucaauuu

SEQ ID NO: 2520633 - RNA, 19 nt, Artificial Sequence
  Description of Artificial Sequence: Synthetic oligonucleotide
ucaaguuuguucgacucca

SEQ ID NO: 2520634 - RNA, 19 nt, Artificial Sequence
  Description of Artificial Sequence: Synthetic oligonucleotide
uggccuucuaucauaacuc

SEQ ID NO: 2520635 - RNA, 19 nt, Artificial Sequence
  Description of Artificial Sequence: Synthetic oligonucleotide
ugcauggguaucaaaaguu

SEQ ID NO: 2520636 - RNA, 19 nt, Artificial Sequence
  Description of Artificial Sequence: Synthetic oligonucleotide
ugugcuugugucuugucaa

SEQ ID NO: 2520637 - RNA, 19 nt, Artificial Sequence
  Description of Artificial Sequence: Synthetic oligonucleotide
aauucauugguugcuucca

SEQ ID NO: 2520638 - RNA, 19 nt, Artificial Sequence
  Description of Artificial Sequence: Synthetic oligonucleotide
ggagcugaaguccagcggg

SEQ ID NO: 2520639 - RNA, 19 nt, Artificial Sequence
  Description of Artificial Sequence: Synthetic oligonucleotide
cauaaguugcuuuucuuga

SEQ ID NO: 2520640 - RNA, 19 nt, Artificial Sequence
  Description of Artificial Sequence: Synthetic oligonucleotide
acuuuucucuaggaugacc

SEQ ID NO: 2520641 - RNA, 19 nt, Artificial Sequence
  Description of Artificial Sequence: Synthetic oligonucleotide
aucgaauugucucaaguuu

SEQ ID NO: 2520642 - RNA, 19 nt, Artificial Sequence
  Description of Artificial Sequence: Synthetic oligonucleotide
ugguggucaagaaaccucu

SEQ ID NO: 2520643 - RNA, 19 nt, Artificial Sequence
  Description of Artificial Sequence: Synthetic oligonucleotide
agugucaauuuuauuacug

SEQ ID NO: 2520644 - RNA, 19 nt, Artificial Sequence
  Description of Artificial Sequence: Synthetic oligonucleotide
uaucgaauugucucaaguu

SEQ ID NO: 2520645 - RNA, 19 nt, Artificial Sequence
  Description of Artificial Sequence: Synthetic oligonucleotide
uaucauaacucgucuuugu

SEQ ID NO: 2520646 - RNA, 19 nt, Artificial Sequence
  Description of Artificial Sequence: Synthetic oligonucleotide
aagugaacaccgaggcugc

SEQ ID NO: 2520647 - RNA, 19 nt, Artificial Sequence
  Description of Artificial Sequence: Synthetic oligonucleotide
cugauggaauccaaaugag

SEQ ID NO: 2520648 - RNA, 19 nt, Artificial Sequence
  Description of Artificial Sequence: Synthetic oligonucleotide
cuguuggacuguuauuucc

SEQ ID NO: 2520649 - RNA, 19 nt, Artificial Sequence
  Description of Artificial Sequence: Synthetic oligonucleotide
uugagcuuuagucaccauu

SEQ ID NO: 2520650 - RNA, 19 nt, Artificial Sequence
  Description of Artificial Sequence: Synthetic oligonucleotide
uguugugguggucaagaaa

SEQ ID NO: 2520651 - RNA, 19 nt, Artificial Sequence
  Description of Artificial Sequence: Synthetic oligonucleotide
gauaucgaauugucucaag

SEQ ID NO: 2520652 - RNA, 19 nt, Artificial Sequence
  Description of Artificial Sequence: Synthetic oligonucleotide
uucuugaucugugaacaug

SEQ ID NO: 2520653 - RNA, 19 nt, Artificial Sequence
  Description of Artificial Sequence: Synthetic oligonucleotide
ugucuuuccugauggaauc

SEQ ID NO: 2520654 - RNA, 19 nt, Artificial Sequence
  Description of Artificial Sequence: Synthetic oligonucleotide
uguuuaacuugaucuaauu

SEQ ID NO: 2520655 - RNA, 19 nt, Artificial Sequence
  Description of Artificial Sequence: Synthetic oligonucleotide
uaauuuucuuuguucuaaa

SEQ ID NO: 2520656 - RNA, 19 nt, Artificial Sequence
  Description of Artificial Sequence: Synthetic oligonucleotide
aaaccucuccgcaggacgg

SEQ ID NO: 2520657 - RNA, 19 nt, Artificial Sequence
  Description of Artificial Sequence: Synthetic oligonucleotide
uccuuauagauaguaucca

SEQ ID NO: 2520658 - RNA, 19 nt, Artificial Sequence
  Description of Artificial Sequence: Synthetic oligonucleotide
aacucgucuuuguuguggu

SEQ ID NO: 2520659 - RNA, 19 nt, Artificial Sequence
  Description of Artificial Sequence: Synthetic oligonucleotide
uuccaaguccuucaccagu

SEQ ID NO: 2520660 - RNA, 19 nt, Artificial Sequence
  Description of Artificial Sequence: Synthetic oligonucleotide
uaaauucauugguugcuuc

SEQ ID NO: 2520661 - RNA, 19 nt, Artificial Sequence
  Description of Artificial Sequence: Synthetic oligonucleotide
uuuagucaccauuuccuua

SEQ ID NO: 2520662 - RNA, 19 nt, Artificial Sequence
  Description of Artificial Sequence: Synthetic oligonucleotide
ggagccgccaaauccagcg

SEQ ID NO: 2520663 - RNA, 19 nt, Artificial Sequence
  Description of Artificial Sequence: Synthetic oligonucleotide
uucaugagucagcugcugu

SEQ ID NO: 2520664 - RNA, 19 nt, Artificial Sequence
  Description of Artificial Sequence: Synthetic oligonucleotide
gacuguuauuuccuguuga

SEQ ID NO: 2520665 - RNA, 19 nt, Artificial Sequence
  Description of Artificial Sequence: Synthetic oligonucleotide
cucaaguuuguucgacucc

SEQ ID NO: 2520666 - RNA, 19 nt, Artificial Sequence
  Description of Artificial Sequence: Synthetic oligonucleotide
uuuguucgacuccaucagu

SEQ ID NO: 2520667 - RNA, 19 nt, Artificial Sequence
  Description of Artificial Sequence: Synthetic oligonucleotide
gauaaaaccccaaugcuau

SEQ ID NO: 2520668 - RNA, 19 nt, Artificial Sequence
  Description of Artificial Sequence: Synthetic oligonucleotide
uugguugcuuccauaaguu

SEQ ID NO: 2520669 - RNA, 19 nt, Artificial Sequence
  Description of Artificial Sequence: Synthetic oligonucleotide
uuaucugcucugauucgac

SEQ ID NO: 2520670 - RNA, 19 nt, Artificial Sequence
  Description of Artificial Sequence: Synthetic oligonucleotide
aaauccagcggcuccucau

SEQ ID NO: 2520671 - RNA, 19 nt, Artificial Sequence
  Description of Artificial Sequence: Synthetic oligonucleotide
aggagcugaaguccagcgg

SEQ ID NO: 2520672 - RNA, 19 nt, Artificial Sequence
  Description of Artificial Sequence: Synthetic oligonucleotide
guggucaagaaaccucucc

SEQ ID NO: 2520673 - RNA, 19 nt, Artificial Sequence
  Description of Artificial Sequence: Synthetic oligonucleotide
gaggcugcaagauaucgaa

SEQ ID NO: 2520674 - RNA, 19 nt, Artificial Sequence
  Description of Artificial Sequence: Synthetic oligonucleotide
ugcuguuuaacuugaucua

SEQ ID NO: 2520675 - RNA, 19 nt, Artificial Sequence
  Description of Artificial Sequence: Synthetic oligonucleotide
uggguaucaaaaguuaauu

SEQ ID NO: 2520676 - RNA, 19 nt, Artificial Sequence
  Description of Artificial Sequence: Synthetic oligonucleotide
ugccaagcaagugaacacc

SEQ ID NO: 2520677 - RNA, 19 nt, Artificial Sequence
  Description of Artificial Sequence: Synthetic oligonucleotide
caauuuuauuacuggucuc

SEQ ID NO: 2520678 - RNA, 19 nt, Artificial Sequence
  Description of Artificial Sequence: Synthetic oligonucleotide
uguugagcuuuagucacca

SEQ ID NO: 2520679 - RNA, 19 nt, Artificial Sequence
  Description of Artificial Sequence: Synthetic oligonucleotide
gcuauugccaagcaaguga

SEQ ID NO: 2520680 - RNA, 19 nt, Artificial Sequence
  Description of Artificial Sequence: Synthetic oligonucleotide
uucaccagugcauggguau

SEQ ID NO: 2520681 - RNA, 19 nt, Artificial Sequence
  Description of Artificial Sequence: Synthetic oligonucleotide
auuaucugcucugauucga

SEQ ID NO: 2520682 - RNA, 19 nt, Artificial Sequence
  Description of Artificial Sequence: Synthetic oligonucleotide
ccaaaaccgauaaaacccc

SEQ ID NO: 2520683 - RNA, 19 nt, Artificial Sequence
  Description of Artificial Sequence: Synthetic oligonucleotide
uggacuguuauuuccuguu

SEQ ID NO: 2520684 - RNA, 19 nt, Artificial Sequence
  Description of Artificial Sequence: Synthetic oligonucleotide
cauaacucgucuuuguugu

SEQ ID NO: 2520685 - RNA, 19 nt, Artificial Sequence
  Description of Artificial Sequence: Synthetic oligonucleotide
caaaugagccauuagcugu

SEQ ID NO: 2520686 - RNA, 19 nt, Artificial Sequence
  Description of Artificial Sequence: Synthetic oligonucleotide
agccauuagcuguuggacu

SEQ ID NO: 2520687 - RNA, 19 nt, Artificial Sequence
  Description of Artificial Sequence: Synthetic oligonucleotide
uuuugguuuggguauccuu

SEQ ID NO: 2520688 - RNA, 19 nt, Artificial Sequence
  Description of Artificial Sequence: Synthetic oligonucleotide
ugguugcuuccauaaguug

SEQ ID NO: 2520689 - RNA, 19 nt, Artificial Sequence
  Description of Artificial Sequence: Synthetic oligonucleotide
uucgacuccaucaguguuu

SEQ ID NO: 2520690 - RNA, 19 nt, Artificial Sequence
  Description of Artificial Sequence: Synthetic oligonucleotide
aaccccaaugcuauugcca

SEQ ID NO: 2520691 - RNA, 19 nt, Artificial Sequence
  Description of Artificial Sequence: Synthetic oligonucleotide
cuaucauaacucgucuuug

SEQ ID NO: 2520692 - RNA, 19 nt, Artificial Sequence
  Description of Artificial Sequence: Synthetic oligonucleotide
ccugauggaauccaaauga

SEQ ID NO: 2520693 - RNA, 19 nt, Artificial Sequence
  Description of Artificial Sequence: Synthetic oligonucleotide
auuacuggucucugaaaua

SEQ ID NO: 2520694 - RNA, 19 nt, Artificial Sequence
  Description of Artificial Sequence: Synthetic oligonucleotide
guuggacuguuauuuccug

SEQ ID NO: 2520695 - RNA, 19 nt, Artificial Sequence
  Description of Artificial Sequence: Synthetic oligonucleotide
auuucagugucaauuuuau

SEQ ID NO: 2520696 - RNA, 19 nt, Artificial Sequence
  Description of Artificial Sequence: Synthetic oligonucleotide
aaaaccgauaaaaccccaa

SEQ ID NO: 2520697 - RNA, 19 nt, Artificial Sequence
  Description of Artificial Sequence: Synthetic oligonucleotide
agcuguuggacuguuauuu

SEQ ID NO: 2520698 - RNA, 19 nt, Artificial Sequence
  Description of Artificial Sequence: Synthetic oligonucleotide
uucucauucucugcucuca

SEQ ID NO: 2520699 - RNA, 19 nt, Artificial Sequence
  Description of Artificial Sequence: Synthetic oligonucleotide
cagugcauggguaucaaaa

SEQ ID NO: 2520700 - RNA, 19 nt, Artificial Sequence
  Description of Artificial Sequence: Synthetic oligonucleotide
acgggugacagacacccgu

SEQ ID NO: 2520701 - RNA, 19 nt, Artificial Sequence
  Description of Artificial Sequence: Synthetic oligonucleotide
ccuucuaucauaacucguc

SEQ ID NO: 2520702 - RNA, 19 nt, Artificial Sequence
  Description of Artificial Sequence: Synthetic oligonucleotide
acuuauuaucugcucugau

SEQ ID NO: 2520703 - RNA, 19 nt, Artificial Sequence
  Description of Artificial Sequence: Synthetic oligonucleotide
ucaugagucagcugcuguu

SEQ ID NO: 2520704 - RNA, 19 nt, Artificial Sequence
  Description of Artificial Sequence: Synthetic oligonucleotide
cucugauucgacugcuuuc

SEQ ID NO: 2520705 - RNA, 19 nt, Artificial Sequence
  Description of Artificial Sequence: Synthetic oligonucleotide
ggccuucuaucauaacucg

SEQ ID NO: 2520706 - RNA, 19 nt, Artificial Sequence
  Description of Artificial Sequence: Synthetic oligonucleotide
uucuaucauaacucgucuu

SEQ ID NO: 2520707 - RNA, 19 nt, Artificial Sequence
  Description of Artificial Sequence: Synthetic oligonucleotide
cuauugccaagcaagugaa

SEQ ID NO: 2520708 - RNA, 19 nt, Artificial Sequence
  Description of Artificial Sequence: Synthetic oligonucleotide
ggucaagaaaccucuccgc

SEQ ID NO: 2520709 - RNA, 19 nt, Artificial Sequence
  Description of Artificial Sequence: Synthetic oligonucleotide
ugcuauugccaagcaagug

SEQ ID NO: 2520710 - RNA, 19 nt, Artificial Sequence
  Description of Artificial Sequence: Synthetic oligonucleotide
acccgugaggagcugaagu

SEQ ID NO: 2520711 - RNA, 19 nt, Artificial Sequence
  Description of Artificial Sequence: Synthetic oligonucleotide
uaaaggaguuacguccacu

SEQ ID NO: 2520712 - RNA, 19 nt, Artificial Sequence
  Description of Artificial Sequence: Synthetic oligonucleotide
accccaaugcuauugccaa

SEQ ID NO: 2520713 - RNA, 19 nt, Artificial Sequence
  Description of Artificial Sequence: Synthetic oligonucleotide
caggacgggugacagacac

SEQ ID NO: 2520714 - RNA, 19 nt, Artificial Sequence
  Description of Artificial Sequence: Synthetic oligonucleotide
uccauaaguugcuuuucuu

SEQ ID NO: 2520715 - RNA, 19 nt, Artificial Sequence
  Description of Artificial Sequence: Synthetic oligonucleotide
ugucucaaguuuguucgac

SEQ ID NO: 2520716 - RNA, 19 nt, Artificial Sequence
  Description of Artificial Sequence: Synthetic oligonucleotide
auuuccuuauagauaguau

SEQ ID NO: 2520717 - RNA, 19 nt, Artificial Sequence
  Description of Artificial Sequence: Synthetic oligonucleotide
auucgacugcuuucaugag

SEQ ID NO: 2520718 - RNA, 19 nt, Artificial Sequence
  Description of Artificial Sequence: Synthetic oligonucleotide
cuuuccagguugaugucca

SEQ ID NO: 2520719 - RNA, 19 nt, Artificial Sequence
  Description of Artificial Sequence: Synthetic oligonucleotide
aauccagcggcuccucaua

SEQ ID NO: 2520720 - RNA, 19 nt, Artificial Sequence
  Description of Artificial Sequence: Synthetic oligonucleotide
uauugccaagcaagugaac

SEQ ID NO: 2520721 - RNA, 19 nt, Artificial Sequence
  Description of Artificial Sequence: Synthetic oligonucleotide
uucauugguugcuuccaua

SEQ ID NO: 2520722 - RNA, 19 nt, Artificial Sequence
  Description of Artificial Sequence: Synthetic oligonucleotide
aaaugagccauuagcuguu

SEQ ID NO: 2520723 - RNA, 19 nt, Artificial Sequence
  Description of Artificial Sequence: Synthetic oligonucleotide
agaaaccucuccgcaggac

SEQ ID NO: 2520724 - RNA, 19 nt, Artificial Sequence
  Description of Artificial Sequence: Synthetic oligonucleotide
cauggguaucaaaaguuaa

SEQ ID NO: 2520725 - RNA, 19 nt, Artificial Sequence
  Description of Artificial Sequence: Synthetic oligonucleotide
cagauuugcaaauucacuu

SEQ ID NO: 2520726 - RNA, 19 nt, Artificial Sequence
  Description of Artificial Sequence: Synthetic oligonucleotide
ucuuuguugugguggucaa

SEQ ID NO: 2520727 - RNA, 19 nt, Artificial Sequence
  Description of Artificial Sequence: Synthetic oligonucleotide
accgccgucagggcgaagg

SEQ ID NO: 2520728 - RNA, 19 nt, Artificial Sequence
  Description of Artificial Sequence: Synthetic oligonucleotide
cuguugagcuuuagucacc

SEQ ID NO: 2520729 - RNA, 19 nt, Artificial Sequence
  Description of Artificial Sequence: Synthetic oligonucleotide
ugaggagcugaaguccagc

SEQ ID NO: 2520730 - RNA, 19 nt, Artificial Sequence
  Description of Artificial Sequence: Synthetic oligonucleotide
auuugauaauuuacuuagu

SEQ ID NO: 2520731 - RNA, 19 nt, Artificial Sequence
  Description of Artificial Sequence: Synthetic oligonucleotide
cuugaucuaauucaauuuu

SEQ ID NO: 2520732 - RNA, 19 nt, Artificial Sequence
  Description of Artificial Sequence: Synthetic oligonucleotide
auaacucgucuuuguugug

SEQ ID NO: 2520733 - RNA, 19 nt, Artificial Sequence
  Description of Artificial Sequence: Synthetic oligonucleotide
uugucucaaguuuguucga

SEQ ID NO: 2520734 - RNA, 19 nt, Artificial Sequence
  Description of Artificial Sequence: Synthetic oligonucleotide
ggacgggugacagacaccc

SEQ ID NO: 2520735 - RNA, 19 nt, Artificial Sequence
  Description of Artificial Sequence: Synthetic oligonucleotide
ggacccaccgccgucaggg

SEQ ID NO: 2520736 - RNA, 19 nt, Artificial Sequence
  Description of Artificial Sequence: Synthetic oligonucleotide
auucauugguugcuuccau

SEQ ID NO: 2520737 - RNA, 19 nt, Artificial Sequence
  Description of Artificial Sequence: Synthetic oligonucleotide
acuggccuucuaucauaac

SEQ ID NO: 2520738 - RNA, 19 nt, Artificial Sequence
  Description of Artificial Sequence: Synthetic oligonucleotide
agguugauguccaacuuau

SEQ ID NO: 2520739 - RNA, 19 nt, Artificial Sequence
  Description of Artificial Sequence: Synthetic oligonucleotide
cuaaaggaguuacguccac

SEQ ID NO: 2520740 - RNA, 19 nt, Artificial Sequence
  Description of Artificial Sequence: Synthetic oligonucleotide
auggguaucaaaaguuaau

SEQ ID NO: 2520741 - RNA, 19 nt, Artificial Sequence
  Description of Artificial Sequence: Synthetic oligonucleotide
gucuuuguuguggugguca

SEQ ID NO: 2520742 - RNA, 19 nt, Artificial Sequence
  Description of Artificial Sequence: Synthetic oligonucleotide
augucuuuccugauggaau

SEQ ID NO: 2520743 - RNA, 19 nt, Artificial Sequence
  Description of Artificial Sequence: Synthetic oligonucleotide
uccgcaggacgggugacag

SEQ ID NO: 2520744 - RNA, 19 nt, Artificial Sequence
  Description of Artificial Sequence: Synthetic oligonucleotide
cugacacaacagucugugc

SEQ ID NO: 2520745 - RNA, 19 nt, Artificial Sequence
  Description of Artificial Sequence: Synthetic oligonucleotide
guuacguccacuggccuuc

SEQ ID NO: 2520746 - RNA, 19 nt, Artificial Sequence
  Description of Artificial Sequence: Synthetic oligonucleotide
aagcaauuucagugucaau

SEQ ID NO: 2520747 - RNA, 19 nt, Artificial Sequence
  Description of Artificial Sequence: Synthetic oligonucleotide
agauaucgaauugucucaa

SEQ ID NO: 2520748 - RNA, 19 nt, Artificial Sequence
  Description of Artificial Sequence: Synthetic oligonucleotide
agauaguauccaggcugac

SEQ ID NO: 2520749 - RNA, 19 nt, Artificial Sequence
  Description of Artificial Sequence: Synthetic oligonucleotide
aguuacguccacuggccuu

SEQ ID NO: 2520750 - RNA, 19 nt, Artificial Sequence
  Description of Artificial Sequence: Synthetic oligonucleotide
aaccucuccgcaggacggg

SEQ ID NO: 2520751 - RNA, 19 nt, Artificial Sequence
  Description of Artificial Sequence: Synthetic oligonucleotide
ggaguuacguccacuggcc

SEQ ID NO: 2520752 - RNA, 19 nt, Artificial Sequence
  Description of Artificial Sequence: Synthetic oligonucleotide
gucagggcgaaggagccgc

SEQ ID NO: 2520753 - RNA, 19 nt, Artificial Sequence
  Description of Artificial Sequence: Synthetic oligonucleotide
cuggccuucuaucauaacu

SEQ ID NO: 2520754 - RNA, 19 nt, Artificial Sequence
  Description of Artificial Sequence: Synthetic oligonucleotide
gagcuuuagucaccauuuc

SEQ ID NO: 2520755 - RNA, 19 nt, Artificial Sequence
  Description of Artificial Sequence: Synthetic oligonucleotide
caaaaccgauaaaacccca

SEQ ID NO: 2520756 - RNA, 19 nt, Artificial Sequence
  Description of Artificial Sequence: Synthetic oligonucleotide
gaucugugaacaugucugu

SEQ ID NO: 2520757 - RNA, 19 nt, Artificial Sequence
  Description of Artificial Sequence: Synthetic oligonucleotide
ugcuuccauaaguugcuuu

SEQ ID NO: 2520758 - RNA, 19 nt, Artificial Sequence
  Description of Artificial Sequence: Synthetic oligonucleotide
uuguugugguggucaagaa

SEQ ID NO: 2520759 - RNA, 19 nt, Artificial Sequence
  Description of Artificial Sequence: Synthetic oligonucleotide
cauuuccuuauagauagua

SEQ ID NO: 2520760 - RNA, 19 nt, Artificial Sequence
  Description of Artificial Sequence: Synthetic oligonucleotide
acuggucucugaaauaaua

SEQ ID NO: 2520761 - RNA, 19 nt, Artificial Sequence
  Description of Artificial Sequence: Synthetic oligonucleotide
caugucuguuacucugcuc

SEQ ID NO: 2520762 - RNA, 19 nt, Artificial Sequence
  Description of Artificial Sequence: Synthetic oligonucleotide
caccauuuccuuauagaua

SEQ ID NO: 2520763 - RNA, 19 nt, Artificial Sequence
  Description of Artificial Sequence: Synthetic oligonucleotide
gacagacacccgugaggag

SEQ ID NO: 2520764 - RNA, 19 nt, Artificial Sequence
  Description of Artificial Sequence: Synthetic oligonucleotide
ggacuguuauuuccuguug

SEQ ID NO: 2520765 - RNA, 19 nt, Artificial Sequence
  Description of Artificial Sequence: Synthetic oligonucleotide
acguccacuggccuucuau

SEQ ID NO: 2520766 - RNA, 19 nt, Artificial Sequence
  Description of Artificial Sequence: Synthetic oligonucleotide
gugguggucaagaaaccuc

SEQ ID NO: 2520767 - RNA, 19 nt, Artificial Sequence
  Description of Artificial Sequence: Synthetic oligonucleotide
guccacuggccuucuauca

SEQ ID NO: 2520768 - RNA, 19 nt, Artificial Sequence
  Description of Artificial Sequence: Synthetic oligonucleotide
gucuuuccugauggaaucc

SEQ ID NO: 2520769 - RNA, 19 nt, Artificial Sequence
  Description of Artificial Sequence: Synthetic oligonucleotide
ccuuccaaaaccgauaaaa

SEQ ID NO: 2520770 - RNA, 19 nt, Artificial Sequence
  Description of Artificial Sequence: Synthetic oligonucleotide
cuucuaucauaacucgucu

SEQ ID NO: 2520771 - RNA, 19 nt, Artificial Sequence
  Description of Artificial Sequence: Synthetic oligonucleotide
cugcucucagauuugcaaa

SEQ ID NO: 2520772 - RNA, 19 nt, Artificial Sequence
  Description of Artificial Sequence: Synthetic oligonucleotide
auaaaaccccaaugcuauu

SEQ ID NO: 2520773 - RNA, 19 nt, Artificial Sequence
  Description of Artificial Sequence: Synthetic oligonucleotide
cccaaugcuauugccaagc

SEQ ID NO: 2520774 - RNA, 19 nt, Artificial Sequence
  Description of Artificial Sequence: Synthetic oligonucleotide
gugcauggguaucaaaagu

SEQ ID NO: 2520775 - RNA, 19 nt, Artificial Sequence
  Description of Artificial Sequence: Synthetic oligonucleotide
uacuuuugguuuggguauc

SEQ ID NO: 2520776 - RNA, 19 nt, Artificial Sequence
  Description of Artificial Sequence: Synthetic oligonucleotide
acucgucuuuguuguggug

SEQ ID NO: 2520777 - RNA, 19 nt, Artificial Sequence
  Description of Artificial Sequence: Synthetic oligonucleotide
caugucuuuccugauggaa

SEQ ID NO: 2520778 - RNA, 19 nt, Artificial Sequence
  Description of Artificial Sequence: Synthetic oligonucleotide
ugcuugugucuugucaaau

SEQ ID NO: 2520779 - RNA, 19 nt, Artificial Sequence
  Description of Artificial Sequence: Synthetic oligonucleotide
gguaaauucauugguugcu

SEQ ID NO: 2520780 - RNA, 19 nt, Artificial Sequence
  Description of Artificial Sequence: Synthetic oligonucleotide
cuguuacucugcuccuuuc

SEQ ID NO: 2520781 - RNA, 19 nt, Artificial Sequence
  Description of Artificial Sequence: Synthetic oligonucleotide
aggacgggugacagacacc

SEQ ID NO: 2520782 - RNA, 19 nt, Artificial Sequence
  Description of Artificial Sequence: Synthetic oligonucleotide
caaugcuauugccaagcaa

SEQ ID NO: 2520783 - RNA, 19 nt, Artificial Sequence
  Description of Artificial Sequence: Synthetic oligonucleotide
ucugugcuugugucuuguc

SEQ ID NO: 2520784 - RNA, 19 nt, Artificial Sequence
  Description of Artificial Sequence: Synthetic oligonucleotide
cucuaggaugaccaugucu

SEQ ID NO: 2520785 - RNA, 19 nt, Artificial Sequence
  Description of Artificial Sequence: Synthetic oligonucleotide
uagcuguuggacuguuauu

SEQ ID NO: 2520786 - RNA, 19 nt, Artificial Sequence
  Description of Artificial Sequence: Synthetic oligonucleotide
agcgggacccaccgccguc

SEQ ID NO: 2520787 - RNA, 19 nt, Artificial Sequence
  Description of Artificial Sequence: Synthetic oligonucleotide
guauccaggcugacauuug

SEQ ID NO: 2520788 - RNA, 19 nt, Artificial Sequence
  Description of Artificial Sequence: Synthetic oligonucleotide
ucgacuccaucaguguuuu

SEQ ID NO: 2520789 - RNA, 19 nt, Artificial Sequence
  Description of Artificial Sequence: Synthetic oligonucleotide
aggagccgccaaauccagc

SEQ ID NO: 2520790 - RNA, 19 nt, Artificial Sequence
  Description of Artificial Sequence: Synthetic oligonucleotide
acaccgaggcugcaagaua

SEQ ID NO: 2520791 - RNA, 19 nt, Artificial Sequence
  Description of Artificial Sequence: Synthetic oligonucleotide
gcuguuuaacuugaucuaa

SEQ ID NO: 2520792 - RNA, 19 nt, Artificial Sequence
  Description of Artificial Sequence: Synthetic oligonucleotide
auccagcggcuccucauau

SEQ ID NO: 2520793 - RNA, 19 nt, Artificial Sequence
  Description of Artificial Sequence: Synthetic oligonucleotide
ugcucugauucgacugcuu

SEQ ID NO: 2520794 - RNA, 19 nt, Artificial Sequence
  Description of Artificial Sequence: Synthetic oligonucleotide
cuguuuaacuugaucuaau

SEQ ID NO: 2520795 - RNA, 19 nt, Artificial Sequence
  Description of Artificial Sequence: Synthetic oligonucleotide
gccgucagggcgaaggagc

SEQ ID NO: 2520796 - RNA, 19 nt, Artificial Sequence
  Description of Artificial Sequence: Synthetic oligonucleotide
gacgggugacagacacccg

SEQ ID NO: 2520797 - RNA, 19 nt, Artificial Sequence
  Description of Artificial Sequence: Synthetic oligonucleotide
gucagcugcuguuuaacuu

SEQ ID NO: 2520798 - RNA, 19 nt, Artificial Sequence
  Description of Artificial Sequence: Synthetic oligonucleotide
ggcugcaagauaucgaauu

SEQ ID NO: 2520799 - RNA, 19 nt, Artificial Sequence
  Description of Artificial Sequence: Synthetic oligonucleotide
ccgaggcugcaagauaucg

SEQ ID NO: 2520800 - RNA, 19 nt, Artificial Sequence
  Description of Artificial Sequence: Synthetic oligonucleotide
ccaacuuauuaucugcucu

SEQ ID NO: 2520801 - RNA, 19 nt, Artificial Sequence
  Description of Artificial Sequence: Synthetic oligonucleotide
cccgugaggagcugaaguc

SEQ ID NO: 2520802 - RNA, 19 nt, Artificial Sequence
  Description of Artificial Sequence: Synthetic oligonucleotide
ggucucugaaauaauacuu

SEQ ID NO: 2520803 - RNA, 19 nt, Artificial Sequence
  Description of Artificial Sequence: Synthetic oligonucleotide
cuucaccagugcaugggua

SEQ ID NO: 2520804 - RNA, 19 nt, Artificial Sequence
  Description of Artificial Sequence: Synthetic oligonucleotide
accgaggcugcaagauauc

SEQ ID NO: 2520805 - RNA, 19 nt, Artificial Sequence
  Description of Artificial Sequence: Synthetic oligonucleotide
cgauaaaaccccaaugcua

SEQ ID NO: 2520806 - RNA, 19 nt, Artificial Sequence
  Description of Artificial Sequence: Synthetic oligonucleotide
caccgaggcugcaagauau

SEQ ID NO: 2520807 - RNA, 19 nt, Artificial Sequence
  Description of Artificial Sequence: Synthetic oligonucleotide
ccgugaggagcugaagucc

SEQ ID NO: 2520808 - RNA, 19 nt, Artificial Sequence
  Description of Artificial Sequence: Synthetic oligonucleotide
gacacccgugaggagcuga

SEQ ID NO: 2520809 - RNA, 19 nt, Artificial Sequence
  Description of Artificial Sequence: Synthetic oligonucleotide
gaguuacguccacuggccu

SEQ ID NO: 2520810 - RNA, 19 nt, Artificial Sequence
  Description of Artificial Sequence: Synthetic oligonucleotide
cacuuuucucuaggaugac

SEQ ID NO: 2520811 - RNA, 19 nt, Artificial Sequence
  Description of Artificial Sequence: Synthetic oligonucleotide
cucuccgcaggacggguga

SEQ ID NO: 2520812 - RNA, 19 nt, Artificial Sequence
  Description of Artificial Sequence: Synthetic oligonucleotide
guucgacuccaucaguguu

SEQ ID NO: 2520813 - RNA, 19 nt, Artificial Sequence
  Description of Artificial Sequence: Synthetic oligonucleotide
caggcugacauuugauaau

SEQ ID NO: 2520814 - RNA, 19 nt, Artificial Sequence
  Description of Artificial Sequence: Synthetic oligonucleotide
gacccaccgccgucagggc

SEQ ID NO: 2520815 - RNA, 19 nt, Artificial Sequence
  Description of Artificial Sequence: Synthetic oligonucleotide
ccgucagggcgaaggagcc

SEQ ID NO: 2520816 - RNA, 19 nt, Artificial Sequence
  Description of Artificial Sequence: Synthetic oligonucleotide
gcauggguaucaaaaguua

SEQ ID NO: 2520817 - RNA, 19 nt, Artificial Sequence
  Description of Artificial Sequence: Synthetic oligonucleotide
cgcaggacgggugacagac

SEQ ID NO: 2520818 - RNA, 19 nt, Artificial Sequence
  Description of Artificial Sequence: Synthetic oligonucleotide
caccagugcauggguauca

SEQ ID NO: 2520819 - RNA, 19 nt, Artificial Sequence
  Description of Artificial Sequence: Synthetic oligonucleotide
gugaacaccgaggcugcaa

SEQ ID NO: 2520820 - RNA, 19 nt, Artificial Sequence
  Description of Artificial Sequence: Synthetic oligonucleotide
gcggcuccucauauucucg

SEQ ID NO: 2520821 - RNA, 19 nt, Artificial Sequence
  Description of Artificial Sequence: Synthetic oligonucleotide
gcaagauaucgaauugucu

SEQ ID NO: 2520822 - RNA, 19 nt, Artificial Sequence
  Description of Artificial Sequence: Synthetic oligonucleotide
auuagcuguuggacuguua

SEQ ID NO: 2520823 - RNA, 19 nt, Artificial Sequence
  Description of Artificial Sequence: Synthetic oligonucleotide
agugaacaccgaggcugca

SEQ ID NO: 2520824 - RNA, 19 nt, Artificial Sequence
  Description of Artificial Sequence: Synthetic oligonucleotide
ucuccgcaggacgggugac

SEQ ID NO: 2520825 - RNA, 19 nt, Artificial Sequence
  Description of Artificial Sequence: Synthetic oligonucleotide
uuacguccacuggccuucu

SEQ ID NO: 2520826 - RNA, 19 nt, Artificial Sequence
  Description of Artificial Sequence: Synthetic oligonucleotide
gggugacagacacccguga

SEQ ID NO: 2520827 - RNA, 19 nt, Artificial Sequence
  Description of Artificial Sequence: Synthetic oligonucleotide
cacccgugaggagcugaag

SEQ ID NO: 2520828 - RNA, 19 nt, Artificial Sequence
  Description of Artificial Sequence: Synthetic oligonucleotide
aggcugcaagauaucgaau

SEQ ID NO: 2520829 - RNA, 19 nt, Artificial Sequence
  Description of Artificial Sequence: Synthetic oligonucleotide
cgccaaauccagcggcucc

SEQ ID NO: 2520830 - RNA, 19 nt, Artificial Sequence
  Description of Artificial Sequence: Synthetic oligonucleotide
cguccacuggccuucuauc

SEQ ID NO: 2520831 - RNA, 19 nt, Artificial Sequence
  Description of Artificial Sequence: Synthetic oligonucleotide
acacccgugaggagcugaa

SEQ ID NO: 2520832 - RNA, 19 nt, Artificial Sequence
  Description of Artificial Sequence: Synthetic oligonucleotide
gguggucaagaaaccucuc

SEQ ID NO: 2520833 - RNA, 19 nt, Artificial Sequence
  Description of Artificial Sequence: Synthetic oligonucleotide
cuaggaugaccaugucuuu

SEQ ID NO: 2520834 - RNA, 19 nt, Artificial Sequence
  Description of Artificial Sequence: Synthetic oligonucleotide
gcaagugaacaccgaggcu

SEQ ID NO: 2520835 - RNA, 19 nt, Artificial Sequence
  Description of Artificial Sequence: Synthetic oligonucleotide
cuuuugguuuggguauccu

SEQ ID NO: 2520836 - RNA, 19 nt, Artificial Sequence
  Description of Artificial Sequence: Synthetic oligonucleotide
gcucugauucgacugcuuu

SEQ ID NO: 2520837 - RNA, 19 nt, Artificial Sequence
  Description of Artificial Sequence: Synthetic oligonucleotide
cgaggcugcaagauaucga

SEQ ID NO: 2520838 - RNA, 19 nt, Artificial Sequence
  Description of Artificial Sequence: Synthetic oligonucleotide
cgggugacagacacccgug

SEQ ID NO: 2520839 - RNA, 19 nt, Artificial Sequence
  Description of Artificial Sequence: Synthetic oligonucleotide
cgaauugucucaaguuugu

SEQ ID NO: 2520840 - RNA, 19 nt, Artificial Sequence
  Description of Artificial Sequence: Synthetic oligonucleotide
guugagcuuuagucaccau

SEQ ID NO: 2520841 - RNA, 19 nt, Artificial Sequence
  Description of Artificial Sequence: Synthetic oligonucleotide
agacacccgugaggagcug

SEQ ID NO: 2520842 - RNA, 19 nt, Artificial Sequence
  Description of Artificial Sequence: Synthetic oligonucleotide
ccucuccgcaggacgggug

SEQ ID NO: 2520843 - RNA, 19 nt, Artificial Sequence
  Description of Artificial Sequence: Synthetic oligonucleotide
cuccgcaggacgggugaca

SEQ ID NO: 2520844 - RNA, 19 nt, Artificial Sequence
  Description of Artificial Sequence: Synthetic oligonucleotide
ccacuggccuucuaucaua

SEQ ID NO: 2520845 - RNA, 19 nt, Artificial Sequence
  Description of Artificial Sequence: Synthetic oligonucleotide
gggcgaaggagccgccaaa

SEQ ID NO: 2520846 - RNA, 19 nt, Artificial Sequence
  Description of Artificial Sequence: Synthetic oligonucleotide
gccuucuaucauaacucgu

SEQ ID NO: 2520847 - RNA, 19 nt, Artificial Sequence
  Description of Artificial Sequence: Synthetic oligonucleotide
cagggcgaaggagccgcca

SEQ ID NO: 2520848 - RNA, 19 nt, Artificial Sequence
  Description of Artificial Sequence: Synthetic oligonucleotide
gucuguuacucugcuccuu

SEQ ID NO: 2520849 - RNA, 19 nt, Artificial Sequence
  Description of Artificial Sequence: Synthetic oligonucleotide
ggcgaaggagccgccaaau

SEQ ID NO: 2520850 - RNA, 19 nt, Artificial Sequence
  Description of Artificial Sequence: Synthetic oligonucleotide
cgucagggcgaaggagccg

SEQ ID NO: 2520851 - RNA, 19 nt, Artificial Sequence
  Description of Artificial Sequence: Synthetic oligonucleotide
ccgccaaauccagcggcuc

SEQ ID NO: 2520852 - RNA, 19 nt, Artificial Sequence
  Description of Artificial Sequence: Synthetic oligonucleotide
gcaggacgggugacagaca

SEQ ID NO: 2520853 - RNA, 19 nt, Artificial Sequence
  Description of Artificial Sequence: Synthetic oligonucleotide
gccgccaaauccagcggcu

SEQ ID NO: 2520854 - RNA, 19 nt, Artificial Sequence
  Description of Artificial Sequence: Synthetic oligonucleotide
ccauuuccuuauagauagu

SEQ ID NO: 2520855 - RNA, 19 nt, Artificial Sequence
  Description of Artificial Sequence: Synthetic oligonucleotide
cgacugcuuucaugaguca

SEQ ID NO: 2520856 - RNA, 19 nt, Artificial Sequence
  Description of Artificial Sequence: Synthetic oligonucleotide
ccgccgucagggcgaagga

SEQ ID NO: 2520857 - RNA, 19 nt, Artificial Sequence
  Description of Artificial Sequence: Synthetic oligonucleotide
ccgcaggacgggugacaga

SEQ ID NO: 2520858 - RNA, 19 nt, Artificial Sequence
  Description of Artificial Sequence: Synthetic oligonucleotide
caccgccgucagggcgaag

SEQ ID NO: 2520859 - RNA, 19 nt, Artificial Sequence
  Description of Artificial Sequence: Synthetic oligonucleotide
aaauaacauuucucgaucc

SEQ ID NO: 2520860 - RNA, 19 nt, Artificial Sequence
  Description of Artificial Sequence: Synthetic oligonucleotide
uucauuauaaacuuagccu

SEQ ID NO: 2520861 - RNA, 19 nt, Artificial Sequence
  Description of Artificial Sequence: Synthetic oligonucleotide
aaaccaaucaauaacuuag

SEQ ID NO: 2520862 - RNA, 19 nt, Artificial Sequence
  Description of Artificial Sequence: Synthetic oligonucleotide
uuuucugagcauaacacag

SEQ ID NO: 2520863 - RNA, 19 nt, Artificial Sequence
  Description of Artificial Sequence: Synthetic oligonucleotide
ugaagcagaacauugagcu

SEQ ID NO: 2520864 - RNA, 19 nt, Artificial Sequence
  Description of Artificial Sequence: Synthetic oligonucleotide
gacggaaacauguacaucc

SEQ ID NO: 2520865 - RNA, 19 nt, Artificial Sequence
  Description of Artificial Sequence: Synthetic oligonucleotide
aauucaaacgaguugucca

SEQ ID NO: 2520866 - RNA, 19 nt, Artificial Sequence
  Description of Artificial Sequence: Synthetic oligonucleotide
aaucucuucaacucucuuc

SEQ ID NO: 2520867 - RNA, 19 nt, Artificial Sequence
  Description of Artificial Sequence: Synthetic oligonucleotide
uauaaacuuagccuggcgc

SEQ ID NO: 2520868 - RNA, 19 nt, Artificial Sequence
  Description of Artificial Sequence: Synthetic oligonucleotide
aaauucaaacgaguugucc

SEQ ID NO: 2520869 - RNA, 19 nt, Artificial Sequence
  Description of Artificial Sequence: Synthetic oligonucleotide
ucaaauucaaacgaguugu

SEQ ID NO: 2520870 - RNA, 19 nt, Artificial Sequence
  Description of Artificial Sequence: Synthetic oligonucleotide
caugccuucaucuacacac

SEQ ID NO: 2520871 - RNA, 19 nt, Artificial Sequence
  Description of Artificial Sequence: Synthetic oligonucleotide
uuuuaugacacuuggauuu

SEQ ID NO: 2520872 - RNA, 19 nt, Artificial Sequence
  Description of Artificial Sequence: Synthetic oligonucleotide
uucaaauucaaacgaguug

SEQ ID NO: 2520873 - RNA, 19 nt, Artificial Sequence
  Description of Artificial Sequence: Synthetic oligonucleotide
auaacuuagggaucaacag

SEQ ID NO: 2520874 - RNA, 19 nt, Artificial Sequence
  Description of Artificial Sequence: Synthetic oligonucleotide
uuaaaggcugcaaugugag

SEQ ID NO: 2520875 - RNA, 19 nt, Artificial Sequence
  Description of Artificial Sequence: Synthetic oligonucleotide
aacuuagggaucaacaguc

SEQ ID NO: 2520876 - RNA, 19 nt, Artificial Sequence
  Description of Artificial Sequence: Synthetic oligonucleotide
acagucuacacugauuucc

SEQ ID NO: 2520877 - RNA, 19 nt, Artificial Sequence
  Description of Artificial Sequence: Synthetic oligonucleotide
uuuucaaauucaaacgagu

SEQ ID NO: 2520878 - RNA, 19 nt, Artificial Sequence
  Description of Artificial Sequence: Synthetic oligonucleotide
aauaacuuagggaucaaca

SEQ ID NO: 2520879 - RNA, 19 nt, Artificial Sequence
  Description of Artificial Sequence: Synthetic oligonucleotide
aaucggaacaccuugcaau

SEQ ID NO: 2520880 - RNA, 19 nt, Artificial Sequence
  Description of Artificial Sequence: Synthetic oligonucleotide
aguuuuacuccauagcucu

SEQ ID NO: 2520881 - RNA, 19 nt, Artificial Sequence
  Description of Artificial Sequence: Synthetic oligonucleotide
agaacauugagcugagcuc

SEQ ID NO: 2520882 - RNA, 19 nt, Artificial Sequence
  Description of Artificial Sequence: Synthetic oligonucleotide
ugcaaugugagacggaaac

SEQ ID NO: 2520883 - RNA, 19 nt, Artificial Sequence
  Description of Artificial Sequence: Synthetic oligonucleotide
cuguucauuauaaacuuag

SEQ ID NO: 2520884 - RNA, 19 nt, Artificial Sequence
  Description of Artificial Sequence: Synthetic oligonucleotide
uguacauccccuuugucug

SEQ ID NO: 2520885 - RNA, 19 nt, Artificial Sequence
  Description of Artificial Sequence: Synthetic oligonucleotide
acgaacaucaugccguggc

SEQ ID NO: 2520886 - RNA, 19 nt, Artificial Sequence
  Description of Artificial Sequence: Synthetic oligonucleotide
uucaucuacacacaaacuu

SEQ ID NO: 2520887 - RNA, 19 nt, Artificial Sequence
  Description of Artificial Sequence: Synthetic oligonucleotide
ugcaucaauaguuuuacuc

SEQ ID NO: 2520888 - RNA, 19 nt, Artificial Sequence
  Description of Artificial Sequence: Synthetic oligonucleotide
auugcaucaauaguuuuac

SEQ ID NO: 2520889 - RNA, 19 nt, Artificial Sequence
  Description of Artificial Sequence: Synthetic oligonucleotide
auucaaacgaguuguccac

SEQ ID NO: 2520890 - RNA, 19 nt, Artificial Sequence
  Description of Artificial Sequence: Synthetic oligonucleotide
aauaacauuucucgauccu

SEQ ID NO: 2520891 - RNA, 19 nt, Artificial Sequence
  Description of Artificial Sequence: Synthetic oligonucleotide
aguucaugccuucaucuac

SEQ ID NO: 2520892 - RNA, 19 nt, Artificial Sequence
  Description of Artificial Sequence: Synthetic oligonucleotide
uuauaaacuuagccuggcg

SEQ ID NO: 2520893 - RNA, 19 nt, Artificial Sequence
  Description of Artificial Sequence: Synthetic oligonucleotide
aacauguacauccccuuug

SEQ ID NO: 2520894 - RNA, 19 nt, Artificial Sequence
  Description of Artificial Sequence: Synthetic oligonucleotide
aaccauguuaugcccagag

SEQ ID NO: 2520895 - RNA, 19 nt, Artificial Sequence
  Description of Artificial Sequence: Synthetic oligonucleotide
cauuauaaacuuagccugg

SEQ ID NO: 2520896 - RNA, 19 nt, Artificial Sequence
  Description of Artificial Sequence: Synthetic oligonucleotide
ugagacggaaacauguaca

SEQ ID NO: 2520897 - RNA, 19 nt, Artificial Sequence
  Description of Artificial Sequence: Synthetic oligonucleotide
uuuaaucucuucaacucuc

SEQ ID NO: 2520898 - RNA, 19 nt, Artificial Sequence
  Description of Artificial Sequence: Synthetic oligonucleotide
ucuucauugcaucaauagu

SEQ ID NO: 2520899 - RNA, 19 nt, Artificial Sequence
  Description of Artificial Sequence: Synthetic oligonucleotide
aaccuguucauuauaaacu

SEQ ID NO: 2520900 - RNA, 19 nt, Artificial Sequence
  Description of Artificial Sequence: Synthetic oligonucleotide
gaccuuaugaaaccaauca

SEQ ID NO: 2520901 - RNA, 19 nt, Artificial Sequence
  Description of Artificial Sequence: Synthetic oligonucleotide
uuaugaaaccaaucaauaa

SEQ ID NO: 2520902 - RNA, 19 nt, Artificial Sequence
  Description of Artificial Sequence: Synthetic oligonucleotide
auuauaaacuuagccuggc

SEQ ID NO: 2520903 - RNA, 19 nt, Artificial Sequence
  Description of Artificial Sequence: Synthetic oligonucleotide
uuuuacuccauagcucucg

SEQ ID NO: 2520904 - RNA, 19 nt, Artificial Sequence
  Description of Artificial Sequence: Synthetic oligonucleotide
uuagggaucaacagucuac

SEQ ID NO: 2520905 - RNA, 19 nt, Artificial Sequence
  Description of Artificial Sequence: Synthetic oligonucleotide
uaacuuagggaucaacagu

SEQ ID NO: 2520906 - RNA, 19 nt, Artificial Sequence
  Description of Artificial Sequence: Synthetic oligonucleotide
ggaucaacagucuacacug

SEQ ID NO: 2520907 - RNA, 19 nt, Artificial Sequence
  Description of Artificial Sequence: Synthetic oligonucleotide
auaaacuuagccuggcgcu

SEQ ID NO: 2520908 - RNA, 19 nt, Artificial Sequence
  Description of Artificial Sequence: Synthetic oligonucleotide
uaacauuucucgauccuca

SEQ ID NO: 2520909 - RNA, 19 nt, Artificial Sequence
  Description of Artificial Sequence: Synthetic oligonucleotide
ggaaguauccuccaugucc

SEQ ID NO: 2520910 - RNA, 19 nt, Artificial Sequence
  Description of Artificial Sequence: Synthetic oligonucleotide
aagcagaacauugagcuga

SEQ ID NO: 2520911 - RNA, 19 nt, Artificial Sequence
  Description of Artificial Sequence: Synthetic oligonucleotide
caauaguuuuacuccauag

SEQ ID NO: 2520912 - RNA, 19 nt, Artificial Sequence
  Description of Artificial Sequence: Synthetic oligonucleotide
aaacgaguuguccaccgug

SEQ ID NO: 2520913 - RNA, 19 nt, Artificial Sequence
  Description of Artificial Sequence: Synthetic oligonucleotide
ugacacuuggauuugcaga

SEQ ID NO: 2520914 - RNA, 19 nt, Artificial Sequence
  Description of Artificial Sequence: Synthetic oligonucleotide
ucaaacgaguuguccaccg

SEQ ID NO: 2520915 - RNA, 19 nt, Artificial Sequence
  Description of Artificial Sequence: Synthetic oligonucleotide
cuugcaaucguugcggacg

SEQ ID NO: 2520916 - RNA, 19 nt, Artificial Sequence
  Description of Artificial Sequence: Synthetic oligonucleotide
caaucaauaacuuagggau

SEQ ID NO: 2520917 - RNA, 19 nt, Artificial Sequence
  Description of Artificial Sequence: Synthetic oligonucleotide
gauaagguggauguucugc

SEQ ID NO: 2520918 - RNA, 19 nt, Artificial Sequence
  Description of Artificial Sequence: Synthetic oligonucleotide
auguacauccccuuugucu

SEQ ID NO: 2520919 - RNA, 19 nt, Artificial Sequence
  Description of Artificial Sequence: Synthetic oligonucleotide
aaucaauaacuuagggauc

SEQ ID NO: 2520920 - RNA, 19 nt, Artificial Sequence
  Description of Artificial Sequence: Synthetic oligonucleotide
cuaacucccaugauggaug

SEQ ID NO: 2520921 - RNA, 19 nt, Artificial Sequence
  Description of Artificial Sequence: Synthetic oligonucleotide
uggauuugcagaaucggaa

SEQ ID NO: 2520922 - RNA, 19 nt, Artificial Sequence
  Description of Artificial Sequence: Synthetic oligonucleotide
agaguucaugccuucaucu

SEQ ID NO: 2520923 - RNA, 19 nt, Artificial Sequence
  Description of Artificial Sequence: Synthetic oligonucleotide
agcucuaacucccaugaug

SEQ ID NO: 2520924 - RNA, 19 nt, Artificial Sequence
  Description of Artificial Sequence: Synthetic oligonucleotide
uuccggaaggcuuuagucc

SEQ ID NO: 2520925 - RNA, 19 nt, Artificial Sequence
  Description of Artificial Sequence: Synthetic oligonucleotide
uuggauuugcagaaucgga

SEQ ID NO: 2520926 - RNA, 19 nt, Artificial Sequence
  Description of Artificial Sequence: Synthetic oligonucleotide
ucacagguucauuucuacg

SEQ ID NO: 2520927 - RNA, 19 nt, Artificial Sequence
  Description of Artificial Sequence: Synthetic oligonucleotide
uucaacucucuucauugca

SEQ ID NO: 2520928 - RNA, 19 nt, Artificial Sequence
  Description of Artificial Sequence: Synthetic oligonucleotide
aucggaacaccuugcaauc

SEQ ID NO: 2520929 - RNA, 19 nt, Artificial Sequence
  Description of Artificial Sequence: Synthetic oligonucleotide
auugagcugagcucuaacu

SEQ ID NO: 2520930 - RNA, 19 nt, Artificial Sequence
  Description of Artificial Sequence: Synthetic oligonucleotide
uaggaaguauccuccaugu

SEQ ID NO: 2520931 - RNA, 19 nt, Artificial Sequence
  Description of Artificial Sequence: Synthetic oligonucleotide
aucaauaacuuagggauca

SEQ ID NO: 2520932 - RNA, 19 nt, Artificial Sequence
  Description of Artificial Sequence: Synthetic oligonucleotide
ucaaccauguuaugcccag

SEQ ID NO: 2520933 - RNA, 19 nt, Artificial Sequence
  Description of Artificial Sequence: Synthetic oligonucleotide
cuuggauuugcagaaucgg

SEQ ID NO: 2520934 - RNA, 19 nt, Artificial Sequence
  Description of Artificial Sequence: Synthetic oligonucleotide
augaaaccaaucaauaacu

SEQ ID NO: 2520935 - RNA, 19 nt, Artificial Sequence
  Description of Artificial Sequence: Synthetic oligonucleotide
uuaugcccagaguucaugc

SEQ ID NO: 2520936 - RNA, 19 nt, Artificial Sequence
  Description of Artificial Sequence: Synthetic oligonucleotide
ugagcauaacacagugaag

SEQ ID NO: 2520937 - RNA, 19 nt, Artificial Sequence
  Description of Artificial Sequence: Synthetic oligonucleotide
uaguuuuacuccauagcuc

SEQ ID NO: 2520938 - RNA, 19 nt, Artificial Sequence
  Description of Artificial Sequence: Synthetic oligonucleotide
ucgauccucauguugacuc

SEQ ID NO: 2520939 - RNA, 19 nt, Artificial Sequence
  Description of Artificial Sequence: Synthetic oligonucleotide
auaagguggauguucugcu

SEQ ID NO: 2520940 - RNA, 19 nt, Artificial Sequence
  Description of Artificial Sequence: Synthetic oligonucleotide
ucuacacacaaacuuucau

SEQ ID NO: 2520941 - RNA, 19 nt, Artificial Sequence
  Description of Artificial Sequence: Synthetic oligonucleotide
ucauguugacuccgcgugg

SEQ ID NO: 2520942 - RNA, 19 nt, Artificial Sequence
  Description of Artificial Sequence: Synthetic oligonucleotide
uaugacacuuggauuugca

SEQ ID NO: 2520943 - RNA, 19 nt, Artificial Sequence
  Description of Artificial Sequence: Synthetic oligonucleotide
gauuugcagaaucggaaca

SEQ ID NO: 2520944 - RNA, 19 nt, Artificial Sequence
  Description of Artificial Sequence: Synthetic oligonucleotide
cuuaugaaaccaaucaaua

SEQ ID NO: 2520945 - RNA, 19 nt, Artificial Sequence
  Description of Artificial Sequence: Synthetic oligonucleotide
acuccauagcucucgcugg

SEQ ID NO: 2520946 - RNA, 19 nt, Artificial Sequence
  Description of Artificial Sequence: Synthetic oligonucleotide
cauguuaugcccagaguuc

SEQ ID NO: 2520947 - RNA, 19 nt, Artificial Sequence
  Description of Artificial Sequence: Synthetic oligonucleotide
uccggaaggcuuuagucca

SEQ ID NO: 2520948 - RNA, 19 nt, Artificial Sequence
  Description of Artificial Sequence: Synthetic oligonucleotide
uuuacuccauagcucucgc

SEQ ID NO: 2520949 - RNA, 19 nt, Artificial Sequence
  Description of Artificial Sequence: Synthetic oligonucleotide
uuucugagcauaacacagu

SEQ ID NO: 2520950 - RNA, 19 nt, Artificial Sequence
  Description of Artificial Sequence: Synthetic oligonucleotide
auguccugaacuuucugca

SEQ ID NO: 2520951 - RNA, 19 nt, Artificial Sequence
  Description of Artificial Sequence: Synthetic oligonucleotide
cugagcauaacacagugaa

SEQ ID NO: 2520952 - RNA, 19 nt, Artificial Sequence
  Description of Artificial Sequence: Synthetic oligonucleotide
uuucaggcggcuccauuag

SEQ ID NO: 2520953 - RNA, 19 nt, Artificial Sequence
  Description of Artificial Sequence: Synthetic oligonucleotide
uggaugcuuuuaaaggcug

SEQ ID NO: 2520954 - RNA, 19 nt, Artificial Sequence
  Description of Artificial Sequence: Synthetic oligonucleotide
ucaacucucuucauugcau

SEQ ID NO: 2520955 - RNA, 19 nt, Artificial Sequence
  Description of Artificial Sequence: Synthetic oligonucleotide
ucaauaguuuuacuccaua

SEQ ID NO: 2520956 - RNA, 19 nt, Artificial Sequence
  Description of Artificial Sequence: Synthetic oligonucleotide
acuuggauuugcagaaucg

SEQ ID NO: 2520957 - RNA, 19 nt, Artificial Sequence
  Description of Artificial Sequence: Synthetic oligonucleotide
ugaaaccaaucaauaacuu

SEQ ID NO: 2520958 - RNA, 19 nt, Artificial Sequence
  Description of Artificial Sequence: Synthetic oligonucleotide
ucguugcggacgaacauca

SEQ ID NO: 2520959 - RNA, 19 nt, Artificial Sequence
  Description of Artificial Sequence: Synthetic oligonucleotide
ucgcugguauuucacaggu

SEQ ID NO: 2520960 - RNA, 19 nt, Artificial Sequence
  Description of Artificial Sequence: Synthetic oligonucleotide
gaaguauccuccaugucca

SEQ ID NO: 2520961 - RNA, 19 nt, Artificial Sequence
  Description of Artificial Sequence: Synthetic oligonucleotide
caugccguggccaggguag

SEQ ID NO: 2520962 - RNA, 19 nt, Artificial Sequence
  Description of Artificial Sequence: Synthetic oligonucleotide
gcucuaacucccaugaugg

SEQ ID NO: 2520963 - RNA, 19 nt, Artificial Sequence
  Description of Artificial Sequence: Synthetic oligonucleotide
agcauaacacagugaagca

SEQ ID NO: 2520964 - RNA, 19 nt, Artificial Sequence
  Description of Artificial Sequence: Synthetic oligonucleotide
uuuaguccaccugaccuug

SEQ ID NO: 2520965 - RNA, 19 nt, Artificial Sequence
  Description of Artificial Sequence: Synthetic oligonucleotide
ucugagcauaacacaguga

SEQ ID NO: 2520966 - RNA, 19 nt, Artificial Sequence
  Description of Artificial Sequence: Synthetic oligonucleotide
uuugcagaaucggaacacc

SEQ ID NO: 2520967 - RNA, 19 nt, Artificial Sequence
  Description of Artificial Sequence: Synthetic oligonucleotide
aaacuuagccuggcgcuuc

SEQ ID NO: 2520968 - RNA, 19 nt, Artificial Sequence
  Description of Artificial Sequence: Synthetic oligonucleotide
gaagcagaacauugagcug

SEQ ID NO: 2520969 - RNA, 19 nt, Artificial Sequence
  Description of Artificial Sequence: Synthetic oligonucleotide
uccucauguugacuccgcg

SEQ ID NO: 2520970 - RNA, 19 nt, Artificial Sequence
  Description of Artificial Sequence: Synthetic oligonucleotide
uuccagugugcccagggcu

SEQ ID NO: 2520971 - RNA, 19 nt, Artificial Sequence
  Description of Artificial Sequence: Synthetic oligonucleotide
cuuccggaaggcuuuaguc

SEQ ID NO: 2520972 - RNA, 19 nt, Artificial Sequence
  Description of Artificial Sequence: Synthetic oligonucleotide
aaugugagacggaaacaug

SEQ ID NO: 2520973 - RNA, 19 nt, Artificial Sequence
  Description of Artificial Sequence: Synthetic oligonucleotide
aaacauguacauccccuuu

SEQ ID NO: 2520974 - RNA, 19 nt, Artificial Sequence
  Description of Artificial Sequence: Synthetic oligonucleotide
accuuaugaaaccaaucaa

SEQ ID NO: 2520975 - RNA, 19 nt, Artificial Sequence
  Description of Artificial Sequence: Synthetic oligonucleotide
aaucguugcggacgaacau

SEQ ID NO: 2520976 - RNA, 19 nt, Artificial Sequence
  Description of Artificial Sequence: Synthetic oligonucleotide
uaugcccagaguucaugcc

SEQ ID NO: 2520977 - RNA, 19 nt, Artificial Sequence
  Description of Artificial Sequence: Synthetic oligonucleotide
aaguauccuccauguccac

SEQ ID NO: 2520978 - RNA, 19 nt, Artificial Sequence
  Description of Artificial Sequence: Synthetic oligonucleotide
guugcggacgaacaucaug

SEQ ID NO: 2520979 - RNA, 19 nt, Artificial Sequence
  Description of Artificial Sequence: Synthetic oligonucleotide
caucaauaguuuuacucca

SEQ ID NO: 2520980 - RNA, 19 nt, Artificial Sequence
  Description of Artificial Sequence: Synthetic oligonucleotide
cauccccuuugucugaggg

SEQ ID NO: 2520981 - RNA, 19 nt, Artificial Sequence
  Description of Artificial Sequence: Synthetic oligonucleotide
uccaccugaccuugcgugg

SEQ ID NO: 2520982 - RNA, 19 nt, Artificial Sequence
  Description of Artificial Sequence: Synthetic oligonucleotide
ugcaagaggagcccggaua

SEQ ID NO: 2520983 - RNA, 19 nt, Artificial Sequence
  Description of Artificial Sequence: Synthetic oligonucleotide
ucuaacucccaugauggau

SEQ ID NO: 2520984 - RNA, 19 nt, Artificial Sequence
  Description of Artificial Sequence: Synthetic oligonucleotide
agaaucggaacaccuugca

SEQ ID NO: 2520985 - RNA, 19 nt, Artificial Sequence
  Description of Artificial Sequence: Synthetic oligonucleotide
uggcucaaccauguuaugc

SEQ ID NO: 2520986 - RNA, 19 nt, Artificial Sequence
  Description of Artificial Sequence: Synthetic oligonucleotide
acauguacauccccuuugu

SEQ ID NO: 2520987 - RNA, 19 nt, Artificial Sequence
  Description of Artificial Sequence: Synthetic oligonucleotide
ucaacagucuacacugauu

SEQ ID NO: 2520988 - RNA, 19 nt, Artificial Sequence
  Description of Artificial Sequence: Synthetic oligonucleotide
guugacuccgcgugggacc

SEQ ID NO: 2520989 - RNA, 19 nt, Artificial Sequence
  Description of Artificial Sequence: Synthetic oligonucleotide
gauccucauguugacuccg

SEQ ID NO: 2520990 - RNA, 19 nt, Artificial Sequence
  Description of Artificial Sequence: Synthetic oligonucleotide
gaacagaaauaacauuucu

SEQ ID NO: 2520991 - RNA, 19 nt, Artificial Sequence
  Description of Artificial Sequence: Synthetic oligonucleotide
augugagacggaaacaugu

SEQ ID NO: 2520992 - RNA, 19 nt, Artificial Sequence
  Description of Artificial Sequence: Synthetic oligonucleotide
cagaaucggaacaccuugc

SEQ ID NO: 2520993 - RNA, 19 nt, Artificial Sequence
  Description of Artificial Sequence: Synthetic oligonucleotide
ugugagacggaaacaugua

SEQ ID NO: 2520994 - RNA, 19 nt, Artificial Sequence
  Description of Artificial Sequence: Synthetic oligonucleotide
acacugauuuccagugugc

SEQ ID NO: 2520995 - RNA, 19 nt, Artificial Sequence
  Description of Artificial Sequence: Synthetic oligonucleotide
cauuucucgauccucaugu

SEQ ID NO: 2520996 - RNA, 19 nt, Artificial Sequence
  Description of Artificial Sequence: Synthetic oligonucleotide
uucauguuuucugagcaua

SEQ ID NO: 2520997 - RNA, 19 nt, Artificial Sequence
  Description of Artificial Sequence: Synthetic oligonucleotide
aucguugcggacgaacauc

SEQ ID NO: 2520998 - RNA, 19 nt, Artificial Sequence
  Description of Artificial Sequence: Synthetic oligonucleotide
uccccuuugucugagggac

SEQ ID NO: 2520999 - RNA, 19 nt, Artificial Sequence
  Description of Artificial Sequence: Synthetic oligonucleotide
uaacucccaugauggaugc

SEQ ID NO: 2521000 - RNA, 19 nt, Artificial Sequence
  Description of Artificial Sequence: Synthetic oligonucleotide
acggaaacauguacauccc

SEQ ID NO: 2521001 - RNA, 19 nt, Artificial Sequence
  Description of Artificial Sequence: Synthetic oligonucleotide
uugucugagggaccuuaug

SEQ ID NO: 2521002 - RNA, 19 nt, Artificial Sequence
  Description of Artificial Sequence: Synthetic oligonucleotide
gugagacggaaacauguac

SEQ ID NO: 2521003 - RNA, 19 nt, Artificial Sequence
  Description of Artificial Sequence: Synthetic oligonucleotide
gaugcuuuuaaaggcugca

SEQ ID NO: 2521004 - RNA, 19 nt, Artificial Sequence
  Description of Artificial Sequence: Synthetic oligonucleotide
aggaaguauccuccauguc

SEQ ID NO: 2521005 - RNA, 19 nt, Artificial Sequence
  Description of Artificial Sequence: Synthetic oligonucleotide
auuaggaaguauccuccau

SEQ ID NO: 2521006 - RNA, 19 nt, Artificial Sequence
  Description of Artificial Sequence: Synthetic oligonucleotide
cugauuuccagugugccca

SEQ ID NO: 2521007 - RNA, 19 nt, Artificial Sequence
  Description of Artificial Sequence: Synthetic oligonucleotide
gcagaaucggaacaccuug

SEQ ID NO: 2521008 - RNA, 19 nt, Artificial Sequence
  Description of Artificial Sequence: Synthetic oligonucleotide
caccuugcaaucguugcgg

SEQ ID NO: 2521009 - RNA, 19 nt, Artificial Sequence
  Description of Artificial Sequence: Synthetic oligonucleotide
caaauucaaacgaguuguc

SEQ ID NO: 2521010 - RNA, 19 nt, Artificial Sequence
  Description of Artificial Sequence: Synthetic oligonucleotide
aggagcccggauaaggugg

SEQ ID NO: 2521011 - RNA, 19 nt, Artificial Sequence
  Description of Artificial Sequence: Synthetic oligonucleotide
aucaacagucuacacugau

SEQ ID NO: 2521012 - RNA, 19 nt, Artificial Sequence
  Description of Artificial Sequence: Synthetic oligonucleotide
uucaaacgaguuguccacc

SEQ ID NO: 2521013 - RNA, 19 nt, Artificial Sequence
  Description of Artificial Sequence: Synthetic oligonucleotide
guuuaaucucuucaacucu

SEQ ID NO: 2521014 - RNA, 19 nt, Artificial Sequence
  Description of Artificial Sequence: Synthetic oligonucleotide
gugaagcagaacauugagc

SEQ ID NO: 2521015 - RNA, 19 nt, Artificial Sequence
  Description of Artificial Sequence: Synthetic oligonucleotide
ucggaacaccuugcaaucg

SEQ ID NO: 2521016 - RNA, 19 nt, Artificial Sequence
  Description of Artificial Sequence: Synthetic oligonucleotide
cauugcaucaauaguuuua

SEQ ID NO: 2521017 - RNA, 19 nt, Artificial Sequence
  Description of Artificial Sequence: Synthetic oligonucleotide
ugcagaaucggaacaccuu

SEQ ID NO: 2521018 - RNA, 19 nt, Artificial Sequence
  Description of Artificial Sequence: Synthetic oligonucleotide
aacgaguuguccaccguga

SEQ ID NO: 2521019 - RNA, 19 nt, Artificial Sequence
  Description of Artificial Sequence: Synthetic oligonucleotide
uuaugacacuuggauuugc

SEQ ID NO: 2521020 - RNA, 19 nt, Artificial Sequence
  Description of Artificial Sequence: Synthetic oligonucleotide
gguagaucggcccggaaca

SEQ ID NO: 2521021 - RNA, 19 nt, Artificial Sequence
  Description of Artificial Sequence: Synthetic oligonucleotide
ccaaucaauaacuuaggga

SEQ ID NO: 2521022 - RNA, 19 nt, Artificial Sequence
  Description of Artificial Sequence: Synthetic oligonucleotide
cagaacauugagcugagcu

SEQ ID NO: 2521023 - RNA, 19 nt, Artificial Sequence
  Description of Artificial Sequence: Synthetic oligonucleotide
cacugauuuccagugugcc

SEQ ID NO: 2521024 - RNA, 19 nt, Artificial Sequence
  Description of Artificial Sequence: Synthetic oligonucleotide
cacuuggauuugcagaauc

SEQ ID NO: 2521025 - RNA, 19 nt, Artificial Sequence
  Description of Artificial Sequence: Synthetic oligonucleotide
ucaugccuucaucuacaca

SEQ ID NO: 2521026 - RNA, 19 nt, Artificial Sequence
  Description of Artificial Sequence: Synthetic oligonucleotide
caauaacuuagggaucaac

SEQ ID NO: 2521027 - RNA, 19 nt, Artificial Sequence
  Description of Artificial Sequence: Synthetic oligonucleotide
ucauugcaucaauaguuuu

SEQ ID NO: 2521028 - RNA, 19 nt, Artificial Sequence
  Description of Artificial Sequence: Synthetic oligonucleotide
ugauuuccagugugcccag

SEQ ID NO: 2521029 - RNA, 19 nt, Artificial Sequence
  Description of Artificial Sequence: Synthetic oligonucleotide
cacagguucauuucuacgu

SEQ ID NO: 2521030 - RNA, 19 nt, Artificial Sequence
  Description of Artificial Sequence: Synthetic oligonucleotide
agacggaaacauguacauc

SEQ ID NO: 2521031 - RNA, 19 nt, Artificial Sequence
  Description of Artificial Sequence: Synthetic oligonucleotide
caaucguugcggacgaaca

SEQ ID NO: 2521032 - RNA, 19 nt, Artificial Sequence
  Description of Artificial Sequence: Synthetic oligonucleotide
caucaugccguggccaggg

SEQ ID NO: 2521033 - RNA, 19 nt, Artificial Sequence
  Description of Artificial Sequence: Synthetic oligonucleotide
uuugucugagggaccuuau

SEQ ID NO: 2521034 - RNA, 19 nt, Artificial Sequence
  Description of Artificial Sequence: Synthetic oligonucleotide
acgaguuguccaccgugag

SEQ ID NO: 2521035 - RNA, 19 nt, Artificial Sequence
  Description of Artificial Sequence: Synthetic oligonucleotide
aucggcccggaacagaaau

SEQ ID NO: 2521036 - RNA, 19 nt, Artificial Sequence
  Description of Artificial Sequence: Synthetic oligonucleotide
gaaucggaacaccuugcaa

SEQ ID NO: 2521037 - RNA, 19 nt, Artificial Sequence
  Description of Artificial Sequence: Synthetic oligonucleotide
uaaucucuucaacucucuu

SEQ ID NO: 2521038 - RNA, 19 nt, Artificial Sequence
  Description of Artificial Sequence: Synthetic oligonucleotide
gcugguuucaggcggcucc

SEQ ID NO: 2521039 - RNA, 19 nt, Artificial Sequence
  Description of Artificial Sequence: Synthetic oligonucleotide
guuaugcccagaguucaug

SEQ ID NO: 2521040 - RNA, 19 nt, Artificial Sequence
  Description of Artificial Sequence: Synthetic oligonucleotide
aacuuagccuggcgcuucu

SEQ ID NO: 2521041 - RNA, 19 nt, Artificial Sequence
  Description of Artificial Sequence: Synthetic oligonucleotide
ugcggacgaacaucaugcc

SEQ ID NO: 2521042 - RNA, 19 nt, Artificial Sequence
  Description of Artificial Sequence: Synthetic oligonucleotide
guauuucacagguucauuu

SEQ ID NO: 2521043 - RNA, 19 nt, Artificial Sequence
  Description of Artificial Sequence: Synthetic oligonucleotide
uguugacuccgcgugggac

SEQ ID NO: 2521044 - RNA, 19 nt, Artificial Sequence
  Description of Artificial Sequence: Synthetic oligonucleotide
ucucgauccucauguugac

SEQ ID NO: 2521045 - RNA, 19 nt, Artificial Sequence
  Description of Artificial Sequence: Synthetic oligonucleotide
guuucaggcggcuccauua

SEQ ID NO: 2521046 - RNA, 19 nt, Artificial Sequence
  Description of Artificial Sequence: Synthetic oligonucleotide
uugcguggguuccucuucu

SEQ ID NO: 2521047 - RNA, 19 nt, Artificial Sequence
  Description of Artificial Sequence: Synthetic oligonucleotide
gagacggaaacauguacau

SEQ ID NO: 2521048 - RNA, 19 nt, Artificial Sequence
  Description of Artificial Sequence: Synthetic oligonucleotide
caugauggaugcuuuuaaa

SEQ ID NO: 2521049 - RNA, 19 nt, Artificial Sequence
  Description of Artificial Sequence: Synthetic oligonucleotide
gcauaacacagugaagcag

SEQ ID NO: 2521050 - RNA, 19 nt, Artificial Sequence
  Description of Artificial Sequence: Synthetic oligonucleotide
uuaguccaccugaccuugc

SEQ ID NO: 2521051 - RNA, 19 nt, Artificial Sequence
  Description of Artificial Sequence: Synthetic oligonucleotide
uugcaucaauaguuuuacu

SEQ ID NO: 2521052 - RNA, 19 nt, Artificial Sequence
  Description of Artificial Sequence: Synthetic oligonucleotide
aggcugcaaugugagacgg

SEQ ID NO: 2521053 - RNA, 19 nt, Artificial Sequence
  Description of Artificial Sequence: Synthetic oligonucleotide
uguuaugcccagaguucau

SEQ ID NO: 2521054 - RNA, 19 nt, Artificial Sequence
  Description of Artificial Sequence: Synthetic oligonucleotide
cucaaccauguuaugccca

SEQ ID NO: 2521055 - RNA, 19 nt, Artificial Sequence
  Description of Artificial Sequence: Synthetic oligonucleotide
cagugaagcagaacauuga

SEQ ID NO: 2521056 - RNA, 19 nt, Artificial Sequence
  Description of Artificial Sequence: Synthetic oligonucleotide
uugacuccgcgugggaccc

SEQ ID NO: 2521057 - RNA, 19 nt, Artificial Sequence
  Description of Artificial Sequence: Synthetic oligonucleotide
gcuccauuaggaaguaucc

SEQ ID NO: 2521058 - RNA, 19 nt, Artificial Sequence
  Description of Artificial Sequence: Synthetic oligonucleotide
uacauccccuuugucugag

SEQ ID NO: 2521059 - RNA, 19 nt, Artificial Sequence
  Description of Artificial Sequence: Synthetic oligonucleotide
aguuguccaccgugagcuc

SEQ ID NO: 2521060 - RNA, 19 nt, Artificial Sequence
  Description of Artificial Sequence: Synthetic oligonucleotide
caacagucuacacugauuu

SEQ ID NO: 2521061 - RNA, 19 nt, Artificial Sequence
  Description of Artificial Sequence: Synthetic oligonucleotide
uuagccuggcgcuucuguu

SEQ ID NO: 2521062 - RNA, 19 nt, Artificial Sequence
  Description of Artificial Sequence: Synthetic oligonucleotide
acucccaugauggaugcuu

SEQ ID NO: 2521063 - RNA, 19 nt, Artificial Sequence
  Description of Artificial Sequence: Synthetic oligonucleotide
gcggacgaacaucaugccg

SEQ ID NO: 2521064 - RNA, 19 nt, Artificial Sequence
  Description of Artificial Sequence: Synthetic oligonucleotide
cagucuacacugauuucca

SEQ ID NO: 2521065 - RNA, 19 nt, Artificial Sequence
  Description of Artificial Sequence: Synthetic oligonucleotide
uaaacuuagccuggcgcuu

SEQ ID NO: 2521066 - RNA, 19 nt, Artificial Sequence
  Description of Artificial Sequence: Synthetic oligonucleotide
cugaccuugcguggguucc

SEQ ID NO: 2521067 - RNA, 19 nt, Artificial Sequence
  Description of Artificial Sequence: Synthetic oligonucleotide
acacacaaacuuucauguu

SEQ ID NO: 2521068 - RNA, 19 nt, Artificial Sequence
  Description of Artificial Sequence: Synthetic oligonucleotide
auagcucucgcugguauuu

SEQ ID NO: 2521069 - RNA, 19 nt, Artificial Sequence
  Description of Artificial Sequence: Synthetic oligonucleotide
aguauccuccauguccaca

SEQ ID NO: 2521070 - RNA, 19 nt, Artificial Sequence
  Description of Artificial Sequence: Synthetic oligonucleotide
aguccaccugaccuugcgu

SEQ ID NO: 2521071 - RNA, 19 nt, Artificial Sequence
  Description of Artificial Sequence: Synthetic oligonucleotide
gacgaacaucaugccgugg

SEQ ID NO: 2521072 - RNA, 19 nt, Artificial Sequence
  Description of Artificial Sequence: Synthetic oligonucleotide
aucuacacacaaacuuuca

SEQ ID NO: 2521073 - RNA, 19 nt, Artificial Sequence
  Description of Artificial Sequence: Synthetic oligonucleotide
auccccuuugucugaggga

SEQ ID NO: 2521074 - RNA, 19 nt, Artificial Sequence
  Description of Artificial Sequence: Synthetic oligonucleotide
uugccugcaagaggagccc

SEQ ID NO: 2521075 - RNA, 19 nt, Artificial Sequence
  Description of Artificial Sequence: Synthetic oligonucleotide
ucaugccguggccagggua

SEQ ID NO: 2521076 - RNA, 19 nt, Artificial Sequence
  Description of Artificial Sequence: Synthetic oligonucleotide
cauguacauccccuuuguc

SEQ ID NO: 2521077 - RNA, 19 nt, Artificial Sequence
  Description of Artificial Sequence: Synthetic oligonucleotide
gcucaaccauguuaugccc

SEQ ID NO: 2521078 - RNA, 19 nt, Artificial Sequence
  Description of Artificial Sequence: Synthetic oligonucleotide
ggguagaucggcccggaac

SEQ ID NO: 2521079 - RNA, 19 nt, Artificial Sequence
  Description of Artificial Sequence: Synthetic oligonucleotide
aggcuuuaguccaccugac

SEQ ID NO: 2521080 - RNA, 19 nt, Artificial Sequence
  Description of Artificial Sequence: Synthetic oligonucleotide
agaggagcccggauaaggu

SEQ ID NO: 2521081 - RNA, 19 nt, Artificial Sequence
  Description of Artificial Sequence: Synthetic oligonucleotide
cuuagggaucaacagucua

SEQ ID NO: 2521082 - RNA, 19 nt, Artificial Sequence
  Description of Artificial Sequence: Synthetic oligonucleotide
guauccuccauguccacau

SEQ ID NO: 2521083 - RNA, 19 nt, Artificial Sequence
  Description of Artificial Sequence: Synthetic oligonucleotide
aucaauaguuuuacuccau

SEQ ID NO: 2521084 - RNA, 19 nt, Artificial Sequence
  Description of Artificial Sequence: Synthetic oligonucleotide
gggaucaacagucuacacu

SEQ ID NO: 2521085 - RNA, 19 nt, Artificial Sequence
  Description of Artificial Sequence: Synthetic oligonucleotide
acuuagggaucaacagucu

SEQ ID NO: 2521086 - RNA, 19 nt, Artificial Sequence
  Description of Artificial Sequence: Synthetic oligonucleotide
auuucucgauccucauguu

SEQ ID NO: 2521087 - RNA, 19 nt, Artificial Sequence
  Description of Artificial Sequence: Synthetic oligonucleotide
gccaggguagaucggcccg

SEQ ID NO: 2521088 - RNA, 19 nt, Artificial Sequence
  Description of Artificial Sequence: Synthetic oligonucleotide
accuugcaaucguugcgga

SEQ ID NO: 2521089 - RNA, 19 nt, Artificial Sequence
  Description of Artificial Sequence: Synthetic oligonucleotide
agggcugguuucaggcggc

SEQ ID NO: 2521090 - RNA, 19 nt, Artificial Sequence
  Description of Artificial Sequence: Synthetic oligonucleotide
cuggcgcuucuguuuaauc

SEQ ID NO: 2521091 - RNA, 19 nt, Artificial Sequence
  Description of Artificial Sequence: Synthetic oligonucleotide
ccguggccaggguagaucg

SEQ ID NO: 2521092 - RNA, 19 nt, Artificial Sequence
  Description of Artificial Sequence: Synthetic oligonucleotide
caaugugagacggaaacau

SEQ ID NO: 2521093 - RNA, 19 nt, Artificial Sequence
  Description of Artificial Sequence: Synthetic oligonucleotide
ggcuuuaguccaccugacc

SEQ ID NO: 2521094 - RNA, 19 nt, Artificial Sequence
  Description of Artificial Sequence: Synthetic oligonucleotide
gaucaacagucuacacuga

SEQ ID NO: 2521095 - RNA, 19 nt, Artificial Sequence
  Description of Artificial Sequence: Synthetic oligonucleotide
guagaucggcccggaacag

SEQ ID NO: 2521096 - RNA, 19 nt, Artificial Sequence
  Description of Artificial Sequence: Synthetic oligonucleotide
gcccggaacagaaauaaca

SEQ ID NO: 2521097 - RNA, 19 nt, Artificial Sequence
  Description of Artificial Sequence: Synthetic oligonucleotide
uagaucggcccggaacaga

SEQ ID NO: 2521098 - RNA, 19 nt, Artificial Sequence
  Description of Artificial Sequence: Synthetic oligonucleotide
auaacacagugaagcagaa

SEQ ID NO: 2521099 - RNA, 19 nt, Artificial Sequence
  Description of Artificial Sequence: Synthetic oligonucleotide
agaucggcccggaacagaa

SEQ ID NO: 2521100 - RNA, 19 nt, Artificial Sequence
  Description of Artificial Sequence: Synthetic oligonucleotide
ggaugcuuuuaaaggcugc

SEQ ID NO: 2521101 - RNA, 19 nt, Artificial Sequence
  Description of Artificial Sequence: Synthetic oligonucleotide
ggauaagguggauguucug

SEQ ID NO: 2521102 - RNA, 19 nt, Artificial Sequence
  Description of Artificial Sequence: Synthetic oligonucleotide
ggaaacauguacauccccu

SEQ ID NO: 2521103 - RNA, 19 nt, Artificial Sequence
  Description of Artificial Sequence: Synthetic oligonucleotide
ccuuaugaaaccaaucaau

SEQ ID NO: 2521104 - RNA, 19 nt, Artificial Sequence
  Description of Artificial Sequence: Synthetic oligonucleotide
agcccggauaagguggaug

SEQ ID NO: 2521105 - RNA, 19 nt, Artificial Sequence
  Description of Artificial Sequence: Synthetic oligonucleotide
ucggcccggaacagaaaua

SEQ ID NO: 2521106 - RNA, 19 nt, Artificial Sequence
  Description of Artificial Sequence: Synthetic oligonucleotide
ggacgaacaucaugccgug

SEQ ID NO: 2521107 - RNA, 19 nt, Artificial Sequence
  Description of Artificial Sequence: Synthetic oligonucleotide
ggaccuuaugaaaccaauc

SEQ ID NO: 2521108 - RNA, 19 nt, Artificial Sequence
  Description of Artificial Sequence: Synthetic oligonucleotide
auguugacuccgcguggga

SEQ ID NO: 2521109 - RNA, 19 nt, Artificial Sequence
  Description of Artificial Sequence: Synthetic oligonucleotide
gcaaucguugcggacgaac

SEQ ID NO: 2521110 - RNA, 19 nt, Artificial Sequence
  Description of Artificial Sequence: Synthetic oligonucleotide
guuuuacuccauagcucuc

SEQ ID NO: 2521111 - RNA, 19 nt, Artificial Sequence
  Description of Artificial Sequence: Synthetic oligonucleotide
aacauugagcugagcucua

SEQ ID NO: 2521112 - RNA, 19 nt, Artificial Sequence
  Description of Artificial Sequence: Synthetic oligonucleotide
uccuugccagcugccuucc

SEQ ID NO: 2521113 - RNA, 19 nt, Artificial Sequence
  Description of Artificial Sequence: Synthetic oligonucleotide
gcugcaaugugagacggaa

SEQ ID NO: 2521114 - RNA, 19 nt, Artificial Sequence
  Description of Artificial Sequence: Synthetic oligonucleotide
cucuaacucccaugaugga

SEQ ID NO: 2521115 - RNA, 19 nt, Artificial Sequence
  Description of Artificial Sequence: Synthetic oligonucleotide
guaacugcugcaccauuuu

SEQ ID NO: 2521116 - RNA, 19 nt, Artificial Sequence
  Description of Artificial Sequence: Synthetic oligonucleotide
ggccaggguagaucggccc

SEQ ID NO: 2521117 - RNA, 19 nt, Artificial Sequence
  Description of Artificial Sequence: Synthetic oligonucleotide
aacucccaugauggaugcu

SEQ ID NO: 2521118 - RNA, 19 nt, Artificial Sequence
  Description of Artificial Sequence: Synthetic oligonucleotide
ccggauaagguggauguuc

SEQ ID NO: 2521119 - RNA, 19 nt, Artificial Sequence
  Description of Artificial Sequence: Synthetic oligonucleotide
ccuccuguaacugcugcac

SEQ ID NO: 2521120 - RNA, 19 nt, Artificial Sequence
  Description of Artificial Sequence: Synthetic oligonucleotide
acauugagcugagcucuaa

SEQ ID NO: 2521121 - RNA, 19 nt, Artificial Sequence
  Description of Artificial Sequence: Synthetic oligonucleotide
agggaccuuaugaaaccaa

SEQ ID NO: 2521122 - RNA, 19 nt, Artificial Sequence
  Description of Artificial Sequence: Synthetic oligonucleotide
caccgugagcuccuugcca

SEQ ID NO: 2521123 - RNA, 19 nt, Artificial Sequence
  Description of Artificial Sequence: Synthetic oligonucleotide
ccauguuaugcccagaguu

SEQ ID NO: 2521124 - RNA, 19 nt, Artificial Sequence
  Description of Artificial Sequence: Synthetic oligonucleotide
uccauagcucucgcuggua

SEQ ID NO: 2521125 - RNA, 19 nt, Artificial Sequence
  Description of Artificial Sequence: Synthetic oligonucleotide
cugcaaugugagacggaaa

SEQ ID NO: 2521126 - RNA, 19 nt, Artificial Sequence
  Description of Artificial Sequence: Synthetic oligonucleotide
ccuugcaaucguugcggac

SEQ ID NO: 2521127 - RNA, 19 nt, Artificial Sequence
  Description of Artificial Sequence: Synthetic oligonucleotide
cgauccucauguugacucc

SEQ ID NO: 2521128 - RNA, 19 nt, Artificial Sequence
  Description of Artificial Sequence: Synthetic oligonucleotide
cgaguuguccaccgugagc

SEQ ID NO: 2521129 - RNA, 19 nt, Artificial Sequence
  Description of Artificial Sequence: Synthetic oligonucleotide
aucaugccguggccagggu

SEQ ID NO: 2521130 - RNA, 19 nt, Artificial Sequence
  Description of Artificial Sequence: Synthetic oligonucleotide
gacuccgcgugggacccac

SEQ ID NO: 2521131 - RNA, 19 nt, Artificial Sequence
  Description of Artificial Sequence: Synthetic oligonucleotide
cucucuucauugcaucaau

SEQ ID NO: 2521132 - RNA, 19 nt, Artificial Sequence
  Description of Artificial Sequence: Synthetic oligonucleotide
gagcuccuugccagcugcc

SEQ ID NO: 2521133 - RNA, 19 nt, Artificial Sequence
  Description of Artificial Sequence: Synthetic oligonucleotide
gcccggauaagguggaugu

SEQ ID NO: 2521134 - RNA, 19 nt, Artificial Sequence
  Description of Artificial Sequence: Synthetic oligonucleotide
cuccauuaggaaguauccu

SEQ ID NO: 2521135 - RNA, 19 nt, Artificial Sequence
  Description of Artificial Sequence: Synthetic oligonucleotide
ccaugauggaugcuuuuaa

SEQ ID NO: 2521136 - RNA, 19 nt, Artificial Sequence
  Description of Artificial Sequence: Synthetic oligonucleotide
acuuagccuggcgcuucug

SEQ ID NO: 2521137 - RNA, 19 nt, Artificial Sequence
  Description of Artificial Sequence: Synthetic oligonucleotide
ugcguggguuccucuucuu

SEQ ID NO: 2521138 - RNA, 19 nt, Artificial Sequence
  Description of Artificial Sequence: Synthetic oligonucleotide
gaccuugcguggguuccuc

SEQ ID NO: 2521139 - RNA, 19 nt, Artificial Sequence
  Description of Artificial Sequence: Synthetic oligonucleotide
ccaccugaccuugcguggg

SEQ ID NO: 2521140 - RNA, 19 nt, Artificial Sequence
  Description of Artificial Sequence: Synthetic oligonucleotide
caaacgaguuguccaccgu

SEQ ID NO: 2521141 - RNA, 19 nt, Artificial Sequence
  Description of Artificial Sequence: Synthetic oligonucleotide
ccugaccuugcguggguuc

SEQ ID NO: 2521142 - RNA, 19 nt, Artificial Sequence
  Description of Artificial Sequence: Synthetic oligonucleotide
cccggaacagaaauaacau

SEQ ID NO: 2521143 - RNA, 19 nt, Artificial Sequence
  Description of Artificial Sequence: Synthetic oligonucleotide
cagguucauuucuacguuu

SEQ ID NO: 2521144 - RNA, 19 nt, Artificial Sequence
  Description of Artificial Sequence: Synthetic oligonucleotide
cggacgaacaucaugccgu

SEQ ID NO: 2521145 - RNA, 19 nt, Artificial Sequence
  Description of Artificial Sequence: Synthetic oligonucleotide
ugcaaucguugcggacgaa

SEQ ID NO: 2521146 - RNA, 19 nt, Artificial Sequence
  Description of Artificial Sequence: Synthetic oligonucleotide
cuccauagcucucgcuggu

SEQ ID NO: 2521147 - RNA, 19 nt, Artificial Sequence
  Description of Artificial Sequence: Synthetic oligonucleotide
acuccgcgugggacccacc

SEQ ID NO: 2521148 - RNA, 19 nt, Artificial Sequence
  Description of Artificial Sequence: Synthetic oligonucleotide
cauagcucucgcugguauu

SEQ ID NO: 2521149 - RNA, 19 nt, Artificial Sequence
  Description of Artificial Sequence: Synthetic oligonucleotide
ugguuucaggcggcuccau

SEQ ID NO: 2521150 - RNA, 19 nt, Artificial Sequence
  Description of Artificial Sequence: Synthetic oligonucleotide
caaccauguuaugcccaga

SEQ ID NO: 2521151 - RNA, 19 nt, Artificial Sequence
  Description of Artificial Sequence: Synthetic oligonucleotide
gagcucuaacucccaugau

SEQ ID NO: 2521152 - RNA, 19 nt, Artificial Sequence
  Description of Artificial Sequence: Synthetic oligonucleotide
gaucggcccggaacagaaa

SEQ ID NO: 2521153 - RNA, 19 nt, Artificial Sequence
  Description of Artificial Sequence: Synthetic oligonucleotide
gggaccuuaugaaaccaau

SEQ ID NO: 2521154 - RNA, 19 nt, Artificial Sequence
  Description of Artificial Sequence: Synthetic oligonucleotide
ccggaaggcuuuaguccac

SEQ ID NO: 2521155 - RNA, 19 nt, Artificial Sequence
  Description of Artificial Sequence: Synthetic oligonucleotide
gcagaacauugagcugagc

SEQ ID NO: 2521156 - RNA, 19 nt, Artificial Sequence
  Description of Artificial Sequence: Synthetic oligonucleotide
cucccaugauggaugcuuu

SEQ ID NO: 2521157 - RNA, 19 nt, Artificial Sequence
  Description of Artificial Sequence: Synthetic oligonucleotide
gccuucaucuacacacaaa

SEQ ID NO: 2521158 - RNA, 19 nt, Artificial Sequence
  Description of Artificial Sequence: Synthetic oligonucleotide
accugaccuugcguggguu

SEQ ID NO: 2521159 - RNA, 19 nt, Artificial Sequence
  Description of Artificial Sequence: Synthetic oligonucleotide
ccgugagcuccuugccagc

SEQ ID NO: 2521160 - RNA, 19 nt, Artificial Sequence
  Description of Artificial Sequence: Synthetic oligonucleotide
ggagcccggauaaggugga

SEQ ID NO: 2521161 - RNA, 19 nt, Artificial Sequence
  Description of Artificial Sequence: Synthetic oligonucleotide
ggcccggaacagaaauaac

SEQ ID NO: 2521162 - RNA, 19 nt, Artificial Sequence
  Description of Artificial Sequence: Synthetic oligonucleotide
cucgauccucauguugacu

SEQ ID NO: 2521163 - RNA, 19 nt, Artificial Sequence
  Description of Artificial Sequence: Synthetic oligonucleotide
cuccgcgugggacccaccu

SEQ ID NO: 2521164 - RNA, 19 nt, Artificial Sequence
  Description of Artificial Sequence: Synthetic oligonucleotide
cguggccaggguagaucgg

SEQ ID NO: 2521165 - RNA, 19 nt, Artificial Sequence
  Description of Artificial Sequence: Synthetic oligonucleotide
caggguagaucggcccgga

SEQ ID NO: 2521166 - RNA, 19 nt, Artificial Sequence
  Description of Artificial Sequence: Synthetic oligonucleotide
cggauaagguggauguucu

SEQ ID NO: 2521167 - RNA, 19 nt, Artificial Sequence
  Description of Artificial Sequence: Synthetic oligonucleotide
ugacuccgcgugggaccca

SEQ ID NO: 2521168 - RNA, 19 nt, Artificial Sequence
  Description of Artificial Sequence: Synthetic oligonucleotide
gccguggccaggguagauc

SEQ ID NO: 2521169 - RNA, 19 nt, Artificial Sequence
  Description of Artificial Sequence: Synthetic oligonucleotide
cccaugauggaugcuuuua

SEQ ID NO: 2521170 - RNA, 19 nt, Artificial Sequence
  Description of Artificial Sequence: Synthetic oligonucleotide
gcgcuucuguuuaaucucu

SEQ ID NO: 2521171 - RNA, 19 nt, Artificial Sequence
  Description of Artificial Sequence: Synthetic oligonucleotide
gcugagcucuaacucccau

SEQ ID NO: 2521172 - RNA, 19 nt, Artificial Sequence
  Description of Artificial Sequence: Synthetic oligonucleotide
ccggaacagaaauaacauu

SEQ ID NO: 2521173 - RNA, 19 nt, Artificial Sequence
  Description of Artificial Sequence: Synthetic oligonucleotide
gguuucaggcggcuccauu

SEQ ID NO: 2521174 - RNA, 19 nt, Artificial Sequence
  Description of Artificial Sequence: Synthetic oligonucleotide
gccuuccggaaggcuuuag

SEQ ID NO: 2521175 - RNA, 19 nt, Artificial Sequence
  Description of Artificial Sequence: Synthetic oligonucleotide
ccugcaagaggagcccgga

SEQ ID NO: 2521176 - RNA, 19 nt, Artificial Sequence
  Description of Artificial Sequence: Synthetic oligonucleotide
ccuuccggaaggcuuuagu

SEQ ID NO: 2521177 - RNA, 19 nt, Artificial Sequence
  Description of Artificial Sequence: Synthetic oligonucleotide
cugcaagaggagcccggau

SEQ ID NO: 2521178 - RNA, 19 nt, Artificial Sequence
  Description of Artificial Sequence: Synthetic oligonucleotide
ccauagcucucgcugguau

SEQ ID NO: 2521179 - RNA, 19 nt, Artificial Sequence
  Description of Artificial Sequence: Synthetic oligonucleotide
cggcccggaacagaaauaa

SEQ ID NO: 2521180 - RNA, 19 nt, Artificial Sequence
  Description of Artificial Sequence: Synthetic oligonucleotide
gcuccuugccagcugccuu

SEQ ID NO: 2521181 - RNA, 19 nt, Artificial Sequence
  Description of Artificial Sequence: Synthetic oligonucleotide
cccuuugucugagggaccu

SEQ ID NO: 2521182 - RNA, 19 nt, Artificial Sequence
  Description of Artificial Sequence: Synthetic oligonucleotide
gagcccggauaagguggau

SEQ ID NO: 2521183 - RNA, 19 nt, Artificial Sequence
  Description of Artificial Sequence: Synthetic oligonucleotide
gcggcuccauuaggaagua

SEQ ID NO: 2521184 - RNA, 19 nt, Artificial Sequence
  Description of Artificial Sequence: Synthetic oligonucleotide
cguugcggacgaacaucau

SEQ ID NO: 2521185 - RNA, 19 nt, Artificial Sequence
  Description of Artificial Sequence: Synthetic oligonucleotide
cgcugguauuucacagguu

SEQ ID NO: 2521186 - RNA, 19 nt, Artificial Sequence
  Description of Artificial Sequence: Synthetic oligonucleotide
cccggauaagguggauguu

SEQ ID NO: 2521187 - RNA, 19 nt, Artificial Sequence
  Description of Artificial Sequence: Synthetic oligonucleotide
ccuuugucugagggaccuu

SEQ ID NO: 2521188 - RNA, 19 nt, Artificial Sequence
  Description of Artificial Sequence: Synthetic oligonucleotide
ucuuaaaacgacaucaucg

SEQ ID NO: 2521189 - RNA, 19 nt, Artificial Sequence
  Description of Artificial Sequence: Synthetic oligonucleotide
uaaaauaccacacuacggg

SEQ ID NO: 2521190 - RNA, 19 nt, Artificial Sequence
  Description of Artificial Sequence: Synthetic oligonucleotide
uaaaauauuauuccaagca

SEQ ID NO: 2521191 - RNA, 19 nt, Artificial Sequence
  Description of Artificial Sequence: Synthetic oligonucleotide
aaaauauuauuccaagcag

SEQ ID NO: 2521192 - RNA, 19 nt, Artificial Sequence
  Description of Artificial Sequence: Synthetic oligonucleotide
gauaaaauaccacacuacg

SEQ ID NO: 2521193 - RNA, 19 nt, Artificial Sequence
  Description of Artificial Sequence: Synthetic oligonucleotide
aaguguaucauuuacaaau

SEQ ID NO: 2521194 - RNA, 19 nt, Artificial Sequence
  Description of Artificial Sequence: Synthetic oligonucleotide
ugccguaucaucaucaucg

SEQ ID NO: 2521195 - RNA, 19 nt, Artificial Sequence
  Description of Artificial Sequence: Synthetic oligonucleotide
aaaacgacaucaucguccc

SEQ ID NO: 2521196 - RNA, 19 nt, Artificial Sequence
  Description of Artificial Sequence: Synthetic oligonucleotide
cuucugaucaucuauaccc

SEQ ID NO: 2521197 - RNA, 19 nt, Artificial Sequence
  Description of Artificial Sequence: Synthetic oligonucleotide
uuauagauaaaauaccaca

SEQ ID NO: 2521198 - RNA, 19 nt, Artificial Sequence
  Description of Artificial Sequence: Synthetic oligonucleotide
ugagaaaguucaaacaggg

SEQ ID NO: 2521199 - RNA, 19 nt, Artificial Sequence
  Description of Artificial Sequence: Synthetic oligonucleotide
uaaaacgacaucaucgucc

SEQ ID NO: 2521200 - RNA, 19 nt, Artificial Sequence
  Description of Artificial Sequence: Synthetic oligonucleotide
acagggaaagaacaaaccc

SEQ ID NO: 2521201 - RNA, 19 nt, Artificial Sequence
  Description of Artificial Sequence: Synthetic oligonucleotide
aauauuuuccauucgaauu

SEQ ID NO: 2521202 - RNA, 19 nt, Artificial Sequence
  Description of Artificial Sequence: Synthetic oligonucleotide
auauuuuccauucgaauuc

SEQ ID NO: 2521203 - RNA, 19 nt, Artificial Sequence
  Description of Artificial Sequence: Synthetic oligonucleotide
uauagauaaaauaccacac

SEQ ID NO: 2521204 - RNA, 19 nt, Artificial Sequence
  Description of Artificial Sequence: Synthetic oligonucleotide
uuagacuuuaauuaagcac

SEQ ID NO: 2521205 - RNA, 19 nt, Artificial Sequence
  Description of Artificial Sequence: Synthetic oligonucleotide
ccaaaagucaaauugaucc

SEQ ID NO: 2521206 - RNA, 19 nt, Artificial Sequence
  Description of Artificial Sequence: Synthetic oligonucleotide
uauuagacuuuaauuaagc

SEQ ID NO: 2521207 - RNA, 19 nt, Artificial Sequence
  Description of Artificial Sequence: Synthetic oligonucleotide
cuuuuaaccuugaaguugg

SEQ ID NO: 2521208 - RNA, 19 nt, Artificial Sequence
  Description of Artificial Sequence: Synthetic oligonucleotide
aaucuuuugucuuucuucu

SEQ ID NO: 2521209 - RNA, 19 nt, Artificial Sequence
  Description of Artificial Sequence: Synthetic oligonucleotide
uuaaaauauuauuccaagc

SEQ ID NO: 2521210 - RNA, 19 nt, Artificial Sequence
  Description of Artificial Sequence: Synthetic oligonucleotide
uugagaaaguucaaacagg

SEQ ID NO: 2521211 - RNA, 19 nt, Artificial Sequence
  Description of Artificial Sequence: Synthetic oligonucleotide
uaaagucacgguuacaacc

SEQ ID NO: 2521212 - RNA, 19 nt, Artificial Sequence
  Description of Artificial Sequence: Synthetic oligonucleotide
uuaaccuugaaguuggccu

SEQ ID NO: 2521213 - RNA, 19 nt, Artificial Sequence
  Description of Artificial Sequence: Synthetic oligonucleotide
uuuauuagacuuuaauuaa

SEQ ID NO: 2521214 - RNA, 19 nt, Artificial Sequence
  Description of Artificial Sequence: Synthetic oligonucleotide
cuacuuaauauauuucucc

SEQ ID NO: 2521215 - RNA, 19 nt, Artificial Sequence
  Description of Artificial Sequence: Synthetic oligonucleotide
ugaaauucagaucgaagug

SEQ ID NO: 2521216 - RNA, 19 nt, Artificial Sequence
  Description of Artificial Sequence: Synthetic oligonucleotide
uuauuagacuuuaauuaag

SEQ ID NO: 2521217 - RNA, 19 nt, Artificial Sequence
  Description of Artificial Sequence: Synthetic oligonucleotide
agaaaguucaaacagggaa

SEQ ID NO: 2521218 - RNA, 19 nt, Artificial Sequence
  Description of Artificial Sequence: Synthetic oligonucleotide
auccuuaacauuuuauuag

SEQ ID NO: 2521219 - RNA, 19 nt, Artificial Sequence
  Description of Artificial Sequence: Synthetic oligonucleotide
aagaggaaguuguauguuc

SEQ ID NO: 2521220 - RNA, 19 nt, Artificial Sequence
  Description of Artificial Sequence: Synthetic oligonucleotide
aagcacauaaaacuguacu

SEQ ID NO: 2521221 - RNA, 19 nt, Artificial Sequence
  Description of Artificial Sequence: Synthetic oligonucleotide
aaauccauuauagauaaaa

SEQ ID NO: 2521222 - RNA, 19 nt, Artificial Sequence
  Description of Artificial Sequence: Synthetic oligonucleotide
uggaaucuggucuaggcgg

SEQ ID NO: 2521223 - RNA, 19 nt, Artificial Sequence
  Description of Artificial Sequence: Synthetic oligonucleotide
uguacuacuuaauauauuu

SEQ ID NO: 2521224 - RNA, 19 nt, Artificial Sequence
  Description of Artificial Sequence: Synthetic oligonucleotide
cuuaauauauuucuccaug

SEQ ID NO: 2521225 - RNA, 19 nt, Artificial Sequence
  Description of Artificial Sequence: Synthetic oligonucleotide
ucuuugacacugaagagga

SEQ ID NO: 2521226 - RNA, 19 nt, Artificial Sequence
  Description of Artificial Sequence: Synthetic oligonucleotide
aaacuggucagacucaccu

SEQ ID NO: 2521227 - RNA, 19 nt, Artificial Sequence
  Description of Artificial Sequence: Synthetic oligonucleotide
aguucuuaaaacgacauca

SEQ ID NO: 2521228 - RNA, 19 nt, Artificial Sequence
  Description of Artificial Sequence: Synthetic oligonucleotide
cuugaaguuggccugaggc

SEQ ID NO: 2521229 - RNA, 19 nt, Artificial Sequence
  Description of Artificial Sequence: Synthetic oligonucleotide
uuaauauauuucuccauga

SEQ ID NO: 2521230 - RNA, 19 nt, Artificial Sequence
  Description of Artificial Sequence: Synthetic oligonucleotide
aacgacaucaucgucccac

SEQ ID NO: 2521231 - RNA, 19 nt, Artificial Sequence
  Description of Artificial Sequence: Synthetic oligonucleotide
uuuuaguuaaaauauuauu

SEQ ID NO: 2521232 - RNA, 19 nt, Artificial Sequence
  Description of Artificial Sequence: Synthetic oligonucleotide
gucaaauugauccuuaaca

SEQ ID NO: 2521233 - RNA, 19 nt, Artificial Sequence
  Description of Artificial Sequence: Synthetic oligonucleotide
aaacagggaaagaacaaac

SEQ ID NO: 2521234 - RNA, 19 nt, Artificial Sequence
  Description of Artificial Sequence: Synthetic oligonucleotide
aucgaaguguaucauuuac

SEQ ID NO: 2521235 - RNA, 19 nt, Artificial Sequence
  Description of Artificial Sequence: Synthetic oligonucleotide
aaggaaguaagacuggaaa

SEQ ID NO: 2521236 - RNA, 19 nt, Artificial Sequence
  Description of Artificial Sequence: Synthetic oligonucleotide
aagacuggaaacuggucag

SEQ ID NO: 2521237 - RNA, 19 nt, Artificial Sequence
  Description of Artificial Sequence: Synthetic oligonucleotide
aacuguacuacuuaauaua

SEQ ID NO: 2521238 - RNA, 19 nt, Artificial Sequence
  Description of Artificial Sequence: Synthetic oligonucleotide
ugugagaggaucaucggca

SEQ ID NO: 2521239 - RNA, 19 nt, Artificial Sequence
  Description of Artificial Sequence: Synthetic oligonucleotide
auuauagauaaaauaccac

SEQ ID NO: 2521240 - RNA, 19 nt, Artificial Sequence
  Description of Artificial Sequence: Synthetic oligonucleotide
guuacaaccucuucagggg

SEQ ID NO: 2521241 - RNA, 19 nt, Artificial Sequence
  Description of Artificial Sequence: Synthetic oligonucleotide
ucaucuauacccuuugcac

SEQ ID NO: 2521242 - RNA, 19 nt, Artificial Sequence
  Description of Artificial Sequence: Synthetic oligonucleotide
ucaaauugauccuuaacau

SEQ ID NO: 2521243 - RNA, 19 nt, Artificial Sequence
  Description of Artificial Sequence: Synthetic oligonucleotide
uagauaaaauaccacacua

SEQ ID NO: 2521244 - RNA, 19 nt, Artificial Sequence
  Description of Artificial Sequence: Synthetic oligonucleotide
aaacuguacuacuuaauau

SEQ ID NO: 2521245 - RNA, 19 nt, Artificial Sequence
  Description of Artificial Sequence: Synthetic oligonucleotide
aaauauuauuccaagcaga

SEQ ID NO: 2521246 - RNA, 19 nt, Artificial Sequence
  Description of Artificial Sequence: Synthetic oligonucleotide
aaauugauccuuaacauuu

SEQ ID NO: 2521247 - RNA, 19 nt, Artificial Sequence
  Description of Artificial Sequence: Synthetic oligonucleotide
aaaguucaaacagggaaag

SEQ ID NO: 2521248 - RNA, 19 nt, Artificial Sequence
  Description of Artificial Sequence: Synthetic oligonucleotide
aaaauaccacacuacggga

SEQ ID NO: 2521249 - RNA, 19 nt, Artificial Sequence
  Description of Artificial Sequence: Synthetic oligonucleotide
uaguuaaaauauuauucca

SEQ ID NO: 2521250 - RNA, 19 nt, Artificial Sequence
  Description of Artificial Sequence: Synthetic oligonucleotide
ucuuuuaaccuugaaguug

SEQ ID NO: 2521251 - RNA, 19 nt, Artificial Sequence
  Description of Artificial Sequence: Synthetic oligonucleotide
uacuuaauauauuucucca

SEQ ID NO: 2521252 - RNA, 19 nt, Artificial Sequence
  Description of Artificial Sequence: Synthetic oligonucleotide
auagauaaaauaccacacu

SEQ ID NO: 2521253 - RNA, 19 nt, Artificial Sequence
  Description of Artificial Sequence: Synthetic oligonucleotide
uccacucagaauauuuucc

SEQ ID NO: 2521254 - RNA, 19 nt, Artificial Sequence
  Description of Artificial Sequence: Synthetic oligonucleotide
agucaaauugauccuuaac

SEQ ID NO: 2521255 - RNA, 19 nt, Artificial Sequence
  Description of Artificial Sequence: Synthetic oligonucleotide
gaaguuguauguucucggg

SEQ ID NO: 2521256 - RNA, 19 nt, Artificial Sequence
  Description of Artificial Sequence: Synthetic oligonucleotide
auaaaauaccacacuacgg

SEQ ID NO: 2521257 - RNA, 19 nt, Artificial Sequence
  Description of Artificial Sequence: Synthetic oligonucleotide
agauaaaauaccacacuac

SEQ ID NO: 2521258 - RNA, 19 nt, Artificial Sequence
  Description of Artificial Sequence: Synthetic oligonucleotide
gguuacaaccucuucaggg

SEQ ID NO: 2521259 - RNA, 19 nt, Artificial Sequence
  Description of Artificial Sequence: Synthetic oligonucleotide
cuucuuuuaaccuugaagu

SEQ ID NO: 2521260 - RNA, 19 nt, Artificial Sequence
  Description of Artificial Sequence: Synthetic oligonucleotide
cagggaaagaacaaacccc

SEQ ID NO: 2521261 - RNA, 19 nt, Artificial Sequence
  Description of Artificial Sequence: Synthetic oligonucleotide
uucagaucgaaguguauca

SEQ ID NO: 2521262 - RNA, 19 nt, Artificial Sequence
  Description of Artificial Sequence: Synthetic oligonucleotide
auuagacuuuaauuaagca

SEQ ID NO: 2521263 - RNA, 19 nt, Artificial Sequence
  Description of Artificial Sequence: Synthetic oligonucleotide
aauauuauuccaagcagau

SEQ ID NO: 2521264 - RNA, 19 nt, Artificial Sequence
  Description of Artificial Sequence: Synthetic oligonucleotide
aucuauacccuuugcacag

SEQ ID NO: 2521265 - RNA, 19 nt, Artificial Sequence
  Description of Artificial Sequence: Synthetic oligonucleotide
acgggaaagagauugagaa

SEQ ID NO: 2521266 - RNA, 19 nt, Artificial Sequence
  Description of Artificial Sequence: Synthetic oligonucleotide
cagacucaccucuaaaucc

SEQ ID NO: 2521267 - RNA, 19 nt, Artificial Sequence
  Description of Artificial Sequence: Synthetic oligonucleotide
cuaaauccauuauagauaa

SEQ ID NO: 2521268 - RNA, 19 nt, Artificial Sequence
  Description of Artificial Sequence: Synthetic oligonucleotide
auucagaucgaaguguauc

SEQ ID NO: 2521269 - RNA, 19 nt, Artificial Sequence
  Description of Artificial Sequence: Synthetic oligonucleotide
ucuucugaucaucuauacc

SEQ ID NO: 2521270 - RNA, 19 nt, Artificial Sequence
  Description of Artificial Sequence: Synthetic oligonucleotide
aaccucuucaggggcaucc

SEQ ID NO: 2521271 - RNA, 19 nt, Artificial Sequence
  Description of Artificial Sequence: Synthetic oligonucleotide
cuggaaacuggucagacuc

SEQ ID NO: 2521272 - RNA, 19 nt, Artificial Sequence
  Description of Artificial Sequence: Synthetic oligonucleotide
ucggcaucaagguuggcag

SEQ ID NO: 2521273 - RNA, 19 nt, Artificial Sequence
  Description of Artificial Sequence: Synthetic oligonucleotide
gcuucuuugacacugaaga

SEQ ID NO: 2521274 - RNA, 19 nt, Artificial Sequence
  Description of Artificial Sequence: Synthetic oligonucleotide
gggaaagagauugagaaag

SEQ ID NO: 2521275 - RNA, 19 nt, Artificial Sequence
  Description of Artificial Sequence: Synthetic oligonucleotide
accucuaaauccauuauag

SEQ ID NO: 2521276 - RNA, 19 nt, Artificial Sequence
  Description of Artificial Sequence: Synthetic oligonucleotide
auccauuauagauaaaaua

SEQ ID NO: 2521277 - RNA, 19 nt, Artificial Sequence
  Description of Artificial Sequence: Synthetic oligonucleotide
aacucucuccuaaagucac

SEQ ID NO: 2521278 - RNA, 19 nt, Artificial Sequence
  Description of Artificial Sequence: Synthetic oligonucleotide
uuaagcacauaaaacugua

SEQ ID NO: 2521279 - RNA, 19 nt, Artificial Sequence
  Description of Artificial Sequence: Synthetic oligonucleotide
aagaagagcugccguauca

SEQ ID NO: 2521280 - RNA, 19 nt, Artificial Sequence
  Description of Artificial Sequence: Synthetic oligonucleotide
acuacuuaauauauuucuc

SEQ ID NO: 2521281 - RNA, 19 nt, Artificial Sequence
  Description of Artificial Sequence: Synthetic oligonucleotide
cugaagaggaaguuguaug

SEQ ID NO: 2521282 - RNA, 19 nt, Artificial Sequence
  Description of Artificial Sequence: Synthetic oligonucleotide
aucugugagaggaucaucg

SEQ ID NO: 2521283 - RNA, 19 nt, Artificial Sequence
  Description of Artificial Sequence: Synthetic oligonucleotide
ucagacucaccucuaaauc

SEQ ID NO: 2521284 - RNA, 19 nt, Artificial Sequence
  Description of Artificial Sequence: Synthetic oligonucleotide
auguucucggguuggacgg

SEQ ID NO: 2521285 - RNA, 19 nt, Artificial Sequence
  Description of Artificial Sequence: Synthetic oligonucleotide
agcucucucucucucuucc

SEQ ID NO: 2521286 - RNA, 19 nt, Artificial Sequence
  Description of Artificial Sequence: Synthetic oligonucleotide
aaagucacgguuacaaccu

SEQ ID NO: 2521287 - RNA, 19 nt, Artificial Sequence
  Description of Artificial Sequence: Synthetic oligonucleotide
auacccuuugcacaguucu

SEQ ID NO: 2521288 - RNA, 19 nt, Artificial Sequence
  Description of Artificial Sequence: Synthetic oligonucleotide
ucaaacagggaaagaacaa

SEQ ID NO: 2521289 - RNA, 19 nt, Artificial Sequence
  Description of Artificial Sequence: Synthetic oligonucleotide
ugauccuuaacauuuuauu

SEQ ID NO: 2521290 - RNA, 19 nt, Artificial Sequence
  Description of Artificial Sequence: Synthetic oligonucleotide
aauaccacacuacgggaaa

SEQ ID NO: 2521291 - RNA, 19 nt, Artificial Sequence
  Description of Artificial Sequence: Synthetic oligonucleotide
gauccuuaacauuuuauua

SEQ ID NO: 2521292 - RNA, 19 nt, Artificial Sequence
  Description of Artificial Sequence: Synthetic oligonucleotide
ucgaaguguaucauuuaca

SEQ ID NO: 2521293 - RNA, 19 nt, Artificial Sequence
  Description of Artificial Sequence: Synthetic oligonucleotide
acgguuacaaccucuucag

SEQ ID NO: 2521294 - RNA, 19 nt, Artificial Sequence
  Description of Artificial Sequence: Synthetic oligonucleotide
aaaaggaaguaagacugga

SEQ ID NO: 2521295 - RNA, 19 nt, Artificial Sequence
  Description of Artificial Sequence: Synthetic oligonucleotide
aucaucuauacccuuugca

SEQ ID NO: 2521296 - RNA, 19 nt, Artificial Sequence
  Description of Artificial Sequence: Synthetic oligonucleotide
aaguuguauguucucgggu

SEQ ID NO: 2521297 - RNA, 19 nt, Artificial Sequence
  Description of Artificial Sequence: Synthetic oligonucleotide
ucugcaagaagagcugccg

SEQ ID NO: 2521298 - RNA, 19 nt, Artificial Sequence
  Description of Artificial Sequence: Synthetic oligonucleotide
aguucaaacagggaaagaa

SEQ ID NO: 2521299 - RNA, 19 nt, Artificial Sequence
  Description of Artificial Sequence: Synthetic oligonucleotide
aaguaagacuggaaacugg

SEQ ID NO: 2521300 - RNA, 19 nt, Artificial Sequence
  Description of Artificial Sequence: Synthetic oligonucleotide
ucugugagaggaucaucgg

SEQ ID NO: 2521301 - RNA, 19 nt, Artificial Sequence
  Description of Artificial Sequence: Synthetic oligonucleotide
ucuccuaaagucacgguua

SEQ ID NO: 2521302 - RNA, 19 nt, Artificial Sequence
  Description of Artificial Sequence: Synthetic oligonucleotide
uucccuuuucuccauauua

SEQ ID NO: 2521303 - RNA, 19 nt, Artificial Sequence
  Description of Artificial Sequence: Synthetic oligonucleotide
uucuuaaaacgacaucauc

SEQ ID NO: 2521304 - RNA, 19 nt, Artificial Sequence
  Description of Artificial Sequence: Synthetic oligonucleotide
uaaccuugaaguuggccug

SEQ ID NO: 2521305 - RNA, 19 nt, Artificial Sequence
  Description of Artificial Sequence: Synthetic oligonucleotide
ugaaguuggccugaggcug

SEQ ID NO: 2521306 - RNA, 19 nt, Artificial Sequence
  Description of Artificial Sequence: Synthetic oligonucleotide
uucgaauucucucuuccuc

SEQ ID NO: 2521307 - RNA, 19 nt, Artificial Sequence
  Description of Artificial Sequence: Synthetic oligonucleotide
uuacaaccucuucaggggc

SEQ ID NO: 2521308 - RNA, 19 nt, Artificial Sequence
  Description of Artificial Sequence: Synthetic oligonucleotide
ucaucggcaucaagguugg

SEQ ID NO: 2521309 - RNA, 19 nt, Artificial Sequence
  Description of Artificial Sequence: Synthetic oligonucleotide
uuucccuugcagcagcucu

SEQ ID NO: 2521310 - RNA, 19 nt, Artificial Sequence
  Description of Artificial Sequence: Synthetic oligonucleotide
uccaacucucuccuaaagu

SEQ ID NO: 2521311 - RNA, 19 nt, Artificial Sequence
  Description of Artificial Sequence: Synthetic oligonucleotide
uuuaaccuugaaguuggcc

SEQ ID NO: 2521312 - RNA, 19 nt, Artificial Sequence
  Description of Artificial Sequence: Synthetic oligonucleotide
acuggucagacucaccucu

SEQ ID NO: 2521313 - RNA, 19 nt, Artificial Sequence
  Description of Artificial Sequence: Synthetic oligonucleotide
uuucuucugaucaucuaua

SEQ ID NO: 2521314 - RNA, 19 nt, Artificial Sequence
  Description of Artificial Sequence: Synthetic oligonucleotide
uuccagcucugcaagaaga

SEQ ID NO: 2521315 - RNA, 19 nt, Artificial Sequence
  Description of Artificial Sequence: Synthetic oligonucleotide
uuaaaacgacaucaucguc

SEQ ID NO: 2521316 - RNA, 19 nt, Artificial Sequence
  Description of Artificial Sequence: Synthetic oligonucleotide
ggaaguuguauguucucgg

SEQ ID NO: 2521317 - RNA, 19 nt, Artificial Sequence
  Description of Artificial Sequence: Synthetic oligonucleotide
aggaaguuguauguucucg

SEQ ID NO: 2521318 - RNA, 19 nt, Artificial Sequence
  Description of Artificial Sequence: Synthetic oligonucleotide
uucuuguuccuuucuggcc

SEQ ID NO: 2521319 - RNA, 19 nt, Artificial Sequence
  Description of Artificial Sequence: Synthetic oligonucleotide
uucugaucaucuauacccu

SEQ ID NO: 2521320 - RNA, 19 nt, Artificial Sequence
  Description of Artificial Sequence: Synthetic oligonucleotide
uaagcacauaaaacuguac

SEQ ID NO: 2521321 - RNA, 19 nt, Artificial Sequence
  Description of Artificial Sequence: Synthetic oligonucleotide
uugaaguuggccugaggcu

SEQ ID NO: 2521322 - RNA, 19 nt, Artificial Sequence
  Description of Artificial Sequence: Synthetic oligonucleotide
agcacauaaaacuguacua

SEQ ID NO: 2521323 - RNA, 19 nt, Artificial Sequence
  Description of Artificial Sequence: Synthetic oligonucleotide
guucuuguuccuuucuggc

SEQ ID NO: 2521324 - RNA, 19 nt, Artificial Sequence
  Description of Artificial Sequence: Synthetic oligonucleotide
aaucuggucuaggcggggc

SEQ ID NO: 2521325 - RNA, 19 nt, Artificial Sequence
  Description of Artificial Sequence: Synthetic oligonucleotide
cuucuuugacacugaagag

SEQ ID NO: 2521326 - RNA, 19 nt, Artificial Sequence
  Description of Artificial Sequence: Synthetic oligonucleotide
auuaagcacauaaaacugu

SEQ ID NO: 2521327 - RNA, 19 nt, Artificial Sequence
  Description of Artificial Sequence: Synthetic oligonucleotide
cacuacgggaaagagauug

SEQ ID NO: 2521328 - RNA, 19 nt, Artificial Sequence
  Description of Artificial Sequence: Synthetic oligonucleotide
aguuguauguucucggguu

SEQ ID NO: 2521329 - RNA, 19 nt, Artificial Sequence
  Description of Artificial Sequence: Synthetic oligonucleotide
uugauccuuaacauuuuau

SEQ ID NO: 2521330 - RNA, 19 nt, Artificial Sequence
  Description of Artificial Sequence: Synthetic oligonucleotide
gaaaguucaaacagggaaa

SEQ ID NO: 2521331 - RNA, 19 nt, Artificial Sequence
  Description of Artificial Sequence: Synthetic oligonucleotide
uuccaacucucuccuaaag

SEQ ID NO: 2521332 - RNA, 19 nt, Artificial Sequence
  Description of Artificial Sequence: Synthetic oligonucleotide
uacgggaaagagauugaga

SEQ ID NO: 2521333 - RNA, 19 nt, Artificial Sequence
  Description of Artificial Sequence: Synthetic oligonucleotide
uucuucugaucaucuauac

SEQ ID NO: 2521334 - RNA, 19 nt, Artificial Sequence
  Description of Artificial Sequence: Synthetic oligonucleotide
ugggccagugagauugagg

SEQ ID NO: 2521335 - RNA, 19 nt, Artificial Sequence
  Description of Artificial Sequence: Synthetic oligonucleotide
ucccuuuucuccauauuaa

SEQ ID NO: 2521336 - RNA, 19 nt, Artificial Sequence
  Description of Artificial Sequence: Synthetic oligonucleotide
uuccacucagaauauuuuc

SEQ ID NO: 2521337 - RNA, 19 nt, Artificial Sequence
  Description of Artificial Sequence: Synthetic oligonucleotide
acgacaucaucgucccacc

SEQ ID NO: 2521338 - RNA, 19 nt, Artificial Sequence
  Description of Artificial Sequence: Synthetic oligonucleotide
aagucacgguuacaaccuc

SEQ ID NO: 2521339 - RNA, 19 nt, Artificial Sequence
  Description of Artificial Sequence: Synthetic oligonucleotide
aagagcugccguaucauca

SEQ ID NO: 2521340 - RNA, 19 nt, Artificial Sequence
  Description of Artificial Sequence: Synthetic oligonucleotide
cuuugcacaguucuuaaaa

SEQ ID NO: 2521341 - RNA, 19 nt, Artificial Sequence
  Description of Artificial Sequence: Synthetic oligonucleotide
cagaauauuuuccauucga

SEQ ID NO: 2521342 - RNA, 19 nt, Artificial Sequence
  Description of Artificial Sequence: Synthetic oligonucleotide
uucuuuuaaccuugaaguu

SEQ ID NO: 2521343 - RNA, 19 nt, Artificial Sequence
  Description of Artificial Sequence: Synthetic oligonucleotide
cuaaagucacgguuacaac

SEQ ID NO: 2521344 - RNA, 19 nt, Artificial Sequence
  Description of Artificial Sequence: Synthetic oligonucleotide
cuuaacauuuuauuagacu

SEQ ID NO: 2521345 - RNA, 19 nt, Artificial Sequence
  Description of Artificial Sequence: Synthetic oligonucleotide
uuguauguucucggguugg

SEQ ID NO: 2521346 - RNA, 19 nt, Artificial Sequence
  Description of Artificial Sequence: Synthetic oligonucleotide
cuuaaaacgacaucaucgu

SEQ ID NO: 2521347 - RNA, 19 nt, Artificial Sequence
  Description of Artificial Sequence: Synthetic oligonucleotide
aguaagacuggaaacuggu

SEQ ID NO: 2521348 - RNA, 19 nt, Artificial Sequence
  Description of Artificial Sequence: Synthetic oligonucleotide
gaauauuuuccauucgaau

SEQ ID NO: 2521349 - RNA, 19 nt, Artificial Sequence
  Description of Artificial Sequence: Synthetic oligonucleotide
cugugagaggaucaucggc

SEQ ID NO: 2521350 - RNA, 19 nt, Artificial Sequence
  Description of Artificial Sequence: Synthetic oligonucleotide
gaucaucuauacccuuugc

SEQ ID NO: 2521351 - RNA, 19 nt, Artificial Sequence
  Description of Artificial Sequence: Synthetic oligonucleotide
aaauaccacacuacgggaa

SEQ ID NO: 2521352 - RNA, 19 nt, Artificial Sequence
  Description of Artificial Sequence: Synthetic oligonucleotide
aaauucagaucgaagugua

SEQ ID NO: 2521353 - RNA, 19 nt, Artificial Sequence
  Description of Artificial Sequence: Synthetic oligonucleotide
gccagugagauugaggagg

SEQ ID NO: 2521354 - RNA, 19 nt, Artificial Sequence
  Description of Artificial Sequence: Synthetic oligonucleotide
uauuuuccauucgaauucu

SEQ ID NO: 2521355 - RNA, 19 nt, Artificial Sequence
  Description of Artificial Sequence: Synthetic oligonucleotide
guuguauguucucggguug

SEQ ID NO: 2521356 - RNA, 19 nt, Artificial Sequence
  Description of Artificial Sequence: Synthetic oligonucleotide
cacacuacgggaaagagau

SEQ ID NO: 2521357 - RNA, 19 nt, Artificial Sequence
  Description of Artificial Sequence: Synthetic oligonucleotide
ggaugggccagugagauug

SEQ ID NO: 2521358 - RNA, 19 nt, Artificial Sequence
  Description of Artificial Sequence: Synthetic oligonucleotide
uggccugaggcugggaugg

SEQ ID NO: 2521359 - RNA, 19 nt, Artificial Sequence
  Description of Artificial Sequence: Synthetic oligonucleotide
gggguuuccacucagaaua

SEQ ID NO: 2521360 - RNA, 19 nt, Artificial Sequence
  Description of Artificial Sequence: Synthetic oligonucleotide
ucuggccugcucuucagcu

SEQ ID NO: 2521361 - RNA, 19 nt, Artificial Sequence
  Description of Artificial Sequence: Synthetic oligonucleotide
gaaauucagaucgaagugu

SEQ ID NO: 2521362 - RNA, 19 nt, Artificial Sequence
  Description of Artificial Sequence: Synthetic oligonucleotide
cauaaaacuguacuacuua

SEQ ID NO: 2521363 - RNA, 19 nt, Artificial Sequence
  Description of Artificial Sequence: Synthetic oligonucleotide
cucucuccuaaagucacgg

SEQ ID NO: 2521364 - RNA, 19 nt, Artificial Sequence
  Description of Artificial Sequence: Synthetic oligonucleotide
caucaagguuggcagcugg

SEQ ID NO: 2521365 - RNA, 19 nt, Artificial Sequence
  Description of Artificial Sequence: Synthetic oligonucleotide
acuguacuacuuaauauau

SEQ ID NO: 2521366 - RNA, 19 nt, Artificial Sequence
  Description of Artificial Sequence: Synthetic oligonucleotide
gcugggaugggccagugag

SEQ ID NO: 2521367 - RNA, 19 nt, Artificial Sequence
  Description of Artificial Sequence: Synthetic oligonucleotide
ucuucaggggcauccugug

SEQ ID NO: 2521368 - RNA, 19 nt, Artificial Sequence
  Description of Artificial Sequence: Synthetic oligonucleotide
aucgcucuccucuucaaaa

SEQ ID NO: 2521369 - RNA, 19 nt, Artificial Sequence
  Description of Artificial Sequence: Synthetic oligonucleotide
guuggcagcuggaaucugg

SEQ ID NO: 2521370 - RNA, 19 nt, Artificial Sequence
  Description of Artificial Sequence: Synthetic oligonucleotide
cacgguuacaaccucuuca

SEQ ID NO: 2521371 - RNA, 19 nt, Artificial Sequence
  Description of Artificial Sequence: Synthetic oligonucleotide
cguaucaucaucaucgcuc

SEQ ID NO: 2521372 - RNA, 19 nt, Artificial Sequence
  Description of Artificial Sequence: Synthetic oligonucleotide
aaaggaaguaagacuggaa

SEQ ID NO: 2521373 - RNA, 19 nt, Artificial Sequence
  Description of Artificial Sequence: Synthetic oligonucleotide
uuuuaaccuugaaguuggc

SEQ ID NO: 2521374 - RNA, 19 nt, Artificial Sequence
  Description of Artificial Sequence: Synthetic oligonucleotide
cacaguucuuaaaacgaca

SEQ ID NO: 2521375 - RNA, 19 nt, Artificial Sequence
  Description of Artificial Sequence: Synthetic oligonucleotide
aaagucaaauugauccuua

SEQ ID NO: 2521376 - RNA, 19 nt, Artificial Sequence
  Description of Artificial Sequence: Synthetic oligonucleotide
ugcaagaagagcugccgua

SEQ ID NO: 2521377 - RNA, 19 nt, Artificial Sequence
  Description of Artificial Sequence: Synthetic oligonucleotide
ucuaggcggggcuucuuug

SEQ ID NO: 2521378 - RNA, 19 nt, Artificial Sequence
  Description of Artificial Sequence: Synthetic oligonucleotide
cucugcaagaagagcugcc

SEQ ID NO: 2521379 - RNA, 19 nt, Artificial Sequence
  Description of Artificial Sequence: Synthetic oligonucleotide
agaggaaguuguauguucu

SEQ ID NO: 2521380 - RNA, 19 nt, Artificial Sequence
  Description of Artificial Sequence: Synthetic oligonucleotide
gaaguuggccugaggcugg

SEQ ID NO: 2521381 - RNA, 19 nt, Artificial Sequence
  Description of Artificial Sequence: Synthetic oligonucleotide
acuggaaacuggucagacu

SEQ ID NO: 2521382 - RNA, 19 nt, Artificial Sequence
  Description of Artificial Sequence: Synthetic oligonucleotide
uccauucgaauucucucuu

SEQ ID NO: 2521383 - RNA, 19 nt, Artificial Sequence
  Description of Artificial Sequence: Synthetic oligonucleotide
agaucgaaguguaucauuu

SEQ ID NO: 2521384 - RNA, 19 nt, Artificial Sequence
  Description of Artificial Sequence: Synthetic oligonucleotide
gcacauaaaacuguacuac

SEQ ID NO: 2521385 - RNA, 19 nt, Artificial Sequence
  Description of Artificial Sequence: Synthetic oligonucleotide
auugauccuuaacauuuua

SEQ ID NO: 2521386 - RNA, 19 nt, Artificial Sequence
  Description of Artificial Sequence: Synthetic oligonucleotide
acaguucuuaaaacgacau

SEQ ID NO: 2521387 - RNA, 19 nt, Artificial Sequence
  Description of Artificial Sequence: Synthetic oligonucleotide
aucggcaucaagguuggca

SEQ ID NO: 2521388 - RNA, 19 nt, Artificial Sequence
  Description of Artificial Sequence: Synthetic oligonucleotide
uauacccuuugcacaguuc

SEQ ID NO: 2521389 - RNA, 19 nt, Artificial Sequence
  Description of Artificial Sequence: Synthetic oligonucleotide
uugucuuucuucugaucau

SEQ ID NO: 2521390 - RNA, 19 nt, Artificial Sequence
  Description of Artificial Sequence: Synthetic oligonucleotide
cuacgggaaagagauugag

SEQ ID NO: 2521391 - RNA, 19 nt, Artificial Sequence
  Description of Artificial Sequence: Synthetic oligonucleotide
uugugaaauucagaucgaa

SEQ ID NO: 2521392 - RNA, 19 nt, Artificial Sequence
  Description of Artificial Sequence: Synthetic oligonucleotide
aucaucgcucuccucuuca

SEQ ID NO: 2521393 - RNA, 19 nt, Artificial Sequence
  Description of Artificial Sequence: Synthetic oligonucleotide
ucaucgucccaccuucuuu

SEQ ID NO: 2521394 - RNA, 19 nt, Artificial Sequence
  Description of Artificial Sequence: Synthetic oligonucleotide
caacucucuccuaaaguca

SEQ ID NO: 2521395 - RNA, 19 nt, Artificial Sequence
  Description of Artificial Sequence: Synthetic oligonucleotide
guacuacuuaauauauuuc

SEQ ID NO: 2521396 - RNA, 19 nt, Artificial Sequence
  Description of Artificial Sequence: Synthetic oligonucleotide
ucucucucucucuuccaac

SEQ ID NO: 2521397 - RNA, 19 nt, Artificial Sequence
  Description of Artificial Sequence: Synthetic oligonucleotide
gucccaccuucuuuuaacc

SEQ ID NO: 2521398 - RNA, 19 nt, Artificial Sequence
  Description of Artificial Sequence: Synthetic oligonucleotide
acauaaaacuguacuacuu

SEQ ID NO: 2521399 - RNA, 19 nt, Artificial Sequence
  Description of Artificial Sequence: Synthetic oligonucleotide
caucuuccucaucugugag

SEQ ID NO: 2521400 - RNA, 19 nt, Artificial Sequence
  Description of Artificial Sequence: Synthetic oligonucleotide
aaguucaaacagggaaaga

SEQ ID NO: 2521401 - RNA, 19 nt, Artificial Sequence
  Description of Artificial Sequence: Synthetic oligonucleotide
aauugauccuuaacauuuu

SEQ ID NO: 2521402 - RNA, 19 nt, Artificial Sequence
  Description of Artificial Sequence: Synthetic oligonucleotide
agacucaccucuaaaucca

SEQ ID NO: 2521403 - RNA, 19 nt, Artificial Sequence
  Description of Artificial Sequence: Synthetic oligonucleotide
ucccaccuucuuuuaaccu

SEQ ID NO: 2521404 - RNA, 19 nt, Artificial Sequence
  Description of Artificial Sequence: Synthetic oligonucleotide
guaucauuuacaaaucuuu

SEQ ID NO: 2521405 - RNA, 19 nt, Artificial Sequence
  Description of Artificial Sequence: Synthetic oligonucleotide
gaggaaguuguauguucuc

SEQ ID NO: 2521406 - RNA, 19 nt, Artificial Sequence
  Description of Artificial Sequence: Synthetic oligonucleotide
ucugaucaucuauacccuu

SEQ ID NO: 2521407 - RNA, 19 nt, Artificial Sequence
  Description of Artificial Sequence: Synthetic oligonucleotide
gacuggaaacuggucagac

SEQ ID NO: 2521408 - RNA, 19 nt, Artificial Sequence
  Description of Artificial Sequence: Synthetic oligonucleotide
accacacuacgggaaagag

SEQ ID NO: 2521409 - RNA, 19 nt, Artificial Sequence
  Description of Artificial Sequence: Synthetic oligonucleotide
cucaucugugagaggauca

SEQ ID NO: 2521410 - RNA, 19 nt, Artificial Sequence
  Description of Artificial Sequence: Synthetic oligonucleotide
agagcugccguaucaucau

SEQ ID NO: 2521411 - RNA, 19 nt, Artificial Sequence
  Description of Artificial Sequence: Synthetic oligonucleotide
ucaagguuggcagcuggaa

SEQ ID NO: 2521412 - RNA, 19 nt, Artificial Sequence
  Description of Artificial Sequence: Synthetic oligonucleotide
ucucggguuggacgguccc

SEQ ID NO: 2521413 - RNA, 19 nt, Artificial Sequence
  Description of Artificial Sequence: Synthetic oligonucleotide
ugggaugggccagugagau

SEQ ID NO: 2521414 - RNA, 19 nt, Artificial Sequence
  Description of Artificial Sequence: Synthetic oligonucleotide
gaggaucaucggcaucaag

SEQ ID NO: 2521415 - RNA, 19 nt, Artificial Sequence
  Description of Artificial Sequence: Synthetic oligonucleotide
ucagaucgaaguguaucau

SEQ ID NO: 2521416 - RNA, 19 nt, Artificial Sequence
  Description of Artificial Sequence: Synthetic oligonucleotide
uaaauccauuauagauaaa

SEQ ID NO: 2521417 - RNA, 19 nt, Artificial Sequence
  Description of Artificial Sequence: Synthetic oligonucleotide
aauucagaucgaaguguau

SEQ ID NO: 2521418 - RNA, 19 nt, Artificial Sequence
  Description of Artificial Sequence: Synthetic oligonucleotide
uaccacacuacgggaaaga

SEQ ID NO: 2521419 - RNA, 19 nt, Artificial Sequence
  Description of Artificial Sequence: Synthetic oligonucleotide
uguauguucucggguugga

SEQ ID NO: 2521420 - RNA, 19 nt, Artificial Sequence
  Description of Artificial Sequence: Synthetic oligonucleotide
ugagaggaucaucggcauc

SEQ ID NO: 2521421 - RNA, 19 nt, Artificial Sequence
  Description of Artificial Sequence: Synthetic oligonucleotide
ucaucugugagaggaucau

SEQ ID NO: 2521422 - RNA, 19 nt, Artificial Sequence
  Description of Artificial Sequence: Synthetic oligonucleotide
gaaacuggucagacucacc

SEQ ID NO: 2521423 - RNA, 19 nt, Artificial Sequence
  Description of Artificial Sequence: Synthetic oligonucleotide
gagaaaguucaaacaggga

SEQ ID NO: 2521424 - RNA, 19 nt, Artificial Sequence
  Description of Artificial Sequence: Synthetic oligonucleotide
cacauaaaacuguacuacu

SEQ ID NO: 2521425 - RNA, 19 nt, Artificial Sequence
  Description of Artificial Sequence: Synthetic oligonucleotide
gaaucuggucuaggcgggg

SEQ ID NO: 2521426 - RNA, 19 nt, Artificial Sequence
  Description of Artificial Sequence: Synthetic oligonucleotide
uucucggguuggacggucc

SEQ ID NO: 2521427 - RNA, 19 nt, Artificial Sequence
  Description of Artificial Sequence: Synthetic oligonucleotide
ucucuccuaaagucacggu

SEQ ID NO: 2521428 - RNA, 19 nt, Artificial Sequence
  Description of Artificial Sequence: Synthetic oligonucleotide
guguaucauuuacaaaucu

SEQ ID NO: 2521429 - RNA, 19 nt, Artificial Sequence
  Description of Artificial Sequence: Synthetic oligonucleotide
gaucgaaguguaucauuua

SEQ ID NO: 2521430 - RNA, 19 nt, Artificial Sequence
  Description of Artificial Sequence: Synthetic oligonucleotide
auaccacacuacgggaaag

SEQ ID NO: 2521431 - RNA, 19 nt, Artificial Sequence
  Description of Artificial Sequence: Synthetic oligonucleotide
ccagugagauugaggaggg

SEQ ID NO: 2521432 - RNA, 19 nt, Artificial Sequence
  Description of Artificial Sequence: Synthetic oligonucleotide
gcagauucccuuuucucca

SEQ ID NO: 2521433 - RNA, 19 nt, Artificial Sequence
  Description of Artificial Sequence: Synthetic oligonucleotide
ggaaguaagacuggaaacu

SEQ ID NO: 2521434 - RNA, 19 nt, Artificial Sequence
  Description of Artificial Sequence: Synthetic oligonucleotide
uggucagacucaccucuaa

SEQ ID NO: 2521435 - RNA, 19 nt, Artificial Sequence
  Description of Artificial Sequence: Synthetic oligonucleotide
uuccaagcagauucccuuu

SEQ ID NO: 2521436 - RNA, 19 nt, Artificial Sequence
  Description of Artificial Sequence: Synthetic oligonucleotide
ucgcucuccucuucaaaau

SEQ ID NO: 2521437 - RNA, 19 nt, Artificial Sequence
  Description of Artificial Sequence: Synthetic oligonucleotide
ggaaucuggucuaggcggg

SEQ ID NO: 2521438 - RNA, 19 nt, Artificial Sequence
  Description of Artificial Sequence: Synthetic oligonucleotide
auauuauuccaagcagauu

SEQ ID NO: 2521439 - RNA, 19 nt, Artificial Sequence
  Description of Artificial Sequence: Synthetic oligonucleotide
gucagacucaccucuaaau

SEQ ID NO: 2521440 - RNA, 19 nt, Artificial Sequence
  Description of Artificial Sequence: Synthetic oligonucleotide
aucuggucuaggcggggcu

SEQ ID NO: 2521441 - RNA, 19 nt, Artificial Sequence
  Description of Artificial Sequence: Synthetic oligonucleotide
agcagcucucucucucucu

SEQ ID NO: 2521442 - RNA, 19 nt, Artificial Sequence
  Description of Artificial Sequence: Synthetic oligonucleotide
agacuuuaauuaagcacau

SEQ ID NO: 2521443 - RNA, 19 nt, Artificial Sequence
  Description of Artificial Sequence: Synthetic oligonucleotide
agaagagcugccguaucau

SEQ ID NO: 2521444 - RNA, 19 nt, Artificial Sequence
  Description of Artificial Sequence: Synthetic oligonucleotide
aaguuggccugaggcuggg

SEQ ID NO: 2521445 - RNA, 19 nt, Artificial Sequence
  Description of Artificial Sequence: Synthetic oligonucleotide
aaacgacaucaucguccca

SEQ ID NO: 2521446 - RNA, 19 nt, Artificial Sequence
  Description of Artificial Sequence: Synthetic oligonucleotide
guaagacuggaaacugguc

SEQ ID NO: 2521447 - RNA, 19 nt, Artificial Sequence
  Description of Artificial Sequence: Synthetic oligonucleotide
cuuccucaucugugagagg

SEQ ID NO: 2521448 - RNA, 19 nt, Artificial Sequence
  Description of Artificial Sequence: Synthetic oligonucleotide
ggcggggcuucuuugacac

SEQ ID NO: 2521449 - RNA, 19 nt, Artificial Sequence
  Description of Artificial Sequence: Synthetic oligonucleotide
ucaucgcucuccucuucaa

SEQ ID NO: 2521450 - RNA, 19 nt, Artificial Sequence
  Description of Artificial Sequence: Synthetic oligonucleotide
ucuauacccuuugcacagu

SEQ ID NO: 2521451 - RNA, 19 nt, Artificial Sequence
  Description of Artificial Sequence: Synthetic oligonucleotide
acucucuccuaaagucacg

SEQ ID NO: 2521452 - RNA, 19 nt, Artificial Sequence
  Description of Artificial Sequence: Synthetic oligonucleotide
ccuaaagucacgguuacaa

SEQ ID NO: 2521453 - RNA, 19 nt, Artificial Sequence
  Description of Artificial Sequence: Synthetic oligonucleotide
ucgucccaccuucuuuuaa

SEQ ID NO: 2521454 - RNA, 19 nt, Artificial Sequence
  Description of Artificial Sequence: Synthetic oligonucleotide
agcugccguaucaucauca

SEQ ID NO: 2521455 - RNA, 19 nt, Artificial Sequence
  Description of Artificial Sequence: Synthetic oligonucleotide
agcuggaaucuggucuagg

SEQ ID NO: 2521456 - RNA, 19 nt, Artificial Sequence
  Description of Artificial Sequence: Synthetic oligonucleotide
gauucccuuuucuccauau

SEQ ID NO: 2521457 - RNA, 19 nt, Artificial Sequence
  Description of Artificial Sequence: Synthetic oligonucleotide
cccaaaagucaaauugauc

SEQ ID NO: 2521458 - RNA, 19 nt, Artificial Sequence
  Description of Artificial Sequence: Synthetic oligonucleotide
agagauugagaaaguucaa

SEQ ID NO: 2521459 - RNA, 19 nt, Artificial Sequence
  Description of Artificial Sequence: Synthetic oligonucleotide
acuacgggaaagagauuga

SEQ ID NO: 2521460 - RNA, 19 nt, Artificial Sequence
  Description of Artificial Sequence: Synthetic oligonucleotide
uacccuuugcacaguucuu

SEQ ID NO: 2521461 - RNA, 19 nt, Artificial Sequence
  Description of Artificial Sequence: Synthetic oligonucleotide
cgaaguguaucauuuacaa

SEQ ID NO: 2521462 - RNA, 19 nt, Artificial Sequence
  Description of Artificial Sequence: Synthetic oligonucleotide
agucacgguuacaaccucu

SEQ ID NO: 2521463 - RNA, 19 nt, Artificial Sequence
  Description of Artificial Sequence: Synthetic oligonucleotide
uccuaaagucacgguuaca

SEQ ID NO: 2521464 - RNA, 19 nt, Artificial Sequence
  Description of Artificial Sequence: Synthetic oligonucleotide
guauguucucggguuggac

SEQ ID NO: 2521465 - RNA, 19 nt, Artificial Sequence
  Description of Artificial Sequence: Synthetic oligonucleotide
aucaucgucccaccuucuu

SEQ ID NO: 2521466 - RNA, 19 nt, Artificial Sequence
  Description of Artificial Sequence: Synthetic oligonucleotide
cuaggcggggcuucuuuga

SEQ ID NO: 2521467 - RNA, 19 nt, Artificial Sequence
  Description of Artificial Sequence: Synthetic oligonucleotide
gacaucaucgucccaccuu

SEQ ID NO: 2521468 - RNA, 19 nt, Artificial Sequence
  Description of Artificial Sequence: Synthetic oligonucleotide
guuuccacucagaauauuu

SEQ ID NO: 2521469 - RNA, 19 nt, Artificial Sequence
  Description of Artificial Sequence: Synthetic oligonucleotide
agacuggaaacuggucaga

SEQ ID NO: 2521470 - RNA, 19 nt, Artificial Sequence
  Description of Artificial Sequence: Synthetic oligonucleotide
ggcuucuuugacacugaag

SEQ ID NO: 2521471 - RNA, 19 nt, Artificial Sequence
  Description of Artificial Sequence: Synthetic oligonucleotide
acccuuugcacaguucuua

SEQ ID NO: 2521472 - RNA, 19 nt, Artificial Sequence
  Description of Artificial Sequence: Synthetic oligonucleotide
ccacucagaauauuuucca

SEQ ID NO: 2521473 - RNA, 19 nt, Artificial Sequence
  Description of Artificial Sequence: Synthetic oligonucleotide
uuuucccuugcagcagcuc

SEQ ID NO: 2521474 - RNA, 19 nt, Artificial Sequence
  Description of Artificial Sequence: Synthetic oligonucleotide
cuuccaacucucuccuaaa

SEQ ID NO: 2521475 - RNA, 19 nt, Artificial Sequence
  Description of Artificial Sequence: Synthetic oligonucleotide
caucugugagaggaucauc

SEQ ID NO: 2521476 - RNA, 19 nt, Artificial Sequence
  Description of Artificial Sequence: Synthetic oligonucleotide
cucucucucucuuccaacu

SEQ ID NO: 2521477 - RNA, 19 nt, Artificial Sequence
  Description of Artificial Sequence: Synthetic oligonucleotide
aucaagguuggcagcugga

SEQ ID NO: 2521478 - RNA, 19 nt, Artificial Sequence
  Description of Artificial Sequence: Synthetic oligonucleotide
aggcggggcuucuuugaca

SEQ ID NO: 2521479 - RNA, 19 nt, Artificial Sequence
  Description of Artificial Sequence: Synthetic oligonucleotide
ucccuugcagcagcucucu

SEQ ID NO: 2521480 - RNA, 19 nt, Artificial Sequence
  Description of Artificial Sequence: Synthetic oligonucleotide
guucuuaaaacgacaucau

SEQ ID NO: 2521481 - RNA, 19 nt, Artificial Sequence
  Description of Artificial Sequence: Synthetic oligonucleotide
cuuuugucuuucuucugau

SEQ ID NO: 2521482 - RNA, 19 nt, Artificial Sequence
  Description of Artificial Sequence: Synthetic oligonucleotide
cucuccuaaagucacgguu

SEQ ID NO: 2521483 - RNA, 19 nt, Artificial Sequence
  Description of Artificial Sequence: Synthetic oligonucleotide
caucaucgcucuccucuuc

SEQ ID NO: 2521484 - RNA, 19 nt, Artificial Sequence
  Description of Artificial Sequence: Synthetic oligonucleotide
gccguaucaucaucaucgc

SEQ ID NO: 2521485 - RNA, 19 nt, Artificial Sequence
  Description of Artificial Sequence: Synthetic oligonucleotide
ggccagugagauugaggag

SEQ ID NO: 2521486 - RNA, 19 nt, Artificial Sequence
  Description of Artificial Sequence: Synthetic oligonucleotide
cucuucaggggcauccugu

SEQ ID NO: 2521487 - RNA, 19 nt, Artificial Sequence
  Description of Artificial Sequence: Synthetic oligonucleotide
gacuuuaauuaagcacaua

SEQ ID NO: 2521488 - RNA, 19 nt, Artificial Sequence
  Description of Artificial Sequence: Synthetic oligonucleotide
cucucucucucucuuccaa

SEQ ID NO: 2521489 - RNA, 19 nt, Artificial Sequence
  Description of Artificial Sequence: Synthetic oligonucleotide
gaagaggaaguuguauguu

SEQ ID NO: 2521490 - RNA, 19 nt, Artificial Sequence
  Description of Artificial Sequence: Synthetic oligonucleotide
caucaucaucgcucuccuc

SEQ ID NO: 2521491 - RNA, 19 nt, Artificial Sequence
  Description of Artificial Sequence: Synthetic oligonucleotide
ucggguuggacggucccua

SEQ ID NO: 2521492 - RNA, 19 nt, Artificial Sequence
  Description of Artificial Sequence: Synthetic oligonucleotide
uguucucggguuggacggu

SEQ ID NO: 2521493 - RNA, 19 nt, Artificial Sequence
  Description of Artificial Sequence: Synthetic oligonucleotide
cugggaugggccagugaga

SEQ ID NO: 2521494 - RNA, 19 nt, Artificial Sequence
  Description of Artificial Sequence: Synthetic oligonucleotide
guuggccugaggcugggau

SEQ ID NO: 2521495 - RNA, 19 nt, Artificial Sequence
  Description of Artificial Sequence: Synthetic oligonucleotide
augggccagugagauugag

SEQ ID NO: 2521496 - RNA, 19 nt, Artificial Sequence
  Description of Artificial Sequence: Synthetic oligonucleotide
gcucugcaagaagagcugc

SEQ ID NO: 2521497 - RNA, 19 nt, Artificial Sequence
  Description of Artificial Sequence: Synthetic oligonucleotide
cagugagauugaggagggg

SEQ ID NO: 2521498 - RNA, 19 nt, Artificial Sequence
  Description of Artificial Sequence: Synthetic oligonucleotide
cagcagcucucucucucuc

SEQ ID NO: 2521499 - RNA, 19 nt, Artificial Sequence
  Description of Artificial Sequence: Synthetic oligonucleotide
ggucagacucaccucuaaa

SEQ ID NO: 2521500 - RNA, 19 nt, Artificial Sequence
  Description of Artificial Sequence: Synthetic oligonucleotide
cuuugacacugaagaggaa

SEQ ID NO: 2521501 - RNA, 19 nt, Artificial Sequence
  Description of Artificial Sequence: Synthetic oligonucleotide
cagcucucucucucucuuc

SEQ ID NO: 2521502 - RNA, 19 nt, Artificial Sequence
  Description of Artificial Sequence: Synthetic oligonucleotide
cgucccaccuucuuuuaac

SEQ ID NO: 2521503 - RNA, 19 nt, Artificial Sequence
  Description of Artificial Sequence: Synthetic oligonucleotide
ccauucgaauucucucuuc

SEQ ID NO: 2521504 - RNA, 19 nt, Artificial Sequence
  Description of Artificial Sequence: Synthetic oligonucleotide
aucgucccaccuucuuuua

SEQ ID NO: 2521505 - RNA, 19 nt, Artificial Sequence
  Description of Artificial Sequence: Synthetic oligonucleotide
caucgucccaccuucuuuu

SEQ ID NO: 2521506 - RNA, 19 nt, Artificial Sequence
  Description of Artificial Sequence: Synthetic oligonucleotide
caucgcucuccucuucaaa

SEQ ID NO: 2521507 - RNA, 19 nt, Artificial Sequence
  Description of Artificial Sequence: Synthetic oligonucleotide
gugagaggaucaucggcau

SEQ ID NO: 2521508 - RNA, 19 nt, Artificial Sequence
  Description of Artificial Sequence: Synthetic oligonucleotide
gguuggacggucccuauuu

SEQ ID NO: 2521509 - RNA, 19 nt, Artificial Sequence
  Description of Artificial Sequence: Synthetic oligonucleotide
cuguacuacuuaauauauu

SEQ ID NO: 2521510 - RNA, 19 nt, Artificial Sequence
  Description of Artificial Sequence: Synthetic oligonucleotide
ccacacuacgggaaagaga

SEQ ID NO: 2521511 - RNA, 19 nt, Artificial Sequence
  Description of Artificial Sequence: Synthetic oligonucleotide
caagguuggcagcuggaau

SEQ ID NO: 2521512 - RNA, 19 nt, Artificial Sequence
  Description of Artificial Sequence: Synthetic oligonucleotide
cagaucgaaguguaucauu

SEQ ID NO: 2521513 - RNA, 19 nt, Artificial Sequence
  Description of Artificial Sequence: Synthetic oligonucleotide
caccuucuuuuaaccuuga

SEQ ID NO: 2521514 - RNA, 19 nt, Artificial Sequence
  Description of Artificial Sequence: Synthetic oligonucleotide
cugcaagaagagcugccgu

SEQ ID NO: 2521515 - RNA, 19 nt, Artificial Sequence
  Description of Artificial Sequence: Synthetic oligonucleotide
gaugggccagugagauuga

SEQ ID NO: 2521516 - RNA, 19 nt, Artificial Sequence
  Description of Artificial Sequence: Synthetic oligonucleotide
cccuuuucuccauauuaaa

SEQ ID NO: 2521517 - RNA, 19 nt, Artificial Sequence
  Description of Artificial Sequence: Synthetic oligonucleotide
guucucggguuggacgguc

SEQ ID NO: 2521518 - RNA, 19 nt, Artificial Sequence
  Description of Artificial Sequence: Synthetic oligonucleotide
acucaccucuaaauccauu

SEQ ID NO: 2521519 - RNA, 19 nt, Artificial Sequence
  Description of Artificial Sequence: Synthetic oligonucleotide
ggcaucaagguuggcagcu

SEQ ID NO: 2521520 - RNA, 19 nt, Artificial Sequence
  Description of Artificial Sequence: Synthetic oligonucleotide
cgguuacaaccucuucagg

SEQ ID NO: 2521521 - RNA, 19 nt, Artificial Sequence
  Description of Artificial Sequence: Synthetic oligonucleotide
cuggucagacucaccucua

SEQ ID NO: 2521522 - RNA, 19 nt, Artificial Sequence
  Description of Artificial Sequence: Synthetic oligonucleotide
cuauacccuuugcacaguu

SEQ ID NO: 2521523 - RNA, 19 nt, Artificial Sequence
  Description of Artificial Sequence: Synthetic oligonucleotide
gcaucaagguuggcagcug

SEQ ID NO: 2521524 - RNA, 19 nt, Artificial Sequence
  Description of Artificial Sequence: Synthetic oligonucleotide
guuggacggucccuauuuu

SEQ ID NO: 2521525 - RNA, 19 nt, Artificial Sequence
  Description of Artificial Sequence: Synthetic oligonucleotide
cuucaggggcauccugugu

SEQ ID NO: 2521526 - RNA, 19 nt, Artificial Sequence
  Description of Artificial Sequence: Synthetic oligonucleotide
gucacgguuacaaccucuu

SEQ ID NO: 2521527 - RNA, 19 nt, Artificial Sequence
  Description of Artificial Sequence: Synthetic oligonucleotide
gcucucucucucucuucca

SEQ ID NO: 2521528 - RNA, 19 nt, Artificial Sequence
  Description of Artificial Sequence: Synthetic oligonucleotide
gacucaccucuaaauccau

SEQ ID NO: 2521529 - RNA, 19 nt, Artificial Sequence
  Description of Artificial Sequence: Synthetic oligonucleotide
gcaagaagagcugccguau

SEQ ID NO: 2521530 - RNA, 19 nt, Artificial Sequence
  Description of Artificial Sequence: Synthetic oligonucleotide
aguuggccugaggcuggga

SEQ ID NO: 2521531 - RNA, 19 nt, Artificial Sequence
  Description of Artificial Sequence: Synthetic oligonucleotide
caucaucgucccaccuucu

SEQ ID NO: 2521532 - RNA, 19 nt, Artificial Sequence
  Description of Artificial Sequence: Synthetic oligonucleotide
aggcugggaugggccagug

SEQ ID NO: 2521533 - RNA, 19 nt, Artificial Sequence
  Description of Artificial Sequence: Synthetic oligonucleotide
ccccaaaagucaaauugau

SEQ ID NO: 2521534 - RNA, 19 nt, Artificial Sequence
  Description of Artificial Sequence: Synthetic oligonucleotide
cggcaucaagguuggcagc

SEQ ID NO: 2521535 - RNA, 19 nt, Artificial Sequence
  Description of Artificial Sequence: Synthetic oligonucleotide
caucggcaucaagguuggc

SEQ ID NO: 2521536 - RNA, 19 nt, Artificial Sequence
  Description of Artificial Sequence: Synthetic oligonucleotide
gcagcagcucucucucucu

SEQ ID NO: 2521537 - RNA, 19 nt, Artificial Sequence
  Description of Artificial Sequence: Synthetic oligonucleotide
acacuacgggaaagagauu

SEQ ID NO: 2521538 - RNA, 19 nt, Artificial Sequence
  Description of Artificial Sequence: Synthetic oligonucleotide
gaggcugggaugggccagu

SEQ ID NO: 2521539 - RNA, 19 nt, Artificial Sequence
  Description of Artificial Sequence: Synthetic oligonucleotide
gcugccguaucaucaucau

SEQ ID NO: 2521540 - RNA, 19 nt, Artificial Sequence
  Description of Artificial Sequence: Synthetic oligonucleotide
ggggcuucuuugacacuga

SEQ ID NO: 2521541 - RNA, 19 nt, Artificial Sequence
  Description of Artificial Sequence: Synthetic oligonucleotide
ccuuucuggccugcucuuc

SEQ ID NO: 2521542 - RNA, 19 nt, Artificial Sequence
  Description of Artificial Sequence: Synthetic oligonucleotide
ggcugggaugggccaguga

SEQ ID NO: 2521543 - RNA, 19 nt, Artificial Sequence
  Description of Artificial Sequence: Synthetic oligonucleotide
gcagcucucucucucucuu

SEQ ID NO: 2521544 - RNA, 19 nt, Artificial Sequence
  Description of Artificial Sequence: Synthetic oligonucleotide
cucggguuggacggucccu

SEQ ID NO: 2521545 - RNA, 19 nt, Artificial Sequence
  Description of Artificial Sequence: Synthetic oligonucleotide
gguuuccacucagaauauu

SEQ ID NO: 2521546 - RNA, 19 nt, Artificial Sequence
  Description of Artificial Sequence: Synthetic oligonucleotide
ggguuuccacucagaauau

SEQ ID NO: 2521547 - RNA, 19 nt, Artificial Sequence
  Description of Artificial Sequence: Synthetic oligonucleotide
ccguaucaucaucaucgcu

SEQ ID NO: 2521548 - RNA, 19 nt, Artificial Sequence
  Description of Artificial Sequence: Synthetic oligonucleotide
ggguuggacggucccuauu

SEQ ID NO: 2521549 - RNA, 19 nt, Artificial Sequence
  Description of Artificial Sequence: Synthetic oligonucleotide
gggaugggccagugagauu

SEQ ID NO: 2521550 - RNA, 19 nt, Artificial Sequence
  Description of Artificial Sequence: Synthetic oligonucleotide
cgacaucaucgucccaccu

SEQ ID NO: 2521551 - RNA, 19 nt, Artificial Sequence
  Description of Artificial Sequence: Synthetic oligonucleotide
ggucuaggcggggcuucuu

SEQ ID NO: 2521552 - RNA, 19 nt, Artificial Sequence
  Description of Artificial Sequence: Synthetic oligonucleotide
cggguuggacggucccuau

SEQ ID NO: 2521553 - RNA, 19 nt, Artificial Sequence
  Description of Artificial Sequence: Synthetic oligonucleotide
ucuacuaaguacuagcucc

SEQ ID NO: 2521554 - RNA, 19 nt, Artificial Sequence
  Description of Artificial Sequence: Synthetic oligonucleotide
agaaaaggcguaucuaucc

SEQ ID NO: 2521555 - RNA, 19 nt, Artificial Sequence
  Description of Artificial Sequence: Synthetic oligonucleotide
uuugccuuaaucaauggca

SEQ ID NO: 2521556 - RNA, 19 nt, Artificial Sequence
  Description of Artificial Sequence: Synthetic oligonucleotide
uaucuauccaaaacaaggg

SEQ ID NO: 2521557 - RNA, 19 nt, Artificial Sequence
  Description of Artificial Sequence: Synthetic oligonucleotide
guaucuauccaaaacaagg

SEQ ID NO: 2521558 - RNA, 19 nt, Artificial Sequence
  Description of Artificial Sequence: Synthetic oligonucleotide
uccucaaugcuuuuggaag

SEQ ID NO: 2521559 - RNA, 19 nt, Artificial Sequence
  Description of Artificial Sequence: Synthetic oligonucleotide
ugcagaaacaggaucaggu

SEQ ID NO: 2521560 - RNA, 19 nt, Artificial Sequence
  Description of Artificial Sequence: Synthetic oligonucleotide
aauggcacuuguucccagc

SEQ ID NO: 2521561 - RNA, 19 nt, Artificial Sequence
  Description of Artificial Sequence: Synthetic oligonucleotide
ugcaguuuauuuccaaagc

SEQ ID NO: 2521562 - RNA, 19 nt, Artificial Sequence
  Description of Artificial Sequence: Synthetic oligonucleotide
uuugcaccaauccagggaa

SEQ ID NO: 2521563 - RNA, 19 nt, Artificial Sequence
  Description of Artificial Sequence: Synthetic oligonucleotide
ugugaguggaggcuuguag

SEQ ID NO: 2521564 - RNA, 19 nt, Artificial Sequence
  Description of Artificial Sequence: Synthetic oligonucleotide
ugaucuuucggggaaacgc

SEQ ID NO: 2521565 - RNA, 19 nt, Artificial Sequence
  Description of Artificial Sequence: Synthetic oligonucleotide
agcagcucggcucuguggc

SEQ ID NO: 2521566 - RNA, 19 nt, Artificial Sequence
  Description of Artificial Sequence: Synthetic oligonucleotide
ucuuuucuagguaggaacu

SEQ ID NO: 2521567 - RNA, 19 nt, Artificial Sequence
  Description of Artificial Sequence: Synthetic oligonucleotide
aacaggaucaggucaggcu

SEQ ID NO: 2521568 - RNA, 19 nt, Artificial Sequence
  Description of Artificial Sequence: Synthetic oligonucleotide
guuguuugcaccaauccag

SEQ ID NO: 2521569 - RNA, 19 nt, Artificial Sequence
  Description of Artificial Sequence: Synthetic oligonucleotide
aaguacuagcuccuguuga

SEQ ID NO: 2521570 - RNA, 19 nt, Artificial Sequence
  Description of Artificial Sequence: Synthetic oligonucleotide
uuucuagguaggaacucag

SEQ ID NO: 2521571 - RNA, 19 nt, Artificial Sequence
  Description of Artificial Sequence: Synthetic oligonucleotide
aauuguaacugcagaaaca

SEQ ID NO: 2521572 - RNA, 19 nt, Artificial Sequence
  Description of Artificial Sequence: Synthetic oligonucleotide
aggcguaucuauccaaaac

SEQ ID NO: 2521573 - RNA, 19 nt, Artificial Sequence
  Description of Artificial Sequence: Synthetic oligonucleotide
ugguuguuugcaccaaucc

SEQ ID NO: 2521574 - RNA, 19 nt, Artificial Sequence
  Description of Artificial Sequence: Synthetic oligonucleotide
caauuguaacugcagaaac

SEQ ID NO: 2521575 - RNA, 19 nt, Artificial Sequence
  Description of Artificial Sequence: Synthetic oligonucleotide
aacuuugccuuaaucaaug

SEQ ID NO: 2521576 - RNA, 19 nt, Artificial Sequence
  Description of Artificial Sequence: Synthetic oligonucleotide
uaaguacuagcuccuguug

SEQ ID NO: 2521577 - RNA, 19 nt, Artificial Sequence
  Description of Artificial Sequence: Synthetic oligonucleotide
gaagcaucaaccaccuucc

SEQ ID NO: 2521578 - RNA, 19 nt, Artificial Sequence
  Description of Artificial Sequence: Synthetic oligonucleotide
cucauagcgcucgagaccg

SEQ ID NO: 2521579 - RNA, 19 nt, Artificial Sequence
  Description of Artificial Sequence: Synthetic oligonucleotide
ucucauagcgcucgagacc

SEQ ID NO: 2521580 - RNA, 19 nt, Artificial Sequence
  Description of Artificial Sequence: Synthetic oligonucleotide
aaacaagggucacacccug

SEQ ID NO: 2521581 - RNA, 19 nt, Artificial Sequence
  Description of Artificial Sequence: Synthetic oligonucleotide
uguugaacaguggugugag

SEQ ID NO: 2521582 - RNA, 19 nt, Artificial Sequence
  Description of Artificial Sequence: Synthetic oligonucleotide
uucuagguaggaacucagg

SEQ ID NO: 2521583 - RNA, 19 nt, Artificial Sequence
  Description of Artificial Sequence: Synthetic oligonucleotide
gugaguggaggcuuguagg

SEQ ID NO: 2521584 - RNA, 19 nt, Artificial Sequence
  Description of Artificial Sequence: Synthetic oligonucleotide
cuauccaaaacaaggguca

SEQ ID NO: 2521585 - RNA, 19 nt, Artificial Sequence
  Description of Artificial Sequence: Synthetic oligonucleotide
uucggggaaacgcagcagc

SEQ ID NO: 2521586 - RNA, 19 nt, Artificial Sequence
  Description of Artificial Sequence: Synthetic oligonucleotide
acgucugguuguuugcacc

SEQ ID NO: 2521587 - RNA, 19 nt, Artificial Sequence
  Description of Artificial Sequence: Synthetic oligonucleotide
cuuugccuuaaucaauggc

SEQ ID NO: 2521588 - RNA, 19 nt, Artificial Sequence
  Description of Artificial Sequence: Synthetic oligonucleotide
uucaugagcugcuggaaac

SEQ ID NO: 2521589 - RNA, 19 nt, Artificial Sequence
  Description of Artificial Sequence: Synthetic oligonucleotide
aaaaggcguaucuauccaa

SEQ ID NO: 2521590 - RNA, 19 nt, Artificial Sequence
  Description of Artificial Sequence: Synthetic oligonucleotide
uuuauuuccaaagcuccuc

SEQ ID NO: 2521591 - RNA, 19 nt, Artificial Sequence
  Description of Artificial Sequence: Synthetic oligonucleotide
uucuacuaaguacuagcuc

SEQ ID NO: 2521592 - RNA, 19 nt, Artificial Sequence
  Description of Artificial Sequence: Synthetic oligonucleotide
uugaacaguggugugaguc

SEQ ID NO: 2521593 - RNA, 19 nt, Artificial Sequence
  Description of Artificial Sequence: Synthetic oligonucleotide
guaggucucuucuacuaag

SEQ ID NO: 2521594 - RNA, 19 nt, Artificial Sequence
  Description of Artificial Sequence: Synthetic oligonucleotide
aaaacaagggucacacccu

SEQ ID NO: 2521595 - RNA, 19 nt, Artificial Sequence
  Description of Artificial Sequence: Synthetic oligonucleotide
agcaucaaccaccuuccag

SEQ ID NO: 2521596 - RNA, 19 nt, Artificial Sequence
  Description of Artificial Sequence: Synthetic oligonucleotide
ugccgauuucuguugaucu

SEQ ID NO: 2521597 - RNA, 19 nt, Artificial Sequence
  Description of Artificial Sequence: Synthetic oligonucleotide
aguggaggcuuguaggucu

SEQ ID NO: 2521598 - RNA, 19 nt, Artificial Sequence
  Description of Artificial Sequence: Synthetic oligonucleotide
ugaguggaggcuuguaggu

SEQ ID NO: 2521599 - RNA, 19 nt, Artificial Sequence
  Description of Artificial Sequence: Synthetic oligonucleotide
uucucccugccuccuaagg

SEQ ID NO: 2521600 - RNA, 19 nt, Artificial Sequence
  Description of Artificial Sequence: Synthetic oligonucleotide
acuaaguacuagcuccugu

SEQ ID NO: 2521601 - RNA, 19 nt, Artificial Sequence
  Description of Artificial Sequence: Synthetic oligonucleotide
acgaugagcgccccgcgac

SEQ ID NO: 2521602 - RNA, 19 nt, Artificial Sequence
  Description of Artificial Sequence: Synthetic oligonucleotide
gaacucuccccgugcagcg

SEQ ID NO: 2521603 - RNA, 19 nt, Artificial Sequence
  Description of Artificial Sequence: Synthetic oligonucleotide
uccuuggcgcuagugaagg

SEQ ID NO: 2521604 - RNA, 19 nt, Artificial Sequence
  Description of Artificial Sequence: Synthetic oligonucleotide
agucucauagcgcucgaga

SEQ ID NO: 2521605 - RNA, 19 nt, Artificial Sequence
  Description of Artificial Sequence: Synthetic oligonucleotide
uguaggucucuucuacuaa

SEQ ID NO: 2521606 - RNA, 19 nt, Artificial Sequence
  Description of Artificial Sequence: Synthetic oligonucleotide
uuaaucaauggcacuuguu

SEQ ID NO: 2521607 - RNA, 19 nt, Artificial Sequence
  Description of Artificial Sequence: Synthetic oligonucleotide
ucuuucggggaaacgcagc

SEQ ID NO: 2521608 - RNA, 19 nt, Artificial Sequence
  Description of Artificial Sequence: Synthetic oligonucleotide
agaacgguaucugcagugg

SEQ ID NO: 2521609 - RNA, 19 nt, Artificial Sequence
  Description of Artificial Sequence: Synthetic oligonucleotide
cucgagaccgaacucuccc

SEQ ID NO: 2521610 - RNA, 19 nt, Artificial Sequence
  Description of Artificial Sequence: Synthetic oligonucleotide
agcacgaugagcgccccgc

SEQ ID NO: 2521611 - RNA, 19 nt, Artificial Sequence
  Description of Artificial Sequence: Synthetic oligonucleotide
aaauucuccuuggcgcuag

SEQ ID NO: 2521612 - RNA, 19 nt, Artificial Sequence
  Description of Artificial Sequence: Synthetic oligonucleotide
gaucaggucaggcuuggga

SEQ ID NO: 2521613 - RNA, 19 nt, Artificial Sequence
  Description of Artificial Sequence: Synthetic oligonucleotide
cacccggauuucuucaugg

SEQ ID NO: 2521614 - RNA, 19 nt, Artificial Sequence
  Description of Artificial Sequence: Synthetic oligonucleotide
ggcguaucuauccaaaaca

SEQ ID NO: 2521615 - RNA, 19 nt, Artificial Sequence
  Description of Artificial Sequence: Synthetic oligonucleotide
aguacuagcuccuguugaa

SEQ ID NO: 2521616 - RNA, 19 nt, Artificial Sequence
  Description of Artificial Sequence: Synthetic oligonucleotide
cccuccagcacgaugagcg

SEQ ID NO: 2521617 - RNA, 19 nt, Artificial Sequence
  Description of Artificial Sequence: Synthetic oligonucleotide
guuugcaccaauccaggga

SEQ ID NO: 2521618 - RNA, 19 nt, Artificial Sequence
  Description of Artificial Sequence: Synthetic oligonucleotide
uagcgcucgagaccgaacu

SEQ ID NO: 2521619 - RNA, 19 nt, Artificial Sequence
  Description of Artificial Sequence: Synthetic oligonucleotide
uaggucucuucuacuaagu

SEQ ID NO: 2521620 - RNA, 19 nt, Artificial Sequence
  Description of Artificial Sequence: Synthetic oligonucleotide
acaagggucacacccuggu

SEQ ID NO: 2521621 - RNA, 19 nt, Artificial Sequence
  Description of Artificial Sequence: Synthetic oligonucleotide
ggggaaacgcagcagcucg

SEQ ID NO: 2521622 - RNA, 19 nt, Artificial Sequence
  Description of Artificial Sequence: Synthetic oligonucleotide
cagaaaaggcguaucuauc

SEQ ID NO: 2521623 - RNA, 19 nt, Artificial Sequence
  Description of Artificial Sequence: Synthetic oligonucleotide
cucagguugugaguggagg

SEQ ID NO: 2521624 - RNA, 19 nt, Artificial Sequence
  Description of Artificial Sequence: Synthetic oligonucleotide
acucuccccgugcagcggc

SEQ ID NO: 2521625 - RNA, 19 nt, Artificial Sequence
  Description of Artificial Sequence: Synthetic oligonucleotide
gucucauagcgcucgagac

SEQ ID NO: 2521626 - RNA, 19 nt, Artificial Sequence
  Description of Artificial Sequence: Synthetic oligonucleotide
guucccagcgauuugcaga

SEQ ID NO: 2521627 - RNA, 19 nt, Artificial Sequence
  Description of Artificial Sequence: Synthetic oligonucleotide
acccugguucaacuuugcc

SEQ ID NO: 2521628 - RNA, 19 nt, Artificial Sequence
  Description of Artificial Sequence: Synthetic oligonucleotide
aaggcguaucuauccaaaa

SEQ ID NO: 2521629 - RNA, 19 nt, Artificial Sequence
  Description of Artificial Sequence: Synthetic oligonucleotide
auccucaaugcuuuuggaa

SEQ ID NO: 2521630 - RNA, 19 nt, Artificial Sequence
  Description of Artificial Sequence: Synthetic oligonucleotide
uugaucuuucggggaaacg

SEQ ID NO: 2521631 - RNA, 19 nt, Artificial Sequence
  Description of Artificial Sequence: Synthetic oligonucleotide
cacggagugguccuccagg

SEQ ID NO: 2521632 - RNA, 19 nt, Artificial Sequence
  Description of Artificial Sequence: Synthetic oligonucleotide
cacagcgccgucaccagcc

SEQ ID NO: 2521633 - RNA, 19 nt, Artificial Sequence
  Description of Artificial Sequence: Synthetic oligonucleotide
aaaggcguaucuauccaaa

SEQ ID NO: 2521634 - RNA, 19 nt, Artificial Sequence
  Description of Artificial Sequence: Synthetic oligonucleotide
aucaaccaccuuccaguuc

SEQ ID NO: 2521635 - RNA, 19 nt, Artificial Sequence
  Description of Artificial Sequence: Synthetic oligonucleotide
auggcguccucagagagca

SEQ ID NO: 2521636 - RNA, 19 nt, Artificial Sequence
  Description of Artificial Sequence: Synthetic oligonucleotide
agucccagucucauagcgc

SEQ ID NO: 2521637 - RNA, 19 nt, Artificial Sequence
  Description of Artificial Sequence: Synthetic oligonucleotide
gaaacaggaucaggucagg

SEQ ID NO: 2521638 - RNA, 19 nt, Artificial Sequence
  Description of Artificial Sequence: Synthetic oligonucleotide
gaaggcccacgucugguug

SEQ ID NO: 2521639 - RNA, 19 nt, Artificial Sequence
  Description of Artificial Sequence: Synthetic oligonucleotide
ggaacucaggagcuugccg

SEQ ID NO: 2521640 - RNA, 19 nt, Artificial Sequence
  Description of Artificial Sequence: Synthetic oligonucleotide
uuggcgcuagugaaggcaa

SEQ ID NO: 2521641 - RNA, 19 nt, Artificial Sequence
  Description of Artificial Sequence: Synthetic oligonucleotide
gagucuucucccugccucc

SEQ ID NO: 2521642 - RNA, 19 nt, Artificial Sequence
  Description of Artificial Sequence: Synthetic oligonucleotide
acgguaucugcaguggaag

SEQ ID NO: 2521643 - RNA, 19 nt, Artificial Sequence
  Description of Artificial Sequence: Synthetic oligonucleotide
guaucugcaguggaagcug

SEQ ID NO: 2521644 - RNA, 19 nt, Artificial Sequence
  Description of Artificial Sequence: Synthetic oligonucleotide
guccacgcccuccagcacg

SEQ ID NO: 2521645 - RNA, 19 nt, Artificial Sequence
  Description of Artificial Sequence: Synthetic oligonucleotide
gaucuuucggggaaacgca

SEQ ID NO: 2521646 - RNA, 19 nt, Artificial Sequence
  Description of Artificial Sequence: Synthetic oligonucleotide
guaggaacucaggagcuug

SEQ ID NO: 2521647 - RNA, 19 nt, Artificial Sequence
  Description of Artificial Sequence: Synthetic oligonucleotide
aacucaggagcuugccgau

SEQ ID NO: 2521648 - RNA, 19 nt, Artificial Sequence
  Description of Artificial Sequence: Synthetic oligonucleotide
aacaagggucacacccugg

SEQ ID NO: 2521649 - RNA, 19 nt, Artificial Sequence
  Description of Artificial Sequence: Synthetic oligonucleotide
gauuugcagagaagagcag

SEQ ID NO: 2521650 - RNA, 19 nt, Artificial Sequence
  Description of Artificial Sequence: Synthetic oligonucleotide
ucaugagcugcuggaaaca

SEQ ID NO: 2521651 - RNA, 19 nt, Artificial Sequence
  Description of Artificial Sequence: Synthetic oligonucleotide
cuccuaaggccccaagaac

SEQ ID NO: 2521652 - RNA, 19 nt, Artificial Sequence
  Description of Artificial Sequence: Synthetic oligonucleotide
ucgagaccgaacucucccc

SEQ ID NO: 2521653 - RNA, 19 nt, Artificial Sequence
  Description of Artificial Sequence: Synthetic oligonucleotide
cugguuguuugcaccaauc

SEQ ID NO: 2521654 - RNA, 19 nt, Artificial Sequence
  Description of Artificial Sequence: Synthetic oligonucleotide
ugggaaggcccacgucugg

SEQ ID NO: 2521655 - RNA, 19 nt, Artificial Sequence
  Description of Artificial Sequence: Synthetic oligonucleotide
ugcagcggcguccagcaau

SEQ ID NO: 2521656 - RNA, 19 nt, Artificial Sequence
  Description of Artificial Sequence: Synthetic oligonucleotide
caaagcuccuccaguggac

SEQ ID NO: 2521657 - RNA, 19 nt, Artificial Sequence
  Description of Artificial Sequence: Synthetic oligonucleotide
ugccuuaaucaauggcacu

SEQ ID NO: 2521658 - RNA, 19 nt, Artificial Sequence
  Description of Artificial Sequence: Synthetic oligonucleotide
uccaggucuguuuucuuuu

SEQ ID NO: 2521659 - RNA, 19 nt, Artificial Sequence
  Description of Artificial Sequence: Synthetic oligonucleotide
agcgauuugcagagaagag

SEQ ID NO: 2521660 - RNA, 19 nt, Artificial Sequence
  Description of Artificial Sequence: Synthetic oligonucleotide
aaggcccacgucugguugu

SEQ ID NO: 2521661 - RNA, 19 nt, Artificial Sequence
  Description of Artificial Sequence: Synthetic oligonucleotide
agggucacacccugguuca

SEQ ID NO: 2521662 - RNA, 19 nt, Artificial Sequence
  Description of Artificial Sequence: Synthetic oligonucleotide
ucggggaaacgcagcagcu

SEQ ID NO: 2521663 - RNA, 19 nt, Artificial Sequence
  Description of Artificial Sequence: Synthetic oligonucleotide
ccaagaacgguaucugcag

SEQ ID NO: 2521664 - RNA, 19 nt, Artificial Sequence
  Description of Artificial Sequence: Synthetic oligonucleotide
aacgguaucugcaguggaa

SEQ ID NO: 2521665 - RNA, 19 nt, Artificial Sequence
  Description of Artificial Sequence: Synthetic oligonucleotide
gcuuguaggucucuucuac

SEQ ID NO: 2521666 - RNA, 19 nt, Artificial Sequence
  Description of Artificial Sequence: Synthetic oligonucleotide
uuucggggaaacgcagcag

SEQ ID NO: 2521667 - RNA, 19 nt, Artificial Sequence
  Description of Artificial Sequence: Synthetic oligonucleotide
cuugggaaggcccacgucu

SEQ ID NO: 2521668 - RNA, 19 nt, Artificial Sequence
  Description of Artificial Sequence: Synthetic oligonucleotide
aagagcaggugcacggagu

SEQ ID NO: 2521669 - RNA, 19 nt, Artificial Sequence
  Description of Artificial Sequence: Synthetic oligonucleotide
agcgcucgagaccgaacuc

SEQ ID NO: 2521670 - RNA, 19 nt, Artificial Sequence
  Description of Artificial Sequence: Synthetic oligonucleotide
cuuucggggaaacgcagca

SEQ ID NO: 2521671 - RNA, 19 nt, Artificial Sequence
  Description of Artificial Sequence: Synthetic oligonucleotide
cuucuacuaaguacuagcu

SEQ ID NO: 2521672 - RNA, 19 nt, Artificial Sequence
  Description of Artificial Sequence: Synthetic oligonucleotide
agaccgaacucuccccgug

SEQ ID NO: 2521673 - RNA, 19 nt, Artificial Sequence
  Description of Artificial Sequence: Synthetic oligonucleotide
ugcguggucuugccggcgc

SEQ ID NO: 2521674 - RNA, 19 nt, Artificial Sequence
  Description of Artificial Sequence: Synthetic oligonucleotide
gcgauuugcagagaagagc

SEQ ID NO: 2521675 - RNA, 19 nt, Artificial Sequence
  Description of Artificial Sequence: Synthetic oligonucleotide
gcggauggcguccucagag

SEQ ID NO: 2521676 - RNA, 19 nt, Artificial Sequence
  Description of Artificial Sequence: Synthetic oligonucleotide
ugcaccaauccagggaaaa

SEQ ID NO: 2521677 - RNA, 19 nt, Artificial Sequence
  Description of Artificial Sequence: Synthetic oligonucleotide
uacuaaguacuagcuccug

SEQ ID NO: 2521678 - RNA, 19 nt, Artificial Sequence
  Description of Artificial Sequence: Synthetic oligonucleotide
gaacgguaucugcagugga

SEQ ID NO: 2521679 - RNA, 19 nt, Artificial Sequence
  Description of Artificial Sequence: Synthetic oligonucleotide
caggucaggcuugggaagg

SEQ ID NO: 2521680 - RNA, 19 nt, Artificial Sequence
  Description of Artificial Sequence: Synthetic oligonucleotide
agcaggugcacggaguggu

SEQ ID NO: 2521681 - RNA, 19 nt, Artificial Sequence
  Description of Artificial Sequence: Synthetic oligonucleotide
gaccgaacucuccccgugc

SEQ ID NO: 2521682 - RNA, 19 nt, Artificial Sequence
  Description of Artificial Sequence: Synthetic oligonucleotide
uggaaagucccagucucau

SEQ ID NO: 2521683 - RNA, 19 nt, Artificial Sequence
  Description of Artificial Sequence: Synthetic oligonucleotide
ggauggcguccucagagag

SEQ ID NO: 2521684 - RNA, 19 nt, Artificial Sequence
  Description of Artificial Sequence: Synthetic oligonucleotide
aucuuucggggaaacgcag

SEQ ID NO: 2521685 - RNA, 19 nt, Artificial Sequence
  Description of Artificial Sequence: Synthetic oligonucleotide
auggacauccucaaugcuu

SEQ ID NO: 2521686 - RNA, 19 nt, Artificial Sequence
  Description of Artificial Sequence: Synthetic oligonucleotide
caugagcugcuggaaacac

SEQ ID NO: 2521687 - RNA, 19 nt, Artificial Sequence
  Description of Artificial Sequence: Synthetic oligonucleotide
gccgucaccagccugcggc

SEQ ID NO: 2521688 - RNA, 19 nt, Artificial Sequence
  Description of Artificial Sequence: Synthetic oligonucleotide
acggagugguccuccaggu

SEQ ID NO: 2521689 - RNA, 19 nt, Artificial Sequence
  Description of Artificial Sequence: Synthetic oligonucleotide
aacucuccccgugcagcgg

SEQ ID NO: 2521690 - RNA, 19 nt, Artificial Sequence
  Description of Artificial Sequence: Synthetic oligonucleotide
gcaguuuauuuccaaagcu

SEQ ID NO: 2521691 - RNA, 19 nt, Artificial Sequence
  Description of Artificial Sequence: Synthetic oligonucleotide
aggucucuucuacuaagua

SEQ ID NO: 2521692 - RNA, 19 nt, Artificial Sequence
  Description of Artificial Sequence: Synthetic oligonucleotide
gugaaggcaaccccagaaa

SEQ ID NO: 2521693 - RNA, 19 nt, Artificial Sequence
  Description of Artificial Sequence: Synthetic oligonucleotide
cguaucuauccaaaacaag

SEQ ID NO: 2521694 - RNA, 19 nt, Artificial Sequence
  Description of Artificial Sequence: Synthetic oligonucleotide
cuuggcgcuagugaaggca

SEQ ID NO: 2521695 - RNA, 19 nt, Artificial Sequence
  Description of Artificial Sequence: Synthetic oligonucleotide
agcggcguccagcaauugu

SEQ ID NO: 2521696 - RNA, 19 nt, Artificial Sequence
  Description of Artificial Sequence: Synthetic oligonucleotide
cacgucugguuguuugcac

SEQ ID NO: 2521697 - RNA, 19 nt, Artificial Sequence
  Description of Artificial Sequence: Synthetic oligonucleotide
uguugaucuuucggggaaa

SEQ ID NO: 2521698 - RNA, 19 nt, Artificial Sequence
  Description of Artificial Sequence: Synthetic oligonucleotide
ggcucuguggcccgcggcg

SEQ ID NO: 2521699 - RNA, 19 nt, Artificial Sequence
  Description of Artificial Sequence: Synthetic oligonucleotide
gaugagcgccccgcgacgc

SEQ ID NO: 2521700 - RNA, 19 nt, Artificial Sequence
  Description of Artificial Sequence: Synthetic oligonucleotide
auagcgcucgagaccgaac

SEQ ID NO: 2521701 - RNA, 19 nt, Artificial Sequence
  Description of Artificial Sequence: Synthetic oligonucleotide
gagcacccggauuucuuca

SEQ ID NO: 2521702 - RNA, 19 nt, Artificial Sequence
  Description of Artificial Sequence: Synthetic oligonucleotide
uccacgcccuccagcacga

SEQ ID NO: 2521703 - RNA, 19 nt, Artificial Sequence
  Description of Artificial Sequence: Synthetic oligonucleotide
accgaacucuccccgugca

SEQ ID NO: 2521704 - RNA, 19 nt, Artificial Sequence
  Description of Artificial Sequence: Synthetic oligonucleotide
caauggcacuuguucccag

SEQ ID NO: 2521705 - RNA, 19 nt, Artificial Sequence
  Description of Artificial Sequence: Synthetic oligonucleotide
ccuccaguggacucugugc

SEQ ID NO: 2521706 - RNA, 19 nt, Artificial Sequence
  Description of Artificial Sequence: Synthetic oligonucleotide
cuaaguacuagcuccuguu

SEQ ID NO: 2521707 - RNA, 19 nt, Artificial Sequence
  Description of Artificial Sequence: Synthetic oligonucleotide
acgcccuccagcacgauga

SEQ ID NO: 2521708 - RNA, 19 nt, Artificial Sequence
  Description of Artificial Sequence: Synthetic oligonucleotide
acacccugguucaacuuug

SEQ ID NO: 2521709 - RNA, 19 nt, Artificial Sequence
  Description of Artificial Sequence: Synthetic oligonucleotide
ugguccuccaggucuguuu

SEQ ID NO: 2521710 - RNA, 19 nt, Artificial Sequence
  Description of Artificial Sequence: Synthetic oligonucleotide
aggugcacggagugguccu

SEQ ID NO: 2521711 - RNA, 19 nt, Artificial Sequence
  Description of Artificial Sequence: Synthetic oligonucleotide
cuugccggcgcgguccacg

SEQ ID NO: 2521712 - RNA, 19 nt, Artificial Sequence
  Description of Artificial Sequence: Synthetic oligonucleotide
ucggcucuguggcccgcgg

SEQ ID NO: 2521713 - RNA, 19 nt, Artificial Sequence
  Description of Artificial Sequence: Synthetic oligonucleotide
aaggccccaagaacgguau

SEQ ID NO: 2521714 - RNA, 19 nt, Artificial Sequence
  Description of Artificial Sequence: Synthetic oligonucleotide
cccugcguggucuugccgg

SEQ ID NO: 2521715 - RNA, 19 nt, Artificial Sequence
  Description of Artificial Sequence: Synthetic oligonucleotide
acccggauuucuucaugga

SEQ ID NO: 2521716 - RNA, 19 nt, Artificial Sequence
  Description of Artificial Sequence: Synthetic oligonucleotide
cuuaaucaauggcacuugu

SEQ ID NO: 2521717 - RNA, 19 nt, Artificial Sequence
  Description of Artificial Sequence: Synthetic oligonucleotide
guacuagcuccuguugaac

SEQ ID NO: 2521718 - RNA, 19 nt, Artificial Sequence
  Description of Artificial Sequence: Synthetic oligonucleotide
gagcaggugcacggagugg

SEQ ID NO: 2521719 - RNA, 19 nt, Artificial Sequence
  Description of Artificial Sequence: Synthetic oligonucleotide
cucaaugcuuuuggaagca

SEQ ID NO: 2521720 - RNA, 19 nt, Artificial Sequence
  Description of Artificial Sequence: Synthetic oligonucleotide
ugguucaacuuugccuuaa

SEQ ID NO: 2521721 - RNA, 19 nt, Artificial Sequence
  Description of Artificial Sequence: Synthetic oligonucleotide
cacccugguucaacuuugc

SEQ ID NO: 2521722 - RNA, 19 nt, Artificial Sequence
  Description of Artificial Sequence: Synthetic oligonucleotide
cuguugaacagugguguga

SEQ ID NO: 2521723 - RNA, 19 nt, Artificial Sequence
  Description of Artificial Sequence: Synthetic oligonucleotide
ugccuccuaaggccccaag

SEQ ID NO: 2521724 - RNA, 19 nt, Artificial Sequence
  Description of Artificial Sequence: Synthetic oligonucleotide
ggagugguccuccaggucu

SEQ ID NO: 2521725 - RNA, 19 nt, Artificial Sequence
  Description of Artificial Sequence: Synthetic oligonucleotide
cuacuaaguacuagcuccu

SEQ ID NO: 2521726 - RNA, 19 nt, Artificial Sequence
  Description of Artificial Sequence: Synthetic oligonucleotide
guuuauuuccaaagcuccu

SEQ ID NO: 2521727 - RNA, 19 nt, Artificial Sequence
  Description of Artificial Sequence: Synthetic oligonucleotide
augagcgccccgcgacgcg

SEQ ID NO: 2521728 - RNA, 19 nt, Artificial Sequence
  Description of Artificial Sequence: Synthetic oligonucleotide
gaguggaggcuuguagguc

SEQ ID NO: 2521729 - RNA, 19 nt, Artificial Sequence
  Description of Artificial Sequence: Synthetic oligonucleotide
ugcacggagugguccucca

SEQ ID NO: 2521730 - RNA, 19 nt, Artificial Sequence
  Description of Artificial Sequence: Synthetic oligonucleotide
uugcaccaauccagggaaa

SEQ ID NO: 2521731 - RNA, 19 nt, Artificial Sequence
  Description of Artificial Sequence: Synthetic oligonucleotide
agcuccuguugaacagugg

SEQ ID NO: 2521732 - RNA, 19 nt, Artificial Sequence
  Description of Artificial Sequence: Synthetic oligonucleotide
agcacccggauuucuucau

SEQ ID NO: 2521733 - RNA, 19 nt, Artificial Sequence
  Description of Artificial Sequence: Synthetic oligonucleotide
ggcguccucagagagcacc

SEQ ID NO: 2521734 - RNA, 19 nt, Artificial Sequence
  Description of Artificial Sequence: Synthetic oligonucleotide
cccggauuucuucauggac

SEQ ID NO: 2521735 - RNA, 19 nt, Artificial Sequence
  Description of Artificial Sequence: Synthetic oligonucleotide
cccagucucauagcgcucg

SEQ ID NO: 2521736 - RNA, 19 nt, Artificial Sequence
  Description of Artificial Sequence: Synthetic oligonucleotide
uggcgcuagugaaggcaac

SEQ ID NO: 2521737 - RNA, 19 nt, Artificial Sequence
  Description of Artificial Sequence: Synthetic oligonucleotide
ccagcgauuugcagagaag

SEQ ID NO: 2521738 - RNA, 19 nt, Artificial Sequence
  Description of Artificial Sequence: Synthetic oligonucleotide
aggccccaagaacgguauc

SEQ ID NO: 2521739 - RNA, 19 nt, Artificial Sequence
  Description of Artificial Sequence: Synthetic oligonucleotide
uugccggcgcgguccacgc

SEQ ID NO: 2521740 - RNA, 19 nt, Artificial Sequence
  Description of Artificial Sequence: Synthetic oligonucleotide
ggcgcuagugaaggcaacc

SEQ ID NO: 2521741 - RNA, 19 nt, Artificial Sequence
  Description of Artificial Sequence: Synthetic oligonucleotide
cagcucggcucuguggccc

SEQ ID NO: 2521742 - RNA, 19 nt, Artificial Sequence
  Description of Artificial Sequence: Synthetic oligonucleotide
ucugugcagcacugcggau

SEQ ID NO: 2521743 - RNA, 19 nt, Artificial Sequence
  Description of Artificial Sequence: Synthetic oligonucleotide
ucauagcgcucgagaccga

SEQ ID NO: 2521744 - RNA, 19 nt, Artificial Sequence
  Description of Artificial Sequence: Synthetic oligonucleotide
gaaacgcagcagcucggcu

SEQ ID NO: 2521745 - RNA, 19 nt, Artificial Sequence
  Description of Artificial Sequence: Synthetic oligonucleotide
uccccgugcagcggcgucc

SEQ ID NO: 2521746 - RNA, 19 nt, Artificial Sequence
  Description of Artificial Sequence: Synthetic oligonucleotide
gcguaucuauccaaaacaa

SEQ ID NO: 2521747 - RNA, 19 nt, Artificial Sequence
  Description of Artificial Sequence: Synthetic oligonucleotide
gcccacgucugguuguuug

SEQ ID NO: 2521748 - RNA, 19 nt, Artificial Sequence
  Description of Artificial Sequence: Synthetic oligonucleotide
ccccaagaacgguaucugc

SEQ ID NO: 2521749 - RNA, 19 nt, Artificial Sequence
  Description of Artificial Sequence: Synthetic oligonucleotide
cagucucauagcgcucgag

SEQ ID NO: 2521750 - RNA, 19 nt, Artificial Sequence
  Description of Artificial Sequence: Synthetic oligonucleotide
gguaucugcaguggaagcu

SEQ ID NO: 2521751 - RNA, 19 nt, Artificial Sequence
  Description of Artificial Sequence: Synthetic oligonucleotide
ugagcgccccgcgacgcga

SEQ ID NO: 2521752 - RNA, 19 nt, Artificial Sequence
  Description of Artificial Sequence: Synthetic oligonucleotide
cgagaccgaacucuccccg

SEQ ID NO: 2521753 - RNA, 19 nt, Artificial Sequence
  Description of Artificial Sequence: Synthetic oligonucleotide
caguggacucugugcagca

SEQ ID NO: 2521754 - RNA, 19 nt, Artificial Sequence
  Description of Artificial Sequence: Synthetic oligonucleotide
gcguccagcaauuguaacu

SEQ ID NO: 2521755 - RNA, 19 nt, Artificial Sequence
  Description of Artificial Sequence: Synthetic oligonucleotide
cccacgucugguuguuugc

SEQ ID NO: 2521756 - RNA, 19 nt, Artificial Sequence
  Description of Artificial Sequence: Synthetic oligonucleotide
gggaaacgcagcagcucgg

SEQ ID NO: 2521757 - RNA, 19 nt, Artificial Sequence
  Description of Artificial Sequence: Synthetic oligonucleotide
uggucuugccggcgcgguc

SEQ ID NO: 2521758 - RNA, 19 nt, Artificial Sequence
  Description of Artificial Sequence: Synthetic oligonucleotide
acagcgccgucaccagccu

SEQ ID NO: 2521759 - RNA, 19 nt, Artificial Sequence
  Description of Artificial Sequence: Synthetic oligonucleotide
ggcguccagcaauuguaac

SEQ ID NO: 2521760 - RNA, 19 nt, Artificial Sequence
  Description of Artificial Sequence: Synthetic oligonucleotide
caagaacgguaucugcagu

SEQ ID NO: 2521761 - RNA, 19 nt, Artificial Sequence
  Description of Artificial Sequence: Synthetic oligonucleotide
ccuccuaaggccccaagaa

SEQ ID NO: 2521762 - RNA, 19 nt, Artificial Sequence
  Description of Artificial Sequence: Synthetic oligonucleotide
gagaccgaacucuccccgu

SEQ ID NO: 2521763 - RNA, 19 nt, Artificial Sequence
  Description of Artificial Sequence: Synthetic oligonucleotide
gcgcuagugaaggcaaccc

SEQ ID NO: 2521764 - RNA, 19 nt, Artificial Sequence
  Description of Artificial Sequence: Synthetic oligonucleotide
cgcuagugaaggcaacccc

SEQ ID NO: 2521765 - RNA, 19 nt, Artificial Sequence
  Description of Artificial Sequence: Synthetic oligonucleotide
gugcacggagugguccucc

SEQ ID NO: 2521766 - RNA, 19 nt, Artificial Sequence
  Description of Artificial Sequence: Synthetic oligonucleotide
cagcacgaugagcgccccg

SEQ ID NO: 2521767 - RNA, 19 nt, Artificial Sequence
  Description of Artificial Sequence: Synthetic oligonucleotide
cgaacucuccccgugcagc

SEQ ID NO: 2521768 - RNA, 19 nt, Artificial Sequence
  Description of Artificial Sequence: Synthetic oligonucleotide
gcacccggauuucuucaug

SEQ ID NO: 2521769 - RNA, 19 nt, Artificial Sequence
  Description of Artificial Sequence: Synthetic oligonucleotide
gccggcgcgguccacgccc

SEQ ID NO: 2521770 - RNA, 19 nt, Artificial Sequence
  Description of Artificial Sequence: Synthetic oligonucleotide
cacgaugagcgccccgcga

SEQ ID NO: 2521771 - RNA, 19 nt, Artificial Sequence
  Description of Artificial Sequence: Synthetic oligonucleotide
gaacaguggugugagucuu

SEQ ID NO: 2521772 - RNA, 19 nt, Artificial Sequence
  Description of Artificial Sequence: Synthetic oligonucleotide
uggaagcaucaaccaccuu

SEQ ID NO: 2521773 - RNA, 19 nt, Artificial Sequence
  Description of Artificial Sequence: Synthetic oligonucleotide
ccugcguggucuugccggc

SEQ ID NO: 2521774 - RNA, 19 nt, Artificial Sequence
  Description of Artificial Sequence: Synthetic oligonucleotide
cugcguggucuugccggcg

SEQ ID NO: 2521775 - RNA, 19 nt, Artificial Sequence
  Description of Artificial Sequence: Synthetic oligonucleotide
cucggcucuguggcccgcg

SEQ ID NO: 2521776 - RNA, 19 nt, Artificial Sequence
  Description of Artificial Sequence: Synthetic oligonucleotide
cauagcgcucgagaccgaa

SEQ ID NO: 2521777 - RNA, 19 nt, Artificial Sequence
  Description of Artificial Sequence: Synthetic oligonucleotide
cuagcuccuguugaacagu

SEQ ID NO: 2521778 - RNA, 19 nt, Artificial Sequence
  Description of Artificial Sequence: Synthetic oligonucleotide
cucaggagcuugccgauuu

SEQ ID NO: 2521779 - RNA, 19 nt, Artificial Sequence
  Description of Artificial Sequence: Synthetic oligonucleotide
gcagcucggcucuguggcc

SEQ ID NO: 2521780 - RNA, 19 nt, Artificial Sequence
  Description of Artificial Sequence: Synthetic oligonucleotide
ugccggcgcgguccacgcc

SEQ ID NO: 2521781 - RNA, 19 nt, Artificial Sequence
  Description of Artificial Sequence: Synthetic oligonucleotide
ggaucaggucaggcuuggg

SEQ ID NO: 2521782 - RNA, 19 nt, Artificial Sequence
  Description of Artificial Sequence: Synthetic oligonucleotide
gccuuaaucaauggcacuu

SEQ ID NO: 2521783 - RNA, 19 nt, Artificial Sequence
  Description of Artificial Sequence: Synthetic oligonucleotide
cugguucaacuuugccuua

SEQ ID NO: 2521784 - RNA, 19 nt, Artificial Sequence
  Description of Artificial Sequence: Synthetic oligonucleotide
caucaaccaccuuccaguu

SEQ ID NO: 2521785 - RNA, 19 nt, Artificial Sequence
  Description of Artificial Sequence: Synthetic oligonucleotide
agugguccuccaggucugu

SEQ ID NO: 2521786 - RNA, 19 nt, Artificial Sequence
  Description of Artificial Sequence: Synthetic oligonucleotide
gcguggucuugccggcgcg

SEQ ID NO: 2521787 - RNA, 19 nt, Artificial Sequence
  Description of Artificial Sequence: Synthetic oligonucleotide
ggcuuguaggucucuucua

SEQ ID NO: 2521788 - RNA, 19 nt, Artificial Sequence
  Description of Artificial Sequence: Synthetic oligonucleotide
gcaaccccagaaaaggcgu

SEQ ID NO: 2521789 - RNA, 19 nt, Artificial Sequence
  Description of Artificial Sequence: Synthetic oligonucleotide
ucuccccgugcagcggcgu

SEQ ID NO: 2521790 - RNA, 19 nt, Artificial Sequence
  Description of Artificial Sequence: Synthetic oligonucleotide
gcucgagaccgaacucucc

SEQ ID NO: 2521791 - RNA, 19 nt, Artificial Sequence
  Description of Artificial Sequence: Synthetic oligonucleotide
gcgguccacgcccuccagc

SEQ ID NO: 2521792 - RNA, 19 nt, Artificial Sequence
  Description of Artificial Sequence: Synthetic oligonucleotide
cccagcgauuugcagagaa

SEQ ID NO: 2521793 - RNA, 19 nt, Artificial Sequence
  Description of Artificial Sequence: Synthetic oligonucleotide
acucaggagcuugccgauu

SEQ ID NO: 2521794 - RNA, 19 nt, Artificial Sequence
  Description of Artificial Sequence: Synthetic oligonucleotide
ccgucaccagccugcggcc

SEQ ID NO: 2521795 - RNA, 19 nt, Artificial Sequence
  Description of Artificial Sequence: Synthetic oligonucleotide
ggcccugcguggucuugcc

SEQ ID NO: 2521796 - RNA, 19 nt, Artificial Sequence
  Description of Artificial Sequence: Synthetic oligonucleotide
ggccccaagaacgguaucu

SEQ ID NO: 2521797 - RNA, 19 nt, Artificial Sequence
  Description of Artificial Sequence: Synthetic oligonucleotide
gcccugcguggucuugccg

SEQ ID NO: 2521798 - RNA, 19 nt, Artificial Sequence
  Description of Artificial Sequence: Synthetic oligonucleotide
cgucugguuguuugcacca

SEQ ID NO: 2521799 - RNA, 19 nt, Artificial Sequence
  Description of Artificial Sequence: Synthetic oligonucleotide
cagcgccgucaccagccug

SEQ ID NO: 2521800 - RNA, 19 nt, Artificial Sequence
  Description of Artificial Sequence: Synthetic oligonucleotide
uggcguccucagagagcac

SEQ ID NO: 2521801 - RNA, 19 nt, Artificial Sequence
  Description of Artificial Sequence: Synthetic oligonucleotide
cgaugagcgccccgcgacg

SEQ ID NO: 2521802 - RNA, 19 nt, Artificial Sequence
  Description of Artificial Sequence: Synthetic oligonucleotide
gucaccagccugcggcccu

SEQ ID NO: 2521803 - RNA, 19 nt, Artificial Sequence
  Description of Artificial Sequence: Synthetic oligonucleotide
ucccagcgauuugcagaga

SEQ ID NO: 2521804 - RNA, 19 nt, Artificial Sequence
  Description of Artificial Sequence: Synthetic oligonucleotide
gagagcacccggauuucuu

SEQ ID NO: 2521805 - RNA, 19 nt, Artificial Sequence
  Description of Artificial Sequence: Synthetic oligonucleotide
cuccccgugcagcggcguc

SEQ ID NO: 2521806 - RNA, 19 nt, Artificial Sequence
  Description of Artificial Sequence: Synthetic oligonucleotide
gcggcguccagcaauugua

SEQ ID NO: 2521807 - RNA, 19 nt, Artificial Sequence
  Description of Artificial Sequence: Synthetic oligonucleotide
ggcgcgguccacgcccucc

SEQ ID NO: 2521808 - RNA, 19 nt, Artificial Sequence
  Description of Artificial Sequence: Synthetic oligonucleotide
ggcuugggaaggcccacgu

SEQ ID NO: 2521809 - RNA, 19 nt, Artificial Sequence
  Description of Artificial Sequence: Synthetic oligonucleotide
cgcucgagaccgaacucuc

SEQ ID NO: 2521810 - RNA, 19 nt, Artificial Sequence
  Description of Artificial Sequence: Synthetic oligonucleotide
ugcggcccugcguggucuu

SEQ ID NO: 2521811 - RNA, 19 nt, Artificial Sequence
  Description of Artificial Sequence: Synthetic oligonucleotide
cccgcggcgcacagcgccg

SEQ ID NO: 2521812 - RNA, 19 nt, Artificial Sequence
  Description of Artificial Sequence: Synthetic oligonucleotide
cccagaaaaggcguaucua

SEQ ID NO: 2521813 - RNA, 19 nt, Artificial Sequence
  Description of Artificial Sequence: Synthetic oligonucleotide
ggugcacggagugguccuc

SEQ ID NO: 2521814 - RNA, 19 nt, Artificial Sequence
  Description of Artificial Sequence: Synthetic oligonucleotide
caagggucacacccugguu

SEQ ID NO: 2521815 - RNA, 19 nt, Artificial Sequence
  Description of Artificial Sequence: Synthetic oligonucleotide
aggcccacgucugguuguu

SEQ ID NO: 2521816 - RNA, 19 nt, Artificial Sequence
  Description of Artificial Sequence: Synthetic oligonucleotide
ccgcgacgcgaugccaucg

SEQ ID NO: 2521817 - RNA, 19 nt, Artificial Sequence
  Description of Artificial Sequence: Synthetic oligonucleotide
ccacgucugguuguuugca

SEQ ID NO: 2521818 - RNA, 19 nt, Artificial Sequence
  Description of Artificial Sequence: Synthetic oligonucleotide
cacugcggauggcguccuc

SEQ ID NO: 2521819 - RNA, 19 nt, Artificial Sequence
  Description of Artificial Sequence: Synthetic oligonucleotide
gcgcucgagaccgaacucu

SEQ ID NO: 2521820 - RNA, 19 nt, Artificial Sequence
  Description of Artificial Sequence: Synthetic oligonucleotide
cguggucuugccggcgcgg

SEQ ID NO: 2521821 - RNA, 19 nt, Artificial Sequence
  Description of Artificial Sequence: Synthetic oligonucleotide
cagcggcguccagcaauug

SEQ ID NO: 2521822 - RNA, 19 nt, Artificial Sequence
  Description of Artificial Sequence: Synthetic oligonucleotide
gcgccgucaccagccugcg

SEQ ID NO: 2521823 - RNA, 19 nt, Artificial Sequence
  Description of Artificial Sequence: Synthetic oligonucleotide
gguaggaacucaggagcuu

SEQ ID NO: 2521824 - RNA, 19 nt, Artificial Sequence
  Description of Artificial Sequence: Synthetic oligonucleotide
ccagcacgaugagcgcccc

SEQ ID NO: 2521825 - RNA, 19 nt, Artificial Sequence
  Description of Artificial Sequence: Synthetic oligonucleotide
cccgcgacgcgaugccauc

SEQ ID NO: 2521826 - RNA, 19 nt, Artificial Sequence
  Description of Artificial Sequence: Synthetic oligonucleotide
gcaggugcacggagugguc

SEQ ID NO: 2521827 - RNA, 19 nt, Artificial Sequence
  Description of Artificial Sequence: Synthetic oligonucleotide
gggaaggcccacgucuggu

SEQ ID NO: 2521828 - RNA, 19 nt, Artificial Sequence
  Description of Artificial Sequence: Synthetic oligonucleotide
gcgccccgcgacgcgaugc

SEQ ID NO: 2521829 - RNA, 19 nt, Artificial Sequence
  Description of Artificial Sequence: Synthetic oligonucleotide
cggauggcguccucagaga

SEQ ID NO: 2521830 - RNA, 19 nt, Artificial Sequence
  Description of Artificial Sequence: Synthetic oligonucleotide
ccagucucauagcgcucga

SEQ ID NO: 2521831 - RNA, 19 nt, Artificial Sequence
  Description of Artificial Sequence: Synthetic oligonucleotide
ccugcggcccugcgugguc

SEQ ID NO: 2521832 - RNA, 19 nt, Artificial Sequence
  Description of Artificial Sequence: Synthetic oligonucleotide
gugcagcggcguccagcaa

SEQ ID NO: 2521833 - RNA, 19 nt, Artificial Sequence
  Description of Artificial Sequence: Synthetic oligonucleotide
cuguggcccgcggcgcaca

SEQ ID NO: 2521834 - RNA, 19 nt, Artificial Sequence
  Description of Artificial Sequence: Synthetic oligonucleotide
cgucaccagccugcggccc

SEQ ID NO: 2521835 - RNA, 19 nt, Artificial Sequence
  Description of Artificial Sequence: Synthetic oligonucleotide
cggcguccagcaauuguaa

SEQ ID NO: 2521836 - RNA, 19 nt, Artificial Sequence
  Description of Artificial Sequence: Synthetic oligonucleotide
ccucagagagcacccggau

SEQ ID NO: 2521837 - RNA, 19 nt, Artificial Sequence
  Description of Artificial Sequence: Synthetic oligonucleotide
cggcucuguggcccgcggc

SEQ ID NO: 2521838 - RNA, 19 nt, Artificial Sequence
  Description of Artificial Sequence: Synthetic oligonucleotide
cugccuccuaaggccccaa

SEQ ID NO: 2521839 - RNA, 19 nt, Artificial Sequence
  Description of Artificial Sequence: Synthetic oligonucleotide
cugcggcccugcguggucu

SEQ ID NO: 2521840 - RNA, 19 nt, Artificial Sequence
  Description of Artificial Sequence: Synthetic oligonucleotide
cggcccugcguggucuugc

SEQ ID NO: 2521841 - RNA, 19 nt, Artificial Sequence
  Description of Artificial Sequence: Synthetic oligonucleotide
gcggcccugcguggucuug

SEQ ID NO: 2521842 - RNA, 19 nt, Artificial Sequence
  Description of Artificial Sequence: Synthetic oligonucleotide
gugguccuccaggucuguu

SEQ ID NO: 2521843 - RNA, 19 nt, Artificial Sequence
  Description of Artificial Sequence: Synthetic oligonucleotide
cgccgucaccagccugcgg

SEQ ID NO: 2521844 - RNA, 19 nt, Artificial Sequence
  Description of Artificial Sequence: Synthetic oligonucleotide
cgcgguccacgcccuccag

SEQ ID NO: 2521845 - RNA, 19 nt, Artificial Sequence
  Description of Artificial Sequence: Synthetic oligonucleotide
gagcgccccgcgacgcgau

SEQ ID NO: 2521846 - RNA, 19 nt, Artificial Sequence
  Description of Artificial Sequence: Synthetic oligonucleotide
ccccgugcagcggcgucca

SEQ ID NO: 2521847 - RNA, 19 nt, Artificial Sequence
  Description of Artificial Sequence: Synthetic oligonucleotide
gccccgcgacgcgaugcca

SEQ ID NO: 2521848 - RNA, 19 nt, Artificial Sequence
  Description of Artificial Sequence: Synthetic oligonucleotide
ccccgcgacgcgaugccau

SEQ ID NO: 2521849 - RNA, 19 nt, Artificial Sequence
  Description of Artificial Sequence: Synthetic oligonucleotide
cgcggcgcacagcgccguc

SEQ ID NO: 2521850 - RNA, 19 nt, Artificial Sequence
  Description of Artificial Sequence: Synthetic oligonucleotide
ccggcgcgguccacgcccu

SEQ ID NO: 2521851 - RNA, 19 nt, Artificial Sequence
  Description of Artificial Sequence: Synthetic oligonucleotide
ggcccacgucugguuguuu

SEQ ID NO: 2521852 - RNA, 19 nt, Artificial Sequence
  Description of Artificial Sequence: Synthetic oligonucleotide
aaaugaaagacaccugcac

SEQ ID NO: 2521853 - RNA, 19 nt, Artificial Sequence
  Description of Artificial Sequence: Synthetic oligonucleotide
uauauagcagauaaauucc

SEQ ID NO: 2521854 - RNA, 19 nt, Artificial Sequence
  Description of Artificial Sequence: Synthetic oligonucleotide
gauacaucggaauagaguc

SEQ ID NO: 2521855 - RNA, 19 nt, Artificial Sequence
  Description of Artificial Sequence: Synthetic oligonucleotide
uuugacaaacccaggaagg

SEQ ID NO: 2521856 - RNA, 19 nt, Artificial Sequence
  Description of Artificial Sequence: Synthetic oligonucleotide
ugauguaaaugaaagacac

SEQ ID NO: 2521857 - RNA, 19 nt, Artificial Sequence
  Description of Artificial Sequence: Synthetic oligonucleotide
uuugacagugagaauaucc

SEQ ID NO: 2521858 - RNA, 19 nt, Artificial Sequence
  Description of Artificial Sequence: Synthetic oligonucleotide
cauaguuugacaaacccag

SEQ ID NO: 2521859 - RNA, 19 nt, Artificial Sequence
  Description of Artificial Sequence: Synthetic oligonucleotide
cuuuauagcacagucauag

SEQ ID NO: 2521860 - RNA, 19 nt, Artificial Sequence
  Description of Artificial Sequence: Synthetic oligonucleotide
cuugauguaaaugaaagac

SEQ ID NO: 2521861 - RNA, 19 nt, Artificial Sequence
  Description of Artificial Sequence: Synthetic oligonucleotide
cuaaguuuugcauuugccc

SEQ ID NO: 2521862 - RNA, 19 nt, Artificial Sequence
  Description of Artificial Sequence: Synthetic oligonucleotide
aaugaaagacaccugcacu

SEQ ID NO: 2521863 - RNA, 19 nt, Artificial Sequence
  Description of Artificial Sequence: Synthetic oligonucleotide
ucggaauagagucuccugg

SEQ ID NO: 2521864 - RNA, 19 nt, Artificial Sequence
  Description of Artificial Sequence: Synthetic oligonucleotide
uugacagugagaauauccc

SEQ ID NO: 2521865 - RNA, 19 nt, Artificial Sequence
  Description of Artificial Sequence: Synthetic oligonucleotide
uugauguaaaugaaagaca

SEQ ID NO: 2521866 - RNA, 19 nt, Artificial Sequence
  Description of Artificial Sequence: Synthetic oligonucleotide
gaaagucacaucaugaaac

SEQ ID NO: 2521867 - RNA, 19 nt, Artificial Sequence
  Description of Artificial Sequence: Synthetic oligonucleotide
gauccgagggcauacuucg

SEQ ID NO: 2521868 - RNA, 19 nt, Artificial Sequence
  Description of Artificial Sequence: Synthetic oligonucleotide
aaagucacaucaugaaaca

SEQ ID NO: 2521869 - RNA, 19 nt, Artificial Sequence
  Description of Artificial Sequence: Synthetic oligonucleotide
gcauacuucggauacaucg

SEQ ID NO: 2521870 - RNA, 19 nt, Artificial Sequence
  Description of Artificial Sequence: Synthetic oligonucleotide
gacaacguauccuugggcc

SEQ ID NO: 2521871 - RNA, 19 nt, Artificial Sequence
  Description of Artificial Sequence: Synthetic oligonucleotide
uagcagauaaauuccagug

SEQ ID NO: 2521872 - RNA, 19 nt, Artificial Sequence
  Description of Artificial Sequence: Synthetic oligonucleotide
aggagcacuucuucgaggc

SEQ ID NO: 2521873 - RNA, 19 nt, Artificial Sequence
  Description of Artificial Sequence: Synthetic oligonucleotide
ucauaguuugacaaaccca

SEQ ID NO: 2521874 - RNA, 19 nt, Artificial Sequence
  Description of Artificial Sequence: Synthetic oligonucleotide
guuugacaaacccaggaag

SEQ ID NO: 2521875 - RNA, 19 nt, Artificial Sequence
  Description of Artificial Sequence: Synthetic oligonucleotide
ucacaucagagucagcuug

SEQ ID NO: 2521876 - RNA, 19 nt, Artificial Sequence
  Description of Artificial Sequence: Synthetic oligonucleotide
uaaaugaaagacaccugca

SEQ ID NO: 2521877 - RNA, 19 nt, Artificial Sequence
  Description of Artificial Sequence: Synthetic oligonucleotide
uguaaaugaaagacaccug

SEQ ID NO: 2521878 - RNA, 19 nt, Artificial Sequence
  Description of Artificial Sequence: Synthetic oligonucleotide
cauacuucggauacaucgg

SEQ ID NO: 2521879 - RNA, 19 nt, Artificial Sequence
  Description of Artificial Sequence: Synthetic oligonucleotide
uuccaagaaaggcaccccg

SEQ ID NO: 2521880 - RNA, 19 nt, Artificial Sequence
  Description of Artificial Sequence: Synthetic oligonucleotide
aaaggcuaaguuuugcauu

SEQ ID NO: 2521881 - RNA, 19 nt, Artificial Sequence
  Description of Artificial Sequence: Synthetic oligonucleotide
ugaaagucacaucaugaaa

SEQ ID NO: 2521882 - RNA, 19 nt, Artificial Sequence
  Description of Artificial Sequence: Synthetic oligonucleotide
uuauagcacagucauaguu

SEQ ID NO: 2521883 - RNA, 19 nt, Artificial Sequence
  Description of Artificial Sequence: Synthetic oligonucleotide
aaaggcaccccguccuggc

SEQ ID NO: 2521884 - RNA, 19 nt, Artificial Sequence
  Description of Artificial Sequence: Synthetic oligonucleotide
gucauaguuugacaaaccc

SEQ ID NO: 2521885 - RNA, 19 nt, Artificial Sequence
  Description of Artificial Sequence: Synthetic oligonucleotide
auccccuugauguaaauga

SEQ ID NO: 2521886 - RNA, 19 nt, Artificial Sequence
  Description of Artificial Sequence: Synthetic oligonucleotide
ugagaauauccccuugaug

SEQ ID NO: 2521887 - RNA, 19 nt, Artificial Sequence
  Description of Artificial Sequence: Synthetic oligonucleotide
uguagcagcuauuguaggc

SEQ ID NO: 2521888 - RNA, 19 nt, Artificial Sequence
  Description of Artificial Sequence: Synthetic oligonucleotide
uucgaggccggacuagucg

SEQ ID NO: 2521889 - RNA, 19 nt, Artificial Sequence
  Description of Artificial Sequence: Synthetic oligonucleotide
acaccugcacuguagcagc

SEQ ID NO: 2521890 - RNA, 19 nt, Artificial Sequence
  Description of Artificial Sequence: Synthetic oligonucleotide
uuaggagcacuucuucgag

SEQ ID NO: 2521891 - RNA, 19 nt, Artificial Sequence
  Description of Artificial Sequence: Synthetic oligonucleotide
auagcacagucauaguuug

SEQ ID NO: 2521892 - RNA, 19 nt, Artificial Sequence
  Description of Artificial Sequence: Synthetic oligonucleotide
ucaugaaacaggaccuggc

SEQ ID NO: 2521893 - RNA, 19 nt, Artificial Sequence
  Description of Artificial Sequence: Synthetic oligonucleotide
uauccuugggccuccaggc

SEQ ID NO: 2521894 - RNA, 19 nt, Artificial Sequence
  Description of Artificial Sequence: Synthetic oligonucleotide
aaggcuaaguuuugcauuu

SEQ ID NO: 2521895 - RNA, 19 nt, Artificial Sequence
  Description of Artificial Sequence: Synthetic oligonucleotide
agcuauuguaggcacgguc

SEQ ID NO: 2521896 - RNA, 19 nt, Artificial Sequence
  Description of Artificial Sequence: Synthetic oligonucleotide
agcugguugccacaucacc

SEQ ID NO: 2521897 - RNA, 19 nt, Artificial Sequence
  Description of Artificial Sequence: Synthetic oligonucleotide
aaguuuugcauuugcccgu

SEQ ID NO: 2521898 - RNA, 19 nt, Artificial Sequence
  Description of Artificial Sequence: Synthetic oligonucleotide
cuuuccggcccuuaggagc

SEQ ID NO: 2521899 - RNA, 19 nt, Artificial Sequence
  Description of Artificial Sequence: Synthetic oligonucleotide
acaggaccuggcuauauag

SEQ ID NO: 2521900 - RNA, 19 nt, Artificial Sequence
  Description of Artificial Sequence: Synthetic oligonucleotide
uggaauuuugacagugaga

SEQ ID NO: 2521901 - RNA, 19 nt, Artificial Sequence
  Description of Artificial Sequence: Synthetic oligonucleotide
ucggacaacguauccuugg

SEQ ID NO: 2521902 - RNA, 19 nt, Artificial Sequence
  Description of Artificial Sequence: Synthetic oligonucleotide
uucggauacaucggaauag

SEQ ID NO: 2521903 - RNA, 19 nt, Artificial Sequence
  Description of Artificial Sequence: Synthetic oligonucleotide
ugacagugagaauaucccc

SEQ ID NO: 2521904 - RNA, 19 nt, Artificial Sequence
  Description of Artificial Sequence: Synthetic oligonucleotide
uggugaaagucacaucaug

SEQ ID NO: 2521905 - RNA, 19 nt, Artificial Sequence
  Description of Artificial Sequence: Synthetic oligonucleotide
agaaaggcuaaguuuugca

SEQ ID NO: 2521906 - RNA, 19 nt, Artificial Sequence
  Description of Artificial Sequence: Synthetic oligonucleotide
guauccuugggccuccagg

SEQ ID NO: 2521907 - RNA, 19 nt, Artificial Sequence
  Description of Artificial Sequence: Synthetic oligonucleotide
ggaauuuugacagugagaa

SEQ ID NO: 2521908 - RNA, 19 nt, Artificial Sequence
  Description of Artificial Sequence: Synthetic oligonucleotide
agcagauaaauuccagugu

SEQ ID NO: 2521909 - RNA, 19 nt, Artificial Sequence
  Description of Artificial Sequence: Synthetic oligonucleotide
uuggcuuucccgagaaacc

SEQ ID NO: 2521910 - RNA, 19 nt, Artificial Sequence
  Description of Artificial Sequence: Synthetic oligonucleotide
uuuugcauuugcccgugga

SEQ ID NO: 2521911 - RNA, 19 nt, Artificial Sequence
  Description of Artificial Sequence: Synthetic oligonucleotide
cagauaaauuccagugucc

SEQ ID NO: 2521912 - RNA, 19 nt, Artificial Sequence
  Description of Artificial Sequence: Synthetic oligonucleotide
agugagaauauccccuuga

SEQ ID NO: 2521913 - RNA, 19 nt, Artificial Sequence
  Description of Artificial Sequence: Synthetic oligonucleotide
acgccugagagcugguugc

SEQ ID NO: 2521914 - RNA, 19 nt, Artificial Sequence
  Description of Artificial Sequence: Synthetic oligonucleotide
acuguagcagcuauuguag

SEQ ID NO: 2521915 - RNA, 19 nt, Artificial Sequence
  Description of Artificial Sequence: Synthetic oligonucleotide
cuagucguuccaagaaagg

SEQ ID NO: 2521916 - RNA, 19 nt, Artificial Sequence
  Description of Artificial Sequence: Synthetic oligonucleotide
uagucguuccaagaaaggc

SEQ ID NO: 2521917 - RNA, 19 nt, Artificial Sequence
  Description of Artificial Sequence: Synthetic oligonucleotide
agagcugguugccacauca

SEQ ID NO: 2521918 - RNA, 19 nt, Artificial Sequence
  Description of Artificial Sequence: Synthetic oligonucleotide
uucccgagaaaccacccca

SEQ ID NO: 2521919 - RNA, 19 nt, Artificial Sequence
  Description of Artificial Sequence: Synthetic oligonucleotide
agucauaguuugacaaacc

SEQ ID NO: 2521920 - RNA, 19 nt, Artificial Sequence
  Description of Artificial Sequence: Synthetic oligonucleotide
uuugcauuugcccguggaa

SEQ ID NO: 2521921 - RNA, 19 nt, Artificial Sequence
  Description of Artificial Sequence: Synthetic oligonucleotide
cuggcuauauagcagauaa

SEQ ID NO: 2521922 - RNA, 19 nt, Artificial Sequence
  Description of Artificial Sequence: Synthetic oligonucleotide
gagggcauacuucggauac

SEQ ID NO: 2521923 - RNA, 19 nt, Artificial Sequence
  Description of Artificial Sequence: Synthetic oligonucleotide
gagcacuucuucgaggccg

SEQ ID NO: 2521924 - RNA, 19 nt, Artificial Sequence
  Description of Artificial Sequence: Synthetic oligonucleotide
acuagucguuccaagaaag

SEQ ID NO: 2521925 - RNA, 19 nt, Artificial Sequence
  Description of Artificial Sequence: Synthetic oligonucleotide
aguuugacaaacccaggaa

SEQ ID NO: 2521926 - RNA, 19 nt, Artificial Sequence
  Description of Artificial Sequence: Synthetic oligonucleotide
ucucccacgccugagagcu

SEQ ID NO: 2521927 - RNA, 19 nt, Artificial Sequence
  Description of Artificial Sequence: Synthetic oligonucleotide
agacucggacaacguaucc

SEQ ID NO: 2521928 - RNA, 19 nt, Artificial Sequence
  Description of Artificial Sequence: Synthetic oligonucleotide
uguaggcacggucaggauc

SEQ ID NO: 2521929 - RNA, 19 nt, Artificial Sequence
  Description of Artificial Sequence: Synthetic oligonucleotide
gaauagagucuccuggcuc

SEQ ID NO: 2521930 - RNA, 19 nt, Artificial Sequence
  Description of Artificial Sequence: Synthetic oligonucleotide
uccagugucccagacucgg

SEQ ID NO: 2521931 - RNA, 19 nt, Artificial Sequence
  Description of Artificial Sequence: Synthetic oligonucleotide
acggucaggauccgagggc

SEQ ID NO: 2521932 - RNA, 19 nt, Artificial Sequence
  Description of Artificial Sequence: Synthetic oligonucleotide
aucaugaaacaggaccugg

SEQ ID NO: 2521933 - RNA, 19 nt, Artificial Sequence
  Description of Artificial Sequence: Synthetic oligonucleotide
accucugucacaucagagu

SEQ ID NO: 2521934 - RNA, 19 nt, Artificial Sequence
  Description of Artificial Sequence: Synthetic oligonucleotide
guaggcacggucaggaucc

SEQ ID NO: 2521935 - RNA, 19 nt, Artificial Sequence
  Description of Artificial Sequence: Synthetic oligonucleotide
acaucaugaaacaggaccu

SEQ ID NO: 2521936 - RNA, 19 nt, Artificial Sequence
  Description of Artificial Sequence: Synthetic oligonucleotide
uuucccgagaaaccacccc

SEQ ID NO: 2521937 - RNA, 19 nt, Artificial Sequence
  Description of Artificial Sequence: Synthetic oligonucleotide
uuuccggcccuuaggagca

SEQ ID NO: 2521938 - RNA, 19 nt, Artificial Sequence
  Description of Artificial Sequence: Synthetic oligonucleotide
aacccaggaagguuccgug

SEQ ID NO: 2521939 - RNA, 19 nt, Artificial Sequence
  Description of Artificial Sequence: Synthetic oligonucleotide
gagaaaccaccccauggug

SEQ ID NO: 2521940 - RNA, 19 nt, Artificial Sequence
  Description of Artificial Sequence: Synthetic oligonucleotide
uuuauagcacagucauagu

SEQ ID NO: 2521941 - RNA, 19 nt, Artificial Sequence
  Description of Artificial Sequence: Synthetic oligonucleotide
aaccaccccauggugaaag

SEQ ID NO: 2521942 - RNA, 19 nt, Artificial Sequence
  Description of Artificial Sequence: Synthetic oligonucleotide
cccuugauguaaaugaaag

SEQ ID NO: 2521943 - RNA, 19 nt, Artificial Sequence
  Description of Artificial Sequence: Synthetic oligonucleotide
gcagauaaauuccaguguc

SEQ ID NO: 2521944 - RNA, 19 nt, Artificial Sequence
  Description of Artificial Sequence: Synthetic oligonucleotide
uacaucggaauagagucuc

SEQ ID NO: 2521945 - RNA, 19 nt, Artificial Sequence
  Description of Artificial Sequence: Synthetic oligonucleotide
cuauuguaggcacggucag

SEQ ID NO: 2521946 - RNA, 19 nt, Artificial Sequence
  Description of Artificial Sequence: Synthetic oligonucleotide
acuucggauacaucggaau

SEQ ID NO: 2521947 - RNA, 19 nt, Artificial Sequence
  Description of Artificial Sequence: Synthetic oligonucleotide
cacagucauaguuugacaa

SEQ ID NO: 2521948 - RNA, 19 nt, Artificial Sequence
  Description of Artificial Sequence: Synthetic oligonucleotide
cacaucagagucagcuugc

SEQ ID NO: 2521949 - RNA, 19 nt, Artificial Sequence
  Description of Artificial Sequence: Synthetic oligonucleotide
uauuguaggcacggucagg

SEQ ID NO: 2521950 - RNA, 19 nt, Artificial Sequence
  Description of Artificial Sequence: Synthetic oligonucleotide
cagucauaguuugacaaac

SEQ ID NO: 2521951 - RNA, 19 nt, Artificial Sequence
  Description of Artificial Sequence: Synthetic oligonucleotide
gaccuggcuauauagcaga

SEQ ID NO: 2521952 - RNA, 19 nt, Artificial Sequence
  Description of Artificial Sequence: Synthetic oligonucleotide
ucaccucugucacaucaga

SEQ ID NO: 2521953 - RNA, 19 nt, Artificial Sequence
  Description of Artificial Sequence: Synthetic oligonucleotide
gugaaagucacaucaugaa

SEQ ID NO: 2521954 - RNA, 19 nt, Artificial Sequence
  Description of Artificial Sequence: Synthetic oligonucleotide
uccgagggcauacuucgga

SEQ ID NO: 2521955 - RNA, 19 nt, Artificial Sequence
  Description of Artificial Sequence: Synthetic oligonucleotide
acagucauaguuugacaaa

SEQ ID NO: 2521956 - RNA, 19 nt, Artificial Sequence
  Description of Artificial Sequence: Synthetic oligonucleotide
gucacaucaugaaacagga

SEQ ID NO: 2521957 - RNA, 19 nt, Artificial Sequence
  Description of Artificial Sequence: Synthetic oligonucleotide
gcccguggaauuuugacag

SEQ ID NO: 2521958 - RNA, 19 nt, Artificial Sequence
  Description of Artificial Sequence: Synthetic oligonucleotide
ugcggagaaaggcuaaguu

SEQ ID NO: 2521959 - RNA, 19 nt, Artificial Sequence
  Description of Artificial Sequence: Synthetic oligonucleotide
uugacaaacccaggaaggu

SEQ ID NO: 2521960 - RNA, 19 nt, Artificial Sequence
  Description of Artificial Sequence: Synthetic oligonucleotide
acaacguauccuugggccu

SEQ ID NO: 2521961 - RNA, 19 nt, Artificial Sequence
  Description of Artificial Sequence: Synthetic oligonucleotide
agucguuccaagaaaggca

SEQ ID NO: 2521962 - RNA, 19 nt, Artificial Sequence
  Description of Artificial Sequence: Synthetic oligonucleotide
acaaacccaggaagguucc

SEQ ID NO: 2521963 - RNA, 19 nt, Artificial Sequence
  Description of Artificial Sequence: Synthetic oligonucleotide
auauagcagauaaauucca

SEQ ID NO: 2521964 - RNA, 19 nt, Artificial Sequence
  Description of Artificial Sequence: Synthetic oligonucleotide
uauccccuugauguaaaug

SEQ ID NO: 2521965 - RNA, 19 nt, Artificial Sequence
  Description of Artificial Sequence: Synthetic oligonucleotide
auccuugggccuccaggcc

SEQ ID NO: 2521966 - RNA, 19 nt, Artificial Sequence
  Description of Artificial Sequence: Synthetic oligonucleotide
uuccgugcggagaaaggcu

SEQ ID NO: 2521967 - RNA, 19 nt, Artificial Sequence
  Description of Artificial Sequence: Synthetic oligonucleotide
gaaaccaccccauggugaa

SEQ ID NO: 2521968 - RNA, 19 nt, Artificial Sequence
  Description of Artificial Sequence: Synthetic oligonucleotide
cacggucaggauccgaggg

SEQ ID NO: 2521969 - RNA, 19 nt, Artificial Sequence
  Description of Artificial Sequence: Synthetic oligonucleotide
ccuucccucaucaaagugc

SEQ ID NO: 2521970 - RNA, 19 nt, Artificial Sequence
  Description of Artificial Sequence: Synthetic oligonucleotide
cuuucccgagaaaccaccc

SEQ ID NO: 2521971 - RNA, 19 nt, Artificial Sequence
  Description of Artificial Sequence: Synthetic oligonucleotide
gaagguuccgugcggagaa

SEQ ID NO: 2521972 - RNA, 19 nt, Artificial Sequence
  Description of Artificial Sequence: Synthetic oligonucleotide
auaguuugacaaacccagg

SEQ ID NO: 2521973 - RNA, 19 nt, Artificial Sequence
  Description of Artificial Sequence: Synthetic oligonucleotide
aguuucagguagaccggcc

SEQ ID NO: 2521974 - RNA, 19 nt, Artificial Sequence
  Description of Artificial Sequence: Synthetic oligonucleotide
aaacccaggaagguuccgu

SEQ ID NO: 2521975 - RNA, 19 nt, Artificial Sequence
  Description of Artificial Sequence: Synthetic oligonucleotide
ucggauacaucggaauaga

SEQ ID NO: 2521976 - RNA, 19 nt, Artificial Sequence
  Description of Artificial Sequence: Synthetic oligonucleotide
uugcccguggaauuuugac

SEQ ID NO: 2521977 - RNA, 19 nt, Artificial Sequence
  Description of Artificial Sequence: Synthetic oligonucleotide
gucguuccaagaaaggcac

SEQ ID NO: 2521978 - RNA, 19 nt, Artificial Sequence
  Description of Artificial Sequence: Synthetic oligonucleotide
agucuccuggcucccuugg

SEQ ID NO: 2521979 - RNA, 19 nt, Artificial Sequence
  Description of Artificial Sequence: Synthetic oligonucleotide
agguagaccggccuucccu

SEQ ID NO: 2521980 - RNA, 19 nt, Artificial Sequence
  Description of Artificial Sequence: Synthetic oligonucleotide
acucggacaacguauccuu

SEQ ID NO: 2521981 - RNA, 19 nt, Artificial Sequence
  Description of Artificial Sequence: Synthetic oligonucleotide
uccccuugauguaaaugaa

SEQ ID NO: 2521982 - RNA, 19 nt, Artificial Sequence
  Description of Artificial Sequence: Synthetic oligonucleotide
uggcuuucccgagaaacca

SEQ ID NO: 2521983 - RNA, 19 nt, Artificial Sequence
  Description of Artificial Sequence: Synthetic oligonucleotide
agaauauccccuugaugua

SEQ ID NO: 2521984 - RNA, 19 nt, Artificial Sequence
  Description of Artificial Sequence: Synthetic oligonucleotide
guuccgugcggagaaaggc

SEQ ID NO: 2521985 - RNA, 19 nt, Artificial Sequence
  Description of Artificial Sequence: Synthetic oligonucleotide
aacaggaccuggcuauaua

SEQ ID NO: 2521986 - RNA, 19 nt, Artificial Sequence
  Description of Artificial Sequence: Synthetic oligonucleotide
uugcauuugcccguggaau

SEQ ID NO: 2521987 - RNA, 19 nt, Artificial Sequence
  Description of Artificial Sequence: Synthetic oligonucleotide
gacuagucguuccaagaaa

SEQ ID NO: 2521988 - RNA, 19 nt, Artificial Sequence
  Description of Artificial Sequence: Synthetic oligonucleotide
acuuuccggcccuuaggag

SEQ ID NO: 2521989 - RNA, 19 nt, Artificial Sequence
  Description of Artificial Sequence: Synthetic oligonucleotide
auagagucuccuggcuccc

SEQ ID NO: 2521990 - RNA, 19 nt, Artificial Sequence
  Description of Artificial Sequence: Synthetic oligonucleotide
ugcauuugcccguggaauu

SEQ ID NO: 2521991 - RNA, 19 nt, Artificial Sequence
  Description of Artificial Sequence: Synthetic oligonucleotide
cugguugccacaucaccuc

SEQ ID NO: 2521992 - RNA, 19 nt, Artificial Sequence
  Description of Artificial Sequence: Synthetic oligonucleotide
aggccggacuagucguucc

SEQ ID NO: 2521993 - RNA, 19 nt, Artificial Sequence
  Description of Artificial Sequence: Synthetic oligonucleotide
caucaccucugucacauca

SEQ ID NO: 2521994 - RNA, 19 nt, Artificial Sequence
  Description of Artificial Sequence: Synthetic oligonucleotide
agaaaccaccccaugguga

SEQ ID NO: 2521995 - RNA, 19 nt, Artificial Sequence
  Description of Artificial Sequence: Synthetic oligonucleotide
ggugaaagucacaucauga

SEQ ID NO: 2521996 - RNA, 19 nt, Artificial Sequence
  Description of Artificial Sequence: Synthetic oligonucleotide
ccuuaggagcacuucuucg

SEQ ID NO: 2521997 - RNA, 19 nt, Artificial Sequence
  Description of Artificial Sequence: Synthetic oligonucleotide
gcagcuauuguaggcacgg

SEQ ID NO: 2521998 - RNA, 19 nt, Artificial Sequence
  Description of Artificial Sequence: Synthetic oligonucleotide
uuucagguagaccggccuu

SEQ ID NO: 2521999 - RNA, 19 nt, Artificial Sequence
  Description of Artificial Sequence: Synthetic oligonucleotide
gucccagacucggacaacg

SEQ ID NO: 2522000 - RNA, 19 nt, Artificial Sequence
  Description of Artificial Sequence: Synthetic oligonucleotide
uagcagcuauuguaggcac

SEQ ID NO: 2522001 - RNA, 19 nt, Artificial Sequence
  Description of Artificial Sequence: Synthetic oligonucleotide
ucccacgccugagagcugg

SEQ ID NO: 2522002 - RNA, 19 nt, Artificial Sequence
  Description of Artificial Sequence: Synthetic oligonucleotide
aauauccccuugauguaaa

SEQ ID NO: 2522003 - RNA, 19 nt, Artificial Sequence
  Description of Artificial Sequence: Synthetic oligonucleotide
ucgaggccggacuagucgu

SEQ ID NO: 2522004 - RNA, 19 nt, Artificial Sequence
  Description of Artificial Sequence: Synthetic oligonucleotide
caccccauggugaaaguca

SEQ ID NO: 2522005 - RNA, 19 nt, Artificial Sequence
  Description of Artificial Sequence: Synthetic oligonucleotide
ucaggauccgagggcauac

SEQ ID NO: 2522006 - RNA, 19 nt, Artificial Sequence
  Description of Artificial Sequence: Synthetic oligonucleotide
ggcuaaguuuugcauuugc

SEQ ID NO: 2522007 - RNA, 19 nt, Artificial Sequence
  Description of Artificial Sequence: Synthetic oligonucleotide
gcuaaguuuugcauuugcc

SEQ ID NO: 2522008 - RNA, 19 nt, Artificial Sequence
  Description of Artificial Sequence: Synthetic oligonucleotide
ucguuccaagaaaggcacc

SEQ ID NO: 2522009 - RNA, 19 nt, Artificial Sequence
  Description of Artificial Sequence: Synthetic oligonucleotide
uggcuauauagcagauaaa

SEQ ID NO: 2522010 - RNA, 19 nt, Artificial Sequence
  Description of Artificial Sequence: Synthetic oligonucleotide
uccgugcggagaaaggcua

SEQ ID NO: 2522011 - RNA, 19 nt, Artificial Sequence
  Description of Artificial Sequence: Synthetic oligonucleotide
cacgccugagagcugguug

SEQ ID NO: 2522012 - RNA, 19 nt, Artificial Sequence
  Description of Artificial Sequence: Synthetic oligonucleotide
cagacucggacaacguauc

SEQ ID NO: 2522013 - RNA, 19 nt, Artificial Sequence
  Description of Artificial Sequence: Synthetic oligonucleotide
ugguugccacaucaccucu

SEQ ID NO: 2522014 - RNA, 19 nt, Artificial Sequence
  Description of Artificial Sequence: Synthetic oligonucleotide
gcuauuguaggcacgguca

SEQ ID NO: 2522015 - RNA, 19 nt, Artificial Sequence
  Description of Artificial Sequence: Synthetic oligonucleotide
ccgagaaaccaccccaugg

SEQ ID NO: 2522016 - RNA, 19 nt, Artificial Sequence
  Description of Artificial Sequence: Synthetic oligonucleotide
caucaugaaacaggaccug

SEQ ID NO: 2522017 - RNA, 19 nt, Artificial Sequence
  Description of Artificial Sequence: Synthetic oligonucleotide
agacaccugcacuguagca

SEQ ID NO: 2522018 - RNA, 19 nt, Artificial Sequence
  Description of Artificial Sequence: Synthetic oligonucleotide
aguuuugcauuugcccgug

SEQ ID NO: 2522019 - RNA, 19 nt, Artificial Sequence
  Description of Artificial Sequence: Synthetic oligonucleotide
cagugucccagacucggac

SEQ ID NO: 2522020 - RNA, 19 nt, Artificial Sequence
  Description of Artificial Sequence: Synthetic oligonucleotide
cucuuccccagccacucac

SEQ ID NO: 2522021 - RNA, 19 nt, Artificial Sequence
  Description of Artificial Sequence: Synthetic oligonucleotide
uucuucgaggccggacuag

SEQ ID NO: 2522022 - RNA, 19 nt, Artificial Sequence
  Description of Artificial Sequence: Synthetic oligonucleotide
cacuuuccggcccuuagga

SEQ ID NO: 2522023 - RNA, 19 nt, Artificial Sequence
  Description of Artificial Sequence: Synthetic oligonucleotide
ugacaaacccaggaagguu

SEQ ID NO: 2522024 - RNA, 19 nt, Artificial Sequence
  Description of Artificial Sequence: Synthetic oligonucleotide
guuuugcauuugcccgugg

SEQ ID NO: 2522025 - RNA, 19 nt, Artificial Sequence
  Description of Artificial Sequence: Synthetic oligonucleotide
aaacaggaccuggcuauau

SEQ ID NO: 2522026 - RNA, 19 nt, Artificial Sequence
  Description of Artificial Sequence: Synthetic oligonucleotide
uucagguagaccggccuuc

SEQ ID NO: 2522027 - RNA, 19 nt, Artificial Sequence
  Description of Artificial Sequence: Synthetic oligonucleotide
auacaucggaauagagucu

SEQ ID NO: 2522028 - RNA, 19 nt, Artificial Sequence
  Description of Artificial Sequence: Synthetic oligonucleotide
ucuucgaggccggacuagu

SEQ ID NO: 2522029 - RNA, 19 nt, Artificial Sequence
  Description of Artificial Sequence: Synthetic oligonucleotide
ccucugucacaucagaguc

SEQ ID NO: 2522030 - RNA, 19 nt, Artificial Sequence
  Description of Artificial Sequence: Synthetic oligonucleotide
agcagcuauuguaggcacg

SEQ ID NO: 2522031 - RNA, 19 nt, Artificial Sequence
  Description of Artificial Sequence: Synthetic oligonucleotide
cuucggauacaucggaaua

SEQ ID NO: 2522032 - RNA, 19 nt, Artificial Sequence
  Description of Artificial Sequence: Synthetic oligonucleotide
caguuucagguagaccggc

SEQ ID NO: 2522033 - RNA, 19 nt, Artificial Sequence
  Description of Artificial Sequence: Synthetic oligonucleotide
cuuccccagccacucacug

SEQ ID NO: 2522034 - RNA, 19 nt, Artificial Sequence
  Description of Artificial Sequence: Synthetic oligonucleotide
cucggacaacguauccuug

SEQ ID NO: 2522035 - RNA, 19 nt, Artificial Sequence
  Description of Artificial Sequence: Synthetic oligonucleotide
agcacuucuucgaggccgg

SEQ ID NO: 2522036 - RNA, 19 nt, Artificial Sequence
  Description of Artificial Sequence: Synthetic oligonucleotide
ggacaacguauccuugggc

SEQ ID NO: 2522037 - RNA, 19 nt, Artificial Sequence
  Description of Artificial Sequence: Synthetic oligonucleotide
aucaccucugucacaucag

SEQ ID NO: 2522038 - RNA, 19 nt, Artificial Sequence
  Description of Artificial Sequence: Synthetic oligonucleotide
ucccgagaaaccaccccau

SEQ ID NO: 2522039 - RNA, 19 nt, Artificial Sequence
  Description of Artificial Sequence: Synthetic oligonucleotide
ucccuuggcuuucccgaga

SEQ ID NO: 2522040 - RNA, 19 nt, Artificial Sequence
  Description of Artificial Sequence: Synthetic oligonucleotide
agaccggccuucccucauc

SEQ ID NO: 2522041 - RNA, 19 nt, Artificial Sequence
  Description of Artificial Sequence: Synthetic oligonucleotide
uuccccagccacucacugu

SEQ ID NO: 2522042 - RNA, 19 nt, Artificial Sequence
  Description of Artificial Sequence: Synthetic oligonucleotide
ucccagacucggacaacgu

SEQ ID NO: 2522043 - RNA, 19 nt, Artificial Sequence
  Description of Artificial Sequence: Synthetic oligonucleotide
agguuccgugcggagaaag

SEQ ID NO: 2522044 - RNA, 19 nt, Artificial Sequence
  Description of Artificial Sequence: Synthetic oligonucleotide
cagugagaauauccccuug

SEQ ID NO: 2522045 - RNA, 19 nt, Artificial Sequence
  Description of Artificial Sequence: Synthetic oligonucleotide
guuucagguagaccggccu

SEQ ID NO: 2522046 - RNA, 19 nt, Artificial Sequence
  Description of Artificial Sequence: Synthetic oligonucleotide
ggacuagucguuccaagaa

SEQ ID NO: 2522047 - RNA, 19 nt, Artificial Sequence
  Description of Artificial Sequence: Synthetic oligonucleotide
cucucccacgccugagagc

SEQ ID NO: 2522048 - RNA, 19 nt, Artificial Sequence
  Description of Artificial Sequence: Synthetic oligonucleotide
caacguauccuugggccuc

SEQ ID NO: 2522049 - RNA, 19 nt, Artificial Sequence
  Description of Artificial Sequence: Synthetic oligonucleotide
auauccccuugauguaaau

SEQ ID NO: 2522050 - RNA, 19 nt, Artificial Sequence
  Description of Artificial Sequence: Synthetic oligonucleotide
ggaccuggcuauauagcag

SEQ ID NO: 2522051 - RNA, 19 nt, Artificial Sequence
  Description of Artificial Sequence: Synthetic oligonucleotide
ggauacaucggaauagagu

SEQ ID NO: 2522052 - RNA, 19 nt, Artificial Sequence
  Description of Artificial Sequence: Synthetic oligonucleotide
ccuugauguaaaugaaaga

SEQ ID NO: 2522053 - RNA, 19 nt, Artificial Sequence
  Description of Artificial Sequence: Synthetic oligonucleotide
ccuggcuucccucugucug

SEQ ID NO: 2522054 - RNA, 19 nt, Artificial Sequence
  Description of Artificial Sequence: Synthetic oligonucleotide
ggcucccuuggcuuucccg

SEQ ID NO: 2522055 - RNA, 19 nt, Artificial Sequence
  Description of Artificial Sequence: Synthetic oligonucleotide
cggaauagagucuccuggc

SEQ ID NO: 2522056 - RNA, 19 nt, Artificial Sequence
  Description of Artificial Sequence: Synthetic oligonucleotide
ggagaaaggcuaaguuuug

SEQ ID NO: 2522057 - RNA, 19 nt, Artificial Sequence
  Description of Artificial Sequence: Synthetic oligonucleotide
aggauccgagggcauacuu

SEQ ID NO: 2522058 - RNA, 19 nt, Artificial Sequence
  Description of Artificial Sequence: Synthetic oligonucleotide
cuucgaggccggacuaguc

SEQ ID NO: 2522059 - RNA, 19 nt, Artificial Sequence
  Description of Artificial Sequence: Synthetic oligonucleotide
gguuccgugcggagaaagg

SEQ ID NO: 2522060 - RNA, 19 nt, Artificial Sequence
  Description of Artificial Sequence: Synthetic oligonucleotide
gaauuuugacagugagaau

SEQ ID NO: 2522061 - RNA, 19 nt, Artificial Sequence
  Description of Artificial Sequence: Synthetic oligonucleotide
gguagaccggccuucccuc

SEQ ID NO: 2522062 - RNA, 19 nt, Artificial Sequence
  Description of Artificial Sequence: Synthetic oligonucleotide
gcucccuuggcuuucccga

SEQ ID NO: 2522063 - RNA, 19 nt, Artificial Sequence
  Description of Artificial Sequence: Synthetic oligonucleotide
gacucggacaacguauccu

SEQ ID NO: 2522064 - RNA, 19 nt, Artificial Sequence
  Description of Artificial Sequence: Synthetic oligonucleotide
gugagaauauccccuugau

SEQ ID NO: 2522065 - RNA, 19 nt, Artificial Sequence
  Description of Artificial Sequence: Synthetic oligonucleotide
uuguaggcacggucaggau

SEQ ID NO: 2522066 - RNA, 19 nt, Artificial Sequence
  Description of Artificial Sequence: Synthetic oligonucleotide
uagaccggccuucccucau

SEQ ID NO: 2522067 - RNA, 19 nt, Artificial Sequence
  Description of Artificial Sequence: Synthetic oligonucleotide
gcacggucaggauccgagg

SEQ ID NO: 2522068 - RNA, 19 nt, Artificial Sequence
  Description of Artificial Sequence: Synthetic oligonucleotide
uugccacaucaccucuguc

SEQ ID NO: 2522069 - RNA, 19 nt, Artificial Sequence
  Description of Artificial Sequence: Synthetic oligonucleotide
ccaagaaaggcaccccguc

SEQ ID NO: 2522070 - RNA, 19 nt, Artificial Sequence
  Description of Artificial Sequence: Synthetic oligonucleotide
cacuucuucgaggccggac

SEQ ID NO: 2522071 - RNA, 19 nt, Artificial Sequence
  Description of Artificial Sequence: Synthetic oligonucleotide
cagguagaccggccuuccc

SEQ ID NO: 2522072 - RNA, 19 nt, Artificial Sequence
  Description of Artificial Sequence: Synthetic oligonucleotide
aggcuaaguuuugcauuug

SEQ ID NO: 2522073 - RNA, 19 nt, Artificial Sequence
  Description of Artificial Sequence: Synthetic oligonucleotide
ggaauagagucuccuggcu

SEQ ID NO: 2522074 - RNA, 19 nt, Artificial Sequence
  Description of Artificial Sequence: Synthetic oligonucleotide
accaccccauggugaaagu

SEQ ID NO: 2522075 - RNA, 19 nt, Artificial Sequence
  Description of Artificial Sequence: Synthetic oligonucleotide
gccuucccucaucaaagug

SEQ ID NO: 2522076 - RNA, 19 nt, Artificial Sequence
  Description of Artificial Sequence: Synthetic oligonucleotide
gcacagucauaguuugaca

SEQ ID NO: 2522077 - RNA, 19 nt, Artificial Sequence
  Description of Artificial Sequence: Synthetic oligonucleotide
ggauccgagggcauacuuc

SEQ ID NO: 2522078 - RNA, 19 nt, Artificial Sequence
  Description of Artificial Sequence: Synthetic oligonucleotide
guagaccggccuucccuca

SEQ ID NO: 2522079 - RNA, 19 nt, Artificial Sequence
  Description of Artificial Sequence: Synthetic oligonucleotide
ccaggaagguuccgugcgg

SEQ ID NO: 2522080 - RNA, 19 nt, Artificial Sequence
  Description of Artificial Sequence: Synthetic oligonucleotide
uccaggccucucccacgcc

SEQ ID NO: 2522081 - RNA, 19 nt, Artificial Sequence
  Description of Artificial Sequence: Synthetic oligonucleotide
cacaucaccucugucacau

SEQ ID NO: 2522082 - RNA, 19 nt, Artificial Sequence
  Description of Artificial Sequence: Synthetic oligonucleotide
cggacaacguauccuuggg

SEQ ID NO: 2522083 - RNA, 19 nt, Artificial Sequence
  Description of Artificial Sequence: Synthetic oligonucleotide
ccguggaauuuugacagug

SEQ ID NO: 2522084 - RNA, 19 nt, Artificial Sequence
  Description of Artificial Sequence: Synthetic oligonucleotide
auccgagggcauacuucgg

SEQ ID NO: 2522085 - RNA, 19 nt, Artificial Sequence
  Description of Artificial Sequence: Synthetic oligonucleotide
uaggcacggucaggauccg

SEQ ID NO: 2522086 - RNA, 19 nt, Artificial Sequence
  Description of Artificial Sequence: Synthetic oligonucleotide
aaaccaccccauggugaaa

SEQ ID NO: 2522087 - RNA, 19 nt, Artificial Sequence
  Description of Artificial Sequence: Synthetic oligonucleotide
ugucccagacucggacaac

SEQ ID NO: 2522088 - RNA, 19 nt, Artificial Sequence
  Description of Artificial Sequence: Synthetic oligonucleotide
gaggccggacuagucguuc

SEQ ID NO: 2522089 - RNA, 19 nt, Artificial Sequence
  Description of Artificial Sequence: Synthetic oligonucleotide
cccuuuauagcacagucau

SEQ ID NO: 2522090 - RNA, 19 nt, Artificial Sequence
  Description of Artificial Sequence: Synthetic oligonucleotide
agggcauacuucggauaca

SEQ ID NO: 2522091 - RNA, 19 nt, Artificial Sequence
  Description of Artificial Sequence: Synthetic oligonucleotide
gaaacaggaccuggcuaua

SEQ ID NO: 2522092 - RNA, 19 nt, Artificial Sequence
  Description of Artificial Sequence: Synthetic oligonucleotide
ggaagguuccgugcggaga

SEQ ID NO: 2522093 - RNA, 19 nt, Artificial Sequence
  Description of Artificial Sequence: Synthetic oligonucleotide
ccucucccacgccugagag

SEQ ID NO: 2522094 - RNA, 19 nt, Artificial Sequence
  Description of Artificial Sequence: Synthetic oligonucleotide
cggauacaucggaauagag

SEQ ID NO: 2522095 - RNA, 19 nt, Artificial Sequence
  Description of Artificial Sequence: Synthetic oligonucleotide
ccggacuagucguuccaag

SEQ ID NO: 2522096 - RNA, 19 nt, Artificial Sequence
  Description of Artificial Sequence: Synthetic oligonucleotide
cuucuucgaggccggacua

SEQ ID NO: 2522097 - RNA, 19 nt, Artificial Sequence
  Description of Artificial Sequence: Synthetic oligonucleotide
cccuuaggagcacuucuuc

SEQ ID NO: 2522098 - RNA, 19 nt, Artificial Sequence
  Description of Artificial Sequence: Synthetic oligonucleotide
uagagucuccuggcucccu

SEQ ID NO: 2522099 - RNA, 19 nt, Artificial Sequence
  Description of Artificial Sequence: Synthetic oligonucleotide
uggcucccuuggcuuuccc

SEQ ID NO: 2522100 - RNA, 19 nt, Artificial Sequence
  Description of Artificial Sequence: Synthetic oligonucleotide
gcggagaaaggcuaaguuu

SEQ ID NO: 2522101 - RNA, 19 nt, Artificial Sequence
  Description of Artificial Sequence: Synthetic oligonucleotide
aagguuccgugcggagaaa

SEQ ID NO: 2522102 - RNA, 19 nt, Artificial Sequence
  Description of Artificial Sequence: Synthetic oligonucleotide
caggaagguuccgugcgga

SEQ ID NO: 2522103 - RNA, 19 nt, Artificial Sequence
  Description of Artificial Sequence: Synthetic oligonucleotide
uucccucugucuggggauu

SEQ ID NO: 2522104 - RNA, 19 nt, Artificial Sequence
  Description of Artificial Sequence: Synthetic oligonucleotide
ggcccuuaggagcacuucu

SEQ ID NO: 2522105 - RNA, 19 nt, Artificial Sequence
  Description of Artificial Sequence: Synthetic oligonucleotide
cuucccucugucuggggau

SEQ ID NO: 2522106 - RNA, 19 nt, Artificial Sequence
  Description of Artificial Sequence: Synthetic oligonucleotide
ccagacucggacaacguau

SEQ ID NO: 2522107 - RNA, 19 nt, Artificial Sequence
  Description of Artificial Sequence: Synthetic oligonucleotide
accuggcuauauagcagau

SEQ ID NO: 2522108 - RNA, 19 nt, Artificial Sequence
  Description of Artificial Sequence: Synthetic oligonucleotide
uccggcccuuaggagcacu

SEQ ID NO: 2522109 - RNA, 19 nt, Artificial Sequence
  Description of Artificial Sequence: Synthetic oligonucleotide
ccccuugauguaaaugaaa

SEQ ID NO: 2522110 - RNA, 19 nt, Artificial Sequence
  Description of Artificial Sequence: Synthetic oligonucleotide
cguggaauuuugacaguga

SEQ ID NO: 2522111 - RNA, 19 nt, Artificial Sequence
  Description of Artificial Sequence: Synthetic oligonucleotide
cggagaaaggcuaaguuuu

SEQ ID NO: 2522112 - RNA, 19 nt, Artificial Sequence
  Description of Artificial Sequence: Synthetic oligonucleotide
gucaggauccgagggcaua

SEQ ID NO: 2522113 - RNA, 19 nt, Artificial Sequence
  Description of Artificial Sequence: Synthetic oligonucleotide
cggacuagucguuccaaga

SEQ ID NO: 2522114 - RNA, 19 nt, Artificial Sequence
  Description of Artificial Sequence: Synthetic oligonucleotide
cgcacuuuccggcccuuag

SEQ ID NO: 2522115 - RNA, 19 nt, Artificial Sequence
  Description of Artificial Sequence: Synthetic oligonucleotide
cccgagaaaccaccccaug

SEQ ID NO: 2522116 - RNA, 19 nt, Artificial Sequence
  Description of Artificial Sequence: Synthetic oligonucleotide
accugcacuguagcagcua

SEQ ID NO: 2522117 - RNA, 19 nt, Artificial Sequence
  Description of Artificial Sequence: Synthetic oligonucleotide
accggccuucccucaucaa

SEQ ID NO: 2522118 - RNA, 19 nt, Artificial Sequence
  Description of Artificial Sequence: Synthetic oligonucleotide
ggccggacuagucguucca

SEQ ID NO: 2522119 - RNA, 19 nt, Artificial Sequence
  Description of Artificial Sequence: Synthetic oligonucleotide
gugcggagaaaggcuaagu

SEQ ID NO: 2522120 - RNA, 19 nt, Artificial Sequence
  Description of Artificial Sequence: Synthetic oligonucleotide
ccuugggccuccaggccuc

SEQ ID NO: 2522121 - RNA, 19 nt, Artificial Sequence
  Description of Artificial Sequence: Synthetic oligonucleotide
cgagaaaccaccccauggu

SEQ ID NO: 2522122 - RNA, 19 nt, Artificial Sequence
  Description of Artificial Sequence: Synthetic oligonucleotide
ggcauacuucggauacauc

SEQ ID NO: 2522123 - RNA, 19 nt, Artificial Sequence
  Description of Artificial Sequence: Synthetic oligonucleotide
ccuuuauagcacagucaua

SEQ ID NO: 2522124 - RNA, 19 nt, Artificial Sequence
  Description of Artificial Sequence: Synthetic oligonucleotide
caccccguccuggcuuccc

SEQ ID NO: 2522125 - RNA, 19 nt, Artificial Sequence
  Description of Artificial Sequence: Synthetic oligonucleotide
gggcauacuucggauacau

SEQ ID NO: 2522126 - RNA, 19 nt, Artificial Sequence
  Description of Artificial Sequence: Synthetic oligonucleotide
ucgcacuuuccggcccuua

SEQ ID NO: 2522127 - RNA, 19 nt, Artificial Sequence
  Description of Artificial Sequence: Synthetic oligonucleotide
ccaccccauggugaaaguc

SEQ ID NO: 2522128 - RNA, 19 nt, Artificial Sequence
  Description of Artificial Sequence: Synthetic oligonucleotide
cucccacgccugagagcug

SEQ ID NO: 2522129 - RNA, 19 nt, Artificial Sequence
  Description of Artificial Sequence: Synthetic oligonucleotide
ccggccuucccucaucaaa

SEQ ID NO: 2522130 - RNA, 19 nt, Artificial Sequence
  Description of Artificial Sequence: Synthetic oligonucleotide
cgugcggagaaaggcuaag

SEQ ID NO: 2522131 - RNA, 19 nt, Artificial Sequence
  Description of Artificial Sequence: Synthetic oligonucleotide
aggcacggucaggauccga

SEQ ID NO: 2522132 - RNA, 19 nt, Artificial Sequence
  Description of Artificial Sequence: Synthetic oligonucleotide
cuccuggcucccuuggcuu

SEQ ID NO: 2522133 - RNA, 19 nt, Artificial Sequence
  Description of Artificial Sequence: Synthetic oligonucleotide
uuccggcccuuaggagcac

SEQ ID NO: 2522134 - RNA, 19 nt, Artificial Sequence
  Description of Artificial Sequence: Synthetic oligonucleotide
caccugcacuguagcagcu

SEQ ID NO: 2522135 - RNA, 19 nt, Artificial Sequence
  Description of Artificial Sequence: Synthetic oligonucleotide
cccagacucggacaacgua

SEQ ID NO: 2522136 - RNA, 19 nt, Artificial Sequence
  Description of Artificial Sequence: Synthetic oligonucleotide
cauuugcccguggaauuuu

SEQ ID NO: 2522137 - RNA, 19 nt, Artificial Sequence
  Description of Artificial Sequence: Synthetic oligonucleotide
cccuuggcuuucccgagaa

SEQ ID NO: 2522138 - RNA, 19 nt, Artificial Sequence
  Description of Artificial Sequence: Synthetic oligonucleotide
ccacaucaccucugucaca

SEQ ID NO: 2522139 - RNA, 19 nt, Artificial Sequence
  Description of Artificial Sequence: Synthetic oligonucleotide
ccugcacuguagcagcuau

SEQ ID NO: 2522140 - RNA, 19 nt, Artificial Sequence
  Description of Artificial Sequence: Synthetic oligonucleotide
cugcacuguagcagcuauu

SEQ ID NO: 2522141 - RNA, 19 nt, Artificial Sequence
  Description of Artificial Sequence: Synthetic oligonucleotide
gcauuugcccguggaauuu

SEQ ID NO: 2522142 - RNA, 19 nt, Artificial Sequence
  Description of Artificial Sequence: Synthetic oligonucleotide
cggucaggauccgagggca

SEQ ID NO: 2522143 - RNA, 19 nt, Artificial Sequence
  Description of Artificial Sequence: Synthetic oligonucleotide
ccuggcucccuuggcuuuc

SEQ ID NO: 2522144 - RNA, 19 nt, Artificial Sequence
  Description of Artificial Sequence: Synthetic oligonucleotide
ccuggcuauauagcagaua

SEQ ID NO: 2522145 - RNA, 19 nt, Artificial Sequence
  Description of Artificial Sequence: Synthetic oligonucleotide
cgagggcauacuucggaua

SEQ ID NO: 2522146 - RNA, 19 nt, Artificial Sequence
  Description of Artificial Sequence: Synthetic oligonucleotide
gccggacuagucguuccaa

SEQ ID NO: 2522147 - RNA, 19 nt, Artificial Sequence
  Description of Artificial Sequence: Synthetic oligonucleotide
gcucgcacuuuccggcccu

SEQ ID NO: 2522148 - RNA, 19 nt, Artificial Sequence
  Description of Artificial Sequence: Synthetic oligonucleotide
cagcuauuguaggcacggu

SEQ ID NO: 2522149 - RNA, 19 nt, Artificial Sequence
  Description of Artificial Sequence: Synthetic oligonucleotide
ccgugcggagaaaggcuaa

SEQ ID NO: 2522150 - RNA, 19 nt, Artificial Sequence
  Description of Artificial Sequence: Synthetic oligonucleotide
cgccugagagcugguugcc

SEQ ID NO: 2522151 - RNA, 19 nt, Artificial Sequence
  Description of Artificial Sequence: Synthetic oligonucleotide
ccgagggcauacuucggau

SEQ ID NO: 2522152 - RNA, 19 nt, Artificial Sequence
  Description of Artificial Sequence: Synthetic oligonucleotide
gcccuuaggagcacuucuu

SEQ ID NO: 2522153 - RNA, 19 nt, Artificial Sequence
  Description of Artificial Sequence: Synthetic oligonucleotide
gcacuucuucgaggccgga

SEQ ID NO: 2522154 - RNA, 19 nt, Artificial Sequence
  Description of Artificial Sequence: Synthetic oligonucleotide
gcaccccguccuggcuucc

SEQ ID NO: 2522155 - RNA, 19 nt, Artificial Sequence
  Description of Artificial Sequence: Synthetic oligonucleotide
cggcccuuaggagcacuuc

SEQ ID NO: 2522156 - RNA, 19 nt, Artificial Sequence
  Description of Artificial Sequence: Synthetic oligonucleotide
cucgcacuuuccggcccuu

SEQ ID NO: 2522157 - RNA, 19 nt, Artificial Sequence
  Description of Artificial Sequence: Synthetic oligonucleotide
ccggcccuuaggagcacuu

SEQ ID NO: 2522158 - RNA, 19 nt, Artificial Sequence
  Description of Artificial Sequence: Synthetic oligonucleotide
cccacgccugagagcuggu

SEQ ID NO: 2522159 - RNA, 19 nt, Artificial Sequence
  Description of Artificial Sequence: Synthetic oligonucleotide
aaauaggcgaugcuggggc

SEQ ID NO: 2522160 - RNA, 19 nt, Artificial Sequence
  Description of Artificial Sequence: Synthetic oligonucleotide
cuggaguucagcaagaggg

SEQ ID NO: 2522161 - RNA, 19 nt, Artificial Sequence
  Description of Artificial Sequence: Synthetic oligonucleotide
ucgcauaggaacaggaugg

SEQ ID NO: 2522162 - RNA, 19 nt, Artificial Sequence
  Description of Artificial Sequence: Synthetic oligonucleotide
cauaggaacaggauggaag

SEQ ID NO: 2522163 - RNA, 19 nt, Artificial Sequence
  Description of Artificial Sequence: Synthetic oligonucleotide
agaaugagcgcuucgcugg

SEQ ID NO: 2522164 - RNA, 19 nt, Artificial Sequence
  Description of Artificial Sequence: Synthetic oligonucleotide
aacaggauggaagacuccg

SEQ ID NO: 2522165 - RNA, 19 nt, Artificial Sequence
  Description of Artificial Sequence: Synthetic oligonucleotide
acaagcugcagaaugagcg

SEQ ID NO: 2522166 - RNA, 19 nt, Artificial Sequence
  Description of Artificial Sequence: Synthetic oligonucleotide
ucuggaguucagcaagagg

SEQ ID NO: 2522167 - RNA, 19 nt, Artificial Sequence
  Description of Artificial Sequence: Synthetic oligonucleotide
acugauacgaucuguggga

SEQ ID NO: 2522168 - RNA, 19 nt, Artificial Sequence
  Description of Artificial Sequence: Synthetic oligonucleotide
uucaagaugcagacuuggg

SEQ ID NO: 2522169 - RNA, 19 nt, Artificial Sequence
  Description of Artificial Sequence: Synthetic oligonucleotide
acggaacgcagcuugggcc

SEQ ID NO: 2522170 - RNA, 19 nt, Artificial Sequence
  Description of Artificial Sequence: Synthetic oligonucleotide
uuacucacuggccggaugc

SEQ ID NO: 2522171 - RNA, 19 nt, Artificial Sequence
  Description of Artificial Sequence: Synthetic oligonucleotide
aucugugggaaauaggcga

SEQ ID NO: 2522172 - RNA, 19 nt, Artificial Sequence
  Description of Artificial Sequence: Synthetic oligonucleotide
ugaagcacgucuuacucac

SEQ ID NO: 2522173 - RNA, 19 nt, Artificial Sequence
  Description of Artificial Sequence: Synthetic oligonucleotide
uggaguucagcaagagggg

SEQ ID NO: 2522174 - RNA, 19 nt, Artificial Sequence
  Description of Artificial Sequence: Synthetic oligonucleotide
gauggaagacuccgggagg

SEQ ID NO: 2522175 - RNA, 19 nt, Artificial Sequence
  Description of Artificial Sequence: Synthetic oligonucleotide
gaacuucuccugcaugucg

SEQ ID NO: 2522176 - RNA, 19 nt, Artificial Sequence
  Description of Artificial Sequence: Synthetic oligonucleotide
cacugauacgaucuguggg

SEQ ID NO: 2522177 - RNA, 19 nt, Artificial Sequence
  Description of Artificial Sequence: Synthetic oligonucleotide
aauaggcgaugcuggggcg

SEQ ID NO: 2522178 - RNA, 19 nt, Artificial Sequence
  Description of Artificial Sequence: Synthetic oligonucleotide
uggccggaugcccugagcg

SEQ ID NO: 2522179 - RNA, 19 nt, Artificial Sequence
  Description of Artificial Sequence: Synthetic oligonucleotide
auuuccgggaggcaccagg

SEQ ID NO: 2522180 - RNA, 19 nt, Artificial Sequence
  Description of Artificial Sequence: Synthetic oligonucleotide
ugggaaauaggcgaugcug

SEQ ID NO: 2522181 - RNA, 19 nt, Artificial Sequence
  Description of Artificial Sequence: Synthetic oligonucleotide
uugaacuuggggugggcag

SEQ ID NO: 2522182 - RNA, 19 nt, Artificial Sequence
  Description of Artificial Sequence: Synthetic oligonucleotide
gaucugugggaaauaggcg

SEQ ID NO: 2522183 - RNA, 19 nt, Artificial Sequence
  Description of Artificial Sequence: Synthetic oligonucleotide
gaaauaggcgaugcugggg

SEQ ID NO: 2522184 - RNA, 19 nt, Artificial Sequence
  Description of Artificial Sequence: Synthetic oligonucleotide
acucucucggguuccggcc

SEQ ID NO: 2522185 - RNA, 19 nt, Artificial Sequence
  Description of Artificial Sequence: Synthetic oligonucleotide
cuguguucaagaugcagac

SEQ ID NO: 2522186 - RNA, 19 nt, Artificial Sequence
  Description of Artificial Sequence: Synthetic oligonucleotide
ugggucaccguuuggcccg

SEQ ID NO: 2522187 - RNA, 19 nt, Artificial Sequence
  Description of Artificial Sequence: Synthetic oligonucleotide
cugaccuuggaagaggccc

SEQ ID NO: 2522188 - RNA, 19 nt, Artificial Sequence
  Description of Artificial Sequence: Synthetic oligonucleotide
gaagacuccgggaggaucc

SEQ ID NO: 2522189 - RNA, 19 nt, Artificial Sequence
  Description of Artificial Sequence: Synthetic oligonucleotide
uucugaccuuggaagaggc

SEQ ID NO: 2522190 - RNA, 19 nt, Artificial Sequence
  Description of Artificial Sequence: Synthetic oligonucleotide
uucgaguccagccggcccc

SEQ ID NO: 2522191 - RNA, 19 nt, Artificial Sequence
  Description of Artificial Sequence: Synthetic oligonucleotide
ugugggaaauaggcgaugc

SEQ ID NO: 2522192 - RNA, 19 nt, Artificial Sequence
  Description of Artificial Sequence: Synthetic oligonucleotide
cugguggagaggaaagccc

SEQ ID NO: 2522193 - RNA, 19 nt, Artificial Sequence
  Description of Artificial Sequence: Synthetic oligonucleotide
agacuugggucucgaggcc

SEQ ID NO: 2522194 - RNA, 19 nt, Artificial Sequence
  Description of Artificial Sequence: Synthetic oligonucleotide
uccaccaggugccuucugc

SEQ ID NO: 2522195 - RNA, 19 nt, Artificial Sequence
  Description of Artificial Sequence: Synthetic oligonucleotide
ugcagaaugagcgcuucgc

SEQ ID NO: 2522196 - RNA, 19 nt, Artificial Sequence
  Description of Artificial Sequence: Synthetic oligonucleotide
gggguucugaccuuggaag

SEQ ID NO: 2522197 - RNA, 19 nt, Artificial Sequence
  Description of Artificial Sequence: Synthetic oligonucleotide
augagcgcuucgcuggugg

SEQ ID NO: 2522198 - RNA, 19 nt, Artificial Sequence
  Description of Artificial Sequence: Synthetic oligonucleotide
caagcugcagaaugagcgc

SEQ ID NO: 2522199 - RNA, 19 nt, Artificial Sequence
  Description of Artificial Sequence: Synthetic oligonucleotide
gggaaauaggcgaugcugg

SEQ ID NO: 2522200 - RNA, 19 nt, Artificial Sequence
  Description of Artificial Sequence: Synthetic oligonucleotide
gucucgaggccacagagca

SEQ ID NO: 2522201 - RNA, 19 nt, Artificial Sequence
  Description of Artificial Sequence: Synthetic oligonucleotide
ugaccuuggaagaggccca

SEQ ID NO: 2522202 - RNA, 19 nt, Artificial Sequence
  Description of Artificial Sequence: Synthetic oligonucleotide
agcacgucuuacucacugg

SEQ ID NO: 2522203 - RNA, 19 nt, Artificial Sequence
  Description of Artificial Sequence: Synthetic oligonucleotide
acguggaccugcaagcccc

SEQ ID NO: 2522204 - RNA, 19 nt, Artificial Sequence
  Description of Artificial Sequence: Synthetic oligonucleotide
ggaaauaggcgaugcuggg

SEQ ID NO: 2522205 - RNA, 19 nt, Artificial Sequence
  Description of Artificial Sequence: Synthetic oligonucleotide
cucgaggccacagagcagc

SEQ ID NO: 2522206 - RNA, 19 nt, Artificial Sequence
  Description of Artificial Sequence: Synthetic oligonucleotide
uucgagaggagcaggcguc

SEQ ID NO: 2522207 - RNA, 19 nt, Artificial Sequence
  Description of Artificial Sequence: Synthetic oligonucleotide
cuuggaagaggcccagcag

SEQ ID NO: 2522208 - RNA, 19 nt, Artificial Sequence
  Description of Artificial Sequence: Synthetic oligonucleotide
ucggguuccggccuggguc

SEQ ID NO: 2522209 - RNA, 19 nt, Artificial Sequence
  Description of Artificial Sequence: Synthetic oligonucleotide
ucucaagucagggucugga

SEQ ID NO: 2522210 - RNA, 19 nt, Artificial Sequence
  Description of Artificial Sequence: Synthetic oligonucleotide
ugcugaagcacgucuuacu

SEQ ID NO: 2522211 - RNA, 19 nt, Artificial Sequence
  Description of Artificial Sequence: Synthetic oligonucleotide
guccaccuggcuucgagag

SEQ ID NO: 2522212 - RNA, 19 nt, Artificial Sequence
  Description of Artificial Sequence: Synthetic oligonucleotide
guucugaccuuggaagagg

SEQ ID NO: 2522213 - RNA, 19 nt, Artificial Sequence
  Description of Artificial Sequence: Synthetic oligonucleotide
uccaccuggcuucgagagg

SEQ ID NO: 2522214 - RNA, 19 nt, Artificial Sequence
  Description of Artificial Sequence: Synthetic oligonucleotide
agccgguccaccuggcuuc

SEQ ID NO: 2522215 - RNA, 19 nt, Artificial Sequence
  Description of Artificial Sequence: Synthetic oligonucleotide
agcagcacggaacgcagcu

SEQ ID NO: 2522216 - RNA, 19 nt, Artificial Sequence
  Description of Artificial Sequence: Synthetic oligonucleotide
cucaagucagggucuggag

SEQ ID NO: 2522217 - RNA, 19 nt, Artificial Sequence
  Description of Artificial Sequence: Synthetic oligonucleotide
cacgucuuacucacuggcc

SEQ ID NO: 2522218 - RNA, 19 nt, Artificial Sequence
  Description of Artificial Sequence: Synthetic oligonucleotide
ucugaccuuggaagaggcc

SEQ ID NO: 2522219 - RNA, 19 nt, Artificial Sequence
  Description of Artificial Sequence: Synthetic oligonucleotide
cagguucgaguccagccgg

SEQ ID NO: 2522220 - RNA, 19 nt, Artificial Sequence
  Description of Artificial Sequence: Synthetic oligonucleotide
uuuccgggaggcaccaggu

SEQ ID NO: 2522221 - RNA, 19 nt, Artificial Sequence
  Description of Artificial Sequence: Synthetic oligonucleotide
gacucucucggguuccggc

SEQ ID NO: 2522222 - RNA, 19 nt, Artificial Sequence
  Description of Artificial Sequence: Synthetic oligonucleotide
uucgccaccggacucucuc

SEQ ID NO: 2522223 - RNA, 19 nt, Artificial Sequence
  Description of Artificial Sequence: Synthetic oligonucleotide
gaaagccccgcucugccuc

SEQ ID NO: 2522224 - RNA, 19 nt, Artificial Sequence
  Description of Artificial Sequence: Synthetic oligonucleotide
aagcugcagaaugagcgcu

SEQ ID NO: 2522225 - RNA, 19 nt, Artificial Sequence
  Description of Artificial Sequence: Synthetic oligonucleotide
caagccccgcuccaggagg

SEQ ID NO: 2522226 - RNA, 19 nt, Artificial Sequence
  Description of Artificial Sequence: Synthetic oligonucleotide
gggucuggaguucagcaag

SEQ ID NO: 2522227 - RNA, 19 nt, Artificial Sequence
  Description of Artificial Sequence: Synthetic oligonucleotide
ucaccguuuggcccgcugu

SEQ ID NO: 2522228 - RNA, 19 nt, Artificial Sequence
  Description of Artificial Sequence: Synthetic oligonucleotide
caccacguggaccugcaag

SEQ ID NO: 2522229 - RNA, 19 nt, Artificial Sequence
  Description of Artificial Sequence: Synthetic oligonucleotide
augcugaagcacgucuuac

SEQ ID NO: 2522230 - RNA, 19 nt, Artificial Sequence
  Description of Artificial Sequence: Synthetic oligonucleotide
gaggcaccagguucgaguc

SEQ ID NO: 2522231 - RNA, 19 nt, Artificial Sequence
  Description of Artificial Sequence: Synthetic oligonucleotide
acucacuggccggaugccc

SEQ ID NO: 2522232 - RNA, 19 nt, Artificial Sequence
  Description of Artificial Sequence: Synthetic oligonucleotide
guguucaagaugcagacuu

SEQ ID NO: 2522233 - RNA, 19 nt, Artificial Sequence
  Description of Artificial Sequence: Synthetic oligonucleotide
gaugcagacuugggucucg

SEQ ID NO: 2522234 - RNA, 19 nt, Artificial Sequence
  Description of Artificial Sequence: Synthetic oligonucleotide
agaggaaagccccgcucug

SEQ ID NO: 2522235 - RNA, 19 nt, Artificial Sequence
  Description of Artificial Sequence: Synthetic oligonucleotide
ucccgcacaagcugcagaa

SEQ ID NO: 2522236 - RNA, 19 nt, Artificial Sequence
  Description of Artificial Sequence: Synthetic oligonucleotide
gauacgaucugugggaaau

SEQ ID NO: 2522237 - RNA, 19 nt, Artificial Sequence
  Description of Artificial Sequence: Synthetic oligonucleotide
accggacucucucggguuc

SEQ ID NO: 2522238 - RNA, 19 nt, Artificial Sequence
  Description of Artificial Sequence: Synthetic oligonucleotide
cacggaacgcagcuugggc

SEQ ID NO: 2522239 - RNA, 19 nt, Artificial Sequence
  Description of Artificial Sequence: Synthetic oligonucleotide
ugccauuuccgggaggcac

SEQ ID NO: 2522240 - RNA, 19 nt, Artificial Sequence
  Description of Artificial Sequence: Synthetic oligonucleotide
cagcacggaacgcagcuug

SEQ ID NO: 2522241 - RNA, 19 nt, Artificial Sequence
  Description of Artificial Sequence: Synthetic oligonucleotide
gcuguggacacgugguccg

SEQ ID NO: 2522242 - RNA, 19 nt, Artificial Sequence
  Description of Artificial Sequence: Synthetic oligonucleotide
cuugggccggccauccagc

SEQ ID NO: 2522243 - RNA, 19 nt, Artificial Sequence
  Description of Artificial Sequence: Synthetic oligonucleotide
agcgucccgcacaagcugc

SEQ ID NO: 2522244 - RNA, 19 nt, Artificial Sequence
  Description of Artificial Sequence: Synthetic oligonucleotide
auaggcgaugcuggggcgg

SEQ ID NO: 2522245 - RNA, 19 nt, Artificial Sequence
  Description of Artificial Sequence: Synthetic oligonucleotide
uguguucaagaugcagacu

SEQ ID NO: 2522246 - RNA, 19 nt, Artificial Sequence
  Description of Artificial Sequence: Synthetic oligonucleotide
aagacuccgggaggauccg

SEQ ID NO: 2522247 - RNA, 19 nt, Artificial Sequence
  Description of Artificial Sequence: Synthetic oligonucleotide
uucgcugguggagaggaaa

SEQ ID NO: 2522248 - RNA, 19 nt, Artificial Sequence
  Description of Artificial Sequence: Synthetic oligonucleotide
uggagaggaaagccccgcu

SEQ ID NO: 2522249 - RNA, 19 nt, Artificial Sequence
  Description of Artificial Sequence: Synthetic oligonucleotide
ucucgaggccacagagcag

SEQ ID NO: 2522250 - RNA, 19 nt, Artificial Sequence
  Description of Artificial Sequence: Synthetic oligonucleotide
aggagcaggcguccaccac

SEQ ID NO: 2522251 - RNA, 19 nt, Artificial Sequence
  Description of Artificial Sequence: Synthetic oligonucleotide
cuuacucacuggccggaug

SEQ ID NO: 2522252 - RNA, 19 nt, Artificial Sequence
  Description of Artificial Sequence: Synthetic oligonucleotide
gagaggaaagccccgcucu

SEQ ID NO: 2522253 - RNA, 19 nt, Artificial Sequence
  Description of Artificial Sequence: Synthetic oligonucleotide
uggcugcugccauuuccgg

SEQ ID NO: 2522254 - RNA, 19 nt, Artificial Sequence
  Description of Artificial Sequence: Synthetic oligonucleotide
uggggcggaacuucuccug

SEQ ID NO: 2522255 - RNA, 19 nt, Artificial Sequence
  Description of Artificial Sequence: Synthetic oligonucleotide
uggaccugcaagccccgcu

SEQ ID NO: 2522256 - RNA, 19 nt, Artificial Sequence
  Description of Artificial Sequence: Synthetic oligonucleotide
aaagccccgcucugccuca

SEQ ID NO: 2522257 - RNA, 19 nt, Artificial Sequence
  Description of Artificial Sequence: Synthetic oligonucleotide
auggaagacuccgggagga

SEQ ID NO: 2522258 - RNA, 19 nt, Artificial Sequence
  Description of Artificial Sequence: Synthetic oligonucleotide
ugauacgaucugugggaaa

SEQ ID NO: 2522259 - RNA, 19 nt, Artificial Sequence
  Description of Artificial Sequence: Synthetic oligonucleotide
cagggcuguguucaagaug

SEQ ID NO: 2522260 - RNA, 19 nt, Artificial Sequence
  Description of Artificial Sequence: Synthetic oligonucleotide
acagagcagcacggaacgc

SEQ ID NO: 2522261 - RNA, 19 nt, Artificial Sequence
  Description of Artificial Sequence: Synthetic oligonucleotide
uucugcgcacuuucgccac

SEQ ID NO: 2522262 - RNA, 19 nt, Artificial Sequence
  Description of Artificial Sequence: Synthetic oligonucleotide
guucgaguccagccggccc

SEQ ID NO: 2522263 - RNA, 19 nt, Artificial Sequence
  Description of Artificial Sequence: Synthetic oligonucleotide
ggcagcgucccgcacaagc

SEQ ID NO: 2522264 - RNA, 19 nt, Artificial Sequence
  Description of Artificial Sequence: Synthetic oligonucleotide
ccucaugcgggccagugcc

SEQ ID NO: 2522265 - RNA, 19 nt, Artificial Sequence
  Description of Artificial Sequence: Synthetic oligonucleotide
cuucugcgcacuuucgcca

SEQ ID NO: 2522266 - RNA, 19 nt, Artificial Sequence
  Description of Artificial Sequence: Synthetic oligonucleotide
gcacgucuuacucacuggc

SEQ ID NO: 2522267 - RNA, 19 nt, Artificial Sequence
  Description of Artificial Sequence: Synthetic oligonucleotide
cacguggaccugcaagccc

SEQ ID NO: 2522268 - RNA, 19 nt, Artificial Sequence
  Description of Artificial Sequence: Synthetic oligonucleotide
ucgccaccggacucucucg

SEQ ID NO: 2522269 - RNA, 19 nt, Artificial Sequence
  Description of Artificial Sequence: Synthetic oligonucleotide
uggacacgugguccgcgcc

SEQ ID NO: 2522270 - RNA, 19 nt, Artificial Sequence
  Description of Artificial Sequence: Synthetic oligonucleotide
accuggcuucgagaggagc

SEQ ID NO: 2522271 - RNA, 19 nt, Artificial Sequence
  Description of Artificial Sequence: Synthetic oligonucleotide
ccuucugcgcacuuucgcc

SEQ ID NO: 2522272 - RNA, 19 nt, Artificial Sequence
  Description of Artificial Sequence: Synthetic oligonucleotide
gcaggcguccaccaccacg

SEQ ID NO: 2522273 - RNA, 19 nt, Artificial Sequence
  Description of Artificial Sequence: Synthetic oligonucleotide
uucugcaaggugggcacca

SEQ ID NO: 2522274 - RNA, 19 nt, Artificial Sequence
  Description of Artificial Sequence: Synthetic oligonucleotide
ugcaagccccgcuccagga

SEQ ID NO: 2522275 - RNA, 19 nt, Artificial Sequence
  Description of Artificial Sequence: Synthetic oligonucleotide
ccacugauacgaucugugg

SEQ ID NO: 2522276 - RNA, 19 nt, Artificial Sequence
  Description of Artificial Sequence: Synthetic oligonucleotide
cugcagaaugagcgcuucg

SEQ ID NO: 2522277 - RNA, 19 nt, Artificial Sequence
  Description of Artificial Sequence: Synthetic oligonucleotide
uuuggcccgcuguggacac

SEQ ID NO: 2522278 - RNA, 19 nt, Artificial Sequence
  Description of Artificial Sequence: Synthetic oligonucleotide
ugcugccauuuccgggagg

SEQ ID NO: 2522279 - RNA, 19 nt, Artificial Sequence
  Description of Artificial Sequence: Synthetic oligonucleotide
caccaggugccuucugcgc

SEQ ID NO: 2522280 - RNA, 19 nt, Artificial Sequence
  Description of Artificial Sequence: Synthetic oligonucleotide
uggcuucgagaggagcagg

SEQ ID NO: 2522281 - RNA, 19 nt, Artificial Sequence
  Description of Artificial Sequence: Synthetic oligonucleotide
gggccggccauccagcucc

SEQ ID NO: 2522282 - RNA, 19 nt, Artificial Sequence
  Description of Artificial Sequence: Synthetic oligonucleotide
ucugcgcacuuucgccacc

SEQ ID NO: 2522283 - RNA, 19 nt, Artificial Sequence
  Description of Artificial Sequence: Synthetic oligonucleotide
acuuucgccaccggacucu

SEQ ID NO: 2522284 - RNA, 19 nt, Artificial Sequence
  Description of Artificial Sequence: Synthetic oligonucleotide
accguuuggcccgcugugg

SEQ ID NO: 2522285 - RNA, 19 nt, Artificial Sequence
  Description of Artificial Sequence: Synthetic oligonucleotide
gcugguggagaggaaagcc

SEQ ID NO: 2522286 - RNA, 19 nt, Artificial Sequence
  Description of Artificial Sequence: Synthetic oligonucleotide
cuggcuucgagaggagcag

SEQ ID NO: 2522287 - RNA, 19 nt, Artificial Sequence
  Description of Artificial Sequence: Synthetic oligonucleotide
aggcccagcagcccgcugu

SEQ ID NO: 2522288 - RNA, 19 nt, Artificial Sequence
  Description of Artificial Sequence: Synthetic oligonucleotide
aaugagcgcuucgcuggug

SEQ ID NO: 2522289 - RNA, 19 nt, Artificial Sequence
  Description of Artificial Sequence: Synthetic oligonucleotide
ucgagaggagcaggcgucc

SEQ ID NO: 2522290 - RNA, 19 nt, Artificial Sequence
  Description of Artificial Sequence: Synthetic oligonucleotide
ugcgcacuuucgccaccgg

SEQ ID NO: 2522291 - RNA, 19 nt, Artificial Sequence
  Description of Artificial Sequence: Synthetic oligonucleotide
ucacuggccggaugcccug

SEQ ID NO: 2522292 - RNA, 19 nt, Artificial Sequence
  Description of Artificial Sequence: Synthetic oligonucleotide
guggacacgugguccgcgc

SEQ ID NO: 2522293 - RNA, 19 nt, Artificial Sequence
  Description of Artificial Sequence: Synthetic oligonucleotide
ugagcgcuucgcuggugga

SEQ ID NO: 2522294 - RNA, 19 nt, Artificial Sequence
  Description of Artificial Sequence: Synthetic oligonucleotide
gacacgugguccgcgcccc

SEQ ID NO: 2522295 - RNA, 19 nt, Artificial Sequence
  Description of Artificial Sequence: Synthetic oligonucleotide
cuugaacuuggggugggca

SEQ ID NO: 2522296 - RNA, 19 nt, Artificial Sequence
  Description of Artificial Sequence: Synthetic oligonucleotide
uacucacuggccggaugcc

SEQ ID NO: 2522297 - RNA, 19 nt, Artificial Sequence
  Description of Artificial Sequence: Synthetic oligonucleotide
aguccagccggccccucca

SEQ ID NO: 2522298 - RNA, 19 nt, Artificial Sequence
  Description of Artificial Sequence: Synthetic oligonucleotide
gcuggggcggaacuucucc

SEQ ID NO: 2522299 - RNA, 19 nt, Artificial Sequence
  Description of Artificial Sequence: Synthetic oligonucleotide
gagcgcuucgcugguggag

SEQ ID NO: 2522300 - RNA, 19 nt, Artificial Sequence
  Description of Artificial Sequence: Synthetic oligonucleotide
gcuugggccggccauccag

SEQ ID NO: 2522301 - RNA, 19 nt, Artificial Sequence
  Description of Artificial Sequence: Synthetic oligonucleotide
agguucgaguccagccggc

SEQ ID NO: 2522302 - RNA, 19 nt, Artificial Sequence
  Description of Artificial Sequence: Synthetic oligonucleotide
uccagccggccccuccacc

SEQ ID NO: 2522303 - RNA, 19 nt, Artificial Sequence
  Description of Artificial Sequence: Synthetic oligonucleotide
uuggggugggcagcguccc

SEQ ID NO: 2522304 - RNA, 19 nt, Artificial Sequence
  Description of Artificial Sequence: Synthetic oligonucleotide
agcgcuucgcugguggaga

SEQ ID NO: 2522305 - RNA, 19 nt, Artificial Sequence
  Description of Artificial Sequence: Synthetic oligonucleotide
cagagcagcacggaacgca

SEQ ID NO: 2522306 - RNA, 19 nt, Artificial Sequence
  Description of Artificial Sequence: Synthetic oligonucleotide
guuuggcccgcuguggaca

SEQ ID NO: 2522307 - RNA, 19 nt, Artificial Sequence
  Description of Artificial Sequence: Synthetic oligonucleotide
augcccugagcgcccagcu

SEQ ID NO: 2522308 - RNA, 19 nt, Artificial Sequence
  Description of Artificial Sequence: Synthetic oligonucleotide
caccguuuggcccgcugug

SEQ ID NO: 2522309 - RNA, 19 nt, Artificial Sequence
  Description of Artificial Sequence: Synthetic oligonucleotide
gaguccagccggccccucc

SEQ ID NO: 2522310 - RNA, 19 nt, Artificial Sequence
  Description of Artificial Sequence: Synthetic oligonucleotide
agcacggaacgcagcuugg

SEQ ID NO: 2522311 - RNA, 19 nt, Artificial Sequence
  Description of Artificial Sequence: Synthetic oligonucleotide
gguggagaggaaagccccg

SEQ ID NO: 2522312 - RNA, 19 nt, Artificial Sequence
  Description of Artificial Sequence: Synthetic oligonucleotide
ccgggaggcaccagguucg

SEQ ID NO: 2522313 - RNA, 19 nt, Artificial Sequence
  Description of Artificial Sequence: Synthetic oligonucleotide
ggagaggaaagccccgcuc

SEQ ID NO: 2522314 - RNA, 19 nt, Artificial Sequence
  Description of Artificial Sequence: Synthetic oligonucleotide
ucgaggccacagagcagca

SEQ ID NO: 2522315 - RNA, 19 nt, Artificial Sequence
  Description of Artificial Sequence: Synthetic oligonucleotide
ugccucaugcgggccagug

SEQ ID NO: 2522316 - RNA, 19 nt, Artificial Sequence
  Description of Artificial Sequence: Synthetic oligonucleotide
cagcgucccgcacaagcug

SEQ ID NO: 2522317 - RNA, 19 nt, Artificial Sequence
  Description of Artificial Sequence: Synthetic oligonucleotide
cugcgcacuuucgccaccg

SEQ ID NO: 2522318 - RNA, 19 nt, Artificial Sequence
  Description of Artificial Sequence: Synthetic oligonucleotide
ggguucugaccuuggaaga

SEQ ID NO: 2522319 - RNA, 19 nt, Artificial Sequence
  Description of Artificial Sequence: Synthetic oligonucleotide
cacuuucgccaccggacuc

SEQ ID NO: 2522320 - RNA, 19 nt, Artificial Sequence
  Description of Artificial Sequence: Synthetic oligonucleotide
gcuucgagaggagcaggcg

SEQ ID NO: 2522321 - RNA, 19 nt, Artificial Sequence
  Description of Artificial Sequence: Synthetic oligonucleotide
cuucgagaggagcaggcgu

SEQ ID NO: 2522322 - RNA, 19 nt, Artificial Sequence
  Description of Artificial Sequence: Synthetic oligonucleotide
gccuucugcgcacuuucgc

SEQ ID NO: 2522323 - RNA, 19 nt, Artificial Sequence
  Description of Artificial Sequence: Synthetic oligonucleotide
uccggccugggucaccguu

SEQ ID NO: 2522324 - RNA, 19 nt, Artificial Sequence
  Description of Artificial Sequence: Synthetic oligonucleotide
uugggccggccauccagcu

SEQ ID NO: 2522325 - RNA, 19 nt, Artificial Sequence
  Description of Artificial Sequence: Synthetic oligonucleotide
cugugggaaauaggcgaug

SEQ ID NO: 2522326 - RNA, 19 nt, Artificial Sequence
  Description of Artificial Sequence: Synthetic oligonucleotide
cgcacuuucgccaccggac

SEQ ID NO: 2522327 - RNA, 19 nt, Artificial Sequence
  Description of Artificial Sequence: Synthetic oligonucleotide
uaggcgaugcuggggcgga

SEQ ID NO: 2522328 - RNA, 19 nt, Artificial Sequence
  Description of Artificial Sequence: Synthetic oligonucleotide
ucuuacucacuggccggau

SEQ ID NO: 2522329 - RNA, 19 nt, Artificial Sequence
  Description of Artificial Sequence: Synthetic oligonucleotide
gugggcagcgucccgcaca

SEQ ID NO: 2522330 - RNA, 19 nt, Artificial Sequence
  Description of Artificial Sequence: Synthetic oligonucleotide
caggcguccaccaccacgu

SEQ ID NO: 2522331 - RNA, 19 nt, Artificial Sequence
  Description of Artificial Sequence: Synthetic oligonucleotide
aggagguccagggcugugu

SEQ ID NO: 2522332 - RNA, 19 nt, Artificial Sequence
  Description of Artificial Sequence: Synthetic oligonucleotide
accugcaagccccgcucca

SEQ ID NO: 2522333 - RNA, 19 nt, Artificial Sequence
  Description of Artificial Sequence: Synthetic oligonucleotide
ggggcggaacuucuccugc

SEQ ID NO: 2522334 - RNA, 19 nt, Artificial Sequence
  Description of Artificial Sequence: Synthetic oligonucleotide
cuucugcaaggugggcacc

SEQ ID NO: 2522335 - RNA, 19 nt, Artificial Sequence
  Description of Artificial Sequence: Synthetic oligonucleotide
uuucgccaccggacucucu

SEQ ID NO: 2522336 - RNA, 19 nt, Artificial Sequence
  Description of Artificial Sequence: Synthetic oligonucleotide
ugcuggggcggaacuucuc

SEQ ID NO: 2522337 - RNA, 19 nt, Artificial Sequence
  Description of Artificial Sequence: Synthetic oligonucleotide
ucucggguuccggccuggg

SEQ ID NO: 2522338 - RNA, 19 nt, Artificial Sequence
  Description of Artificial Sequence: Synthetic oligonucleotide
gagcaggcguccaccacca

SEQ ID NO: 2522339 - RNA, 19 nt, Artificial Sequence
  Description of Artificial Sequence: Synthetic oligonucleotide
gaaugagcgcuucgcuggu

SEQ ID NO: 2522340 - RNA, 19 nt, Artificial Sequence
  Description of Artificial Sequence: Synthetic oligonucleotide
ggaccugcaagccccgcuc

SEQ ID NO: 2522341 - RNA, 19 nt, Artificial Sequence
  Description of Artificial Sequence: Synthetic oligonucleotide
cuggccggaugcccugagc

SEQ ID NO: 2522342 - RNA, 19 nt, Artificial Sequence
  Description of Artificial Sequence: Synthetic oligonucleotide
cugcugccauuuccgggag

SEQ ID NO: 2522343 - RNA, 19 nt, Artificial Sequence
  Description of Artificial Sequence: Synthetic oligonucleotide
gcccgcuguggacacgugg

SEQ ID NO: 2522344 - RNA, 19 nt, Artificial Sequence
  Description of Artificial Sequence: Synthetic oligonucleotide
agcaggcguccaccaccac

SEQ ID NO: 2522345 - RNA, 19 nt, Artificial Sequence
  Description of Artificial Sequence: Synthetic oligonucleotide
ggcuucgagaggagcaggc

SEQ ID NO: 2522346 - RNA, 19 nt, Artificial Sequence
  Description of Artificial Sequence: Synthetic oligonucleotide
gucuuacucacuggccgga

SEQ ID NO: 2522347 - RNA, 19 nt, Artificial Sequence
  Description of Artificial Sequence: Synthetic oligonucleotide
gucccgcacaagcugcaga

SEQ ID NO: 2522348 - RNA, 19 nt, Artificial Sequence
  Description of Artificial Sequence: Synthetic oligonucleotide
gcuucgcugguggagagga

SEQ ID NO: 2522349 - RNA, 19 nt, Artificial Sequence
  Description of Artificial Sequence: Synthetic oligonucleotide
gcaagccccgcuccaggag

SEQ ID NO: 2522350 - RNA, 19 nt, Artificial Sequence
  Description of Artificial Sequence: Synthetic oligonucleotide
ggucucgaggccacagagc

SEQ ID NO: 2522351 - RNA, 19 nt, Artificial Sequence
  Description of Artificial Sequence: Synthetic oligonucleotide
caccagguucgaguccagc

SEQ ID NO: 2522352 - RNA, 19 nt, Artificial Sequence
  Description of Artificial Sequence: Synthetic oligonucleotide
gccauuuccgggaggcacc

SEQ ID NO: 2522353 - RNA, 19 nt, Artificial Sequence
  Description of Artificial Sequence: Synthetic oligonucleotide
ugggccggccauccagcuc

SEQ ID NO: 2522354 - RNA, 19 nt, Artificial Sequence
  Description of Artificial Sequence: Synthetic oligonucleotide
auacgaucugugggaaaua

SEQ ID NO: 2522355 - RNA, 19 nt, Artificial Sequence
  Description of Artificial Sequence: Synthetic oligonucleotide
ggaagacuccgggaggauc

SEQ ID NO: 2522356 - RNA, 19 nt, Artificial Sequence
  Description of Artificial Sequence: Synthetic oligonucleotide
gccaccggacucucucggg

SEQ ID NO: 2522357 - RNA, 19 nt, Artificial Sequence
  Description of Artificial Sequence: Synthetic oligonucleotide
gcacggaacgcagcuuggg

SEQ ID NO: 2522358 - RNA, 19 nt, Artificial Sequence
  Description of Artificial Sequence: Synthetic oligonucleotide
cuguggacacgugguccgc

SEQ ID NO: 2522359 - RNA, 19 nt, Artificial Sequence
  Description of Artificial Sequence: Synthetic oligonucleotide
gccggaugcccugagcgcc

SEQ ID NO: 2522360 - RNA, 19 nt, Artificial Sequence
  Description of Artificial Sequence: Synthetic oligonucleotide
gugggaaauaggcgaugcu

SEQ ID NO: 2522361 - RNA, 19 nt, Artificial Sequence
  Description of Artificial Sequence: Synthetic oligonucleotide
uggaagacuccgggaggau

SEQ ID NO: 2522362 - RNA, 19 nt, Artificial Sequence
  Description of Artificial Sequence: Synthetic oligonucleotide
cucugccucaugcgggcca

SEQ ID NO: 2522363 - RNA, 19 nt, Artificial Sequence
  Description of Artificial Sequence: Synthetic oligonucleotide
ggccggaugcccugagcgc

SEQ ID NO: 2522364 - RNA, 19 nt, Artificial Sequence
  Description of Artificial Sequence: Synthetic oligonucleotide
caccuggcuucgagaggag

SEQ ID NO: 2522365 - RNA, 19 nt, Artificial Sequence
  Description of Artificial Sequence: Synthetic oligonucleotide
cuuucgccaccggacucuc

SEQ ID NO: 2522366 - RNA, 19 nt, Artificial Sequence
  Description of Artificial Sequence: Synthetic oligonucleotide
gcagaaugagcgcuucgcu

SEQ ID NO: 2522367 - RNA, 19 nt, Artificial Sequence
  Description of Artificial Sequence: Synthetic oligonucleotide
gguucgaguccagccggcc

SEQ ID NO: 2522368 - RNA, 19 nt, Artificial Sequence
  Description of Artificial Sequence: Synthetic oligonucleotide
cucaugcgggccagugcca

SEQ ID NO: 2522369 - RNA, 19 nt, Artificial Sequence
  Description of Artificial Sequence: Synthetic oligonucleotide
uuggcccgcuguggacacg

SEQ ID NO: 2522370 - RNA, 19 nt, Artificial Sequence
  Description of Artificial Sequence: Synthetic oligonucleotide
ccaggugccuucugcgcac

SEQ ID NO: 2522371 - RNA, 19 nt, Artificial Sequence
  Description of Artificial Sequence: Synthetic oligonucleotide
ucgaguccagccggccccu

SEQ ID NO: 2522372 - RNA, 19 nt, Artificial Sequence
  Description of Artificial Sequence: Synthetic oligonucleotide
ccaccuggcuucgagagga

SEQ ID NO: 2522373 - RNA, 19 nt, Artificial Sequence
  Description of Artificial Sequence: Synthetic oligonucleotide
caccaugcugaagcacguc

SEQ ID NO: 2522374 - RNA, 19 nt, Artificial Sequence
  Description of Artificial Sequence: Synthetic oligonucleotide
cgcacaagcugcagaauga

SEQ ID NO: 2522375 - RNA, 19 nt, Artificial Sequence
  Description of Artificial Sequence: Synthetic oligonucleotide
ggucuggaguucagcaaga

SEQ ID NO: 2522376 - RNA, 19 nt, Artificial Sequence
  Description of Artificial Sequence: Synthetic oligonucleotide
augcuggggcggaacuucu

SEQ ID NO: 2522377 - RNA, 19 nt, Artificial Sequence
  Description of Artificial Sequence: Synthetic oligonucleotide
agcugcagaaugagcgcuu

SEQ ID NO: 2522378 - RNA, 19 nt, Artificial Sequence
  Description of Artificial Sequence: Synthetic oligonucleotide
cauuuccgggaggcaccag

SEQ ID NO: 2522379 - RNA, 19 nt, Artificial Sequence
  Description of Artificial Sequence: Synthetic oligonucleotide
ggacucucucggguuccgg

SEQ ID NO: 2522380 - RNA, 19 nt, Artificial Sequence
  Description of Artificial Sequence: Synthetic oligonucleotide
agcuugggccggccaucca

SEQ ID NO: 2522381 - RNA, 19 nt, Artificial Sequence
  Description of Artificial Sequence: Synthetic oligonucleotide
gcugcagaaugagcgcuuc

SEQ ID NO: 2522382 - RNA, 19 nt, Artificial Sequence
  Description of Artificial Sequence: Synthetic oligonucleotide
gcggccacugauacgaucu

SEQ ID NO: 2522383 - RNA, 19 nt, Artificial Sequence
  Description of Artificial Sequence: Synthetic oligonucleotide
ccggccauccagcuccuuc

SEQ ID NO: 2522384 - RNA, 19 nt, Artificial Sequence
  Description of Artificial Sequence: Synthetic oligonucleotide
acacgugguccgcgccccu

SEQ ID NO: 2522385 - RNA, 19 nt, Artificial Sequence
  Description of Artificial Sequence: Synthetic oligonucleotide
cuggggcggaacuucuccu

SEQ ID NO: 2522386 - RNA, 19 nt, Artificial Sequence
  Description of Artificial Sequence: Synthetic oligonucleotide
gcacuuucgccaccggacu

SEQ ID NO: 2522387 - RNA, 19 nt, Artificial Sequence
  Description of Artificial Sequence: Synthetic oligonucleotide
agaggcccagcagcccgcu

SEQ ID NO: 2522388 - RNA, 19 nt, Artificial Sequence
  Description of Artificial Sequence: Synthetic oligonucleotide
cuccaccaggugccuucug

SEQ ID NO: 2522389 - RNA, 19 nt, Artificial Sequence
  Description of Artificial Sequence: Synthetic oligonucleotide
gggcggaacuucuccugca

SEQ ID NO: 2522390 - RNA, 19 nt, Artificial Sequence
  Description of Artificial Sequence: Synthetic oligonucleotide
gcgcuucgcugguggagag

SEQ ID NO: 2522391 - RNA, 19 nt, Artificial Sequence
  Description of Artificial Sequence: Synthetic oligonucleotide
gcgcacuuucgccaccgga

SEQ ID NO: 2522392 - RNA, 19 nt, Artificial Sequence
  Description of Artificial Sequence: Synthetic oligonucleotide
gaagcacgucuuacucacu

SEQ ID NO: 2522393 - RNA, 19 nt, Artificial Sequence
  Description of Artificial Sequence: Synthetic oligonucleotide
ggugggcaccaugcugaag

SEQ ID NO: 2522394 - RNA, 19 nt, Artificial Sequence
  Description of Artificial Sequence: Synthetic oligonucleotide
ccggaugcccugagcgccc

SEQ ID NO: 2522395 - RNA, 19 nt, Artificial Sequence
  Description of Artificial Sequence: Synthetic oligonucleotide
guccagccggccccuccac

SEQ ID NO: 2522396 - RNA, 19 nt, Artificial Sequence
  Description of Artificial Sequence: Synthetic oligonucleotide
guggaccugcaagccccgc

SEQ ID NO: 2522397 - RNA, 19 nt, Artificial Sequence
  Description of Artificial Sequence: Synthetic oligonucleotide
agccccgcucugccucaug

SEQ ID NO: 2522398 - RNA, 19 nt, Artificial Sequence
  Description of Artificial Sequence: Synthetic oligonucleotide
cuucgcugguggagaggaa

SEQ ID NO: 2522399 - RNA, 19 nt, Artificial Sequence
  Description of Artificial Sequence: Synthetic oligonucleotide
gcaaggugggcaccaugcu

SEQ ID NO: 2522400 - RNA, 19 nt, Artificial Sequence
  Description of Artificial Sequence: Synthetic oligonucleotide
gggcaccaugcugaagcac

SEQ ID NO: 2522401 - RNA, 19 nt, Artificial Sequence
  Description of Artificial Sequence: Synthetic oligonucleotide
cggaacuucuccugcaugu

SEQ ID NO: 2522402 - RNA, 19 nt, Artificial Sequence
  Description of Artificial Sequence: Synthetic oligonucleotide
cguuuggcccgcuguggac

SEQ ID NO: 2522403 - RNA, 19 nt, Artificial Sequence
  Description of Artificial Sequence: Synthetic oligonucleotide
cguggaccugcaagccccg

SEQ ID NO: 2522404 - RNA, 19 nt, Artificial Sequence
  Description of Artificial Sequence: Synthetic oligonucleotide
uuccggccugggucaccgu

SEQ ID NO: 2522405 - RNA, 19 nt, Artificial Sequence
  Description of Artificial Sequence: Synthetic oligonucleotide
ccagccggccccuccacca

SEQ ID NO: 2522406 - RNA, 19 nt, Artificial Sequence
  Description of Artificial Sequence: Synthetic oligonucleotide
ggaaagccccgcucugccu

SEQ ID NO: 2522407 - RNA, 19 nt, Artificial Sequence
  Description of Artificial Sequence: Synthetic oligonucleotide
cgccaccggacucucucgg

SEQ ID NO: 2522408 - RNA, 19 nt, Artificial Sequence
  Description of Artificial Sequence: Synthetic oligonucleotide
cgguccaccuggcuucgag

SEQ ID NO: 2522409 - RNA, 19 nt, Artificial Sequence
  Description of Artificial Sequence: Synthetic oligonucleotide
gcgggccagugccaccagc

SEQ ID NO: 2522410 - RNA, 19 nt, Artificial Sequence
  Description of Artificial Sequence: Synthetic oligonucleotide
ggaugcccugagcgcccag

SEQ ID NO: 2522411 - RNA, 19 nt, Artificial Sequence
  Description of Artificial Sequence: Synthetic oligonucleotide
cugccauuuccgggaggca

SEQ ID NO: 2522412 - RNA, 19 nt, Artificial Sequence
  Description of Artificial Sequence: Synthetic oligonucleotide
ccggacucucucggguucc

SEQ ID NO: 2522413 - RNA, 19 nt, Artificial Sequence
  Description of Artificial Sequence: Synthetic oligonucleotide
ccguuuggcccgcugugga

SEQ ID NO: 2522414 - RNA, 19 nt, Artificial Sequence
  Description of Artificial Sequence: Synthetic oligonucleotide
gggaggcaccagguucgag

SEQ ID NO: 2522415 - RNA, 19 nt, Artificial Sequence
  Description of Artificial Sequence: Synthetic oligonucleotide
gccgguccaccuggcuucg

SEQ ID NO: 2522416 - RNA, 19 nt, Artificial Sequence
  Description of Artificial Sequence: Synthetic oligonucleotide
cccgcuguggacacguggu

SEQ ID NO: 2522417 - RNA, 19 nt, Artificial Sequence
  Description of Artificial Sequence: Synthetic oligonucleotide
ggcggaacuucuccugcau

SEQ ID NO: 2522418 - RNA, 19 nt, Artificial Sequence
  Description of Artificial Sequence: Synthetic oligonucleotide
gcagcgucccgcacaagcu

SEQ ID NO: 2522419 - RNA, 19 nt, Artificial Sequence
  Description of Artificial Sequence: Synthetic oligonucleotide
ccgcuguggacacgugguc

SEQ ID NO: 2522420 - RNA, 19 nt, Artificial Sequence
  Description of Artificial Sequence: Synthetic oligonucleotide
cagccgguccaccuggcuu

SEQ ID NO: 2522421 - RNA, 19 nt, Artificial Sequence
  Description of Artificial Sequence: Synthetic oligonucleotide
cucggguuccggccugggu

SEQ ID NO: 2522422 - RNA, 19 nt, Artificial Sequence
  Description of Artificial Sequence: Synthetic oligonucleotide
gguccagggcuguguucaa

SEQ ID NO: 2522423 - RNA, 19 nt, Artificial Sequence
  Description of Artificial Sequence: Synthetic oligonucleotide
ccauuuccgggaggcacca

SEQ ID NO: 2522424 - RNA, 19 nt, Artificial Sequence
  Description of Artificial Sequence: Synthetic oligonucleotide
cggguuccggccuggguca

SEQ ID NO: 2522425 - RNA, 19 nt, Artificial Sequence
  Description of Artificial Sequence: Synthetic oligonucleotide
ccaugcugaagcacgucuu

SEQ ID NO: 2522426 - RNA, 19 nt, Artificial Sequence
  Description of Artificial Sequence: Synthetic oligonucleotide
gggucaccguuuggcccgc

SEQ ID NO: 2522427 - RNA, 19 nt, Artificial Sequence
  Description of Artificial Sequence: Synthetic oligonucleotide
cgcauaggaacaggaugga

SEQ ID NO: 2522428 - RNA, 19 nt, Artificial Sequence
  Description of Artificial Sequence: Synthetic oligonucleotide
cggccacugauacgaucug

SEQ ID NO: 2522429 - RNA, 19 nt, Artificial Sequence
  Description of Artificial Sequence: Synthetic oligonucleotide
cgcuucgcugguggagagg

SEQ ID NO: 2522430 - RNA, 19 nt, Artificial Sequence
  Description of Artificial Sequence: Synthetic oligonucleotide
cggacucucucggguuccg

SEQ ID NO: 2522431 - RNA, 19 nt, Artificial Sequence
  Description of Artificial Sequence: Synthetic oligonucleotide
ggugccuucugcgcacuuu

SEQ ID NO: 2522432 - RNA, 19 nt, Artificial Sequence
  Description of Artificial Sequence: Synthetic oligonucleotide
aggcgaugcuggggcggaa

SEQ ID NO: 2522433 - RNA, 19 nt, Artificial Sequence
  Description of Artificial Sequence: Synthetic oligonucleotide
ccgcuccaggagguccagg

SEQ ID NO: 2522434 - RNA, 19 nt, Artificial Sequence
  Description of Artificial Sequence: Synthetic oligonucleotide
gcgucccgcacaagcugca

SEQ ID NO: 2522435 - RNA, 19 nt, Artificial Sequence
  Description of Artificial Sequence: Synthetic oligonucleotide
ggguuccggccugggucac

SEQ ID NO: 2522436 - RNA, 19 nt, Artificial Sequence
  Description of Artificial Sequence: Synthetic oligonucleotide
caggugccuucugcgcacu

SEQ ID NO: 2522437 - RNA, 19 nt, Artificial Sequence
  Description of Artificial Sequence: Synthetic oligonucleotide
ggcccgcuguggacacgug

SEQ ID NO: 2522438 - RNA, 19 nt, Artificial Sequence
  Description of Artificial Sequence: Synthetic oligonucleotide
gggcagcgucccgcacaag

SEQ ID NO: 2522439 - RNA, 19 nt, Artificial Sequence
  Description of Artificial Sequence: Synthetic oligonucleotide
ccggccugggucaccguuu

SEQ ID NO: 2522440 - RNA, 19 nt, Artificial Sequence
  Description of Artificial Sequence: Synthetic oligonucleotide
ccuccaccaggugccuucu

SEQ ID NO: 2522441 - RNA, 19 nt, Artificial Sequence
  Description of Artificial Sequence: Synthetic oligonucleotide
cccgcacaagcugcagaau

SEQ ID NO: 2522442 - RNA, 19 nt, Artificial Sequence
  Description of Artificial Sequence: Synthetic oligonucleotide
cgggaggcaccagguucga

SEQ ID NO: 2522443 - RNA, 19 nt, Artificial Sequence
  Description of Artificial Sequence: Synthetic oligonucleotide
ggucaccguuuggcccgcu

SEQ ID NO: 2522444 - RNA, 19 nt, Artificial Sequence
  Description of Artificial Sequence: Synthetic oligonucleotide
ggccggccauccagcuccu

SEQ ID NO: 2522445 - RNA, 19 nt, Artificial Sequence
  Description of Artificial Sequence: Synthetic oligonucleotide
ccgguccaccuggcuucga

SEQ ID NO: 2522446 - RNA, 19 nt, Artificial Sequence
  Description of Artificial Sequence: Synthetic oligonucleotide
gccggccauccagcuccuu

SEQ ID NO: 2522447 - RNA, 19 nt, Artificial Sequence
  Description of Artificial Sequence: Synthetic oligonucleotide
auuaucuaugaacagcugc

SEQ ID NO: 2522448 - RNA, 19 nt, Artificial Sequence
  Description of Artificial Sequence: Synthetic oligonucleotide
aaauugaucugauacucuc

SEQ ID NO: 2522449 - RNA, 19 nt, Artificial Sequence
  Description of Artificial Sequence: Synthetic oligonucleotide
aacgcuuucaguuugggga

SEQ ID NO: 2522450 - RNA, 19 nt, Artificial Sequence
  Description of Artificial Sequence: Synthetic oligonucleotide
aaugccaugucuuggccgc

SEQ ID NO: 2522451 - RNA, 19 nt, Artificial Sequence
  Description of Artificial Sequence: Synthetic oligonucleotide
uuugacuggagccauuugg

SEQ ID NO: 2522452 - RNA, 19 nt, Artificial Sequence
  Description of Artificial Sequence: Synthetic oligonucleotide
guauuuguuaaacucaucc

SEQ ID NO: 2522453 - RNA, 19 nt, Artificial Sequence
  Description of Artificial Sequence: Synthetic oligonucleotide
agaauuaucuaugaacagc

SEQ ID NO: 2522454 - RNA, 19 nt, Artificial Sequence
  Description of Artificial Sequence: Synthetic oligonucleotide
uagaugacaacccuuauac

SEQ ID NO: 2522455 - RNA, 19 nt, Artificial Sequence
  Description of Artificial Sequence: Synthetic oligonucleotide
auauuuaccacccaggaau

SEQ ID NO: 2522456 - RNA, 19 nt, Artificial Sequence
  Description of Artificial Sequence: Synthetic oligonucleotide
uuaucuaugaacagcugcc

SEQ ID NO: 2522457 - RNA, 19 nt, Artificial Sequence
  Description of Artificial Sequence: Synthetic oligonucleotide
aguggcacuacuuuuagag

SEQ ID NO: 2522458 - RNA, 19 nt, Artificial Sequence
  Description of Artificial Sequence: Synthetic oligonucleotide
aauuaacugacugugcguc

SEQ ID NO: 2522459 - RNA, 19 nt, Artificial Sequence
  Description of Artificial Sequence: Synthetic oligonucleotide
cuuauacaguccuugaggg

SEQ ID NO: 2522460 - RNA, 19 nt, Artificial Sequence
  Description of Artificial Sequence: Synthetic oligonucleotide
uucauaauuugacuggagc

SEQ ID NO: 2522461 - RNA, 19 nt, Artificial Sequence
  Description of Artificial Sequence: Synthetic oligonucleotide
uuguucauaauuugacugg

SEQ ID NO: 2522462 - RNA, 19 nt, Artificial Sequence
  Description of Artificial Sequence: Synthetic oligonucleotide
aaacucauccuuccaguac

SEQ ID NO: 2522463 - RNA, 19 nt, Artificial Sequence
  Description of Artificial Sequence: Synthetic oligonucleotide
uauggguagacuuacuagc

SEQ ID NO: 2522464 - RNA, 19 nt, Artificial Sequence
  Description of Artificial Sequence: Synthetic oligonucleotide
aaacugggcucacaguggc

SEQ ID NO: 2522465 - RNA, 19 nt, Artificial Sequence
  Description of Artificial Sequence: Synthetic oligonucleotide
auacucuccuaucauaacg

SEQ ID NO: 2522466 - RNA, 19 nt, Artificial Sequence
  Description of Artificial Sequence: Synthetic oligonucleotide
uuuuagagacaucaggagu

SEQ ID NO: 2522467 - RNA, 19 nt, Artificial Sequence
  Description of Artificial Sequence: Synthetic oligonucleotide
aucacaauaggcccgcucg

SEQ ID NO: 2522468 - RNA, 19 nt, Artificial Sequence
  Description of Artificial Sequence: Synthetic oligonucleotide
uaucauaacgcuuucaguu

SEQ ID NO: 2522469 - RNA, 19 nt, Artificial Sequence
  Description of Artificial Sequence: Synthetic oligonucleotide
auagucgcaagucauuuuc

SEQ ID NO: 2522470 - RNA, 19 nt, Artificial Sequence
  Description of Artificial Sequence: Synthetic oligonucleotide
acaaacugggcucacagug

SEQ ID NO: 2522471 - RNA, 19 nt, Artificial Sequence
  Description of Artificial Sequence: Synthetic oligonucleotide
uuacaaacugggcucacag

SEQ ID NO: 2522472 - RNA, 19 nt, Artificial Sequence
  Description of Artificial Sequence: Synthetic oligonucleotide
uugacuggagccauuuggg

SEQ ID NO: 2522473 - RNA, 19 nt, Artificial Sequence
  Description of Artificial Sequence: Synthetic oligonucleotide
uuuagagacaucaggaguu

SEQ ID NO: 2522474 - RNA, 19 nt, Artificial Sequence
  Description of Artificial Sequence: Synthetic oligonucleotide
cucgauauccuccaugucc

SEQ ID NO: 2522475 - RNA, 19 nt, Artificial Sequence
  Description of Artificial Sequence: Synthetic oligonucleotide
uuuacaccaaagccagugg

SEQ ID NO: 2522476 - RNA, 19 nt, Artificial Sequence
  Description of Artificial Sequence: Synthetic oligonucleotide
gacuuacuagcccagacug

SEQ ID NO: 2522477 - RNA, 19 nt, Artificial Sequence
  Description of Artificial Sequence: Synthetic oligonucleotide
guuaaacucauccuuccag

SEQ ID NO: 2522478 - RNA, 19 nt, Artificial Sequence
  Description of Artificial Sequence: Synthetic oligonucleotide
uuuggggaucacaauaggc

SEQ ID NO: 2522479 - RNA, 19 nt, Artificial Sequence
  Description of Artificial Sequence: Synthetic oligonucleotide
ggaauuaacugacugugcg

SEQ ID NO: 2522480 - RNA, 19 nt, Artificial Sequence
  Description of Artificial Sequence: Synthetic oligonucleotide
uuuuacaccaaagccagug

SEQ ID NO: 2522481 - RNA, 19 nt, Artificial Sequence
  Description of Artificial Sequence: Synthetic oligonucleotide
cugaagacggaauuaacug

SEQ ID NO: 2522482 - RNA, 19 nt, Artificial Sequence
  Description of Artificial Sequence: Synthetic oligonucleotide
uauuuguuaaacucauccu

SEQ ID NO: 2522483 - RNA, 19 nt, Artificial Sequence
  Description of Artificial Sequence: Synthetic oligonucleotide
uauucucaucaccauacug

SEQ ID NO: 2522484 - RNA, 19 nt, Artificial Sequence
  Description of Artificial Sequence: Synthetic oligonucleotide
uacucuccuaucauaacgc

SEQ ID NO: 2522485 - RNA, 19 nt, Artificial Sequence
  Description of Artificial Sequence: Synthetic oligonucleotide
uucaguuuggggaucacaa

SEQ ID NO: 2522486 - RNA, 19 nt, Artificial Sequence
  Description of Artificial Sequence: Synthetic oligonucleotide
ugaccuccaaagcucauag

SEQ ID NO: 2522487 - RNA, 19 nt, Artificial Sequence
  Description of Artificial Sequence: Synthetic oligonucleotide
ugaagacggaauuaacuga

SEQ ID NO: 2522488 - RNA, 19 nt, Artificial Sequence
  Description of Artificial Sequence: Synthetic oligonucleotide
ugauacucuccuaucauaa

SEQ ID NO: 2522489 - RNA, 19 nt, Artificial Sequence
  Description of Artificial Sequence: Synthetic oligonucleotide
uuaaacucauccuuccagu

SEQ ID NO: 2522490 - RNA, 19 nt, Artificial Sequence
  Description of Artificial Sequence: Synthetic oligonucleotide
uuacaccaaagccaguggc

SEQ ID NO: 2522491 - RNA, 19 nt, Artificial Sequence
  Description of Artificial Sequence: Synthetic oligonucleotide
accuccaaagcucauagcu

SEQ ID NO: 2522492 - RNA, 19 nt, Artificial Sequence
  Description of Artificial Sequence: Synthetic oligonucleotide
ucuccuaucauaacgcuuu

SEQ ID NO: 2522493 - RNA, 19 nt, Artificial Sequence
  Description of Artificial Sequence: Synthetic oligonucleotide
ugaucugauacucuccuau

SEQ ID NO: 2522494 - RNA, 19 nt, Artificial Sequence
  Description of Artificial Sequence: Synthetic oligonucleotide
uccuccauauuuaccaccc

SEQ ID NO: 2522495 - RNA, 19 nt, Artificial Sequence
  Description of Artificial Sequence: Synthetic oligonucleotide
ucaaaugaaggcguggaga

SEQ ID NO: 2522496 - RNA, 19 nt, Artificial Sequence
  Description of Artificial Sequence: Synthetic oligonucleotide
agguaugaagagcugaugu

SEQ ID NO: 2522497 - RNA, 19 nt, Artificial Sequence
  Description of Artificial Sequence: Synthetic oligonucleotide
uggcacuacuuuuagagac

SEQ ID NO: 2522498 - RNA, 19 nt, Artificial Sequence
  Description of Artificial Sequence: Synthetic oligonucleotide
ucauaacgcuuucaguuug

SEQ ID NO: 2522499 - RNA, 19 nt, Artificial Sequence
  Description of Artificial Sequence: Synthetic oligonucleotide
cuauggguagacuuacuag

SEQ ID NO: 2522500 - RNA, 19 nt, Artificial Sequence
  Description of Artificial Sequence: Synthetic oligonucleotide
acaucaggaguuuuguuca

SEQ ID NO: 2522501 - RNA, 19 nt, Artificial Sequence
  Description of Artificial Sequence: Synthetic oligonucleotide
uugccaaggaucucagagg

SEQ ID NO: 2522502 - RNA, 19 nt, Artificial Sequence
  Description of Artificial Sequence: Synthetic oligonucleotide
ucgauauccuccauguccu

SEQ ID NO: 2522503 - RNA, 19 nt, Artificial Sequence
  Description of Artificial Sequence: Synthetic oligonucleotide
uauuuaccacccaggaaug

SEQ ID NO: 2522504 - RNA, 19 nt, Artificial Sequence
  Description of Artificial Sequence: Synthetic oligonucleotide
aagagcugauguuggaacu

SEQ ID NO: 2522505 - RNA, 19 nt, Artificial Sequence
  Description of Artificial Sequence: Synthetic oligonucleotide
guugcucuagaugacaacc

SEQ ID NO: 2522506 - RNA, 19 nt, Artificial Sequence
  Description of Artificial Sequence: Synthetic oligonucleotide
gugacugcugcuuuuacac

SEQ ID NO: 2522507 - RNA, 19 nt, Artificial Sequence
  Description of Artificial Sequence: Synthetic oligonucleotide
aaagcucauagcuucuuuu

SEQ ID NO: 2522508 - RNA, 19 nt, Artificial Sequence
  Description of Artificial Sequence: Synthetic oligonucleotide
cacguggugcugaagacgg

SEQ ID NO: 2522509 - RNA, 19 nt, Artificial Sequence
  Description of Artificial Sequence: Synthetic oligonucleotide
uuugggucacuauggguag

SEQ ID NO: 2522510 - RNA, 19 nt, Artificial Sequence
  Description of Artificial Sequence: Synthetic oligonucleotide
acaacccuuauacaguccu

SEQ ID NO: 2522511 - RNA, 19 nt, Artificial Sequence
  Description of Artificial Sequence: Synthetic oligonucleotide
agacucugaccuccaaagc

SEQ ID NO: 2522512 - RNA, 19 nt, Artificial Sequence
  Description of Artificial Sequence: Synthetic oligonucleotide
agacggaauuaacugacug

SEQ ID NO: 2522513 - RNA, 19 nt, Artificial Sequence
  Description of Artificial Sequence: Synthetic oligonucleotide
cuuccaguaccaaagccac

SEQ ID NO: 2522514 - RNA, 19 nt, Artificial Sequence
  Description of Artificial Sequence: Synthetic oligonucleotide
gaagacggaauuaacugac

SEQ ID NO: 2522515 - RNA, 19 nt, Artificial Sequence
  Description of Artificial Sequence: Synthetic oligonucleotide
gucgcaagucauuuucugg

SEQ ID NO: 2522516 - RNA, 19 nt, Artificial Sequence
  Description of Artificial Sequence: Synthetic oligonucleotide
uaacgcuuucaguuugggg

SEQ ID NO: 2522517 - RNA, 19 nt, Artificial Sequence
  Description of Artificial Sequence: Synthetic oligonucleotide
auggguagacuuacuagcc

SEQ ID NO: 2522518 - RNA, 19 nt, Artificial Sequence
  Description of Artificial Sequence: Synthetic oligonucleotide
cugugcgucaaaugaaggc

SEQ ID NO: 2522519 - RNA, 19 nt, Artificial Sequence
  Description of Artificial Sequence: Synthetic oligonucleotide
uuuaccacccaggaaugcc

SEQ ID NO: 2522520 - RNA, 19 nt, Artificial Sequence
  Description of Artificial Sequence: Synthetic oligonucleotide
ucaggaguuuuguucauaa

SEQ ID NO: 2522521 - RNA, 19 nt, Artificial Sequence
  Description of Artificial Sequence: Synthetic oligonucleotide
uugcucuagaugacaaccc

SEQ ID NO: 2522522 - RNA, 19 nt, Artificial Sequence
  Description of Artificial Sequence: Synthetic oligonucleotide
ucgggcauagccaggaccu

SEQ ID NO: 2522523 - RNA, 19 nt, Artificial Sequence
  Description of Artificial Sequence: Synthetic oligonucleotide
ucugauacucuccuaucau

SEQ ID NO: 2522524 - RNA, 19 nt, Artificial Sequence
  Description of Artificial Sequence: Synthetic oligonucleotide
uguucauaauuugacugga

SEQ ID NO: 2522525 - RNA, 19 nt, Artificial Sequence
  Description of Artificial Sequence: Synthetic oligonucleotide
aacccuuauacaguccuug

SEQ ID NO: 2522526 - RNA, 19 nt, Artificial Sequence
  Description of Artificial Sequence: Synthetic oligonucleotide
agccauuugggucacuaug

SEQ ID NO: 2522527 - RNA, 19 nt, Artificial Sequence
  Description of Artificial Sequence: Synthetic oligonucleotide
gaauuaucuaugaacagcu

SEQ ID NO: 2522528 - RNA, 19 nt, Artificial Sequence
  Description of Artificial Sequence: Synthetic oligonucleotide
aauaggcccgcucgauauc

SEQ ID NO: 2522529 - RNA, 19 nt, Artificial Sequence
  Description of Artificial Sequence: Synthetic oligonucleotide
uggggaaauagucgcaagu

SEQ ID NO: 2522530 - RNA, 19 nt, Artificial Sequence
  Description of Artificial Sequence: Synthetic oligonucleotide
uacugcacguauuuguuaa

SEQ ID NO: 2522531 - RNA, 19 nt, Artificial Sequence
  Description of Artificial Sequence: Synthetic oligonucleotide
uagacuuacuagcccagac

SEQ ID NO: 2522532 - RNA, 19 nt, Artificial Sequence
  Description of Artificial Sequence: Synthetic oligonucleotide
cuugagggcuuacaaacug

SEQ ID NO: 2522533 - RNA, 19 nt, Artificial Sequence
  Description of Artificial Sequence: Synthetic oligonucleotide
cauguguggaguucuugcc

SEQ ID NO: 2522534 - RNA, 19 nt, Artificial Sequence
  Description of Artificial Sequence: Synthetic oligonucleotide
gcugcuuuuacaccaaagc

SEQ ID NO: 2522535 - RNA, 19 nt, Artificial Sequence
  Description of Artificial Sequence: Synthetic oligonucleotide
uccaguaccaaagccacgu

SEQ ID NO: 2522536 - RNA, 19 nt, Artificial Sequence
  Description of Artificial Sequence: Synthetic oligonucleotide
cugacugugcgucaaauga

SEQ ID NO: 2522537 - RNA, 19 nt, Artificial Sequence
  Description of Artificial Sequence: Synthetic oligonucleotide
aaauagucgcaagucauuu

SEQ ID NO: 2522538 - RNA, 19 nt, Artificial Sequence
  Description of Artificial Sequence: Synthetic oligonucleotide
ugcacguauuuguuaaacu

SEQ ID NO: 2522539 - RNA, 19 nt, Artificial Sequence
  Description of Artificial Sequence: Synthetic oligonucleotide
uggguagacuuacuagccc

SEQ ID NO: 2522540 - RNA, 19 nt, Artificial Sequence
  Description of Artificial Sequence: Synthetic oligonucleotide
uuaccacccaggaaugcca

SEQ ID NO: 2522541 - RNA, 19 nt, Artificial Sequence
  Description of Artificial Sequence: Synthetic oligonucleotide
ugcucuagaugacaacccu

SEQ ID NO: 2522542 - RNA, 19 nt, Artificial Sequence
  Description of Artificial Sequence: Synthetic oligonucleotide
cuuacuagcccagacugug

SEQ ID NO: 2522543 - RNA, 19 nt, Artificial Sequence
  Description of Artificial Sequence: Synthetic oligonucleotide
cacguauuuguuaaacuca

SEQ ID NO: 2522544 - RNA, 19 nt, Artificial Sequence
  Description of Artificial Sequence: Synthetic oligonucleotide
cauaacgcuuucaguuugg

SEQ ID NO: 2522545 - RNA, 19 nt, Artificial Sequence
  Description of Artificial Sequence: Synthetic oligonucleotide
agacuuacuagcccagacu

SEQ ID NO: 2522546 - RNA, 19 nt, Artificial Sequence
  Description of Artificial Sequence: Synthetic oligonucleotide
aucaccauacugcacguau

SEQ ID NO: 2522547 - RNA, 19 nt, Artificial Sequence
  Description of Artificial Sequence: Synthetic oligonucleotide
uuggaacugagauuggcuu

SEQ ID NO: 2522548 - RNA, 19 nt, Artificial Sequence
  Description of Artificial Sequence: Synthetic oligonucleotide
gauacucuccuaucauaac

SEQ ID NO: 2522549 - RNA, 19 nt, Artificial Sequence
  Description of Artificial Sequence: Synthetic oligonucleotide
cauaauuugacuggagcca

SEQ ID NO: 2522550 - RNA, 19 nt, Artificial Sequence
  Description of Artificial Sequence: Synthetic oligonucleotide
aauagucgcaagucauuuu

SEQ ID NO: 2522551 - RNA, 19 nt, Artificial Sequence
  Description of Artificial Sequence: Synthetic oligonucleotide
ugacaacccuuauacaguc

SEQ ID NO: 2522552 - RNA, 19 nt, Artificial Sequence
  Description of Artificial Sequence: Synthetic oligonucleotide
acuauggguagacuuacua

SEQ ID NO: 2522553 - RNA, 19 nt, Artificial Sequence
  Description of Artificial Sequence: Synthetic oligonucleotide
aauuaucuaugaacagcug

SEQ ID NO: 2522554 - RNA, 19 nt, Artificial Sequence
  Description of Artificial Sequence: Synthetic oligonucleotide
uguuggaacugagauuggc

SEQ ID NO: 2522555 - RNA, 19 nt, Artificial Sequence
  Description of Artificial Sequence: Synthetic oligonucleotide
acugagauuggcuuuuauu

SEQ ID NO: 2522556 - RNA, 19 nt, Artificial Sequence
  Description of Artificial Sequence: Synthetic oligonucleotide
gacugugcgucaaaugaag

SEQ ID NO: 2522557 - RNA, 19 nt, Artificial Sequence
  Description of Artificial Sequence: Synthetic oligonucleotide
auuuaccacccaggaaugc

SEQ ID NO: 2522558 - RNA, 19 nt, Artificial Sequence
  Description of Artificial Sequence: Synthetic oligonucleotide
agucgcaagucauuuucug

SEQ ID NO: 2522559 - RNA, 19 nt, Artificial Sequence
  Description of Artificial Sequence: Synthetic oligonucleotide
uguguggaguucuugccaa

SEQ ID NO: 2522560 - RNA, 19 nt, Artificial Sequence
  Description of Artificial Sequence: Synthetic oligonucleotide
gcuuuuacaccaaagccag

SEQ ID NO: 2522561 - RNA, 19 nt, Artificial Sequence
  Description of Artificial Sequence: Synthetic oligonucleotide
caugucuuggccgcugucg

SEQ ID NO: 2522562 - RNA, 19 nt, Artificial Sequence
  Description of Artificial Sequence: Synthetic oligonucleotide
ugacugugcgucaaaugaa

SEQ ID NO: 2522563 - RNA, 19 nt, Artificial Sequence
  Description of Artificial Sequence: Synthetic oligonucleotide
aauuugacuggagccauuu

SEQ ID NO: 2522564 - RNA, 19 nt, Artificial Sequence
  Description of Artificial Sequence: Synthetic oligonucleotide
acugacugugcgucaaaug

SEQ ID NO: 2522565 - RNA, 19 nt, Artificial Sequence
  Description of Artificial Sequence: Synthetic oligonucleotide
agcucauagcuucuuuucu

SEQ ID NO: 2522566 - RNA, 19 nt, Artificial Sequence
  Description of Artificial Sequence: Synthetic oligonucleotide
uaaacucauccuuccagua

SEQ ID NO: 2522567 - RNA, 19 nt, Artificial Sequence
  Description of Artificial Sequence: Synthetic oligonucleotide
gucaaaugaaggcguggag

SEQ ID NO: 2522568 - RNA, 19 nt, Artificial Sequence
  Description of Artificial Sequence: Synthetic oligonucleotide
acucugaccuccaaagcuc

SEQ ID NO: 2522569 - RNA, 19 nt, Artificial Sequence
  Description of Artificial Sequence: Synthetic oligonucleotide
ggaaauugaucugauacuc

SEQ ID NO: 2522570 - RNA, 19 nt, Artificial Sequence
  Description of Artificial Sequence: Synthetic oligonucleotide
uccagguaugaagagcuga

SEQ ID NO: 2522571 - RNA, 19 nt, Artificial Sequence
  Description of Artificial Sequence: Synthetic oligonucleotide
uggaguucuugccaaggau

SEQ ID NO: 2522572 - RNA, 19 nt, Artificial Sequence
  Description of Artificial Sequence: Synthetic oligonucleotide
aguaccaaagccacguggu

SEQ ID NO: 2522573 - RNA, 19 nt, Artificial Sequence
  Description of Artificial Sequence: Synthetic oligonucleotide
aagccaguggcacuacuuu

SEQ ID NO: 2522574 - RNA, 19 nt, Artificial Sequence
  Description of Artificial Sequence: Synthetic oligonucleotide
gaagguggaggugucugag

SEQ ID NO: 2522575 - RNA, 19 nt, Artificial Sequence
  Description of Artificial Sequence: Synthetic oligonucleotide
uuccaguaccaaagccacg

SEQ ID NO: 2522576 - RNA, 19 nt, Artificial Sequence
  Description of Artificial Sequence: Synthetic oligonucleotide
ugcugaagacggaauuaac

SEQ ID NO: 2522577 - RNA, 19 nt, Artificial Sequence
  Description of Artificial Sequence: Synthetic oligonucleotide
uaugaacagcugccaccgg

SEQ ID NO: 2522578 - RNA, 19 nt, Artificial Sequence
  Description of Artificial Sequence: Synthetic oligonucleotide
ugcgucaaaugaaggcgug

SEQ ID NO: 2522579 - RNA, 19 nt, Artificial Sequence
  Description of Artificial Sequence: Synthetic oligonucleotide
gcacguauuuguuaaacuc

SEQ ID NO: 2522580 - RNA, 19 nt, Artificial Sequence
  Description of Artificial Sequence: Synthetic oligonucleotide
aaggcguggagaggcgucg

SEQ ID NO: 2522581 - RNA, 19 nt, Artificial Sequence
  Description of Artificial Sequence: Synthetic oligonucleotide
ucacaauaggcccgcucga

SEQ ID NO: 2522582 - RNA, 19 nt, Artificial Sequence
  Description of Artificial Sequence: Synthetic oligonucleotide
agucaacccaagaauuauc

SEQ ID NO: 2522583 - RNA, 19 nt, Artificial Sequence
  Description of Artificial Sequence: Synthetic oligonucleotide
ucuuguugcaguugcucua

SEQ ID NO: 2522584 - RNA, 19 nt, Artificial Sequence
  Description of Artificial Sequence: Synthetic oligonucleotide
acccaagaauuaucuauga

SEQ ID NO: 2522585 - RNA, 19 nt, Artificial Sequence
  Description of Artificial Sequence: Synthetic oligonucleotide
ucuagaugacaacccuuau

SEQ ID NO: 2522586 - RNA, 19 nt, Artificial Sequence
  Description of Artificial Sequence: Synthetic oligonucleotide
auaacgcuuucaguuuggg

SEQ ID NO: 2522587 - RNA, 19 nt, Artificial Sequence
  Description of Artificial Sequence: Synthetic oligonucleotide
uccuggaagucaacccaag

SEQ ID NO: 2522588 - RNA, 19 nt, Artificial Sequence
  Description of Artificial Sequence: Synthetic oligonucleotide
ucacuauggguagacuuac

SEQ ID NO: 2522589 - RNA, 19 nt, Artificial Sequence
  Description of Artificial Sequence: Synthetic oligonucleotide
cuuguugcaguugcucuag

SEQ ID NO: 2522590 - RNA, 19 nt, Artificial Sequence
  Description of Artificial Sequence: Synthetic oligonucleotide
gaagaaggacuccagguau

SEQ ID NO: 2522591 - RNA, 19 nt, Artificial Sequence
  Description of Artificial Sequence: Synthetic oligonucleotide
agaugacaacccuuauaca

SEQ ID NO: 2522592 - RNA, 19 nt, Artificial Sequence
  Description of Artificial Sequence: Synthetic oligonucleotide
auggggaaauagucgcaag

SEQ ID NO: 2522593 - RNA, 19 nt, Artificial Sequence
  Description of Artificial Sequence: Synthetic oligonucleotide
auaauuugacuggagccau

SEQ ID NO: 2522594 - RNA, 19 nt, Artificial Sequence
  Description of Artificial Sequence: Synthetic oligonucleotide
uguugcaguugcucuagau

SEQ ID NO: 2522595 - RNA, 19 nt, Artificial Sequence
  Description of Artificial Sequence: Synthetic oligonucleotide
ugcaguugcucuagaugac

SEQ ID NO: 2522596 - RNA, 19 nt, Artificial Sequence
  Description of Artificial Sequence: Synthetic oligonucleotide
ugacuggagccauuugggu

SEQ ID NO: 2522597 - RNA, 19 nt, Artificial Sequence
  Description of Artificial Sequence: Synthetic oligonucleotide
gaauuaacugacugugcgu

SEQ ID NO: 2522598 - RNA, 19 nt, Artificial Sequence
  Description of Artificial Sequence: Synthetic oligonucleotide
augacaacccuuauacagu

SEQ ID NO: 2522599 - RNA, 19 nt, Artificial Sequence
  Description of Artificial Sequence: Synthetic oligonucleotide
cuggaagucaacccaagaa

SEQ ID NO: 2522600 - RNA, 19 nt, Artificial Sequence
  Description of Artificial Sequence: Synthetic oligonucleotide
cucgggcauagccaggacc

SEQ ID NO: 2522601 - RNA, 19 nt, Artificial Sequence
  Description of Artificial Sequence: Synthetic oligonucleotide
cauagcuucuuuucuucca

SEQ ID NO: 2522602 - RNA, 19 nt, Artificial Sequence
  Description of Artificial Sequence: Synthetic oligonucleotide
gacggaauuaacugacugu

SEQ ID NO: 2522603 - RNA, 19 nt, Artificial Sequence
  Description of Artificial Sequence: Synthetic oligonucleotide
acugugcgucaaaugaagg

SEQ ID NO: 2522604 - RNA, 19 nt, Artificial Sequence
  Description of Artificial Sequence: Synthetic oligonucleotide
auuugacuggagccauuug

SEQ ID NO: 2522605 - RNA, 19 nt, Artificial Sequence
  Description of Artificial Sequence: Synthetic oligonucleotide
acucuccuaucauaacgcu

SEQ ID NO: 2522606 - RNA, 19 nt, Artificial Sequence
  Description of Artificial Sequence: Synthetic oligonucleotide
uuacuagcccagacugugu

SEQ ID NO: 2522607 - RNA, 19 nt, Artificial Sequence
  Description of Artificial Sequence: Synthetic oligonucleotide
ucaucaccauacugcacgu

SEQ ID NO: 2522608 - RNA, 19 nt, Artificial Sequence
  Description of Artificial Sequence: Synthetic oligonucleotide
ggacaggacuggaagaagg

SEQ ID NO: 2522609 - RNA, 19 nt, Artificial Sequence
  Description of Artificial Sequence: Synthetic oligonucleotide
gcauguguggaguucuugc

SEQ ID NO: 2522610 - RNA, 19 nt, Artificial Sequence
  Description of Artificial Sequence: Synthetic oligonucleotide
aacugagauuggcuuuuau

SEQ ID NO: 2522611 - RNA, 19 nt, Artificial Sequence
  Description of Artificial Sequence: Synthetic oligonucleotide
gaucacaauaggcccgcuc

SEQ ID NO: 2522612 - RNA, 19 nt, Artificial Sequence
  Description of Artificial Sequence: Synthetic oligonucleotide
ucaguuuggggaucacaau

SEQ ID NO: 2522613 - RNA, 19 nt, Artificial Sequence
  Description of Artificial Sequence: Synthetic oligonucleotide
caggaaugccaugucuugg

SEQ ID NO: 2522614 - RNA, 19 nt, Artificial Sequence
  Description of Artificial Sequence: Synthetic oligonucleotide
aagucauuuucuggaaauu

SEQ ID NO: 2522615 - RNA, 19 nt, Artificial Sequence
  Description of Artificial Sequence: Synthetic oligonucleotide
aaagccacguggugcugaa

SEQ ID NO: 2522616 - RNA, 19 nt, Artificial Sequence
  Description of Artificial Sequence: Synthetic oligonucleotide
cugauguuggaacugagau

SEQ ID NO: 2522617 - RNA, 19 nt, Artificial Sequence
  Description of Artificial Sequence: Synthetic oligonucleotide
gaagucaacccaagaauua

SEQ ID NO: 2522618 - RNA, 19 nt, Artificial Sequence
  Description of Artificial Sequence: Synthetic oligonucleotide
aaagccaguggcacuacuu

SEQ ID NO: 2522619 - RNA, 19 nt, Artificial Sequence
  Description of Artificial Sequence: Synthetic oligonucleotide
gucggauggggaaauaguc

SEQ ID NO: 2522620 - RNA, 19 nt, Artificial Sequence
  Description of Artificial Sequence: Synthetic oligonucleotide
cauauuuaccacccaggaa

SEQ ID NO: 2522621 - RNA, 19 nt, Artificial Sequence
  Description of Artificial Sequence: Synthetic oligonucleotide
guguuuccuccauauuuac

SEQ ID NO: 2522622 - RNA, 19 nt, Artificial Sequence
  Description of Artificial Sequence: Synthetic oligonucleotide
cugcacguauuuguuaaac

SEQ ID NO: 2522623 - RNA, 19 nt, Artificial Sequence
  Description of Artificial Sequence: Synthetic oligonucleotide
aagacggaauuaacugacu

SEQ ID NO: 2522624 - RNA, 19 nt, Artificial Sequence
  Description of Artificial Sequence: Synthetic oligonucleotide
acccuuauacaguccuuga

SEQ ID NO: 2522625 - RNA, 19 nt, Artificial Sequence
  Description of Artificial Sequence: Synthetic oligonucleotide
gggaaauagucgcaaguca

SEQ ID NO: 2522626 - RNA, 19 nt, Artificial Sequence
  Description of Artificial Sequence: Synthetic oligonucleotide
aaggaucucagaggcugca

SEQ ID NO: 2522627 - RNA, 19 nt, Artificial Sequence
  Description of Artificial Sequence: Synthetic oligonucleotide
gauggggaaauagucgcaa

SEQ ID NO: 2522628 - RNA, 19 nt, Artificial Sequence
  Description of Artificial Sequence: Synthetic oligonucleotide
aacugacugugcgucaaau

SEQ ID NO: 2522629 - RNA, 19 nt, Artificial Sequence
  Description of Artificial Sequence: Synthetic oligonucleotide
acccaggaaugccaugucu

SEQ ID NO: 2522630 - RNA, 19 nt, Artificial Sequence
  Description of Artificial Sequence: Synthetic oligonucleotide
gaucucagaggcugcaacu

SEQ ID NO: 2522631 - RNA, 19 nt, Artificial Sequence
  Description of Artificial Sequence: Synthetic oligonucleotide
cuagaugacaacccuuaua

SEQ ID NO: 2522632 - RNA, 19 nt, Artificial Sequence
  Description of Artificial Sequence: Synthetic oligonucleotide
ucaccauacugcacguauu

SEQ ID NO: 2522633 - RNA, 19 nt, Artificial Sequence
  Description of Artificial Sequence: Synthetic oligonucleotide
acgcuuucaguuuggggau

SEQ ID NO: 2522634 - RNA, 19 nt, Artificial Sequence
  Description of Artificial Sequence: Synthetic oligonucleotide
auacugcacguauuuguua

SEQ ID NO: 2522635 - RNA, 19 nt, Artificial Sequence
  Description of Artificial Sequence: Synthetic oligonucleotide
agaggcgucggauggggaa

SEQ ID NO: 2522636 - RNA, 19 nt, Artificial Sequence
  Description of Artificial Sequence: Synthetic oligonucleotide
ugguacagcggcagugauc

SEQ ID NO: 2522637 - RNA, 19 nt, Artificial Sequence
  Description of Artificial Sequence: Synthetic oligonucleotide
caguuuggggaucacaaua

SEQ ID NO: 2522638 - RNA, 19 nt, Artificial Sequence
  Description of Artificial Sequence: Synthetic oligonucleotide
gaccuccaaagcucauagc

SEQ ID NO: 2522639 - RNA, 19 nt, Artificial Sequence
  Description of Artificial Sequence: Synthetic oligonucleotide
agauuggcuuuuauucuca

SEQ ID NO: 2522640 - RNA, 19 nt, Artificial Sequence
  Description of Artificial Sequence: Synthetic oligonucleotide
uuagagacaucaggaguuu

SEQ ID NO: 2522641 - RNA, 19 nt, Artificial Sequence
  Description of Artificial Sequence: Synthetic oligonucleotide
ugggucacuauggguagac

SEQ ID NO: 2522642 - RNA, 19 nt, Artificial Sequence
  Description of Artificial Sequence: Synthetic oligonucleotide
gcggcagugaucuccucgg

SEQ ID NO: 2522643 - RNA, 19 nt, Artificial Sequence
  Description of Artificial Sequence: Synthetic oligonucleotide
gacaacccuuauacagucc

SEQ ID NO: 2522644 - RNA, 19 nt, Artificial Sequence
  Description of Artificial Sequence: Synthetic oligonucleotide
ggaguucuugccaaggauc

SEQ ID NO: 2522645 - RNA, 19 nt, Artificial Sequence
  Description of Artificial Sequence: Synthetic oligonucleotide
gggcuuacaaacugggcuc

SEQ ID NO: 2522646 - RNA, 19 nt, Artificial Sequence
  Description of Artificial Sequence: Synthetic oligonucleotide
guggcacuacuuuuagaga

SEQ ID NO: 2522647 - RNA, 19 nt, Artificial Sequence
  Description of Artificial Sequence: Synthetic oligonucleotide
gucaacccaagaauuaucu

SEQ ID NO: 2522648 - RNA, 19 nt, Artificial Sequence
  Description of Artificial Sequence: Synthetic oligonucleotide
caagucauuuucuggaaau

SEQ ID NO: 2522649 - RNA, 19 nt, Artificial Sequence
  Description of Artificial Sequence: Synthetic oligonucleotide
gcagugaucuccucgggca

SEQ ID NO: 2522650 - RNA, 19 nt, Artificial Sequence
  Description of Artificial Sequence: Synthetic oligonucleotide
acaauaggcccgcucgaua

SEQ ID NO: 2522651 - RNA, 19 nt, Artificial Sequence
  Description of Artificial Sequence: Synthetic oligonucleotide
gguacagcggcagugaucu

SEQ ID NO: 2522652 - RNA, 19 nt, Artificial Sequence
  Description of Artificial Sequence: Synthetic oligonucleotide
cuaucauaacgcuuucagu

SEQ ID NO: 2522653 - RNA, 19 nt, Artificial Sequence
  Description of Artificial Sequence: Synthetic oligonucleotide
uugaucugauacucuccua

SEQ ID NO: 2522654 - RNA, 19 nt, Artificial Sequence
  Description of Artificial Sequence: Synthetic oligonucleotide
uaauuugacuggagccauu

SEQ ID NO: 2522655 - RNA, 19 nt, Artificial Sequence
  Description of Artificial Sequence: Synthetic oligonucleotide
ugggcucacaguggcaugu

SEQ ID NO: 2522656 - RNA, 19 nt, Artificial Sequence
  Description of Artificial Sequence: Synthetic oligonucleotide
accauacugcacguauuug

SEQ ID NO: 2522657 - RNA, 19 nt, Artificial Sequence
  Description of Artificial Sequence: Synthetic oligonucleotide
uccucgggcauagccagga

SEQ ID NO: 2522658 - RNA, 19 nt, Artificial Sequence
  Description of Artificial Sequence: Synthetic oligonucleotide
agguggaaguggcucuugu

SEQ ID NO: 2522659 - RNA, 19 nt, Artificial Sequence
  Description of Artificial Sequence: Synthetic oligonucleotide
cugauacucuccuaucaua

SEQ ID NO: 2522660 - RNA, 19 nt, Artificial Sequence
  Description of Artificial Sequence: Synthetic oligonucleotide
cggauggggaaauagucgc

SEQ ID NO: 2522661 - RNA, 19 nt, Artificial Sequence
  Description of Artificial Sequence: Synthetic oligonucleotide
uaacugacugugcgucaaa

SEQ ID NO: 2522662 - RNA, 19 nt, Artificial Sequence
  Description of Artificial Sequence: Synthetic oligonucleotide
ugcaacucuguggcuugag

SEQ ID NO: 2522663 - RNA, 19 nt, Artificial Sequence
  Description of Artificial Sequence: Synthetic oligonucleotide
gugaucuccucgggcauag

SEQ ID NO: 2522664 - RNA, 19 nt, Artificial Sequence
  Description of Artificial Sequence: Synthetic oligonucleotide
ggggaucacaauaggcccg

SEQ ID NO: 2522665 - RNA, 19 nt, Artificial Sequence
  Description of Artificial Sequence: Synthetic oligonucleotide
uuguugcaguugcucuaga

SEQ ID NO: 2522666 - RNA, 19 nt, Artificial Sequence
  Description of Artificial Sequence: Synthetic oligonucleotide
aucuccucgggcauagcca

SEQ ID NO: 2522667 - RNA, 19 nt, Artificial Sequence
  Description of Artificial Sequence: Synthetic oligonucleotide
gguagacuuacuagcccag

SEQ ID NO: 2522668 - RNA, 19 nt, Artificial Sequence
  Description of Artificial Sequence: Synthetic oligonucleotide
ggggaaauagucgcaaguc

SEQ ID NO: 2522669 - RNA, 19 nt, Artificial Sequence
  Description of Artificial Sequence: Synthetic oligonucleotide
gucacuauggguagacuua

SEQ ID NO: 2522670 - RNA, 19 nt, Artificial Sequence
  Description of Artificial Sequence: Synthetic oligonucleotide
ugaaggcguggagaggcgu

SEQ ID NO: 2522671 - RNA, 19 nt, Artificial Sequence
  Description of Artificial Sequence: Synthetic oligonucleotide
guguggaguucuugccaag

SEQ ID NO: 2522672 - RNA, 19 nt, Artificial Sequence
  Description of Artificial Sequence: Synthetic oligonucleotide
cuucucagacucugaccuc

SEQ ID NO: 2522673 - RNA, 19 nt, Artificial Sequence
  Description of Artificial Sequence: Synthetic oligonucleotide
uggcuugaggaagguggag

SEQ ID NO: 2522674 - RNA, 19 nt, Artificial Sequence
  Description of Artificial Sequence: Synthetic oligonucleotide
ccauauuuaccacccagga

SEQ ID NO: 2522675 - RNA, 19 nt, Artificial Sequence
  Description of Artificial Sequence: Synthetic oligonucleotide
uccagugacugcugcuuuu

SEQ ID NO: 2522676 - RNA, 19 nt, Artificial Sequence
  Description of Artificial Sequence: Synthetic oligonucleotide
guuggaacugagauuggcu

SEQ ID NO: 2522677 - RNA, 19 nt, Artificial Sequence
  Description of Artificial Sequence: Synthetic oligonucleotide
cccuuauacaguccuugag

SEQ ID NO: 2522678 - RNA, 19 nt, Artificial Sequence
  Description of Artificial Sequence: Synthetic oligonucleotide
acuuacuagcccagacugu

SEQ ID NO: 2522679 - RNA, 19 nt, Artificial Sequence
  Description of Artificial Sequence: Synthetic oligonucleotide
cuuacaaacugggcucaca

SEQ ID NO: 2522680 - RNA, 19 nt, Artificial Sequence
  Description of Artificial Sequence: Synthetic oligonucleotide
gugcugaagacggaauuaa

SEQ ID NO: 2522681 - RNA, 19 nt, Artificial Sequence
  Description of Artificial Sequence: Synthetic oligonucleotide
gaaggcguggagaggcguc

SEQ ID NO: 2522682 - RNA, 19 nt, Artificial Sequence
  Description of Artificial Sequence: Synthetic oligonucleotide
cccagacuguguuuccucc

SEQ ID NO: 2522683 - RNA, 19 nt, Artificial Sequence
  Description of Artificial Sequence: Synthetic oligonucleotide
cauacugcacguauuuguu

SEQ ID NO: 2522684 - RNA, 19 nt, Artificial Sequence
  Description of Artificial Sequence: Synthetic oligonucleotide
caauaggcccgcucgauau

SEQ ID NO: 2522685 - RNA, 19 nt, Artificial Sequence
  Description of Artificial Sequence: Synthetic oligonucleotide
cauuugggucacuaugggu

SEQ ID NO: 2522686 - RNA, 19 nt, Artificial Sequence
  Description of Artificial Sequence: Synthetic oligonucleotide
gcugaagacggaauuaacu

SEQ ID NO: 2522687 - RNA, 19 nt, Artificial Sequence
  Description of Artificial Sequence: Synthetic oligonucleotide
cuccuaucauaacgcuuuc

SEQ ID NO: 2522688 - RNA, 19 nt, Artificial Sequence
  Description of Artificial Sequence: Synthetic oligonucleotide
guagacuuacuagcccaga

SEQ ID NO: 2522689 - RNA, 19 nt, Artificial Sequence
  Description of Artificial Sequence: Synthetic oligonucleotide
ggaaauagucgcaagucau

SEQ ID NO: 2522690 - RNA, 19 nt, Artificial Sequence
  Description of Artificial Sequence: Synthetic oligonucleotide
acaguccuugagggcuuac

SEQ ID NO: 2522691 - RNA, 19 nt, Artificial Sequence
  Description of Artificial Sequence: Synthetic oligonucleotide
guggcucuuguugcaguug

SEQ ID NO: 2522692 - RNA, 19 nt, Artificial Sequence
  Description of Artificial Sequence: Synthetic oligonucleotide
gggaucacaauaggcccgc

SEQ ID NO: 2522693 - RNA, 19 nt, Artificial Sequence
  Description of Artificial Sequence: Synthetic oligonucleotide
gcgucaaaugaaggcgugg

SEQ ID NO: 2522694 - RNA, 19 nt, Artificial Sequence
  Description of Artificial Sequence: Synthetic oligonucleotide
uugggucacuauggguaga

SEQ ID NO: 2522695 - RNA, 19 nt, Artificial Sequence
  Description of Artificial Sequence: Synthetic oligonucleotide
ugccaugucuuggccgcug

SEQ ID NO: 2522696 - RNA, 19 nt, Artificial Sequence
  Description of Artificial Sequence: Synthetic oligonucleotide
gcaagucauuuucuggaaa

SEQ ID NO: 2522697 - RNA, 19 nt, Artificial Sequence
  Description of Artificial Sequence: Synthetic oligonucleotide
gguaugaagagcugauguu

SEQ ID NO: 2522698 - RNA, 19 nt, Artificial Sequence
  Description of Artificial Sequence: Synthetic oligonucleotide
ggucacuauggguagacuu

SEQ ID NO: 2522699 - RNA, 19 nt, Artificial Sequence
  Description of Artificial Sequence: Synthetic oligonucleotide
ccacguggugcugaagacg

SEQ ID NO: 2522700 - RNA, 19 nt, Artificial Sequence
  Description of Artificial Sequence: Synthetic oligonucleotide
aagccacguggugcugaag

SEQ ID NO: 2522701 - RNA, 19 nt, Artificial Sequence
  Description of Artificial Sequence: Synthetic oligonucleotide
uggcugguacagcggcagu

SEQ ID NO: 2522702 - RNA, 19 nt, Artificial Sequence
  Description of Artificial Sequence: Synthetic oligonucleotide
gcagccugcuggcugguac

SEQ ID NO: 2522703 - RNA, 19 nt, Artificial Sequence
  Description of Artificial Sequence: Synthetic oligonucleotide
guggcuugaggaaggugga

SEQ ID NO: 2522704 - RNA, 19 nt, Artificial Sequence
  Description of Artificial Sequence: Synthetic oligonucleotide
ggcacuacuuuuagagaca

SEQ ID NO: 2522705 - RNA, 19 nt, Artificial Sequence
  Description of Artificial Sequence: Synthetic oligonucleotide
gcugauguuggaacugaga

SEQ ID NO: 2522706 - RNA, 19 nt, Artificial Sequence
  Description of Artificial Sequence: Synthetic oligonucleotide
ggaagucaacccaagaauu

SEQ ID NO: 2522707 - RNA, 19 nt, Artificial Sequence
  Description of Artificial Sequence: Synthetic oligonucleotide
gcgucggauggggaaauag

SEQ ID NO: 2522708 - RNA, 19 nt, Artificial Sequence
  Description of Artificial Sequence: Synthetic oligonucleotide
agcccagacuguguuuccu

SEQ ID NO: 2522709 - RNA, 19 nt, Artificial Sequence
  Description of Artificial Sequence: Synthetic oligonucleotide
ccauacugcacguauuugu

SEQ ID NO: 2522710 - RNA, 19 nt, Artificial Sequence
  Description of Artificial Sequence: Synthetic oligonucleotide
ggcugguacagcggcagug

SEQ ID NO: 2522711 - RNA, 19 nt, Artificial Sequence
  Description of Artificial Sequence: Synthetic oligonucleotide
cuguggcuugaggaaggug

SEQ ID NO: 2522712 - RNA, 19 nt, Artificial Sequence
  Description of Artificial Sequence: Synthetic oligonucleotide
agugaucuccucgggcaua

SEQ ID NO: 2522713 - RNA, 19 nt, Artificial Sequence
  Description of Artificial Sequence: Synthetic oligonucleotide
caguggcacuacuuuuaga

SEQ ID NO: 2522714 - RNA, 19 nt, Artificial Sequence
  Description of Artificial Sequence: Synthetic oligonucleotide
gaggcgucggauggggaaa

SEQ ID NO: 2522715 - RNA, 19 nt, Artificial Sequence
  Description of Artificial Sequence: Synthetic oligonucleotide
aggcguggagaggcgucgg

SEQ ID NO: 2522716 - RNA, 19 nt, Artificial Sequence
  Description of Artificial Sequence: Synthetic oligonucleotide
cagccugcuggcugguaca

SEQ ID NO: 2522717 - RNA, 19 nt, Artificial Sequence
  Description of Artificial Sequence: Synthetic oligonucleotide
gugcgucaaaugaaggcgu

SEQ ID NO: 2522718 - RNA, 19 nt, Artificial Sequence
  Description of Artificial Sequence: Synthetic oligonucleotide
cucuccuaucauaacgcuu

SEQ ID NO: 2522719 - RNA, 19 nt, Artificial Sequence
  Description of Artificial Sequence: Synthetic oligonucleotide
accgguagggcagguggaa

SEQ ID NO: 2522720 - RNA, 19 nt, Artificial Sequence
  Description of Artificial Sequence: Synthetic oligonucleotide
ggcuuacaaacugggcuca

SEQ ID NO: 2522721 - RNA, 19 nt, Artificial Sequence
  Description of Artificial Sequence: Synthetic oligonucleotide
gagccauuugggucacuau

SEQ ID NO: 2522722 - RNA, 19 nt, Artificial Sequence
  Description of Artificial Sequence: Synthetic oligonucleotide
cguggagaggcgucggaug

SEQ ID NO: 2522723 - RNA, 19 nt, Artificial Sequence
  Description of Artificial Sequence: Synthetic oligonucleotide
ggauggggaaauagucgca

SEQ ID NO: 2522724 - RNA, 19 nt, Artificial Sequence
  Description of Artificial Sequence: Synthetic oligonucleotide
cagguggaaguggcucuug

SEQ ID NO: 2522725 - RNA, 19 nt, Artificial Sequence
  Description of Artificial Sequence: Synthetic oligonucleotide
cugaccuccaaagcucaua

SEQ ID NO: 2522726 - RNA, 19 nt, Artificial Sequence
  Description of Artificial Sequence: Synthetic oligonucleotide
caaagcucauagcuucuuu

SEQ ID NO: 2522727 - RNA, 19 nt, Artificial Sequence
  Description of Artificial Sequence: Synthetic oligonucleotide
caccgguagggcaggugga

SEQ ID NO: 2522728 - RNA, 19 nt, Artificial Sequence
  Description of Artificial Sequence: Synthetic oligonucleotide
ggcccgcucgauauccucc

SEQ ID NO: 2522729 - RNA, 19 nt, Artificial Sequence
  Description of Artificial Sequence: Synthetic oligonucleotide
uacaguccuugagggcuua

SEQ ID NO: 2522730 - RNA, 19 nt, Artificial Sequence
  Description of Artificial Sequence: Synthetic oligonucleotide
ggagccauuugggucacua

SEQ ID NO: 2522731 - RNA, 19 nt, Artificial Sequence
  Description of Artificial Sequence: Synthetic oligonucleotide
cuuuuacaccaaagccagu

SEQ ID NO: 2522732 - RNA, 19 nt, Artificial Sequence
  Description of Artificial Sequence: Synthetic oligonucleotide
ccuggaagucaacccaaga

SEQ ID NO: 2522733 - RNA, 19 nt, Artificial Sequence
  Description of Artificial Sequence: Synthetic oligonucleotide
gaacugagauuggcuuuua

SEQ ID NO: 2522734 - RNA, 19 nt, Artificial Sequence
  Description of Artificial Sequence: Synthetic oligonucleotide
gggcagguggaaguggcuc

SEQ ID NO: 2522735 - RNA, 19 nt, Artificial Sequence
  Description of Artificial Sequence: Synthetic oligonucleotide
gcccagacuguguuuccuc

SEQ ID NO: 2522736 - RNA, 19 nt, Artificial Sequence
  Description of Artificial Sequence: Synthetic oligonucleotide
gagaggcgucggaugggga

SEQ ID NO: 2522737 - RNA, 19 nt, Artificial Sequence
  Description of Artificial Sequence: Synthetic oligonucleotide
ccagacuguguuuccucca

SEQ ID NO: 2522738 - RNA, 19 nt, Artificial Sequence
  Description of Artificial Sequence: Synthetic oligonucleotide
cacuauggguagacuuacu

SEQ ID NO: 2522739 - RNA, 19 nt, Artificial Sequence
  Description of Artificial Sequence: Synthetic oligonucleotide
gccaguggcacuacuuuua

SEQ ID NO: 2522740 - RNA, 19 nt, Artificial Sequence
  Description of Artificial Sequence: Synthetic oligonucleotide
caaagccaguggcacuacu

SEQ ID NO: 2522741 - RNA, 19 nt, Artificial Sequence
  Description of Artificial Sequence: Synthetic oligonucleotide
gcuuacaaacugggcucac

SEQ ID NO: 2522742 - RNA, 19 nt, Artificial Sequence
  Description of Artificial Sequence: Synthetic oligonucleotide
aggcgucggauggggaaau

SEQ ID NO: 2522743 - RNA, 19 nt, Artificial Sequence
  Description of Artificial Sequence: Synthetic oligonucleotide
caucaggaguuuuguucau

SEQ ID NO: 2522744 - RNA, 19 nt, Artificial Sequence
  Description of Artificial Sequence: Synthetic oligonucleotide
ccagguaugaagagcugau

SEQ ID NO: 2522745 - RNA, 19 nt, Artificial Sequence
  Description of Artificial Sequence: Synthetic oligonucleotide
gcccgcucgauauccucca

SEQ ID NO: 2522746 - RNA, 19 nt, Artificial Sequence
  Description of Artificial Sequence: Synthetic oligonucleotide
gugucugaggcagccugcu

SEQ ID NO: 2522747 - RNA, 19 nt, Artificial Sequence
  Description of Artificial Sequence: Synthetic oligonucleotide
gguggaaguggcucuuguu

SEQ ID NO: 2522748 - RNA, 19 nt, Artificial Sequence
  Description of Artificial Sequence: Synthetic oligonucleotide
cgcucgauauccuccaugu

SEQ ID NO: 2522749 - RNA, 19 nt, Artificial Sequence
  Description of Artificial Sequence: Synthetic oligonucleotide
cacaauaggcccgcucgau

SEQ ID NO: 2522750 - RNA, 19 nt, Artificial Sequence
  Description of Artificial Sequence: Synthetic oligonucleotide
caacccuuauacaguccuu

SEQ ID NO: 2522751 - RNA, 19 nt, Artificial Sequence
  Description of Artificial Sequence: Synthetic oligonucleotide
guacagcggcagugaucuc

SEQ ID NO: 2522752 - RNA, 19 nt, Artificial Sequence
  Description of Artificial Sequence: Synthetic oligonucleotide
caucaccauacugcacgua

SEQ ID NO: 2522753 - RNA, 19 nt, Artificial Sequence
  Description of Artificial Sequence: Synthetic oligonucleotide
ggcguggagaggcgucgga

SEQ ID NO: 2522754 - RNA, 19 nt, Artificial Sequence
  Description of Artificial Sequence: Synthetic oligonucleotide
acguggugcugaagacgga

SEQ ID NO: 2522755 - RNA, 19 nt, Artificial Sequence
  Description of Artificial Sequence: Synthetic oligonucleotide
ggcucacaguggcaugugu

SEQ ID NO: 2522756 - RNA, 19 nt, Artificial Sequence
  Description of Artificial Sequence: Synthetic oligonucleotide
ccaugucuuggccgcuguc

SEQ ID NO: 2522757 - RNA, 19 nt, Artificial Sequence
  Description of Artificial Sequence: Synthetic oligonucleotide
ccuccaaagcucauagcuu

SEQ ID NO: 2522758 - RNA, 19 nt, Artificial Sequence
  Description of Artificial Sequence: Synthetic oligonucleotide
uggagccauuugggucacu

SEQ ID NO: 2522759 - RNA, 19 nt, Artificial Sequence
  Description of Artificial Sequence: Synthetic oligonucleotide
ccaaagccaguggcacuac

SEQ ID NO: 2522760 - RNA, 19 nt, Artificial Sequence
  Description of Artificial Sequence: Synthetic oligonucleotide
ugccaccgguagggcaggu

SEQ ID NO: 2522761 - RNA, 19 nt, Artificial Sequence
  Description of Artificial Sequence: Synthetic oligonucleotide
gcucuagaugacaacccuu

SEQ ID NO: 2522762 - RNA, 19 nt, Artificial Sequence
  Description of Artificial Sequence: Synthetic oligonucleotide
gccaccgguagggcaggug

SEQ ID NO: 2522763 - RNA, 19 nt, Artificial Sequence
  Description of Artificial Sequence: Synthetic oligonucleotide
cgucggauggggaaauagu

SEQ ID NO: 2522764 - RNA, 19 nt, Artificial Sequence
  Description of Artificial Sequence: Synthetic oligonucleotide
ccucgggcauagccaggac

SEQ ID NO: 2522765 - RNA, 19 nt, Artificial Sequence
  Description of Artificial Sequence: Synthetic oligonucleotide
gccaugucuuggccgcugu

SEQ ID NO: 2522766 - RNA, 19 nt, Artificial Sequence
  Description of Artificial Sequence: Synthetic oligonucleotide
gggucacuauggguagacu

SEQ ID NO: 2522767 - RNA, 19 nt, Artificial Sequence
  Description of Artificial Sequence: Synthetic oligonucleotide
gcguggagaggcgucggau

SEQ ID NO: 2522768 - RNA, 19 nt, Artificial Sequence
  Description of Artificial Sequence: Synthetic oligonucleotide
ggaucacaauaggcccgcu

SEQ ID NO: 2522769 - RNA, 19 nt, Artificial Sequence
  Description of Artificial Sequence: Synthetic oligonucleotide
ggcgucggauggggaaaua

SEQ ID NO: 2522770 - RNA, 19 nt, Artificial Sequence
  Description of Artificial Sequence: Synthetic oligonucleotide
ggccgcugucggcgaugcu

SEQ ID NO: 2522771 - RNA, 19 nt, Artificial Sequence
  Description of Artificial Sequence: Synthetic oligonucleotide
cccgcucgauauccuccau

SEQ ID NO: 2522772 - RNA, 19 nt, Artificial Sequence
  Description of Artificial Sequence: Synthetic oligonucleotide
aaauuggagacauaaaccg

SEQ ID NO: 2522773 - RNA, 19 nt, Artificial Sequence
  Description of Artificial Sequence: Synthetic oligonucleotide
uuagauuuaaucaaaguag

SEQ ID NO: 2522774 - RNA, 19 nt, Artificial Sequence
  Description of Artificial Sequence: Synthetic oligonucleotide
aacaaauaaaugcaacacc

SEQ ID NO: 2522775 - RNA, 19 nt, Artificial Sequence
  Description of Artificial Sequence: Synthetic oligonucleotide
uuuucuuuauccuuggucg

SEQ ID NO: 2522776 - RNA, 19 nt, Artificial Sequence
  Description of Artificial Sequence: Synthetic oligonucleotide
uuauuuauugcucuggugc

SEQ ID NO: 2522777 - RNA, 19 nt, Artificial Sequence
  Description of Artificial Sequence: Synthetic oligonucleotide
aaucaucugagguugaggg

SEQ ID NO: 2522778 - RNA, 19 nt, Artificial Sequence
  Description of Artificial Sequence: Synthetic oligonucleotide
aaucaaaguaguuucgccg

SEQ ID NO: 2522779 - RNA, 19 nt, Artificial Sequence
  Description of Artificial Sequence: Synthetic oligonucleotide
uuuagauuuaaucaaagua

SEQ ID NO: 2522780 - RNA, 19 nt, Artificial Sequence
  Description of Artificial Sequence: Synthetic oligonucleotide
uauaguaaccuucacaacu

SEQ ID NO: 2522781 - RNA, 19 nt, Artificial Sequence
  Description of Artificial Sequence: Synthetic oligonucleotide
aaaauauccgguauaaauc

SEQ ID NO: 2522782 - RNA, 19 nt, Artificial Sequence
  Description of Artificial Sequence: Synthetic oligonucleotide
uuauccaaaacaaauaaau

SEQ ID NO: 2522783 - RNA, 19 nt, Artificial Sequence
  Description of Artificial Sequence: Synthetic oligonucleotide
aaauauccgguauaaauca

SEQ ID NO: 2522784 - RNA, 19 nt, Artificial Sequence
  Description of Artificial Sequence: Synthetic oligonucleotide
auuauaguaaccuucacaa

SEQ ID NO: 2522785 - RNA, 19 nt, Artificial Sequence
  Description of Artificial Sequence: Synthetic oligonucleotide
auuugaauaauauuuacaa

SEQ ID NO: 2522786 - RNA, 19 nt, Artificial Sequence
  Description of Artificial Sequence: Synthetic oligonucleotide
aacuguuuguuauuuauug

SEQ ID NO: 2522787 - RNA, 19 nt, Artificial Sequence
  Description of Artificial Sequence: Synthetic oligonucleotide
auuuuaaucacuaaguucu

SEQ ID NO: 2522788 - RNA, 19 nt, Artificial Sequence
  Description of Artificial Sequence: Synthetic oligonucleotide
aaaucauuguuugucaggg

SEQ ID NO: 2522789 - RNA, 19 nt, Artificial Sequence
  Description of Artificial Sequence: Synthetic oligonucleotide
ucuuccauugucaauagca

SEQ ID NO: 2522790 - RNA, 19 nt, Artificial Sequence
  Description of Artificial Sequence: Synthetic oligonucleotide
uuuaaucaaaguaguuucg

SEQ ID NO: 2522791 - RNA, 19 nt, Artificial Sequence
  Description of Artificial Sequence: Synthetic oligonucleotide
auaaaugcaacaccuuuac

SEQ ID NO: 2522792 - RNA, 19 nt, Artificial Sequence
  Description of Artificial Sequence: Synthetic oligonucleotide
uugucaauagcaaugcuug

SEQ ID NO: 2522793 - RNA, 19 nt, Artificial Sequence
  Description of Artificial Sequence: Synthetic oligonucleotide
uauuugaauaauauuuaca

SEQ ID NO: 2522794 - RNA, 19 nt, Artificial Sequence
  Description of Artificial Sequence: Synthetic oligonucleotide
cauacuuggaaaauauccg

SEQ ID NO: 2522795 - RNA, 19 nt, Artificial Sequence
  Description of Artificial Sequence: Synthetic oligonucleotide
aaucacuaaguucuucuuc

SEQ ID NO: 2522796 - RNA, 19 nt, Artificial Sequence
  Description of Artificial Sequence: Synthetic oligonucleotide
uuguuugucagggagaagg

SEQ ID NO: 2522797 - RNA, 19 nt, Artificial Sequence
  Description of Artificial Sequence: Synthetic oligonucleotide
agaagggcaaauuggagac

SEQ ID NO: 2522798 - RNA, 19 nt, Artificial Sequence
  Description of Artificial Sequence: Synthetic oligonucleotide
auuucuucagcgcaacggc

SEQ ID NO: 2522799 - RNA, 19 nt, Artificial Sequence
  Description of Artificial Sequence: Synthetic oligonucleotide
caaauuggagacauaaacc

SEQ ID NO: 2522800 - RNA, 19 nt, Artificial Sequence
  Description of Artificial Sequence: Synthetic oligonucleotide
acaggcauaacuuaagugu

SEQ ID NO: 2522801 - RNA, 19 nt, Artificial Sequence
  Description of Artificial Sequence: Synthetic oligonucleotide
acuaaguucuucuucauca

SEQ ID NO: 2522802 - RNA, 19 nt, Artificial Sequence
  Description of Artificial Sequence: Synthetic oligonucleotide
uuuuaggacaggcauaacu

SEQ ID NO: 2522803 - RNA, 19 nt, Artificial Sequence
  Description of Artificial Sequence: Synthetic oligonucleotide
ucuaccaaauaacuguuug

SEQ ID NO: 2522804 - RNA, 19 nt, Artificial Sequence
  Description of Artificial Sequence: Synthetic oligonucleotide
uugucuuucauuauaguaa

SEQ ID NO: 2522805 - RNA, 19 nt, Artificial Sequence
  Description of Artificial Sequence: Synthetic oligonucleotide
acuguuuguuauuuauugc

SEQ ID NO: 2522806 - RNA, 19 nt, Artificial Sequence
  Description of Artificial Sequence: Synthetic oligonucleotide
agagucuuuauccaaaaca

SEQ ID NO: 2522807 - RNA, 19 nt, Artificial Sequence
  Description of Artificial Sequence: Synthetic oligonucleotide
uaaaucauuguuugucagg

SEQ ID NO: 2522808 - RNA, 19 nt, Artificial Sequence
  Description of Artificial Sequence: Synthetic oligonucleotide
aaugcuauggccugacuga

SEQ ID NO: 2522809 - RNA, 19 nt, Artificial Sequence
  Description of Artificial Sequence: Synthetic oligonucleotide
aaauaaaugcaacaccuuu

SEQ ID NO: 2522810 - RNA, 19 nt, Artificial Sequence
  Description of Artificial Sequence: Synthetic oligonucleotide
uauuuuaaucacuaaguuc

SEQ ID NO: 2522811 - RNA, 19 nt, Artificial Sequence
  Description of Artificial Sequence: Synthetic oligonucleotide
uuucauuauaguaaccuuc

SEQ ID NO: 2522812 - RNA, 19 nt, Artificial Sequence
  Description of Artificial Sequence: Synthetic oligonucleotide
aaaccgugcucuuacuugg

SEQ ID NO: 2522813 - RNA, 19 nt, Artificial Sequence
  Description of Artificial Sequence: Synthetic oligonucleotide
acauaaaccgugcucuuac

SEQ ID NO: 2522814 - RNA, 19 nt, Artificial Sequence
  Description of Artificial Sequence: Synthetic oligonucleotide
ucgucuagaaucaucugag

SEQ ID NO: 2522815 - RNA, 19 nt, Artificial Sequence
  Description of Artificial Sequence: Synthetic oligonucleotide
uaaguguccgcuuuccccg

SEQ ID NO: 2522816 - RNA, 19 nt, Artificial Sequence
  Description of Artificial Sequence: Synthetic oligonucleotide
uaagcacuuuucuuuaucc

SEQ ID NO: 2522817 - RNA, 19 nt, Artificial Sequence
  Description of Artificial Sequence: Synthetic oligonucleotide
uauccgguauaaaucauug

SEQ ID NO: 2522818 - RNA, 19 nt, Artificial Sequence
  Description of Artificial Sequence: Synthetic oligonucleotide
uuugucuuucauuauagua

SEQ ID NO: 2522819 - RNA, 19 nt, Artificial Sequence
  Description of Artificial Sequence: Synthetic oligonucleotide
uuaucacucuaccaaauaa

SEQ ID NO: 2522820 - RNA, 19 nt, Artificial Sequence
  Description of Artificial Sequence: Synthetic oligonucleotide
acaaauaaaugcaacaccu

SEQ ID NO: 2522821 - RNA, 19 nt, Artificial Sequence
  Description of Artificial Sequence: Synthetic oligonucleotide
uuaaguguccgcuuucccc

SEQ ID NO: 2522822 - RNA, 19 nt, Artificial Sequence
  Description of Artificial Sequence: Synthetic oligonucleotide
uuuaggacaggcauaacuu

SEQ ID NO: 2522823 - RNA, 19 nt, Artificial Sequence
  Description of Artificial Sequence: Synthetic oligonucleotide
uuuauccaaaacaaauaaa

SEQ ID NO: 2522824 - RNA, 19 nt, Artificial Sequence
  Description of Artificial Sequence: Synthetic oligonucleotide
uaaucaaaguaguuucgcc

SEQ ID NO: 2522825 - RNA, 19 nt, Artificial Sequence
  Description of Artificial Sequence: Synthetic oligonucleotide
ucuuuauccaaaacaaaua

SEQ ID NO: 2522826 - RNA, 19 nt, Artificial Sequence
  Description of Artificial Sequence: Synthetic oligonucleotide
ucuggugcaguuuaaggca

SEQ ID NO: 2522827 - RNA, 19 nt, Artificial Sequence
  Description of Artificial Sequence: Synthetic oligonucleotide
uaucacucuaccaaauaac

SEQ ID NO: 2522828 - RNA, 19 nt, Artificial Sequence
  Description of Artificial Sequence: Synthetic oligonucleotide
auaaaucauuguuugucag

SEQ ID NO: 2522829 - RNA, 19 nt, Artificial Sequence
  Description of Artificial Sequence: Synthetic oligonucleotide
aaaguaguuucgccgucgg

SEQ ID NO: 2522830 - RNA, 19 nt, Artificial Sequence
  Description of Artificial Sequence: Synthetic oligonucleotide
auuuagauuuaaucaaagu

SEQ ID NO: 2522831 - RNA, 19 nt, Artificial Sequence
  Description of Artificial Sequence: Synthetic oligonucleotide
uuugaauaauauuuacaaa

SEQ ID NO: 2522832 - RNA, 19 nt, Artificial Sequence
  Description of Artificial Sequence: Synthetic oligonucleotide
ucuuacuuggagccaagcc

SEQ ID NO: 2522833 - RNA, 19 nt, Artificial Sequence
  Description of Artificial Sequence: Synthetic oligonucleotide
gaaaauauccgguauaaau

SEQ ID NO: 2522834 - RNA, 19 nt, Artificial Sequence
  Description of Artificial Sequence: Synthetic oligonucleotide
aacuuugccauacuuggaa

SEQ ID NO: 2522835 - RNA, 19 nt, Artificial Sequence
  Description of Artificial Sequence: Synthetic oligonucleotide
acucacuucuacuuccucg

SEQ ID NO: 2522836 - RNA, 19 nt, Artificial Sequence
  Description of Artificial Sequence: Synthetic oligonucleotide
acugaaauaagcacuuuuc

SEQ ID NO: 2522837 - RNA, 19 nt, Artificial Sequence
  Description of Artificial Sequence: Synthetic oligonucleotide
gaaugcuauggccugacug

SEQ ID NO: 2522838 - RNA, 19 nt, Artificial Sequence
  Description of Artificial Sequence: Synthetic oligonucleotide
uuaaucaaaguaguuucgc

SEQ ID NO: 2522839 - RNA, 19 nt, Artificial Sequence
  Description of Artificial Sequence: Synthetic oligonucleotide
ugucuuucauuauaguaac

SEQ ID NO: 2522840 - RNA, 19 nt, Artificial Sequence
  Description of Artificial Sequence: Synthetic oligonucleotide
uucuucagcgcaacggccg

SEQ ID NO: 2522841 - RNA, 19 nt, Artificial Sequence
  Description of Artificial Sequence: Synthetic oligonucleotide
ucuucaucacugaaauaag

SEQ ID NO: 2522842 - RNA, 19 nt, Artificial Sequence
  Description of Artificial Sequence: Synthetic oligonucleotide
uauggccugacugagacug

SEQ ID NO: 2522843 - RNA, 19 nt, Artificial Sequence
  Description of Artificial Sequence: Synthetic oligonucleotide
auaagcacuuuucuuuauc

SEQ ID NO: 2522844 - RNA, 19 nt, Artificial Sequence
  Description of Artificial Sequence: Synthetic oligonucleotide
auaacuguuuguuauuuau

SEQ ID NO: 2522845 - RNA, 19 nt, Artificial Sequence
  Description of Artificial Sequence: Synthetic oligonucleotide
acaguaagauuuuauuuga

SEQ ID NO: 2522846 - RNA, 19 nt, Artificial Sequence
  Description of Artificial Sequence: Synthetic oligonucleotide
uccuuggucgucuagaauc

SEQ ID NO: 2522847 - RNA, 19 nt, Artificial Sequence
  Description of Artificial Sequence: Synthetic oligonucleotide
uaaaccgugcucuuacuug

SEQ ID NO: 2522848 - RNA, 19 nt, Artificial Sequence
  Description of Artificial Sequence: Synthetic oligonucleotide
aaauaagcacuuuucuuua

SEQ ID NO: 2522849 - RNA, 19 nt, Artificial Sequence
  Description of Artificial Sequence: Synthetic oligonucleotide
uguuauuuauugcucuggu

SEQ ID NO: 2522850 - RNA, 19 nt, Artificial Sequence
  Description of Artificial Sequence: Synthetic oligonucleotide
auauuuuaaucacuaaguu

SEQ ID NO: 2522851 - RNA, 19 nt, Artificial Sequence
  Description of Artificial Sequence: Synthetic oligonucleotide
uguuugucagggagaaggg

SEQ ID NO: 2522852 - RNA, 19 nt, Artificial Sequence
  Description of Artificial Sequence: Synthetic oligonucleotide
aguaagauuuuauuugaau

SEQ ID NO: 2522853 - RNA, 19 nt, Artificial Sequence
  Description of Artificial Sequence: Synthetic oligonucleotide
uuacuuggagccaagccac

SEQ ID NO: 2522854 - RNA, 19 nt, Artificial Sequence
  Description of Artificial Sequence: Synthetic oligonucleotide
uauuuauugcucuggugca

SEQ ID NO: 2522855 - RNA, 19 nt, Artificial Sequence
  Description of Artificial Sequence: Synthetic oligonucleotide
ucuagaaucaucugagguu

SEQ ID NO: 2522856 - RNA, 19 nt, Artificial Sequence
  Description of Artificial Sequence: Synthetic oligonucleotide
guaagauuuuauuugaaua

SEQ ID NO: 2522857 - RNA, 19 nt, Artificial Sequence
  Description of Artificial Sequence: Synthetic oligonucleotide
uguuuguuauuuauugcuc

SEQ ID NO: 2522858 - RNA, 19 nt, Artificial Sequence
  Description of Artificial Sequence: Synthetic oligonucleotide
uuguuauuuauugcucugg

SEQ ID NO: 2522859 - RNA, 19 nt, Artificial Sequence
  Description of Artificial Sequence: Synthetic oligonucleotide
uuuccccgcacucauaaca

SEQ ID NO: 2522860 - RNA, 19 nt, Artificial Sequence
  Description of Artificial Sequence: Synthetic oligonucleotide
gucggaugaacucagcugc

SEQ ID NO: 2522861 - RNA, 19 nt, Artificial Sequence
  Description of Artificial Sequence: Synthetic oligonucleotide
ugaaauaagcacuuuucuu

SEQ ID NO: 2522862 - RNA, 19 nt, Artificial Sequence
  Description of Artificial Sequence: Synthetic oligonucleotide
gcaaauuggagacauaaac

SEQ ID NO: 2522863 - RNA, 19 nt, Artificial Sequence
  Description of Artificial Sequence: Synthetic oligonucleotide
uggucgucuagaaucaucu

SEQ ID NO: 2522864 - RNA, 19 nt, Artificial Sequence
  Description of Artificial Sequence: Synthetic oligonucleotide
ucacucuaccaaauaacug

SEQ ID NO: 2522865 - RNA, 19 nt, Artificial Sequence
  Description of Artificial Sequence: Synthetic oligonucleotide
agcgcaacggccgugagcg

SEQ ID NO: 2522866 - RNA, 19 nt, Artificial Sequence
  Description of Artificial Sequence: Synthetic oligonucleotide
accacucauuucuucagcg

SEQ ID NO: 2522867 - RNA, 19 nt, Artificial Sequence
  Description of Artificial Sequence: Synthetic oligonucleotide
cuagaaucaucugagguug

SEQ ID NO: 2522868 - RNA, 19 nt, Artificial Sequence
  Description of Artificial Sequence: Synthetic oligonucleotide
gacaggcauaacuuaagug

SEQ ID NO: 2522869 - RNA, 19 nt, Artificial Sequence
  Description of Artificial Sequence: Synthetic oligonucleotide
cauuucuucagcgcaacgg

SEQ ID NO: 2522870 - RNA, 19 nt, Artificial Sequence
  Description of Artificial Sequence: Synthetic oligonucleotide
gaaauaagcacuuuucuuu

SEQ ID NO: 2522871 - RNA, 19 nt, Artificial Sequence
  Description of Artificial Sequence: Synthetic oligonucleotide
gagaagggcaaauuggaga

SEQ ID NO: 2522872 - RNA, 19 nt, Artificial Sequence
  Description of Artificial Sequence: Synthetic oligonucleotide
uacuuggaaaauauccggu

SEQ ID NO: 2522873 - RNA, 19 nt, Artificial Sequence
  Description of Artificial Sequence: Synthetic oligonucleotide
cuuacuuggagccaagcca

SEQ ID NO: 2522874 - RNA, 19 nt, Artificial Sequence
  Description of Artificial Sequence: Synthetic oligonucleotide
uugccuuuaucacucuacc

SEQ ID NO: 2522875 - RNA, 19 nt, Artificial Sequence
  Description of Artificial Sequence: Synthetic oligonucleotide
aauagcaaugcuugccuuu

SEQ ID NO: 2522876 - RNA, 19 nt, Artificial Sequence
  Description of Artificial Sequence: Synthetic oligonucleotide
ugcuggaaugcuauggccu

SEQ ID NO: 2522877 - RNA, 19 nt, Artificial Sequence
  Description of Artificial Sequence: Synthetic oligonucleotide
agguugagggaccaccugg

SEQ ID NO: 2522878 - RNA, 19 nt, Artificial Sequence
  Description of Artificial Sequence: Synthetic oligonucleotide
cacaacuuugccauacuug

SEQ ID NO: 2522879 - RNA, 19 nt, Artificial Sequence
  Description of Artificial Sequence: Synthetic oligonucleotide
cuuuacuccuccuuguguc

SEQ ID NO: 2522880 - RNA, 19 nt, Artificial Sequence
  Description of Artificial Sequence: Synthetic oligonucleotide
uucugguucaggaacuuuc

SEQ ID NO: 2522881 - RNA, 19 nt, Artificial Sequence
  Description of Artificial Sequence: Synthetic oligonucleotide
uuuaucacucuaccaaaua

SEQ ID NO: 2522882 - RNA, 19 nt, Artificial Sequence
  Description of Artificial Sequence: Synthetic oligonucleotide
guuauuuauugcucuggug

SEQ ID NO: 2522883 - RNA, 19 nt, Artificial Sequence
  Description of Artificial Sequence: Synthetic oligonucleotide
aagcacuuuucuuuauccu

SEQ ID NO: 2522884 - RNA, 19 nt, Artificial Sequence
  Description of Artificial Sequence: Synthetic oligonucleotide
aauaacuguuuguuauuua

SEQ ID NO: 2522885 - RNA, 19 nt, Artificial Sequence
  Description of Artificial Sequence: Synthetic oligonucleotide
acuuaaguguccgcuuucc

SEQ ID NO: 2522886 - RNA, 19 nt, Artificial Sequence
  Description of Artificial Sequence: Synthetic oligonucleotide
cuugccuuuaucacucuac

SEQ ID NO: 2522887 - RNA, 19 nt, Artificial Sequence
  Description of Artificial Sequence: Synthetic oligonucleotide
uucaggaacuuucuucuuc

SEQ ID NO: 2522888 - RNA, 19 nt, Artificial Sequence
  Description of Artificial Sequence: Synthetic oligonucleotide
aaauaacuguuuguuauuu

SEQ ID NO: 2522889 - RNA, 19 nt, Artificial Sequence
  Description of Artificial Sequence: Synthetic oligonucleotide
cuugcuggaaugcuauggc

SEQ ID NO: 2522890 - RNA, 19 nt, Artificial Sequence
  Description of Artificial Sequence: Synthetic oligonucleotide
gaaucaucugagguugagg

SEQ ID NO: 2522891 - RNA, 19 nt, Artificial Sequence
  Description of Artificial Sequence: Synthetic oligonucleotide
uuggagacauaaaccgugc

SEQ ID NO: 2522892 - RNA, 19 nt, Artificial Sequence
  Description of Artificial Sequence: Synthetic oligonucleotide
ucuucacucacuucuacuu

SEQ ID NO: 2522893 - RNA, 19 nt, Artificial Sequence
  Description of Artificial Sequence: Synthetic oligonucleotide
uuuauccuuggucgucuag

SEQ ID NO: 2522894 - RNA, 19 nt, Artificial Sequence
  Description of Artificial Sequence: Synthetic oligonucleotide
ugguucaggaacuuucuuc

SEQ ID NO: 2522895 - RNA, 19 nt, Artificial Sequence
  Description of Artificial Sequence: Synthetic oligonucleotide
uuauaguaaccuucacaac

SEQ ID NO: 2522896 - RNA, 19 nt, Artificial Sequence
  Description of Artificial Sequence: Synthetic oligonucleotide
gagucuuuauccaaaacaa

SEQ ID NO: 2522897 - RNA, 19 nt, Artificial Sequence
  Description of Artificial Sequence: Synthetic oligonucleotide
uuggaaaauauccgguaua

SEQ ID NO: 2522898 - RNA, 19 nt, Artificial Sequence
  Description of Artificial Sequence: Synthetic oligonucleotide
aauuggagacauaaaccgu

SEQ ID NO: 2522899 - RNA, 19 nt, Artificial Sequence
  Description of Artificial Sequence: Synthetic oligonucleotide
agcaaugcuugccuuuauc

SEQ ID NO: 2522900 - RNA, 19 nt, Artificial Sequence
  Description of Artificial Sequence: Synthetic oligonucleotide
uggaaaauauccgguauaa

SEQ ID NO: 2522901 - RNA, 19 nt, Artificial Sequence
  Description of Artificial Sequence: Synthetic oligonucleotide
uuaaggcagagucuuuauc

SEQ ID NO: 2522902 - RNA, 19 nt, Artificial Sequence
  Description of Artificial Sequence: Synthetic oligonucleotide
acaccuuuacuccuccuug

SEQ ID NO: 2522903 - RNA, 19 nt, Artificial Sequence
  Description of Artificial Sequence: Synthetic oligonucleotide
aacaccuuuacuccuccuu

SEQ ID NO: 2522904 - RNA, 19 nt, Artificial Sequence
  Description of Artificial Sequence: Synthetic oligonucleotide
uaggacaggcauaacuuaa

SEQ ID NO: 2522905 - RNA, 19 nt, Artificial Sequence
  Description of Artificial Sequence: Synthetic oligonucleotide
ugaacucagcugcucuucc

SEQ ID NO: 2522906 - RNA, 19 nt, Artificial Sequence
  Description of Artificial Sequence: Synthetic oligonucleotide
aaguguccgcuuuccccgc

SEQ ID NO: 2522907 - RNA, 19 nt, Artificial Sequence
  Description of Artificial Sequence: Synthetic oligonucleotide
uuucuuuauccuuggucgu

SEQ ID NO: 2522908 - RNA, 19 nt, Artificial Sequence
  Description of Artificial Sequence: Synthetic oligonucleotide
ugagacuguccagagccgg

SEQ ID NO: 2522909 - RNA, 19 nt, Artificial Sequence
  Description of Artificial Sequence: Synthetic oligonucleotide
ucauuauaguaaccuucac

SEQ ID NO: 2522910 - RNA, 19 nt, Artificial Sequence
  Description of Artificial Sequence: Synthetic oligonucleotide
uugagggaccaccugggcu

SEQ ID NO: 2522911 - RNA, 19 nt, Artificial Sequence
  Description of Artificial Sequence: Synthetic oligonucleotide
aucacucuaccaaauaacu

SEQ ID NO: 2522912 - RNA, 19 nt, Artificial Sequence
  Description of Artificial Sequence: Synthetic oligonucleotide
cacuuuucuuuauccuugg

SEQ ID NO: 2522913 - RNA, 19 nt, Artificial Sequence
  Description of Artificial Sequence: Synthetic oligonucleotide
aguaguuucgccgucggau

SEQ ID NO: 2522914 - RNA, 19 nt, Artificial Sequence
  Description of Artificial Sequence: Synthetic oligonucleotide
uaacuuaaguguccgcuuu

SEQ ID NO: 2522915 - RNA, 19 nt, Artificial Sequence
  Description of Artificial Sequence: Synthetic oligonucleotide
agcacuuuucuuuauccuu

SEQ ID NO: 2522916 - RNA, 19 nt, Artificial Sequence
  Description of Artificial Sequence: Synthetic oligonucleotide
aagggcaaauuggagacau

SEQ ID NO: 2522917 - RNA, 19 nt, Artificial Sequence
  Description of Artificial Sequence: Synthetic oligonucleotide
uuuaaggcagagucuuuau

SEQ ID NO: 2522918 - RNA, 19 nt, Artificial Sequence
  Description of Artificial Sequence: Synthetic oligonucleotide
aggcauaacuuaagugucc

SEQ ID NO: 2522919 - RNA, 19 nt, Artificial Sequence
  Description of Artificial Sequence: Synthetic oligonucleotide
ugagguugagggaccaccu

SEQ ID NO: 2522920 - RNA, 19 nt, Artificial Sequence
  Description of Artificial Sequence: Synthetic oligonucleotide
uuaggacaggcauaacuua

SEQ ID NO: 2522921 - RNA, 19 nt, Artificial Sequence
  Description of Artificial Sequence: Synthetic oligonucleotide
uuuaaucacuaaguucuuc

SEQ ID NO: 2522922 - RNA, 19 nt, Artificial Sequence
  Description of Artificial Sequence: Synthetic oligonucleotide
uuuacuccuccuugugucu

SEQ ID NO: 2522923 - RNA, 19 nt, Artificial Sequence
  Description of Artificial Sequence: Synthetic oligonucleotide
auugucaauagcaaugcuu

SEQ ID NO: 2522924 - RNA, 19 nt, Artificial Sequence
  Description of Artificial Sequence: Synthetic oligonucleotide
acuuggaaaauauccggua

SEQ ID NO: 2522925 - RNA, 19 nt, Artificial Sequence
  Description of Artificial Sequence: Synthetic oligonucleotide
ugagcggaggcugcgagcc

SEQ ID NO: 2522926 - RNA, 19 nt, Artificial Sequence
  Description of Artificial Sequence: Synthetic oligonucleotide
auaacuuaaguguccgcuu

SEQ ID NO: 2522927 - RNA, 19 nt, Artificial Sequence
  Description of Artificial Sequence: Synthetic oligonucleotide
auugcucuggugcaguuua

SEQ ID NO: 2522928 - RNA, 19 nt, Artificial Sequence
  Description of Artificial Sequence: Synthetic oligonucleotide
cacucuaccaaauaacugu

SEQ ID NO: 2522929 - RNA, 19 nt, Artificial Sequence
  Description of Artificial Sequence: Synthetic oligonucleotide
uucuucuucuucuucuuuu

SEQ ID NO: 2522930 - RNA, 19 nt, Artificial Sequence
  Description of Artificial Sequence: Synthetic oligonucleotide
gagacauaaaccgugcucu

SEQ ID NO: 2522931 - RNA, 19 nt, Artificial Sequence
  Description of Artificial Sequence: Synthetic oligonucleotide
cuuaaguguccgcuuuccc

SEQ ID NO: 2522932 - RNA, 19 nt, Artificial Sequence
  Description of Artificial Sequence: Synthetic oligonucleotide
guaguuucgccgucggaug

SEQ ID NO: 2522933 - RNA, 19 nt, Artificial Sequence
  Description of Artificial Sequence: Synthetic oligonucleotide
uuuauugcucuggugcagu

SEQ ID NO: 2522934 - RNA, 19 nt, Artificial Sequence
  Description of Artificial Sequence: Synthetic oligonucleotide
uuccauugucaauagcaau

SEQ ID NO: 2522935 - RNA, 19 nt, Artificial Sequence
  Description of Artificial Sequence: Synthetic oligonucleotide
guuuguuauuuauugcucu

SEQ ID NO: 2522936 - RNA, 19 nt, Artificial Sequence
  Description of Artificial Sequence: Synthetic oligonucleotide
ugccuuuaucacucuacca

SEQ ID NO: 2522937 - RNA, 19 nt, Artificial Sequence
  Description of Artificial Sequence: Synthetic oligonucleotide
cuguuuguuauuuauugcu

SEQ ID NO: 2522938 - RNA, 19 nt, Artificial Sequence
  Description of Artificial Sequence: Synthetic oligonucleotide
aacggccgugagcggaggc

SEQ ID NO: 2522939 - RNA, 19 nt, Artificial Sequence
  Description of Artificial Sequence: Synthetic oligonucleotide
augcuugccuuuaucacuc

SEQ ID NO: 2522940 - RNA, 19 nt, Artificial Sequence
  Description of Artificial Sequence: Synthetic oligonucleotide
auuuauugcucuggugcag

SEQ ID NO: 2522941 - RNA, 19 nt, Artificial Sequence
  Description of Artificial Sequence: Synthetic oligonucleotide
accaaauaacuguuuguua

SEQ ID NO: 2522942 - RNA, 19 nt, Artificial Sequence
  Description of Artificial Sequence: Synthetic oligonucleotide
uuuuaaucacuaaguucuu

SEQ ID NO: 2522943 - RNA, 19 nt, Artificial Sequence
  Description of Artificial Sequence: Synthetic oligonucleotide
uuggagccaagccaccacu

SEQ ID NO: 2522944 - RNA, 19 nt, Artificial Sequence
  Description of Artificial Sequence: Synthetic oligonucleotide
uaaucacuaaguucuucuu

SEQ ID NO: 2522945 - RNA, 19 nt, Artificial Sequence
  Description of Artificial Sequence: Synthetic oligonucleotide
auaaaccgugcucuuacuu

SEQ ID NO: 2522946 - RNA, 19 nt, Artificial Sequence
  Description of Artificial Sequence: Synthetic oligonucleotide
uucacaacuuugccauacu

SEQ ID NO: 2522947 - RNA, 19 nt, Artificial Sequence
  Description of Artificial Sequence: Synthetic oligonucleotide
ugcaacaccuuuacuccuc

SEQ ID NO: 2522948 - RNA, 19 nt, Artificial Sequence
  Description of Artificial Sequence: Synthetic oligonucleotide
cuggugcaguuuaaggcag

SEQ ID NO: 2522949 - RNA, 19 nt, Artificial Sequence
  Description of Artificial Sequence: Synthetic oligonucleotide
caucacugaaauaagcacu

SEQ ID NO: 2522950 - RNA, 19 nt, Artificial Sequence
  Description of Artificial Sequence: Synthetic oligonucleotide
uggagacauaaaccgugcu

SEQ ID NO: 2522951 - RNA, 19 nt, Artificial Sequence
  Description of Artificial Sequence: Synthetic oligonucleotide
uuggucgucuagaaucauc

SEQ ID NO: 2522952 - RNA, 19 nt, Artificial Sequence
  Description of Artificial Sequence: Synthetic oligonucleotide
ggcauaacuuaaguguccg

SEQ ID NO: 2522953 - RNA, 19 nt, Artificial Sequence
  Description of Artificial Sequence: Synthetic oligonucleotide
uaguuucgccgucggauga

SEQ ID NO: 2522954 - RNA, 19 nt, Artificial Sequence
  Description of Artificial Sequence: Synthetic oligonucleotide
cugagguugagggaccacc

SEQ ID NO: 2522955 - RNA, 19 nt, Artificial Sequence
  Description of Artificial Sequence: Synthetic oligonucleotide
aguaaccuucacaacuuug

SEQ ID NO: 2522956 - RNA, 19 nt, Artificial Sequence
  Description of Artificial Sequence: Synthetic oligonucleotide
uccuccuugugucuuuguc

SEQ ID NO: 2522957 - RNA, 19 nt, Artificial Sequence
  Description of Artificial Sequence: Synthetic oligonucleotide
aucaucugagguugaggga

SEQ ID NO: 2522958 - RNA, 19 nt, Artificial Sequence
  Description of Artificial Sequence: Synthetic oligonucleotide
uuucuucuucuucuucuuu

SEQ ID NO: 2522959 - RNA, 19 nt, Artificial Sequence
  Description of Artificial Sequence: Synthetic oligonucleotide
accuuuacuccuccuugug

SEQ ID NO: 2522960 - RNA, 19 nt, Artificial Sequence
  Description of Artificial Sequence: Synthetic oligonucleotide
ucacucacuucuacuuccu

SEQ ID NO: 2522961 - RNA, 19 nt, Artificial Sequence
  Description of Artificial Sequence: Synthetic oligonucleotide
acguucuccaagcauguuu

SEQ ID NO: 2522962 - RNA, 19 nt, Artificial Sequence
  Description of Artificial Sequence: Synthetic oligonucleotide
acuuugccauacuuggaaa

SEQ ID NO: 2522963 - RNA, 19 nt, Artificial Sequence
  Description of Artificial Sequence: Synthetic oligonucleotide
gucuuuauccaaaacaaau

SEQ ID NO: 2522964 - RNA, 19 nt, Artificial Sequence
  Description of Artificial Sequence: Synthetic oligonucleotide
ggagacauaaaccgugcuc

SEQ ID NO: 2522965 - RNA, 19 nt, Artificial Sequence
  Description of Artificial Sequence: Synthetic oligonucleotide
aaguaguuucgccgucgga

SEQ ID NO: 2522966 - RNA, 19 nt, Artificial Sequence
  Description of Artificial Sequence: Synthetic oligonucleotide
uggcuugcuggaaugcuau

SEQ ID NO: 2522967 - RNA, 19 nt, Artificial Sequence
  Description of Artificial Sequence: Synthetic oligonucleotide
auaguaaccuucacaacuu

SEQ ID NO: 2522968 - RNA, 19 nt, Artificial Sequence
  Description of Artificial Sequence: Synthetic oligonucleotide
cugaaauaagcacuuuucu

SEQ ID NO: 2522969 - RNA, 19 nt, Artificial Sequence
  Description of Artificial Sequence: Synthetic oligonucleotide
uagaaucaucugagguuga

SEQ ID NO: 2522970 - RNA, 19 nt, Artificial Sequence
  Description of Artificial Sequence: Synthetic oligonucleotide
uuggcuugcuggaaugcua

SEQ ID NO: 2522971 - RNA, 19 nt, Artificial Sequence
  Description of Artificial Sequence: Synthetic oligonucleotide
cugagacuguccagagccg

SEQ ID NO: 2522972 - RNA, 19 nt, Artificial Sequence
  Description of Artificial Sequence: Synthetic oligonucleotide
gcuugcuggaaugcuaugg

SEQ ID NO: 2522973 - RNA, 19 nt, Artificial Sequence
  Description of Artificial Sequence: Synthetic oligonucleotide
guuugucagggagaagggc

SEQ ID NO: 2522974 - RNA, 19 nt, Artificial Sequence
  Description of Artificial Sequence: Synthetic oligonucleotide
aucacugaaauaagcacuu

SEQ ID NO: 2522975 - RNA, 19 nt, Artificial Sequence
  Description of Artificial Sequence: Synthetic oligonucleotide
cgugcucuuacuuggagcc

SEQ ID NO: 2522976 - RNA, 19 nt, Artificial Sequence
  Description of Artificial Sequence: Synthetic oligonucleotide
gccuuuaucacucuaccaa

SEQ ID NO: 2522977 - RNA, 19 nt, Artificial Sequence
  Description of Artificial Sequence: Synthetic oligonucleotide
ucuucagcgcaacggccgu

SEQ ID NO: 2522978 - RNA, 19 nt, Artificial Sequence
  Description of Artificial Sequence: Synthetic oligonucleotide
caucugagguugagggacc

SEQ ID NO: 2522979 - RNA, 19 nt, Artificial Sequence
  Description of Artificial Sequence: Synthetic oligonucleotide
uuccccgcacucauaacau

SEQ ID NO: 2522980 - RNA, 19 nt, Artificial Sequence
  Description of Artificial Sequence: Synthetic oligonucleotide
auccgguauaaaucauugu

SEQ ID NO: 2522981 - RNA, 19 nt, Artificial Sequence
  Description of Artificial Sequence: Synthetic oligonucleotide
cauaacuuaaguguccgcu

SEQ ID NO: 2522982 - RNA, 19 nt, Artificial Sequence
  Description of Artificial Sequence: Synthetic oligonucleotide
uucuuuauccuuggucguc

SEQ ID NO: 2522983 - RNA, 19 nt, Artificial Sequence
  Description of Artificial Sequence: Synthetic oligonucleotide
cgguauaaaucauuguuug

SEQ ID NO: 2522984 - RNA, 19 nt, Artificial Sequence
  Description of Artificial Sequence: Synthetic oligonucleotide
ucauaacauuuagauuuaa

SEQ ID NO: 2522985 - RNA, 19 nt, Artificial Sequence
  Description of Artificial Sequence: Synthetic oligonucleotide
gcacucauaacauuuagau

SEQ ID NO: 2522986 - RNA, 19 nt, Artificial Sequence
  Description of Artificial Sequence: Synthetic oligonucleotide
accgugcucuuacuuggag

SEQ ID NO: 2522987 - RNA, 19 nt, Artificial Sequence
  Description of Artificial Sequence: Synthetic oligonucleotide
ucggaugaacucagcugcu

SEQ ID NO: 2522988 - RNA, 19 nt, Artificial Sequence
  Description of Artificial Sequence: Synthetic oligonucleotide
ucacuaaguucuucuucau

SEQ ID NO: 2522989 - RNA, 19 nt, Artificial Sequence
  Description of Artificial Sequence: Synthetic oligonucleotide
cuuggagccaagccaccac

SEQ ID NO: 2522990 - RNA, 19 nt, Artificial Sequence
  Description of Artificial Sequence: Synthetic oligonucleotide
gguucaggaacuuucuucu

SEQ ID NO: 2522991 - RNA, 19 nt, Artificial Sequence
  Description of Artificial Sequence: Synthetic oligonucleotide
agauuuaaucaaaguaguu

SEQ ID NO: 2522992 - RNA, 19 nt, Artificial Sequence
  Description of Artificial Sequence: Synthetic oligonucleotide
ugcucuuacuuggagccaa

SEQ ID NO: 2522993 - RNA, 19 nt, Artificial Sequence
  Description of Artificial Sequence: Synthetic oligonucleotide
cugacugagacuguccaga

SEQ ID NO: 2522994 - RNA, 19 nt, Artificial Sequence
  Description of Artificial Sequence: Synthetic oligonucleotide
uaguaaccuucacaacuuu

SEQ ID NO: 2522995 - RNA, 19 nt, Artificial Sequence
  Description of Artificial Sequence: Synthetic oligonucleotide
ccauugucaauagcaaugc

SEQ ID NO: 2522996 - RNA, 19 nt, Artificial Sequence
  Description of Artificial Sequence: Synthetic oligonucleotide
uuucgccgucggaugaacu

SEQ ID NO: 2522997 - RNA, 19 nt, Artificial Sequence
  Description of Artificial Sequence: Synthetic oligonucleotide
uugugucuuugucuuucau

SEQ ID NO: 2522998 - RNA, 19 nt, Artificial Sequence
  Description of Artificial Sequence: Synthetic oligonucleotide
uuuggaggcucacguucuc

SEQ ID NO: 2522999 - RNA, 19 nt, Artificial Sequence
  Description of Artificial Sequence: Synthetic oligonucleotide
guugagggaccaccugggc

SEQ ID NO: 2523000 - RNA, 19 nt, Artificial Sequence
  Description of Artificial Sequence: Synthetic oligonucleotide
gaacucagcugcucuucca

SEQ ID NO: 2523001 - RNA, 19 nt, Artificial Sequence
  Description of Artificial Sequence: Synthetic oligonucleotide
cucuuccauugucaauagc

SEQ ID NO: 2523002 - RNA, 19 nt, Artificial Sequence
  Description of Artificial Sequence: Synthetic oligonucleotide
uggagccaagccaccacuc

SEQ ID NO: 2523003 - RNA, 19 nt, Artificial Sequence
  Description of Artificial Sequence: Synthetic oligonucleotide
uuggaggcucacguucucc

SEQ ID NO: 2523004 - RNA, 19 nt, Artificial Sequence
  Description of Artificial Sequence: Synthetic oligonucleotide
gcuggaaugcuauggccug

SEQ ID NO: 2523005 - RNA, 19 nt, Artificial Sequence
  Description of Artificial Sequence: Synthetic oligonucleotide
cuaccaaauaacuguuugu

SEQ ID NO: 2523006 - RNA, 19 nt, Artificial Sequence
  Description of Artificial Sequence: Synthetic oligonucleotide
augcuauggccugacugag

SEQ ID NO: 2523007 - RNA, 19 nt, Artificial Sequence
  Description of Artificial Sequence: Synthetic oligonucleotide
guuuaaggcagagucuuua

SEQ ID NO: 2523008 - RNA, 19 nt, Artificial Sequence
  Description of Artificial Sequence: Synthetic oligonucleotide
gucuuucauuauaguaacc

SEQ ID NO: 2523009 - RNA, 19 nt, Artificial Sequence
  Description of Artificial Sequence: Synthetic oligonucleotide
auagcaaugcuugccuuua

SEQ ID NO: 2523010 - RNA, 19 nt, Artificial Sequence
  Description of Artificial Sequence: Synthetic oligonucleotide
uucagcgcaacggccguga

SEQ ID NO: 2523011 - RNA, 19 nt, Artificial Sequence
  Description of Artificial Sequence: Synthetic oligonucleotide
cuucuuuggaggcucacgu

SEQ ID NO: 2523012 - RNA, 19 nt, Artificial Sequence
  Description of Artificial Sequence: Synthetic oligonucleotide
uggugcaguuuaaggcaga

SEQ ID NO: 2523013 - RNA, 19 nt, Artificial Sequence
  Description of Artificial Sequence: Synthetic oligonucleotide
ggagaagggcaaauuggag

SEQ ID NO: 2523014 - RNA, 19 nt, Artificial Sequence
  Description of Artificial Sequence: Synthetic oligonucleotide
uggaaugcuauggccugac

SEQ ID NO: 2523015 - RNA, 19 nt, Artificial Sequence
  Description of Artificial Sequence: Synthetic oligonucleotide
cuuggaaaauauccgguau

SEQ ID NO: 2523016 - RNA, 19 nt, Artificial Sequence
  Description of Artificial Sequence: Synthetic oligonucleotide
cucuuacuuggagccaagc

SEQ ID NO: 2523017 - RNA, 19 nt, Artificial Sequence
  Description of Artificial Sequence: Synthetic oligonucleotide
auuguuugucagggagaag

SEQ ID NO: 2523018 - RNA, 19 nt, Artificial Sequence
  Description of Artificial Sequence: Synthetic oligonucleotide
caguaagauuuuauuugaa

SEQ ID NO: 2523019 - RNA, 19 nt, Artificial Sequence
  Description of Artificial Sequence: Synthetic oligonucleotide
uuauugcucuggugcaguu

SEQ ID NO: 2523020 - RNA, 19 nt, Artificial Sequence
  Description of Artificial Sequence: Synthetic oligonucleotide
agacauaaaccgugcucuu

SEQ ID NO: 2523021 - RNA, 19 nt, Artificial Sequence
  Description of Artificial Sequence: Synthetic oligonucleotide
ucagggagaagggcaaauu

SEQ ID NO: 2523022 - RNA, 19 nt, Artificial Sequence
  Description of Artificial Sequence: Synthetic oligonucleotide
gguauaaaucauuguuugu

SEQ ID NO: 2523023 - RNA, 19 nt, Artificial Sequence
  Description of Artificial Sequence: Synthetic oligonucleotide
acucuaccaaauaacuguu

SEQ ID NO: 2523024 - RNA, 19 nt, Artificial Sequence
  Description of Artificial Sequence: Synthetic oligonucleotide
ucagcgcaacggccgugag

SEQ ID NO: 2523025 - RNA, 19 nt, Artificial Sequence
  Description of Artificial Sequence: Synthetic oligonucleotide
acuuggagccaagccacca

SEQ ID NO: 2523026 - RNA, 19 nt, Artificial Sequence
  Description of Artificial Sequence: Synthetic oligonucleotide
ggugcaguuuaaggcagag

SEQ ID NO: 2523027 - RNA, 19 nt, Artificial Sequence
  Description of Artificial Sequence: Synthetic oligonucleotide
caacuuugccauacuugga

SEQ ID NO: 2523028 - RNA, 19 nt, Artificial Sequence
  Description of Artificial Sequence: Synthetic oligonucleotide
cuuuaucacucuaccaaau

SEQ ID NO: 2523029 - RNA, 19 nt, Artificial Sequence
  Description of Artificial Sequence: Synthetic oligonucleotide
ccacucauuucuucagcgc

SEQ ID NO: 2523030 - RNA, 19 nt, Artificial Sequence
  Description of Artificial Sequence: Synthetic oligonucleotide
gggcaaauuggagacauaa

SEQ ID NO: 2523031 - RNA, 19 nt, Artificial Sequence
  Description of Artificial Sequence: Synthetic oligonucleotide
uguccgcuuuccccgcacu

SEQ ID NO: 2523032 - RNA, 19 nt, Artificial Sequence
  Description of Artificial Sequence: Synthetic oligonucleotide
gacauaaaccgugcucuua

SEQ ID NO: 2523033 - RNA, 19 nt, Artificial Sequence
  Description of Artificial Sequence: Synthetic oligonucleotide
cuuuccccgcacucauaac

SEQ ID NO: 2523034 - RNA, 19 nt, Artificial Sequence
  Description of Artificial Sequence: Synthetic oligonucleotide
gcaacaccuuuacuccucc

SEQ ID NO: 2523035 - RNA, 19 nt, Artificial Sequence
  Description of Artificial Sequence: Synthetic oligonucleotide
gcauaacuuaaguguccgc

SEQ ID NO: 2523036 - RNA, 19 nt, Artificial Sequence
  Description of Artificial Sequence: Synthetic oligonucleotide
auccuuggucgucuagaau

SEQ ID NO: 2523037 - RNA, 19 nt, Artificial Sequence
  Description of Artificial Sequence: Synthetic oligonucleotide
gcucuuccauugucaauag

SEQ ID NO: 2523038 - RNA, 19 nt, Artificial Sequence
  Description of Artificial Sequence: Synthetic oligonucleotide
gaugaacucagcugcucuu

SEQ ID NO: 2523039 - RNA, 19 nt, Artificial Sequence
  Description of Artificial Sequence: Synthetic oligonucleotide
caaauaaaugcaacaccuu

SEQ ID NO: 2523040 - RNA, 19 nt, Artificial Sequence
  Description of Artificial Sequence: Synthetic oligonucleotide
agccggauccuccccuucu

SEQ ID NO: 2523041 - RNA, 19 nt, Artificial Sequence
  Description of Artificial Sequence: Synthetic oligonucleotide
gccaccacucauuucuuca

SEQ ID NO: 2523042 - RNA, 19 nt, Artificial Sequence
  Description of Artificial Sequence: Synthetic oligonucleotide
gugagcggaggcugcgagc

SEQ ID NO: 2523043 - RNA, 19 nt, Artificial Sequence
  Description of Artificial Sequence: Synthetic oligonucleotide
caaauaacuguuuguuauu

SEQ ID NO: 2523044 - RNA, 19 nt, Artificial Sequence
  Description of Artificial Sequence: Synthetic oligonucleotide
gaagggcaaauuggagaca

SEQ ID NO: 2523045 - RNA, 19 nt, Artificial Sequence
  Description of Artificial Sequence: Synthetic oligonucleotide
ggucgucuagaaucaucug

SEQ ID NO: 2523046 - RNA, 19 nt, Artificial Sequence
  Description of Artificial Sequence: Synthetic oligonucleotide
ccaccacucauuucuucag

SEQ ID NO: 2523047 - RNA, 19 nt, Artificial Sequence
  Description of Artificial Sequence: Synthetic oligonucleotide
cuuuggaggcucacguucu

SEQ ID NO: 2523048 - RNA, 19 nt, Artificial Sequence
  Description of Artificial Sequence: Synthetic oligonucleotide
gagggaccaccugggcugg

SEQ ID NO: 2523049 - RNA, 19 nt, Artificial Sequence
  Description of Artificial Sequence: Synthetic oligonucleotide
ccgugcucuuacuuggagc

SEQ ID NO: 2523050 - RNA, 19 nt, Artificial Sequence
  Description of Artificial Sequence: Synthetic oligonucleotide
uuacuccuccuugugucuu

SEQ ID NO: 2523051 - RNA, 19 nt, Artificial Sequence
  Description of Artificial Sequence: Synthetic oligonucleotide
cagcgcaacggccgugagc

SEQ ID NO: 2523052 - RNA, 19 nt, Artificial Sequence
  Description of Artificial Sequence: Synthetic oligonucleotide
ucugagguugagggaccac

SEQ ID NO: 2523053 - RNA, 19 nt, Artificial Sequence
  Description of Artificial Sequence: Synthetic oligonucleotide
uugcucuggugcaguuuaa

SEQ ID NO: 2523054 - RNA, 19 nt, Artificial Sequence
  Description of Artificial Sequence: Synthetic oligonucleotide
cgucggaugaacucagcug

SEQ ID NO: 2523055 - RNA, 19 nt, Artificial Sequence
  Description of Artificial Sequence: Synthetic oligonucleotide
aaccgugcucuuacuugga

SEQ ID NO: 2523056 - RNA, 19 nt, Artificial Sequence
  Description of Artificial Sequence: Synthetic oligonucleotide
cgucuagaaucaucugagg

SEQ ID NO: 2523057 - RNA, 19 nt, Artificial Sequence
  Description of Artificial Sequence: Synthetic oligonucleotide
ugcuugccuuuaucacucu

SEQ ID NO: 2523058 - RNA, 19 nt, Artificial Sequence
  Description of Artificial Sequence: Synthetic oligonucleotide
gcuuuccccgcacucauaa

SEQ ID NO: 2523059 - RNA, 19 nt, Artificial Sequence
  Description of Artificial Sequence: Synthetic oligonucleotide
ccugacugagacuguccag

SEQ ID NO: 2523060 - RNA, 19 nt, Artificial Sequence
  Description of Artificial Sequence: Synthetic oligonucleotide
ccugcgguggccucacccc

SEQ ID NO: 2523061 - RNA, 19 nt, Artificial Sequence
  Description of Artificial Sequence: Synthetic oligonucleotide
aucugagguugagggacca

SEQ ID NO: 2523062 - RNA, 19 nt, Artificial Sequence
  Description of Artificial Sequence: Synthetic oligonucleotide
cacucauaacauuuagauu

SEQ ID NO: 2523063 - RNA, 19 nt, Artificial Sequence
  Description of Artificial Sequence: Synthetic oligonucleotide
acuccuccuugugucuuug

SEQ ID NO: 2523064 - RNA, 19 nt, Artificial Sequence
  Description of Artificial Sequence: Synthetic oligonucleotide
ggagccaagccaccacuca

SEQ ID NO: 2523065 - RNA, 19 nt, Artificial Sequence
  Description of Artificial Sequence: Synthetic oligonucleotide
ggaugaacucagcugcucu

SEQ ID NO: 2523066 - RNA, 19 nt, Artificial Sequence
  Description of Artificial Sequence: Synthetic oligonucleotide
agacuguccagagccggau

SEQ ID NO: 2523067 - RNA, 19 nt, Artificial Sequence
  Description of Artificial Sequence: Synthetic oligonucleotide
uacuccuccuugugucuuu

SEQ ID NO: 2523068 - RNA, 19 nt, Artificial Sequence
  Description of Artificial Sequence: Synthetic oligonucleotide
gcagagucuuuauccaaaa

SEQ ID NO: 2523069 - RNA, 19 nt, Artificial Sequence
  Description of Artificial Sequence: Synthetic oligonucleotide
ccgcacucauaacauuuag

SEQ ID NO: 2523070 - RNA, 19 nt, Artificial Sequence
  Description of Artificial Sequence: Synthetic oligonucleotide
caguuuaaggcagagucuu

SEQ ID NO: 2523071 - RNA, 19 nt, Artificial Sequence
  Description of Artificial Sequence: Synthetic oligonucleotide
cuccuugugucuuugucuu

SEQ ID NO: 2523072 - RNA, 19 nt, Artificial Sequence
  Description of Artificial Sequence: Synthetic oligonucleotide
guuucgccgucggaugaac

SEQ ID NO: 2523073 - RNA, 19 nt, Artificial Sequence
  Description of Artificial Sequence: Synthetic oligonucleotide
ccuuggucgucuagaauca

SEQ ID NO: 2523074 - RNA, 19 nt, Artificial Sequence
  Description of Artificial Sequence: Synthetic oligonucleotide
gagccaagccaccacucau

SEQ ID NO: 2523075 - RNA, 19 nt, Artificial Sequence
  Description of Artificial Sequence: Synthetic oligonucleotide
ggacaggcauaacuuaagu

SEQ ID NO: 2523076 - RNA, 19 nt, Artificial Sequence
  Description of Artificial Sequence: Synthetic oligonucleotide
cacuucuacuuccucgacu

SEQ ID NO: 2523077 - RNA, 19 nt, Artificial Sequence
  Description of Artificial Sequence: Synthetic oligonucleotide
cauaaaccgugcucuuacu

SEQ ID NO: 2523078 - RNA, 19 nt, Artificial Sequence
  Description of Artificial Sequence: Synthetic oligonucleotide
cuuucuucuucuucuucuu

SEQ ID NO: 2523079 - RNA, 19 nt, Artificial Sequence
  Description of Artificial Sequence: Synthetic oligonucleotide
aguuuaaggcagagucuuu

SEQ ID NO: 2523080 - RNA, 19 nt, Artificial Sequence
  Description of Artificial Sequence: Synthetic oligonucleotide
cauugucaauagcaaugcu

SEQ ID NO: 2523081 - RNA, 19 nt, Artificial Sequence
  Description of Artificial Sequence: Synthetic oligonucleotide
agagccggauccuccccuu

SEQ ID NO: 2523082 - RNA, 19 nt, Artificial Sequence
  Description of Artificial Sequence: Synthetic oligonucleotide
aguuucgccgucggaugaa

SEQ ID NO: 2523083 - RNA, 19 nt, Artificial Sequence
  Description of Artificial Sequence: Synthetic oligonucleotide
uccccgcacucauaacauu

SEQ ID NO: 2523084 - RNA, 19 nt, Artificial Sequence
  Description of Artificial Sequence: Synthetic oligonucleotide
gccugcgguggccucaccc

SEQ ID NO: 2523085 - RNA, 19 nt, Artificial Sequence
  Description of Artificial Sequence: Synthetic oligonucleotide
acggccgugagcggaggcu

SEQ ID NO: 2523086 - RNA, 19 nt, Artificial Sequence
  Description of Artificial Sequence: Synthetic oligonucleotide
ggcaaauuggagacauaaa

SEQ ID NO: 2523087 - RNA, 19 nt, Artificial Sequence
  Description of Artificial Sequence: Synthetic oligonucleotide
cuuuauccuuggucgucua

SEQ ID NO: 2523088 - RNA, 19 nt, Artificial Sequence
  Description of Artificial Sequence: Synthetic oligonucleotide
ggcugcgagccugcggugg

SEQ ID NO: 2523089 - RNA, 19 nt, Artificial Sequence
  Description of Artificial Sequence: Synthetic oligonucleotide
agccaagccaccacucauu

SEQ ID NO: 2523090 - RNA, 19 nt, Artificial Sequence
  Description of Artificial Sequence: Synthetic oligonucleotide
guguccgcuuuccccgcac

SEQ ID NO: 2523091 - RNA, 19 nt, Artificial Sequence
  Description of Artificial Sequence: Synthetic oligonucleotide
ggcuugcuggaaugcuaug

SEQ ID NO: 2523092 - RNA, 19 nt, Artificial Sequence
  Description of Artificial Sequence: Synthetic oligonucleotide
gagccggauccuccccuuc

SEQ ID NO: 2523093 - RNA, 19 nt, Artificial Sequence
  Description of Artificial Sequence: Synthetic oligonucleotide
cuucagcgcaacggccgug

SEQ ID NO: 2523094 - RNA, 19 nt, Artificial Sequence
  Description of Artificial Sequence: Synthetic oligonucleotide
caauagcaaugcuugccuu

SEQ ID NO: 2523095 - RNA, 19 nt, Artificial Sequence
  Description of Artificial Sequence: Synthetic oligonucleotide
gcugcgagccugcgguggc

SEQ ID NO: 2523096 - RNA, 19 nt, Artificial Sequence
  Description of Artificial Sequence: Synthetic oligonucleotide
agccugcgguggccucacc

SEQ ID NO: 2523097 - RNA, 19 nt, Artificial Sequence
  Description of Artificial Sequence: Synthetic oligonucleotide
aggcugcgagccugcggug

SEQ ID NO: 2523098 - RNA, 19 nt, Artificial Sequence
  Description of Artificial Sequence: Synthetic oligonucleotide
cuggaaugcuauggccuga

SEQ ID NO: 2523099 - RNA, 19 nt, Artificial Sequence
  Description of Artificial Sequence: Synthetic oligonucleotide
cucuaccaaauaacuguuu

SEQ ID NO: 2523100 - RNA, 19 nt, Artificial Sequence
  Description of Artificial Sequence: Synthetic oligonucleotide
ccgguauaaaucauuguuu

SEQ ID NO: 2523101 - RNA, 19 nt, Artificial Sequence
  Description of Artificial Sequence: Synthetic oligonucleotide
gcaguuuaaggcagagucu

SEQ ID NO: 2523102 - RNA, 19 nt, Artificial Sequence
  Description of Artificial Sequence: Synthetic oligonucleotide
gcaacggccgugagcggag

SEQ ID NO: 2523103 - RNA, 19 nt, Artificial Sequence
  Description of Artificial Sequence: Synthetic oligonucleotide
cgcacucauaacauuuaga

SEQ ID NO: 2523104 - RNA, 19 nt, Artificial Sequence
  Description of Artificial Sequence: Synthetic oligonucleotide
caacggccgugagcggagg

SEQ ID NO: 2523105 - RNA, 19 nt, Artificial Sequence
  Description of Artificial Sequence: Synthetic oligonucleotide
ccuccuugugucuuugucu

SEQ ID NO: 2523106 - RNA, 19 nt, Artificial Sequence
  Description of Artificial Sequence: Synthetic oligonucleotide
gcucuuacuuggagccaag

SEQ ID NO: 2523107 - RNA, 19 nt, Artificial Sequence
  Description of Artificial Sequence: Synthetic oligonucleotide
gugcucuuacuuggagcca

SEQ ID NO: 2523108 - RNA, 19 nt, Artificial Sequence
  Description of Artificial Sequence: Synthetic oligonucleotide
ggaccaccugggcuggguc

SEQ ID NO: 2523109 - RNA, 19 nt, Artificial Sequence
  Description of Artificial Sequence: Synthetic oligonucleotide
gagccugcgguggccucac

SEQ ID NO: 2523110 - RNA, 19 nt, Artificial Sequence
  Description of Artificial Sequence: Synthetic oligonucleotide
cgugagcggaggcugcgag

SEQ ID NO: 2523111 - RNA, 19 nt, Artificial Sequence
  Description of Artificial Sequence: Synthetic oligonucleotide
ccagagccggauccucccc

SEQ ID NO: 2523112 - RNA, 19 nt, Artificial Sequence
  Description of Artificial Sequence: Synthetic oligonucleotide
ccaagccaccacucauuuc

SEQ ID NO: 2523113 - RNA, 19 nt, Artificial Sequence
  Description of Artificial Sequence: Synthetic oligonucleotide
ccccuucuucuucacucac

SEQ ID NO: 2523114 - RNA, 19 nt, Artificial Sequence
  Description of Artificial Sequence: Synthetic oligonucleotide
auggccugacugagacugu

SEQ ID NO: 2523115 - RNA, 19 nt, Artificial Sequence
  Description of Artificial Sequence: Synthetic oligonucleotide
cuauggccugacugagacu

SEQ ID NO: 2523116 - RNA, 19 nt, Artificial Sequence
  Description of Artificial Sequence: Synthetic oligonucleotide
gcuugccuuuaucacucua

SEQ ID NO: 2523117 - RNA, 19 nt, Artificial Sequence
  Description of Artificial Sequence: Synthetic oligonucleotide
gccgugagcggaggcugcg

SEQ ID NO: 2523118 - RNA, 19 nt, Artificial Sequence
  Description of Artificial Sequence: Synthetic oligonucleotide
ccuuuacuccuccuugugu

SEQ ID NO: 2523119 - RNA, 19 nt, Artificial Sequence
  Description of Artificial Sequence: Synthetic oligonucleotide
gcucacguucuccaagcau

SEQ ID NO: 2523120 - RNA, 19 nt, Artificial Sequence
  Description of Artificial Sequence: Synthetic oligonucleotide
agggcaaauuggagacaua

SEQ ID NO: 2523121 - RNA, 19 nt, Artificial Sequence
  Description of Artificial Sequence: Synthetic oligonucleotide
ggaaugcuauggccugacu

SEQ ID NO: 2523122 - RNA, 19 nt, Artificial Sequence
  Description of Artificial Sequence: Synthetic oligonucleotide
cgccgucggaugaacucag

SEQ ID NO: 2523123 - RNA, 19 nt, Artificial Sequence
  Description of Artificial Sequence: Synthetic oligonucleotide
gccaagccaccacucauuu

SEQ ID NO: 2523124 - RNA, 19 nt, Artificial Sequence
  Description of Artificial Sequence: Synthetic oligonucleotide
ccgucggaugaacucagcu

SEQ ID NO: 2523125 - RNA, 19 nt, Artificial Sequence
  Description of Artificial Sequence: Synthetic oligonucleotide
cuucugguucaggaacuuu

SEQ ID NO: 2523126 - RNA, 19 nt, Artificial Sequence
  Description of Artificial Sequence: Synthetic oligonucleotide
ggccgugagcggaggcugc

SEQ ID NO: 2523127 - RNA, 19 nt, Artificial Sequence
  Description of Artificial Sequence: Synthetic oligonucleotide
cuuggucgucuagaaucau

SEQ ID NO: 2523128 - RNA, 19 nt, Artificial Sequence
  Description of Artificial Sequence: Synthetic oligonucleotide
gccgucggaugaacucagc

SEQ ID NO: 2523129 - RNA, 19 nt, Artificial Sequence
  Description of Artificial Sequence: Synthetic oligonucleotide
gcgcaacggccgugagcgg

SEQ ID NO: 2523130 - RNA, 19 nt, Artificial Sequence
  Description of Artificial Sequence: Synthetic oligonucleotide
cggaugaacucagcugcuc

SEQ ID NO: 2523131 - RNA, 19 nt, Artificial Sequence
  Description of Artificial Sequence: Synthetic oligonucleotide
gggcugggucuccauuugu

SEQ ID NO: 2523132 - RNA, 19 nt, Artificial Sequence
  Description of Artificial Sequence: Synthetic oligonucleotide
ccuucacaacuuugccaua

SEQ ID NO: 2523133 - RNA, 19 nt, Artificial Sequence
  Description of Artificial Sequence: Synthetic oligonucleotide
ccaccugggcugggucucc

SEQ ID NO: 2523134 - RNA, 19 nt, Artificial Sequence
  Description of Artificial Sequence: Synthetic oligonucleotide
cgcaacggccgugagcgga

SEQ ID NO: 2523135 - RNA, 19 nt, Artificial Sequence
  Description of Artificial Sequence: Synthetic oligonucleotide
cggccgugagcggaggcug

SEQ ID NO: 2523136 - RNA, 19 nt, Artificial Sequence
  Description of Artificial Sequence: Synthetic oligonucleotide
gggaccaccugggcugggu

SEQ ID NO: 2523137 - RNA, 19 nt, Artificial Sequence
  Description of Artificial Sequence: Synthetic oligonucleotide
gccggauccuccccuucuu

SEQ ID NO: 2523138 - RNA, 19 nt, Artificial Sequence
  Description of Artificial Sequence: Synthetic oligonucleotide
cggaggcugcgagccugcg

SEQ ID NO: 2523139 - RNA, 19 nt, Artificial Sequence
  Description of Artificial Sequence: Synthetic oligonucleotide
ccgcuuuccccgcacucau

SEQ ID NO: 2523140 - RNA, 19 nt, Artificial Sequence
  Description of Artificial Sequence: Synthetic oligonucleotide
ccgugagcggaggcugcga

SEQ ID NO: 2523141 - RNA, 19 nt, Artificial Sequence
  Description of Artificial Sequence: Synthetic oligonucleotide
cgcuuuccccgcacucaua

SEQ ID NO: 2523142 - RNA, 19 nt, Artificial Sequence
  Description of Artificial Sequence: Synthetic oligonucleotide
aagaugauagcaaagaggc

SEQ ID NO: 2523143 - RNA, 19 nt, Artificial Sequence
  Description of Artificial Sequence: Synthetic oligonucleotide
aaggcuuauacauauuucc

SEQ ID NO: 2523144 - RNA, 19 nt, Artificial Sequence
  Description of Artificial Sequence: Synthetic oligonucleotide
aaaccaauaacaccaaguc

SEQ ID NO: 2523145 - RNA, 19 nt, Artificial Sequence
  Description of Artificial Sequence: Synthetic oligonucleotide
cuauaacugauuaaaaugg

SEQ ID NO: 2523146 - RNA, 19 nt, Artificial Sequence
  Description of Artificial Sequence: Synthetic oligonucleotide
aauucuucacauuuccugg

SEQ ID NO: 2523147 - RNA, 19 nt, Artificial Sequence
  Description of Artificial Sequence: Synthetic oligonucleotide
agucauauaacuucucccc

SEQ ID NO: 2523148 - RNA, 19 nt, Artificial Sequence
  Description of Artificial Sequence: Synthetic oligonucleotide
aaaugaguccaagaaaacc

SEQ ID NO: 2523149 - RNA, 19 nt, Artificial Sequence
  Description of Artificial Sequence: Synthetic oligonucleotide
ucuucuacaacuauguaac

SEQ ID NO: 2523150 - RNA, 19 nt, Artificial Sequence
  Description of Artificial Sequence: Synthetic oligonucleotide
uauacauauuuccaaauga

SEQ ID NO: 2523151 - RNA, 19 nt, Artificial Sequence
  Description of Artificial Sequence: Synthetic oligonucleotide
uagaaauacugauuuaccg

SEQ ID NO: 2523152 - RNA, 19 nt, Artificial Sequence
  Description of Artificial Sequence: Synthetic oligonucleotide
uauaacugauuaaaauggg

SEQ ID NO: 2523153 - RNA, 19 nt, Artificial Sequence
  Description of Artificial Sequence: Synthetic oligonucleotide
gacaccaacuuguauaugg

SEQ ID NO: 2523154 - RNA, 19 nt, Artificial Sequence
  Description of Artificial Sequence: Synthetic oligonucleotide
uuuguagaaauacugauuu

SEQ ID NO: 2523155 - RNA, 19 nt, Artificial Sequence
  Description of Artificial Sequence: Synthetic oligonucleotide
agaaugaggaguucuaagg

SEQ ID NO: 2523156 - RNA, 19 nt, Artificial Sequence
  Description of Artificial Sequence: Synthetic oligonucleotide
aauguuuaccuauaacuga

SEQ ID NO: 2523157 - RNA, 19 nt, Artificial Sequence
  Description of Artificial Sequence: Synthetic oligonucleotide
aacugauuaaaaugggcag

SEQ ID NO: 2523158 - RNA, 19 nt, Artificial Sequence
  Description of Artificial Sequence: Synthetic oligonucleotide
uuggaaauagucauaguug

SEQ ID NO: 2523159 - RNA, 19 nt, Artificial Sequence
  Description of Artificial Sequence: Synthetic oligonucleotide
ugauauaagaaugaggagu

SEQ ID NO: 2523160 - RNA, 19 nt, Artificial Sequence
  Description of Artificial Sequence: Synthetic oligonucleotide
uuuagacugacccucagga

SEQ ID NO: 2523161 - RNA, 19 nt, Artificial Sequence
  Description of Artificial Sequence: Synthetic oligonucleotide
aauacuuuuccugacacca

SEQ ID NO: 2523162 - RNA, 19 nt, Artificial Sequence
  Description of Artificial Sequence: Synthetic oligonucleotide
ucuacuuauuuccagguga

SEQ ID NO: 2523163 - RNA, 19 nt, Artificial Sequence
  Description of Artificial Sequence: Synthetic oligonucleotide
cuuguuguggguaauagac

SEQ ID NO: 2523164 - RNA, 19 nt, Artificial Sequence
  Description of Artificial Sequence: Synthetic oligonucleotide
uuuggaaauagucauaguu

SEQ ID NO: 2523165 - RNA, 19 nt, Artificial Sequence
  Description of Artificial Sequence: Synthetic oligonucleotide
aaauagugauauaagaaug

SEQ ID NO: 2523166 - RNA, 19 nt, Artificial Sequence
  Description of Artificial Sequence: Synthetic oligonucleotide
uuuucuucaaguugagucc

SEQ ID NO: 2523167 - RNA, 19 nt, Artificial Sequence
  Description of Artificial Sequence: Synthetic oligonucleotide
acuuguauauggcucacac

SEQ ID NO: 2523168 - RNA, 19 nt, Artificial Sequence
  Description of Artificial Sequence: Synthetic oligonucleotide
uuauguacauaaauaguga

SEQ ID NO: 2523169 - RNA, 19 nt, Artificial Sequence
  Description of Artificial Sequence: Synthetic oligonucleotide
uuguauauggcucacacuu

SEQ ID NO: 2523170 - RNA, 19 nt, Artificial Sequence
  Description of Artificial Sequence: Synthetic oligonucleotide
agagcauggaguuuucuac

SEQ ID NO: 2523171 - RNA, 19 nt, Artificial Sequence
  Description of Artificial Sequence: Synthetic oligonucleotide
uaguuggucuagaauaugg

SEQ ID NO: 2523172 - RNA, 19 nt, Artificial Sequence
  Description of Artificial Sequence: Synthetic oligonucleotide
uagugauauaagaaugagg

SEQ ID NO: 2523173 - RNA, 19 nt, Artificial Sequence
  Description of Artificial Sequence: Synthetic oligonucleotide
gauuaguuggucuagaaua

SEQ ID NO: 2523174 - RNA, 19 nt, Artificial Sequence
  Description of Artificial Sequence: Synthetic oligonucleotide
auggcucacacuuaugucg

SEQ ID NO: 2523175 - RNA, 19 nt, Artificial Sequence
  Description of Artificial Sequence: Synthetic oligonucleotide
cuagaauauggcaucaccc

SEQ ID NO: 2523176 - RNA, 19 nt, Artificial Sequence
  Description of Artificial Sequence: Synthetic oligonucleotide
ugaauagagugaaagcuca

SEQ ID NO: 2523177 - RNA, 19 nt, Artificial Sequence
  Description of Artificial Sequence: Synthetic oligonucleotide
guggguaauagacagaggc

SEQ ID NO: 2523178 - RNA, 19 nt, Artificial Sequence
  Description of Artificial Sequence: Synthetic oligonucleotide
ucuagaauauggcaucacc

SEQ ID NO: 2523179 - RNA, 19 nt, Artificial Sequence
  Description of Artificial Sequence: Synthetic oligonucleotide
ucauaguugucuaaucccc

SEQ ID NO: 2523180 - RNA, 19 nt, Artificial Sequence
  Description of Artificial Sequence: Synthetic oligonucleotide
aauacugacucucugccau

SEQ ID NO: 2523181 - RNA, 19 nt, Artificial Sequence
  Description of Artificial Sequence: Synthetic oligonucleotide
agcaaaaccaauaacacca

SEQ ID NO: 2523182 - RNA, 19 nt, Artificial Sequence
  Description of Artificial Sequence: Synthetic oligonucleotide
aaauguugcuuccacaaau

SEQ ID NO: 2523183 - RNA, 19 nt, Artificial Sequence
  Description of Artificial Sequence: Synthetic oligonucleotide
caauguuuaccuauaacug

SEQ ID NO: 2523184 - RNA, 19 nt, Artificial Sequence
  Description of Artificial Sequence: Synthetic oligonucleotide
auaacugauuaaaaugggc

SEQ ID NO: 2523185 - RNA, 19 nt, Artificial Sequence
  Description of Artificial Sequence: Synthetic oligonucleotide
uauguaaccucguaauccc

SEQ ID NO: 2523186 - RNA, 19 nt, Artificial Sequence
  Description of Artificial Sequence: Synthetic oligonucleotide
uaaaaugggcagagcaugg

SEQ ID NO: 2523187 - RNA, 19 nt, Artificial Sequence
  Description of Artificial Sequence: Synthetic oligonucleotide
aaaaccaauaacaccaagu

SEQ ID NO: 2523188 - RNA, 19 nt, Artificial Sequence
  Description of Artificial Sequence: Synthetic oligonucleotide
aauagagugaaagcucauc

SEQ ID NO: 2523189 - RNA, 19 nt, Artificial Sequence
  Description of Artificial Sequence: Synthetic oligonucleotide
gaugauagcaaagaggcuc

SEQ ID NO: 2523190 - RNA, 19 nt, Artificial Sequence
  Description of Artificial Sequence: Synthetic oligonucleotide
auuuuggaaauagucauag

SEQ ID NO: 2523191 - RNA, 19 nt, Artificial Sequence
  Description of Artificial Sequence: Synthetic oligonucleotide
aauagugauauaagaauga

SEQ ID NO: 2523192 - RNA, 19 nt, Artificial Sequence
  Description of Artificial Sequence: Synthetic oligonucleotide
gaaugaggaguucuaaggc

SEQ ID NO: 2523193 - RNA, 19 nt, Artificial Sequence
  Description of Artificial Sequence: Synthetic oligonucleotide
aaccucguaauccccaguc

SEQ ID NO: 2523194 - RNA, 19 nt, Artificial Sequence
  Description of Artificial Sequence: Synthetic oligonucleotide
aguuuacuauauccaauac

SEQ ID NO: 2523195 - RNA, 19 nt, Artificial Sequence
  Description of Artificial Sequence: Synthetic oligonucleotide
uuaaaaugggcagagcaug

SEQ ID NO: 2523196 - RNA, 19 nt, Artificial Sequence
  Description of Artificial Sequence: Synthetic oligonucleotide
acugaauagagugaaagcu

SEQ ID NO: 2523197 - RNA, 19 nt, Artificial Sequence
  Description of Artificial Sequence: Synthetic oligonucleotide
aauacugauuuaccgucug

SEQ ID NO: 2523198 - RNA, 19 nt, Artificial Sequence
  Description of Artificial Sequence: Synthetic oligonucleotide
uuaccuauaacugauuaaa

SEQ ID NO: 2523199 - RNA, 19 nt, Artificial Sequence
  Description of Artificial Sequence: Synthetic oligonucleotide
aggaggauacaccagcuuc

SEQ ID NO: 2523200 - RNA, 19 nt, Artificial Sequence
  Description of Artificial Sequence: Synthetic oligonucleotide
gacagaggcaccuaauccc

SEQ ID NO: 2523201 - RNA, 19 nt, Artificial Sequence
  Description of Artificial Sequence: Synthetic oligonucleotide
aaaaugaguccaagaaaac

SEQ ID NO: 2523202 - RNA, 19 nt, Artificial Sequence
  Description of Artificial Sequence: Synthetic oligonucleotide
cuuaugucggaguugggag

SEQ ID NO: 2523203 - RNA, 19 nt, Artificial Sequence
  Description of Artificial Sequence: Synthetic oligonucleotide
uucaaguugaguccuuggc

SEQ ID NO: 2523204 - RNA, 19 nt, Artificial Sequence
  Description of Artificial Sequence: Synthetic oligonucleotide
cuauauccaauacugacuc

SEQ ID NO: 2523205 - RNA, 19 nt, Artificial Sequence
  Description of Artificial Sequence: Synthetic oligonucleotide
cuauguaaccucguaaucc

SEQ ID NO: 2523206 - RNA, 19 nt, Artificial Sequence
  Description of Artificial Sequence: Synthetic oligonucleotide
aaccaauaacaccaagucu

SEQ ID NO: 2523207 - RNA, 19 nt, Artificial Sequence
  Description of Artificial Sequence: Synthetic oligonucleotide
aaaugggcagagcauggag

SEQ ID NO: 2523208 - RNA, 19 nt, Artificial Sequence
  Description of Artificial Sequence: Synthetic oligonucleotide
gaaaauguugcuuccacaa

SEQ ID NO: 2523209 - RNA, 19 nt, Artificial Sequence
  Description of Artificial Sequence: Synthetic oligonucleotide
uauaagaaugaggaguucu

SEQ ID NO: 2523210 - RNA, 19 nt, Artificial Sequence
  Description of Artificial Sequence: Synthetic oligonucleotide
aauauggcaucacccaaga

SEQ ID NO: 2523211 - RNA, 19 nt, Artificial Sequence
  Description of Artificial Sequence: Synthetic oligonucleotide
uuguggguaauagacagag

SEQ ID NO: 2523212 - RNA, 19 nt, Artificial Sequence
  Description of Artificial Sequence: Synthetic oligonucleotide
uguuuguagaaauacugau

SEQ ID NO: 2523213 - RNA, 19 nt, Artificial Sequence
  Description of Artificial Sequence: Synthetic oligonucleotide
ucaaguugaguccuuggcu

SEQ ID NO: 2523214 - RNA, 19 nt, Artificial Sequence
  Description of Artificial Sequence: Synthetic oligonucleotide
auaaauagugauauaagaa

SEQ ID NO: 2523215 - RNA, 19 nt, Artificial Sequence
  Description of Artificial Sequence: Synthetic oligonucleotide
auauggcucacacuuaugu

SEQ ID NO: 2523216 - RNA, 19 nt, Artificial Sequence
  Description of Artificial Sequence: Synthetic oligonucleotide
acuauguaaccucguaauc

SEQ ID NO: 2523217 - RNA, 19 nt, Artificial Sequence
  Description of Artificial Sequence: Synthetic oligonucleotide
uccuccacaaauuuagacu

SEQ ID NO: 2523218 - RNA, 19 nt, Artificial Sequence
  Description of Artificial Sequence: Synthetic oligonucleotide
aauguugcuuccacaaauc

SEQ ID NO: 2523219 - RNA, 19 nt, Artificial Sequence
  Description of Artificial Sequence: Synthetic oligonucleotide
ccuauaacugauuaaaaug

SEQ ID NO: 2523220 - RNA, 19 nt, Artificial Sequence
  Description of Artificial Sequence: Synthetic oligonucleotide
uauguacauaaauagugau

SEQ ID NO: 2523221 - RNA, 19 nt, Artificial Sequence
  Description of Artificial Sequence: Synthetic oligonucleotide
ugauuuaccgucuggaguu

SEQ ID NO: 2523222 - RNA, 19 nt, Artificial Sequence
  Description of Artificial Sequence: Synthetic oligonucleotide
uuggucuagaauauggcau

SEQ ID NO: 2523223 - RNA, 19 nt, Artificial Sequence
  Description of Artificial Sequence: Synthetic oligonucleotide
uccaauacugacucucugc

SEQ ID NO: 2523224 - RNA, 19 nt, Artificial Sequence
  Description of Artificial Sequence: Synthetic oligonucleotide
ucauauaacuucuccccgc

SEQ ID NO: 2523225 - RNA, 19 nt, Artificial Sequence
  Description of Artificial Sequence: Synthetic oligonucleotide
uugggaauacuuuuccuga

SEQ ID NO: 2523226 - RNA, 19 nt, Artificial Sequence
  Description of Artificial Sequence: Synthetic oligonucleotide
acaaauuuagacugacccu

SEQ ID NO: 2523227 - RNA, 19 nt, Artificial Sequence
  Description of Artificial Sequence: Synthetic oligonucleotide
aauccccagucauauaacu

SEQ ID NO: 2523228 - RNA, 19 nt, Artificial Sequence
  Description of Artificial Sequence: Synthetic oligonucleotide
gucuaauccccacuggacg

SEQ ID NO: 2523229 - RNA, 19 nt, Artificial Sequence
  Description of Artificial Sequence: Synthetic oligonucleotide
aauuuagacugacccucag

SEQ ID NO: 2523230 - RNA, 19 nt, Artificial Sequence
  Description of Artificial Sequence: Synthetic oligonucleotide
auuuagacugacccucagg

SEQ ID NO: 2523231 - RNA, 19 nt, Artificial Sequence
  Description of Artificial Sequence: Synthetic oligonucleotide
cuacaacuauguaaccucg

SEQ ID NO: 2523232 - RNA, 19 nt, Artificial Sequence
  Description of Artificial Sequence: Synthetic oligonucleotide
acacuuaugucggaguugg

SEQ ID NO: 2523233 - RNA, 19 nt, Artificial Sequence
  Description of Artificial Sequence: Synthetic oligonucleotide
gucauauaacuucuccccg

SEQ ID NO: 2523234 - RNA, 19 nt, Artificial Sequence
  Description of Artificial Sequence: Synthetic oligonucleotide
uucuaaggcuuauacauau

SEQ ID NO: 2523235 - RNA, 19 nt, Artificial Sequence
  Description of Artificial Sequence: Synthetic oligonucleotide
cagucauauaacuucuccc

SEQ ID NO: 2523236 - RNA, 19 nt, Artificial Sequence
  Description of Artificial Sequence: Synthetic oligonucleotide
caaauuuagacugacccuc

SEQ ID NO: 2523237 - RNA, 19 nt, Artificial Sequence
  Description of Artificial Sequence: Synthetic oligonucleotide
accuauaacugauuaaaau

SEQ ID NO: 2523238 - RNA, 19 nt, Artificial Sequence
  Description of Artificial Sequence: Synthetic oligonucleotide
uugucuaauccccacugga

SEQ ID NO: 2523239 - RNA, 19 nt, Artificial Sequence
  Description of Artificial Sequence: Synthetic oligonucleotide
auagugauauaagaaugag

SEQ ID NO: 2523240 - RNA, 19 nt, Artificial Sequence
  Description of Artificial Sequence: Synthetic oligonucleotide
aguugucuaauccccacug

SEQ ID NO: 2523241 - RNA, 19 nt, Artificial Sequence
  Description of Artificial Sequence: Synthetic oligonucleotide
ugaaaauguugcuuccaca

SEQ ID NO: 2523242 - RNA, 19 nt, Artificial Sequence
  Description of Artificial Sequence: Synthetic oligonucleotide
acauauuuccaaaugaaaa

SEQ ID NO: 2523243 - RNA, 19 nt, Artificial Sequence
  Description of Artificial Sequence: Synthetic oligonucleotide
uguaaccucguaaucccca

SEQ ID NO: 2523244 - RNA, 19 nt, Artificial Sequence
  Description of Artificial Sequence: Synthetic oligonucleotide
uggcucacacuuaugucgg

SEQ ID NO: 2523245 - RNA, 19 nt, Artificial Sequence
  Description of Artificial Sequence: Synthetic oligonucleotide
cugaauagagugaaagcuc

SEQ ID NO: 2523246 - RNA, 19 nt, Artificial Sequence
  Description of Artificial Sequence: Synthetic oligonucleotide
uggacgaagcgcuccaccg

SEQ ID NO: 2523247 - RNA, 19 nt, Artificial Sequence
  Description of Artificial Sequence: Synthetic oligonucleotide
uguagauuaguuggucuag

SEQ ID NO: 2523248 - RNA, 19 nt, Artificial Sequence
  Description of Artificial Sequence: Synthetic oligonucleotide
ugaaaaguuguagauuagu

SEQ ID NO: 2523249 - RNA, 19 nt, Artificial Sequence
  Description of Artificial Sequence: Synthetic oligonucleotide
aaauagucauaguugucua

SEQ ID NO: 2523250 - RNA, 19 nt, Artificial Sequence
  Description of Artificial Sequence: Synthetic oligonucleotide
uuugaaucuggauuuuaau

SEQ ID NO: 2523251 - RNA, 19 nt, Artificial Sequence
  Description of Artificial Sequence: Synthetic oligonucleotide
aguuggucuagaauauggc

SEQ ID NO: 2523252 - RNA, 19 nt, Artificial Sequence
  Description of Artificial Sequence: Synthetic oligonucleotide
ucuaauccccacuggacga

SEQ ID NO: 2523253 - RNA, 19 nt, Artificial Sequence
  Description of Artificial Sequence: Synthetic oligonucleotide
uucuacaacuauguaaccu

SEQ ID NO: 2523254 - RNA, 19 nt, Artificial Sequence
  Description of Artificial Sequence: Synthetic oligonucleotide
accaauaacaccaagucuu

SEQ ID NO: 2523255 - RNA, 19 nt, Artificial Sequence
  Description of Artificial Sequence: Synthetic oligonucleotide
uccaggugaauucuucaca

SEQ ID NO: 2523256 - RNA, 19 nt, Artificial Sequence
  Description of Artificial Sequence: Synthetic oligonucleotide
uggaguuuucuacuuauuu

SEQ ID NO: 2523257 - RNA, 19 nt, Artificial Sequence
  Description of Artificial Sequence: Synthetic oligonucleotide
uucuacuuauuuccaggug

SEQ ID NO: 2523258 - RNA, 19 nt, Artificial Sequence
  Description of Artificial Sequence: Synthetic oligonucleotide
ugaauucuucacauuuccu

SEQ ID NO: 2523259 - RNA, 19 nt, Artificial Sequence
  Description of Artificial Sequence: Synthetic oligonucleotide
gaauacuuuuccugacacc

SEQ ID NO: 2523260 - RNA, 19 nt, Artificial Sequence
  Description of Artificial Sequence: Synthetic oligonucleotide
ugucuaauccccacuggac

SEQ ID NO: 2523261 - RNA, 19 nt, Artificial Sequence
  Description of Artificial Sequence: Synthetic oligonucleotide
guagaaauacugauuuacc

SEQ ID NO: 2523262 - RNA, 19 nt, Artificial Sequence
  Description of Artificial Sequence: Synthetic oligonucleotide
gaauauggcaucacccaag

SEQ ID NO: 2523263 - RNA, 19 nt, Artificial Sequence
  Description of Artificial Sequence: Synthetic oligonucleotide
caaguugaguccuuggcuc

SEQ ID NO: 2523264 - RNA, 19 nt, Artificial Sequence
  Description of Artificial Sequence: Synthetic oligonucleotide
uuuugaaccucgagcaaaa

SEQ ID NO: 2523265 - RNA, 19 nt, Artificial Sequence
  Description of Artificial Sequence: Synthetic oligonucleotide
accaacuuguauauggcuc

SEQ ID NO: 2523266 - RNA, 19 nt, Artificial Sequence
  Description of Artificial Sequence: Synthetic oligonucleotide
cugauuaaaaugggcagag

SEQ ID NO: 2523267 - RNA, 19 nt, Artificial Sequence
  Description of Artificial Sequence: Synthetic oligonucleotide
uucugaaaauguugcuucc

SEQ ID NO: 2523268 - RNA, 19 nt, Artificial Sequence
  Description of Artificial Sequence: Synthetic oligonucleotide
guaauccccagucauauaa

SEQ ID NO: 2523269 - RNA, 19 nt, Artificial Sequence
  Description of Artificial Sequence: Synthetic oligonucleotide
uccccagucauauaacuuc

SEQ ID NO: 2523270 - RNA, 19 nt, Artificial Sequence
  Description of Artificial Sequence: Synthetic oligonucleotide
aaauccaggaggcgcauuu

SEQ ID NO: 2523271 - RNA, 19 nt, Artificial Sequence
  Description of Artificial Sequence: Synthetic oligonucleotide
uuguuguggguaauagaca

SEQ ID NO: 2523272 - RNA, 19 nt, Artificial Sequence
  Description of Artificial Sequence: Synthetic oligonucleotide
acuauauccaauacugacu

SEQ ID NO: 2523273 - RNA, 19 nt, Artificial Sequence
  Description of Artificial Sequence: Synthetic oligonucleotide
aguuguagauuaguugguc

SEQ ID NO: 2523274 - RNA, 19 nt, Artificial Sequence
  Description of Artificial Sequence: Synthetic oligonucleotide
uuuccaggugaauucuuca

SEQ ID NO: 2523275 - RNA, 19 nt, Artificial Sequence
  Description of Artificial Sequence: Synthetic oligonucleotide
uuuaccgucuggaguuucc

SEQ ID NO: 2523276 - RNA, 19 nt, Artificial Sequence
  Description of Artificial Sequence: Synthetic oligonucleotide
uguggguaauagacagagg

SEQ ID NO: 2523277 - RNA, 19 nt, Artificial Sequence
  Description of Artificial Sequence: Synthetic oligonucleotide
guuggucuagaauauggca

SEQ ID NO: 2523278 - RNA, 19 nt, Artificial Sequence
  Description of Artificial Sequence: Synthetic oligonucleotide
uagacagaggcaccuaauc

SEQ ID NO: 2523279 - RNA, 19 nt, Artificial Sequence
  Description of Artificial Sequence: Synthetic oligonucleotide
cuucaaguugaguccuugg

SEQ ID NO: 2523280 - RNA, 19 nt, Artificial Sequence
  Description of Artificial Sequence: Synthetic oligonucleotide
uuguagauuaguuggucua

SEQ ID NO: 2523281 - RNA, 19 nt, Artificial Sequence
  Description of Artificial Sequence: Synthetic oligonucleotide
agauuaguuggucuagaau

SEQ ID NO: 2523282 - RNA, 19 nt, Artificial Sequence
  Description of Artificial Sequence: Synthetic oligonucleotide
cugaaaauguugcuuccac

SEQ ID NO: 2523283 - RNA, 19 nt, Artificial Sequence
  Description of Artificial Sequence: Synthetic oligonucleotide
uuaugucggaguugggaga

SEQ ID NO: 2523284 - RNA, 19 nt, Artificial Sequence
  Description of Artificial Sequence: Synthetic oligonucleotide
uacugauuuaccgucugga

SEQ ID NO: 2523285 - RNA, 19 nt, Artificial Sequence
  Description of Artificial Sequence: Synthetic oligonucleotide
uuauuuccaggugaauucu

SEQ ID NO: 2523286 - RNA, 19 nt, Artificial Sequence
  Description of Artificial Sequence: Synthetic oligonucleotide
uaccuauaacugauuaaaa

SEQ ID NO: 2523287 - RNA, 19 nt, Artificial Sequence
  Description of Artificial Sequence: Synthetic oligonucleotide
acugauuaaaaugggcaga

SEQ ID NO: 2523288 - RNA, 19 nt, Artificial Sequence
  Description of Artificial Sequence: Synthetic oligonucleotide
ugacucucugccauuuugu

SEQ ID NO: 2523289 - RNA, 19 nt, Artificial Sequence
  Description of Artificial Sequence: Synthetic oligonucleotide
uuccacaaaucuucuacaa

SEQ ID NO: 2523290 - RNA, 19 nt, Artificial Sequence
  Description of Artificial Sequence: Synthetic oligonucleotide
uauauggcucacacuuaug

SEQ ID NO: 2523291 - RNA, 19 nt, Artificial Sequence
  Description of Artificial Sequence: Synthetic oligonucleotide
uuuccaauguuuaccuaua

SEQ ID NO: 2523292 - RNA, 19 nt, Artificial Sequence
  Description of Artificial Sequence: Synthetic oligonucleotide
aaauacugauuuaccgucu

SEQ ID NO: 2523293 - RNA, 19 nt, Artificial Sequence
  Description of Artificial Sequence: Synthetic oligonucleotide
aaugggcagagcauggagu

SEQ ID NO: 2523294 - RNA, 19 nt, Artificial Sequence
  Description of Artificial Sequence: Synthetic oligonucleotide
acaaaucuucuacaacuau

SEQ ID NO: 2523295 - RNA, 19 nt, Artificial Sequence
  Description of Artificial Sequence: Synthetic oligonucleotide
ucugaaaauguugcuucca

SEQ ID NO: 2523296 - RNA, 19 nt, Artificial Sequence
  Description of Artificial Sequence: Synthetic oligonucleotide
uagauuaguuggucuagaa

SEQ ID NO: 2523297 - RNA, 19 nt, Artificial Sequence
  Description of Artificial Sequence: Synthetic oligonucleotide
uggaguuuccaauguuuac

SEQ ID NO: 2523298 - RNA, 19 nt, Artificial Sequence
  Description of Artificial Sequence: Synthetic oligonucleotide
acuuaugucggaguuggga

SEQ ID NO: 2523299 - RNA, 19 nt, Artificial Sequence
  Description of Artificial Sequence: Synthetic oligonucleotide
ggaauacuuuuccugacac

SEQ ID NO: 2523300 - RNA, 19 nt, Artificial Sequence
  Description of Artificial Sequence: Synthetic oligonucleotide
uauggcucacacuuauguc

SEQ ID NO: 2523301 - RNA, 19 nt, Artificial Sequence
  Description of Artificial Sequence: Synthetic oligonucleotide
uaauccccagucauauaac

SEQ ID NO: 2523302 - RNA, 19 nt, Artificial Sequence
  Description of Artificial Sequence: Synthetic oligonucleotide
aaauuuagacugacccuca

SEQ ID NO: 2523303 - RNA, 19 nt, Artificial Sequence
  Description of Artificial Sequence: Synthetic oligonucleotide
uacaacuauguaaccucgu

SEQ ID NO: 2523304 - RNA, 19 nt, Artificial Sequence
  Description of Artificial Sequence: Synthetic oligonucleotide
uuccaggugaauucuucac

SEQ ID NO: 2523305 - RNA, 19 nt, Artificial Sequence
  Description of Artificial Sequence: Synthetic oligonucleotide
uaagaaugaggaguucuaa

SEQ ID NO: 2523306 - RNA, 19 nt, Artificial Sequence
  Description of Artificial Sequence: Synthetic oligonucleotide
uguauauggcucacacuua

SEQ ID NO: 2523307 - RNA, 19 nt, Artificial Sequence
  Description of Artificial Sequence: Synthetic oligonucleotide
ucacacuuaugucggaguu

SEQ ID NO: 2523308 - RNA, 19 nt, Artificial Sequence
  Description of Artificial Sequence: Synthetic oligonucleotide
acaacuauguaaccucgua

SEQ ID NO: 2523309 - RNA, 19 nt, Artificial Sequence
  Description of Artificial Sequence: Synthetic oligonucleotide
aaaaugggcagagcaugga

SEQ ID NO: 2523310 - RNA, 19 nt, Artificial Sequence
  Description of Artificial Sequence: Synthetic oligonucleotide
uagcaaagaggcucagugu

SEQ ID NO: 2523311 - RNA, 19 nt, Artificial Sequence
  Description of Artificial Sequence: Synthetic oligonucleotide
ucuucaaguugaguccuug

SEQ ID NO: 2523312 - RNA, 19 nt, Artificial Sequence
  Description of Artificial Sequence: Synthetic oligonucleotide
guaaccucguaauccccag

SEQ ID NO: 2523313 - RNA, 19 nt, Artificial Sequence
  Description of Artificial Sequence: Synthetic oligonucleotide
auuaguuggucuagaauau

SEQ ID NO: 2523314 - RNA, 19 nt, Artificial Sequence
  Description of Artificial Sequence: Synthetic oligonucleotide
aaguuguagauuaguuggu

SEQ ID NO: 2523315 - RNA, 19 nt, Artificial Sequence
  Description of Artificial Sequence: Synthetic oligonucleotide
uauauccaauacugacucu

SEQ ID NO: 2523316 - RNA, 19 nt, Artificial Sequence
  Description of Artificial Sequence: Synthetic oligonucleotide
cugacucucugccauuuug

SEQ ID NO: 2523317 - RNA, 19 nt, Artificial Sequence
  Description of Artificial Sequence: Synthetic oligonucleotide
uagucauaguugucuaauc

SEQ ID NO: 2523318 - RNA, 19 nt, Artificial Sequence
  Description of Artificial Sequence: Synthetic oligonucleotide
ugggaauacuuuuccugac

SEQ ID NO: 2523319 - RNA, 19 nt, Artificial Sequence
  Description of Artificial Sequence: Synthetic oligonucleotide
ugauuaaaaugggcagagc

SEQ ID NO: 2523320 - RNA, 19 nt, Artificial Sequence
  Description of Artificial Sequence: Synthetic oligonucleotide
aggaacugaauagagugaa

SEQ ID NO: 2523321 - RNA, 19 nt, Artificial Sequence
  Description of Artificial Sequence: Synthetic oligonucleotide
uuagacugacccucaggaa

SEQ ID NO: 2523322 - RNA, 19 nt, Artificial Sequence
  Description of Artificial Sequence: Synthetic oligonucleotide
gcaucacccaagaugauag

SEQ ID NO: 2523323 - RNA, 19 nt, Artificial Sequence
  Description of Artificial Sequence: Synthetic oligonucleotide
caguuuacuauauccaaua

SEQ ID NO: 2523324 - RNA, 19 nt, Artificial Sequence
  Description of Artificial Sequence: Synthetic oligonucleotide
ucguaauccccagucauau

SEQ ID NO: 2523325 - RNA, 19 nt, Artificial Sequence
  Description of Artificial Sequence: Synthetic oligonucleotide
auguuuaccuauaacugau

SEQ ID NO: 2523326 - RNA, 19 nt, Artificial Sequence
  Description of Artificial Sequence: Synthetic oligonucleotide
auguaaccucguaaucccc

SEQ ID NO: 2523327 - RNA, 19 nt, Artificial Sequence
  Description of Artificial Sequence: Synthetic oligonucleotide
cuuccacaaaucuucuaca

SEQ ID NO: 2523328 - RNA, 19 nt, Artificial Sequence
  Description of Artificial Sequence: Synthetic oligonucleotide
ggauuuuaauuuauguaca

SEQ ID NO: 2523329 - RNA, 19 nt, Artificial Sequence
  Description of Artificial Sequence: Synthetic oligonucleotide
auauaacuucuccccgcug

SEQ ID NO: 2523330 - RNA, 19 nt, Artificial Sequence
  Description of Artificial Sequence: Synthetic oligonucleotide
ccaagaugauagcaaagag

SEQ ID NO: 2523331 - RNA, 19 nt, Artificial Sequence
  Description of Artificial Sequence: Synthetic oligonucleotide
uguuuaccuauaacugauu

SEQ ID NO: 2523332 - RNA, 19 nt, Artificial Sequence
  Description of Artificial Sequence: Synthetic oligonucleotide
uccuggcuucugaaaaugu

SEQ ID NO: 2523333 - RNA, 19 nt, Artificial Sequence
  Description of Artificial Sequence: Synthetic oligonucleotide
ugucggaguugggagaugu

SEQ ID NO: 2523334 - RNA, 19 nt, Artificial Sequence
  Description of Artificial Sequence: Synthetic oligonucleotide
gaggcaccuaaucccauga

SEQ ID NO: 2523335 - RNA, 19 nt, Artificial Sequence
  Description of Artificial Sequence: Synthetic oligonucleotide
aggaggcgcauuuuggaaa

SEQ ID NO: 2523336 - RNA, 19 nt, Artificial Sequence
  Description of Artificial Sequence: Synthetic oligonucleotide
augauagcaaagaggcuca

SEQ ID NO: 2523337 - RNA, 19 nt, Artificial Sequence
  Description of Artificial Sequence: Synthetic oligonucleotide
aggcuuauacauauuucca

SEQ ID NO: 2523338 - RNA, 19 nt, Artificial Sequence
  Description of Artificial Sequence: Synthetic oligonucleotide
ucuaaggcuuauacauauu

SEQ ID NO: 2523339 - RNA, 19 nt, Artificial Sequence
  Description of Artificial Sequence: Synthetic oligonucleotide
augggcagagcauggaguu

SEQ ID NO: 2523340 - RNA, 19 nt, Artificial Sequence
  Description of Artificial Sequence: Synthetic oligonucleotide
cugaccugggcaaaggcaa

SEQ ID NO: 2523341 - RNA, 19 nt, Artificial Sequence
  Description of Artificial Sequence: Synthetic oligonucleotide
guuugaaucuggauuuuaa

SEQ ID NO: 2523342 - RNA, 19 nt, Artificial Sequence
  Description of Artificial Sequence: Synthetic oligonucleotide
cuacuuauuuccaggugaa

SEQ ID NO: 2523343 - RNA, 19 nt, Artificial Sequence
  Description of Artificial Sequence: Synthetic oligonucleotide
accgucuggaguuuccaau

SEQ ID NO: 2523344 - RNA, 19 nt, Artificial Sequence
  Description of Artificial Sequence: Synthetic oligonucleotide
ggagauguuuucuucaagu

SEQ ID NO: 2523345 - RNA, 19 nt, Artificial Sequence
  Description of Artificial Sequence: Synthetic oligonucleotide
aacuuguauauggcucaca

SEQ ID NO: 2523346 - RNA, 19 nt, Artificial Sequence
  Description of Artificial Sequence: Synthetic oligonucleotide
agcauggaguuuucuacuu

SEQ ID NO: 2523347 - RNA, 19 nt, Artificial Sequence
  Description of Artificial Sequence: Synthetic oligonucleotide
auaagaaugaggaguucua

SEQ ID NO: 2523348 - RNA, 19 nt, Artificial Sequence
  Description of Artificial Sequence: Synthetic oligonucleotide
cuggacgaagcgcuccacc

SEQ ID NO: 2523349 - RNA, 19 nt, Artificial Sequence
  Description of Artificial Sequence: Synthetic oligonucleotide
uaaccucguaauccccagu

SEQ ID NO: 2523350 - RNA, 19 nt, Artificial Sequence
  Description of Artificial Sequence: Synthetic oligonucleotide
auuuaccgucuggaguuuc

SEQ ID NO: 2523351 - RNA, 19 nt, Artificial Sequence
  Description of Artificial Sequence: Synthetic oligonucleotide
caucacccaagaugauagc

SEQ ID NO: 2523352 - RNA, 19 nt, Artificial Sequence
  Description of Artificial Sequence: Synthetic oligonucleotide
gguaauagacagaggcacc

SEQ ID NO: 2523353 - RNA, 19 nt, Artificial Sequence
  Description of Artificial Sequence: Synthetic oligonucleotide
cacaaaucuucuacaacua

SEQ ID NO: 2523354 - RNA, 19 nt, Artificial Sequence
  Description of Artificial Sequence: Synthetic oligonucleotide
ucggaguugggagauguuu

SEQ ID NO: 2523355 - RNA, 19 nt, Artificial Sequence
  Description of Artificial Sequence: Synthetic oligonucleotide
ugauagcaaagaggcucag

SEQ ID NO: 2523356 - RNA, 19 nt, Artificial Sequence
  Description of Artificial Sequence: Synthetic oligonucleotide
accucguaauccccaguca

SEQ ID NO: 2523357 - RNA, 19 nt, Artificial Sequence
  Description of Artificial Sequence: Synthetic oligonucleotide
cugauuuaccgucuggagu

SEQ ID NO: 2523358 - RNA, 19 nt, Artificial Sequence
  Description of Artificial Sequence: Synthetic oligonucleotide
gagauguuuucuucaaguu

SEQ ID NO: 2523359 - RNA, 19 nt, Artificial Sequence
  Description of Artificial Sequence: Synthetic oligonucleotide
uuaccgucuggaguuucca

SEQ ID NO: 2523360 - RNA, 19 nt, Artificial Sequence
  Description of Artificial Sequence: Synthetic oligonucleotide
uaauccccacuggacgaag

SEQ ID NO: 2523361 - RNA, 19 nt, Artificial Sequence
  Description of Artificial Sequence: Synthetic oligonucleotide
cacacuuaugucggaguug

SEQ ID NO: 2523362 - RNA, 19 nt, Artificial Sequence
  Description of Artificial Sequence: Synthetic oligonucleotide
guaauagacagaggcaccu

SEQ ID NO: 2523363 - RNA, 19 nt, Artificial Sequence
  Description of Artificial Sequence: Synthetic oligonucleotide
ccaauaacaccaagucuug

SEQ ID NO: 2523364 - RNA, 19 nt, Artificial Sequence
  Description of Artificial Sequence: Synthetic oligonucleotide
uaacuucuccccgcugacc

SEQ ID NO: 2523365 - RNA, 19 nt, Artificial Sequence
  Description of Artificial Sequence: Synthetic oligonucleotide
ccucaggaacugaauagag

SEQ ID NO: 2523366 - RNA, 19 nt, Artificial Sequence
  Description of Artificial Sequence: Synthetic oligonucleotide
acuuuuccugacaccaacu

SEQ ID NO: 2523367 - RNA, 19 nt, Artificial Sequence
  Description of Artificial Sequence: Synthetic oligonucleotide
guauauggcucacacuuau

SEQ ID NO: 2523368 - RNA, 19 nt, Artificial Sequence
  Description of Artificial Sequence: Synthetic oligonucleotide
acccaagaugauagcaaag

SEQ ID NO: 2523369 - RNA, 19 nt, Artificial Sequence
  Description of Artificial Sequence: Synthetic oligonucleotide
guagauuaguuggucuaga

SEQ ID NO: 2523370 - RNA, 19 nt, Artificial Sequence
  Description of Artificial Sequence: Synthetic oligonucleotide
gggagauguuuucuucaag

SEQ ID NO: 2523371 - RNA, 19 nt, Artificial Sequence
  Description of Artificial Sequence: Synthetic oligonucleotide
caauacugacucucugcca

SEQ ID NO: 2523372 - RNA, 19 nt, Artificial Sequence
  Description of Artificial Sequence: Synthetic oligonucleotide
ggacgaagcgcuccaccgg

SEQ ID NO: 2523373 - RNA, 19 nt, Artificial Sequence
  Description of Artificial Sequence: Synthetic oligonucleotide
aguuuccaauguuuaccua

SEQ ID NO: 2523374 - RNA, 19 nt, Artificial Sequence
  Description of Artificial Sequence: Synthetic oligonucleotide
gggaauacuuuuccugaca

SEQ ID NO: 2523375 - RNA, 19 nt, Artificial Sequence
  Description of Artificial Sequence: Synthetic oligonucleotide
ccaacuuguauauggcuca

SEQ ID NO: 2523376 - RNA, 19 nt, Artificial Sequence
  Description of Artificial Sequence: Synthetic oligonucleotide
ggcuuguuguggguaauag

SEQ ID NO: 2523377 - RNA, 19 nt, Artificial Sequence
  Description of Artificial Sequence: Synthetic oligonucleotide
ggaguugggagauguuuuc

SEQ ID NO: 2523378 - RNA, 19 nt, Artificial Sequence
  Description of Artificial Sequence: Synthetic oligonucleotide
ccugaagaaagccaguuua

SEQ ID NO: 2523379 - RNA, 19 nt, Artificial Sequence
  Description of Artificial Sequence: Synthetic oligonucleotide
uaauagacagaggcaccua

SEQ ID NO: 2523380 - RNA, 19 nt, Artificial Sequence
  Description of Artificial Sequence: Synthetic oligonucleotide
cauggaguuuucuacuuau

SEQ ID NO: 2523381 - RNA, 19 nt, Artificial Sequence
  Description of Artificial Sequence: Synthetic oligonucleotide
agaugauagcaaagaggcu

SEQ ID NO: 2523382 - RNA, 19 nt, Artificial Sequence
  Description of Artificial Sequence: Synthetic oligonucleotide
gcgcauuuuggaaauaguc

SEQ ID NO: 2523383 - RNA, 19 nt, Artificial Sequence
  Description of Artificial Sequence: Synthetic oligonucleotide
cauauaacuucuccccgcu

SEQ ID NO: 2523384 - RNA, 19 nt, Artificial Sequence
  Description of Artificial Sequence: Synthetic oligonucleotide
cacuuaugucggaguuggg

SEQ ID NO: 2523385 - RNA, 19 nt, Artificial Sequence
  Description of Artificial Sequence: Synthetic oligonucleotide
ugaccugggcaaaggcaau

SEQ ID NO: 2523386 - RNA, 19 nt, Artificial Sequence
  Description of Artificial Sequence: Synthetic oligonucleotide
ugacaccaacuuguauaug

SEQ ID NO: 2523387 - RNA, 19 nt, Artificial Sequence
  Description of Artificial Sequence: Synthetic oligonucleotide
uaccgucuggaguuuccaa

SEQ ID NO: 2523388 - RNA, 19 nt, Artificial Sequence
  Description of Artificial Sequence: Synthetic oligonucleotide
acuggacgaagcgcuccac

SEQ ID NO: 2523389 - RNA, 19 nt, Artificial Sequence
  Description of Artificial Sequence: Synthetic oligonucleotide
cuuguauauggcucacacu

SEQ ID NO: 2523390 - RNA, 19 nt, Artificial Sequence
  Description of Artificial Sequence: Synthetic oligonucleotide
uggcuccuccacaaauuua

SEQ ID NO: 2523391 - RNA, 19 nt, Artificial Sequence
  Description of Artificial Sequence: Synthetic oligonucleotide
auagacagaggcaccuaau

SEQ ID NO: 2523392 - RNA, 19 nt, Artificial Sequence
  Description of Artificial Sequence: Synthetic oligonucleotide
gcaccuaaucccaugaaaa

SEQ ID NO: 2523393 - RNA, 19 nt, Artificial Sequence
  Description of Artificial Sequence: Synthetic oligonucleotide
cugacccucaggaacugaa

SEQ ID NO: 2523394 - RNA, 19 nt, Artificial Sequence
  Description of Artificial Sequence: Synthetic oligonucleotide
auauggcaucacccaagau

SEQ ID NO: 2523395 - RNA, 19 nt, Artificial Sequence
  Description of Artificial Sequence: Synthetic oligonucleotide
uacuuauuuccaggugaau

SEQ ID NO: 2523396 - RNA, 19 nt, Artificial Sequence
  Description of Artificial Sequence: Synthetic oligonucleotide
cuccacaaauuuagacuga

SEQ ID NO: 2523397 - RNA, 19 nt, Artificial Sequence
  Description of Artificial Sequence: Synthetic oligonucleotide
uucuucaaguugaguccuu

SEQ ID NO: 2523398 - RNA, 19 nt, Artificial Sequence
  Description of Artificial Sequence: Synthetic oligonucleotide
uucuccccgcugaccuggg

SEQ ID NO: 2523399 - RNA, 19 nt, Artificial Sequence
  Description of Artificial Sequence: Synthetic oligonucleotide
gucuagaauauggcaucac

SEQ ID NO: 2523400 - RNA, 19 nt, Artificial Sequence
  Description of Artificial Sequence: Synthetic oligonucleotide
ggcaccuaaucccaugaaa

SEQ ID NO: 2523401 - RNA, 19 nt, Artificial Sequence
  Description of Artificial Sequence: Synthetic oligonucleotide
aaaauccaggaggcgcauu

SEQ ID NO: 2523402 - RNA, 19 nt, Artificial Sequence
  Description of Artificial Sequence: Synthetic oligonucleotide
aauccaggaggcgcauuuu

SEQ ID NO: 2523403 - RNA, 19 nt, Artificial Sequence
  Description of Artificial Sequence: Synthetic oligonucleotide
gcuuguuguggguaauaga

SEQ ID NO: 2523404 - RNA, 19 nt, Artificial Sequence
  Description of Artificial Sequence: Synthetic oligonucleotide
aguugaguccuuggcuccu

SEQ ID NO: 2523405 - RNA, 19 nt, Artificial Sequence
  Description of Artificial Sequence: Synthetic oligonucleotide
guucuaaggcuuauacaua

SEQ ID NO: 2523406 - RNA, 19 nt, Artificial Sequence
  Description of Artificial Sequence: Synthetic oligonucleotide
guuguggguaauagacaga

SEQ ID NO: 2523407 - RNA, 19 nt, Artificial Sequence
  Description of Artificial Sequence: Synthetic oligonucleotide
cucguaauccccagucaua

SEQ ID NO: 2523408 - RNA, 19 nt, Artificial Sequence
  Description of Artificial Sequence: Synthetic oligonucleotide
gcucacacuuaugucggag

SEQ ID NO: 2523409 - RNA, 19 nt, Artificial Sequence
  Description of Artificial Sequence: Synthetic oligonucleotide
ccgucuggaguuuccaaug

SEQ ID NO: 2523410 - RNA, 19 nt, Artificial Sequence
  Description of Artificial Sequence: Synthetic oligonucleotide
gauagcaaagaggcucagu

SEQ ID NO: 2523411 - RNA, 19 nt, Artificial Sequence
  Description of Artificial Sequence: Synthetic oligonucleotide
cucacacuuaugucggagu

SEQ ID NO: 2523412 - RNA, 19 nt, Artificial Sequence
  Description of Artificial Sequence: Synthetic oligonucleotide
aggauacaccagcuucuuu

SEQ ID NO: 2523413 - RNA, 19 nt, Artificial Sequence
  Description of Artificial Sequence: Synthetic oligonucleotide
caggaggcgcauuuuggaa

SEQ ID NO: 2523414 - RNA, 19 nt, Artificial Sequence
  Description of Artificial Sequence: Synthetic oligonucleotide
uccuuggcuccuccacaaa

SEQ ID NO: 2523415 - RNA, 19 nt, Artificial Sequence
  Description of Artificial Sequence: Synthetic oligonucleotide
auacuuuuccugacaccaa

SEQ ID NO: 2523416 - RNA, 19 nt, Artificial Sequence
  Description of Artificial Sequence: Synthetic oligonucleotide
aggcaccuaaucccaugaa

SEQ ID NO: 2523417 - RNA, 19 nt, Artificial Sequence
  Description of Artificial Sequence: Synthetic oligonucleotide
acugacucucugccauuuu

SEQ ID NO: 2523418 - RNA, 19 nt, Artificial Sequence
  Description of Artificial Sequence: Synthetic oligonucleotide
caaagaggcucaguguugu

SEQ ID NO: 2523419 - RNA, 19 nt, Artificial Sequence
  Description of Artificial Sequence: Synthetic oligonucleotide
ggucuagaauauggcauca

SEQ ID NO: 2523420 - RNA, 19 nt, Artificial Sequence
  Description of Artificial Sequence: Synthetic oligonucleotide
gacucucugccauuuuguu

SEQ ID NO: 2523421 - RNA, 19 nt, Artificial Sequence
  Description of Artificial Sequence: Synthetic oligonucleotide
cuccccgcugaccugggca

SEQ ID NO: 2523422 - RNA, 19 nt, Artificial Sequence
  Description of Artificial Sequence: Synthetic oligonucleotide
uggcuuguuguggguaaua

SEQ ID NO: 2523423 - RNA, 19 nt, Artificial Sequence
  Description of Artificial Sequence: Synthetic oligonucleotide
aggaguucuaaggcuuaua

SEQ ID NO: 2523424 - RNA, 19 nt, Artificial Sequence
  Description of Artificial Sequence: Synthetic oligonucleotide
uggcaucacccaagaugau

SEQ ID NO: 2523425 - RNA, 19 nt, Artificial Sequence
  Description of Artificial Sequence: Synthetic oligonucleotide
cuuggcuccuccacaaauu

SEQ ID NO: 2523426 - RNA, 19 nt, Artificial Sequence
  Description of Artificial Sequence: Synthetic oligonucleotide
acgaagcgcuccaccgggg

SEQ ID NO: 2523427 - RNA, 19 nt, Artificial Sequence
  Description of Artificial Sequence: Synthetic oligonucleotide
gaauagagugaaagcucau

SEQ ID NO: 2523428 - RNA, 19 nt, Artificial Sequence
  Description of Artificial Sequence: Synthetic oligonucleotide
cacuggacgaagcgcucca

SEQ ID NO: 2523429 - RNA, 19 nt, Artificial Sequence
  Description of Artificial Sequence: Synthetic oligonucleotide
acugacccucaggaacuga

SEQ ID NO: 2523430 - RNA, 19 nt, Artificial Sequence
  Description of Artificial Sequence: Synthetic oligonucleotide
ggaggauacaccagcuucu

SEQ ID NO: 2523431 - RNA, 19 nt, Artificial Sequence
  Description of Artificial Sequence: Synthetic oligonucleotide
ggguuuaguuugggaauac

SEQ ID NO: 2523432 - RNA, 19 nt, Artificial Sequence
  Description of Artificial Sequence: Synthetic oligonucleotide
ccaggaggcgcauuuugga

SEQ ID NO: 2523433 - RNA, 19 nt, Artificial Sequence
  Description of Artificial Sequence: Synthetic oligonucleotide
cuaauccccacuggacgaa

SEQ ID NO: 2523434 - RNA, 19 nt, Artificial Sequence
  Description of Artificial Sequence: Synthetic oligonucleotide
auggcuuguuguggguaau

SEQ ID NO: 2523435 - RNA, 19 nt, Artificial Sequence
  Description of Artificial Sequence: Synthetic oligonucleotide
ugggcagagcauggaguuu

SEQ ID NO: 2523436 - RNA, 19 nt, Artificial Sequence
  Description of Artificial Sequence: Synthetic oligonucleotide
ggaacugaauagagugaaa

SEQ ID NO: 2523437 - RNA, 19 nt, Artificial Sequence
  Description of Artificial Sequence: Synthetic oligonucleotide
ggaggcgcauuuuggaaau

SEQ ID NO: 2523438 - RNA, 19 nt, Artificial Sequence
  Description of Artificial Sequence: Synthetic oligonucleotide
gggguuuaguuugggaaua

SEQ ID NO: 2523439 - RNA, 19 nt, Artificial Sequence
  Description of Artificial Sequence: Synthetic oligonucleotide
ccaggugaauucuucacau

SEQ ID NO: 2523440 - RNA, 19 nt, Artificial Sequence
  Description of Artificial Sequence: Synthetic oligonucleotide
augucggaguugggagaug

SEQ ID NO: 2523441 - RNA, 19 nt, Artificial Sequence
  Description of Artificial Sequence: Synthetic oligonucleotide
ccaguuuacuauauccaau

SEQ ID NO: 2523442 - RNA, 19 nt, Artificial Sequence
  Description of Artificial Sequence: Synthetic oligonucleotide
gucuggaguuuccaauguu

SEQ ID NO: 2523443 - RNA, 19 nt, Artificial Sequence
  Description of Artificial Sequence: Synthetic oligonucleotide
ccacuggacgaagcgcucc

SEQ ID NO: 2523444 - RNA, 19 nt, Artificial Sequence
  Description of Artificial Sequence: Synthetic oligonucleotide
gaggauacaccagcuucuu

SEQ ID NO: 2523445 - RNA, 19 nt, Artificial Sequence
  Description of Artificial Sequence: Synthetic oligonucleotide
gauuuaccgucuggaguuu

SEQ ID NO: 2523446 - RNA, 19 nt, Artificial Sequence
  Description of Artificial Sequence: Synthetic oligonucleotide
ggcgcauuuuggaaauagu

SEQ ID NO: 2523447 - RNA, 19 nt, Artificial Sequence
  Description of Artificial Sequence: Synthetic oligonucleotide
ggcucacacuuaugucgga

SEQ ID NO: 2523448 - RNA, 19 nt, Artificial Sequence
  Description of Artificial Sequence: Synthetic oligonucleotide
ccucguaauccccagucau

SEQ ID NO: 2523449 - RNA, 19 nt, Artificial Sequence
  Description of Artificial Sequence: Synthetic oligonucleotide
ccccagucauauaacuucu

SEQ ID NO: 2523450 - RNA, 19 nt, Artificial Sequence
  Description of Artificial Sequence: Synthetic oligonucleotide
gaggcgcauuuuggaaaua

SEQ ID NO: 2523451 - RNA, 19 nt, Artificial Sequence
  Description of Artificial Sequence: Synthetic oligonucleotide
ccgcugaccugggcaaagg

SEQ ID NO: 2523452 - RNA, 19 nt, Artificial Sequence
  Description of Artificial Sequence: Synthetic oligonucleotide
ggcagagcauggaguuuuc

SEQ ID NO: 2523453 - RNA, 19 nt, Artificial Sequence
  Description of Artificial Sequence: Synthetic oligonucleotide
ccccacuggacgaagcgcu

SEQ ID NO: 2523454 - RNA, 19 nt, Artificial Sequence
  Description of Artificial Sequence: Synthetic oligonucleotide
cccgcugaccugggcaaag

SEQ ID NO: 2523455 - RNA, 19 nt, Artificial Sequence
  Description of Artificial Sequence: Synthetic oligonucleotide
cagaggcaccuaaucccau

SEQ ID NO: 2523456 - RNA, 19 nt, Artificial Sequence
  Description of Artificial Sequence: Synthetic oligonucleotide
cucugccauuuuguuugua

SEQ ID NO: 2523457 - RNA, 19 nt, Artificial Sequence
  Description of Artificial Sequence: Synthetic oligonucleotide
cggaguugggagauguuuu

SEQ ID NO: 2523458 - RNA, 19 nt, Artificial Sequence
  Description of Artificial Sequence: Synthetic oligonucleotide
cgucuggaguuuccaaugu

SEQ ID NO: 2523459 - RNA, 19 nt, Artificial Sequence
  Description of Artificial Sequence: Synthetic oligonucleotide
cguaauccccagucauaua

SEQ ID NO: 2523460 - RNA, 19 nt, Artificial Sequence
  Description of Artificial Sequence: Synthetic oligonucleotide
gucggaguugggagauguu

SEQ ID NO: 2523461 - RNA, 19 nt, Artificial Sequence
  Description of Artificial Sequence: Synthetic oligonucleotide
uccaauaucaauacaaacu

SEQ ID NO: 2523462 - RNA, 19 nt, Artificial Sequence
  Description of Artificial Sequence: Synthetic oligonucleotide
aguguuaacuauuuaagag

SEQ ID NO: 2523463 - RNA, 19 nt, Artificial Sequence
  Description of Artificial Sequence: Synthetic oligonucleotide
aacuauuuaagagauaacu

SEQ ID NO: 2523464 - RNA, 19 nt, Artificial Sequence
  Description of Artificial Sequence: Synthetic oligonucleotide
uuaacuauuuaagagauaa

SEQ ID NO: 2523465 - RNA, 19 nt, Artificial Sequence
  Description of Artificial Sequence: Synthetic oligonucleotide
uuuaagagauaacucaaca

SEQ ID NO: 2523466 - RNA, 19 nt, Artificial Sequence
  Description of Artificial Sequence: Synthetic oligonucleotide
uaagagauaacucaacauc

SEQ ID NO: 2523467 - RNA, 19 nt, Artificial Sequence
  Description of Artificial Sequence: Synthetic oligonucleotide
aaaguguuaacuauuuaag

SEQ ID NO: 2523468 - RNA, 19 nt, Artificial Sequence
  Description of Artificial Sequence: Synthetic oligonucleotide
aauaucaauacaaacugga

SEQ ID NO: 2523469 - RNA, 19 nt, Artificial Sequence
  Description of Artificial Sequence: Synthetic oligonucleotide
cuaaaguucaauuacaucu

SEQ ID NO: 2523470 - RNA, 19 nt, Artificial Sequence
  Description of Artificial Sequence: Synthetic oligonucleotide
uacaaacuggauuucauca

SEQ ID NO: 2523471 - RNA, 19 nt, Artificial Sequence
  Description of Artificial Sequence: Synthetic oligonucleotide
uguuaacuauuuaagagau

SEQ ID NO: 2523472 - RNA, 19 nt, Artificial Sequence
  Description of Artificial Sequence: Synthetic oligonucleotide
cuauuuaagagauaacuca

SEQ ID NO: 2523473 - RNA, 19 nt, Artificial Sequence
  Description of Artificial Sequence: Synthetic oligonucleotide
aaguguuaacuauuuaaga

SEQ ID NO: 2523474 - RNA, 19 nt, Artificial Sequence
  Description of Artificial Sequence: Synthetic oligonucleotide
uauuuaagagauaacucaa

SEQ ID NO: 2523475 - RNA, 19 nt, Artificial Sequence
  Description of Artificial Sequence: Synthetic oligonucleotide
gauuucaucaucauccaug

SEQ ID NO: 2523476 - RNA, 19 nt, Artificial Sequence
  Description of Artificial Sequence: Synthetic oligonucleotide
acuauuuaagagauaacuc

SEQ ID NO: 2523477 - RNA, 19 nt, Artificial Sequence
  Description of Artificial Sequence: Synthetic oligonucleotide
uaucaauacaaacuggauu

SEQ ID NO: 2523478 - RNA, 19 nt, Artificial Sequence
  Description of Artificial Sequence: Synthetic oligonucleotide
aagagauaacucaacaucu

SEQ ID NO: 2523479 - RNA, 19 nt, Artificial Sequence
  Description of Artificial Sequence: Synthetic oligonucleotide
auacaaacuggauuucauc

SEQ ID NO: 2523480 - RNA, 19 nt, Artificial Sequence
  Description of Artificial Sequence: Synthetic oligonucleotide
caauaucaauacaaacugg

SEQ ID NO: 2523481 - RNA, 19 nt, Artificial Sequence
  Description of Artificial Sequence: Synthetic oligonucleotide
uuaagagauaacucaacau

SEQ ID NO: 2523482 - RNA, 19 nt, Artificial Sequence
  Description of Artificial Sequence: Synthetic oligonucleotide
uacccuaaaguucaauuac

SEQ ID NO: 2523483 - RNA, 19 nt, Artificial Sequence
  Description of Artificial Sequence: Synthetic oligonucleotide
ucauccauguucuggaagu

SEQ ID NO: 2523484 - RNA, 19 nt, Artificial Sequence
  Description of Artificial Sequence: Synthetic oligonucleotide
uaaaguucaauuacaucua

SEQ ID NO: 2523485 - RNA, 19 nt, Artificial Sequence
  Description of Artificial Sequence: Synthetic oligonucleotide
ucaucauccauguucugga

SEQ ID NO: 2523486 - RNA, 19 nt, Artificial Sequence
  Description of Artificial Sequence: Synthetic oligonucleotide
ucaucuccaauaucaauac

SEQ ID NO: 2523487 - RNA, 19 nt, Artificial Sequence
  Description of Artificial Sequence: Synthetic oligonucleotide
guguuaacuauuuaagaga

SEQ ID NO: 2523488 - RNA, 19 nt, Artificial Sequence
  Description of Artificial Sequence: Synthetic oligonucleotide
caaaguguuaacuauuuaa

SEQ ID NO: 2523489 - RNA, 19 nt, Artificial Sequence
  Description of Artificial Sequence: Synthetic oligonucleotide
auuuaagagauaacucaac

SEQ ID NO: 2523490 - RNA, 19 nt, Artificial Sequence
  Description of Artificial Sequence: Synthetic oligonucleotide
uccauguucuggaaguucu

SEQ ID NO: 2523491 - RNA, 19 nt, Artificial Sequence
  Description of Artificial Sequence: Synthetic oligonucleotide
aucaucauccauguucugg

SEQ ID NO: 2523492 - RNA, 19 nt, Artificial Sequence
  Description of Artificial Sequence: Synthetic oligonucleotide
ccaauaucaauacaaacug

SEQ ID NO: 2523493 - RNA, 19 nt, Artificial Sequence
  Description of Artificial Sequence: Synthetic oligonucleotide
ucuccaauaucaauacaaa

SEQ ID NO: 2523494 - RNA, 19 nt, Artificial Sequence
  Description of Artificial Sequence: Synthetic oligonucleotide
uguacccuaaaguucaauu

SEQ ID NO: 2523495 - RNA, 19 nt, Artificial Sequence
  Description of Artificial Sequence: Synthetic oligonucleotide
cuccaauaucaauacaaac

SEQ ID NO: 2523496 - RNA, 19 nt, Artificial Sequence
  Description of Artificial Sequence: Synthetic oligonucleotide
aauacaaacuggauuucau

SEQ ID NO: 2523497 - RNA, 19 nt, Artificial Sequence
  Description of Artificial Sequence: Synthetic oligonucleotide
uaacuauuuaagagauaac

SEQ ID NO: 2523498 - RNA, 19 nt, Artificial Sequence
  Description of Artificial Sequence: Synthetic oligonucleotide
aucauccauguucuggaag

SEQ ID NO: 2523499 - RNA, 19 nt, Artificial Sequence
  Description of Artificial Sequence: Synthetic oligonucleotide
aucuccaauaucaauacaa

SEQ ID NO: 2523500 - RNA, 19 nt, Artificial Sequence
  Description of Artificial Sequence: Synthetic oligonucleotide
aacaaaguguuaacuauuu

SEQ ID NO: 2523501 - RNA, 19 nt, Artificial Sequence
  Description of Artificial Sequence: Synthetic oligonucleotide
uauacugcuguacccuaaa

SEQ ID NO: 2523502 - RNA, 19 nt, Artificial Sequence
  Description of Artificial Sequence: Synthetic oligonucleotide
aucaucuccaauaucaaua

SEQ ID NO: 2523503 - RNA, 19 nt, Artificial Sequence
  Description of Artificial Sequence: Synthetic oligonucleotide
guacccuaaaguucaauua

SEQ ID NO: 2523504 - RNA, 19 nt, Artificial Sequence
  Description of Artificial Sequence: Synthetic oligonucleotide
auaucaauacaaacuggau

SEQ ID NO: 2523505 - RNA, 19 nt, Artificial Sequence
  Description of Artificial Sequence: Synthetic oligonucleotide
acaaaguguuaacuauuua

SEQ ID NO: 2523506 - RNA, 19 nt, Artificial Sequence
  Description of Artificial Sequence: Synthetic oligonucleotide
ccuaaaguucaauuacauc

SEQ ID NO: 2523507 - RNA, 19 nt, Artificial Sequence
  Description of Artificial Sequence: Synthetic oligonucleotide
agagauaacucaacaucuu

SEQ ID NO: 2523508 - RNA, 19 nt, Artificial Sequence
  Description of Artificial Sequence: Synthetic oligonucleotide
gaacaaaguguuaacuauu

SEQ ID NO: 2523509 - RNA, 19 nt, Artificial Sequence
  Description of Artificial Sequence: Synthetic oligonucleotide
caucuccaauaucaauaca

SEQ ID NO: 2523510 - RNA, 19 nt, Artificial Sequence
  Description of Artificial Sequence: Synthetic oligonucleotide
guauacugcuguacccuaa

SEQ ID NO: 2523511 - RNA, 19 nt, Artificial Sequence
  Description of Artificial Sequence: Synthetic oligonucleotide
cccuaaaguucaauuacau

SEQ ID NO: 2523512 - RNA, 19 nt, Artificial Sequence
  Description of Artificial Sequence: Synthetic oligonucleotide
cuguacccuaaaguucaau

SEQ ID NO: 2523513 - RNA, 19 nt, Artificial Sequence
  Description of Artificial Sequence: Synthetic oligonucleotide
cauccauguucuggaaguu

SEQ ID NO: 2523514 - RNA, 19 nt, Artificial Sequence
  Description of Artificial Sequence: Synthetic oligonucleotide
auaaacuuguaauauaugc

SEQ ID NO: 2523515 - RNA, 19 nt, Artificial Sequence
  Description of Artificial Sequence: Synthetic oligonucleotide
aaacuuguaauauaugcuc

SEQ ID NO: 2523516 - RNA, 19 nt, Artificial Sequence
  Description of Artificial Sequence: Synthetic oligonucleotide
uguaauauaugcuccaacg

SEQ ID NO: 2523517 - RNA, 19 nt, Artificial Sequence
  Description of Artificial Sequence: Synthetic oligonucleotide
uaaacuuguaauauaugcu

SEQ ID NO: 2523518 - RNA, 19 nt, Artificial Sequence
  Description of Artificial Sequence: Synthetic oligonucleotide
aacuuguaauauaugcucc

SEQ ID NO: 2523519 - RNA, 19 nt, Artificial Sequence
  Description of Artificial Sequence: Synthetic oligonucleotide
uucagaagcugcuggaucg

SEQ ID NO: 2523520 - RNA, 19 nt, Artificial Sequence
  Description of Artificial Sequence: Synthetic oligonucleotide
uuucccagcuucuaggagg

SEQ ID NO: 2523521 - RNA, 19 nt, Artificial Sequence
  Description of Artificial Sequence: Synthetic oligonucleotide
uaauauaugcuccaacguc

SEQ ID NO: 2523522 - RNA, 19 nt, Artificial Sequence
  Description of Artificial Sequence: Synthetic oligonucleotide
aauauaugcuccaacgucu

SEQ ID NO: 2523523 - RNA, 19 nt, Artificial Sequence
  Description of Artificial Sequence: Synthetic oligonucleotide
ucuaggaggccauagagaa

SEQ ID NO: 2523524 - RNA, 19 nt, Artificial Sequence
  Description of Artificial Sequence: Synthetic oligonucleotide
cuucgugaaaggaaguucc

SEQ ID NO: 2523525 - RNA, 19 nt, Artificial Sequence
  Description of Artificial Sequence: Synthetic oligonucleotide
gcaggugucauucagaagc

SEQ ID NO: 2523526 - RNA, 19 nt, Artificial Sequence
  Description of Artificial Sequence: Synthetic oligonucleotide
uaggaggccauagagaacc

SEQ ID NO: 2523527 - RNA, 19 nt, Artificial Sequence
  Description of Artificial Sequence: Synthetic oligonucleotide
uugacaaccaggccacagg

SEQ ID NO: 2523528 - RNA, 19 nt, Artificial Sequence
  Description of Artificial Sequence: Synthetic oligonucleotide
guagaagccggagacaugg

SEQ ID NO: 2523529 - RNA, 19 nt, Artificial Sequence
  Description of Artificial Sequence: Synthetic oligonucleotide
uggaucguuucccuggucc

SEQ ID NO: 2523530 - RNA, 19 nt, Artificial Sequence
  Description of Artificial Sequence: Synthetic oligonucleotide
gucauucagaagcugcugg

SEQ ID NO: 2523531 - RNA, 19 nt, Artificial Sequence
  Description of Artificial Sequence: Synthetic oligonucleotide
aagccaucugugcgaaagc

SEQ ID NO: 2523532 - RNA, 19 nt, Artificial Sequence
  Description of Artificial Sequence: Synthetic oligonucleotide
auucagaagcugcuggauc

SEQ ID NO: 2523533 - RNA, 19 nt, Artificial Sequence
  Description of Artificial Sequence: Synthetic oligonucleotide
ugcuggaucguuucccugg

SEQ ID NO: 2523534 - RNA, 19 nt, Artificial Sequence
  Description of Artificial Sequence: Synthetic oligonucleotide
ugcuuucccagcuucuagg

SEQ ID NO: 2523535 - RNA, 19 nt, Artificial Sequence
  Description of Artificial Sequence: Synthetic oligonucleotide
cuucuaggaggccauagag

SEQ ID NO: 2523536 - RNA, 19 nt, Artificial Sequence
  Description of Artificial Sequence: Synthetic oligonucleotide
uuguaauauaugcuccaac

SEQ ID NO: 2523537 - RNA, 19 nt, Artificial Sequence
  Description of Artificial Sequence: Synthetic oligonucleotide
gaggccauagagaaccugg

SEQ ID NO: 2523538 - RNA, 19 nt, Artificial Sequence
  Description of Artificial Sequence: Synthetic oligonucleotide
gauaaacuuguaauauaug

SEQ ID NO: 2523539 - RNA, 19 nt, Artificial Sequence
  Description of Artificial Sequence: Synthetic oligonucleotide
agguuucucuugcuugucc

SEQ ID NO: 2523540 - RNA, 19 nt, Artificial Sequence
  Description of Artificial Sequence: Synthetic oligonucleotide
uucuaggaggccauagaga

SEQ ID NO: 2523541 - RNA, 19 nt, Artificial Sequence
  Description of Artificial Sequence: Synthetic oligonucleotide
cacaccaacugcaaauggc

SEQ ID NO: 2523542 - RNA, 19 nt, Artificial Sequence
  Description of Artificial Sequence: Synthetic oligonucleotide
acuuguaauauaugcucca

SEQ ID NO: 2523543 - RNA, 19 nt, Artificial Sequence
  Description of Artificial Sequence: Synthetic oligonucleotide
agacauggcacaccaacug

SEQ ID NO: 2523544 - RNA, 19 nt, Artificial Sequence
  Description of Artificial Sequence: Synthetic oligonucleotide
uucccuggucccuugauca

SEQ ID NO: 2523545 - RNA, 19 nt, Artificial Sequence
  Description of Artificial Sequence: Synthetic oligonucleotide
ugugcgaaagcugcuacug

SEQ ID NO: 2523546 - RNA, 19 nt, Artificial Sequence
  Description of Artificial Sequence: Synthetic oligonucleotide
gacauggcacaccaacugc

SEQ ID NO: 2523547 - RNA, 19 nt, Artificial Sequence
  Description of Artificial Sequence: Synthetic oligonucleotide
ugacaaccaggccacaggu

SEQ ID NO: 2523548 - RNA, 19 nt, Artificial Sequence
  Description of Artificial Sequence: Synthetic oligonucleotide
ucuggggccuucgugaaag

SEQ ID NO: 2523549 - RNA, 19 nt, Artificial Sequence
  Description of Artificial Sequence: Synthetic oligonucleotide
ucgauaaacuuguaauaua

SEQ ID NO: 2523550 - RNA, 19 nt, Artificial Sequence
  Description of Artificial Sequence: Synthetic oligonucleotide
uucgugaaaggaaguuccc

SEQ ID NO: 2523551 - RNA, 19 nt, Artificial Sequence
  Description of Artificial Sequence: Synthetic oligonucleotide
acaaccaggccacagguuu

SEQ ID NO: 2523552 - RNA, 19 nt, Artificial Sequence
  Description of Artificial Sequence: Synthetic oligonucleotide
caagccaucugugcgaaag

SEQ ID NO: 2523553 - RNA, 19 nt, Artificial Sequence
  Description of Artificial Sequence: Synthetic oligonucleotide
uucccagcuucuaggaggc

SEQ ID NO: 2523554 - RNA, 19 nt, Artificial Sequence
  Description of Artificial Sequence: Synthetic oligonucleotide
acagguuucucuugcuugu

SEQ ID NO: 2523555 - RNA, 19 nt, Artificial Sequence
  Description of Artificial Sequence: Synthetic oligonucleotide
ucugugcgaaagcugcuac

SEQ ID NO: 2523556 - RNA, 19 nt, Artificial Sequence
  Description of Artificial Sequence: Synthetic oligonucleotide
gaagcugcuggaucguuuc

SEQ ID NO: 2523557 - RNA, 19 nt, Artificial Sequence
  Description of Artificial Sequence: Synthetic oligonucleotide
ucuugcuuguccaguucug

SEQ ID NO: 2523558 - RNA, 19 nt, Artificial Sequence
  Description of Artificial Sequence: Synthetic oligonucleotide
ggagacauggcacaccaac

SEQ ID NO: 2523559 - RNA, 19 nt, Artificial Sequence
  Description of Artificial Sequence: Synthetic oligonucleotide
aagccggagacauggcaca

SEQ ID NO: 2523560 - RNA, 19 nt, Artificial Sequence
  Description of Artificial Sequence: Synthetic oligonucleotide
uguccaguucugcuuuccc

SEQ ID NO: 2523561 - RNA, 19 nt, Artificial Sequence
  Description of Artificial Sequence: Synthetic oligonucleotide
guaauauaugcuccaacgu

SEQ ID NO: 2523562 - RNA, 19 nt, Artificial Sequence
  Description of Artificial Sequence: Synthetic oligonucleotide
agaagccggagacauggca

SEQ ID NO: 2523563 - RNA, 19 nt, Artificial Sequence
  Description of Artificial Sequence: Synthetic oligonucleotide
uggcacaccaacugcaaau

SEQ ID NO: 2523564 - RNA, 19 nt, Artificial Sequence
  Description of Artificial Sequence: Synthetic oligonucleotide
ccaucugugcgaaagcugc

SEQ ID NO: 2523565 - RNA, 19 nt, Artificial Sequence
  Description of Artificial Sequence: Synthetic oligonucleotide
ucuccaacugugcguuugc

SEQ ID NO: 2523566 - RNA, 19 nt, Artificial Sequence
  Description of Artificial Sequence: Synthetic oligonucleotide
gaagccggagacauggcac

SEQ ID NO: 2523567 - RNA, 19 nt, Artificial Sequence
  Description of Artificial Sequence: Synthetic oligonucleotide
gcauuucuccaacugugcg

SEQ ID NO: 2523568 - RNA, 19 nt, Artificial Sequence
  Description of Artificial Sequence: Synthetic oligonucleotide
uuucccuggucccuugauc

SEQ ID NO: 2523569 - RNA, 19 nt, Artificial Sequence
  Description of Artificial Sequence: Synthetic oligonucleotide
ugcgaaagcugcuacuguu

SEQ ID NO: 2523570 - RNA, 19 nt, Artificial Sequence
  Description of Artificial Sequence: Synthetic oligonucleotide
cuugcuuguccaguucugc

SEQ ID NO: 2523571 - RNA, 19 nt, Artificial Sequence
  Description of Artificial Sequence: Synthetic oligonucleotide
ggugucauucagaagcugc

SEQ ID NO: 2523572 - RNA, 19 nt, Artificial Sequence
  Description of Artificial Sequence: Synthetic oligonucleotide
uucuccaacugugcguuug

SEQ ID NO: 2523573 - RNA, 19 nt, Artificial Sequence
  Description of Artificial Sequence: Synthetic oligonucleotide
auuucuccaacugugcguu

SEQ ID NO: 2523574 - RNA, 19 nt, Artificial Sequence
  Description of Artificial Sequence: Synthetic oligonucleotide
ucgugaaaggaaguucccu

SEQ ID NO: 2523575 - RNA, 19 nt, Artificial Sequence
  Description of Artificial Sequence: Synthetic oligonucleotide
ucucuugcuuguccaguuc

SEQ ID NO: 2523576 - RNA, 19 nt, Artificial Sequence
  Description of Artificial Sequence: Synthetic oligonucleotide
uucucuugcuuguccaguu

SEQ ID NO: 2523577 - RNA, 19 nt, Artificial Sequence
  Description of Artificial Sequence: Synthetic oligonucleotide
ggccauagagaaccugggg

SEQ ID NO: 2523578 - RNA, 19 nt, Artificial Sequence
  Description of Artificial Sequence: Synthetic oligonucleotide
cugcuuucccagcuucuag

SEQ ID NO: 2523579 - RNA, 19 nt, Artificial Sequence
  Description of Artificial Sequence: Synthetic oligonucleotide
agcuucuaggaggccauag

SEQ ID NO: 2523580 - RNA, 19 nt, Artificial Sequence
  Description of Artificial Sequence: Synthetic oligonucleotide
cuaggaggccauagagaac

SEQ ID NO: 2523581 - RNA, 19 nt, Artificial Sequence
  Description of Artificial Sequence: Synthetic oligonucleotide
uggucccuugaucaguguu

SEQ ID NO: 2523582 - RNA, 19 nt, Artificial Sequence
  Description of Artificial Sequence: Synthetic oligonucleotide
uagaagccggagacauggc

SEQ ID NO: 2523583 - RNA, 19 nt, Artificial Sequence
  Description of Artificial Sequence: Synthetic oligonucleotide
acauggcacaccaacugca

SEQ ID NO: 2523584 - RNA, 19 nt, Artificial Sequence
  Description of Artificial Sequence: Synthetic oligonucleotide
aggccauagagaaccuggg

SEQ ID NO: 2523585 - RNA, 19 nt, Artificial Sequence
  Description of Artificial Sequence: Synthetic oligonucleotide
uuguccaguucugcuuucc

SEQ ID NO: 2523586 - RNA, 19 nt, Artificial Sequence
  Description of Artificial Sequence: Synthetic oligonucleotide
gcacaccaacugcaaaugg

SEQ ID NO: 2523587 - RNA, 19 nt, Artificial Sequence
  Description of Artificial Sequence: Synthetic oligonucleotide
ggaucguuucccugguccc

SEQ ID NO: 2523588 - RNA, 19 nt, Artificial Sequence
  Description of Artificial Sequence: Synthetic oligonucleotide
ucccuggucccuugaucag

SEQ ID NO: 2523589 - RNA, 19 nt, Artificial Sequence
  Description of Artificial Sequence: Synthetic oligonucleotide
agccaucugugcgaaagcu

SEQ ID NO: 2523590 - RNA, 19 nt, Artificial Sequence
  Description of Artificial Sequence: Synthetic oligonucleotide
cgugaaaggaaguucccug

SEQ ID NO: 2523591 - RNA, 19 nt, Artificial Sequence
  Description of Artificial Sequence: Synthetic oligonucleotide
ucugcuuucccagcuucua

SEQ ID NO: 2523592 - RNA, 19 nt, Artificial Sequence
  Description of Artificial Sequence: Synthetic oligonucleotide
gcaucuggggccuucguga

SEQ ID NO: 2523593 - RNA, 19 nt, Artificial Sequence
  Description of Artificial Sequence: Synthetic oligonucleotide
cauuucuccaacugugcgu

SEQ ID NO: 2523594 - RNA, 19 nt, Artificial Sequence
  Description of Artificial Sequence: Synthetic oligonucleotide
ucagaagcugcuggaucgu

SEQ ID NO: 2523595 - RNA, 19 nt, Artificial Sequence
  Description of Artificial Sequence: Synthetic oligonucleotide
gggccuucgugaaaggaag

SEQ ID NO: 2523596 - RNA, 19 nt, Artificial Sequence
  Description of Artificial Sequence: Synthetic oligonucleotide
caaccaggccacagguuuc

SEQ ID NO: 2523597 - RNA, 19 nt, Artificial Sequence
  Description of Artificial Sequence: Synthetic oligonucleotide
ggcauuucuccaacugugc

SEQ ID NO: 2523598 - RNA, 19 nt, Artificial Sequence
  Description of Artificial Sequence: Synthetic oligonucleotide
cuuguccaguucugcuuuc

SEQ ID NO: 2523599 - RNA, 19 nt, Artificial Sequence
  Description of Artificial Sequence: Synthetic oligonucleotide
uggggccuucgugaaagga

SEQ ID NO: 2523600 - RNA, 19 nt, Artificial Sequence
  Description of Artificial Sequence: Synthetic oligonucleotide
aggccacagguuucucuug

SEQ ID NO: 2523601 - RNA, 19 nt, Artificial Sequence
  Description of Artificial Sequence: Synthetic oligonucleotide
ggcaucuggggccuucgug

SEQ ID NO: 2523602 - RNA, 19 nt, Artificial Sequence
  Description of Artificial Sequence: Synthetic oligonucleotide
gagacauggcacaccaacu

SEQ ID NO: 2523603 - RNA, 19 nt, Artificial Sequence
  Description of Artificial Sequence: Synthetic oligonucleotide
cauggcacaccaacugcaa

SEQ ID NO: 2523604 - RNA, 19 nt, Artificial Sequence
  Description of Artificial Sequence: Synthetic oligonucleotide
agccggagacauggcacac

SEQ ID NO: 2523605 - RNA, 19 nt, Artificial Sequence
  Description of Artificial Sequence: Synthetic oligonucleotide
ucguuucccuggucccuug

SEQ ID NO: 2523606 - RNA, 19 nt, Artificial Sequence
  Description of Artificial Sequence: Synthetic oligonucleotide
cugcuggaucguuucccug

SEQ ID NO: 2523607 - RNA, 19 nt, Artificial Sequence
  Description of Artificial Sequence: Synthetic oligonucleotide
gcuucuaggaggccauaga

SEQ ID NO: 2523608 - RNA, 19 nt, Artificial Sequence
  Description of Artificial Sequence: Synthetic oligonucleotide
ggcaggugucauucagaag

SEQ ID NO: 2523609 - RNA, 19 nt, Artificial Sequence
  Description of Artificial Sequence: Synthetic oligonucleotide
gcuuucccagcuucuagga

SEQ ID NO: 2523610 - RNA, 19 nt, Artificial Sequence
  Description of Artificial Sequence: Synthetic oligonucleotide
cuggggccuucgugaaagg

SEQ ID NO: 2523611 - RNA, 19 nt, Artificial Sequence
  Description of Artificial Sequence: Synthetic oligonucleotide
gggcaggugucauucagaa

SEQ ID NO: 2523612 - RNA, 19 nt, Artificial Sequence
  Description of Artificial Sequence: Synthetic oligonucleotide
aucugugcgaaagcugcua

SEQ ID NO: 2523613 - RNA, 19 nt, Artificial Sequence
  Description of Artificial Sequence: Synthetic oligonucleotide
ccuucgugaaaggaaguuc

SEQ ID NO: 2523614 - RNA, 19 nt, Artificial Sequence
  Description of Artificial Sequence: Synthetic oligonucleotide
ccuggucccuugaucagug

SEQ ID NO: 2523615 - RNA, 19 nt, Artificial Sequence
  Description of Artificial Sequence: Synthetic oligonucleotide
ccaguucugcuuucccagc

SEQ ID NO: 2523616 - RNA, 19 nt, Artificial Sequence
  Description of Artificial Sequence: Synthetic oligonucleotide
gugucauucagaagcugcu

SEQ ID NO: 2523617 - RNA, 19 nt, Artificial Sequence
  Description of Artificial Sequence: Synthetic oligonucleotide
cgauaaacuuguaauauau

SEQ ID NO: 2523618 - RNA, 19 nt, Artificial Sequence
  Description of Artificial Sequence: Synthetic oligonucleotide
ccaacugcaaauggccaug

SEQ ID NO: 2523619 - RNA, 19 nt, Artificial Sequence
  Description of Artificial Sequence: Synthetic oligonucleotide
gccaucugugcgaaagcug

SEQ ID NO: 2523620 - RNA, 19 nt, Artificial Sequence
  Description of Artificial Sequence: Synthetic oligonucleotide
caggugucauucagaagcu

SEQ ID NO: 2523621 - RNA, 19 nt, Artificial Sequence
  Description of Artificial Sequence: Synthetic oligonucleotide
uuucuccaacugugcguuu

SEQ ID NO: 2523622 - RNA, 19 nt, Artificial Sequence
  Description of Artificial Sequence: Synthetic oligonucleotide
gaucguuucccuggucccu

SEQ ID NO: 2523623 - RNA, 19 nt, Artificial Sequence
  Description of Artificial Sequence: Synthetic oligonucleotide
caucuggggccuucgugaa

SEQ ID NO: 2523624 - RNA, 19 nt, Artificial Sequence
  Description of Artificial Sequence: Synthetic oligonucleotide
aucuggggccuucgugaaa

SEQ ID NO: 2523625 - RNA, 19 nt, Artificial Sequence
  Description of Artificial Sequence: Synthetic oligonucleotide
ggaggccauagagaaccug

SEQ ID NO: 2523626 - RNA, 19 nt, Artificial Sequence
  Description of Artificial Sequence: Synthetic oligonucleotide
aucguuucccuggucccuu

SEQ ID NO: 2523627 - RNA, 19 nt, Artificial Sequence
  Description of Artificial Sequence: Synthetic oligonucleotide
cuggaucguuucccugguc

SEQ ID NO: 2523628 - RNA, 19 nt, Artificial Sequence
  Description of Artificial Sequence: Synthetic oligonucleotide
gugcgaaagcugcuacugu

SEQ ID NO: 2523629 - RNA, 19 nt, Artificial Sequence
  Description of Artificial Sequence: Synthetic oligonucleotide
accaggccacagguuucuc

SEQ ID NO: 2523630 - RNA, 19 nt, Artificial Sequence
  Description of Artificial Sequence: Synthetic oligonucleotide
caguucugcuuucccagcu

SEQ ID NO: 2523631 - RNA, 19 nt, Artificial Sequence
  Description of Artificial Sequence: Synthetic oligonucleotide
ggggccuucgugaaaggaa

SEQ ID NO: 2523632 - RNA, 19 nt, Artificial Sequence
  Description of Artificial Sequence: Synthetic oligonucleotide
ccggagacauggcacacca

SEQ ID NO: 2523633 - RNA, 19 nt, Artificial Sequence
  Description of Artificial Sequence: Synthetic oligonucleotide
cugugcgaaagcugcuacu

SEQ ID NO: 2523634 - RNA, 19 nt, Artificial Sequence
  Description of Artificial Sequence: Synthetic oligonucleotide
caggccacagguuucucuu

SEQ ID NO: 2523635 - RNA, 19 nt, Artificial Sequence
  Description of Artificial Sequence: Synthetic oligonucleotide
acuugacaaccaggccaca

SEQ ID NO: 2523636 - RNA, 19 nt, Artificial Sequence
  Description of Artificial Sequence: Synthetic oligonucleotide
cauucagaagcugcuggau

SEQ ID NO: 2523637 - RNA, 19 nt, Artificial Sequence
  Description of Artificial Sequence: Synthetic oligonucleotide
caucugugcgaaagcugcu

SEQ ID NO: 2523638 - RNA, 19 nt, Artificial Sequence
  Description of Artificial Sequence: Synthetic oligonucleotide
guuucccuggucccuugau

SEQ ID NO: 2523639 - RNA, 19 nt, Artificial Sequence
  Description of Artificial Sequence: Synthetic oligonucleotide
ucccagcuucuaggaggcc

SEQ ID NO: 2523640 - RNA, 19 nt, Artificial Sequence
  Description of Artificial Sequence: Synthetic oligonucleotide
gcugcuggaucguuucccu

SEQ ID NO: 2523641 - RNA, 19 nt, Artificial Sequence
  Description of Artificial Sequence: Synthetic oligonucleotide
aggaggccauagagaaccu

SEQ ID NO: 2523642 - RNA, 19 nt, Artificial Sequence
  Description of Artificial Sequence: Synthetic oligonucleotide
ggggcaggugucauucaga

SEQ ID NO: 2523643 - RNA, 19 nt, Artificial Sequence
  Description of Artificial Sequence: Synthetic oligonucleotide
gccggagacauggcacacc

SEQ ID NO: 2523644 - RNA, 19 nt, Artificial Sequence
  Description of Artificial Sequence: Synthetic oligonucleotide
gacaaccaggccacagguu

SEQ ID NO: 2523645 - RNA, 19 nt, Artificial Sequence
  Description of Artificial Sequence: Synthetic oligonucleotide
gcuggaucguuucccuggu

SEQ ID NO: 2523646 - RNA, 19 nt, Artificial Sequence
  Description of Artificial Sequence: Synthetic oligonucleotide
gccacagguuucucuugcu

SEQ ID NO: 2523647 - RNA, 19 nt, Artificial Sequence
  Description of Artificial Sequence: Synthetic oligonucleotide
cuggucccuugaucagugu

SEQ ID NO: 2523648 - RNA, 19 nt, Artificial Sequence
  Description of Artificial Sequence: Synthetic oligonucleotide
ccaggccacagguuucucu

SEQ ID NO: 2523649 - RNA, 19 nt, Artificial Sequence
  Description of Artificial Sequence: Synthetic oligonucleotide
gcgaaagcugcuacuguuu

SEQ ID NO: 2523650 - RNA, 19 nt, Artificial Sequence
  Description of Artificial Sequence: Synthetic oligonucleotide
gccuucgugaaaggaaguu

SEQ ID NO: 2523651 - RNA, 19 nt, Artificial Sequence
  Description of Artificial Sequence: Synthetic oligonucleotide
ggccuucgugaaaggaagu

SEQ ID NO: 2523652 - RNA, 19 nt, Artificial Sequence
  Description of Artificial Sequence: Synthetic oligonucleotide
cagcuucuaggaggccaua

SEQ ID NO: 2523653 - RNA, 19 nt, Artificial Sequence
  Description of Artificial Sequence: Synthetic oligonucleotide
cguuucccuggucccuuga

SEQ ID NO: 2523654 - RNA, 19 nt, Artificial Sequence
  Description of Artificial Sequence: Synthetic oligonucleotide
ccaagccaucugugcgaaa

SEQ ID NO: 2523655 - RNA, 19 nt, Artificial Sequence
  Description of Artificial Sequence: Synthetic oligonucleotide
cccuggucccuugaucagu

SEQ ID NO: 2523656 - RNA, 19 nt, Artificial Sequence
  Description of Artificial Sequence: Synthetic oligonucleotide
cggagacauggcacaccaa

SEQ ID NO: 2523657 - RNA, 19 nt, Artificial Sequence
  Description of Artificial Sequence: Synthetic oligonucleotide
auaguugcgaacuccaucc

SEQ ID NO: 2523658 - RNA, 19 nt, Artificial Sequence
  Description of Artificial Sequence: Synthetic oligonucleotide
uuuaagcucauccagggag

SEQ ID NO: 2523659 - RNA, 19 nt, Artificial Sequence
  Description of Artificial Sequence: Synthetic oligonucleotide
auaggcuuuaagcucaucc

SEQ ID NO: 2523660 - RNA, 19 nt, Artificial Sequence
  Description of Artificial Sequence: Synthetic oligonucleotide
uguacauccaccaucgacc

SEQ ID NO: 2523661 - RNA, 19 nt, Artificial Sequence
  Description of Artificial Sequence: Synthetic oligonucleotide
ucaucauucgaacaaacug

SEQ ID NO: 2523662 - RNA, 19 nt, Artificial Sequence
  Description of Artificial Sequence: Synthetic oligonucleotide
auuaacgugguucuguuuc

SEQ ID NO: 2523663 - RNA, 19 nt, Artificial Sequence
  Description of Artificial Sequence: Synthetic oligonucleotide
uuuacgaucuucauaaguc

SEQ ID NO: 2523664 - RNA, 19 nt, Artificial Sequence
  Description of Artificial Sequence: Synthetic oligonucleotide
gaaguuccgagccugauag

SEQ ID NO: 2523665 - RNA, 19 nt, Artificial Sequence
  Description of Artificial Sequence: Synthetic oligonucleotide
ugaacugaaagucucuggc

SEQ ID NO: 2523666 - RNA, 19 nt, Artificial Sequence
  Description of Artificial Sequence: Synthetic oligonucleotide
uccuuuacgaucuucauaa

SEQ ID NO: 2523667 - RNA, 19 nt, Artificial Sequence
  Description of Artificial Sequence: Synthetic oligonucleotide
uuggugauaggcuuuaagc

SEQ ID NO: 2523668 - RNA, 19 nt, Artificial Sequence
  Description of Artificial Sequence: Synthetic oligonucleotide
ucgaacaaacuguacaucc

SEQ ID NO: 2523669 - RNA, 19 nt, Artificial Sequence
  Description of Artificial Sequence: Synthetic oligonucleotide
uucauaagucccacgaugc

SEQ ID NO: 2523670 - RNA, 19 nt, Artificial Sequence
  Description of Artificial Sequence: Synthetic oligonucleotide
agagccuucauuaacgugg

SEQ ID NO: 2523671 - RNA, 19 nt, Artificial Sequence
  Description of Artificial Sequence: Synthetic oligonucleotide
uacaccuuucucuagccgg

SEQ ID NO: 2523672 - RNA, 19 nt, Artificial Sequence
  Description of Artificial Sequence: Synthetic oligonucleotide
uugcuaugguagaagaagg

SEQ ID NO: 2523673 - RNA, 19 nt, Artificial Sequence
  Description of Artificial Sequence: Synthetic oligonucleotide
aagauaaccggacaagcaa

SEQ ID NO: 2523674 - RNA, 19 nt, Artificial Sequence
  Description of Artificial Sequence: Synthetic oligonucleotide
aguuuucgguuuuaguacg

SEQ ID NO: 2523675 - RNA, 19 nt, Artificial Sequence
  Description of Artificial Sequence: Synthetic oligonucleotide
aacaaacuguacauccacc

SEQ ID NO: 2523676 - RNA, 19 nt, Artificial Sequence
  Description of Artificial Sequence: Synthetic oligonucleotide
aguugcuuacauucuugcc

SEQ ID NO: 2523677 - RNA, 19 nt, Artificial Sequence
  Description of Artificial Sequence: Synthetic oligonucleotide
gaacugaaagucucuggcg

SEQ ID NO: 2523678 - RNA, 19 nt, Artificial Sequence
  Description of Artificial Sequence: Synthetic oligonucleotide
guugcuaugguagaagaag

SEQ ID NO: 2523679 - RNA, 19 nt, Artificial Sequence
  Description of Artificial Sequence: Synthetic oligonucleotide
uuacgaucuucauaagucc

SEQ ID NO: 2523680 - RNA, 19 nt, Artificial Sequence
  Description of Artificial Sequence: Synthetic oligonucleotide
ucugauagcuccuucuugu

SEQ ID NO: 2523681 - RNA, 19 nt, Artificial Sequence
  Description of Artificial Sequence: Synthetic oligonucleotide
gaguuuucgguuuuaguac

SEQ ID NO: 2523682 - RNA, 19 nt, Artificial Sequence
  Description of Artificial Sequence: Synthetic oligonucleotide
agauccucgaugcugaacu

SEQ ID NO: 2523683 - RNA, 19 nt, Artificial Sequence
  Description of Artificial Sequence: Synthetic oligonucleotide
uucaucagccaguaguugc

SEQ ID NO: 2523684 - RNA, 19 nt, Artificial Sequence
  Description of Artificial Sequence: Synthetic oligonucleotide
aguagagccuucauuaacg

SEQ ID NO: 2523685 - RNA, 19 nt, Artificial Sequence
  Description of Artificial Sequence: Synthetic oligonucleotide
uggugauaggcuuuaagcu

SEQ ID NO: 2523686 - RNA, 19 nt, Artificial Sequence
  Description of Artificial Sequence: Synthetic oligonucleotide
aucaguagagccuucauua

SEQ ID NO: 2523687 - RNA, 19 nt, Artificial Sequence
  Description of Artificial Sequence: Synthetic oligonucleotide
uuuucucaaacugugugug

SEQ ID NO: 2523688 - RNA, 19 nt, Artificial Sequence
  Description of Artificial Sequence: Synthetic oligonucleotide
ucgaugcugaacuucaugu

SEQ ID NO: 2523689 - RNA, 19 nt, Artificial Sequence
  Description of Artificial Sequence: Synthetic oligonucleotide
uaaccggacaagcaagaag

SEQ ID NO: 2523690 - RNA, 19 nt, Artificial Sequence
  Description of Artificial Sequence: Synthetic oligonucleotide
uuugagauccucgaugcug

SEQ ID NO: 2523691 - RNA, 19 nt, Artificial Sequence
  Description of Artificial Sequence: Synthetic oligonucleotide
uacgaucuucauaaguccc

SEQ ID NO: 2523692 - RNA, 19 nt, Artificial Sequence
  Description of Artificial Sequence: Synthetic oligonucleotide
agcgcuucaucauucgaac

SEQ ID NO: 2523693 - RNA, 19 nt, Artificial Sequence
  Description of Artificial Sequence: Synthetic oligonucleotide
uuuucugauagcuccuucu

SEQ ID NO: 2523694 - RNA, 19 nt, Artificial Sequence
  Description of Artificial Sequence: Synthetic oligonucleotide
cugaacuucaugucuacac

SEQ ID NO: 2523695 - RNA, 19 nt, Artificial Sequence
  Description of Artificial Sequence: Synthetic oligonucleotide
gagguugaagucuucugag

SEQ ID NO: 2523696 - RNA, 19 nt, Artificial Sequence
  Description of Artificial Sequence: Synthetic oligonucleotide
gguugaagucuucugaggg

SEQ ID NO: 2523697 - RNA, 19 nt, Artificial Sequence
  Description of Artificial Sequence: Synthetic oligonucleotide
uuaaggggccaccaguagc

SEQ ID NO: 2523698 - RNA, 19 nt, Artificial Sequence
  Description of Artificial Sequence: Synthetic oligonucleotide
cuucauaagucccacgaug

SEQ ID NO: 2523699 - RNA, 19 nt, Artificial Sequence
  Description of Artificial Sequence: Synthetic oligonucleotide
aaggcuuccuccuccaacu

SEQ ID NO: 2523700 - RNA, 19 nt, Artificial Sequence
  Description of Artificial Sequence: Synthetic oligonucleotide
ugaagauaaccggacaagc

SEQ ID NO: 2523701 - RNA, 19 nt, Artificial Sequence
  Description of Artificial Sequence: Synthetic oligonucleotide
uguucacuccaucaguaga

SEQ ID NO: 2523702 - RNA, 19 nt, Artificial Sequence
  Description of Artificial Sequence: Synthetic oligonucleotide
acgugguucuguuuccucc

SEQ ID NO: 2523703 - RNA, 19 nt, Artificial Sequence
  Description of Artificial Sequence: Synthetic oligonucleotide
uggguaagccuccuuuacg

SEQ ID NO: 2523704 - RNA, 19 nt, Artificial Sequence
  Description of Artificial Sequence: Synthetic oligonucleotide
ucgagucaaaggcugaacu

SEQ ID NO: 2523705 - RNA, 19 nt, Artificial Sequence
  Description of Artificial Sequence: Synthetic oligonucleotide
uguccucuuugcuggaugg

SEQ ID NO: 2523706 - RNA, 19 nt, Artificial Sequence
  Description of Artificial Sequence: Synthetic oligonucleotide
uaggcuuuaagcucaucca

SEQ ID NO: 2523707 - RNA, 19 nt, Artificial Sequence
  Description of Artificial Sequence: Synthetic oligonucleotide
uugagauccucgaugcuga

SEQ ID NO: 2523708 - RNA, 19 nt, Artificial Sequence
  Description of Artificial Sequence: Synthetic oligonucleotide
uuuaaggggccaccaguag

SEQ ID NO: 2523709 - RNA, 19 nt, Artificial Sequence
  Description of Artificial Sequence: Synthetic oligonucleotide
ugcuaugguagaagaaggc

SEQ ID NO: 2523710 - RNA, 19 nt, Artificial Sequence
  Description of Artificial Sequence: Synthetic oligonucleotide
cauucgaacaaacuguaca

SEQ ID NO: 2523711 - RNA, 19 nt, Artificial Sequence
  Description of Artificial Sequence: Synthetic oligonucleotide
uuaagcucauccagggaga

SEQ ID NO: 2523712 - RNA, 19 nt, Artificial Sequence
  Description of Artificial Sequence: Synthetic oligonucleotide
gauaguugcgaacuccauc

SEQ ID NO: 2523713 - RNA, 19 nt, Artificial Sequence
  Description of Artificial Sequence: Synthetic oligonucleotide
uuuuaaggggccaccagua

SEQ ID NO: 2523714 - RNA, 19 nt, Artificial Sequence
  Description of Artificial Sequence: Synthetic oligonucleotide
uuaggguuguccucuuugc

SEQ ID NO: 2523715 - RNA, 19 nt, Artificial Sequence
  Description of Artificial Sequence: Synthetic oligonucleotide
uucugauagcuccuucuug

SEQ ID NO: 2523716 - RNA, 19 nt, Artificial Sequence
  Description of Artificial Sequence: Synthetic oligonucleotide
uccagggagaugaagcgcu

SEQ ID NO: 2523717 - RNA, 19 nt, Artificial Sequence
  Description of Artificial Sequence: Synthetic oligonucleotide
uggaugggucguaaugggg

SEQ ID NO: 2523718 - RNA, 19 nt, Artificial Sequence
  Description of Artificial Sequence: Synthetic oligonucleotide
uucugacuucaucagccag

SEQ ID NO: 2523719 - RNA, 19 nt, Artificial Sequence
  Description of Artificial Sequence: Synthetic oligonucleotide
uucgguuuuaguacguuuu

SEQ ID NO: 2523720 - RNA, 19 nt, Artificial Sequence
  Description of Artificial Sequence: Synthetic oligonucleotide
ugaagcgcuucaucauucg

SEQ ID NO: 2523721 - RNA, 19 nt, Artificial Sequence
  Description of Artificial Sequence: Synthetic oligonucleotide
ucuacaccuuucucuagcc

SEQ ID NO: 2523722 - RNA, 19 nt, Artificial Sequence
  Description of Artificial Sequence: Synthetic oligonucleotide
uguggucuggguaagccuc

SEQ ID NO: 2523723 - RNA, 19 nt, Artificial Sequence
  Description of Artificial Sequence: Synthetic oligonucleotide
agguugaagucuucugagg

SEQ ID NO: 2523724 - RNA, 19 nt, Artificial Sequence
  Description of Artificial Sequence: Synthetic oligonucleotide
aacgugguucuguuuccuc

SEQ ID NO: 2523725 - RNA, 19 nt, Artificial Sequence
  Description of Artificial Sequence: Synthetic oligonucleotide
ucauaagucccacgaugcc

SEQ ID NO: 2523726 - RNA, 19 nt, Artificial Sequence
  Description of Artificial Sequence: Synthetic oligonucleotide
uucauuaacgugguucugu

SEQ ID NO: 2523727 - RNA, 19 nt, Artificial Sequence
  Description of Artificial Sequence: Synthetic oligonucleotide
uuaacgugguucuguuucc

SEQ ID NO: 2523728 - RNA, 19 nt, Artificial Sequence
  Description of Artificial Sequence: Synthetic oligonucleotide
accauuuaggguuguccuc

SEQ ID NO: 2523729 - RNA, 19 nt, Artificial Sequence
  Description of Artificial Sequence: Synthetic oligonucleotide
ugauagcuccuucuugucu

SEQ ID NO: 2523730 - RNA, 19 nt, Artificial Sequence
  Description of Artificial Sequence: Synthetic oligonucleotide
acugaaagucucuggcgag

SEQ ID NO: 2523731 - RNA, 19 nt, Artificial Sequence
  Description of Artificial Sequence: Synthetic oligonucleotide
uuccgagccugauaguugc

SEQ ID NO: 2523732 - RNA, 19 nt, Artificial Sequence
  Description of Artificial Sequence: Synthetic oligonucleotide
uuguucacuccaucaguag

SEQ ID NO: 2523733 - RNA, 19 nt, Artificial Sequence
  Description of Artificial Sequence: Synthetic oligonucleotide
uugaagucuucugagggcu

SEQ ID NO: 2523734 - RNA, 19 nt, Artificial Sequence
  Description of Artificial Sequence: Synthetic oligonucleotide
agcugguguauuuucugag

SEQ ID NO: 2523735 - RNA, 19 nt, Artificial Sequence
  Description of Artificial Sequence: Synthetic oligonucleotide
auuuucugaguuuucgguu

SEQ ID NO: 2523736 - RNA, 19 nt, Artificial Sequence
  Description of Artificial Sequence: Synthetic oligonucleotide
acauucuugccacaguuuu

SEQ ID NO: 2523737 - RNA, 19 nt, Artificial Sequence
  Description of Artificial Sequence: Synthetic oligonucleotide
gaugcugaacuucaugucu

SEQ ID NO: 2523738 - RNA, 19 nt, Artificial Sequence
  Description of Artificial Sequence: Synthetic oligonucleotide
agcaagaagcaacucuugu

SEQ ID NO: 2523739 - RNA, 19 nt, Artificial Sequence
  Description of Artificial Sequence: Synthetic oligonucleotide
cuguacauccaccaucgac

SEQ ID NO: 2523740 - RNA, 19 nt, Artificial Sequence
  Description of Artificial Sequence: Synthetic oligonucleotide
ggaggcugaagauaaccgg

SEQ ID NO: 2523741 - RNA, 19 nt, Artificial Sequence
  Description of Artificial Sequence: Synthetic oligonucleotide
agcagccccagucagccuc

SEQ ID NO: 2523742 - RNA, 19 nt, Artificial Sequence
  Description of Artificial Sequence: Synthetic oligonucleotide
gaugccuggcuguuugcag

SEQ ID NO: 2523743 - RNA, 19 nt, Artificial Sequence
  Description of Artificial Sequence: Synthetic oligonucleotide
ucacuccaucaguagagcc

SEQ ID NO: 2523744 - RNA, 19 nt, Artificial Sequence
  Description of Artificial Sequence: Synthetic oligonucleotide
cuggaugggucguaauggg

SEQ ID NO: 2523745 - RNA, 19 nt, Artificial Sequence
  Description of Artificial Sequence: Synthetic oligonucleotide
ugguucugacuucaucagc

SEQ ID NO: 2523746 - RNA, 19 nt, Artificial Sequence
  Description of Artificial Sequence: Synthetic oligonucleotide
gaagauaaccggacaagca

SEQ ID NO: 2523747 - RNA, 19 nt, Artificial Sequence
  Description of Artificial Sequence: Synthetic oligonucleotide
agauaaccggacaagcaag

SEQ ID NO: 2523748 - RNA, 19 nt, Artificial Sequence
  Description of Artificial Sequence: Synthetic oligonucleotide
uguguggucuggguaagcc

SEQ ID NO: 2523749 - RNA, 19 nt, Artificial Sequence
  Description of Artificial Sequence: Synthetic oligonucleotide
gucuacaccuuucucuagc

SEQ ID NO: 2523750 - RNA, 19 nt, Artificial Sequence
  Description of Artificial Sequence: Synthetic oligonucleotide
ucauucgaacaaacuguac

SEQ ID NO: 2523751 - RNA, 19 nt, Artificial Sequence
  Description of Artificial Sequence: Synthetic oligonucleotide
ucagccaguaguugcuuac

SEQ ID NO: 2523752 - RNA, 19 nt, Artificial Sequence
  Description of Artificial Sequence: Synthetic oligonucleotide
cugaagauaaccggacaag

SEQ ID NO: 2523753 - RNA, 19 nt, Artificial Sequence
  Description of Artificial Sequence: Synthetic oligonucleotide
ucuucauaagucccacgau

SEQ ID NO: 2523754 - RNA, 19 nt, Artificial Sequence
  Description of Artificial Sequence: Synthetic oligonucleotide
ggugauaggcuuuaagcuc

SEQ ID NO: 2523755 - RNA, 19 nt, Artificial Sequence
  Description of Artificial Sequence: Synthetic oligonucleotide
uucucuagccggcuuucug

SEQ ID NO: 2523756 - RNA, 19 nt, Artificial Sequence
  Description of Artificial Sequence: Synthetic oligonucleotide
aguaguugcuuacauucuu

SEQ ID NO: 2523757 - RNA, 19 nt, Artificial Sequence
  Description of Artificial Sequence: Synthetic oligonucleotide
aggaggcugaagauaaccg

SEQ ID NO: 2523758 - RNA, 19 nt, Artificial Sequence
  Description of Artificial Sequence: Synthetic oligonucleotide
aaggcugaacugaaagucu

SEQ ID NO: 2523759 - RNA, 19 nt, Artificial Sequence
  Description of Artificial Sequence: Synthetic oligonucleotide
guugcgaacuccaucccag

SEQ ID NO: 2523760 - RNA, 19 nt, Artificial Sequence
  Description of Artificial Sequence: Synthetic oligonucleotide
ccaccaguagcuuuguggg

SEQ ID NO: 2523761 - RNA, 19 nt, Artificial Sequence
  Description of Artificial Sequence: Synthetic oligonucleotide
aacuguguguggucugggu

SEQ ID NO: 2523762 - RNA, 19 nt, Artificial Sequence
  Description of Artificial Sequence: Synthetic oligonucleotide
uugggcugugcuuuugaga

SEQ ID NO: 2523763 - RNA, 19 nt, Artificial Sequence
  Description of Artificial Sequence: Synthetic oligonucleotide
accaucgaccauuuagggu

SEQ ID NO: 2523764 - RNA, 19 nt, Artificial Sequence
  Description of Artificial Sequence: Synthetic oligonucleotide
ugcgaacuccaucccagca

SEQ ID NO: 2523765 - RNA, 19 nt, Artificial Sequence
  Description of Artificial Sequence: Synthetic oligonucleotide
aaacuguguguggucuggg

SEQ ID NO: 2523766 - RNA, 19 nt, Artificial Sequence
  Description of Artificial Sequence: Synthetic oligonucleotide
caagaagcaacucuugucu

SEQ ID NO: 2523767 - RNA, 19 nt, Artificial Sequence
  Description of Artificial Sequence: Synthetic oligonucleotide
ucaguagagccuucauuaa

SEQ ID NO: 2523768 - RNA, 19 nt, Artificial Sequence
  Description of Artificial Sequence: Synthetic oligonucleotide
gaacuucaugucuacaccu

SEQ ID NO: 2523769 - RNA, 19 nt, Artificial Sequence
  Description of Artificial Sequence: Synthetic oligonucleotide
uuuugagauccucgaugcu

SEQ ID NO: 2523770 - RNA, 19 nt, Artificial Sequence
  Description of Artificial Sequence: Synthetic oligonucleotide
caaacuguguguggucugg

SEQ ID NO: 2523771 - RNA, 19 nt, Artificial Sequence
  Description of Artificial Sequence: Synthetic oligonucleotide
cuacaccuuucucuagccg

SEQ ID NO: 2523772 - RNA, 19 nt, Artificial Sequence
  Description of Artificial Sequence: Synthetic oligonucleotide
cucggcauguucucucugc

SEQ ID NO: 2523773 - RNA, 19 nt, Artificial Sequence
  Description of Artificial Sequence: Synthetic oligonucleotide
agaugaagcgcuucaucau

SEQ ID NO: 2523774 - RNA, 19 nt, Artificial Sequence
  Description of Artificial Sequence: Synthetic oligonucleotide
guaguugcuuacauucuug

SEQ ID NO: 2523775 - RNA, 19 nt, Artificial Sequence
  Description of Artificial Sequence: Synthetic oligonucleotide
ucauuaacgugguucuguu

SEQ ID NO: 2523776 - RNA, 19 nt, Artificial Sequence
  Description of Artificial Sequence: Synthetic oligonucleotide
guaagccuccuuuacgauc

SEQ ID NO: 2523777 - RNA, 19 nt, Artificial Sequence
  Description of Artificial Sequence: Synthetic oligonucleotide
aguugcgaacuccauccca

SEQ ID NO: 2523778 - RNA, 19 nt, Artificial Sequence
  Description of Artificial Sequence: Synthetic oligonucleotide
uaggguuguccucuuugcu

SEQ ID NO: 2523779 - RNA, 19 nt, Artificial Sequence
  Description of Artificial Sequence: Synthetic oligonucleotide
accaguagcuuugugggcu

SEQ ID NO: 2523780 - RNA, 19 nt, Artificial Sequence
  Description of Artificial Sequence: Synthetic oligonucleotide
ccaccaucgaccauuuagg

SEQ ID NO: 2523781 - RNA, 19 nt, Artificial Sequence
  Description of Artificial Sequence: Synthetic oligonucleotide
ugucuacaccuuucucuag

SEQ ID NO: 2523782 - RNA, 19 nt, Artificial Sequence
  Description of Artificial Sequence: Synthetic oligonucleotide
caguagagccuucauuaac

SEQ ID NO: 2523783 - RNA, 19 nt, Artificial Sequence
  Description of Artificial Sequence: Synthetic oligonucleotide
cugauaguugcgaacucca

SEQ ID NO: 2523784 - RNA, 19 nt, Artificial Sequence
  Description of Artificial Sequence: Synthetic oligonucleotide
augaagcgcuucaucauuc

SEQ ID NO: 2523785 - RNA, 19 nt, Artificial Sequence
  Description of Artificial Sequence: Synthetic oligonucleotide
ucucucugcaggaggcuga

SEQ ID NO: 2523786 - RNA, 19 nt, Artificial Sequence
  Description of Artificial Sequence: Synthetic oligonucleotide
gaggcugaagauaaccgga

SEQ ID NO: 2523787 - RNA, 19 nt, Artificial Sequence
  Description of Artificial Sequence: Synthetic oligonucleotide
gauaaccggacaagcaaga

SEQ ID NO: 2523788 - RNA, 19 nt, Artificial Sequence
  Description of Artificial Sequence: Synthetic oligonucleotide
gcuggaugggucguaaugg

SEQ ID NO: 2523789 - RNA, 19 nt, Artificial Sequence
  Description of Artificial Sequence: Synthetic oligonucleotide
gugauaggcuuuaagcuca

SEQ ID NO: 2523790 - RNA, 19 nt, Artificial Sequence
  Description of Artificial Sequence: Synthetic oligonucleotide
ucguaauggggauuauuuu

SEQ ID NO: 2523791 - RNA, 19 nt, Artificial Sequence
  Description of Artificial Sequence: Synthetic oligonucleotide
uucacuccaucaguagagc

SEQ ID NO: 2523792 - RNA, 19 nt, Artificial Sequence
  Description of Artificial Sequence: Synthetic oligonucleotide
ucuagcuuagcugguguau

SEQ ID NO: 2523793 - RNA, 19 nt, Artificial Sequence
  Description of Artificial Sequence: Synthetic oligonucleotide
gaccauuuaggguuguccu

SEQ ID NO: 2523794 - RNA, 19 nt, Artificial Sequence
  Description of Artificial Sequence: Synthetic oligonucleotide
ugucugggccagcagcccc

SEQ ID NO: 2523795 - RNA, 19 nt, Artificial Sequence
  Description of Artificial Sequence: Synthetic oligonucleotide
agccugauaguugcgaacu

SEQ ID NO: 2523796 - RNA, 19 nt, Artificial Sequence
  Description of Artificial Sequence: Synthetic oligonucleotide
aagcgcuucaucauucgaa

SEQ ID NO: 2523797 - RNA, 19 nt, Artificial Sequence
  Description of Artificial Sequence: Synthetic oligonucleotide
uggcgagugaagagaguca

SEQ ID NO: 2523798 - RNA, 19 nt, Artificial Sequence
  Description of Artificial Sequence: Synthetic oligonucleotide
ucucaaacugugugugguc

SEQ ID NO: 2523799 - RNA, 19 nt, Artificial Sequence
  Description of Artificial Sequence: Synthetic oligonucleotide
cuggcgagugaagagaguc

SEQ ID NO: 2523800 - RNA, 19 nt, Artificial Sequence
  Description of Artificial Sequence: Synthetic oligonucleotide
uaguugcgaacuccauccc

SEQ ID NO: 2523801 - RNA, 19 nt, Artificial Sequence
  Description of Artificial Sequence: Synthetic oligonucleotide
ugcuuuugagauccucgau

SEQ ID NO: 2523802 - RNA, 19 nt, Artificial Sequence
  Description of Artificial Sequence: Synthetic oligonucleotide
ucuggguaagccuccuuua

SEQ ID NO: 2523803 - RNA, 19 nt, Artificial Sequence
  Description of Artificial Sequence: Synthetic oligonucleotide
aagucccacgaugccuggc

SEQ ID NO: 2523804 - RNA, 19 nt, Artificial Sequence
  Description of Artificial Sequence: Synthetic oligonucleotide
ggcugugcuuuugagaucc

SEQ ID NO: 2523805 - RNA, 19 nt, Artificial Sequence
  Description of Artificial Sequence: Synthetic oligonucleotide
gagccugauaguugcgaac

SEQ ID NO: 2523806 - RNA, 19 nt, Artificial Sequence
  Description of Artificial Sequence: Synthetic oligonucleotide
cuuguucacuccaucagua

SEQ ID NO: 2523807 - RNA, 19 nt, Artificial Sequence
  Description of Artificial Sequence: Synthetic oligonucleotide
ccugaggaaguuccgagcc

SEQ ID NO: 2523808 - RNA, 19 nt, Artificial Sequence
  Description of Artificial Sequence: Synthetic oligonucleotide
ugcugaacuucaugucuac

SEQ ID NO: 2523809 - RNA, 19 nt, Artificial Sequence
  Description of Artificial Sequence: Synthetic oligonucleotide
agucccacgaugccuggcu

SEQ ID NO: 2523810 - RNA, 19 nt, Artificial Sequence
  Description of Artificial Sequence: Synthetic oligonucleotide
ugguguauuuucugaguuu

SEQ ID NO: 2523811 - RNA, 19 nt, Artificial Sequence
  Description of Artificial Sequence: Synthetic oligonucleotide
guacauccaccaucgacca

SEQ ID NO: 2523812 - RNA, 19 nt, Artificial Sequence
  Description of Artificial Sequence: Synthetic oligonucleotide
uccucuuugcuggaugggu

SEQ ID NO: 2523813 - RNA, 19 nt, Artificial Sequence
  Description of Artificial Sequence: Synthetic oligonucleotide
cuggguaagccuccuuuac

SEQ ID NO: 2523814 - RNA, 19 nt, Artificial Sequence
  Description of Artificial Sequence: Synthetic oligonucleotide
uucucucugcaggaggcug

SEQ ID NO: 2523815 - RNA, 19 nt, Artificial Sequence
  Description of Artificial Sequence: Synthetic oligonucleotide
acauccaccaucgaccauu

SEQ ID NO: 2523816 - RNA, 19 nt, Artificial Sequence
  Description of Artificial Sequence: Synthetic oligonucleotide
uccaucaguagagccuuca

SEQ ID NO: 2523817 - RNA, 19 nt, Artificial Sequence
  Description of Artificial Sequence: Synthetic oligonucleotide
ugaagagagucaugcuuuu

SEQ ID NO: 2523818 - RNA, 19 nt, Artificial Sequence
  Description of Artificial Sequence: Synthetic oligonucleotide
cuuuacgaucuucauaagu

SEQ ID NO: 2523819 - RNA, 19 nt, Artificial Sequence
  Description of Artificial Sequence: Synthetic oligonucleotide
uguguguggucuggguaag

SEQ ID NO: 2523820 - RNA, 19 nt, Artificial Sequence
  Description of Artificial Sequence: Synthetic oligonucleotide
cagcaugcugucugcuugg

SEQ ID NO: 2523821 - RNA, 19 nt, Artificial Sequence
  Description of Artificial Sequence: Synthetic oligonucleotide
uccgagccugauaguugcg

SEQ ID NO: 2523822 - RNA, 19 nt, Artificial Sequence
  Description of Artificial Sequence: Synthetic oligonucleotide
gaagcgcuucaucauucga

SEQ ID NO: 2523823 - RNA, 19 nt, Artificial Sequence
  Description of Artificial Sequence: Synthetic oligonucleotide
aguuccgagccugauaguu

SEQ ID NO: 2523824 - RNA, 19 nt, Artificial Sequence
  Description of Artificial Sequence: Synthetic oligonucleotide
caguugcuaugguagaaga

SEQ ID NO: 2523825 - RNA, 19 nt, Artificial Sequence
  Description of Artificial Sequence: Synthetic oligonucleotide
cgagugaagagagucaugc

SEQ ID NO: 2523826 - RNA, 19 nt, Artificial Sequence
  Description of Artificial Sequence: Synthetic oligonucleotide
ggguaagccuccuuuacga

SEQ ID NO: 2523827 - RNA, 19 nt, Artificial Sequence
  Description of Artificial Sequence: Synthetic oligonucleotide
uugcgaacuccaucccagc

SEQ ID NO: 2523828 - RNA, 19 nt, Artificial Sequence
  Description of Artificial Sequence: Synthetic oligonucleotide
uuugcuggaugggucguaa

SEQ ID NO: 2523829 - RNA, 19 nt, Artificial Sequence
  Description of Artificial Sequence: Synthetic oligonucleotide
uuuggagguugaagucuuc

SEQ ID NO: 2523830 - RNA, 19 nt, Artificial Sequence
  Description of Artificial Sequence: Synthetic oligonucleotide
ugggucguaauggggauua

SEQ ID NO: 2523831 - RNA, 19 nt, Artificial Sequence
  Description of Artificial Sequence: Synthetic oligonucleotide
cugauagcuccuucuuguc

SEQ ID NO: 2523832 - RNA, 19 nt, Artificial Sequence
  Description of Artificial Sequence: Synthetic oligonucleotide
aucauucgaacaaacugua

SEQ ID NO: 2523833 - RNA, 19 nt, Artificial Sequence
  Description of Artificial Sequence: Synthetic oligonucleotide
gcuuacauucuugccacag

SEQ ID NO: 2523834 - RNA, 19 nt, Artificial Sequence
  Description of Artificial Sequence: Synthetic oligonucleotide
gcugaagauaaccggacaa

SEQ ID NO: 2523835 - RNA, 19 nt, Artificial Sequence
  Description of Artificial Sequence: Synthetic oligonucleotide
acgaucuucauaaguccca

SEQ ID NO: 2523836 - RNA, 19 nt, Artificial Sequence
  Description of Artificial Sequence: Synthetic oligonucleotide
gaaagucucuggcgaguga

SEQ ID NO: 2523837 - RNA, 19 nt, Artificial Sequence
  Description of Artificial Sequence: Synthetic oligonucleotide
aaguuccgagccugauagu

SEQ ID NO: 2523838 - RNA, 19 nt, Artificial Sequence
  Description of Artificial Sequence: Synthetic oligonucleotide
ucuggcgagugaagagagu

SEQ ID NO: 2523839 - RNA, 19 nt, Artificial Sequence
  Description of Artificial Sequence: Synthetic oligonucleotide
cuaugguagaagaaggcuu

SEQ ID NO: 2523840 - RNA, 19 nt, Artificial Sequence
  Description of Artificial Sequence: Synthetic oligonucleotide
caucgaccauuuaggguug

SEQ ID NO: 2523841 - RNA, 19 nt, Artificial Sequence
  Description of Artificial Sequence: Synthetic oligonucleotide
gaugaagcgcuucaucauu

SEQ ID NO: 2523842 - RNA, 19 nt, Artificial Sequence
  Description of Artificial Sequence: Synthetic oligonucleotide
gccuucauuaacgugguuc

SEQ ID NO: 2523843 - RNA, 19 nt, Artificial Sequence
  Description of Artificial Sequence: Synthetic oligonucleotide
caccaguagcuuugugggc

SEQ ID NO: 2523844 - RNA, 19 nt, Artificial Sequence
  Description of Artificial Sequence: Synthetic oligonucleotide
uagcuuagcugguguauuu

SEQ ID NO: 2523845 - RNA, 19 nt, Artificial Sequence
  Description of Artificial Sequence: Synthetic oligonucleotide
agccaguaguugcuuacau

SEQ ID NO: 2523846 - RNA, 19 nt, Artificial Sequence
  Description of Artificial Sequence: Synthetic oligonucleotide
guuccgagccugauaguug

SEQ ID NO: 2523847 - RNA, 19 nt, Artificial Sequence
  Description of Artificial Sequence: Synthetic oligonucleotide
ccugauaguugcgaacucc

SEQ ID NO: 2523848 - RNA, 19 nt, Artificial Sequence
  Description of Artificial Sequence: Synthetic oligonucleotide
ucucgagucaaaggcugaa

SEQ ID NO: 2523849 - RNA, 19 nt, Artificial Sequence
  Description of Artificial Sequence: Synthetic oligonucleotide
uaacgugguucuguuuccu

SEQ ID NO: 2523850 - RNA, 19 nt, Artificial Sequence
  Description of Artificial Sequence: Synthetic oligonucleotide
gcaguugcuaugguagaag

SEQ ID NO: 2523851 - RNA, 19 nt, Artificial Sequence
  Description of Artificial Sequence: Synthetic oligonucleotide
ugauaggcuuuaagcucau

SEQ ID NO: 2523852 - RNA, 19 nt, Artificial Sequence
  Description of Artificial Sequence: Synthetic oligonucleotide
ucccacgaugccuggcugu

SEQ ID NO: 2523853 - RNA, 19 nt, Artificial Sequence
  Description of Artificial Sequence: Synthetic oligonucleotide
aguugcuaugguagaagaa

SEQ ID NO: 2523854 - RNA, 19 nt, Artificial Sequence
  Description of Artificial Sequence: Synthetic oligonucleotide
cuucauuaacgugguucug

SEQ ID NO: 2523855 - RNA, 19 nt, Artificial Sequence
  Description of Artificial Sequence: Synthetic oligonucleotide
uugugggcuuggugauagg

SEQ ID NO: 2523856 - RNA, 19 nt, Artificial Sequence
  Description of Artificial Sequence: Synthetic oligonucleotide
auaaccggacaagcaagaa

SEQ ID NO: 2523857 - RNA, 19 nt, Artificial Sequence
  Description of Artificial Sequence: Synthetic oligonucleotide
ugcuuacauucuugccaca

SEQ ID NO: 2523858 - RNA, 19 nt, Artificial Sequence
  Description of Artificial Sequence: Synthetic oligonucleotide
ggaugggucguaaugggga

SEQ ID NO: 2523859 - RNA, 19 nt, Artificial Sequence
  Description of Artificial Sequence: Synthetic oligonucleotide
gucguaauggggauuauuu

SEQ ID NO: 2523860 - RNA, 19 nt, Artificial Sequence
  Description of Artificial Sequence: Synthetic oligonucleotide
gcugaacugaaagucucug

SEQ ID NO: 2523861 - RNA, 19 nt, Artificial Sequence
  Description of Artificial Sequence: Synthetic oligonucleotide
cucgagucaaaggcugaac

SEQ ID NO: 2523862 - RNA, 19 nt, Artificial Sequence
  Description of Artificial Sequence: Synthetic oligonucleotide
gagauccucgaugcugaac

SEQ ID NO: 2523863 - RNA, 19 nt, Artificial Sequence
  Description of Artificial Sequence: Synthetic oligonucleotide
ccucucgagucaaaggcug

SEQ ID NO: 2523864 - RNA, 19 nt, Artificial Sequence
  Description of Artificial Sequence: Synthetic oligonucleotide
guagagccuucauuaacgu

SEQ ID NO: 2523865 - RNA, 19 nt, Artificial Sequence
  Description of Artificial Sequence: Synthetic oligonucleotide
cacuccaucaguagagccu

SEQ ID NO: 2523866 - RNA, 19 nt, Artificial Sequence
  Description of Artificial Sequence: Synthetic oligonucleotide
auuuaggguuguccucuuu

SEQ ID NO: 2523867 - RNA, 19 nt, Artificial Sequence
  Description of Artificial Sequence: Synthetic oligonucleotide
cuccuuuacgaucuucaua

SEQ ID NO: 2523868 - RNA, 19 nt, Artificial Sequence
  Description of Artificial Sequence: Synthetic oligonucleotide
gagugaagagagucaugcu

SEQ ID NO: 2523869 - RNA, 19 nt, Artificial Sequence
  Description of Artificial Sequence: Synthetic oligonucleotide
uagccggcuuucugguucu

SEQ ID NO: 2523870 - RNA, 19 nt, Artificial Sequence
  Description of Artificial Sequence: Synthetic oligonucleotide
gaugggucguaauggggau

SEQ ID NO: 2523871 - RNA, 19 nt, Artificial Sequence
  Description of Artificial Sequence: Synthetic oligonucleotide
ugagauccucgaugcugaa

SEQ ID NO: 2523872 - RNA, 19 nt, Artificial Sequence
  Description of Artificial Sequence: Synthetic oligonucleotide
cuggggcucucuagcuuag

SEQ ID NO: 2523873 - RNA, 19 nt, Artificial Sequence
  Description of Artificial Sequence: Synthetic oligonucleotide
ccaucgaccauuuaggguu

SEQ ID NO: 2523874 - RNA, 19 nt, Artificial Sequence
  Description of Artificial Sequence: Synthetic oligonucleotide
uggcuguuugcaguugcua

SEQ ID NO: 2523875 - RNA, 19 nt, Artificial Sequence
  Description of Artificial Sequence: Synthetic oligonucleotide
ggucucggcauguucucuc

SEQ ID NO: 2523876 - RNA, 19 nt, Artificial Sequence
  Description of Artificial Sequence: Synthetic oligonucleotide
gucccacgaugccuggcug

SEQ ID NO: 2523877 - RNA, 19 nt, Artificial Sequence
  Description of Artificial Sequence: Synthetic oligonucleotide
ucuagccggcuuucugguu

SEQ ID NO: 2523878 - RNA, 19 nt, Artificial Sequence
  Description of Artificial Sequence: Synthetic oligonucleotide
gcuaugguagaagaaggcu

SEQ ID NO: 2523879 - RNA, 19 nt, Artificial Sequence
  Description of Artificial Sequence: Synthetic oligonucleotide
ccucuuugcuggauggguc

SEQ ID NO: 2523880 - RNA, 19 nt, Artificial Sequence
  Description of Artificial Sequence: Synthetic oligonucleotide
gauaggcuuuaagcucauc

SEQ ID NO: 2523881 - RNA, 19 nt, Artificial Sequence
  Description of Artificial Sequence: Synthetic oligonucleotide
cgaccauuuaggguugucc

SEQ ID NO: 2523882 - RNA, 19 nt, Artificial Sequence
  Description of Artificial Sequence: Synthetic oligonucleotide
ccuuuacgaucuucauaag

SEQ ID NO: 2523883 - RNA, 19 nt, Artificial Sequence
  Description of Artificial Sequence: Synthetic oligonucleotide
ucgaccauuuaggguuguc

SEQ ID NO: 2523884 - RNA, 19 nt, Artificial Sequence
  Description of Artificial Sequence: Synthetic oligonucleotide
gcuuguucacuccaucagu

SEQ ID NO: 2523885 - RNA, 19 nt, Artificial Sequence
  Description of Artificial Sequence: Synthetic oligonucleotide
gaggaaguuccgagccuga

SEQ ID NO: 2523886 - RNA, 19 nt, Artificial Sequence
  Description of Artificial Sequence: Synthetic oligonucleotide
cucuagcuuagcuggugua

SEQ ID NO: 2523887 - RNA, 19 nt, Artificial Sequence
  Description of Artificial Sequence: Synthetic oligonucleotide
ggaaguuccgagccugaua

SEQ ID NO: 2523888 - RNA, 19 nt, Artificial Sequence
  Description of Artificial Sequence: Synthetic oligonucleotide
guguggucuggguaagccu

SEQ ID NO: 2523889 - RNA, 19 nt, Artificial Sequence
  Description of Artificial Sequence: Synthetic oligonucleotide
aggggccaccaguagcuuu

SEQ ID NO: 2523890 - RNA, 19 nt, Artificial Sequence
  Description of Artificial Sequence: Synthetic oligonucleotide
ccccagucagccucuuccg

SEQ ID NO: 2523891 - RNA, 19 nt, Artificial Sequence
  Description of Artificial Sequence: Synthetic oligonucleotide
cgaacaaacuguacaucca

SEQ ID NO: 2523892 - RNA, 19 nt, Artificial Sequence
  Description of Artificial Sequence: Synthetic oligonucleotide
uggucuggguaagccuccu

SEQ ID NO: 2523893 - RNA, 19 nt, Artificial Sequence
  Description of Artificial Sequence: Synthetic oligonucleotide
gccucuuccggggucucgg

SEQ ID NO: 2523894 - RNA, 19 nt, Artificial Sequence
  Description of Artificial Sequence: Synthetic oligonucleotide
ggcuguuugcaguugcuau

SEQ ID NO: 2523895 - RNA, 19 nt, Artificial Sequence
  Description of Artificial Sequence: Synthetic oligonucleotide
cgaugcugaacuucauguc

SEQ ID NO: 2523896 - RNA, 19 nt, Artificial Sequence
  Description of Artificial Sequence: Synthetic oligonucleotide
agccucuuccggggucucg

SEQ ID NO: 2523897 - RNA, 19 nt, Artificial Sequence
  Description of Artificial Sequence: Synthetic oligonucleotide
gcuuucugguucugacuuc

SEQ ID NO: 2523898 - RNA, 19 nt, Artificial Sequence
  Description of Artificial Sequence: Synthetic oligonucleotide
ggacaagcaagaagcaacu

SEQ ID NO: 2523899 - RNA, 19 nt, Artificial Sequence
  Description of Artificial Sequence: Synthetic oligonucleotide
uggggcucucuagcuuagc

SEQ ID NO: 2523900 - RNA, 19 nt, Artificial Sequence
  Description of Artificial Sequence: Synthetic oligonucleotide
cucuagccggcuuucuggu

SEQ ID NO: 2523901 - RNA, 19 nt, Artificial Sequence
  Description of Artificial Sequence: Synthetic oligonucleotide
guguguggucuggguaagc

SEQ ID NO: 2523902 - RNA, 19 nt, Artificial Sequence
  Description of Artificial Sequence: Synthetic oligonucleotide
uguuuccuccaggcucaaa

SEQ ID NO: 2523903 - RNA, 19 nt, Artificial Sequence
  Description of Artificial Sequence: Synthetic oligonucleotide
gugggcuuggugauaggcu

SEQ ID NO: 2523904 - RNA, 19 nt, Artificial Sequence
  Description of Artificial Sequence: Synthetic oligonucleotide
gucucggcauguucucucu

SEQ ID NO: 2523905 - RNA, 19 nt, Artificial Sequence
  Description of Artificial Sequence: Synthetic oligonucleotide
caguagcuuugugggcuug

SEQ ID NO: 2523906 - RNA, 19 nt, Artificial Sequence
  Description of Artificial Sequence: Synthetic oligonucleotide
aucgaccauuuaggguugu

SEQ ID NO: 2523907 - RNA, 19 nt, Artificial Sequence
  Description of Artificial Sequence: Synthetic oligonucleotide
cagccaguaguugcuuaca

SEQ ID NO: 2523908 - RNA, 19 nt, Artificial Sequence
  Description of Artificial Sequence: Synthetic oligonucleotide
gauccucgaugcugaacuu

SEQ ID NO: 2523909 - RNA, 19 nt, Artificial Sequence
  Description of Artificial Sequence: Synthetic oligonucleotide
gcugaacuucaugucuaca

SEQ ID NO: 2523910 - RNA, 19 nt, Artificial Sequence
  Description of Artificial Sequence: Synthetic oligonucleotide
cugaggaaguuccgagccu

SEQ ID NO: 2523911 - RNA, 19 nt, Artificial Sequence
  Description of Artificial Sequence: Synthetic oligonucleotide
augggucguaauggggauu

SEQ ID NO: 2523912 - RNA, 19 nt, Artificial Sequence
  Description of Artificial Sequence: Synthetic oligonucleotide
ggggucucggcauguucuc

SEQ ID NO: 2523913 - RNA, 19 nt, Artificial Sequence
  Description of Artificial Sequence: Synthetic oligonucleotide
uuccggggucucggcaugu

SEQ ID NO: 2523914 - RNA, 19 nt, Artificial Sequence
  Description of Artificial Sequence: Synthetic oligonucleotide
gccugauaguugcgaacuc

SEQ ID NO: 2523915 - RNA, 19 nt, Artificial Sequence
  Description of Artificial Sequence: Synthetic oligonucleotide
cauuaacgugguucuguuu

SEQ ID NO: 2523916 - RNA, 19 nt, Artificial Sequence
  Description of Artificial Sequence: Synthetic oligonucleotide
guagcuuugugggcuuggu

SEQ ID NO: 2523917 - RNA, 19 nt, Artificial Sequence
  Description of Artificial Sequence: Synthetic oligonucleotide
ggggcucucuagcuuagcu

SEQ ID NO: 2523918 - RNA, 19 nt, Artificial Sequence
  Description of Artificial Sequence: Synthetic oligonucleotide
cuggcuguuugcaguugcu

SEQ ID NO: 2523919 - RNA, 19 nt, Artificial Sequence
  Description of Artificial Sequence: Synthetic oligonucleotide
cuagcuuagcugguguauu

SEQ ID NO: 2523920 - RNA, 19 nt, Artificial Sequence
  Description of Artificial Sequence: Synthetic oligonucleotide
gguaagccuccuuuacgau

SEQ ID NO: 2523921 - RNA, 19 nt, Artificial Sequence
  Description of Artificial Sequence: Synthetic oligonucleotide
ucauggcccugaggaaguu

SEQ ID NO: 2523922 - RNA, 19 nt, Artificial Sequence
  Description of Artificial Sequence: Synthetic oligonucleotide
gcgagugaagagagucaug

SEQ ID NO: 2523923 - RNA, 19 nt, Artificial Sequence
  Description of Artificial Sequence: Synthetic oligonucleotide
ccuccaggcucaaaauaaa

SEQ ID NO: 2523924 - RNA, 19 nt, Artificial Sequence
  Description of Artificial Sequence: Synthetic oligonucleotide
gcuuugugggcuuggugau

SEQ ID NO: 2523925 - RNA, 19 nt, Artificial Sequence
  Description of Artificial Sequence: Synthetic oligonucleotide
ggcgagugaagagagucau

SEQ ID NO: 2523926 - RNA, 19 nt, Artificial Sequence
  Description of Artificial Sequence: Synthetic oligonucleotide
cuuugugggcuuggugaua

SEQ ID NO: 2523927 - RNA, 19 nt, Artificial Sequence
  Description of Artificial Sequence: Synthetic oligonucleotide
gcgaacuccaucccagcau

SEQ ID NO: 2523928 - RNA, 19 nt, Artificial Sequence
  Description of Artificial Sequence: Synthetic oligonucleotide
cuuugcuggaugggucgua

SEQ ID NO: 2523929 - RNA, 19 nt, Artificial Sequence
  Description of Artificial Sequence: Synthetic oligonucleotide
ggcuuggugauaggcuuua

SEQ ID NO: 2523930 - RNA, 19 nt, Artificial Sequence
  Description of Artificial Sequence: Synthetic oligonucleotide
uccggggucucggcauguu

SEQ ID NO: 2523931 - RNA, 19 nt, Artificial Sequence
  Description of Artificial Sequence: Synthetic oligonucleotide
cgagccugauaguugcgaa

SEQ ID NO: 2523932 - RNA, 19 nt, Artificial Sequence
  Description of Artificial Sequence: Synthetic oligonucleotide
ggucguaauggggauuauu

SEQ ID NO: 2523933 - RNA, 19 nt, Artificial Sequence
  Description of Artificial Sequence: Synthetic oligonucleotide
ccgagccugauaguugcga

SEQ ID NO: 2523934 - RNA, 19 nt, Artificial Sequence
  Description of Artificial Sequence: Synthetic oligonucleotide
ccggggucucggcauguuc

SEQ ID NO: 2523935 - RNA, 19 nt, Artificial Sequence
  Description of Artificial Sequence: Synthetic oligonucleotide
gcugucugcuugggcugug

SEQ ID NO: 2523936 - RNA, 19 nt, Artificial Sequence
  Description of Artificial Sequence: Synthetic oligonucleotide
agccggcuuucugguucug

SEQ ID NO: 2523937 - RNA, 19 nt, Artificial Sequence
  Description of Artificial Sequence: Synthetic oligonucleotide
cggggucucggcauguucu

SEQ ID NO: 2523938 - RNA, 19 nt, Artificial Sequence
  Description of Artificial Sequence: Synthetic oligonucleotide
ccaucaguagagccuucau

SEQ ID NO: 2523939 - RNA, 19 nt, Artificial Sequence
  Description of Artificial Sequence: Synthetic oligonucleotide
gggucucggcauguucucu

SEQ ID NO: 2523940 - RNA, 19 nt, Artificial Sequence
  Description of Artificial Sequence: Synthetic oligonucleotide
gggcuuggugauaggcuuu

SEQ ID NO: 2523941 - RNA, 19 nt, Artificial Sequence
  Description of Artificial Sequence: Synthetic oligonucleotide
gggucguaauggggauuau

SEQ ID NO: 2523942 - RNA, 19 nt, Artificial Sequence
  Description of Artificial Sequence: Synthetic oligonucleotide
ccaucccagcaugcugucu

SEQ ID NO: 2523943 - RNA, 19 nt, Artificial Sequence
  Description of Artificial Sequence: Synthetic oligonucleotide
cccacgaugccuggcuguu

SEQ ID NO: 2523944 - RNA, 19 nt, Artificial Sequence
  Description of Artificial Sequence: Synthetic oligonucleotide
ccacgaugccuggcuguuu

SEQ ID NO: 2523945 - RNA, 19 nt, Artificial Sequence
  Description of Artificial Sequence: Synthetic oligonucleotide
aaaguaacaaggaagguag

SEQ ID NO: 2523946 - RNA, 19 nt, Artificial Sequence
  Description of Artificial Sequence: Synthetic oligonucleotide
aaucucaauuucaugaugg

SEQ ID NO: 2523947 - RNA, 19 nt, Artificial Sequence
  Description of Artificial Sequence: Synthetic oligonucleotide
aaucaagcaucucugguug

SEQ ID NO: 2523948 - RNA, 19 nt, Artificial Sequence
  Description of Artificial Sequence: Synthetic oligonucleotide
auaaagucaaauuuggcau

SEQ ID NO: 2523949 - RNA, 19 nt, Artificial Sequence
  Description of Artificial Sequence: Synthetic oligonucleotide
aagcacuucccacagcggc

SEQ ID NO: 2523950 - RNA, 19 nt, Artificial Sequence
  Description of Artificial Sequence: Synthetic oligonucleotide
uccagaaucaagcaucucu

SEQ ID NO: 2523951 - RNA, 19 nt, Artificial Sequence
  Description of Artificial Sequence: Synthetic oligonucleotide
ugagaaucugcacaguaca

SEQ ID NO: 2523952 - RNA, 19 nt, Artificial Sequence
  Description of Artificial Sequence: Synthetic oligonucleotide
guaaaacucagccucgcgg

SEQ ID NO: 2523953 - RNA, 19 nt, Artificial Sequence
  Description of Artificial Sequence: Synthetic oligonucleotide
aaggaagguagcuccacuc

SEQ ID NO: 2523954 - RNA, 19 nt, Artificial Sequence
  Description of Artificial Sequence: Synthetic oligonucleotide
uccacaaagcacaugcgcc

SEQ ID NO: 2523955 - RNA, 19 nt, Artificial Sequence
  Description of Artificial Sequence: Synthetic oligonucleotide
ccaaaaguaacaaggaagg

SEQ ID NO: 2523956 - RNA, 19 nt, Artificial Sequence
  Description of Artificial Sequence: Synthetic oligonucleotide
aguacagacaugcgcaauc

SEQ ID NO: 2523957 - RNA, 19 nt, Artificial Sequence
  Description of Artificial Sequence: Synthetic oligonucleotide
ucucgugauucauagagga

SEQ ID NO: 2523958 - RNA, 19 nt, Artificial Sequence
  Description of Artificial Sequence: Synthetic oligonucleotide
ugauaaagucaaauuuggc

SEQ ID NO: 2523959 - RNA, 19 nt, Artificial Sequence
  Description of Artificial Sequence: Synthetic oligonucleotide
uucaugauggcuguccccg

SEQ ID NO: 2523960 - RNA, 19 nt, Artificial Sequence
  Description of Artificial Sequence: Synthetic oligonucleotide
ucgugauucauagaggagc

SEQ ID NO: 2523961 - RNA, 19 nt, Artificial Sequence
  Description of Artificial Sequence: Synthetic oligonucleotide
ugauucauagaggagcuug

SEQ ID NO: 2523962 - RNA, 19 nt, Artificial Sequence
  Description of Artificial Sequence: Synthetic oligonucleotide
uacugcaggaacaugccug

SEQ ID NO: 2523963 - RNA, 19 nt, Artificial Sequence
  Description of Artificial Sequence: Synthetic oligonucleotide
uuguccgggacccacugcg

SEQ ID NO: 2523964 - RNA, 19 nt, Artificial Sequence
  Description of Artificial Sequence: Synthetic oligonucleotide
gagcgcacaagcuucuugg

SEQ ID NO: 2523965 - RNA, 19 nt, Artificial Sequence
  Description of Artificial Sequence: Synthetic oligonucleotide
uaaaacucagccucgcggu

SEQ ID NO: 2523966 - RNA, 19 nt, Artificial Sequence
  Description of Artificial Sequence: Synthetic oligonucleotide
uuggagagacgacaaacca

SEQ ID NO: 2523967 - RNA, 19 nt, Artificial Sequence
  Description of Artificial Sequence: Synthetic oligonucleotide
ggucucgugauucauagag

SEQ ID NO: 2523968 - RNA, 19 nt, Artificial Sequence
  Description of Artificial Sequence: Synthetic oligonucleotide
cuuggacacucuuuguccg

SEQ ID NO: 2523969 - RNA, 19 nt, Artificial Sequence
  Description of Artificial Sequence: Synthetic oligonucleotide
cauagaggagcuugguugc

SEQ ID NO: 2523970 - RNA, 19 nt, Artificial Sequence
  Description of Artificial Sequence: Synthetic oligonucleotide
acacucuuuguccgggacc

SEQ ID NO: 2523971 - RNA, 19 nt, Artificial Sequence
  Description of Artificial Sequence: Synthetic oligonucleotide
uguguugcagccucugccc

SEQ ID NO: 2523972 - RNA, 19 nt, Artificial Sequence
  Description of Artificial Sequence: Synthetic oligonucleotide
gauucauagaggagcuugg

SEQ ID NO: 2523973 - RNA, 19 nt, Artificial Sequence
  Description of Artificial Sequence: Synthetic oligonucleotide
ggugauaaagucaaauuug

SEQ ID NO: 2523974 - RNA, 19 nt, Artificial Sequence
  Description of Artificial Sequence: Synthetic oligonucleotide
ugcagcaccugucacagaa

SEQ ID NO: 2523975 - RNA, 19 nt, Artificial Sequence
  Description of Artificial Sequence: Synthetic oligonucleotide
cccaaaaguaacaaggaag

SEQ ID NO: 2523976 - RNA, 19 nt, Artificial Sequence
  Description of Artificial Sequence: Synthetic oligonucleotide
aagguagcuccacucagga

SEQ ID NO: 2523977 - RNA, 19 nt, Artificial Sequence
  Description of Artificial Sequence: Synthetic oligonucleotide
aaaccaugguuucaggcuu

SEQ ID NO: 2523978 - RNA, 19 nt, Artificial Sequence
  Description of Artificial Sequence: Synthetic oligonucleotide
agaaucaagcaucucuggu

SEQ ID NO: 2523979 - RNA, 19 nt, Artificial Sequence
  Description of Artificial Sequence: Synthetic oligonucleotide
ugaugugcugagcucagcu

SEQ ID NO: 2523980 - RNA, 19 nt, Artificial Sequence
  Description of Artificial Sequence: Synthetic oligonucleotide
ucucugaguccccaaaagu

SEQ ID NO: 2523981 - RNA, 19 nt, Artificial Sequence
  Description of Artificial Sequence: Synthetic oligonucleotide
gucaaauuuggcaucacac

SEQ ID NO: 2523982 - RNA, 19 nt, Artificial Sequence
  Description of Artificial Sequence: Synthetic oligonucleotide
ugugagaaucugcacagua

SEQ ID NO: 2523983 - RNA, 19 nt, Artificial Sequence
  Description of Artificial Sequence: Synthetic oligonucleotide
aggaacaugccuguggcuc

SEQ ID NO: 2523984 - RNA, 19 nt, Artificial Sequence
  Description of Artificial Sequence: Synthetic oligonucleotide
ugcuugucguaaaacucag

SEQ ID NO: 2523985 - RNA, 19 nt, Artificial Sequence
  Description of Artificial Sequence: Synthetic oligonucleotide
agcacaugcgccgaagugg

SEQ ID NO: 2523986 - RNA, 19 nt, Artificial Sequence
  Description of Artificial Sequence: Synthetic oligonucleotide
augauggcuguccccgucc

SEQ ID NO: 2523987 - RNA, 19 nt, Artificial Sequence
  Description of Artificial Sequence: Synthetic oligonucleotide
acugcggcuccuccaagcc

SEQ ID NO: 2523988 - RNA, 19 nt, Artificial Sequence
  Description of Artificial Sequence: Synthetic oligonucleotide
ugcacaguacagacaugcg

SEQ ID NO: 2523989 - RNA, 19 nt, Artificial Sequence
  Description of Artificial Sequence: Synthetic oligonucleotide
cuggucucgugauucauag

SEQ ID NO: 2523990 - RNA, 19 nt, Artificial Sequence
  Description of Artificial Sequence: Synthetic oligonucleotide
aaagcacaugcgccgaagu

SEQ ID NO: 2523991 - RNA, 19 nt, Artificial Sequence
  Description of Artificial Sequence: Synthetic oligonucleotide
aaaacucagccucgcggug

SEQ ID NO: 2523992 - RNA, 19 nt, Artificial Sequence
  Description of Artificial Sequence: Synthetic oligonucleotide
ucuggugauaaagucaaau

SEQ ID NO: 2523993 - RNA, 19 nt, Artificial Sequence
  Description of Artificial Sequence: Synthetic oligonucleotide
agcugcuugucguaaaacu

SEQ ID NO: 2523994 - RNA, 19 nt, Artificial Sequence
  Description of Artificial Sequence: Synthetic oligonucleotide
ugcgcaaucucaauuucau

SEQ ID NO: 2523995 - RNA, 19 nt, Artificial Sequence
  Description of Artificial Sequence: Synthetic oligonucleotide
aguaacaaggaagguagcu

SEQ ID NO: 2523996 - RNA, 19 nt, Artificial Sequence
  Description of Artificial Sequence: Synthetic oligonucleotide
ugcuccggcaccaugcgca

SEQ ID NO: 2523997 - RNA, 19 nt, Artificial Sequence
  Description of Artificial Sequence: Synthetic oligonucleotide
cucgcggugagacaccagg

SEQ ID NO: 2523998 - RNA, 19 nt, Artificial Sequence
  Description of Artificial Sequence: Synthetic oligonucleotide
guccacaaagcacaugcgc

SEQ ID NO: 2523999 - RNA, 19 nt, Artificial Sequence
  Description of Artificial Sequence: Synthetic oligonucleotide
uugugcauggcugccagcc

SEQ ID NO: 2524000 - RNA, 19 nt, Artificial Sequence
  Description of Artificial Sequence: Synthetic oligonucleotide
ugccauuugcauccucucc

SEQ ID NO: 2524001 - RNA, 19 nt, Artificial Sequence
  Description of Artificial Sequence: Synthetic oligonucleotide
guuggagagacgacaaacc

SEQ ID NO: 2524002 - RNA, 19 nt, Artificial Sequence
  Description of Artificial Sequence: Synthetic oligonucleotide
gacucgguaaccugaugug

SEQ ID NO: 2524003 - RNA, 19 nt, Artificial Sequence
  Description of Artificial Sequence: Synthetic oligonucleotide
uuucaugauggcugucccc

SEQ ID NO: 2524004 - RNA, 19 nt, Artificial Sequence
  Description of Artificial Sequence: Synthetic oligonucleotide
uggagagacgacaaaccau

SEQ ID NO: 2524005 - RNA, 19 nt, Artificial Sequence
  Description of Artificial Sequence: Synthetic oligonucleotide
agcgcacaagcuucuuggc

SEQ ID NO: 2524006 - RNA, 19 nt, Artificial Sequence
  Description of Artificial Sequence: Synthetic oligonucleotide
uuggacacucuuuguccgg

SEQ ID NO: 2524007 - RNA, 19 nt, Artificial Sequence
  Description of Artificial Sequence: Synthetic oligonucleotide
caugccuguggcucgagug

SEQ ID NO: 2524008 - RNA, 19 nt, Artificial Sequence
  Description of Artificial Sequence: Synthetic oligonucleotide
acaugcgcaaucucaauuu

SEQ ID NO: 2524009 - RNA, 19 nt, Artificial Sequence
  Description of Artificial Sequence: Synthetic oligonucleotide
gagaaucugcacaguacag

SEQ ID NO: 2524010 - RNA, 19 nt, Artificial Sequence
  Description of Artificial Sequence: Synthetic oligonucleotide
guugccuugugcauggcug

SEQ ID NO: 2524011 - RNA, 19 nt, Artificial Sequence
  Description of Artificial Sequence: Synthetic oligonucleotide
uccggcaccaugcgcaggc

SEQ ID NO: 2524012 - RNA, 19 nt, Artificial Sequence
  Description of Artificial Sequence: Synthetic oligonucleotide
aacucagccucgcggugag

SEQ ID NO: 2524013 - RNA, 19 nt, Artificial Sequence
  Description of Artificial Sequence: Synthetic oligonucleotide
agaaucugcacaguacaga

SEQ ID NO: 2524014 - RNA, 19 nt, Artificial Sequence
  Description of Artificial Sequence: Synthetic oligonucleotide
agagacgacaaaccauggu

SEQ ID NO: 2524015 - RNA, 19 nt, Artificial Sequence
  Description of Artificial Sequence: Synthetic oligonucleotide
uacaucuuggacacucuuu

SEQ ID NO: 2524016 - RNA, 19 nt, Artificial Sequence
  Description of Artificial Sequence: Synthetic oligonucleotide
ggagagacgacaaaccaug

SEQ ID NO: 2524017 - RNA, 19 nt, Artificial Sequence
  Description of Artificial Sequence: Synthetic oligonucleotide
guaacaaggaagguagcuc

SEQ ID NO: 2524018 - RNA, 19 nt, Artificial Sequence
  Description of Artificial Sequence: Synthetic oligonucleotide
gacgacaaaccaugguuuc

SEQ ID NO: 2524019 - RNA, 19 nt, Artificial Sequence
  Description of Artificial Sequence: Synthetic oligonucleotide
aagucaaauuuggcaucac

SEQ ID NO: 2524020 - RNA, 19 nt, Artificial Sequence
  Description of Artificial Sequence: Synthetic oligonucleotide
aacgggcuuccgaaggcgc

SEQ ID NO: 2524021 - RNA, 19 nt, Artificial Sequence
  Description of Artificial Sequence: Synthetic oligonucleotide
acaugcgccgaaguggcac

SEQ ID NO: 2524022 - RNA, 19 nt, Artificial Sequence
  Description of Artificial Sequence: Synthetic oligonucleotide
aggaagguagcuccacuca

SEQ ID NO: 2524023 - RNA, 19 nt, Artificial Sequence
  Description of Artificial Sequence: Synthetic oligonucleotide
ucgcggugagacaccaggg

SEQ ID NO: 2524024 - RNA, 19 nt, Artificial Sequence
  Description of Artificial Sequence: Synthetic oligonucleotide
cugaguccccaaaaguaac

SEQ ID NO: 2524025 - RNA, 19 nt, Artificial Sequence
  Description of Artificial Sequence: Synthetic oligonucleotide
cugcuugucguaaaacuca

SEQ ID NO: 2524026 - RNA, 19 nt, Artificial Sequence
  Description of Artificial Sequence: Synthetic oligonucleotide
cucgcagucacuggucucg

SEQ ID NO: 2524027 - RNA, 19 nt, Artificial Sequence
  Description of Artificial Sequence: Synthetic oligonucleotide
cucgugauucauagaggag

SEQ ID NO: 2524028 - RNA, 19 nt, Artificial Sequence
  Description of Artificial Sequence: Synthetic oligonucleotide
agcuccacucaggagcacc

SEQ ID NO: 2524029 - RNA, 19 nt, Artificial Sequence
  Description of Artificial Sequence: Synthetic oligonucleotide
gaugugcugagcucagcuc

SEQ ID NO: 2524030 - RNA, 19 nt, Artificial Sequence
  Description of Artificial Sequence: Synthetic oligonucleotide
cucgagugcugccugcucc

SEQ ID NO: 2524031 - RNA, 19 nt, Artificial Sequence
  Description of Artificial Sequence: Synthetic oligonucleotide
cuuggacucgguaaccuga

SEQ ID NO: 2524032 - RNA, 19 nt, Artificial Sequence
  Description of Artificial Sequence: Synthetic oligonucleotide
agcccugagugccucauca

SEQ ID NO: 2524033 - RNA, 19 nt, Artificial Sequence
  Description of Artificial Sequence: Synthetic oligonucleotide
auagaggagcuugguugcc

SEQ ID NO: 2524034 - RNA, 19 nt, Artificial Sequence
  Description of Artificial Sequence: Synthetic oligonucleotide
gucguaaaacucagccucg

SEQ ID NO: 2524035 - RNA, 19 nt, Artificial Sequence
  Description of Artificial Sequence: Synthetic oligonucleotide
ucgguaaccugaugugcug

SEQ ID NO: 2524036 - RNA, 19 nt, Artificial Sequence
  Description of Artificial Sequence: Synthetic oligonucleotide
gagagacgacaaaccaugg

SEQ ID NO: 2524037 - RNA, 19 nt, Artificial Sequence
  Description of Artificial Sequence: Synthetic oligonucleotide
ggaacaugccuguggcucg

SEQ ID NO: 2524038 - RNA, 19 nt, Artificial Sequence
  Description of Artificial Sequence: Synthetic oligonucleotide
agugccucaucaggcaggg

SEQ ID NO: 2524039 - RNA, 19 nt, Artificial Sequence
  Description of Artificial Sequence: Synthetic oligonucleotide
gcacaguacagacaugcgc

SEQ ID NO: 2524040 - RNA, 19 nt, Artificial Sequence
  Description of Artificial Sequence: Synthetic oligonucleotide
cacuggguccacaaagcac

SEQ ID NO: 2524041 - RNA, 19 nt, Artificial Sequence
  Description of Artificial Sequence: Synthetic oligonucleotide
gaaucaagcaucucugguu

SEQ ID NO: 2524042 - RNA, 19 nt, Artificial Sequence
  Description of Artificial Sequence: Synthetic oligonucleotide
aaacucagccucgcgguga

SEQ ID NO: 2524043 - RNA, 19 nt, Artificial Sequence
  Description of Artificial Sequence: Synthetic oligonucleotide
aagccgaacgggcuuccga

SEQ ID NO: 2524044 - RNA, 19 nt, Artificial Sequence
  Description of Artificial Sequence: Synthetic oligonucleotide
gacacucuuuguccgggac

SEQ ID NO: 2524045 - RNA, 19 nt, Artificial Sequence
  Description of Artificial Sequence: Synthetic oligonucleotide
gucucgugauucauagagg

SEQ ID NO: 2524046 - RNA, 19 nt, Artificial Sequence
  Description of Artificial Sequence: Synthetic oligonucleotide
caaaccaugguuucaggcu

SEQ ID NO: 2524047 - RNA, 19 nt, Artificial Sequence
  Description of Artificial Sequence: Synthetic oligonucleotide
gaacgggcuuccgaaggcg

SEQ ID NO: 2524048 - RNA, 19 nt, Artificial Sequence
  Description of Artificial Sequence: Synthetic oligonucleotide
uuuguccgggacccacugc

SEQ ID NO: 2524049 - RNA, 19 nt, Artificial Sequence
  Description of Artificial Sequence: Synthetic oligonucleotide
gugagaaucugcacaguac

SEQ ID NO: 2524050 - RNA, 19 nt, Artificial Sequence
  Description of Artificial Sequence: Synthetic oligonucleotide
uguccgggacccacugcgg

SEQ ID NO: 2524051 - RNA, 19 nt, Artificial Sequence
  Description of Artificial Sequence: Synthetic oligonucleotide
gagcuugguugccuugugc

SEQ ID NO: 2524052 - RNA, 19 nt, Artificial Sequence
  Description of Artificial Sequence: Synthetic oligonucleotide
ccacaaagcacaugcgccg

SEQ ID NO: 2524053 - RNA, 19 nt, Artificial Sequence
  Description of Artificial Sequence: Synthetic oligonucleotide
aaucugcacaguacagaca

SEQ ID NO: 2524054 - RNA, 19 nt, Artificial Sequence
  Description of Artificial Sequence: Synthetic oligonucleotide
gagugccucaucaggcagg

SEQ ID NO: 2524055 - RNA, 19 nt, Artificial Sequence
  Description of Artificial Sequence: Synthetic oligonucleotide
gcaggaacaugccuguggc

SEQ ID NO: 2524056 - RNA, 19 nt, Artificial Sequence
  Description of Artificial Sequence: Synthetic oligonucleotide
ucguaaaacucagccucgc

SEQ ID NO: 2524057 - RNA, 19 nt, Artificial Sequence
  Description of Artificial Sequence: Synthetic oligonucleotide
ccugagugccucaucaggc

SEQ ID NO: 2524058 - RNA, 19 nt, Artificial Sequence
  Description of Artificial Sequence: Synthetic oligonucleotide
gucacuggucucgugauuc

SEQ ID NO: 2524059 - RNA, 19 nt, Artificial Sequence
  Description of Artificial Sequence: Synthetic oligonucleotide
uccgaaggcgcggugcucc

SEQ ID NO: 2524060 - RNA, 19 nt, Artificial Sequence
  Description of Artificial Sequence: Synthetic oligonucleotide
gaaggcgcggugcuccggc

SEQ ID NO: 2524061 - RNA, 19 nt, Artificial Sequence
  Description of Artificial Sequence: Synthetic oligonucleotide
caugcgcaaucucaauuuc

SEQ ID NO: 2524062 - RNA, 19 nt, Artificial Sequence
  Description of Artificial Sequence: Synthetic oligonucleotide
gcuuucuggugauaaaguc

SEQ ID NO: 2524063 - RNA, 19 nt, Artificial Sequence
  Description of Artificial Sequence: Synthetic oligonucleotide
agcacuucccacagcggcg

SEQ ID NO: 2524064 - RNA, 19 nt, Artificial Sequence
  Description of Artificial Sequence: Synthetic oligonucleotide
accugaugugcugagcuca

SEQ ID NO: 2524065 - RNA, 19 nt, Artificial Sequence
  Description of Artificial Sequence: Synthetic oligonucleotide
uguguacugcaggaacaug

SEQ ID NO: 2524066 - RNA, 19 nt, Artificial Sequence
  Description of Artificial Sequence: Synthetic oligonucleotide
cgaaguggcaccuucuggc

SEQ ID NO: 2524067 - RNA, 19 nt, Artificial Sequence
  Description of Artificial Sequence: Synthetic oligonucleotide
auacaucuuggacacucuu

SEQ ID NO: 2524068 - RNA, 19 nt, Artificial Sequence
  Description of Artificial Sequence: Synthetic oligonucleotide
cuuuguccgggacccacug

SEQ ID NO: 2524069 - RNA, 19 nt, Artificial Sequence
  Description of Artificial Sequence: Synthetic oligonucleotide
uggugcuuucuggugauaa

SEQ ID NO: 2524070 - RNA, 19 nt, Artificial Sequence
  Description of Artificial Sequence: Synthetic oligonucleotide
acaguacagacaugcgcaa

SEQ ID NO: 2524071 - RNA, 19 nt, Artificial Sequence
  Description of Artificial Sequence: Synthetic oligonucleotide
gguaaccugaugugcugag

SEQ ID NO: 2524072 - RNA, 19 nt, Artificial Sequence
  Description of Artificial Sequence: Synthetic oligonucleotide
uuggacucgguaaccugau

SEQ ID NO: 2524073 - RNA, 19 nt, Artificial Sequence
  Description of Artificial Sequence: Synthetic oligonucleotide
caugcgccgaaguggcacc

SEQ ID NO: 2524074 - RNA, 19 nt, Artificial Sequence
  Description of Artificial Sequence: Synthetic oligonucleotide
auucauagaggagcuuggu

SEQ ID NO: 2524075 - RNA, 19 nt, Artificial Sequence
  Description of Artificial Sequence: Synthetic oligonucleotide
uguggcucgagugcugccu

SEQ ID NO: 2524076 - RNA, 19 nt, Artificial Sequence
  Description of Artificial Sequence: Synthetic oligonucleotide
ucacuggucucgugauuca

SEQ ID NO: 2524077 - RNA, 19 nt, Artificial Sequence
  Description of Artificial Sequence: Synthetic oligonucleotide
aucagccgcagcuguguug

SEQ ID NO: 2524078 - RNA, 19 nt, Artificial Sequence
  Description of Artificial Sequence: Synthetic oligonucleotide
aguggugcuuucuggugau

SEQ ID NO: 2524079 - RNA, 19 nt, Artificial Sequence
  Description of Artificial Sequence: Synthetic oligonucleotide
ggcaggggcaagcagcuug

SEQ ID NO: 2524080 - RNA, 19 nt, Artificial Sequence
  Description of Artificial Sequence: Synthetic oligonucleotide
uggacucgguaaccugaug

SEQ ID NO: 2524081 - RNA, 19 nt, Artificial Sequence
  Description of Artificial Sequence: Synthetic oligonucleotide
ccguccagaaucaagcauc

SEQ ID NO: 2524082 - RNA, 19 nt, Artificial Sequence
  Description of Artificial Sequence: Synthetic oligonucleotide
cagacaugcgcaaucucaa

SEQ ID NO: 2524083 - RNA, 19 nt, Artificial Sequence
  Description of Artificial Sequence: Synthetic oligonucleotide
agacgacaaaccaugguuu

SEQ ID NO: 2524084 - RNA, 19 nt, Artificial Sequence
  Description of Artificial Sequence: Synthetic oligonucleotide
agccgaacgggcuuccgaa

SEQ ID NO: 2524085 - RNA, 19 nt, Artificial Sequence
  Description of Artificial Sequence: Synthetic oligonucleotide
guaaccugaugugcugagc

SEQ ID NO: 2524086 - RNA, 19 nt, Artificial Sequence
  Description of Artificial Sequence: Synthetic oligonucleotide
ggcacuguguacugcagga

SEQ ID NO: 2524087 - RNA, 19 nt, Artificial Sequence
  Description of Artificial Sequence: Synthetic oligonucleotide
gcaccugucacagaagcac

SEQ ID NO: 2524088 - RNA, 19 nt, Artificial Sequence
  Description of Artificial Sequence: Synthetic oligonucleotide
cacucaggagcaccuugag

SEQ ID NO: 2524089 - RNA, 19 nt, Artificial Sequence
  Description of Artificial Sequence: Synthetic oligonucleotide
acgacaaaccaugguuuca

SEQ ID NO: 2524090 - RNA, 19 nt, Artificial Sequence
  Description of Artificial Sequence: Synthetic oligonucleotide
agacaugcgcaaucucaau

SEQ ID NO: 2524091 - RNA, 19 nt, Artificial Sequence
  Description of Artificial Sequence: Synthetic oligonucleotide
cugccauuugcauccucuc

SEQ ID NO: 2524092 - RNA, 19 nt, Artificial Sequence
  Description of Artificial Sequence: Synthetic oligonucleotide
cugagugccucaucaggca

SEQ ID NO: 2524093 - RNA, 19 nt, Artificial Sequence
  Description of Artificial Sequence: Synthetic oligonucleotide
gacaugcgcaaucucaauu

SEQ ID NO: 2524094 - RNA, 19 nt, Artificial Sequence
  Description of Artificial Sequence: Synthetic oligonucleotide
gcgcacuggguccacaaag

SEQ ID NO: 2524095 - RNA, 19 nt, Artificial Sequence
  Description of Artificial Sequence: Synthetic oligonucleotide
cuugugcauggcugccagc

SEQ ID NO: 2524096 - RNA, 19 nt, Artificial Sequence
  Description of Artificial Sequence: Synthetic oligonucleotide
aagcagcuuggacucggua

SEQ ID NO: 2524097 - RNA, 19 nt, Artificial Sequence
  Description of Artificial Sequence: Synthetic oligonucleotide
uggucucgugauucauaga

SEQ ID NO: 2524098 - RNA, 19 nt, Artificial Sequence
  Description of Artificial Sequence: Synthetic oligonucleotide
uucuggugauaaagucaaa

SEQ ID NO: 2524099 - RNA, 19 nt, Artificial Sequence
  Description of Artificial Sequence: Synthetic oligonucleotide
ggugcuccggcaccaugcg

SEQ ID NO: 2524100 - RNA, 19 nt, Artificial Sequence
  Description of Artificial Sequence: Synthetic oligonucleotide
cuggugauaaagucaaauu

SEQ ID NO: 2524101 - RNA, 19 nt, Artificial Sequence
  Description of Artificial Sequence: Synthetic oligonucleotide
gagcugcuugucguaaaac

SEQ ID NO: 2524102 - RNA, 19 nt, Artificial Sequence
  Description of Artificial Sequence: Synthetic oligonucleotide
augcgcaaucucaauuuca

SEQ ID NO: 2524103 - RNA, 19 nt, Artificial Sequence
  Description of Artificial Sequence: Synthetic oligonucleotide
agaggagcuugguugccuu

SEQ ID NO: 2524104 - RNA, 19 nt, Artificial Sequence
  Description of Artificial Sequence: Synthetic oligonucleotide
agcuuggacucgguaaccu

SEQ ID NO: 2524105 - RNA, 19 nt, Artificial Sequence
  Description of Artificial Sequence: Synthetic oligonucleotide
ggacucgguaaccugaugu

SEQ ID NO: 2524106 - RNA, 19 nt, Artificial Sequence
  Description of Artificial Sequence: Synthetic oligonucleotide
aggcgcggugcuccggcac

SEQ ID NO: 2524107 - RNA, 19 nt, Artificial Sequence
  Description of Artificial Sequence: Synthetic oligonucleotide
acaaagcacaugcgccgaa

SEQ ID NO: 2524108 - RNA, 19 nt, Artificial Sequence
  Description of Artificial Sequence: Synthetic oligonucleotide
cagccucgcggugagacac

SEQ ID NO: 2524109 - RNA, 19 nt, Artificial Sequence
  Description of Artificial Sequence: Synthetic oligonucleotide
gguccacaaagcacaugcg

SEQ ID NO: 2524110 - RNA, 19 nt, Artificial Sequence
  Description of Artificial Sequence: Synthetic oligonucleotide
ucccucgcagucacugguc

SEQ ID NO: 2524111 - RNA, 19 nt, Artificial Sequence
  Description of Artificial Sequence: Synthetic oligonucleotide
gcaagcagcuuggacucgg

SEQ ID NO: 2524112 - RNA, 19 nt, Artificial Sequence
  Description of Artificial Sequence: Synthetic oligonucleotide
agacaccagggcacacucg

SEQ ID NO: 2524113 - RNA, 19 nt, Artificial Sequence
  Description of Artificial Sequence: Synthetic oligonucleotide
ccgaacgggcuuccgaagg

SEQ ID NO: 2524114 - RNA, 19 nt, Artificial Sequence
  Description of Artificial Sequence: Synthetic oligonucleotide
uccaagccgaacgggcuuc

SEQ ID NO: 2524115 - RNA, 19 nt, Artificial Sequence
  Description of Artificial Sequence: Synthetic oligonucleotide
caccagggcacacucggca

SEQ ID NO: 2524116 - RNA, 19 nt, Artificial Sequence
  Description of Artificial Sequence: Synthetic oligonucleotide
ccgaaguggcaccuucugg

SEQ ID NO: 2524117 - RNA, 19 nt, Artificial Sequence
  Description of Artificial Sequence: Synthetic oligonucleotide
guccccguccagaaucaag

SEQ ID NO: 2524118 - RNA, 19 nt, Artificial Sequence
  Description of Artificial Sequence: Synthetic oligonucleotide
ucggcacacuggcgcacug

SEQ ID NO: 2524119 - RNA, 19 nt, Artificial Sequence
  Description of Artificial Sequence: Synthetic oligonucleotide
cguaaaacucagccucgcg

SEQ ID NO: 2524120 - RNA, 19 nt, Artificial Sequence
  Description of Artificial Sequence: Synthetic oligonucleotide
gugaagccuucugugagaa

SEQ ID NO: 2524121 - RNA, 19 nt, Artificial Sequence
  Description of Artificial Sequence: Synthetic oligonucleotide
acgggcuuccgaaggcgcg

SEQ ID NO: 2524122 - RNA, 19 nt, Artificial Sequence
  Description of Artificial Sequence: Synthetic oligonucleotide
aaggcgcggugcuccggca

SEQ ID NO: 2524123 - RNA, 19 nt, Artificial Sequence
  Description of Artificial Sequence: Synthetic oligonucleotide
gcacaugcgccgaaguggc

SEQ ID NO: 2524124 - RNA, 19 nt, Artificial Sequence
  Description of Artificial Sequence: Synthetic oligonucleotide
uggcgcacuggguccacaa

SEQ ID NO: 2524125 - RNA, 19 nt, Artificial Sequence
  Description of Artificial Sequence: Synthetic oligonucleotide
cagcuuggacucgguaacc

SEQ ID NO: 2524126 - RNA, 19 nt, Artificial Sequence
  Description of Artificial Sequence: Synthetic oligonucleotide
gcggugagacaccagggca

SEQ ID NO: 2524127 - RNA, 19 nt, Artificial Sequence
  Description of Artificial Sequence: Synthetic oligonucleotide
agccuucugugagaaucug

SEQ ID NO: 2524128 - RNA, 19 nt, Artificial Sequence
  Description of Artificial Sequence: Synthetic oligonucleotide
ugccccuggcacuguguac

SEQ ID NO: 2524129 - RNA, 19 nt, Artificial Sequence
  Description of Artificial Sequence: Synthetic oligonucleotide
cucaucaggcaggggcaag

SEQ ID NO: 2524130 - RNA, 19 nt, Artificial Sequence
  Description of Artificial Sequence: Synthetic oligonucleotide
gcugggcgagcgcacaagc

SEQ ID NO: 2524131 - RNA, 19 nt, Artificial Sequence
  Description of Artificial Sequence: Synthetic oligonucleotide
caggagugaagccuucugu

SEQ ID NO: 2524132 - RNA, 19 nt, Artificial Sequence
  Description of Artificial Sequence: Synthetic oligonucleotide
gccgaaguggcaccuucug

SEQ ID NO: 2524133 - RNA, 19 nt, Artificial Sequence
  Description of Artificial Sequence: Synthetic oligonucleotide
ccugaugugcugagcucag

SEQ ID NO: 2524134 - RNA, 19 nt, Artificial Sequence
  Description of Artificial Sequence: Synthetic oligonucleotide
gaacaugccuguggcucga

SEQ ID NO: 2524135 - RNA, 19 nt, Artificial Sequence
  Description of Artificial Sequence: Synthetic oligonucleotide
cacaaagcacaugcgccga

SEQ ID NO: 2524136 - RNA, 19 nt, Artificial Sequence
  Description of Artificial Sequence: Synthetic oligonucleotide
cgacaaaccaugguuucag

SEQ ID NO: 2524137 - RNA, 19 nt, Artificial Sequence
  Description of Artificial Sequence: Synthetic oligonucleotide
gcacuggguccacaaagca

SEQ ID NO: 2524138 - RNA, 19 nt, Artificial Sequence
  Description of Artificial Sequence: Synthetic oligonucleotide
cuguccccguccagaauca

SEQ ID NO: 2524139 - RNA, 19 nt, Artificial Sequence
  Description of Artificial Sequence: Synthetic oligonucleotide
caagccgaacgggcuuccg

SEQ ID NO: 2524140 - RNA, 19 nt, Artificial Sequence
  Description of Artificial Sequence: Synthetic oligonucleotide
agccucgcggugagacacc

SEQ ID NO: 2524141 - RNA, 19 nt, Artificial Sequence
  Description of Artificial Sequence: Synthetic oligonucleotide
ugcauacaucuuggacacu

SEQ ID NO: 2524142 - RNA, 19 nt, Artificial Sequence
  Description of Artificial Sequence: Synthetic oligonucleotide
caaggaagguagcuccacu

SEQ ID NO: 2524143 - RNA, 19 nt, Artificial Sequence
  Description of Artificial Sequence: Synthetic oligonucleotide
gccuucugugagaaucugc

SEQ ID NO: 2524144 - RNA, 19 nt, Artificial Sequence
  Description of Artificial Sequence: Synthetic oligonucleotide
gugcuccggcaccaugcgc

SEQ ID NO: 2524145 - RNA, 19 nt, Artificial Sequence
  Description of Artificial Sequence: Synthetic oligonucleotide
agagcccugagugccucau

SEQ ID NO: 2524146 - RNA, 19 nt, Artificial Sequence
  Description of Artificial Sequence: Synthetic oligonucleotide
gccgaacgggcuuccgaag

SEQ ID NO: 2524147 - RNA, 19 nt, Artificial Sequence
  Description of Artificial Sequence: Synthetic oligonucleotide
gcuugucguaaaacucagc

SEQ ID NO: 2524148 - RNA, 19 nt, Artificial Sequence
  Description of Artificial Sequence: Synthetic oligonucleotide
caccugucacagaagcacu

SEQ ID NO: 2524149 - RNA, 19 nt, Artificial Sequence
  Description of Artificial Sequence: Synthetic oligonucleotide
ucgcagucacuggucucgu

SEQ ID NO: 2524150 - RNA, 19 nt, Artificial Sequence
  Description of Artificial Sequence: Synthetic oligonucleotide
ugccagccacgcugcugcc

SEQ ID NO: 2524151 - RNA, 19 nt, Artificial Sequence
  Description of Artificial Sequence: Synthetic oligonucleotide
gagcccugagugccucauc

SEQ ID NO: 2524152 - RNA, 19 nt, Artificial Sequence
  Description of Artificial Sequence: Synthetic oligonucleotide
cgcggugagacaccagggc

SEQ ID NO: 2524153 - RNA, 19 nt, Artificial Sequence
  Description of Artificial Sequence: Synthetic oligonucleotide
cgaacgggcuuccgaaggc

SEQ ID NO: 2524154 - RNA, 19 nt, Artificial Sequence
  Description of Artificial Sequence: Synthetic oligonucleotide
cuuccgaaggcgcggugcu

SEQ ID NO: 2524155 - RNA, 19 nt, Artificial Sequence
  Description of Artificial Sequence: Synthetic oligonucleotide
ggcgcggugcuccggcacc

SEQ ID NO: 2524156 - RNA, 19 nt, Artificial Sequence
  Description of Artificial Sequence: Synthetic oligonucleotide
ggcaagcagcuuggacucg

SEQ ID NO: 2524157 - RNA, 19 nt, Artificial Sequence
  Description of Artificial Sequence: Synthetic oligonucleotide
gcuccggcaccaugcgcag

SEQ ID NO: 2524158 - RNA, 19 nt, Artificial Sequence
  Description of Artificial Sequence: Synthetic oligonucleotide
uguccccguccagaaucaa

SEQ ID NO: 2524159 - RNA, 19 nt, Artificial Sequence
  Description of Artificial Sequence: Synthetic oligonucleotide
uuccgaaggcgcggugcuc

SEQ ID NO: 2524160 - RNA, 19 nt, Artificial Sequence
  Description of Artificial Sequence: Synthetic oligonucleotide
ggacacucuuuguccggga

SEQ ID NO: 2524161 - RNA, 19 nt, Artificial Sequence
  Description of Artificial Sequence: Synthetic oligonucleotide
gggcgagcgcacaagcuuc

SEQ ID NO: 2524162 - RNA, 19 nt, Artificial Sequence
  Description of Artificial Sequence: Synthetic oligonucleotide
gguugccuugugcauggcu

SEQ ID NO: 2524163 - RNA, 19 nt, Artificial Sequence
  Description of Artificial Sequence: Synthetic oligonucleotide
cgugauucauagaggagcu

SEQ ID NO: 2524164 - RNA, 19 nt, Artificial Sequence
  Description of Artificial Sequence: Synthetic oligonucleotide
augcgccgaaguggcaccu

SEQ ID NO: 2524165 - RNA, 19 nt, Artificial Sequence
  Description of Artificial Sequence: Synthetic oligonucleotide
acucuuuguccgggaccca

SEQ ID NO: 2524166 - RNA, 19 nt, Artificial Sequence
  Description of Artificial Sequence: Synthetic oligonucleotide
gcaucacacugcauacauc

SEQ ID NO: 2524167 - RNA, 19 nt, Artificial Sequence
  Description of Artificial Sequence: Synthetic oligonucleotide
cgagcgcacaagcuucuug

SEQ ID NO: 2524168 - RNA, 19 nt, Artificial Sequence
  Description of Artificial Sequence: Synthetic oligonucleotide
cugccccuggcacugugua

SEQ ID NO: 2524169 - RNA, 19 nt, Artificial Sequence
  Description of Artificial Sequence: Synthetic oligonucleotide
cuccggcaccaugcgcagg

SEQ ID NO: 2524170 - RNA, 19 nt, Artificial Sequence
  Description of Artificial Sequence: Synthetic oligonucleotide
caggaacaugccuguggcu

SEQ ID NO: 2524171 - RNA, 19 nt, Artificial Sequence
  Description of Artificial Sequence: Synthetic oligonucleotide
cacaugcgccgaaguggca

SEQ ID NO: 2524172 - RNA, 19 nt, Artificial Sequence
  Description of Artificial Sequence: Synthetic oligonucleotide
gugccucaucaggcagggg

SEQ ID NO: 2524173 - RNA, 19 nt, Artificial Sequence
  Description of Artificial Sequence: Synthetic oligonucleotide
caccaugcgcaggccgcug

SEQ ID NO: 2524174 - RNA, 19 nt, Artificial Sequence
  Description of Artificial Sequence: Synthetic oligonucleotide
gcgccgaaguggcaccuuc

SEQ ID NO: 2524175 - RNA, 19 nt, Artificial Sequence
  Description of Artificial Sequence: Synthetic oligonucleotide
caagcagcuuggacucggu

SEQ ID NO: 2524176 - RNA, 19 nt, Artificial Sequence
  Description of Artificial Sequence: Synthetic oligonucleotide
ccacgcugcugccugucuc

SEQ ID NO: 2524177 - RNA, 19 nt, Artificial Sequence
  Description of Artificial Sequence: Synthetic oligonucleotide
ccgaaggcgcggugcuccg

SEQ ID NO: 2524178 - RNA, 19 nt, Artificial Sequence
  Description of Artificial Sequence: Synthetic oligonucleotide
cagagcccugagugccuca

SEQ ID NO: 2524179 - RNA, 19 nt, Artificial Sequence
  Description of Artificial Sequence: Synthetic oligonucleotide
ccucgcagucacuggucuc

SEQ ID NO: 2524180 - RNA, 19 nt, Artificial Sequence
  Description of Artificial Sequence: Synthetic oligonucleotide
gcucgagugcugccugcuc

SEQ ID NO: 2524181 - RNA, 19 nt, Artificial Sequence
  Description of Artificial Sequence: Synthetic oligonucleotide
ugcgccgaaguggcaccuu

SEQ ID NO: 2524182 - RNA, 19 nt, Artificial Sequence
  Description of Artificial Sequence: Synthetic oligonucleotide
ccccguccagaaucaagca

SEQ ID NO: 2524183 - RNA, 19 nt, Artificial Sequence
  Description of Artificial Sequence: Synthetic oligonucleotide
ggcgcacuggguccacaaa

SEQ ID NO: 2524184 - RNA, 19 nt, Artificial Sequence
  Description of Artificial Sequence: Synthetic oligonucleotide
ccaagccgaacgggcuucc

SEQ ID NO: 2524185 - RNA, 19 nt, Artificial Sequence
  Description of Artificial Sequence: Synthetic oligonucleotide
cugugagaaucugcacagu

SEQ ID NO: 2524186 - RNA, 19 nt, Artificial Sequence
  Description of Artificial Sequence: Synthetic oligonucleotide
caguacagacaugcgcaau

SEQ ID NO: 2524187 - RNA, 19 nt, Artificial Sequence
  Description of Artificial Sequence: Synthetic oligonucleotide
gugauucauagaggagcuu

SEQ ID NO: 2524188 - RNA, 19 nt, Artificial Sequence
  Description of Artificial Sequence: Synthetic oligonucleotide
cgggcuuccgaaggcgcgg

SEQ ID NO: 2524189 - RNA, 19 nt, Artificial Sequence
  Description of Artificial Sequence: Synthetic oligonucleotide
cguccagaaucaagcaucu

SEQ ID NO: 2524190 - RNA, 19 nt, Artificial Sequence
  Description of Artificial Sequence: Synthetic oligonucleotide
cccacugcggcuccuccaa

SEQ ID NO: 2524191 - RNA, 19 nt, Artificial Sequence
  Description of Artificial Sequence: Synthetic oligonucleotide
acucagccucgcggugaga

SEQ ID NO: 2524192 - RNA, 19 nt, Artificial Sequence
  Description of Artificial Sequence: Synthetic oligonucleotide
cauggcugccagccacgcu

SEQ ID NO: 2524193 - RNA, 19 nt, Artificial Sequence
  Description of Artificial Sequence: Synthetic oligonucleotide
ccucgcggugagacaccag

SEQ ID NO: 2524194 - RNA, 19 nt, Artificial Sequence
  Description of Artificial Sequence: Synthetic oligonucleotide
gccucgcggugagacacca

SEQ ID NO: 2524195 - RNA, 19 nt, Artificial Sequence
  Description of Artificial Sequence: Synthetic oligonucleotide
cacuggucucgugauucau

SEQ ID NO: 2524196 - RNA, 19 nt, Artificial Sequence
  Description of Artificial Sequence: Synthetic oligonucleotide
cucggcacacuggcgcacu

SEQ ID NO: 2524197 - RNA, 19 nt, Artificial Sequence
  Description of Artificial Sequence: Synthetic oligonucleotide
cccguccagaaucaagcau

SEQ ID NO: 2524198 - RNA, 19 nt, Artificial Sequence
  Description of Artificial Sequence: Synthetic oligonucleotide
caucagccgcagcuguguu

SEQ ID NO: 2524199 - RNA, 19 nt, Artificial Sequence
  Description of Artificial Sequence: Synthetic oligonucleotide
cuggcgcacuggguccaca

SEQ ID NO: 2524200 - RNA, 19 nt, Artificial Sequence
  Description of Artificial Sequence: Synthetic oligonucleotide
cgguaaccugaugugcuga

SEQ ID NO: 2524201 - RNA, 19 nt, Artificial Sequence
  Description of Artificial Sequence: Synthetic oligonucleotide
cagccgcagcuguguugca

SEQ ID NO: 2524202 - RNA, 19 nt, Artificial Sequence
  Description of Artificial Sequence: Synthetic oligonucleotide
ccaucagccgcagcugugu

SEQ ID NO: 2524203 - RNA, 19 nt, Artificial Sequence
  Description of Artificial Sequence: Synthetic oligonucleotide
ggcucgagugcugccugcu

SEQ ID NO: 2524204 - RNA, 19 nt, Artificial Sequence
  Description of Artificial Sequence: Synthetic oligonucleotide
ggcgagcgcacaagcuucu

SEQ ID NO: 2524205 - RNA, 19 nt, Artificial Sequence
  Description of Artificial Sequence: Synthetic oligonucleotide
cgaaggcgcggugcuccgg

SEQ ID NO: 2524206 - RNA, 19 nt, Artificial Sequence
  Description of Artificial Sequence: Synthetic oligonucleotide
ggcuguccccguccagaau

SEQ ID NO: 2524207 - RNA, 19 nt, Artificial Sequence
  Description of Artificial Sequence: Synthetic oligonucleotide
gcacacuggcgcacugggu

SEQ ID NO: 2524208 - RNA, 19 nt, Artificial Sequence
  Description of Artificial Sequence: Synthetic oligonucleotide
gcaccaugcgcaggccgcu

SEQ ID NO: 2524209 - RNA, 19 nt, Artificial Sequence
  Description of Artificial Sequence: Synthetic oligonucleotide
gcgcggugcuccggcacca

SEQ ID NO: 2524210 - RNA, 19 nt, Artificial Sequence
  Description of Artificial Sequence: Synthetic oligonucleotide
gggcuuccgaaggcgcggu

SEQ ID NO: 2524211 - RNA, 19 nt, Artificial Sequence
  Description of Artificial Sequence: Synthetic oligonucleotide
gcggcggcaguggugcuuu

SEQ ID NO: 2524212 - RNA, 19 nt, Artificial Sequence
  Description of Artificial Sequence: Synthetic oligonucleotide
cgccgaaguggcaccuucu

SEQ ID NO: 2524213 - RNA, 19 nt, Artificial Sequence
  Description of Artificial Sequence: Synthetic oligonucleotide
ccgcugggcgagcgcacaa

SEQ ID NO: 2524214 - RNA, 19 nt, Artificial Sequence
  Description of Artificial Sequence: Synthetic oligonucleotide
ccacagcggcggcaguggu

SEQ ID NO: 2524215 - RNA, 19 nt, Artificial Sequence
  Description of Artificial Sequence: Synthetic oligonucleotide
gcggcuccuccaagccgaa

SEQ ID NO: 2524216 - RNA, 19 nt, Artificial Sequence
  Description of Artificial Sequence: Synthetic oligonucleotide
gcgagcgcacaagcuucuu

SEQ ID NO: 2524217 - RNA, 19 nt, Artificial Sequence
  Description of Artificial Sequence: Synthetic oligonucleotide
cggcggcaguggugcuuuc

SEQ ID NO: 2524218 - RNA, 19 nt, Artificial Sequence
  Description of Artificial Sequence: Synthetic oligonucleotide
aguaagaucucccggagcc

SEQ ID NO: 2524219 - RNA, 19 nt, Artificial Sequence
  Description of Artificial Sequence: Synthetic oligonucleotide
uuucucaacaaacacgggg

SEQ ID NO: 2524220 - RNA, 19 nt, Artificial Sequence
  Description of Artificial Sequence: Synthetic oligonucleotide
ugaaugagcaggcagaugu

SEQ ID NO: 2524221 - RNA, 19 nt, Artificial Sequence
  Description of Artificial Sequence: Synthetic oligonucleotide
uccaaaauaucugaggcgg

SEQ ID NO: 2524222 - RNA, 19 nt, Artificial Sequence
  Description of Artificial Sequence: Synthetic oligonucleotide
uacaguauaccacccagcg

SEQ ID NO: 2524223 - RNA, 19 nt, Artificial Sequence
  Description of Artificial Sequence: Synthetic oligonucleotide
ugucccuugaucgagagcg

SEQ ID NO: 2524224 - RNA, 19 nt, Artificial Sequence
  Description of Artificial Sequence: Synthetic oligonucleotide
aaauaucugaggcgguggc

SEQ ID NO: 2524225 - RNA, 19 nt, Artificial Sequence
  Description of Artificial Sequence: Synthetic oligonucleotide
aauacauguguagaugccg

SEQ ID NO: 2524226 - RNA, 19 nt, Artificial Sequence
  Description of Artificial Sequence: Synthetic oligonucleotide
uuuguuggcucccugaaug

SEQ ID NO: 2524227 - RNA, 19 nt, Artificial Sequence
  Description of Artificial Sequence: Synthetic oligonucleotide
ugaacaguaagaucucccg

SEQ ID NO: 2524228 - RNA, 19 nt, Artificial Sequence
  Description of Artificial Sequence: Synthetic oligonucleotide
aguuucucaacaaacacgg

SEQ ID NO: 2524229 - RNA, 19 nt, Artificial Sequence
  Description of Artificial Sequence: Synthetic oligonucleotide
gaagaaucgcuccugaaug

SEQ ID NO: 2524230 - RNA, 19 nt, Artificial Sequence
  Description of Artificial Sequence: Synthetic oligonucleotide
gauacaguauaccacccag

SEQ ID NO: 2524231 - RNA, 19 nt, Artificial Sequence
  Description of Artificial Sequence: Synthetic oligonucleotide
aacaguaagaucucccgga

SEQ ID NO: 2524232 - RNA, 19 nt, Artificial Sequence
  Description of Artificial Sequence: Synthetic oligonucleotide
uugguugacagccuguacc

SEQ ID NO: 2524233 - RNA, 19 nt, Artificial Sequence
  Description of Artificial Sequence: Synthetic oligonucleotide
aagaaucgcuccugaaugg

SEQ ID NO: 2524234 - RNA, 19 nt, Artificial Sequence
  Description of Artificial Sequence: Synthetic oligonucleotide
aaaauaucugaggcggugg

SEQ ID NO: 2524235 - RNA, 19 nt, Artificial Sequence
  Description of Artificial Sequence: Synthetic oligonucleotide
aguuuugccuuccugaaca

SEQ ID NO: 2524236 - RNA, 19 nt, Artificial Sequence
  Description of Artificial Sequence: Synthetic oligonucleotide
aacccacugacuuuugcag

SEQ ID NO: 2524237 - RNA, 19 nt, Artificial Sequence
  Description of Artificial Sequence: Synthetic oligonucleotide
caucaucuaggguagaggc

SEQ ID NO: 2524238 - RNA, 19 nt, Artificial Sequence
  Description of Artificial Sequence: Synthetic oligonucleotide
uccuguacaacugacacga

SEQ ID NO: 2524239 - RNA, 19 nt, Artificial Sequence
  Description of Artificial Sequence: Synthetic oligonucleotide
acagccuguaccauuagcc

SEQ ID NO: 2524240 - RNA, 19 nt, Artificial Sequence
  Description of Artificial Sequence: Synthetic oligonucleotide
cucguuuucaucuccacug

SEQ ID NO: 2524241 - RNA, 19 nt, Artificial Sequence
  Description of Artificial Sequence: Synthetic oligonucleotide
caguuucucaacaaacacg

SEQ ID NO: 2524242 - RNA, 19 nt, Artificial Sequence
  Description of Artificial Sequence: Synthetic oligonucleotide
acugcgaccucuuugguug

SEQ ID NO: 2524243 - RNA, 19 nt, Artificial Sequence
  Description of Artificial Sequence: Synthetic oligonucleotide
auaaugagggaguguacuc

SEQ ID NO: 2524244 - RNA, 19 nt, Artificial Sequence
  Description of Artificial Sequence: Synthetic oligonucleotide
ucuauaaugagggagugua

SEQ ID NO: 2524245 - RNA, 19 nt, Artificial Sequence
  Description of Artificial Sequence: Synthetic oligonucleotide
gaacaguaagaucucccgg

SEQ ID NO: 2524246 - RNA, 19 nt, Artificial Sequence
  Description of Artificial Sequence: Synthetic oligonucleotide
caguauaccacccagcguc

SEQ ID NO: 2524247 - RNA, 19 nt, Artificial Sequence
  Description of Artificial Sequence: Synthetic oligonucleotide
uauaaugagggaguguacu

SEQ ID NO: 2524248 - RNA, 19 nt, Artificial Sequence
  Description of Artificial Sequence: Synthetic oligonucleotide
ugcuucuuuagcagcaacc

SEQ ID NO: 2524249 - RNA, 19 nt, Artificial Sequence
  Description of Artificial Sequence: Synthetic oligonucleotide
uguaccauuagccguccug

SEQ ID NO: 2524250 - RNA, 19 nt, Artificial Sequence
  Description of Artificial Sequence: Synthetic oligonucleotide
uguagaugccggcaucccg

SEQ ID NO: 2524251 - RNA, 19 nt, Artificial Sequence
  Description of Artificial Sequence: Synthetic oligonucleotide
gaguguacuccauucuggg

SEQ ID NO: 2524252 - RNA, 19 nt, Artificial Sequence
  Description of Artificial Sequence: Synthetic oligonucleotide
uuagccguccuguacaacu

SEQ ID NO: 2524253 - RNA, 19 nt, Artificial Sequence
  Description of Artificial Sequence: Synthetic oligonucleotide
uugguggcaauacaugugu

SEQ ID NO: 2524254 - RNA, 19 nt, Artificial Sequence
  Description of Artificial Sequence: Synthetic oligonucleotide
ugacuuuugcaguccaucc

SEQ ID NO: 2524255 - RNA, 19 nt, Artificial Sequence
  Description of Artificial Sequence: Synthetic oligonucleotide
gguuaaaagaguucugccc

SEQ ID NO: 2524256 - RNA, 19 nt, Artificial Sequence
  Description of Artificial Sequence: Synthetic oligonucleotide
aacucggcacuccagccuc

SEQ ID NO: 2524257 - RNA, 19 nt, Artificial Sequence
  Description of Artificial Sequence: Synthetic oligonucleotide
uguaguucccgucaucauc

SEQ ID NO: 2524258 - RNA, 19 nt, Artificial Sequence
  Description of Artificial Sequence: Synthetic oligonucleotide
uaugcagggagcagguccc

SEQ ID NO: 2524259 - RNA, 19 nt, Artificial Sequence
  Description of Artificial Sequence: Synthetic oligonucleotide
ucaucaucuaggguagagg

SEQ ID NO: 2524260 - RNA, 19 nt, Artificial Sequence
  Description of Artificial Sequence: Synthetic oligonucleotide
guaugcagggagcaggucc

SEQ ID NO: 2524261 - RNA, 19 nt, Artificial Sequence
  Description of Artificial Sequence: Synthetic oligonucleotide
cugaacaguaagaucuccc

SEQ ID NO: 2524262 - RNA, 19 nt, Artificial Sequence
  Description of Artificial Sequence: Synthetic oligonucleotide
uguguaguucccgucauca

SEQ ID NO: 2524263 - RNA, 19 nt, Artificial Sequence
  Description of Artificial Sequence: Synthetic oligonucleotide
accauuagccguccuguac

SEQ ID NO: 2524264 - RNA, 19 nt, Artificial Sequence
  Description of Artificial Sequence: Synthetic oligonucleotide
ugcuuacucgcucagugcu

SEQ ID NO: 2524265 - RNA, 19 nt, Artificial Sequence
  Description of Artificial Sequence: Synthetic oligonucleotide
ucuaggguagaggccaugg

SEQ ID NO: 2524266 - RNA, 19 nt, Artificial Sequence
  Description of Artificial Sequence: Synthetic oligonucleotide
gauuguguaguucccguca

SEQ ID NO: 2524267 - RNA, 19 nt, Artificial Sequence
  Description of Artificial Sequence: Synthetic oligonucleotide
augcuuacucgcucagugc

SEQ ID NO: 2524268 - RNA, 19 nt, Artificial Sequence
  Description of Artificial Sequence: Synthetic oligonucleotide
caugcuuacucgcucagug

SEQ ID NO: 2524269 - RNA, 19 nt, Artificial Sequence
  Description of Artificial Sequence: Synthetic oligonucleotide
uaaugagggaguguacucc

SEQ ID NO: 2524270 - RNA, 19 nt, Artificial Sequence
  Description of Artificial Sequence: Synthetic oligonucleotide
cagguuaaaagaguucugc

SEQ ID NO: 2524271 - RNA, 19 nt, Artificial Sequence
  Description of Artificial Sequence: Synthetic oligonucleotide
guuaaaagaguucugcccu

SEQ ID NO: 2524272 - RNA, 19 nt, Artificial Sequence
  Description of Artificial Sequence: Synthetic oligonucleotide
uaacccacugacuuuugca

SEQ ID NO: 2524273 - RNA, 19 nt, Artificial Sequence
  Description of Artificial Sequence: Synthetic oligonucleotide
gagugagcgauucauuuuc

SEQ ID NO: 2524274 - RNA, 19 nt, Artificial Sequence
  Description of Artificial Sequence: Synthetic oligonucleotide
ucuuuuguuggcucccuga

SEQ ID NO: 2524275 - RNA, 19 nt, Artificial Sequence
  Description of Artificial Sequence: Synthetic oligonucleotide
uuggcucccugaaugagca

SEQ ID NO: 2524276 - RNA, 19 nt, Artificial Sequence
  Description of Artificial Sequence: Synthetic oligonucleotide
gauggcccgagggagagcg

SEQ ID NO: 2524277 - RNA, 19 nt, Artificial Sequence
  Description of Artificial Sequence: Synthetic oligonucleotide
aguguacuccauucugggg

SEQ ID NO: 2524278 - RNA, 19 nt, Artificial Sequence
  Description of Artificial Sequence: Synthetic oligonucleotide
cuguacaacugacacgacc

SEQ ID NO: 2524279 - RNA, 19 nt, Artificial Sequence
  Description of Artificial Sequence: Synthetic oligonucleotide
ucccugaaugagcaggcag

SEQ ID NO: 2524280 - RNA, 19 nt, Artificial Sequence
  Description of Artificial Sequence: Synthetic oligonucleotide
gaaacucggcacuccagcc

SEQ ID NO: 2524281 - RNA, 19 nt, Artificial Sequence
  Description of Artificial Sequence: Synthetic oligonucleotide
uucccgucaucaucuaggg

SEQ ID NO: 2524282 - RNA, 19 nt, Artificial Sequence
  Description of Artificial Sequence: Synthetic oligonucleotide
uggcucuauaaugagggag

SEQ ID NO: 2524283 - RNA, 19 nt, Artificial Sequence
  Description of Artificial Sequence: Synthetic oligonucleotide
ucguucuuggcggauacag

SEQ ID NO: 2524284 - RNA, 19 nt, Artificial Sequence
  Description of Artificial Sequence: Synthetic oligonucleotide
uucugcccugcucuguugg

SEQ ID NO: 2524285 - RNA, 19 nt, Artificial Sequence
  Description of Artificial Sequence: Synthetic oligonucleotide
guucccgucaucaucuagg

SEQ ID NO: 2524286 - RNA, 19 nt, Artificial Sequence
  Description of Artificial Sequence: Synthetic oligonucleotide
acaguaagaucucccggag

SEQ ID NO: 2524287 - RNA, 19 nt, Artificial Sequence
  Description of Artificial Sequence: Synthetic oligonucleotide
aacugacacgacccugagg

SEQ ID NO: 2524288 - RNA, 19 nt, Artificial Sequence
  Description of Artificial Sequence: Synthetic oligonucleotide
aaacucggcacuccagccu

SEQ ID NO: 2524289 - RNA, 19 nt, Artificial Sequence
  Description of Artificial Sequence: Synthetic oligonucleotide
auacauguguagaugccgg

SEQ ID NO: 2524290 - RNA, 19 nt, Artificial Sequence
  Description of Artificial Sequence: Synthetic oligonucleotide
agugcugugagugagcgau

SEQ ID NO: 2524291 - RNA, 19 nt, Artificial Sequence
  Description of Artificial Sequence: Synthetic oligonucleotide
auacaguauaccacccagc

SEQ ID NO: 2524292 - RNA, 19 nt, Artificial Sequence
  Description of Artificial Sequence: Synthetic oligonucleotide
uggcggauacaguauacca

SEQ ID NO: 2524293 - RNA, 19 nt, Artificial Sequence
  Description of Artificial Sequence: Synthetic oligonucleotide
augguaugcagggagcagg

SEQ ID NO: 2524294 - RNA, 19 nt, Artificial Sequence
  Description of Artificial Sequence: Synthetic oligonucleotide
cuugugugcuucuuuagca

SEQ ID NO: 2524295 - RNA, 19 nt, Artificial Sequence
  Description of Artificial Sequence: Synthetic oligonucleotide
caugauuguguaguucccg

SEQ ID NO: 2524296 - RNA, 19 nt, Artificial Sequence
  Description of Artificial Sequence: Synthetic oligonucleotide
gccaugauuguguaguucc

SEQ ID NO: 2524297 - RNA, 19 nt, Artificial Sequence
  Description of Artificial Sequence: Synthetic oligonucleotide
uuuugcaguuucucaacaa

SEQ ID NO: 2524298 - RNA, 19 nt, Artificial Sequence
  Description of Artificial Sequence: Synthetic oligonucleotide
cagccuguaccauuagccg

SEQ ID NO: 2524299 - RNA, 19 nt, Artificial Sequence
  Description of Artificial Sequence: Synthetic oligonucleotide
uguguagaugccggcaucc

SEQ ID NO: 2524300 - RNA, 19 nt, Artificial Sequence
  Description of Artificial Sequence: Synthetic oligonucleotide
gagagcgaggccuucuggc

SEQ ID NO: 2524301 - RNA, 19 nt, Artificial Sequence
  Description of Artificial Sequence: Synthetic oligonucleotide
uuauccuggugcaugcuua

SEQ ID NO: 2524302 - RNA, 19 nt, Artificial Sequence
  Description of Artificial Sequence: Synthetic oligonucleotide
agcaaccacaagcuccagg

SEQ ID NO: 2524303 - RNA, 19 nt, Artificial Sequence
  Description of Artificial Sequence: Synthetic oligonucleotide
augauuguguaguucccgu

SEQ ID NO: 2524304 - RNA, 19 nt, Artificial Sequence
  Description of Artificial Sequence: Synthetic oligonucleotide
uaggguagaggccauggua

SEQ ID NO: 2524305 - RNA, 19 nt, Artificial Sequence
  Description of Artificial Sequence: Synthetic oligonucleotide
aggccggaagaaucgcucc

SEQ ID NO: 2524306 - RNA, 19 nt, Artificial Sequence
  Description of Artificial Sequence: Synthetic oligonucleotide
agaaucgcuccugaauggg

SEQ ID NO: 2524307 - RNA, 19 nt, Artificial Sequence
  Description of Artificial Sequence: Synthetic oligonucleotide
uugacagccuguaccauua

SEQ ID NO: 2524308 - RNA, 19 nt, Artificial Sequence
  Description of Artificial Sequence: Synthetic oligonucleotide
agugaggccggaagaaucg

SEQ ID NO: 2524309 - RNA, 19 nt, Artificial Sequence
  Description of Artificial Sequence: Synthetic oligonucleotide
agcgauucauuuucuuucu

SEQ ID NO: 2524310 - RNA, 19 nt, Artificial Sequence
  Description of Artificial Sequence: Synthetic oligonucleotide
gguggcaauacauguguag

SEQ ID NO: 2524311 - RNA, 19 nt, Artificial Sequence
  Description of Artificial Sequence: Synthetic oligonucleotide
gggacugcgaccucuuugg

SEQ ID NO: 2524312 - RNA, 19 nt, Artificial Sequence
  Description of Artificial Sequence: Synthetic oligonucleotide
uggcacucccgaaacucgg

SEQ ID NO: 2524313 - RNA, 19 nt, Artificial Sequence
  Description of Artificial Sequence: Synthetic oligonucleotide
uaaaagaguucugcccugc

SEQ ID NO: 2524314 - RNA, 19 nt, Artificial Sequence
  Description of Artificial Sequence: Synthetic oligonucleotide
gaugccggcaucccgggac

SEQ ID NO: 2524315 - RNA, 19 nt, Artificial Sequence
  Description of Artificial Sequence: Synthetic oligonucleotide
cuauaaugagggaguguac

SEQ ID NO: 2524316 - RNA, 19 nt, Artificial Sequence
  Description of Artificial Sequence: Synthetic oligonucleotide
uuugguugacagccuguac

SEQ ID NO: 2524317 - RNA, 19 nt, Artificial Sequence
  Description of Artificial Sequence: Synthetic oligonucleotide
gacuggcucuauaaugagg

SEQ ID NO: 2524318 - RNA, 19 nt, Artificial Sequence
  Description of Artificial Sequence: Synthetic oligonucleotide
gccaugguuauccuggugc

SEQ ID NO: 2524319 - RNA, 19 nt, Artificial Sequence
  Description of Artificial Sequence: Synthetic oligonucleotide
ugguuauccuggugcaugc

SEQ ID NO: 2524320 - RNA, 19 nt, Artificial Sequence
  Description of Artificial Sequence: Synthetic oligonucleotide
gcggauacaguauaccacc

SEQ ID NO: 2524321 - RNA, 19 nt, Artificial Sequence
  Description of Artificial Sequence: Synthetic oligonucleotide
uacauguguagaugccggc

SEQ ID NO: 2524322 - RNA, 19 nt, Artificial Sequence
  Description of Artificial Sequence: Synthetic oligonucleotide
cuuccugaacaguaagauc

SEQ ID NO: 2524323 - RNA, 19 nt, Artificial Sequence
  Description of Artificial Sequence: Synthetic oligonucleotide
uaagaucucccggagccug

SEQ ID NO: 2524324 - RNA, 19 nt, Artificial Sequence
  Description of Artificial Sequence: Synthetic oligonucleotide
aaucgcuccugaaugggcu

SEQ ID NO: 2524325 - RNA, 19 nt, Artificial Sequence
  Description of Artificial Sequence: Synthetic oligonucleotide
cuguugguggcaauacaug

SEQ ID NO: 2524326 - RNA, 19 nt, Artificial Sequence
  Description of Artificial Sequence: Synthetic oligonucleotide
auguguagaugccggcauc

SEQ ID NO: 2524327 - RNA, 19 nt, Artificial Sequence
  Description of Artificial Sequence: Synthetic oligonucleotide
ugcaugcuuacucgcucag

SEQ ID NO: 2524328 - RNA, 19 nt, Artificial Sequence
  Description of Artificial Sequence: Synthetic oligonucleotide
ggcagugcaggacacaaug

SEQ ID NO: 2524329 - RNA, 19 nt, Artificial Sequence
  Description of Artificial Sequence: Synthetic oligonucleotide
gacagccuguaccauuagc

SEQ ID NO: 2524330 - RNA, 19 nt, Artificial Sequence
  Description of Artificial Sequence: Synthetic oligonucleotide
ccagcuucguucuuggcgg

SEQ ID NO: 2524331 - RNA, 19 nt, Artificial Sequence
  Description of Artificial Sequence: Synthetic oligonucleotide
aggaagugaggccggaaga

SEQ ID NO: 2524332 - RNA, 19 nt, Artificial Sequence
  Description of Artificial Sequence: Synthetic oligonucleotide
uccugaaugggcucguuuu

SEQ ID NO: 2524333 - RNA, 19 nt, Artificial Sequence
  Description of Artificial Sequence: Synthetic oligonucleotide
uggcaauacauguguagau

SEQ ID NO: 2524334 - RNA, 19 nt, Artificial Sequence
  Description of Artificial Sequence: Synthetic oligonucleotide
gccagcuucguucuuggcg

SEQ ID NO: 2524335 - RNA, 19 nt, Artificial Sequence
  Description of Artificial Sequence: Synthetic oligonucleotide
acucgcucagugcugugag

SEQ ID NO: 2524336 - RNA, 19 nt, Artificial Sequence
  Description of Artificial Sequence: Synthetic oligonucleotide
ucgcucagugcugugagug

SEQ ID NO: 2524337 - RNA, 19 nt, Artificial Sequence
  Description of Artificial Sequence: Synthetic oligonucleotide
cauucugggguugguaacc

SEQ ID NO: 2524338 - RNA, 19 nt, Artificial Sequence
  Description of Artificial Sequence: Synthetic oligonucleotide
ucuuggcggauacaguaua

SEQ ID NO: 2524339 - RNA, 19 nt, Artificial Sequence
  Description of Artificial Sequence: Synthetic oligonucleotide
guucuuggcggauacagua

SEQ ID NO: 2524340 - RNA, 19 nt, Artificial Sequence
  Description of Artificial Sequence: Synthetic oligonucleotide
uuuuguuggcucccugaau

SEQ ID NO: 2524341 - RNA, 19 nt, Artificial Sequence
  Description of Artificial Sequence: Synthetic oligonucleotide
guguuuugcaguuucucaa

SEQ ID NO: 2524342 - RNA, 19 nt, Artificial Sequence
  Description of Artificial Sequence: Synthetic oligonucleotide
acugucccuugaucgagag

SEQ ID NO: 2524343 - RNA, 19 nt, Artificial Sequence
  Description of Artificial Sequence: Synthetic oligonucleotide
uuggcggauacaguauacc

SEQ ID NO: 2524344 - RNA, 19 nt, Artificial Sequence
  Description of Artificial Sequence: Synthetic oligonucleotide
gacgugacuggcucuauaa

SEQ ID NO: 2524345 - RNA, 19 nt, Artificial Sequence
  Description of Artificial Sequence: Synthetic oligonucleotide
ugggguugguaacccacug

SEQ ID NO: 2524346 - RNA, 19 nt, Artificial Sequence
  Description of Artificial Sequence: Synthetic oligonucleotide
ugauuguguaguucccguc

SEQ ID NO: 2524347 - RNA, 19 nt, Artificial Sequence
  Description of Artificial Sequence: Synthetic oligonucleotide
cuuggcggauacaguauac

SEQ ID NO: 2524348 - RNA, 19 nt, Artificial Sequence
  Description of Artificial Sequence: Synthetic oligonucleotide
agccuguaccauuagccgu

SEQ ID NO: 2524349 - RNA, 19 nt, Artificial Sequence
  Description of Artificial Sequence: Synthetic oligonucleotide
guugguaacccacugacuu

SEQ ID NO: 2524350 - RNA, 19 nt, Artificial Sequence
  Description of Artificial Sequence: Synthetic oligonucleotide
uuguuggcucccugaauga

SEQ ID NO: 2524351 - RNA, 19 nt, Artificial Sequence
  Description of Artificial Sequence: Synthetic oligonucleotide
guaacccacugacuuuugc

SEQ ID NO: 2524352 - RNA, 19 nt, Artificial Sequence
  Description of Artificial Sequence: Synthetic oligonucleotide
uacaacugacacgacccug

SEQ ID NO: 2524353 - RNA, 19 nt, Artificial Sequence
  Description of Artificial Sequence: Synthetic oligonucleotide
ugugagugagcgauucauu

SEQ ID NO: 2524354 - RNA, 19 nt, Artificial Sequence
  Description of Artificial Sequence: Synthetic oligonucleotide
acaguauaccacccagcgu

SEQ ID NO: 2524355 - RNA, 19 nt, Artificial Sequence
  Description of Artificial Sequence: Synthetic oligonucleotide
ggaguguacuccauucugg

SEQ ID NO: 2524356 - RNA, 19 nt, Artificial Sequence
  Description of Artificial Sequence: Synthetic oligonucleotide
uucuuggcggauacaguau

SEQ ID NO: 2524357 - RNA, 19 nt, Artificial Sequence
  Description of Artificial Sequence: Synthetic oligonucleotide
aguucccgucaucaucuag

SEQ ID NO: 2524358 - RNA, 19 nt, Artificial Sequence
  Description of Artificial Sequence: Synthetic oligonucleotide
gucaucaucuaggguagag

SEQ ID NO: 2524359 - RNA, 19 nt, Artificial Sequence
  Description of Artificial Sequence: Synthetic oligonucleotide
uagccguccuguacaacug

SEQ ID NO: 2524360 - RNA, 19 nt, Artificial Sequence
  Description of Artificial Sequence: Synthetic oligonucleotide
uagaugccggcaucccggg

SEQ ID NO: 2524361 - RNA, 19 nt, Artificial Sequence
  Description of Artificial Sequence: Synthetic oligonucleotide
gaguuuugccuuccugaac

SEQ ID NO: 2524362 - RNA, 19 nt, Artificial Sequence
  Description of Artificial Sequence: Synthetic oligonucleotide
auuguguaguucccgucau

SEQ ID NO: 2524363 - RNA, 19 nt, Artificial Sequence
  Description of Artificial Sequence: Synthetic oligonucleotide
aucgcuccugaaugggcuc

SEQ ID NO: 2524364 - RNA, 19 nt, Artificial Sequence
  Description of Artificial Sequence: Synthetic oligonucleotide
uggugcaugcuuacucgcu

SEQ ID NO: 2524365 - RNA, 19 nt, Artificial Sequence
  Description of Artificial Sequence: Synthetic oligonucleotide
uacccaucggcuaccccug

SEQ ID NO: 2524366 - RNA, 19 nt, Artificial Sequence
  Description of Artificial Sequence: Synthetic oligonucleotide
agagcgaggccuucuggca

SEQ ID NO: 2524367 - RNA, 19 nt, Artificial Sequence
  Description of Artificial Sequence: Synthetic oligonucleotide
ucccaucaaggucucucug

SEQ ID NO: 2524368 - RNA, 19 nt, Artificial Sequence
  Description of Artificial Sequence: Synthetic oligonucleotide
ugaggccggaagaaucgcu

SEQ ID NO: 2524369 - RNA, 19 nt, Artificial Sequence
  Description of Artificial Sequence: Synthetic oligonucleotide
gaaucgcuccugaaugggc

SEQ ID NO: 2524370 - RNA, 19 nt, Artificial Sequence
  Description of Artificial Sequence: Synthetic oligonucleotide
cuggugcaugcuuacucgc

SEQ ID NO: 2524371 - RNA, 19 nt, Artificial Sequence
  Description of Artificial Sequence: Synthetic oligonucleotide
cugacuuuugcaguccauc

SEQ ID NO: 2524372 - RNA, 19 nt, Artificial Sequence
  Description of Artificial Sequence: Synthetic oligonucleotide
agggaguguacuccauucu

SEQ ID NO: 2524373 - RNA, 19 nt, Artificial Sequence
  Description of Artificial Sequence: Synthetic oligonucleotide
acaacugacacgacccuga

SEQ ID NO: 2524374 - RNA, 19 nt, Artificial Sequence
  Description of Artificial Sequence: Synthetic oligonucleotide
cuaccccuguguuuugcag

SEQ ID NO: 2524375 - RNA, 19 nt, Artificial Sequence
  Description of Artificial Sequence: Synthetic oligonucleotide
cuucguucuuggcggauac

SEQ ID NO: 2524376 - RNA, 19 nt, Artificial Sequence
  Description of Artificial Sequence: Synthetic oligonucleotide
ggguugguaacccacugac

SEQ ID NO: 2524377 - RNA, 19 nt, Artificial Sequence
  Description of Artificial Sequence: Synthetic oligonucleotide
guggcaauacauguguaga

SEQ ID NO: 2524378 - RNA, 19 nt, Artificial Sequence
  Description of Artificial Sequence: Synthetic oligonucleotide
ggcaauacauguguagaug

SEQ ID NO: 2524379 - RNA, 19 nt, Artificial Sequence
  Description of Artificial Sequence: Synthetic oligonucleotide
ucgagagcgaggccuucug

SEQ ID NO: 2524380 - RNA, 19 nt, Artificial Sequence
  Description of Artificial Sequence: Synthetic oligonucleotide
caguaagaucucccggagc

SEQ ID NO: 2524381 - RNA, 19 nt, Artificial Sequence
  Description of Artificial Sequence: Synthetic oligonucleotide
cucacuggguacccaucgg

SEQ ID NO: 2524382 - RNA, 19 nt, Artificial Sequence
  Description of Artificial Sequence: Synthetic oligonucleotide
ccuggugcaugcuuacucg

SEQ ID NO: 2524383 - RNA, 19 nt, Artificial Sequence
  Description of Artificial Sequence: Synthetic oligonucleotide
gggaguguacuccauucug

SEQ ID NO: 2524384 - RNA, 19 nt, Artificial Sequence
  Description of Artificial Sequence: Synthetic oligonucleotide
agccaugauuguguaguuc

SEQ ID NO: 2524385 - RNA, 19 nt, Artificial Sequence
  Description of Artificial Sequence: Synthetic oligonucleotide
uugccuuccugaacaguaa

SEQ ID NO: 2524386 - RNA, 19 nt, Artificial Sequence
  Description of Artificial Sequence: Synthetic oligonucleotide
guuucucaacaaacacggg

SEQ ID NO: 2524387 - RNA, 19 nt, Artificial Sequence
  Description of Artificial Sequence: Synthetic oligonucleotide
agcaggcagauguagccau

SEQ ID NO: 2524388 - RNA, 19 nt, Artificial Sequence
  Description of Artificial Sequence: Synthetic oligonucleotide
ugagggaguguacuccauu

SEQ ID NO: 2524389 - RNA, 19 nt, Artificial Sequence
  Description of Artificial Sequence: Synthetic oligonucleotide
gacacgacccugaggguug

SEQ ID NO: 2524390 - RNA, 19 nt, Artificial Sequence
  Description of Artificial Sequence: Synthetic oligonucleotide
caucccgggacgugacugg

SEQ ID NO: 2524391 - RNA, 19 nt, Artificial Sequence
  Description of Artificial Sequence: Synthetic oligonucleotide
ucccuugaucgagagcgag

SEQ ID NO: 2524392 - RNA, 19 nt, Artificial Sequence
  Description of Artificial Sequence: Synthetic oligonucleotide
agaguucugcccugcucug

SEQ ID NO: 2524393 - RNA, 19 nt, Artificial Sequence
  Description of Artificial Sequence: Synthetic oligonucleotide
gagagcggggacugcgacc

SEQ ID NO: 2524394 - RNA, 19 nt, Artificial Sequence
  Description of Artificial Sequence: Synthetic oligonucleotide
ugacagccuguaccauuag

SEQ ID NO: 2524395 - RNA, 19 nt, Artificial Sequence
  Description of Artificial Sequence: Synthetic oligonucleotide
ucggcuaccccuguguuuu

SEQ ID NO: 2524396 - RNA, 19 nt, Artificial Sequence
  Description of Artificial Sequence: Synthetic oligonucleotide
aggguagaggccaugguau

SEQ ID NO: 2524397 - RNA, 19 nt, Artificial Sequence
  Description of Artificial Sequence: Synthetic oligonucleotide
uccagccucacuggguacc

SEQ ID NO: 2524398 - RNA, 19 nt, Artificial Sequence
  Description of Artificial Sequence: Synthetic oligonucleotide
guacccaucggcuaccccu

SEQ ID NO: 2524399 - RNA, 19 nt, Artificial Sequence
  Description of Artificial Sequence: Synthetic oligonucleotide
agaggccaugguaugcagg

SEQ ID NO: 2524400 - RNA, 19 nt, Artificial Sequence
  Description of Artificial Sequence: Synthetic oligonucleotide
cuugaucgagagcgaggcc

SEQ ID NO: 2524401 - RNA, 19 nt, Artificial Sequence
  Description of Artificial Sequence: Synthetic oligonucleotide
ucgcuccugaaugggcucg

SEQ ID NO: 2524402 - RNA, 19 nt, Artificial Sequence
  Description of Artificial Sequence: Synthetic oligonucleotide
auuagccguccuguacaac

SEQ ID NO: 2524403 - RNA, 19 nt, Artificial Sequence
  Description of Artificial Sequence: Synthetic oligonucleotide
uggcccgagggagagcggg

SEQ ID NO: 2524404 - RNA, 19 nt, Artificial Sequence
  Description of Artificial Sequence: Synthetic oligonucleotide
cuguguuuugcaguuucuc

SEQ ID NO: 2524405 - RNA, 19 nt, Artificial Sequence
  Description of Artificial Sequence: Synthetic oligonucleotide
ccuugugugcuucuuuagc

SEQ ID NO: 2524406 - RNA, 19 nt, Artificial Sequence
  Description of Artificial Sequence: Synthetic oligonucleotide
ccuugaucgagagcgaggc

SEQ ID NO: 2524407 - RNA, 19 nt, Artificial Sequence
  Description of Artificial Sequence: Synthetic oligonucleotide
guaguucccgucaucaucu

SEQ ID NO: 2524408 - RNA, 19 nt, Artificial Sequence
  Description of Artificial Sequence: Synthetic oligonucleotide
ugacacgacccugaggguu

SEQ ID NO: 2524409 - RNA, 19 nt, Artificial Sequence
  Description of Artificial Sequence: Synthetic oligonucleotide
uacucgcucagugcuguga

SEQ ID NO: 2524410 - RNA, 19 nt, Artificial Sequence
  Description of Artificial Sequence: Synthetic oligonucleotide
uaucugaggcgguggcacu

SEQ ID NO: 2524411 - RNA, 19 nt, Artificial Sequence
  Description of Artificial Sequence: Synthetic oligonucleotide
ccuucuggcauggggaugg

SEQ ID NO: 2524412 - RNA, 19 nt, Artificial Sequence
  Description of Artificial Sequence: Synthetic oligonucleotide
uccagccgggcagugcagg

SEQ ID NO: 2524413 - RNA, 19 nt, Artificial Sequence
  Description of Artificial Sequence: Synthetic oligonucleotide
cacucccgaaacucggcac

SEQ ID NO: 2524414 - RNA, 19 nt, Artificial Sequence
  Description of Artificial Sequence: Synthetic oligonucleotide
cgugacuggcucuauaaug

SEQ ID NO: 2524415 - RNA, 19 nt, Artificial Sequence
  Description of Artificial Sequence: Synthetic oligonucleotide
aucugaggcgguggcacuc

SEQ ID NO: 2524416 - RNA, 19 nt, Artificial Sequence
  Description of Artificial Sequence: Synthetic oligonucleotide
guagaggccaugguaugca

SEQ ID NO: 2524417 - RNA, 19 nt, Artificial Sequence
  Description of Artificial Sequence: Synthetic oligonucleotide
cccgucaucaucuagggua

SEQ ID NO: 2524418 - RNA, 19 nt, Artificial Sequence
  Description of Artificial Sequence: Synthetic oligonucleotide
caacugacacgacccugag

SEQ ID NO: 2524419 - RNA, 19 nt, Artificial Sequence
  Description of Artificial Sequence: Synthetic oligonucleotide
uucugggguugguaaccca

SEQ ID NO: 2524420 - RNA, 19 nt, Artificial Sequence
  Description of Artificial Sequence: Synthetic oligonucleotide
acgugacuggcucuauaau

SEQ ID NO: 2524421 - RNA, 19 nt, Artificial Sequence
  Description of Artificial Sequence: Synthetic oligonucleotide
cauccagccgggcagugca

SEQ ID NO: 2524422 - RNA, 19 nt, Artificial Sequence
  Description of Artificial Sequence: Synthetic oligonucleotide
ucugaggcgguggcacucc

SEQ ID NO: 2524423 - RNA, 19 nt, Artificial Sequence
  Description of Artificial Sequence: Synthetic oligonucleotide
ccucacuggguacccaucg

SEQ ID NO: 2524424 - RNA, 19 nt, Artificial Sequence
  Description of Artificial Sequence: Synthetic oligonucleotide
aucccgggacgugacuggc

SEQ ID NO: 2524425 - RNA, 19 nt, Artificial Sequence
  Description of Artificial Sequence: Synthetic oligonucleotide
gaggccggaagaaucgcuc

SEQ ID NO: 2524426 - RNA, 19 nt, Artificial Sequence
  Description of Artificial Sequence: Synthetic oligonucleotide
cguccuguacaacugacac

SEQ ID NO: 2524427 - RNA, 19 nt, Artificial Sequence
  Description of Artificial Sequence: Synthetic oligonucleotide
accccuguguuuugcaguu

SEQ ID NO: 2524428 - RNA, 19 nt, Artificial Sequence
  Description of Artificial Sequence: Synthetic oligonucleotide
gugagugagcgauucauuu

SEQ ID NO: 2524429 - RNA, 19 nt, Artificial Sequence
  Description of Artificial Sequence: Synthetic oligonucleotide
cacccagcgucuucuuuug

SEQ ID NO: 2524430 - RNA, 19 nt, Artificial Sequence
  Description of Artificial Sequence: Synthetic oligonucleotide
ccaugauuguguaguuccc

SEQ ID NO: 2524431 - RNA, 19 nt, Artificial Sequence
  Description of Artificial Sequence: Synthetic oligonucleotide
aguauaccacccagcgucu

SEQ ID NO: 2524432 - RNA, 19 nt, Artificial Sequence
  Description of Artificial Sequence: Synthetic oligonucleotide
ucccgucaucaucuagggu

SEQ ID NO: 2524433 - RNA, 19 nt, Artificial Sequence
  Description of Artificial Sequence: Synthetic oligonucleotide
ggaagaaucgcuccugaau

SEQ ID NO: 2524434 - RNA, 19 nt, Artificial Sequence
  Description of Artificial Sequence: Synthetic oligonucleotide
ggggacugcgaccucuuug

SEQ ID NO: 2524435 - RNA, 19 nt, Artificial Sequence
  Description of Artificial Sequence: Synthetic oligonucleotide
cagggagcaggucccauca

SEQ ID NO: 2524436 - RNA, 19 nt, Artificial Sequence
  Description of Artificial Sequence: Synthetic oligonucleotide
ccgucaucaucuaggguag

SEQ ID NO: 2524437 - RNA, 19 nt, Artificial Sequence
  Description of Artificial Sequence: Synthetic oligonucleotide
agccguccuguacaacuga

SEQ ID NO: 2524438 - RNA, 19 nt, Artificial Sequence
  Description of Artificial Sequence: Synthetic oligonucleotide
agugagcgauucauuuucu

SEQ ID NO: 2524439 - RNA, 19 nt, Artificial Sequence
  Description of Artificial Sequence: Synthetic oligonucleotide
uaccauuagccguccugua

SEQ ID NO: 2524440 - RNA, 19 nt, Artificial Sequence
  Description of Artificial Sequence: Synthetic oligonucleotide
ccagguuaaaagaguucug

SEQ ID NO: 2524441 - RNA, 19 nt, Artificial Sequence
  Description of Artificial Sequence: Synthetic oligonucleotide
uuacucgcucagugcugug

SEQ ID NO: 2524442 - RNA, 19 nt, Artificial Sequence
  Description of Artificial Sequence: Synthetic oligonucleotide
agccucacuggguacccau

SEQ ID NO: 2524443 - RNA, 19 nt, Artificial Sequence
  Description of Artificial Sequence: Synthetic oligonucleotide
guaccauuagccguccugu

SEQ ID NO: 2524444 - RNA, 19 nt, Artificial Sequence
  Description of Artificial Sequence: Synthetic oligonucleotide
gagcaggucccaucaaggu

SEQ ID NO: 2524445 - RNA, 19 nt, Artificial Sequence
  Description of Artificial Sequence: Synthetic oligonucleotide
cugucccuugaucgagagc

SEQ ID NO: 2524446 - RNA, 19 nt, Artificial Sequence
  Description of Artificial Sequence: Synthetic oligonucleotide
gguggcacucccgaaacuc

SEQ ID NO: 2524447 - RNA, 19 nt, Artificial Sequence
  Description of Artificial Sequence: Synthetic oligonucleotide
cucuguugguggcaauaca

SEQ ID NO: 2524448 - RNA, 19 nt, Artificial Sequence
  Description of Artificial Sequence: Synthetic oligonucleotide
cccuugaucgagagcgagg

SEQ ID NO: 2524449 - RNA, 19 nt, Artificial Sequence
  Description of Artificial Sequence: Synthetic oligonucleotide
ccauccugcagaguuuugc

SEQ ID NO: 2524450 - RNA, 19 nt, Artificial Sequence
  Description of Artificial Sequence: Synthetic oligonucleotide
uucuggcauggggauggcc

SEQ ID NO: 2524451 - RNA, 19 nt, Artificial Sequence
  Description of Artificial Sequence: Synthetic oligonucleotide
uggguacccaucggcuacc

SEQ ID NO: 2524452 - RNA, 19 nt, Artificial Sequence
  Description of Artificial Sequence: Synthetic oligonucleotide
aucggcuaccccuguguuu

SEQ ID NO: 2524453 - RNA, 19 nt, Artificial Sequence
  Description of Artificial Sequence: Synthetic oligonucleotide
gccuugugugcuucuuuag

SEQ ID NO: 2524454 - RNA, 19 nt, Artificial Sequence
  Description of Artificial Sequence: Synthetic oligonucleotide
uucguucuuggcggauaca

SEQ ID NO: 2524455 - RNA, 19 nt, Artificial Sequence
  Description of Artificial Sequence: Synthetic oligonucleotide
ccauuagccguccuguaca

SEQ ID NO: 2524456 - RNA, 19 nt, Artificial Sequence
  Description of Artificial Sequence: Synthetic oligonucleotide
gacacaaugccagcuucgu

SEQ ID NO: 2524457 - RNA, 19 nt, Artificial Sequence
  Description of Artificial Sequence: Synthetic oligonucleotide
cauuagccguccuguacaa

SEQ ID NO: 2524458 - RNA, 19 nt, Artificial Sequence
  Description of Artificial Sequence: Synthetic oligonucleotide
caguccauccugcagaguu

SEQ ID NO: 2524459 - RNA, 19 nt, Artificial Sequence
  Description of Artificial Sequence: Synthetic oligonucleotide
acgacccugaggguuggca

SEQ ID NO: 2524460 - RNA, 19 nt, Artificial Sequence
  Description of Artificial Sequence: Synthetic oligonucleotide
cuggcucuauaaugaggga

SEQ ID NO: 2524461 - RNA, 19 nt, Artificial Sequence
  Description of Artificial Sequence: Synthetic oligonucleotide
cuuugguugacagccugua

SEQ ID NO: 2524462 - RNA, 19 nt, Artificial Sequence
  Description of Artificial Sequence: Synthetic oligonucleotide
guuauccuggugcaugcuu

SEQ ID NO: 2524463 - RNA, 19 nt, Artificial Sequence
  Description of Artificial Sequence: Synthetic oligonucleotide
cacugacuuuugcagucca

SEQ ID NO: 2524464 - RNA, 19 nt, Artificial Sequence
  Description of Artificial Sequence: Synthetic oligonucleotide
gaaugagcaggcagaugua

SEQ ID NO: 2524465 - RNA, 19 nt, Artificial Sequence
  Description of Artificial Sequence: Synthetic oligonucleotide
cccugaaugagcaggcaga

SEQ ID NO: 2524466 - RNA, 19 nt, Artificial Sequence
  Description of Artificial Sequence: Synthetic oligonucleotide
guacaacugacacgacccu

SEQ ID NO: 2524467 - RNA, 19 nt, Artificial Sequence
  Description of Artificial Sequence: Synthetic oligonucleotide
ucggcacuccagccucacu

SEQ ID NO: 2524468 - RNA, 19 nt, Artificial Sequence
  Description of Artificial Sequence: Synthetic oligonucleotide
cccuguguuuugcaguuuc

SEQ ID NO: 2524469 - RNA, 19 nt, Artificial Sequence
  Description of Artificial Sequence: Synthetic oligonucleotide
agacauccagccgggcagu

SEQ ID NO: 2524470 - RNA, 19 nt, Artificial Sequence
  Description of Artificial Sequence: Synthetic oligonucleotide
gaagugaggccggaagaau

SEQ ID NO: 2524471 - RNA, 19 nt, Artificial Sequence
  Description of Artificial Sequence: Synthetic oligonucleotide
gucccaucaaggucucucu

SEQ ID NO: 2524472 - RNA, 19 nt, Artificial Sequence
  Description of Artificial Sequence: Synthetic oligonucleotide
acacgacccugaggguugg

SEQ ID NO: 2524473 - RNA, 19 nt, Artificial Sequence
  Description of Artificial Sequence: Synthetic oligonucleotide
acugacuuuugcaguccau

SEQ ID NO: 2524474 - RNA, 19 nt, Artificial Sequence
  Description of Artificial Sequence: Synthetic oligonucleotide
gacauccagccgggcagug

SEQ ID NO: 2524475 - RNA, 19 nt, Artificial Sequence
  Description of Artificial Sequence: Synthetic oligonucleotide
ggagagcggggacugcgac

SEQ ID NO: 2524476 - RNA, 19 nt, Artificial Sequence
  Description of Artificial Sequence: Synthetic oligonucleotide
cuuacucgcucagugcugu

SEQ ID NO: 2524477 - RNA, 19 nt, Artificial Sequence
  Description of Artificial Sequence: Synthetic oligonucleotide
agaucucccggagccugca

SEQ ID NO: 2524478 - RNA, 19 nt, Artificial Sequence
  Description of Artificial Sequence: Synthetic oligonucleotide
gacugcgaccucuuugguu

SEQ ID NO: 2524479 - RNA, 19 nt, Artificial Sequence
  Description of Artificial Sequence: Synthetic oligonucleotide
gcucuguugguggcaauac

SEQ ID NO: 2524480 - RNA, 19 nt, Artificial Sequence
  Description of Artificial Sequence: Synthetic oligonucleotide
cacugucccuugaucgaga

SEQ ID NO: 2524481 - RNA, 19 nt, Artificial Sequence
  Description of Artificial Sequence: Synthetic oligonucleotide
cacuggguacccaucggcu

SEQ ID NO: 2524482 - RNA, 19 nt, Artificial Sequence
  Description of Artificial Sequence: Synthetic oligonucleotide
cccaucaaggucucucuga

SEQ ID NO: 2524483 - RNA, 19 nt, Artificial Sequence
  Description of Artificial Sequence: Synthetic oligonucleotide
ccgaaacucggcacuccag

SEQ ID NO: 2524484 - RNA, 19 nt, Artificial Sequence
  Description of Artificial Sequence: Synthetic oligonucleotide
gccaugguaugcagggagc

SEQ ID NO: 2524485 - RNA, 19 nt, Artificial Sequence
  Description of Artificial Sequence: Synthetic oligonucleotide
gcaucccgggacgugacug

SEQ ID NO: 2524486 - RNA, 19 nt, Artificial Sequence
  Description of Artificial Sequence: Synthetic oligonucleotide
guacuccauucugggguug

SEQ ID NO: 2524487 - RNA, 19 nt, Artificial Sequence
  Description of Artificial Sequence: Synthetic oligonucleotide
cucccgaaacucggcacuc

SEQ ID NO: 2524488 - RNA, 19 nt, Artificial Sequence
  Description of Artificial Sequence: Synthetic oligonucleotide
agaugccggcaucccggga

SEQ ID NO: 2524489 - RNA, 19 nt, Artificial Sequence
  Description of Artificial Sequence: Synthetic oligonucleotide
uaguucccgucaucaucua

SEQ ID NO: 2524490 - RNA, 19 nt, Artificial Sequence
  Description of Artificial Sequence: Synthetic oligonucleotide
ccaugguuauccuggugca

SEQ ID NO: 2524491 - RNA, 19 nt, Artificial Sequence
  Description of Artificial Sequence: Synthetic oligonucleotide
gggauggcccgagggagag

SEQ ID NO: 2524492 - RNA, 19 nt, Artificial Sequence
  Description of Artificial Sequence: Synthetic oligonucleotide
gccuguaccauuagccguc

SEQ ID NO: 2524493 - RNA, 19 nt, Artificial Sequence
  Description of Artificial Sequence: Synthetic oligonucleotide
gguacccaucggcuacccc

SEQ ID NO: 2524494 - RNA, 19 nt, Artificial Sequence
  Description of Artificial Sequence: Synthetic oligonucleotide
ggccuugugugcuucuuua

SEQ ID NO: 2524495 - RNA, 19 nt, Artificial Sequence
  Description of Artificial Sequence: Synthetic oligonucleotide
aguccauccugcagaguuu

SEQ ID NO: 2524496 - RNA, 19 nt, Artificial Sequence
  Description of Artificial Sequence: Synthetic oligonucleotide
acccagcgucuucuuuugu

SEQ ID NO: 2524497 - RNA, 19 nt, Artificial Sequence
  Description of Artificial Sequence: Synthetic oligonucleotide
cugugagugagcgauucau

SEQ ID NO: 2524498 - RNA, 19 nt, Artificial Sequence
  Description of Artificial Sequence: Synthetic oligonucleotide
caggucccaucaaggucuc

SEQ ID NO: 2524499 - RNA, 19 nt, Artificial Sequence
  Description of Artificial Sequence: Synthetic oligonucleotide
gcuuacucgcucagugcug

SEQ ID NO: 2524500 - RNA, 19 nt, Artificial Sequence
  Description of Artificial Sequence: Synthetic oligonucleotide
ccaucaaggucucucugaa

SEQ ID NO: 2524501 - RNA, 19 nt, Artificial Sequence
  Description of Artificial Sequence: Synthetic oligonucleotide
gcacucccgaaacucggca

SEQ ID NO: 2524502 - RNA, 19 nt, Artificial Sequence
  Description of Artificial Sequence: Synthetic oligonucleotide
gagcgaggccuucuggcau

SEQ ID NO: 2524503 - RNA, 19 nt, Artificial Sequence
  Description of Artificial Sequence: Synthetic oligonucleotide
cuaggguagaggccauggu

SEQ ID NO: 2524504 - RNA, 19 nt, Artificial Sequence
  Description of Artificial Sequence: Synthetic oligonucleotide
ggcacucccgaaacucggc

SEQ ID NO: 2524505 - RNA, 19 nt, Artificial Sequence
  Description of Artificial Sequence: Synthetic oligonucleotide
cucuauaaugagggagugu

SEQ ID NO: 2524506 - RNA, 19 nt, Artificial Sequence
  Description of Artificial Sequence: Synthetic oligonucleotide
gguaacccacugacuuuug

SEQ ID NO: 2524507 - RNA, 19 nt, Artificial Sequence
  Description of Artificial Sequence: Synthetic oligonucleotide
gccggaagaaucgcuccug

SEQ ID NO: 2524508 - RNA, 19 nt, Artificial Sequence
  Description of Artificial Sequence: Synthetic oligonucleotide
ccacugacuuuugcagucc

SEQ ID NO: 2524509 - RNA, 19 nt, Artificial Sequence
  Description of Artificial Sequence: Synthetic oligonucleotide
cugggguugguaacccacu

SEQ ID NO: 2524510 - RNA, 19 nt, Artificial Sequence
  Description of Artificial Sequence: Synthetic oligonucleotide
ugcagggagcaggucccau

SEQ ID NO: 2524511 - RNA, 19 nt, Artificial Sequence
  Description of Artificial Sequence: Synthetic oligonucleotide
gcugugagugagcgauuca

SEQ ID NO: 2524512 - RNA, 19 nt, Artificial Sequence
  Description of Artificial Sequence: Synthetic oligonucleotide
guaagaucucccggagccu

SEQ ID NO: 2524513 - RNA, 19 nt, Artificial Sequence
  Description of Artificial Sequence: Synthetic oligonucleotide
augagggaguguacuccau

SEQ ID NO: 2524514 - RNA, 19 nt, Artificial Sequence
  Description of Artificial Sequence: Synthetic oligonucleotide
gugagcgauucauuuucuu

SEQ ID NO: 2524515 - RNA, 19 nt, Artificial Sequence
  Description of Artificial Sequence: Synthetic oligonucleotide
cgagagcgaggccuucugg

SEQ ID NO: 2524516 - RNA, 19 nt, Artificial Sequence
  Description of Artificial Sequence: Synthetic oligonucleotide
acccaucggcuaccccugu

SEQ ID NO: 2524517 - RNA, 19 nt, Artificial Sequence
  Description of Artificial Sequence: Synthetic oligonucleotide
cucggcacuccagccucac

SEQ ID NO: 2524518 - RNA, 19 nt, Artificial Sequence
  Description of Artificial Sequence: Synthetic oligonucleotide
gcauggggauggcccgagg

SEQ ID NO: 2524519 - RNA, 19 nt, Artificial Sequence
  Description of Artificial Sequence: Synthetic oligonucleotide
ggcuaccccuguguuuugc

SEQ ID NO: 2524520 - RNA, 19 nt, Artificial Sequence
  Description of Artificial Sequence: Synthetic oligonucleotide
agcuucguucuuggcggau

SEQ ID NO: 2524521 - RNA, 19 nt, Artificial Sequence
  Description of Artificial Sequence: Synthetic oligonucleotide
cccgggacgugacuggcuc

SEQ ID NO: 2524522 - RNA, 19 nt, Artificial Sequence
  Description of Artificial Sequence: Synthetic oligonucleotide
cagugcugugagugagcga

SEQ ID NO: 2524523 - RNA, 19 nt, Artificial Sequence
  Description of Artificial Sequence: Synthetic oligonucleotide
ggcauggggauggcccgag

SEQ ID NO: 2524524 - RNA, 19 nt, Artificial Sequence
  Description of Artificial Sequence: Synthetic oligonucleotide
ccuguaccauuagccgucc

SEQ ID NO: 2524525 - RNA, 19 nt, Artificial Sequence
  Description of Artificial Sequence: Synthetic oligonucleotide
auccagccgggcagugcag

SEQ ID NO: 2524526 - RNA, 19 nt, Artificial Sequence
  Description of Artificial Sequence: Synthetic oligonucleotide
cugcgaccucuuugguuga

SEQ ID NO: 2524527 - RNA, 19 nt, Artificial Sequence
  Description of Artificial Sequence: Synthetic oligonucleotide
ccaugguaugcagggagca

SEQ ID NO: 2524528 - RNA, 19 nt, Artificial Sequence
  Description of Artificial Sequence: Synthetic oligonucleotide
ccuguacaacugacacgac

SEQ ID NO: 2524529 - RNA, 19 nt, Artificial Sequence
  Description of Artificial Sequence: Synthetic oligonucleotide
cagcuucguucuuggcgga

SEQ ID NO: 2524530 - RNA, 19 nt, Artificial Sequence
  Description of Artificial Sequence: Synthetic oligonucleotide
gccguccuguacaacugac

SEQ ID NO: 2524531 - RNA, 19 nt, Artificial Sequence
  Description of Artificial Sequence: Synthetic oligonucleotide
ccguccuguacaacugaca

SEQ ID NO: 2524532 - RNA, 19 nt, Artificial Sequence
  Description of Artificial Sequence: Synthetic oligonucleotide
auggcccgagggagagcgg

SEQ ID NO: 2524533 - RNA, 19 nt, Artificial Sequence
  Description of Artificial Sequence: Synthetic oligonucleotide
gguaugcagggagcagguc

SEQ ID NO: 2524534 - RNA, 19 nt, Artificial Sequence
  Description of Artificial Sequence: Synthetic oligonucleotide
gucccuugaucgagagcga

SEQ ID NO: 2524535 - RNA, 19 nt, Artificial Sequence
  Description of Artificial Sequence: Synthetic oligonucleotide
ccagccucacuggguaccc

SEQ ID NO: 2524536 - RNA, 19 nt, Artificial Sequence
  Description of Artificial Sequence: Synthetic oligonucleotide
gcgaggccuucuggcaugg

SEQ ID NO: 2524537 - RNA, 19 nt, Artificial Sequence
  Description of Artificial Sequence: Synthetic oligonucleotide
gguugguaacccacugacu

SEQ ID NO: 2524538 - RNA, 19 nt, Artificial Sequence
  Description of Artificial Sequence: Synthetic oligonucleotide
cccgaaacucggcacucca

SEQ ID NO: 2524539 - RNA, 19 nt, Artificial Sequence
  Description of Artificial Sequence: Synthetic oligonucleotide
ggacgugacuggcucuaua

SEQ ID NO: 2524540 - RNA, 19 nt, Artificial Sequence
  Description of Artificial Sequence: Synthetic oligonucleotide
ccggaagaaucgcuccuga

SEQ ID NO: 2524541 - RNA, 19 nt, Artificial Sequence
  Description of Artificial Sequence: Synthetic oligonucleotide
ugccggcaucccgggacgu

SEQ ID NO: 2524542 - RNA, 19 nt, Artificial Sequence
  Description of Artificial Sequence: Synthetic oligonucleotide
gggcucguuuucaucucca

SEQ ID NO: 2524543 - RNA, 19 nt, Artificial Sequence
  Description of Artificial Sequence: Synthetic oligonucleotide
cugacacgacccugagggu

SEQ ID NO: 2524544 - RNA, 19 nt, Artificial Sequence
  Description of Artificial Sequence: Synthetic oligonucleotide
acucggcacuccagccuca

SEQ ID NO: 2524545 - RNA, 19 nt, Artificial Sequence
  Description of Artificial Sequence: Synthetic oligonucleotide
gccuucuggcauggggaug

SEQ ID NO: 2524546 - RNA, 19 nt, Artificial Sequence
  Description of Artificial Sequence: Synthetic oligonucleotide
ggguacccaucggcuaccc

SEQ ID NO: 2524547 - RNA, 19 nt, Artificial Sequence
  Description of Artificial Sequence: Synthetic oligonucleotide
cucgcucagugcugugagu

SEQ ID NO: 2524548 - RNA, 19 nt, Artificial Sequence
  Description of Artificial Sequence: Synthetic oligonucleotide
ggccggaagaaucgcuccu

SEQ ID NO: 2524549 - RNA, 19 nt, Artificial Sequence
  Description of Artificial Sequence: Synthetic oligonucleotide
caugguuauccuggugcau

SEQ ID NO: 2524550 - RNA, 19 nt, Artificial Sequence
  Description of Artificial Sequence: Synthetic oligonucleotide
cacgacccugaggguuggc

SEQ ID NO: 2524551 - RNA, 19 nt, Artificial Sequence
  Description of Artificial Sequence: Synthetic oligonucleotide
gcgaccucuuugguugaca

SEQ ID NO: 2524552 - RNA, 19 nt, Artificial Sequence
  Description of Artificial Sequence: Synthetic oligonucleotide
caucggcuaccccuguguu

SEQ ID NO: 2524553 - RNA, 19 nt, Artificial Sequence
  Description of Artificial Sequence: Synthetic oligonucleotide
ccuguguuuugcaguuucu

SEQ ID NO: 2524554 - RNA, 19 nt, Artificial Sequence
  Description of Artificial Sequence: Synthetic oligonucleotide
aggucccaucaaggucucu

SEQ ID NO: 2524555 - RNA, 19 nt, Artificial Sequence
  Description of Artificial Sequence: Synthetic oligonucleotide
caaccacaagcuccagguu

SEQ ID NO: 2524556 - RNA, 19 nt, Artificial Sequence
  Description of Artificial Sequence: Synthetic oligonucleotide
ggggauggcccgagggaga

SEQ ID NO: 2524557 - RNA, 19 nt, Artificial Sequence
  Description of Artificial Sequence: Synthetic oligonucleotide
cccgagggagagcggggac

SEQ ID NO: 2524558 - RNA, 19 nt, Artificial Sequence
  Description of Artificial Sequence: Synthetic oligonucleotide
ggccuucuggcauggggau

SEQ ID NO: 2524559 - RNA, 19 nt, Artificial Sequence
  Description of Artificial Sequence: Synthetic oligonucleotide
ccaucggcuaccccugugu

SEQ ID NO: 2524560 - RNA, 19 nt, Artificial Sequence
  Description of Artificial Sequence: Synthetic oligonucleotide
ggacugcgaccucuuuggu

SEQ ID NO: 2524561 - RNA, 19 nt, Artificial Sequence
  Description of Artificial Sequence: Synthetic oligonucleotide
cuguaccauuagccguccu

SEQ ID NO: 2524562 - RNA, 19 nt, Artificial Sequence
  Description of Artificial Sequence: Synthetic oligonucleotide
guauaccacccagcgucuu

SEQ ID NO: 2524563 - RNA, 19 nt, Artificial Sequence
  Description of Artificial Sequence: Synthetic oligonucleotide
cagccucacuggguaccca

SEQ ID NO: 2524564 - RNA, 19 nt, Artificial Sequence
  Description of Artificial Sequence: Synthetic oligonucleotide
cggaagaaucgcuccugaa

SEQ ID NO: 2524565 - RNA, 19 nt, Artificial Sequence
  Description of Artificial Sequence: Synthetic oligonucleotide
gccgggcagugcaggacac

SEQ ID NO: 2524566 - RNA, 19 nt, Artificial Sequence
  Description of Artificial Sequence: Synthetic oligonucleotide
gccggcaucccgggacgug

SEQ ID NO: 2524567 - RNA, 19 nt, Artificial Sequence
  Description of Artificial Sequence: Synthetic oligonucleotide
gcaugcuuacucgcucagu

SEQ ID NO: 2524568 - RNA, 19 nt, Artificial Sequence
  Description of Artificial Sequence: Synthetic oligonucleotide
cccggagccugcaggaagu

SEQ ID NO: 2524569 - RNA, 19 nt, Artificial Sequence
  Description of Artificial Sequence: Synthetic oligonucleotide
cccagcgucuucuuuuguu

SEQ ID NO: 2524570 - RNA, 19 nt, Artificial Sequence
  Description of Artificial Sequence: Synthetic oligonucleotide
ccggcaucccgggacguga

SEQ ID NO: 2524571 - RNA, 19 nt, Artificial Sequence
  Description of Artificial Sequence: Synthetic oligonucleotide
gggccuugugugcuucuuu

SEQ ID NO: 2524572 - RNA, 19 nt, Artificial Sequence
  Description of Artificial Sequence: Synthetic oligonucleotide
ggcaucccgggacgugacu

SEQ ID NO: 2524573 - RNA, 19 nt, Artificial Sequence
  Description of Artificial Sequence: Synthetic oligonucleotide
ccggagccugcaggaagug

SEQ ID NO: 2524574 - RNA, 19 nt, Artificial Sequence
  Description of Artificial Sequence: Synthetic oligonucleotide
cggcaucccgggacgugac

SEQ ID NO: 2524575 - RNA, 19 nt, Artificial Sequence
  Description of Artificial Sequence: Synthetic oligonucleotide
gugcugugagugagcgauu

SEQ ID NO: 2524576 - RNA, 19 nt, Artificial Sequence
  Description of Artificial Sequence: Synthetic oligonucleotide
ccgagggagagcggggacu

SEQ ID NO: 2524577 - RNA, 19 nt, Artificial Sequence
  Description of Artificial Sequence: Synthetic oligonucleotide
cggcuaccccuguguuuug

SEQ ID NO: 2524578 - RNA, 19 nt, Artificial Sequence
  Description of Artificial Sequence: Synthetic oligonucleotide
ccacaagcuccagguuaaa

SEQ ID NO: 2524579 - RNA, 19 nt, Artificial Sequence
  Description of Artificial Sequence: Synthetic oligonucleotide
gcaguccauccugcagagu

SEQ ID NO: 2524580 - RNA, 19 nt, Artificial Sequence
  Description of Artificial Sequence: Synthetic oligonucleotide
gggacgugacuggcucuau

SEQ ID NO: 2524581 - RNA, 19 nt, Artificial Sequence
  Description of Artificial Sequence: Synthetic oligonucleotide
ccgggacgugacuggcucu

SEQ ID NO: 2524582 - RNA, 19 nt, Artificial Sequence
  Description of Artificial Sequence: Synthetic oligonucleotide
gcuccugaaugggcucguu

SEQ ID NO: 2524583 - RNA, 19 nt, Artificial Sequence
  Description of Artificial Sequence: Synthetic oligonucleotide
gcggggacugcgaccucuu

SEQ ID NO: 2524584 - RNA, 19 nt, Artificial Sequence
  Description of Artificial Sequence: Synthetic oligonucleotide
cgcuccugaaugggcucgu

SEQ ID NO: 2524585 - RNA, 19 nt, Artificial Sequence
  Description of Artificial Sequence: Synthetic oligonucleotide
ccccuguguuuugcaguuu

SEQ ID NO: 2524586 - RNA, 19 nt, Artificial Sequence
  Description of Artificial Sequence: Synthetic oligonucleotide
aauacuuaggaacaugaac

SEQ ID NO: 2524587 - RNA, 19 nt, Artificial Sequence
  Description of Artificial Sequence: Synthetic oligonucleotide
uucagcuuaagcaugaggc

SEQ ID NO: 2524588 - RNA, 19 nt, Artificial Sequence
  Description of Artificial Sequence: Synthetic oligonucleotide
aagucugugguuuuacccc

SEQ ID NO: 2524589 - RNA, 19 nt, Artificial Sequence
  Description of Artificial Sequence: Synthetic oligonucleotide
uaagugaauacuuaggaac

SEQ ID NO: 2524590 - RNA, 19 nt, Artificial Sequence
  Description of Artificial Sequence: Synthetic oligonucleotide
aacaugaacaguguuuccc

SEQ ID NO: 2524591 - RNA, 19 nt, Artificial Sequence
  Description of Artificial Sequence: Synthetic oligonucleotide
uuaucaacugauuucaaca

SEQ ID NO: 2524592 - RNA, 19 nt, Artificial Sequence
  Description of Artificial Sequence: Synthetic oligonucleotide
uuaauuaucaacugauuuc

SEQ ID NO: 2524593 - RNA, 19 nt, Artificial Sequence
  Description of Artificial Sequence: Synthetic oligonucleotide
aacaguguuucccauaaca

SEQ ID NO: 2524594 - RNA, 19 nt, Artificial Sequence
  Description of Artificial Sequence: Synthetic oligonucleotide
auuguugguggacauagcg

SEQ ID NO: 2524595 - RNA, 19 nt, Artificial Sequence
  Description of Artificial Sequence: Synthetic oligonucleotide
ugaauacuuaggaacauga

SEQ ID NO: 2524596 - RNA, 19 nt, Artificial Sequence
  Description of Artificial Sequence: Synthetic oligonucleotide
gaaacuacucaucaucugc

SEQ ID NO: 2524597 - RNA, 19 nt, Artificial Sequence
  Description of Artificial Sequence: Synthetic oligonucleotide
uuugucaaaacagaagcag

SEQ ID NO: 2524598 - RNA, 19 nt, Artificial Sequence
  Description of Artificial Sequence: Synthetic oligonucleotide
acugauuucaacaagaaaa

SEQ ID NO: 2524599 - RNA, 19 nt, Artificial Sequence
  Description of Artificial Sequence: Synthetic oligonucleotide
ucaacugauuucaacaaga

SEQ ID NO: 2524600 - RNA, 19 nt, Artificial Sequence
  Description of Artificial Sequence: Synthetic oligonucleotide
uaauuaucaacugauuuca

SEQ ID NO: 2524601 - RNA, 19 nt, Artificial Sequence
  Description of Artificial Sequence: Synthetic oligonucleotide
acuaagugaauacuuagga

SEQ ID NO: 2524602 - RNA, 19 nt, Artificial Sequence
  Description of Artificial Sequence: Synthetic oligonucleotide
cuaggugacaucaccaagg

SEQ ID NO: 2524603 - RNA, 19 nt, Artificial Sequence
  Description of Artificial Sequence: Synthetic oligonucleotide
agcagauucauguagucug

SEQ ID NO: 2524604 - RNA, 19 nt, Artificial Sequence
  Description of Artificial Sequence: Synthetic oligonucleotide
ugcagauaggacaucacca

SEQ ID NO: 2524605 - RNA, 19 nt, Artificial Sequence
  Description of Artificial Sequence: Synthetic oligonucleotide
aacuaagugaauacuuagg

SEQ ID NO: 2524606 - RNA, 19 nt, Artificial Sequence
  Description of Artificial Sequence: Synthetic oligonucleotide
gaagucugugguuuuaccc

SEQ ID NO: 2524607 - RNA, 19 nt, Artificial Sequence
  Description of Artificial Sequence: Synthetic oligonucleotide
uuaaggacagcagcuaagg

SEQ ID NO: 2524608 - RNA, 19 nt, Artificial Sequence
  Description of Artificial Sequence: Synthetic oligonucleotide
auugagagcaugaaacuac

SEQ ID NO: 2524609 - RNA, 19 nt, Artificial Sequence
  Description of Artificial Sequence: Synthetic oligonucleotide
caugaaacuacucaucauc

SEQ ID NO: 2524610 - RNA, 19 nt, Artificial Sequence
  Description of Artificial Sequence: Synthetic oligonucleotide
cuacucaucaucugcuucg

SEQ ID NO: 2524611 - RNA, 19 nt, Artificial Sequence
  Description of Artificial Sequence: Synthetic oligonucleotide
uuucccauaacagugggga

SEQ ID NO: 2524612 - RNA, 19 nt, Artificial Sequence
  Description of Artificial Sequence: Synthetic oligonucleotide
uuucaacaagaaaacuaag

SEQ ID NO: 2524613 - RNA, 19 nt, Artificial Sequence
  Description of Artificial Sequence: Synthetic oligonucleotide
caaaggcuagaccagagag

SEQ ID NO: 2524614 - RNA, 19 nt, Artificial Sequence
  Description of Artificial Sequence: Synthetic oligonucleotide
guuggaggcagccaaaggc

SEQ ID NO: 2524615 - RNA, 19 nt, Artificial Sequence
  Description of Artificial Sequence: Synthetic oligonucleotide
aagaguggaaaauuuuaau

SEQ ID NO: 2524616 - RNA, 19 nt, Artificial Sequence
  Description of Artificial Sequence: Synthetic oligonucleotide
uacuuaggaacaugaacag

SEQ ID NO: 2524617 - RNA, 19 nt, Artificial Sequence
  Description of Artificial Sequence: Synthetic oligonucleotide
auauuguugguggacauag

SEQ ID NO: 2524618 - RNA, 19 nt, Artificial Sequence
  Description of Artificial Sequence: Synthetic oligonucleotide
guuggcaaagcugauaaag

SEQ ID NO: 2524619 - RNA, 19 nt, Artificial Sequence
  Description of Artificial Sequence: Synthetic oligonucleotide
aucaccacggcagagauug

SEQ ID NO: 2524620 - RNA, 19 nt, Artificial Sequence
  Description of Artificial Sequence: Synthetic oligonucleotide
aaagggcccaacuucccuc

SEQ ID NO: 2524621 - RNA, 19 nt, Artificial Sequence
  Description of Artificial Sequence: Synthetic oligonucleotide
gacauagcgaacugaagac

SEQ ID NO: 2524622 - RNA, 19 nt, Artificial Sequence
  Description of Artificial Sequence: Synthetic oligonucleotide
uguuucccauaacaguggg

SEQ ID NO: 2524623 - RNA, 19 nt, Artificial Sequence
  Description of Artificial Sequence: Synthetic oligonucleotide
gaguggaaaauuuuaauua

SEQ ID NO: 2524624 - RNA, 19 nt, Artificial Sequence
  Description of Artificial Sequence: Synthetic oligonucleotide
aguggaaaauuuuaauuau

SEQ ID NO: 2524625 - RNA, 19 nt, Artificial Sequence
  Description of Artificial Sequence: Synthetic oligonucleotide
agcaugaaacuacucauca

SEQ ID NO: 2524626 - RNA, 19 nt, Artificial Sequence
  Description of Artificial Sequence: Synthetic oligonucleotide
uuaagcaugaggccacaca

SEQ ID NO: 2524627 - RNA, 19 nt, Artificial Sequence
  Description of Artificial Sequence: Synthetic oligonucleotide
ucuaggugacaucaccaag

SEQ ID NO: 2524628 - RNA, 19 nt, Artificial Sequence
  Description of Artificial Sequence: Synthetic oligonucleotide
aguguuucccauaacagug

SEQ ID NO: 2524629 - RNA, 19 nt, Artificial Sequence
  Description of Artificial Sequence: Synthetic oligonucleotide
acuacucaucaucugcuuc

SEQ ID NO: 2524630 - RNA, 19 nt, Artificial Sequence
  Description of Artificial Sequence: Synthetic oligonucleotide
ucagcuuaagcaugaggcc

SEQ ID NO: 2524631 - RNA, 19 nt, Artificial Sequence
  Description of Artificial Sequence: Synthetic oligonucleotide
ugguuuuaccccuuuguca

SEQ ID NO: 2524632 - RNA, 19 nt, Artificial Sequence
  Description of Artificial Sequence: Synthetic oligonucleotide
aacaguagacagcaaccca

SEQ ID NO: 2524633 - RNA, 19 nt, Artificial Sequence
  Description of Artificial Sequence: Synthetic oligonucleotide
cuuuguugggucuccgugg

SEQ ID NO: 2524634 - RNA, 19 nt, Artificial Sequence
  Description of Artificial Sequence: Synthetic oligonucleotide
aagugaauacuuaggaaca

SEQ ID NO: 2524635 - RNA, 19 nt, Artificial Sequence
  Description of Artificial Sequence: Synthetic oligonucleotide
aucaacugauuucaacaag

SEQ ID NO: 2524636 - RNA, 19 nt, Artificial Sequence
  Description of Artificial Sequence: Synthetic oligonucleotide
uucaacugggagaccagag

SEQ ID NO: 2524637 - RNA, 19 nt, Artificial Sequence
  Description of Artificial Sequence: Synthetic oligonucleotide
acauagcgaacugaagacc

SEQ ID NO: 2524638 - RNA, 19 nt, Artificial Sequence
  Description of Artificial Sequence: Synthetic oligonucleotide
aacugauuucaacaagaaa

SEQ ID NO: 2524639 - RNA, 19 nt, Artificial Sequence
  Description of Artificial Sequence: Synthetic oligonucleotide
aaggcuagaccagagagaa

SEQ ID NO: 2524640 - RNA, 19 nt, Artificial Sequence
  Description of Artificial Sequence: Synthetic oligonucleotide
aaaacuaagugaauacuua

SEQ ID NO: 2524641 - RNA, 19 nt, Artificial Sequence
  Description of Artificial Sequence: Synthetic oligonucleotide
ggcuagaccagagagaagg

SEQ ID NO: 2524642 - RNA, 19 nt, Artificial Sequence
  Description of Artificial Sequence: Synthetic oligonucleotide
agauaggacaucaccacgg

SEQ ID NO: 2524643 - RNA, 19 nt, Artificial Sequence
  Description of Artificial Sequence: Synthetic oligonucleotide
aggcuuauaccucagcacu

SEQ ID NO: 2524644 - RNA, 19 nt, Artificial Sequence
  Description of Artificial Sequence: Synthetic oligonucleotide
agauugagagcaugaaacu

SEQ ID NO: 2524645 - RNA, 19 nt, Artificial Sequence
  Description of Artificial Sequence: Synthetic oligonucleotide
agaaaacuaagugaauacu

SEQ ID NO: 2524646 - RNA, 19 nt, Artificial Sequence
  Description of Artificial Sequence: Synthetic oligonucleotide
ugaaacuacucaucaucug

SEQ ID NO: 2524647 - RNA, 19 nt, Artificial Sequence
  Description of Artificial Sequence: Synthetic oligonucleotide
cacaccguaccuuucacug

SEQ ID NO: 2524648 - RNA, 19 nt, Artificial Sequence
  Description of Artificial Sequence: Synthetic oligonucleotide
uuauaccucagcacuuugu

SEQ ID NO: 2524649 - RNA, 19 nt, Artificial Sequence
  Description of Artificial Sequence: Synthetic oligonucleotide
uauaccucagcacuuuguu

SEQ ID NO: 2524650 - RNA, 19 nt, Artificial Sequence
  Description of Artificial Sequence: Synthetic oligonucleotide
ucggcggaggcuuauaccu

SEQ ID NO: 2524651 - RNA, 19 nt, Artificial Sequence
  Description of Artificial Sequence: Synthetic oligonucleotide
acggcagagauugagagca

SEQ ID NO: 2524652 - RNA, 19 nt, Artificial Sequence
  Description of Artificial Sequence: Synthetic oligonucleotide
cugaggguucugcagauag

SEQ ID NO: 2524653 - RNA, 19 nt, Artificial Sequence
  Description of Artificial Sequence: Synthetic oligonucleotide
uuaccccuuugucaaaaca

SEQ ID NO: 2524654 - RNA, 19 nt, Artificial Sequence
  Description of Artificial Sequence: Synthetic oligonucleotide
gauaggacaucaccacggc

SEQ ID NO: 2524655 - RNA, 19 nt, Artificial Sequence
  Description of Artificial Sequence: Synthetic oligonucleotide
gaggcuuauaccucagcac

SEQ ID NO: 2524656 - RNA, 19 nt, Artificial Sequence
  Description of Artificial Sequence: Synthetic oligonucleotide
gaguuggcaaagcugauaa

SEQ ID NO: 2524657 - RNA, 19 nt, Artificial Sequence
  Description of Artificial Sequence: Synthetic oligonucleotide
gggucggacauauuguugg

SEQ ID NO: 2524658 - RNA, 19 nt, Artificial Sequence
  Description of Artificial Sequence: Synthetic oligonucleotide
aggaguccuggauccaagc

SEQ ID NO: 2524659 - RNA, 19 nt, Artificial Sequence
  Description of Artificial Sequence: Synthetic oligonucleotide
cugcagauaggacaucacc

SEQ ID NO: 2524660 - RNA, 19 nt, Artificial Sequence
  Description of Artificial Sequence: Synthetic oligonucleotide
agagauugagagcaugaaa

SEQ ID NO: 2524661 - RNA, 19 nt, Artificial Sequence
  Description of Artificial Sequence: Synthetic oligonucleotide
ugaggguucugcagauagg

SEQ ID NO: 2524662 - RNA, 19 nt, Artificial Sequence
  Description of Artificial Sequence: Synthetic oligonucleotide
caccacuucagcuuaagca

SEQ ID NO: 2524663 - RNA, 19 nt, Artificial Sequence
  Description of Artificial Sequence: Synthetic oligonucleotide
ucccauaacaguggggaag

SEQ ID NO: 2524664 - RNA, 19 nt, Artificial Sequence
  Description of Artificial Sequence: Synthetic oligonucleotide
gauucauguagucuggcgu

SEQ ID NO: 2524665 - RNA, 19 nt, Artificial Sequence
  Description of Artificial Sequence: Synthetic oligonucleotide
cauagcgaacugaagacca

SEQ ID NO: 2524666 - RNA, 19 nt, Artificial Sequence
  Description of Artificial Sequence: Synthetic oligonucleotide
ugauuucaacaagaaaacu

SEQ ID NO: 2524667 - RNA, 19 nt, Artificial Sequence
  Description of Artificial Sequence: Synthetic oligonucleotide
cagauaggacaucaccacg

SEQ ID NO: 2524668 - RNA, 19 nt, Artificial Sequence
  Description of Artificial Sequence: Synthetic oligonucleotide
uucccuccauucaacuggg

SEQ ID NO: 2524669 - RNA, 19 nt, Artificial Sequence
  Description of Artificial Sequence: Synthetic oligonucleotide
uucauguagucuggcgucg

SEQ ID NO: 2524670 - RNA, 19 nt, Artificial Sequence
  Description of Artificial Sequence: Synthetic oligonucleotide
uucguguccuccgagcucc

SEQ ID NO: 2524671 - RNA, 19 nt, Artificial Sequence
  Description of Artificial Sequence: Synthetic oligonucleotide
aagaucaugccuagcagau

SEQ ID NO: 2524672 - RNA, 19 nt, Artificial Sequence
  Description of Artificial Sequence: Synthetic oligonucleotide
augaaacuacucaucaucu

SEQ ID NO: 2524673 - RNA, 19 nt, Artificial Sequence
  Description of Artificial Sequence: Synthetic oligonucleotide
aaaggcuagaccagagaga

SEQ ID NO: 2524674 - RNA, 19 nt, Artificial Sequence
  Description of Artificial Sequence: Synthetic oligonucleotide
aguuaaggacagcagcuaa

SEQ ID NO: 2524675 - RNA, 19 nt, Artificial Sequence
  Description of Artificial Sequence: Synthetic oligonucleotide
cuaagugaauacuuaggaa

SEQ ID NO: 2524676 - RNA, 19 nt, Artificial Sequence
  Description of Artificial Sequence: Synthetic oligonucleotide
ucgggucguccaaagcugg

SEQ ID NO: 2524677 - RNA, 19 nt, Artificial Sequence
  Description of Artificial Sequence: Synthetic oligonucleotide
uugguggacauagcgaacu

SEQ ID NO: 2524678 - RNA, 19 nt, Artificial Sequence
  Description of Artificial Sequence: Synthetic oligonucleotide
guuaaggacagcagcuaag

SEQ ID NO: 2524679 - RNA, 19 nt, Artificial Sequence
  Description of Artificial Sequence: Synthetic oligonucleotide
gagacaacacucaggcaag

SEQ ID NO: 2524680 - RNA, 19 nt, Artificial Sequence
  Description of Artificial Sequence: Synthetic oligonucleotide
uauuguugguggacauagc

SEQ ID NO: 2524681 - RNA, 19 nt, Artificial Sequence
  Description of Artificial Sequence: Synthetic oligonucleotide
acacucaggcaaguuaagg

SEQ ID NO: 2524682 - RNA, 19 nt, Artificial Sequence
  Description of Artificial Sequence: Synthetic oligonucleotide
gacauauuguugguggaca

SEQ ID NO: 2524683 - RNA, 19 nt, Artificial Sequence
  Description of Artificial Sequence: Synthetic oligonucleotide
acugaagaccacaccguac

SEQ ID NO: 2524684 - RNA, 19 nt, Artificial Sequence
  Description of Artificial Sequence: Synthetic oligonucleotide
uugcaagaguggaaaauuu

SEQ ID NO: 2524685 - RNA, 19 nt, Artificial Sequence
  Description of Artificial Sequence: Synthetic oligonucleotide
ugggucggacauauuguug

SEQ ID NO: 2524686 - RNA, 19 nt, Artificial Sequence
  Description of Artificial Sequence: Synthetic oligonucleotide
caggaccccaaaagaaagg

SEQ ID NO: 2524687 - RNA, 19 nt, Artificial Sequence
  Description of Artificial Sequence: Synthetic oligonucleotide
guagucuggcgucgggucg

SEQ ID NO: 2524688 - RNA, 19 nt, Artificial Sequence
  Description of Artificial Sequence: Synthetic oligonucleotide
caagaguggaaaauuuuaa

SEQ ID NO: 2524689 - RNA, 19 nt, Artificial Sequence
  Description of Artificial Sequence: Synthetic oligonucleotide
ugggcugaggguucugcag

SEQ ID NO: 2524690 - RNA, 19 nt, Artificial Sequence
  Description of Artificial Sequence: Synthetic oligonucleotide
cuagcagauucauguaguc

SEQ ID NO: 2524691 - RNA, 19 nt, Artificial Sequence
  Description of Artificial Sequence: Synthetic oligonucleotide
ggaacaguagacagcaacc

SEQ ID NO: 2524692 - RNA, 19 nt, Artificial Sequence
  Description of Artificial Sequence: Synthetic oligonucleotide
ucugcagauaggacaucac

SEQ ID NO: 2524693 - RNA, 19 nt, Artificial Sequence
  Description of Artificial Sequence: Synthetic oligonucleotide
gguuuuaccccuuugucaa

SEQ ID NO: 2524694 - RNA, 19 nt, Artificial Sequence
  Description of Artificial Sequence: Synthetic oligonucleotide
agcacuuuguugggucucc

SEQ ID NO: 2524695 - RNA, 19 nt, Artificial Sequence
  Description of Artificial Sequence: Synthetic oligonucleotide
ucugcuucguguccuccga

SEQ ID NO: 2524696 - RNA, 19 nt, Artificial Sequence
  Description of Artificial Sequence: Synthetic oligonucleotide
agcuggguugcacucgcuc

SEQ ID NO: 2524697 - RNA, 19 nt, Artificial Sequence
  Description of Artificial Sequence: Synthetic oligonucleotide
agcuuaagcaugaggccac

SEQ ID NO: 2524698 - RNA, 19 nt, Artificial Sequence
  Description of Artificial Sequence: Synthetic oligonucleotide
aaacagaagcaggacccca

SEQ ID NO: 2524699 - RNA, 19 nt, Artificial Sequence
  Description of Artificial Sequence: Synthetic oligonucleotide
aacuacucaucaucugcuu

SEQ ID NO: 2524700 - RNA, 19 nt, Artificial Sequence
  Description of Artificial Sequence: Synthetic oligonucleotide
accacaccguaccuuucac

SEQ ID NO: 2524701 - RNA, 19 nt, Artificial Sequence
  Description of Artificial Sequence: Synthetic oligonucleotide
agcgaacugaagaccacac

SEQ ID NO: 2524702 - RNA, 19 nt, Artificial Sequence
  Description of Artificial Sequence: Synthetic oligonucleotide
aggcaaguuaaggacagca

SEQ ID NO: 2524703 - RNA, 19 nt, Artificial Sequence
  Description of Artificial Sequence: Synthetic oligonucleotide
gaaaacuaagugaauacuu

SEQ ID NO: 2524704 - RNA, 19 nt, Artificial Sequence
  Description of Artificial Sequence: Synthetic oligonucleotide
ugaagaccacaccguaccu

SEQ ID NO: 2524705 - RNA, 19 nt, Artificial Sequence
  Description of Artificial Sequence: Synthetic oligonucleotide
guugggucuccgugggucg

SEQ ID NO: 2524706 - RNA, 19 nt, Artificial Sequence
  Description of Artificial Sequence: Synthetic oligonucleotide
cucagcacuuuguuggguc

SEQ ID NO: 2524707 - RNA, 19 nt, Artificial Sequence
  Description of Artificial Sequence: Synthetic oligonucleotide
guaccuuucacugcuagaa

SEQ ID NO: 2524708 - RNA, 19 nt, Artificial Sequence
  Description of Artificial Sequence: Synthetic oligonucleotide
aagcccucuaggugacauc

SEQ ID NO: 2524709 - RNA, 19 nt, Artificial Sequence
  Description of Artificial Sequence: Synthetic oligonucleotide
gcugauaaaggaacaguag

SEQ ID NO: 2524710 - RNA, 19 nt, Artificial Sequence
  Description of Artificial Sequence: Synthetic oligonucleotide
uuuuaccccuuugucaaaa

SEQ ID NO: 2524711 - RNA, 19 nt, Artificial Sequence
  Description of Artificial Sequence: Synthetic oligonucleotide
caacacucaggcaaguuaa

SEQ ID NO: 2524712 - RNA, 19 nt, Artificial Sequence
  Description of Artificial Sequence: Synthetic oligonucleotide
acauauuguugguggacau

SEQ ID NO: 2524713 - RNA, 19 nt, Artificial Sequence
  Description of Artificial Sequence: Synthetic oligonucleotide
caaguuaaggacagcagcu

SEQ ID NO: 2524714 - RNA, 19 nt, Artificial Sequence
  Description of Artificial Sequence: Synthetic oligonucleotide
gcaaagcugauaaaggaac

SEQ ID NO: 2524715 - RNA, 19 nt, Artificial Sequence
  Description of Artificial Sequence: Synthetic oligonucleotide
cuggguugcacucgcucgg

SEQ ID NO: 2524716 - RNA, 19 nt, Artificial Sequence
  Description of Artificial Sequence: Synthetic oligonucleotide
uuuaccccuuugucaaaac

SEQ ID NO: 2524717 - RNA, 19 nt, Artificial Sequence
  Description of Artificial Sequence: Synthetic oligonucleotide
aggugacaucaccaagggg

SEQ ID NO: 2524718 - RNA, 19 nt, Artificial Sequence
  Description of Artificial Sequence: Synthetic oligonucleotide
gugaauacuuaggaacaug

SEQ ID NO: 2524719 - RNA, 19 nt, Artificial Sequence
  Description of Artificial Sequence: Synthetic oligonucleotide
uccgggaguuggcaaagcu

SEQ ID NO: 2524720 - RNA, 19 nt, Artificial Sequence
  Description of Artificial Sequence: Synthetic oligonucleotide
uagcagauucauguagucu

SEQ ID NO: 2524721 - RNA, 19 nt, Artificial Sequence
  Description of Artificial Sequence: Synthetic oligonucleotide
ugcuucguguccuccgagc

SEQ ID NO: 2524722 - RNA, 19 nt, Artificial Sequence
  Description of Artificial Sequence: Synthetic oligonucleotide
auaggacaucaccacggca

SEQ ID NO: 2524723 - RNA, 19 nt, Artificial Sequence
  Description of Artificial Sequence: Synthetic oligonucleotide
acugggagaccagagacaa

SEQ ID NO: 2524724 - RNA, 19 nt, Artificial Sequence
  Description of Artificial Sequence: Synthetic oligonucleotide
ucguccaaagcuggguugc

SEQ ID NO: 2524725 - RNA, 19 nt, Artificial Sequence
  Description of Artificial Sequence: Synthetic oligonucleotide
aaguuaaggacagcagcua

SEQ ID NO: 2524726 - RNA, 19 nt, Artificial Sequence
  Description of Artificial Sequence: Synthetic oligonucleotide
gucaaaacagaagcaggac

SEQ ID NO: 2524727 - RNA, 19 nt, Artificial Sequence
  Description of Artificial Sequence: Synthetic oligonucleotide
ucauguagucuggcgucgg

SEQ ID NO: 2524728 - RNA, 19 nt, Artificial Sequence
  Description of Artificial Sequence: Synthetic oligonucleotide
caugccuagcagauucaug

SEQ ID NO: 2524729 - RNA, 19 nt, Artificial Sequence
  Description of Artificial Sequence: Synthetic oligonucleotide
uguugggucuccguggguc

SEQ ID NO: 2524730 - RNA, 19 nt, Artificial Sequence
  Description of Artificial Sequence: Synthetic oligonucleotide
agcugauaaaggaacagua

SEQ ID NO: 2524731 - RNA, 19 nt, Artificial Sequence
  Description of Artificial Sequence: Synthetic oligonucleotide
caucaucugcuucgugucc

SEQ ID NO: 2524732 - RNA, 19 nt, Artificial Sequence
  Description of Artificial Sequence: Synthetic oligonucleotide
caaagcuggguugcacucg

SEQ ID NO: 2524733 - RNA, 19 nt, Artificial Sequence
  Description of Artificial Sequence: Synthetic oligonucleotide
aauuaucaacugauuucaa

SEQ ID NO: 2524734 - RNA, 19 nt, Artificial Sequence
  Description of Artificial Sequence: Synthetic oligonucleotide
auagcgaacugaagaccac

SEQ ID NO: 2524735 - RNA, 19 nt, Artificial Sequence
  Description of Artificial Sequence: Synthetic oligonucleotide
ucuggcgucgggucgucca

SEQ ID NO: 2524736 - RNA, 19 nt, Artificial Sequence
  Description of Artificial Sequence: Synthetic oligonucleotide
ugguggacauagcgaacug

SEQ ID NO: 2524737 - RNA, 19 nt, Artificial Sequence
  Description of Artificial Sequence: Synthetic oligonucleotide
ggaggcuuauaccucagca

SEQ ID NO: 2524738 - RNA, 19 nt, Artificial Sequence
  Description of Artificial Sequence: Synthetic oligonucleotide
cacggcagagauugagagc

SEQ ID NO: 2524739 - RNA, 19 nt, Artificial Sequence
  Description of Artificial Sequence: Synthetic oligonucleotide
gcuggguugcacucgcucg

SEQ ID NO: 2524740 - RNA, 19 nt, Artificial Sequence
  Description of Artificial Sequence: Synthetic oligonucleotide
uaacaguggggaagucugu

SEQ ID NO: 2524741 - RNA, 19 nt, Artificial Sequence
  Description of Artificial Sequence: Synthetic oligonucleotide
gcagcuaagggcagguugg

SEQ ID NO: 2524742 - RNA, 19 nt, Artificial Sequence
  Description of Artificial Sequence: Synthetic oligonucleotide
cauguagucuggcgucggg

SEQ ID NO: 2524743 - RNA, 19 nt, Artificial Sequence
  Description of Artificial Sequence: Synthetic oligonucleotide
guuucccauaacagugggg

SEQ ID NO: 2524744 - RNA, 19 nt, Artificial Sequence
  Description of Artificial Sequence: Synthetic oligonucleotide
acuuaggaacaugaacagu

SEQ ID NO: 2524745 - RNA, 19 nt, Artificial Sequence
  Description of Artificial Sequence: Synthetic oligonucleotide
gaauacuuaggaacaugaa

SEQ ID NO: 2524746 - RNA, 19 nt, Artificial Sequence
  Description of Artificial Sequence: Synthetic oligonucleotide
acacaugcugaagaucaug

SEQ ID NO: 2524747 - RNA, 19 nt, Artificial Sequence
  Description of Artificial Sequence: Synthetic oligonucleotide
uguccuccgagcuccggga

SEQ ID NO: 2524748 - RNA, 19 nt, Artificial Sequence
  Description of Artificial Sequence: Synthetic oligonucleotide
aacugggagaccagagaca

SEQ ID NO: 2524749 - RNA, 19 nt, Artificial Sequence
  Description of Artificial Sequence: Synthetic oligonucleotide
cucggcggaggcuuauacc

SEQ ID NO: 2524750 - RNA, 19 nt, Artificial Sequence
  Description of Artificial Sequence: Synthetic oligonucleotide
cccuuugucaaaacagaag

SEQ ID NO: 2524751 - RNA, 19 nt, Artificial Sequence
  Description of Artificial Sequence: Synthetic oligonucleotide
uagcgaacugaagaccaca

SEQ ID NO: 2524752 - RNA, 19 nt, Artificial Sequence
  Description of Artificial Sequence: Synthetic oligonucleotide
cagccaaaggcuagaccag

SEQ ID NO: 2524753 - RNA, 19 nt, Artificial Sequence
  Description of Artificial Sequence: Synthetic oligonucleotide
agcccucuaggugacauca

SEQ ID NO: 2524754 - RNA, 19 nt, Artificial Sequence
  Description of Artificial Sequence: Synthetic oligonucleotide
ccacacaugcugaagauca

SEQ ID NO: 2524755 - RNA, 19 nt, Artificial Sequence
  Description of Artificial Sequence: Synthetic oligonucleotide
gguugcacucgcucggcgg

SEQ ID NO: 2524756 - RNA, 19 nt, Artificial Sequence
  Description of Artificial Sequence: Synthetic oligonucleotide
caacuucccuccauucaac

SEQ ID NO: 2524757 - RNA, 19 nt, Artificial Sequence
  Description of Artificial Sequence: Synthetic oligonucleotide
agugaauacuuaggaacau

SEQ ID NO: 2524758 - RNA, 19 nt, Artificial Sequence
  Description of Artificial Sequence: Synthetic oligonucleotide
caacugauuucaacaagaa

SEQ ID NO: 2524759 - RNA, 19 nt, Artificial Sequence
  Description of Artificial Sequence: Synthetic oligonucleotide
agcacaccacuucagcuua

SEQ ID NO: 2524760 - RNA, 19 nt, Artificial Sequence
  Description of Artificial Sequence: Synthetic oligonucleotide
gguuggaggcagccaaagg

SEQ ID NO: 2524761 - RNA, 19 nt, Artificial Sequence
  Description of Artificial Sequence: Synthetic oligonucleotide
cacuucagcuuaagcauga

SEQ ID NO: 2524762 - RNA, 19 nt, Artificial Sequence
  Description of Artificial Sequence: Synthetic oligonucleotide
ggcaaguuaaggacagcag

SEQ ID NO: 2524763 - RNA, 19 nt, Artificial Sequence
  Description of Artificial Sequence: Synthetic oligonucleotide
aggguucugcagauaggac

SEQ ID NO: 2524764 - RNA, 19 nt, Artificial Sequence
  Description of Artificial Sequence: Synthetic oligonucleotide
gcaggaccccaaaagaaag

SEQ ID NO: 2524765 - RNA, 19 nt, Artificial Sequence
  Description of Artificial Sequence: Synthetic oligonucleotide
uucccauaacaguggggaa

SEQ ID NO: 2524766 - RNA, 19 nt, Artificial Sequence
  Description of Artificial Sequence: Synthetic oligonucleotide
cagcuuaagcaugaggcca

SEQ ID NO: 2524767 - RNA, 19 nt, Artificial Sequence
  Description of Artificial Sequence: Synthetic oligonucleotide
agcaacccaagcacaccac

SEQ ID NO: 2524768 - RNA, 19 nt, Artificial Sequence
  Description of Artificial Sequence: Synthetic oligonucleotide
ccacggcagagauugagag

SEQ ID NO: 2524769 - RNA, 19 nt, Artificial Sequence
  Description of Artificial Sequence: Synthetic oligonucleotide
acagaagcaggaccccaaa

SEQ ID NO: 2524770 - RNA, 19 nt, Artificial Sequence
  Description of Artificial Sequence: Synthetic oligonucleotide
gaacaguguuucccauaac

SEQ ID NO: 2524771 - RNA, 19 nt, Artificial Sequence
  Description of Artificial Sequence: Synthetic oligonucleotide
guugcacucgcucggcgga

SEQ ID NO: 2524772 - RNA, 19 nt, Artificial Sequence
  Description of Artificial Sequence: Synthetic oligonucleotide
agcaggaccccaaaagaaa

SEQ ID NO: 2524773 - RNA, 19 nt, Artificial Sequence
  Description of Artificial Sequence: Synthetic oligonucleotide
ugaggccacacaugcugaa

SEQ ID NO: 2524774 - RNA, 19 nt, Artificial Sequence
  Description of Artificial Sequence: Synthetic oligonucleotide
ccaagcacaccacuucagc

SEQ ID NO: 2524775 - RNA, 19 nt, Artificial Sequence
  Description of Artificial Sequence: Synthetic oligonucleotide
accagagagaaggugggua

SEQ ID NO: 2524776 - RNA, 19 nt, Artificial Sequence
  Description of Artificial Sequence: Synthetic oligonucleotide
ucaugccuagcagauucau

SEQ ID NO: 2524777 - RNA, 19 nt, Artificial Sequence
  Description of Artificial Sequence: Synthetic oligonucleotide
acucaucaucugcuucgug

SEQ ID NO: 2524778 - RNA, 19 nt, Artificial Sequence
  Description of Artificial Sequence: Synthetic oligonucleotide
gucgggucguccaaagcug

SEQ ID NO: 2524779 - RNA, 19 nt, Artificial Sequence
  Description of Artificial Sequence: Synthetic oligonucleotide
gucggacauauuguuggug

SEQ ID NO: 2524780 - RNA, 19 nt, Artificial Sequence
  Description of Artificial Sequence: Synthetic oligonucleotide
aguuggcaaagcugauaaa

SEQ ID NO: 2524781 - RNA, 19 nt, Artificial Sequence
  Description of Artificial Sequence: Synthetic oligonucleotide
gaaagggcccaacuucccu

SEQ ID NO: 2524782 - RNA, 19 nt, Artificial Sequence
  Description of Artificial Sequence: Synthetic oligonucleotide
caccacggcagagauugag

SEQ ID NO: 2524783 - RNA, 19 nt, Artificial Sequence
  Description of Artificial Sequence: Synthetic oligonucleotide
cuuaagcaugaggccacac

SEQ ID NO: 2524784 - RNA, 19 nt, Artificial Sequence
  Description of Artificial Sequence: Synthetic oligonucleotide
ugccuagcagauucaugua

SEQ ID NO: 2524785 - RNA, 19 nt, Artificial Sequence
  Description of Artificial Sequence: Synthetic oligonucleotide
uccuccgagcuccgggagu

SEQ ID NO: 2524786 - RNA, 19 nt, Artificial Sequence
  Description of Artificial Sequence: Synthetic oligonucleotide
auguagucuggcgucgggu

SEQ ID NO: 2524787 - RNA, 19 nt, Artificial Sequence
  Description of Artificial Sequence: Synthetic oligonucleotide
ccuccauucaacugggaga

SEQ ID NO: 2524788 - RNA, 19 nt, Artificial Sequence
  Description of Artificial Sequence: Synthetic oligonucleotide
ccgugggucggacauauug

SEQ ID NO: 2524789 - RNA, 19 nt, Artificial Sequence
  Description of Artificial Sequence: Synthetic oligonucleotide
ggacauauuguugguggac

SEQ ID NO: 2524790 - RNA, 19 nt, Artificial Sequence
  Description of Artificial Sequence: Synthetic oligonucleotide
cuucguguccuccgagcuc

SEQ ID NO: 2524791 - RNA, 19 nt, Artificial Sequence
  Description of Artificial Sequence: Synthetic oligonucleotide
ugcacucgcucggcggagg

SEQ ID NO: 2524792 - RNA, 19 nt, Artificial Sequence
  Description of Artificial Sequence: Synthetic oligonucleotide
agcuaagggcagguuggag

SEQ ID NO: 2524793 - RNA, 19 nt, Artificial Sequence
  Description of Artificial Sequence: Synthetic oligonucleotide
ggcaaagcugauaaaggaa

SEQ ID NO: 2524794 - RNA, 19 nt, Artificial Sequence
  Description of Artificial Sequence: Synthetic oligonucleotide
gcaagaguggaaaauuuua

SEQ ID NO: 2524795 - RNA, 19 nt, Artificial Sequence
  Description of Artificial Sequence: Synthetic oligonucleotide
gcgaacugaagaccacacc

SEQ ID NO: 2524796 - RNA, 19 nt, Artificial Sequence
  Description of Artificial Sequence: Synthetic oligonucleotide
cacaccacuucagcuuaag

SEQ ID NO: 2524797 - RNA, 19 nt, Artificial Sequence
  Description of Artificial Sequence: Synthetic oligonucleotide
cauaacaguggggaagucu

SEQ ID NO: 2524798 - RNA, 19 nt, Artificial Sequence
  Description of Artificial Sequence: Synthetic oligonucleotide
gggcgucaugggcugaggg

SEQ ID NO: 2524799 - RNA, 19 nt, Artificial Sequence
  Description of Artificial Sequence: Synthetic oligonucleotide
uagucuggcgucgggucgu

SEQ ID NO: 2524800 - RNA, 19 nt, Artificial Sequence
  Description of Artificial Sequence: Synthetic oligonucleotide
accacggcagagauugaga

SEQ ID NO: 2524801 - RNA, 19 nt, Artificial Sequence
  Description of Artificial Sequence: Synthetic oligonucleotide
uuguugggucuccgugggu

SEQ ID NO: 2524802 - RNA, 19 nt, Artificial Sequence
  Description of Artificial Sequence: Synthetic oligonucleotide
uggguugcacucgcucggc

SEQ ID NO: 2524803 - RNA, 19 nt, Artificial Sequence
  Description of Artificial Sequence: Synthetic oligonucleotide
gcagagauugagagcauga

SEQ ID NO: 2524804 - RNA, 19 nt, Artificial Sequence
  Description of Artificial Sequence: Synthetic oligonucleotide
ucguguccuccgagcuccg

SEQ ID NO: 2524805 - RNA, 19 nt, Artificial Sequence
  Description of Artificial Sequence: Synthetic oligonucleotide
ggcagagauugagagcaug

SEQ ID NO: 2524806 - RNA, 19 nt, Artificial Sequence
  Description of Artificial Sequence: Synthetic oligonucleotide
cugcuucguguccuccgag

SEQ ID NO: 2524807 - RNA, 19 nt, Artificial Sequence
  Description of Artificial Sequence: Synthetic oligonucleotide
gaggcagccaaaggcuaga

SEQ ID NO: 2524808 - RNA, 19 nt, Artificial Sequence
  Description of Artificial Sequence: Synthetic oligonucleotide
guuuuaccccuuugucaaa

SEQ ID NO: 2524809 - RNA, 19 nt, Artificial Sequence
  Description of Artificial Sequence: Synthetic oligonucleotide
ggcggaggcuuauaccuca

SEQ ID NO: 2524810 - RNA, 19 nt, Artificial Sequence
  Description of Artificial Sequence: Synthetic oligonucleotide
guccuccgagcuccgggag

SEQ ID NO: 2524811 - RNA, 19 nt, Artificial Sequence
  Description of Artificial Sequence: Synthetic oligonucleotide
uugcacucgcucggcggag

SEQ ID NO: 2524812 - RNA, 19 nt, Artificial Sequence
  Description of Artificial Sequence: Synthetic oligonucleotide
ccucuaggugacaucacca

SEQ ID NO: 2524813 - RNA, 19 nt, Artificial Sequence
  Description of Artificial Sequence: Synthetic oligonucleotide
uggggaagucugugguuuu

SEQ ID NO: 2524814 - RNA, 19 nt, Artificial Sequence
  Description of Artificial Sequence: Synthetic oligonucleotide
cagagacaacacucaggca

SEQ ID NO: 2524815 - RNA, 19 nt, Artificial Sequence
  Description of Artificial Sequence: Synthetic oligonucleotide
guaggaguccuggauccaa

SEQ ID NO: 2524816 - RNA, 19 nt, Artificial Sequence
  Description of Artificial Sequence: Synthetic oligonucleotide
cauauuguugguggacaua

SEQ ID NO: 2524817 - RNA, 19 nt, Artificial Sequence
  Description of Artificial Sequence: Synthetic oligonucleotide
cugggagaccagagacaac

SEQ ID NO: 2524818 - RNA, 19 nt, Artificial Sequence
  Description of Artificial Sequence: Synthetic oligonucleotide
cccaagcacaccacuucag

SEQ ID NO: 2524819 - RNA, 19 nt, Artificial Sequence
  Description of Artificial Sequence: Synthetic oligonucleotide
caggcaaguuaaggacagc

SEQ ID NO: 2524820 - RNA, 19 nt, Artificial Sequence
  Description of Artificial Sequence: Synthetic oligonucleotide
ucccuccauucaacuggga

SEQ ID NO: 2524821 - RNA, 19 nt, Artificial Sequence
  Description of Artificial Sequence: Synthetic oligonucleotide
cagaagcaggaccccaaaa

SEQ ID NO: 2524822 - RNA, 19 nt, Artificial Sequence
  Description of Artificial Sequence: Synthetic oligonucleotide
ucaccacggcagagauuga

SEQ ID NO: 2524823 - RNA, 19 nt, Artificial Sequence
  Description of Artificial Sequence: Synthetic oligonucleotide
ggguugcacucgcucggcg

SEQ ID NO: 2524824 - RNA, 19 nt, Artificial Sequence
  Description of Artificial Sequence: Synthetic oligonucleotide
aaggaacaguagacagcaa

SEQ ID NO: 2524825 - RNA, 19 nt, Artificial Sequence
  Description of Artificial Sequence: Synthetic oligonucleotide
ggcgucgggucguccaaag

SEQ ID NO: 2524826 - RNA, 19 nt, Artificial Sequence
  Description of Artificial Sequence: Synthetic oligonucleotide
ggagaccagagacaacacu

SEQ ID NO: 2524827 - RNA, 19 nt, Artificial Sequence
  Description of Artificial Sequence: Synthetic oligonucleotide
gucuccgugggucggacau

SEQ ID NO: 2524828 - RNA, 19 nt, Artificial Sequence
  Description of Artificial Sequence: Synthetic oligonucleotide
acucgcucggcggaggcuu

SEQ ID NO: 2524829 - RNA, 19 nt, Artificial Sequence
  Description of Artificial Sequence: Synthetic oligonucleotide
agaucaugccuagcagauu

SEQ ID NO: 2524830 - RNA, 19 nt, Artificial Sequence
  Description of Artificial Sequence: Synthetic oligonucleotide
cagcacuuuguugggucuc

SEQ ID NO: 2524831 - RNA, 19 nt, Artificial Sequence
  Description of Artificial Sequence: Synthetic oligonucleotide
ccguaccuuucacugcuag

SEQ ID NO: 2524832 - RNA, 19 nt, Artificial Sequence
  Description of Artificial Sequence: Synthetic oligonucleotide
gagcuccgggaguuggcaa

SEQ ID NO: 2524833 - RNA, 19 nt, Artificial Sequence
  Description of Artificial Sequence: Synthetic oligonucleotide
ggacaucaccacggcagag

SEQ ID NO: 2524834 - RNA, 19 nt, Artificial Sequence
  Description of Artificial Sequence: Synthetic oligonucleotide
ccuagcagauucauguagu

SEQ ID NO: 2524835 - RNA, 19 nt, Artificial Sequence
  Description of Artificial Sequence: Synthetic oligonucleotide
gugggucggacauauuguu

SEQ ID NO: 2524836 - RNA, 19 nt, Artificial Sequence
  Description of Artificial Sequence: Synthetic oligonucleotide
gcucggcggaggcuuauac

SEQ ID NO: 2524837 - RNA, 19 nt, Artificial Sequence
  Description of Artificial Sequence: Synthetic oligonucleotide
gcugaagaucaugccuagc

SEQ ID NO: 2524838 - RNA, 19 nt, Artificial Sequence
  Description of Artificial Sequence: Synthetic oligonucleotide
aggcuagaccagagagaag

SEQ ID NO: 2524839 - RNA, 19 nt, Artificial Sequence
  Description of Artificial Sequence: Synthetic oligonucleotide
agucuggcgucgggucguc

SEQ ID NO: 2524840 - RNA, 19 nt, Artificial Sequence
  Description of Artificial Sequence: Synthetic oligonucleotide
caacccaagcacaccacuu

SEQ ID NO: 2524841 - RNA, 19 nt, Artificial Sequence
  Description of Artificial Sequence: Synthetic oligonucleotide
agggcccaacuucccucca

SEQ ID NO: 2524842 - RNA, 19 nt, Artificial Sequence
  Description of Artificial Sequence: Synthetic oligonucleotide
aagcuggguugcacucgcu

SEQ ID NO: 2524843 - RNA, 19 nt, Artificial Sequence
  Description of Artificial Sequence: Synthetic oligonucleotide
ggaguuggcaaagcugaua

SEQ ID NO: 2524844 - RNA, 19 nt, Artificial Sequence
  Description of Artificial Sequence: Synthetic oligonucleotide
ccccuuugucaaaacagaa

SEQ ID NO: 2524845 - RNA, 19 nt, Artificial Sequence
  Description of Artificial Sequence: Synthetic oligonucleotide
gcccaacuucccuccauuc

SEQ ID NO: 2524846 - RNA, 19 nt, Artificial Sequence
  Description of Artificial Sequence: Synthetic oligonucleotide
gcaugaaacuacucaucau

SEQ ID NO: 2524847 - RNA, 19 nt, Artificial Sequence
  Description of Artificial Sequence: Synthetic oligonucleotide
gggagaccagagacaacac

SEQ ID NO: 2524848 - RNA, 19 nt, Artificial Sequence
  Description of Artificial Sequence: Synthetic oligonucleotide
ggcgucaugggcugagggu

SEQ ID NO: 2524849 - RNA, 19 nt, Artificial Sequence
  Description of Artificial Sequence: Synthetic oligonucleotide
ucuccgugggucggacaua

SEQ ID NO: 2524850 - RNA, 19 nt, Artificial Sequence
  Description of Artificial Sequence: Synthetic oligonucleotide
gggcagguuggaggcagcc

SEQ ID NO: 2524851 - RNA, 19 nt, Artificial Sequence
  Description of Artificial Sequence: Synthetic oligonucleotide
gcgucgggucguccaaagc

SEQ ID NO: 2524852 - RNA, 19 nt, Artificial Sequence
  Description of Artificial Sequence: Synthetic oligonucleotide
gguaggaguccuggaucca

SEQ ID NO: 2524853 - RNA, 19 nt, Artificial Sequence
  Description of Artificial Sequence: Synthetic oligonucleotide
cagcuaagggcagguugga

SEQ ID NO: 2524854 - RNA, 19 nt, Artificial Sequence
  Description of Artificial Sequence: Synthetic oligonucleotide
uggcgucgggucguccaaa

SEQ ID NO: 2524855 - RNA, 19 nt, Artificial Sequence
  Description of Artificial Sequence: Synthetic oligonucleotide
caagcccucuaggugacau

SEQ ID NO: 2524856 - RNA, 19 nt, Artificial Sequence
  Description of Artificial Sequence: Synthetic oligonucleotide
ccgagcuccgggaguuggc

SEQ ID NO: 2524857 - RNA, 19 nt, Artificial Sequence
  Description of Artificial Sequence: Synthetic oligonucleotide
ggucguccaaagcuggguu

SEQ ID NO: 2524858 - RNA, 19 nt, Artificial Sequence
  Description of Artificial Sequence: Synthetic oligonucleotide
uccgugggucggacauauu

SEQ ID NO: 2524859 - RNA, 19 nt, Artificial Sequence
  Description of Artificial Sequence: Synthetic oligonucleotide
cguaccuuucacugcuaga

SEQ ID NO: 2524860 - RNA, 19 nt, Artificial Sequence
  Description of Artificial Sequence: Synthetic oligonucleotide
cuggcgucgggucguccaa

SEQ ID NO: 2524861 - RNA, 19 nt, Artificial Sequence
  Description of Artificial Sequence: Synthetic oligonucleotide
cgggucguccaaagcuggg

SEQ ID NO: 2524862 - RNA, 19 nt, Artificial Sequence
  Description of Artificial Sequence: Synthetic oligonucleotide
ggggcgucaugggcugagg

SEQ ID NO: 2524863 - RNA, 19 nt, Artificial Sequence
  Description of Artificial Sequence: Synthetic oligonucleotide
gcuuaagcaugaggccaca

SEQ ID NO: 2524864 - RNA, 19 nt, Artificial Sequence
  Description of Artificial Sequence: Synthetic oligonucleotide
cggacauauuguuggugga

SEQ ID NO: 2524865 - RNA, 19 nt, Artificial Sequence
  Description of Artificial Sequence: Synthetic oligonucleotide
gcggaggcuuauaccucag

SEQ ID NO: 2524866 - RNA, 19 nt, Artificial Sequence
  Description of Artificial Sequence: Synthetic oligonucleotide
cgucgggucguccaaagcu

SEQ ID NO: 2524867 - RNA, 19 nt, Artificial Sequence
  Description of Artificial Sequence: Synthetic oligonucleotide
gcuuauaccucagcacuuu

SEQ ID NO: 2524868 - RNA, 19 nt, Artificial Sequence
  Description of Artificial Sequence: Synthetic oligonucleotide
gucaugggcugaggguucu

SEQ ID NO: 2524869 - RNA, 19 nt, Artificial Sequence
  Description of Artificial Sequence: Synthetic oligonucleotide
cuccgugggucggacauau

SEQ ID NO: 2524870 - RNA, 19 nt, Artificial Sequence
  Description of Artificial Sequence: Synthetic oligonucleotide
cgugggucggacauauugu

SEQ ID NO: 2524871 - RNA, 19 nt, Artificial Sequence
  Description of Artificial Sequence: Synthetic oligonucleotide
ucgcucggcggaggcuuau

SEQ ID NO: 2524872 - RNA, 19 nt, Artificial Sequence
  Description of Artificial Sequence: Synthetic oligonucleotide
gcuagaccagagagaaggu

SEQ ID NO: 2524873 - RNA, 19 nt, Artificial Sequence
  Description of Artificial Sequence: Synthetic oligonucleotide
gcgucaugggcugaggguu

SEQ ID NO: 2524874 - RNA, 19 nt, Artificial Sequence
  Description of Artificial Sequence: Synthetic oligonucleotide
gggucguccaaagcugggu

SEQ ID NO: 2524875 - RNA, 19 nt, Artificial Sequence
  Description of Artificial Sequence: Synthetic oligonucleotide
ggggaagucugugguuuua

SEQ ID NO: 2524876 - RNA, 19 nt, Artificial Sequence
  Description of Artificial Sequence: Synthetic oligonucleotide
ggcuuauaccucagcacuu

SEQ ID NO: 2524877 - RNA, 19 nt, Artificial Sequence
  Description of Artificial Sequence: Synthetic oligonucleotide
ccauaacaguggggaaguc

SEQ ID NO: 2524878 - RNA, 19 nt, Artificial Sequence
  Description of Artificial Sequence: Synthetic oligonucleotide
caucaccacggcagagauu

SEQ ID NO: 2524879 - RNA, 19 nt, Artificial Sequence
  Description of Artificial Sequence: Synthetic oligonucleotide
ggcccaacuucccuccauu

SEQ ID NO: 2524880 - RNA, 19 nt, Artificial Sequence
  Description of Artificial Sequence: Synthetic oligonucleotide
ccacaccguaccuuucacu

SEQ ID NO: 2524881 - RNA, 19 nt, Artificial Sequence
  Description of Artificial Sequence: Synthetic oligonucleotide
cucgcucggcggaggcuua

SEQ ID NO: 2524882 - RNA, 19 nt, Artificial Sequence
  Description of Artificial Sequence: Synthetic oligonucleotide
cggcggaggcuuauaccuc

SEQ ID NO: 2524883 - RNA, 19 nt, Artificial Sequence
  Description of Artificial Sequence: Synthetic oligonucleotide
cguguccuccgagcuccgg

SEQ ID NO: 2524884 - RNA, 19 nt, Artificial Sequence
  Description of Artificial Sequence: Synthetic oligonucleotide
gcacaccacuucagcuuaa

SEQ ID NO: 2524885 - RNA, 19 nt, Artificial Sequence
  Description of Artificial Sequence: Synthetic oligonucleotide
cacucgcucggcggaggcu

SEQ ID NO: 2524886 - RNA, 19 nt, Artificial Sequence
  Description of Artificial Sequence: Synthetic oligonucleotide
cguccaaagcuggguugca

SEQ ID NO: 2524887 - RNA, 19 nt, Artificial Sequence
  Description of Artificial Sequence: Synthetic oligonucleotide
ccaagcccucuaggugaca

SEQ ID NO: 2524888 - RNA, 19 nt, Artificial Sequence
  Description of Artificial Sequence: Synthetic oligonucleotide
cgcucggcggaggcuuaua

SEQ ID NO: 2524889 - RNA, 19 nt, Artificial Sequence
  Description of Artificial Sequence: Synthetic oligonucleotide
aauaagaagagguauaagc

SEQ ID NO: 2524890 - RNA, 19 nt, Artificial Sequence
  Description of Artificial Sequence: Synthetic oligonucleotide
uauuaauucaauaaaucag

SEQ ID NO: 2524891 - RNA, 19 nt, Artificial Sequence
  Description of Artificial Sequence: Synthetic oligonucleotide
ugaaagauaacaaagcggc

SEQ ID NO: 2524892 - RNA, 19 nt, Artificial Sequence
  Description of Artificial Sequence: Synthetic oligonucleotide
aaaguuauuaauucaauaa

SEQ ID NO: 2524893 - RNA, 19 nt, Artificial Sequence
  Description of Artificial Sequence: Synthetic oligonucleotide
uacaaaauggaaaagaauc

SEQ ID NO: 2524894 - RNA, 19 nt, Artificial Sequence
  Description of Artificial Sequence: Synthetic oligonucleotide
aaacgagguagccugaagc

SEQ ID NO: 2524895 - RNA, 19 nt, Artificial Sequence
  Description of Artificial Sequence: Synthetic oligonucleotide
ugaagcacaccuuuaaucg

SEQ ID NO: 2524896 - RNA, 19 nt, Artificial Sequence
  Description of Artificial Sequence: Synthetic oligonucleotide
aaaccaguaacuuacaaaa

SEQ ID NO: 2524897 - RNA, 19 nt, Artificial Sequence
  Description of Artificial Sequence: Synthetic oligonucleotide
ucaucaaauaagaagaggu

SEQ ID NO: 2524898 - RNA, 19 nt, Artificial Sequence
  Description of Artificial Sequence: Synthetic oligonucleotide
aauacaaaggagguauugc

SEQ ID NO: 2524899 - RNA, 19 nt, Artificial Sequence
  Description of Artificial Sequence: Synthetic oligonucleotide
agguauaagccauaagucc

SEQ ID NO: 2524900 - RNA, 19 nt, Artificial Sequence
  Description of Artificial Sequence: Synthetic oligonucleotide
aagauaacaaagcggcuac

SEQ ID NO: 2524901 - RNA, 19 nt, Artificial Sequence
  Description of Artificial Sequence: Synthetic oligonucleotide
aaagacuacugucaugagg

SEQ ID NO: 2524902 - RNA, 19 nt, Artificial Sequence
  Description of Artificial Sequence: Synthetic oligonucleotide
agagguauaagccauaagu

SEQ ID NO: 2524903 - RNA, 19 nt, Artificial Sequence
  Description of Artificial Sequence: Synthetic oligonucleotide
auaagaagagguauaagcc

SEQ ID NO: 2524904 - RNA, 19 nt, Artificial Sequence
  Description of Artificial Sequence: Synthetic oligonucleotide
gaaacuuuugcugaaaacc

SEQ ID NO: 2524905 - RNA, 19 nt, Artificial Sequence
  Description of Artificial Sequence: Synthetic oligonucleotide
uucaauuucacgcacgcug

SEQ ID NO: 2524906 - RNA, 19 nt, Artificial Sequence
  Description of Artificial Sequence: Synthetic oligonucleotide
ugaaucguaaauccaagcc

SEQ ID NO: 2524907 - RNA, 19 nt, Artificial Sequence
  Description of Artificial Sequence: Synthetic oligonucleotide
uguaauuuugaucauccac

SEQ ID NO: 2524908 - RNA, 19 nt, Artificial Sequence
  Description of Artificial Sequence: Synthetic oligonucleotide
uggcuuauggaacagaggc

SEQ ID NO: 2524909 - RNA, 19 nt, Artificial Sequence
  Description of Artificial Sequence: Synthetic oligonucleotide
uaagccauaagucccaacc

SEQ ID NO: 2524910 - RNA, 19 nt, Artificial Sequence
  Description of Artificial Sequence: Synthetic oligonucleotide
ugcaauauucaauuucacg

SEQ ID NO: 2524911 - RNA, 19 nt, Artificial Sequence
  Description of Artificial Sequence: Synthetic oligonucleotide
ucaaaaguuauuaauucaa

SEQ ID NO: 2524912 - RNA, 19 nt, Artificial Sequence
  Description of Artificial Sequence: Synthetic oligonucleotide
aguugcaauauucaauuuc

SEQ ID NO: 2524913 - RNA, 19 nt, Artificial Sequence
  Description of Artificial Sequence: Synthetic oligonucleotide
aauaaaucagaaacgaggu

SEQ ID NO: 2524914 - RNA, 19 nt, Artificial Sequence
  Description of Artificial Sequence: Synthetic oligonucleotide
aaccuggagaaacuuuugc

SEQ ID NO: 2524915 - RNA, 19 nt, Artificial Sequence
  Description of Artificial Sequence: Synthetic oligonucleotide
gcaauauucaauuucacgc

SEQ ID NO: 2524916 - RNA, 19 nt, Artificial Sequence
  Description of Artificial Sequence: Synthetic oligonucleotide
aucacauccaaaauaagac

SEQ ID NO: 2524917 - RNA, 19 nt, Artificial Sequence
  Description of Artificial Sequence: Synthetic oligonucleotide
gauacuacccuugaguucc

SEQ ID NO: 2524918 - RNA, 19 nt, Artificial Sequence
  Description of Artificial Sequence: Synthetic oligonucleotide
ucagaaacgagguagccug

SEQ ID NO: 2524919 - RNA, 19 nt, Artificial Sequence
  Description of Artificial Sequence: Synthetic oligonucleotide
auccaagccuuauaaaggc

SEQ ID NO: 2524920 - RNA, 19 nt, Artificial Sequence
  Description of Artificial Sequence: Synthetic oligonucleotide
auaagacagguagugaucc

SEQ ID NO: 2524921 - RNA, 19 nt, Artificial Sequence
  Description of Artificial Sequence: Synthetic oligonucleotide
aaaggcuucuguuccguac

SEQ ID NO: 2524922 - RNA, 19 nt, Artificial Sequence
  Description of Artificial Sequence: Synthetic oligonucleotide
auuggcaauguaugcaagc

SEQ ID NO: 2524923 - RNA, 19 nt, Artificial Sequence
  Description of Artificial Sequence: Synthetic oligonucleotide
aaugccgaugaccaguuug

SEQ ID NO: 2524924 - RNA, 19 nt, Artificial Sequence
  Description of Artificial Sequence: Synthetic oligonucleotide
acaaacaaugccgaugacc

SEQ ID NO: 2524925 - RNA, 19 nt, Artificial Sequence
  Description of Artificial Sequence: Synthetic oligonucleotide
ucaauuucacgcacgcugg

SEQ ID NO: 2524926 - RNA, 19 nt, Artificial Sequence
  Description of Artificial Sequence: Synthetic oligonucleotide
aagacuacugucaugagga

SEQ ID NO: 2524927 - RNA, 19 nt, Artificial Sequence
  Description of Artificial Sequence: Synthetic oligonucleotide
uucaaaaguuauuaauuca

SEQ ID NO: 2524928 - RNA, 19 nt, Artificial Sequence
  Description of Artificial Sequence: Synthetic oligonucleotide
augaagcacaccuuuaauc

SEQ ID NO: 2524929 - RNA, 19 nt, Artificial Sequence
  Description of Artificial Sequence: Synthetic oligonucleotide
aaaucagaaacgagguagc

SEQ ID NO: 2524930 - RNA, 19 nt, Artificial Sequence
  Description of Artificial Sequence: Synthetic oligonucleotide
uauucaauuucacgcacgc

SEQ ID NO: 2524931 - RNA, 19 nt, Artificial Sequence
  Description of Artificial Sequence: Synthetic oligonucleotide
uauaguaggcucaucaaau

SEQ ID NO: 2524932 - RNA, 19 nt, Artificial Sequence
  Description of Artificial Sequence: Synthetic oligonucleotide
aaugaagauggcuuaugga

SEQ ID NO: 2524933 - RNA, 19 nt, Artificial Sequence
  Description of Artificial Sequence: Synthetic oligonucleotide
aucugaaagauaacaaagc

SEQ ID NO: 2524934 - RNA, 19 nt, Artificial Sequence
  Description of Artificial Sequence: Synthetic oligonucleotide
uacacggaauauaugaaga

SEQ ID NO: 2524935 - RNA, 19 nt, Artificial Sequence
  Description of Artificial Sequence: Synthetic oligonucleotide
auccagguaaacugaaucg

SEQ ID NO: 2524936 - RNA, 19 nt, Artificial Sequence
  Description of Artificial Sequence: Synthetic oligonucleotide
agcggcuacaaacaaugcc

SEQ ID NO: 2524937 - RNA, 19 nt, Artificial Sequence
  Description of Artificial Sequence: Synthetic oligonucleotide
aggcucaucaaauaagaag

SEQ ID NO: 2524938 - RNA, 19 nt, Artificial Sequence
  Description of Artificial Sequence: Synthetic oligonucleotide
acuacugucaugaggauuc

SEQ ID NO: 2524939 - RNA, 19 nt, Artificial Sequence
  Description of Artificial Sequence: Synthetic oligonucleotide
uagugauccagguaaacug

SEQ ID NO: 2524940 - RNA, 19 nt, Artificial Sequence
  Description of Artificial Sequence: Synthetic oligonucleotide
aaagcggcuacaaacaaug

SEQ ID NO: 2524941 - RNA, 19 nt, Artificial Sequence
  Description of Artificial Sequence: Synthetic oligonucleotide
uuaauucaauaaaucagaa

SEQ ID NO: 2524942 - RNA, 19 nt, Artificial Sequence
  Description of Artificial Sequence: Synthetic oligonucleotide
aaauuggcaauguaugcaa

SEQ ID NO: 2524943 - RNA, 19 nt, Artificial Sequence
  Description of Artificial Sequence: Synthetic oligonucleotide
aauggaaaagaaucugaaa

SEQ ID NO: 2524944 - RNA, 19 nt, Artificial Sequence
  Description of Artificial Sequence: Synthetic oligonucleotide
aaucagaaacgagguagcc

SEQ ID NO: 2524945 - RNA, 19 nt, Artificial Sequence
  Description of Artificial Sequence: Synthetic oligonucleotide
uauuguaaccuggagaaac

SEQ ID NO: 2524946 - RNA, 19 nt, Artificial Sequence
  Description of Artificial Sequence: Synthetic oligonucleotide
aaauacaaaggagguauug

SEQ ID NO: 2524947 - RNA, 19 nt, Artificial Sequence
  Description of Artificial Sequence: Synthetic oligonucleotide
ucaaauaagaagagguaua

SEQ ID NO: 2524948 - RNA, 19 nt, Artificial Sequence
  Description of Artificial Sequence: Synthetic oligonucleotide
uuccauucaaucuucuucu

SEQ ID NO: 2524949 - RNA, 19 nt, Artificial Sequence
  Description of Artificial Sequence: Synthetic oligonucleotide
agguauugcaaugauccgc

SEQ ID NO: 2524950 - RNA, 19 nt, Artificial Sequence
  Description of Artificial Sequence: Synthetic oligonucleotide
uauaaaggcuucuguuccg

SEQ ID NO: 2524951 - RNA, 19 nt, Artificial Sequence
  Description of Artificial Sequence: Synthetic oligonucleotide
ggagguauugcaaugaucc

SEQ ID NO: 2524952 - RNA, 19 nt, Artificial Sequence
  Description of Artificial Sequence: Synthetic oligonucleotide
uccaauucaaaaguuauua

SEQ ID NO: 2524953 - RNA, 19 nt, Artificial Sequence
  Description of Artificial Sequence: Synthetic oligonucleotide
aguuuuccguucugaaggc

SEQ ID NO: 2524954 - RNA, 19 nt, Artificial Sequence
  Description of Artificial Sequence: Synthetic oligonucleotide
aaagauaacaaagcggcua

SEQ ID NO: 2524955 - RNA, 19 nt, Artificial Sequence
  Description of Artificial Sequence: Synthetic oligonucleotide
aacgagguagccugaagca

SEQ ID NO: 2524956 - RNA, 19 nt, Artificial Sequence
  Description of Artificial Sequence: Synthetic oligonucleotide
auacaaaggagguauugca

SEQ ID NO: 2524957 - RNA, 19 nt, Artificial Sequence
  Description of Artificial Sequence: Synthetic oligonucleotide
agcuauaguaggcucauca

SEQ ID NO: 2524958 - RNA, 19 nt, Artificial Sequence
  Description of Artificial Sequence: Synthetic oligonucleotide
uaugcaagcuuuccaauuc

SEQ ID NO: 2524959 - RNA, 19 nt, Artificial Sequence
  Description of Artificial Sequence: Synthetic oligonucleotide
guaauuuugaucauccaca

SEQ ID NO: 2524960 - RNA, 19 nt, Artificial Sequence
  Description of Artificial Sequence: Synthetic oligonucleotide
aaaggggcuggaaagcucg

SEQ ID NO: 2524961 - RNA, 19 nt, Artificial Sequence
  Description of Artificial Sequence: Synthetic oligonucleotide
gaguggaucagcuauagua

SEQ ID NO: 2524962 - RNA, 19 nt, Artificial Sequence
  Description of Artificial Sequence: Synthetic oligonucleotide
uauucuuagcuuucucuug

SEQ ID NO: 2524963 - RNA, 19 nt, Artificial Sequence
  Description of Artificial Sequence: Synthetic oligonucleotide
uuagcuuucucuugucuga

SEQ ID NO: 2524964 - RNA, 19 nt, Artificial Sequence
  Description of Artificial Sequence: Synthetic oligonucleotide
guacacggaauauaugaag

SEQ ID NO: 2524965 - RNA, 19 nt, Artificial Sequence
  Description of Artificial Sequence: Synthetic oligonucleotide
uaauucaauaaaucagaaa

SEQ ID NO: 2524966 - RNA, 19 nt, Artificial Sequence
  Description of Artificial Sequence: Synthetic oligonucleotide
auuucacgcacgcuggauc

SEQ ID NO: 2524967 - RNA, 19 nt, Artificial Sequence
  Description of Artificial Sequence: Synthetic oligonucleotide
aaagaaucugaaagauaac

SEQ ID NO: 2524968 - RNA, 19 nt, Artificial Sequence
  Description of Artificial Sequence: Synthetic oligonucleotide
ccaguaacuuacaaaaugg

SEQ ID NO: 2524969 - RNA, 19 nt, Artificial Sequence
  Description of Artificial Sequence: Synthetic oligonucleotide
aggguuucaaagaaccacc

SEQ ID NO: 2524970 - RNA, 19 nt, Artificial Sequence
  Description of Artificial Sequence: Synthetic oligonucleotide
agcaaagaguggcagguag

SEQ ID NO: 2524971 - RNA, 19 nt, Artificial Sequence
  Description of Artificial Sequence: Synthetic oligonucleotide
aaugauccgcacuacgaaa

SEQ ID NO: 2524972 - RNA, 19 nt, Artificial Sequence
  Description of Artificial Sequence: Synthetic oligonucleotide
guaaauccaagccuuauaa

SEQ ID NO: 2524973 - RNA, 19 nt, Artificial Sequence
  Description of Artificial Sequence: Synthetic oligonucleotide
ucccaaccagcaaagagug

SEQ ID NO: 2524974 - RNA, 19 nt, Artificial Sequence
  Description of Artificial Sequence: Synthetic oligonucleotide
uucugaaggcuauucuuag

SEQ ID NO: 2524975 - RNA, 19 nt, Artificial Sequence
  Description of Artificial Sequence: Synthetic oligonucleotide
gaugcuaaggcuauuguaa

SEQ ID NO: 2524976 - RNA, 19 nt, Artificial Sequence
  Description of Artificial Sequence: Synthetic oligonucleotide
aacaaagcggcuacaaaca

SEQ ID NO: 2524977 - RNA, 19 nt, Artificial Sequence
  Description of Artificial Sequence: Synthetic oligonucleotide
agauacuacccuugaguuc

SEQ ID NO: 2524978 - RNA, 19 nt, Artificial Sequence
  Description of Artificial Sequence: Synthetic oligonucleotide
uauugcaaugauccgcacu

SEQ ID NO: 2524979 - RNA, 19 nt, Artificial Sequence
  Description of Artificial Sequence: Synthetic oligonucleotide
aaauggaaaagaaucugaa

SEQ ID NO: 2524980 - RNA, 19 nt, Artificial Sequence
  Description of Artificial Sequence: Synthetic oligonucleotide
ugaugaagcacaccuuuaa

SEQ ID NO: 2524981 - RNA, 19 nt, Artificial Sequence
  Description of Artificial Sequence: Synthetic oligonucleotide
guacuucaggguuucaaag

SEQ ID NO: 2524982 - RNA, 19 nt, Artificial Sequence
  Description of Artificial Sequence: Synthetic oligonucleotide
uggaucagcuauaguaggc

SEQ ID NO: 2524983 - RNA, 19 nt, Artificial Sequence
  Description of Artificial Sequence: Synthetic oligonucleotide
cuacccuugaguuccauuc

SEQ ID NO: 2524984 - RNA, 19 nt, Artificial Sequence
  Description of Artificial Sequence: Synthetic oligonucleotide
gaaauuggcaauguaugca

SEQ ID NO: 2524985 - RNA, 19 nt, Artificial Sequence
  Description of Artificial Sequence: Synthetic oligonucleotide
aguggaucagcuauaguag

SEQ ID NO: 2524986 - RNA, 19 nt, Artificial Sequence
  Description of Artificial Sequence: Synthetic oligonucleotide
uacuucaggguuucaaaga

SEQ ID NO: 2524987 - RNA, 19 nt, Artificial Sequence
  Description of Artificial Sequence: Synthetic oligonucleotide
aagagguauaagccauaag

SEQ ID NO: 2524988 - RNA, 19 nt, Artificial Sequence
  Description of Artificial Sequence: Synthetic oligonucleotide
uucuguuccguacacggaa

SEQ ID NO: 2524989 - RNA, 19 nt, Artificial Sequence
  Description of Artificial Sequence: Synthetic oligonucleotide
aagccauaagucccaacca

SEQ ID NO: 2524990 - RNA, 19 nt, Artificial Sequence
  Description of Artificial Sequence: Synthetic oligonucleotide
cuacaaacaaugccgauga

SEQ ID NO: 2524991 - RNA, 19 nt, Artificial Sequence
  Description of Artificial Sequence: Synthetic oligonucleotide
cugaaucguaaauccaagc

SEQ ID NO: 2524992 - RNA, 19 nt, Artificial Sequence
  Description of Artificial Sequence: Synthetic oligonucleotide
caauauucaauuucacgca

SEQ ID NO: 2524993 - RNA, 19 nt, Artificial Sequence
  Description of Artificial Sequence: Synthetic oligonucleotide
gaggauuccauugaugaca

SEQ ID NO: 2524994 - RNA, 19 nt, Artificial Sequence
  Description of Artificial Sequence: Synthetic oligonucleotide
agccauaagucccaaccag

SEQ ID NO: 2524995 - RNA, 19 nt, Artificial Sequence
  Description of Artificial Sequence: Synthetic oligonucleotide
uaguaggcucaucaaauaa

SEQ ID NO: 2524996 - RNA, 19 nt, Artificial Sequence
  Description of Artificial Sequence: Synthetic oligonucleotide
aacuuuugcugaaaaccag

SEQ ID NO: 2524997 - RNA, 19 nt, Artificial Sequence
  Description of Artificial Sequence: Synthetic oligonucleotide
gagguauaagccauaaguc

SEQ ID NO: 2524998 - RNA, 19 nt, Artificial Sequence
  Description of Artificial Sequence: Synthetic oligonucleotide
gagguauugcaaugauccg

SEQ ID NO: 2524999 - RNA, 19 nt, Artificial Sequence
  Description of Artificial Sequence: Synthetic oligonucleotide
gaaucguaaauccaagccu

SEQ ID NO: 2525000 - RNA, 19 nt, Artificial Sequence
  Description of Artificial Sequence: Synthetic oligonucleotide
gguauaagccauaaguccc

SEQ ID NO: 2525001 - RNA, 19 nt, Artificial Sequence
  Description of Artificial Sequence: Synthetic oligonucleotide
ugacauucaucacauccaa

SEQ ID NO: 2525002 - RNA, 19 nt, Artificial Sequence
  Description of Artificial Sequence: Synthetic oligonucleotide
guggaucagcuauaguagg

SEQ ID NO: 2525003 - RNA, 19 nt, Artificial Sequence
  Description of Artificial Sequence: Synthetic oligonucleotide
aaucguaaauccaagccuu

SEQ ID NO: 2525004 - RNA, 19 nt, Artificial Sequence
  Description of Artificial Sequence: Synthetic oligonucleotide
ccuuuaaucgaguuuuccg

SEQ ID NO: 2525005 - RNA, 19 nt, Artificial Sequence
  Description of Artificial Sequence: Synthetic oligonucleotide
uuucacgcacgcuggauca

SEQ ID NO: 2525006 - RNA, 19 nt, Artificial Sequence
  Description of Artificial Sequence: Synthetic oligonucleotide
auuccauugaugacauugg

SEQ ID NO: 2525007 - RNA, 19 nt, Artificial Sequence
  Description of Artificial Sequence: Synthetic oligonucleotide
caagcaggcggaaauuggc

SEQ ID NO: 2525008 - RNA, 19 nt, Artificial Sequence
  Description of Artificial Sequence: Synthetic oligonucleotide
uggcagguagauacuaccc

SEQ ID NO: 2525009 - RNA, 19 nt, Artificial Sequence
  Description of Artificial Sequence: Synthetic oligonucleotide
uuccguacacggaauauau

SEQ ID NO: 2525010 - RNA, 19 nt, Artificial Sequence
  Description of Artificial Sequence: Synthetic oligonucleotide
gagagagaugaccuugaug

SEQ ID NO: 2525011 - RNA, 19 nt, Artificial Sequence
  Description of Artificial Sequence: Synthetic oligonucleotide
aaggcuauucuuagcuuuc

SEQ ID NO: 2525012 - RNA, 19 nt, Artificial Sequence
  Description of Artificial Sequence: Synthetic oligonucleotide
aguaggcucaucaaauaag

SEQ ID NO: 2525013 - RNA, 19 nt, Artificial Sequence
  Description of Artificial Sequence: Synthetic oligonucleotide
ugcuaaggcuauuguaacc

SEQ ID NO: 2525014 - RNA, 19 nt, Artificial Sequence
  Description of Artificial Sequence: Synthetic oligonucleotide
uaaucgaguuuuccguucu

SEQ ID NO: 2525015 - RNA, 19 nt, Artificial Sequence
  Description of Artificial Sequence: Synthetic oligonucleotide
aagcacaccuuuaaucgag

SEQ ID NO: 2525016 - RNA, 19 nt, Artificial Sequence
  Description of Artificial Sequence: Synthetic oligonucleotide
aagaagagguauaagccau

SEQ ID NO: 2525017 - RNA, 19 nt, Artificial Sequence
  Description of Artificial Sequence: Synthetic oligonucleotide
uuuaaucgaguuuuccguu

SEQ ID NO: 2525018 - RNA, 19 nt, Artificial Sequence
  Description of Artificial Sequence: Synthetic oligonucleotide
uuaaucgaguuuuccguuc

SEQ ID NO: 2525019 - RNA, 19 nt, Artificial Sequence
  Description of Artificial Sequence: Synthetic oligonucleotide
guagauacuacccuugagu

SEQ ID NO: 2525020 - RNA, 19 nt, Artificial Sequence
  Description of Artificial Sequence: Synthetic oligonucleotide
auauucaauuucacgcacg

SEQ ID NO: 2525021 - RNA, 19 nt, Artificial Sequence
  Description of Artificial Sequence: Synthetic oligonucleotide
aagcaguugcaauauucaa

SEQ ID NO: 2525022 - RNA, 19 nt, Artificial Sequence
  Description of Artificial Sequence: Synthetic oligonucleotide
gaaagcucggcaagcaggc

SEQ ID NO: 2525023 - RNA, 19 nt, Artificial Sequence
  Description of Artificial Sequence: Synthetic oligonucleotide
uuugguguuggcuuccaua

SEQ ID NO: 2525024 - RNA, 19 nt, Artificial Sequence
  Description of Artificial Sequence: Synthetic oligonucleotide
gaagcaguugcaauauuca

SEQ ID NO: 2525025 - RNA, 19 nt, Artificial Sequence
  Description of Artificial Sequence: Synthetic oligonucleotide
ugaguuccauucaaucuuc

SEQ ID NO: 2525026 - RNA, 19 nt, Artificial Sequence
  Description of Artificial Sequence: Synthetic oligonucleotide
uaaccuggagaaacuuuug

SEQ ID NO: 2525027 - RNA, 19 nt, Artificial Sequence
  Description of Artificial Sequence: Synthetic oligonucleotide
ggcucaucaaauaagaaga

SEQ ID NO: 2525028 - RNA, 19 nt, Artificial Sequence
  Description of Artificial Sequence: Synthetic oligonucleotide
acaccuuuaaucgaguuuu

SEQ ID NO: 2525029 - RNA, 19 nt, Artificial Sequence
  Description of Artificial Sequence: Synthetic oligonucleotide
ucaggguuucaaagaacca

SEQ ID NO: 2525030 - RNA, 19 nt, Artificial Sequence
  Description of Artificial Sequence: Synthetic oligonucleotide
aauuggcaauguaugcaag

SEQ ID NO: 2525031 - RNA, 19 nt, Artificial Sequence
  Description of Artificial Sequence: Synthetic oligonucleotide
uccagguaaacugaaucgu

SEQ ID NO: 2525032 - RNA, 19 nt, Artificial Sequence
  Description of Artificial Sequence: Synthetic oligonucleotide
gcggcuacaaacaaugccg

SEQ ID NO: 2525033 - RNA, 19 nt, Artificial Sequence
  Description of Artificial Sequence: Synthetic oligonucleotide
acggaauauaugaagaaau

SEQ ID NO: 2525034 - RNA, 19 nt, Artificial Sequence
  Description of Artificial Sequence: Synthetic oligonucleotide
aaacugaaucguaaaucca

SEQ ID NO: 2525035 - RNA, 19 nt, Artificial Sequence
  Description of Artificial Sequence: Synthetic oligonucleotide
uuguaauuuugaucaucca

SEQ ID NO: 2525036 - RNA, 19 nt, Artificial Sequence
  Description of Artificial Sequence: Synthetic oligonucleotide
augacauuggcuguggaaa

SEQ ID NO: 2525037 - RNA, 19 nt, Artificial Sequence
  Description of Artificial Sequence: Synthetic oligonucleotide
uugcaauauucaauuucac

SEQ ID NO: 2525038 - RNA, 19 nt, Artificial Sequence
  Description of Artificial Sequence: Synthetic oligonucleotide
uguaaccuggagaaacuuu

SEQ ID NO: 2525039 - RNA, 19 nt, Artificial Sequence
  Description of Artificial Sequence: Synthetic oligonucleotide
agaaucugaaagauaacaa

SEQ ID NO: 2525040 - RNA, 19 nt, Artificial Sequence
  Description of Artificial Sequence: Synthetic oligonucleotide
caugaggauuccauugaug

SEQ ID NO: 2525041 - RNA, 19 nt, Artificial Sequence
  Description of Artificial Sequence: Synthetic oligonucleotide
cagguagugauccagguaa

SEQ ID NO: 2525042 - RNA, 19 nt, Artificial Sequence
  Description of Artificial Sequence: Synthetic oligonucleotide
auaacaaagcggcuacaaa

SEQ ID NO: 2525043 - RNA, 19 nt, Artificial Sequence
  Description of Artificial Sequence: Synthetic oligonucleotide
guggcagguagauacuacc

SEQ ID NO: 2525044 - RNA, 19 nt, Artificial Sequence
  Description of Artificial Sequence: Synthetic oligonucleotide
ugaggauuccauugaugac

SEQ ID NO: 2525045 - RNA, 19 nt, Artificial Sequence
  Description of Artificial Sequence: Synthetic oligonucleotide
uguaugcaagcuuuccaau

SEQ ID NO: 2525046 - RNA, 19 nt, Artificial Sequence
  Description of Artificial Sequence: Synthetic oligonucleotide
cuuuaaucgaguuuuccgu

SEQ ID NO: 2525047 - RNA, 19 nt, Artificial Sequence
  Description of Artificial Sequence: Synthetic oligonucleotide
caauguaugcaagcuuucc

SEQ ID NO: 2525048 - RNA, 19 nt, Artificial Sequence
  Description of Artificial Sequence: Synthetic oligonucleotide
cuggagaaacuuuugcuga

SEQ ID NO: 2525049 - RNA, 19 nt, Artificial Sequence
  Description of Artificial Sequence: Synthetic oligonucleotide
gaugacauuggcuguggaa

SEQ ID NO: 2525050 - RNA, 19 nt, Artificial Sequence
  Description of Artificial Sequence: Synthetic oligonucleotide
acugaaucguaaauccaag

SEQ ID NO: 2525051 - RNA, 19 nt, Artificial Sequence
  Description of Artificial Sequence: Synthetic oligonucleotide
aaucgaguuuuccguucug

SEQ ID NO: 2525052 - RNA, 19 nt, Artificial Sequence
  Description of Artificial Sequence: Synthetic oligonucleotide
uguggaaaacuugggguac

SEQ ID NO: 2525053 - RNA, 19 nt, Artificial Sequence
  Description of Artificial Sequence: Synthetic oligonucleotide
uuccaauucaaaaguuauu

SEQ ID NO: 2525054 - RNA, 19 nt, Artificial Sequence
  Description of Artificial Sequence: Synthetic oligonucleotide
auaaaucagaaacgaggua

SEQ ID NO: 2525055 - RNA, 19 nt, Artificial Sequence
  Description of Artificial Sequence: Synthetic oligonucleotide
aaggcuauuguaaccugga

SEQ ID NO: 2525056 - RNA, 19 nt, Artificial Sequence
  Description of Artificial Sequence: Synthetic oligonucleotide
gauaacaaagcggcuacaa

SEQ ID NO: 2525057 - RNA, 19 nt, Artificial Sequence
  Description of Artificial Sequence: Synthetic oligonucleotide
gaagcacaccuuuaaucga

SEQ ID NO: 2525058 - RNA, 19 nt, Artificial Sequence
  Description of Artificial Sequence: Synthetic oligonucleotide
ugaucauccacaugacauu

SEQ ID NO: 2525059 - RNA, 19 nt, Artificial Sequence
  Description of Artificial Sequence: Synthetic oligonucleotide
gaucagcuauaguaggcuc

SEQ ID NO: 2525060 - RNA, 19 nt, Artificial Sequence
  Description of Artificial Sequence: Synthetic oligonucleotide
ucgaugcuaaggcuauugu

SEQ ID NO: 2525061 - RNA, 19 nt, Artificial Sequence
  Description of Artificial Sequence: Synthetic oligonucleotide
acacggaauauaugaagaa

SEQ ID NO: 2525062 - RNA, 19 nt, Artificial Sequence
  Description of Artificial Sequence: Synthetic oligonucleotide
caauucaaaaguuauuaau

SEQ ID NO: 2525063 - RNA, 19 nt, Artificial Sequence
  Description of Artificial Sequence: Synthetic oligonucleotide
aacagaggcguuugaugaa

SEQ ID NO: 2525064 - RNA, 19 nt, Artificial Sequence
  Description of Artificial Sequence: Synthetic oligonucleotide
ucggcaagcaggcggaaau

SEQ ID NO: 2525065 - RNA, 19 nt, Artificial Sequence
  Description of Artificial Sequence: Synthetic oligonucleotide
aagcggcuacaaacaaugc

SEQ ID NO: 2525066 - RNA, 19 nt, Artificial Sequence
  Description of Artificial Sequence: Synthetic oligonucleotide
uacccuugaguuccauuca

SEQ ID NO: 2525067 - RNA, 19 nt, Artificial Sequence
  Description of Artificial Sequence: Synthetic oligonucleotide
uucucgaugcuaaggcuau

SEQ ID NO: 2525068 - RNA, 19 nt, Artificial Sequence
  Description of Artificial Sequence: Synthetic oligonucleotide
uaggcucaucaaauaagaa

SEQ ID NO: 2525069 - RNA, 19 nt, Artificial Sequence
  Description of Artificial Sequence: Synthetic oligonucleotide
guaggcucaucaaauaaga

SEQ ID NO: 2525070 - RNA, 19 nt, Artificial Sequence
  Description of Artificial Sequence: Synthetic oligonucleotide
cagguagauacuacccuug

SEQ ID NO: 2525071 - RNA, 19 nt, Artificial Sequence
  Description of Artificial Sequence: Synthetic oligonucleotide
caagccuuauaaaggcuuc

SEQ ID NO: 2525072 - RNA, 19 nt, Artificial Sequence
  Description of Artificial Sequence: Synthetic oligonucleotide
uccguacacggaauauaug

SEQ ID NO: 2525073 - RNA, 19 nt, Artificial Sequence
  Description of Artificial Sequence: Synthetic oligonucleotide
ugacauuggcuguggaaaa

SEQ ID NO: 2525074 - RNA, 19 nt, Artificial Sequence
  Description of Artificial Sequence: Synthetic oligonucleotide
cuugaguuccauucaaucu

SEQ ID NO: 2525075 - RNA, 19 nt, Artificial Sequence
  Description of Artificial Sequence: Synthetic oligonucleotide
auaguaggcucaucaaaua

SEQ ID NO: 2525076 - RNA, 19 nt, Artificial Sequence
  Description of Artificial Sequence: Synthetic oligonucleotide
accuugaugcauccuuuug

SEQ ID NO: 2525077 - RNA, 19 nt, Artificial Sequence
  Description of Artificial Sequence: Synthetic oligonucleotide
augccgaugaccaguuugg

SEQ ID NO: 2525078 - RNA, 19 nt, Artificial Sequence
  Description of Artificial Sequence: Synthetic oligonucleotide
cuucaggguuucaaagaac

SEQ ID NO: 2525079 - RNA, 19 nt, Artificial Sequence
  Description of Artificial Sequence: Synthetic oligonucleotide
uugaugaagcacaccuuua

SEQ ID NO: 2525080 - RNA, 19 nt, Artificial Sequence
  Description of Artificial Sequence: Synthetic oligonucleotide
cuaaggcuauuguaaccug

SEQ ID NO: 2525081 - RNA, 19 nt, Artificial Sequence
  Description of Artificial Sequence: Synthetic oligonucleotide
caucaaauaagaagaggua

SEQ ID NO: 2525082 - RNA, 19 nt, Artificial Sequence
  Description of Artificial Sequence: Synthetic oligonucleotide
ugcaagcuuuccaauucaa

SEQ ID NO: 2525083 - RNA, 19 nt, Artificial Sequence
  Description of Artificial Sequence: Synthetic oligonucleotide
acagaggcguuugaugaag

SEQ ID NO: 2525084 - RNA, 19 nt, Artificial Sequence
  Description of Artificial Sequence: Synthetic oligonucleotide
uuuccguucugaaggcuau

SEQ ID NO: 2525085 - RNA, 19 nt, Artificial Sequence
  Description of Artificial Sequence: Synthetic oligonucleotide
aucagaaacgagguagccu

SEQ ID NO: 2525086 - RNA, 19 nt, Artificial Sequence
  Description of Artificial Sequence: Synthetic oligonucleotide
uggagaaacuuuugcugaa

SEQ ID NO: 2525087 - RNA, 19 nt, Artificial Sequence
  Description of Artificial Sequence: Synthetic oligonucleotide
acuuuugcugaaaaccagu

SEQ ID NO: 2525088 - RNA, 19 nt, Artificial Sequence
  Description of Artificial Sequence: Synthetic oligonucleotide
aguggcagguagauacuac

SEQ ID NO: 2525089 - RNA, 19 nt, Artificial Sequence
  Description of Artificial Sequence: Synthetic oligonucleotide
agugauccagguaaacuga

SEQ ID NO: 2525090 - RNA, 19 nt, Artificial Sequence
  Description of Artificial Sequence: Synthetic oligonucleotide
augcaagcuuuccaauuca

SEQ ID NO: 2525091 - RNA, 19 nt, Artificial Sequence
  Description of Artificial Sequence: Synthetic oligonucleotide
ggcuauuguaaccuggaga

SEQ ID NO: 2525092 - RNA, 19 nt, Artificial Sequence
  Description of Artificial Sequence: Synthetic oligonucleotide
acaaagcggcuacaaacaa

SEQ ID NO: 2525093 - RNA, 19 nt, Artificial Sequence
  Description of Artificial Sequence: Synthetic oligonucleotide
gaggcguuugaugaagcac

SEQ ID NO: 2525094 - RNA, 19 nt, Artificial Sequence
  Description of Artificial Sequence: Synthetic oligonucleotide
auuguaaccuggagaaacu

SEQ ID NO: 2525095 - RNA, 19 nt, Artificial Sequence
  Description of Artificial Sequence: Synthetic oligonucleotide
aggcuauuguaaccuggag

SEQ ID NO: 2525096 - RNA, 19 nt, Artificial Sequence
  Description of Artificial Sequence: Synthetic oligonucleotide
gcuacaaacaaugccgaug

SEQ ID NO: 2525097 - RNA, 19 nt, Artificial Sequence
  Description of Artificial Sequence: Synthetic oligonucleotide
aucaccccagaguggauca

SEQ ID NO: 2525098 - RNA, 19 nt, Artificial Sequence
  Description of Artificial Sequence: Synthetic oligonucleotide
aggcguuugaugaagcaca

SEQ ID NO: 2525099 - RNA, 19 nt, Artificial Sequence
  Description of Artificial Sequence: Synthetic oligonucleotide
ugauccagguaaacugaau

SEQ ID NO: 2525100 - RNA, 19 nt, Artificial Sequence
  Description of Artificial Sequence: Synthetic oligonucleotide
agguagauacuacccuuga

SEQ ID NO: 2525101 - RNA, 19 nt, Artificial Sequence
  Description of Artificial Sequence: Synthetic oligonucleotide
gguagauacuacccuugag

SEQ ID NO: 2525102 - RNA, 19 nt, Artificial Sequence
  Description of Artificial Sequence: Synthetic oligonucleotide
aauuucacgcacgcuggau

SEQ ID NO: 2525103 - RNA, 19 nt, Artificial Sequence
  Description of Artificial Sequence: Synthetic oligonucleotide
aaagcucggcaagcaggcg

SEQ ID NO: 2525104 - RNA, 19 nt, Artificial Sequence
  Description of Artificial Sequence: Synthetic oligonucleotide
cacaaaggggcuggaaagc

SEQ ID NO: 2525105 - RNA, 19 nt, Artificial Sequence
  Description of Artificial Sequence: Synthetic oligonucleotide
aagccuuauaaaggcuucu

SEQ ID NO: 2525106 - RNA, 19 nt, Artificial Sequence
  Description of Artificial Sequence: Synthetic oligonucleotide
agagaugaccuugaugcau

SEQ ID NO: 2525107 - RNA, 19 nt, Artificial Sequence
  Description of Artificial Sequence: Synthetic oligonucleotide
aggagguauugcaaugauc

SEQ ID NO: 2525108 - RNA, 19 nt, Artificial Sequence
  Description of Artificial Sequence: Synthetic oligonucleotide
auggcuuauggaacagagg

SEQ ID NO: 2525109 - RNA, 19 nt, Artificial Sequence
  Description of Artificial Sequence: Synthetic oligonucleotide
ucuguuccguacacggaau

SEQ ID NO: 2525110 - RNA, 19 nt, Artificial Sequence
  Description of Artificial Sequence: Synthetic oligonucleotide
ugcugaaaaccaguaacuu

SEQ ID NO: 2525111 - RNA, 19 nt, Artificial Sequence
  Description of Artificial Sequence: Synthetic oligonucleotide
ugaaggcuauucuuagcuu

SEQ ID NO: 2525112 - RNA, 19 nt, Artificial Sequence
  Description of Artificial Sequence: Synthetic oligonucleotide
cucgaugcuaaggcuauug

SEQ ID NO: 2525113 - RNA, 19 nt, Artificial Sequence
  Description of Artificial Sequence: Synthetic oligonucleotide
acaaaggggcuggaaagcu

SEQ ID NO: 2525114 - RNA, 19 nt, Artificial Sequence
  Description of Artificial Sequence: Synthetic oligonucleotide
gaagagguauaagccauaa

SEQ ID NO: 2525115 - RNA, 19 nt, Artificial Sequence
  Description of Artificial Sequence: Synthetic oligonucleotide
cagguaaacugaaucguaa

SEQ ID NO: 2525116 - RNA, 19 nt, Artificial Sequence
  Description of Artificial Sequence: Synthetic oligonucleotide
cuuuugcugaaaaccagua

SEQ ID NO: 2525117 - RNA, 19 nt, Artificial Sequence
  Description of Artificial Sequence: Synthetic oligonucleotide
ugagagagaugaccuugau

SEQ ID NO: 2525118 - RNA, 19 nt, Artificial Sequence
  Description of Artificial Sequence: Synthetic oligonucleotide
uuauggaacagaggcguuu

SEQ ID NO: 2525119 - RNA, 19 nt, Artificial Sequence
  Description of Artificial Sequence: Synthetic oligonucleotide
aucagcuauaguaggcuca

SEQ ID NO: 2525120 - RNA, 19 nt, Artificial Sequence
  Description of Artificial Sequence: Synthetic oligonucleotide
auaaaggcuucuguuccgu

SEQ ID NO: 2525121 - RNA, 19 nt, Artificial Sequence
  Description of Artificial Sequence: Synthetic oligonucleotide
gguauugcaaugauccgca

SEQ ID NO: 2525122 - RNA, 19 nt, Artificial Sequence
  Description of Artificial Sequence: Synthetic oligonucleotide
ugaugagagagaugaccuu

SEQ ID NO: 2525123 - RNA, 19 nt, Artificial Sequence
  Description of Artificial Sequence: Synthetic oligonucleotide
cuucucgaugcuaaggcua

SEQ ID NO: 2525124 - RNA, 19 nt, Artificial Sequence
  Description of Artificial Sequence: Synthetic oligonucleotide
aguuccauucaaucuucuu

SEQ ID NO: 2525125 - RNA, 19 nt, Artificial Sequence
  Description of Artificial Sequence: Synthetic oligonucleotide
uacaaacaaugccgaugac

SEQ ID NO: 2525126 - RNA, 19 nt, Artificial Sequence
  Description of Artificial Sequence: Synthetic oligonucleotide
cagaguggaucagcuauag

SEQ ID NO: 2525127 - RNA, 19 nt, Artificial Sequence
  Description of Artificial Sequence: Synthetic oligonucleotide
agccuuauaaaggcuucug

SEQ ID NO: 2525128 - RNA, 19 nt, Artificial Sequence
  Description of Artificial Sequence: Synthetic oligonucleotide
cagaggcguuugaugaagc

SEQ ID NO: 2525129 - RNA, 19 nt, Artificial Sequence
  Description of Artificial Sequence: Synthetic oligonucleotide
ccguacacggaauauauga

SEQ ID NO: 2525130 - RNA, 19 nt, Artificial Sequence
  Description of Artificial Sequence: Synthetic oligonucleotide
uguuccguacacggaauau

SEQ ID NO: 2525131 - RNA, 19 nt, Artificial Sequence
  Description of Artificial Sequence: Synthetic oligonucleotide
cuguggaaaacuuggggua

SEQ ID NO: 2525132 - RNA, 19 nt, Artificial Sequence
  Description of Artificial Sequence: Synthetic oligonucleotide
ccuugaguuccauucaauc

SEQ ID NO: 2525133 - RNA, 19 nt, Artificial Sequence
  Description of Artificial Sequence: Synthetic oligonucleotide
uucuuagcuuucucuuguc

SEQ ID NO: 2525134 - RNA, 19 nt, Artificial Sequence
  Description of Artificial Sequence: Synthetic oligonucleotide
caaaggggcuggaaagcuc

SEQ ID NO: 2525135 - RNA, 19 nt, Artificial Sequence
  Description of Artificial Sequence: Synthetic oligonucleotide
uccguucugaaggcuauuc

SEQ ID NO: 2525136 - RNA, 19 nt, Artificial Sequence
  Description of Artificial Sequence: Synthetic oligonucleotide
ggcuuauggaacagaggcg

SEQ ID NO: 2525137 - RNA, 19 nt, Artificial Sequence
  Description of Artificial Sequence: Synthetic oligonucleotide
aucgaguuuuccguucuga

SEQ ID NO: 2525138 - RNA, 19 nt, Artificial Sequence
  Description of Artificial Sequence: Synthetic oligonucleotide
gaucaccccagaguggauc

SEQ ID NO: 2525139 - RNA, 19 nt, Artificial Sequence
  Description of Artificial Sequence: Synthetic oligonucleotide
caaugauccgcacuacgaa

SEQ ID NO: 2525140 - RNA, 19 nt, Artificial Sequence
  Description of Artificial Sequence: Synthetic oligonucleotide
acgcacgcuggaucacccc

SEQ ID NO: 2525141 - RNA, 19 nt, Artificial Sequence
  Description of Artificial Sequence: Synthetic oligonucleotide
agcuuucucuugucugaug

SEQ ID NO: 2525142 - RNA, 19 nt, Artificial Sequence
  Description of Artificial Sequence: Synthetic oligonucleotide
ucguaaauccaagccuuau

SEQ ID NO: 2525143 - RNA, 19 nt, Artificial Sequence
  Description of Artificial Sequence: Synthetic oligonucleotide
uauaagccauaagucccaa

SEQ ID NO: 2525144 - RNA, 19 nt, Artificial Sequence
  Description of Artificial Sequence: Synthetic oligonucleotide
agaguggaucagcuauagu

SEQ ID NO: 2525145 - RNA, 19 nt, Artificial Sequence
  Description of Artificial Sequence: Synthetic oligonucleotide
cacaugacauucaucacau

SEQ ID NO: 2525146 - RNA, 19 nt, Artificial Sequence
  Description of Artificial Sequence: Synthetic oligonucleotide
cuauucuuagcuuucucuu

SEQ ID NO: 2525147 - RNA, 19 nt, Artificial Sequence
  Description of Artificial Sequence: Synthetic oligonucleotide
auucaauuucacgcacgcu

SEQ ID NO: 2525148 - RNA, 19 nt, Artificial Sequence
  Description of Artificial Sequence: Synthetic oligonucleotide
cacggaauauaugaagaaa

SEQ ID NO: 2525149 - RNA, 19 nt, Artificial Sequence
  Description of Artificial Sequence: Synthetic oligonucleotide
cacgcacgcuggaucaccc

SEQ ID NO: 2525150 - RNA, 19 nt, Artificial Sequence
  Description of Artificial Sequence: Synthetic oligonucleotide
guagugauccagguaaacu

SEQ ID NO: 2525151 - RNA, 19 nt, Artificial Sequence
  Description of Artificial Sequence: Synthetic oligonucleotide
acccuugaguuccauucaa

SEQ ID NO: 2525152 - RNA, 19 nt, Artificial Sequence
  Description of Artificial Sequence: Synthetic oligonucleotide
ugcauccuuuuguaauuuu

SEQ ID NO: 2525153 - RNA, 19 nt, Artificial Sequence
  Description of Artificial Sequence: Synthetic oligonucleotide
agccugaagcaguugcaau

SEQ ID NO: 2525154 - RNA, 19 nt, Artificial Sequence
  Description of Artificial Sequence: Synthetic oligonucleotide
gcugaaaaccaguaacuua

SEQ ID NO: 2525155 - RNA, 19 nt, Artificial Sequence
  Description of Artificial Sequence: Synthetic oligonucleotide
aggauuccauugaugacau

SEQ ID NO: 2525156 - RNA, 19 nt, Artificial Sequence
  Description of Artificial Sequence: Synthetic oligonucleotide
gguaaacugaaucguaaau

SEQ ID NO: 2525157 - RNA, 19 nt, Artificial Sequence
  Description of Artificial Sequence: Synthetic oligonucleotide
gcaguugcaauauucaauu

SEQ ID NO: 2525158 - RNA, 19 nt, Artificial Sequence
  Description of Artificial Sequence: Synthetic oligonucleotide
acuacccuugaguuccauu

SEQ ID NO: 2525159 - RNA, 19 nt, Artificial Sequence
  Description of Artificial Sequence: Synthetic oligonucleotide
agauaacaaagcggcuaca

SEQ ID NO: 2525160 - RNA, 19 nt, Artificial Sequence
  Description of Artificial Sequence: Synthetic oligonucleotide
auggaacagaggcguuuga

SEQ ID NO: 2525161 - RNA, 19 nt, Artificial Sequence
  Description of Artificial Sequence: Synthetic oligonucleotide
agauggcuuauggaacaga

SEQ ID NO: 2525162 - RNA, 19 nt, Artificial Sequence
  Description of Artificial Sequence: Synthetic oligonucleotide
guauugcaaugauccgcac

SEQ ID NO: 2525163 - RNA, 19 nt, Artificial Sequence
  Description of Artificial Sequence: Synthetic oligonucleotide
gcuauaguaggcucaucaa

SEQ ID NO: 2525164 - RNA, 19 nt, Artificial Sequence
  Description of Artificial Sequence: Synthetic oligonucleotide
guaaccuggagaaacuuuu

SEQ ID NO: 2525165 - RNA, 19 nt, Artificial Sequence
  Description of Artificial Sequence: Synthetic oligonucleotide
acgcuggaucaccccagag

SEQ ID NO: 2525166 - RNA, 19 nt, Artificial Sequence
  Description of Artificial Sequence: Synthetic oligonucleotide
gcaaugauccgcacuacga

SEQ ID NO: 2525167 - RNA, 19 nt, Artificial Sequence
  Description of Artificial Sequence: Synthetic oligonucleotide
gccauaagucccaaccagc

SEQ ID NO: 2525168 - RNA, 19 nt, Artificial Sequence
  Description of Artificial Sequence: Synthetic oligonucleotide
caccuuuaaucgaguuuuc

SEQ ID NO: 2525169 - RNA, 19 nt, Artificial Sequence
  Description of Artificial Sequence: Synthetic oligonucleotide
ccauaagucccaaccagca

SEQ ID NO: 2525170 - RNA, 19 nt, Artificial Sequence
  Description of Artificial Sequence: Synthetic oligonucleotide
agacuacugucaugaggau

SEQ ID NO: 2525171 - RNA, 19 nt, Artificial Sequence
  Description of Artificial Sequence: Synthetic oligonucleotide
guaugcaagcuuuccaauu

SEQ ID NO: 2525172 - RNA, 19 nt, Artificial Sequence
  Description of Artificial Sequence: Synthetic oligonucleotide
gccgaugaccaguuuggug

SEQ ID NO: 2525173 - RNA, 19 nt, Artificial Sequence
  Description of Artificial Sequence: Synthetic oligonucleotide
agaaacgagguagccugaa

SEQ ID NO: 2525174 - RNA, 19 nt, Artificial Sequence
  Description of Artificial Sequence: Synthetic oligonucleotide
ccgaugaccaguuuggugu

SEQ ID NO: 2525175 - RNA, 19 nt, Artificial Sequence
  Description of Artificial Sequence: Synthetic oligonucleotide
cuacugucaugaggauucc

SEQ ID NO: 2525176 - RNA, 19 nt, Artificial Sequence
  Description of Artificial Sequence: Synthetic oligonucleotide
gcuaaggcuauuguaaccu

SEQ ID NO: 2525177 - RNA, 19 nt, Artificial Sequence
  Description of Artificial Sequence: Synthetic oligonucleotide
cuugucugaugagagagau

SEQ ID NO: 2525178 - RNA, 19 nt, Artificial Sequence
  Description of Artificial Sequence: Synthetic oligonucleotide
uggaaaacuugggguacuu

SEQ ID NO: 2525179 - RNA, 19 nt, Artificial Sequence
  Description of Artificial Sequence: Synthetic oligonucleotide
gguagugauccagguaaac

SEQ ID NO: 2525180 - RNA, 19 nt, Artificial Sequence
  Description of Artificial Sequence: Synthetic oligonucleotide
guuccguacacggaauaua

SEQ ID NO: 2525181 - RNA, 19 nt, Artificial Sequence
  Description of Artificial Sequence: Synthetic oligonucleotide
cuugggguacuucaggguu

SEQ ID NO: 2525182 - RNA, 19 nt, Artificial Sequence
  Description of Artificial Sequence: Synthetic oligonucleotide
cguuugaugaagcacaccu

SEQ ID NO: 2525183 - RNA, 19 nt, Artificial Sequence
  Description of Artificial Sequence: Synthetic oligonucleotide
caauuucacgcacgcugga

SEQ ID NO: 2525184 - RNA, 19 nt, Artificial Sequence
  Description of Artificial Sequence: Synthetic oligonucleotide
ucaccccagaguggaucag

SEQ ID NO: 2525185 - RNA, 19 nt, Artificial Sequence
  Description of Artificial Sequence: Synthetic oligonucleotide
ggggcuggaaagcucggca

SEQ ID NO: 2525186 - RNA, 19 nt, Artificial Sequence
  Description of Artificial Sequence: Synthetic oligonucleotide
cuggaaagcucggcaagca

SEQ ID NO: 2525187 - RNA, 19 nt, Artificial Sequence
  Description of Artificial Sequence: Synthetic oligonucleotide
acaaugccgaugaccaguu

SEQ ID NO: 2525188 - RNA, 19 nt, Artificial Sequence
  Description of Artificial Sequence: Synthetic oligonucleotide
agaagagguauaagccaua

SEQ ID NO: 2525189 - RNA, 19 nt, Artificial Sequence
  Description of Artificial Sequence: Synthetic oligonucleotide
augcauccuuuuguaauuu

SEQ ID NO: 2525190 - RNA, 19 nt, Artificial Sequence
  Description of Artificial Sequence: Synthetic oligonucleotide
ugccgaugaccaguuuggu

SEQ ID NO: 2525191 - RNA, 19 nt, Artificial Sequence
  Description of Artificial Sequence: Synthetic oligonucleotide
gccugaagcaguugcaaua

SEQ ID NO: 2525192 - RNA, 19 nt, Artificial Sequence
  Description of Artificial Sequence: Synthetic oligonucleotide
ggcagguagauacuacccu

SEQ ID NO: 2525193 - RNA, 19 nt, Artificial Sequence
  Description of Artificial Sequence: Synthetic oligonucleotide
gugauccagguaaacugaa

SEQ ID NO: 2525194 - RNA, 19 nt, Artificial Sequence
  Description of Artificial Sequence: Synthetic oligonucleotide
cagaaacgagguagccuga

SEQ ID NO: 2525195 - RNA, 19 nt, Artificial Sequence
  Description of Artificial Sequence: Synthetic oligonucleotide
agcucggcaagcaggcgga

SEQ ID NO: 2525196 - RNA, 19 nt, Artificial Sequence
  Description of Artificial Sequence: Synthetic oligonucleotide
caaagcggcuacaaacaau

SEQ ID NO: 2525197 - RNA, 19 nt, Artificial Sequence
  Description of Artificial Sequence: Synthetic oligonucleotide
gaguggcagguagauacua

SEQ ID NO: 2525198 - RNA, 19 nt, Artificial Sequence
  Description of Artificial Sequence: Synthetic oligonucleotide
ggcaauguaugcaagcuuu

SEQ ID NO: 2525199 - RNA, 19 nt, Artificial Sequence
  Description of Artificial Sequence: Synthetic oligonucleotide
ggaaaacuugggguacuuc

SEQ ID NO: 2525200 - RNA, 19 nt, Artificial Sequence
  Description of Artificial Sequence: Synthetic oligonucleotide
aucguaaauccaagccuua

SEQ ID NO: 2525201 - RNA, 19 nt, Artificial Sequence
  Description of Artificial Sequence: Synthetic oligonucleotide
cacaccuuuaaucgaguuu

SEQ ID NO: 2525202 - RNA, 19 nt, Artificial Sequence
  Description of Artificial Sequence: Synthetic oligonucleotide
gccuuauaaaggcuucugu

SEQ ID NO: 2525203 - RNA, 19 nt, Artificial Sequence
  Description of Artificial Sequence: Synthetic oligonucleotide
ggaucagcuauaguaggcu

SEQ ID NO: 2525204 - RNA, 19 nt, Artificial Sequence
  Description of Artificial Sequence: Synthetic oligonucleotide
cuauuguaaccuggagaaa

SEQ ID NO: 2525205 - RNA, 19 nt, Artificial Sequence
  Description of Artificial Sequence: Synthetic oligonucleotide
gcaauguaugcaagcuuuc

SEQ ID NO: 2525206 - RNA, 19 nt, Artificial Sequence
  Description of Artificial Sequence: Synthetic oligonucleotide
gcaaagaguggcagguaga

SEQ ID NO: 2525207 - RNA, 19 nt, Artificial Sequence
  Description of Artificial Sequence: Synthetic oligonucleotide
ggagaaacuuuugcugaaa

SEQ ID NO: 2525208 - RNA, 19 nt, Artificial Sequence
  Description of Artificial Sequence: Synthetic oligonucleotide
gcggaaauuggcaauguau

SEQ ID NO: 2525209 - RNA, 19 nt, Artificial Sequence
  Description of Artificial Sequence: Synthetic oligonucleotide
gaccuugaugcauccuuuu

SEQ ID NO: 2525210 - RNA, 19 nt, Artificial Sequence
  Description of Artificial Sequence: Synthetic oligonucleotide
cccaaccagcaaagagugg

SEQ ID NO: 2525211 - RNA, 19 nt, Artificial Sequence
  Description of Artificial Sequence: Synthetic oligonucleotide
agguagugauccagguaaa

SEQ ID NO: 2525212 - RNA, 19 nt, Artificial Sequence
  Description of Artificial Sequence: Synthetic oligonucleotide
gaugaccuugaugcauccu

SEQ ID NO: 2525213 - RNA, 19 nt, Artificial Sequence
  Description of Artificial Sequence: Synthetic oligonucleotide
ccagguaaacugaaucgua

SEQ ID NO: 2525214 - RNA, 19 nt, Artificial Sequence
  Description of Artificial Sequence: Synthetic oligonucleotide
cguacacggaauauaugaa

SEQ ID NO: 2525215 - RNA, 19 nt, Artificial Sequence
  Description of Artificial Sequence: Synthetic oligonucleotide
gaguuccauucaaucuucu

SEQ ID NO: 2525216 - RNA, 19 nt, Artificial Sequence
  Description of Artificial Sequence: Synthetic oligonucleotide
cacgcuggaucaccccaga

SEQ ID NO: 2525217 - RNA, 19 nt, Artificial Sequence
  Description of Artificial Sequence: Synthetic oligonucleotide
guuuuccguucugaaggcu

SEQ ID NO: 2525218 - RNA, 19 nt, Artificial Sequence
  Description of Artificial Sequence: Synthetic oligonucleotide
cuuauggaacagaggcguu

SEQ ID NO: 2525219 - RNA, 19 nt, Artificial Sequence
  Description of Artificial Sequence: Synthetic oligonucleotide
uuccguucugaaggcuauu

SEQ ID NO: 2525220 - RNA, 19 nt, Artificial Sequence
  Description of Artificial Sequence: Synthetic oligonucleotide
cccagaguggaucagcuau

SEQ ID NO: 2525221 - RNA, 19 nt, Artificial Sequence
  Description of Artificial Sequence: Synthetic oligonucleotide
gcguuugaugaagcacacc

SEQ ID NO: 2525222 - RNA, 19 nt, Artificial Sequence
  Description of Artificial Sequence: Synthetic oligonucleotide
ggcggaaauuggcaaugua

SEQ ID NO: 2525223 - RNA, 19 nt, Artificial Sequence
  Description of Artificial Sequence: Synthetic oligonucleotide
ggguuucaaagaaccaccu

SEQ ID NO: 2525224 - RNA, 19 nt, Artificial Sequence
  Description of Artificial Sequence: Synthetic oligonucleotide
ccaagccuuauaaaggcuu

SEQ ID NO: 2525225 - RNA, 19 nt, Artificial Sequence
  Description of Artificial Sequence: Synthetic oligonucleotide
auacuacccuugaguucca

SEQ ID NO: 2525226 - RNA, 19 nt, Artificial Sequence
  Description of Artificial Sequence: Synthetic oligonucleotide
cguaaauccaagccuuaua

SEQ ID NO: 2525227 - RNA, 19 nt, Artificial Sequence
  Description of Artificial Sequence: Synthetic oligonucleotide
caguugcaauauucaauuu

SEQ ID NO: 2525228 - RNA, 19 nt, Artificial Sequence
  Description of Artificial Sequence: Synthetic oligonucleotide
cgaugcuaaggcuauugua

SEQ ID NO: 2525229 - RNA, 19 nt, Artificial Sequence
  Description of Artificial Sequence: Synthetic oligonucleotide
cagcuauaguaggcucauc

SEQ ID NO: 2525230 - RNA, 19 nt, Artificial Sequence
  Description of Artificial Sequence: Synthetic oligonucleotide
guuugguguuggcuuccau

SEQ ID NO: 2525231 - RNA, 19 nt, Artificial Sequence
  Description of Artificial Sequence: Synthetic oligonucleotide
ccagaguggaucagcuaua

SEQ ID NO: 2525232 - RNA, 19 nt, Artificial Sequence
  Description of Artificial Sequence: Synthetic oligonucleotide
cucggcaagcaggcggaaa

SEQ ID NO: 2525233 - RNA, 19 nt, Artificial Sequence
  Description of Artificial Sequence: Synthetic oligonucleotide
ggcuacaaacaaugccgau

SEQ ID NO: 2525234 - RNA, 19 nt, Artificial Sequence
  Description of Artificial Sequence: Synthetic oligonucleotide
cgagguagccugaagcagu

SEQ ID NO: 2525235 - RNA, 19 nt, Artificial Sequence
  Description of Artificial Sequence: Synthetic oligonucleotide
cagcaaagaguggcaggua

SEQ ID NO: 2525236 - RNA, 19 nt, Artificial Sequence
  Description of Artificial Sequence: Synthetic oligonucleotide
cugaagcaguugcaauauu

SEQ ID NO: 2525237 - RNA, 19 nt, Artificial Sequence
  Description of Artificial Sequence: Synthetic oligonucleotide
gcacaccuuuaaucgaguu

SEQ ID NO: 2525238 - RNA, 19 nt, Artificial Sequence
  Description of Artificial Sequence: Synthetic oligonucleotide
cgcacgcuggaucacccca

SEQ ID NO: 2525239 - RNA, 19 nt, Artificial Sequence
  Description of Artificial Sequence: Synthetic oligonucleotide
ccguucugaaggcuauucu

SEQ ID NO: 2525240 - RNA, 19 nt, Artificial Sequence
  Description of Artificial Sequence: Synthetic oligonucleotide
cgcuggaucaccccagagu

SEQ ID NO: 2525241 - RNA, 19 nt, Artificial Sequence
  Description of Artificial Sequence: Synthetic oligonucleotide
cccuugaguuccauucaau

SEQ ID NO: 2525242 - RNA, 19 nt, Artificial Sequence
  Description of Artificial Sequence: Synthetic oligonucleotide
caaugccgaugaccaguuu

SEQ ID NO: 2525243 - RNA, 19 nt, Artificial Sequence
  Description of Artificial Sequence: Synthetic oligonucleotide
gggguacuucaggguuuca

SEQ ID NO: 2525244 - RNA, 19 nt, Artificial Sequence
  Description of Artificial Sequence: Synthetic oligonucleotide
ggaucaccccagaguggau

SEQ ID NO: 2525245 - RNA, 19 nt, Artificial Sequence
  Description of Artificial Sequence: Synthetic oligonucleotide
cgaugaccaguuugguguu

SEQ ID NO: 2525246 - RNA, 19 nt, Artificial Sequence
  Description of Artificial Sequence: Synthetic oligonucleotide
aaaguuacggcucugguag

SEQ ID NO: 2525247 - RNA, 19 nt, Artificial Sequence
  Description of Artificial Sequence: Synthetic oligonucleotide
aagaaagaaagauggaggg

SEQ ID NO: 2525248 - RNA, 19 nt, Artificial Sequence
  Description of Artificial Sequence: Synthetic oligonucleotide
uauaaguugaaaaugauuu

SEQ ID NO: 2525249 - RNA, 19 nt, Artificial Sequence
  Description of Artificial Sequence: Synthetic oligonucleotide
aucuuagucaucuugaucu

SEQ ID NO: 2525250 - RNA, 19 nt, Artificial Sequence
  Description of Artificial Sequence: Synthetic oligonucleotide
aaacuuccauuccuuaggc

SEQ ID NO: 2525251 - RNA, 19 nt, Artificial Sequence
  Description of Artificial Sequence: Synthetic oligonucleotide
augaauuuagcccuuauga

SEQ ID NO: 2525252 - RNA, 19 nt, Artificial Sequence
  Description of Artificial Sequence: Synthetic oligonucleotide
cuuugggucaucuaggccc

SEQ ID NO: 2525253 - RNA, 19 nt, Artificial Sequence
  Description of Artificial Sequence: Synthetic oligonucleotide
agugauagcaacaagagga

SEQ ID NO: 2525254 - RNA, 19 nt, Artificial Sequence
  Description of Artificial Sequence: Synthetic oligonucleotide
ucagugauagcaacaagag

SEQ ID NO: 2525255 - RNA, 19 nt, Artificial Sequence
  Description of Artificial Sequence: Synthetic oligonucleotide
caagcaaugaguaucacuc

SEQ ID NO: 2525256 - RNA, 19 nt, Artificial Sequence
  Description of Artificial Sequence: Synthetic oligonucleotide
aucugaucuguccacaagc

SEQ ID NO: 2525257 - RNA, 19 nt, Artificial Sequence
  Description of Artificial Sequence: Synthetic oligonucleotide
acaagaggaugccugaggc

SEQ ID NO: 2525258 - RNA, 19 nt, Artificial Sequence
  Description of Artificial Sequence: Synthetic oligonucleotide
ugguauaaguugaaaauga

SEQ ID NO: 2525259 - RNA, 19 nt, Artificial Sequence
  Description of Artificial Sequence: Synthetic oligonucleotide
augagaaacuccucgcugc

SEQ ID NO: 2525260 - RNA, 19 nt, Artificial Sequence
  Description of Artificial Sequence: Synthetic oligonucleotide
cuugaucucauaacguugg

SEQ ID NO: 2525261 - RNA, 19 nt, Artificial Sequence
  Description of Artificial Sequence: Synthetic oligonucleotide
uaccagggaaccaagaagc

SEQ ID NO: 2525262 - RNA, 19 nt, Artificial Sequence
  Description of Artificial Sequence: Synthetic oligonucleotide
ugcggcauuucccacagcg

SEQ ID NO: 2525263 - RNA, 19 nt, Artificial Sequence
  Description of Artificial Sequence: Synthetic oligonucleotide
cuauacgucuuugagaagg

SEQ ID NO: 2525264 - RNA, 19 nt, Artificial Sequence
  Description of Artificial Sequence: Synthetic oligonucleotide
aagcaggcaaaguuacggc

SEQ ID NO: 2525265 - RNA, 19 nt, Artificial Sequence
  Description of Artificial Sequence: Synthetic oligonucleotide
aauuuagcccuuaugacca

SEQ ID NO: 2525266 - RNA, 19 nt, Artificial Sequence
  Description of Artificial Sequence: Synthetic oligonucleotide
aaaucugcggcauuuccca

SEQ ID NO: 2525267 - RNA, 19 nt, Artificial Sequence
  Description of Artificial Sequence: Synthetic oligonucleotide
ucuggugucucucuagaag

SEQ ID NO: 2525268 - RNA, 19 nt, Artificial Sequence
  Description of Artificial Sequence: Synthetic oligonucleotide
uccgcagaggcucucaagg

SEQ ID NO: 2525269 - RNA, 19 nt, Artificial Sequence
  Description of Artificial Sequence: Synthetic oligonucleotide
ucuagaagcccgaucugcg

SEQ ID NO: 2525270 - RNA, 19 nt, Artificial Sequence
  Description of Artificial Sequence: Synthetic oligonucleotide
aguaucacucuccaguuug

SEQ ID NO: 2525271 - RNA, 19 nt, Artificial Sequence
  Description of Artificial Sequence: Synthetic oligonucleotide
uggacauauccgcagaggc

SEQ ID NO: 2525272 - RNA, 19 nt, Artificial Sequence
  Description of Artificial Sequence: Synthetic oligonucleotide
ucacucuccaguuugcaag

SEQ ID NO: 2525273 - RNA, 19 nt, Artificial Sequence
  Description of Artificial Sequence: Synthetic oligonucleotide
ugaauuuagcccuuaugac

SEQ ID NO: 2525274 - RNA, 19 nt, Artificial Sequence
  Description of Artificial Sequence: Synthetic oligonucleotide
agcccuuaugaccaggucg

SEQ ID NO: 2525275 - RNA, 19 nt, Artificial Sequence
  Description of Artificial Sequence: Synthetic oligonucleotide
uugguauaaguugaaaaug

SEQ ID NO: 2525276 - RNA, 19 nt, Artificial Sequence
  Description of Artificial Sequence: Synthetic oligonucleotide
uaacguugguauaaguuga

SEQ ID NO: 2525277 - RNA, 19 nt, Artificial Sequence
  Description of Artificial Sequence: Synthetic oligonucleotide
acuuccauuccuuaggcgu

SEQ ID NO: 2525278 - RNA, 19 nt, Artificial Sequence
  Description of Artificial Sequence: Synthetic oligonucleotide
agcacuauacgucuuugag

SEQ ID NO: 2525279 - RNA, 19 nt, Artificial Sequence
  Description of Artificial Sequence: Synthetic oligonucleotide
gaaccaagaagcugcaggc

SEQ ID NO: 2525280 - RNA, 19 nt, Artificial Sequence
  Description of Artificial Sequence: Synthetic oligonucleotide
gaaagaaagauggagggga

SEQ ID NO: 2525281 - RNA, 19 nt, Artificial Sequence
  Description of Artificial Sequence: Synthetic oligonucleotide
agcaaugaguaucacucuc

SEQ ID NO: 2525282 - RNA, 19 nt, Artificial Sequence
  Description of Artificial Sequence: Synthetic oligonucleotide
auaccagggaaccaagaag

SEQ ID NO: 2525283 - RNA, 19 nt, Artificial Sequence
  Description of Artificial Sequence: Synthetic oligonucleotide
aaugaguaucacucuccag

SEQ ID NO: 2525284 - RNA, 19 nt, Artificial Sequence
  Description of Artificial Sequence: Synthetic oligonucleotide
gacuuguggacauauccgc

SEQ ID NO: 2525285 - RNA, 19 nt, Artificial Sequence
  Description of Artificial Sequence: Synthetic oligonucleotide
uauaccagggaaccaagaa

SEQ ID NO: 2525286 - RNA, 19 nt, Artificial Sequence
  Description of Artificial Sequence: Synthetic oligonucleotide
auagcaacaagaggaugcc

SEQ ID NO: 2525287 - RNA, 19 nt, Artificial Sequence
  Description of Artificial Sequence: Synthetic oligonucleotide
ugaggaucugaucugucca

SEQ ID NO: 2525288 - RNA, 19 nt, Artificial Sequence
  Description of Artificial Sequence: Synthetic oligonucleotide
ggaaccaagaagcugcagg

SEQ ID NO: 2525289 - RNA, 19 nt, Artificial Sequence
  Description of Artificial Sequence: Synthetic oligonucleotide
ugagaaacuccucgcugcg

SEQ ID NO: 2525290 - RNA, 19 nt, Artificial Sequence
  Description of Artificial Sequence: Synthetic oligonucleotide
aacuuccauuccuuaggcg

SEQ ID NO: 2525291 - RNA, 19 nt, Artificial Sequence
  Description of Artificial Sequence: Synthetic oligonucleotide
agcgucgaauccuuugagc

SEQ ID NO: 2525292 - RNA, 19 nt, Artificial Sequence
  Description of Artificial Sequence: Synthetic oligonucleotide
aaggcaugguugaacaggg

SEQ ID NO: 2525293 - RNA, 19 nt, Artificial Sequence
  Description of Artificial Sequence: Synthetic oligonucleotide
acagcuacaggccuugcug

SEQ ID NO: 2525294 - RNA, 19 nt, Artificial Sequence
  Description of Artificial Sequence: Synthetic oligonucleotide
uccacaagcaaugaguauc

SEQ ID NO: 2525295 - RNA, 19 nt, Artificial Sequence
  Description of Artificial Sequence: Synthetic oligonucleotide
cacuauacgucuuugagaa

SEQ ID NO: 2525296 - RNA, 19 nt, Artificial Sequence
  Description of Artificial Sequence: Synthetic oligonucleotide
uauacgucuuugagaaggc

SEQ ID NO: 2525297 - RNA, 19 nt, Artificial Sequence
  Description of Artificial Sequence: Synthetic oligonucleotide
aucagugauagcaacaaga

SEQ ID NO: 2525298 - RNA, 19 nt, Artificial Sequence
  Description of Artificial Sequence: Synthetic oligonucleotide
uuaucagugauagcaacaa

SEQ ID NO: 2525299 - RNA, 19 nt, Artificial Sequence
  Description of Artificial Sequence: Synthetic oligonucleotide
gaucucauaacguugguau

SEQ ID NO: 2525300 - RNA, 19 nt, Artificial Sequence
  Description of Artificial Sequence: Synthetic oligonucleotide
uggauuccgaggcaagcag

SEQ ID NO: 2525301 - RNA, 19 nt, Artificial Sequence
  Description of Artificial Sequence: Synthetic oligonucleotide
acaagcaaugaguaucacu

SEQ ID NO: 2525302 - RNA, 19 nt, Artificial Sequence
  Description of Artificial Sequence: Synthetic oligonucleotide
aguugcagaaggcugucug

SEQ ID NO: 2525303 - RNA, 19 nt, Artificial Sequence
  Description of Artificial Sequence: Synthetic oligonucleotide
ucacugucuaaaagaaaga

SEQ ID NO: 2525304 - RNA, 19 nt, Artificial Sequence
  Description of Artificial Sequence: Synthetic oligonucleotide
agggaaacacugugcacac

SEQ ID NO: 2525305 - RNA, 19 nt, Artificial Sequence
  Description of Artificial Sequence: Synthetic oligonucleotide
ucggaguugcagaaggcug

SEQ ID NO: 2525306 - RNA, 19 nt, Artificial Sequence
  Description of Artificial Sequence: Synthetic oligonucleotide
gaaaucugcggcauuuccc

SEQ ID NO: 2525307 - RNA, 19 nt, Artificial Sequence
  Description of Artificial Sequence: Synthetic oligonucleotide
gagcaucuuagucaucuug

SEQ ID NO: 2525308 - RNA, 19 nt, Artificial Sequence
  Description of Artificial Sequence: Synthetic oligonucleotide
ugguaguucuuuauuucac

SEQ ID NO: 2525309 - RNA, 19 nt, Artificial Sequence
  Description of Artificial Sequence: Synthetic oligonucleotide
uuucccacagcgucgaauc

SEQ ID NO: 2525310 - RNA, 19 nt, Artificial Sequence
  Description of Artificial Sequence: Synthetic oligonucleotide
auuccuuaggcgucccgcg

SEQ ID NO: 2525311 - RNA, 19 nt, Artificial Sequence
  Description of Artificial Sequence: Synthetic oligonucleotide
agucaucuugaucucauaa

SEQ ID NO: 2525312 - RNA, 19 nt, Artificial Sequence
  Description of Artificial Sequence: Synthetic oligonucleotide
aaucugcggcauuucccac

SEQ ID NO: 2525313 - RNA, 19 nt, Artificial Sequence
  Description of Artificial Sequence: Synthetic oligonucleotide
cacugaugugcaaacuucc

SEQ ID NO: 2525314 - RNA, 19 nt, Artificial Sequence
  Description of Artificial Sequence: Synthetic oligonucleotide
ugaugugcaaacuuccauu

SEQ ID NO: 2525315 - RNA, 19 nt, Artificial Sequence
  Description of Artificial Sequence: Synthetic oligonucleotide
acagccagcacuauacguc

SEQ ID NO: 2525316 - RNA, 19 nt, Artificial Sequence
  Description of Artificial Sequence: Synthetic oligonucleotide
ugguugaacagggaaacac

SEQ ID NO: 2525317 - RNA, 19 nt, Artificial Sequence
  Description of Artificial Sequence: Synthetic oligonucleotide
uugaacagggaaacacugu

SEQ ID NO: 2525318 - RNA, 19 nt, Artificial Sequence
  Description of Artificial Sequence: Synthetic oligonucleotide
gucaucuugaucucauaac

SEQ ID NO: 2525319 - RNA, 19 nt, Artificial Sequence
  Description of Artificial Sequence: Synthetic oligonucleotide
gacauauccgcagaggcuc

SEQ ID NO: 2525320 - RNA, 19 nt, Artificial Sequence
  Description of Artificial Sequence: Synthetic oligonucleotide
gaucugaucuguccacaag

SEQ ID NO: 2525321 - RNA, 19 nt, Artificial Sequence
  Description of Artificial Sequence: Synthetic oligonucleotide
cagugauagcaacaagagg

SEQ ID NO: 2525322 - RNA, 19 nt, Artificial Sequence
  Description of Artificial Sequence: Synthetic oligonucleotide
gggacuuguggacauaucc

SEQ ID NO: 2525323 - RNA, 19 nt, Artificial Sequence
  Description of Artificial Sequence: Synthetic oligonucleotide
caugguugaacagggaaac

SEQ ID NO: 2525324 - RNA, 19 nt, Artificial Sequence
  Description of Artificial Sequence: Synthetic oligonucleotide
agaaacuccucgcugcggu

SEQ ID NO: 2525325 - RNA, 19 nt, Artificial Sequence
  Description of Artificial Sequence: Synthetic oligonucleotide
uucucagagcccgugagga

SEQ ID NO: 2525326 - RNA, 19 nt, Artificial Sequence
  Description of Artificial Sequence: Synthetic oligonucleotide
ugugugguaguucuuuauu

SEQ ID NO: 2525327 - RNA, 19 nt, Artificial Sequence
  Description of Artificial Sequence: Synthetic oligonucleotide
aucuugaucucauaacguu

SEQ ID NO: 2525328 - RNA, 19 nt, Artificial Sequence
  Description of Artificial Sequence: Synthetic oligonucleotide
aguuacggcucugguagcc

SEQ ID NO: 2525329 - RNA, 19 nt, Artificial Sequence
  Description of Artificial Sequence: Synthetic oligonucleotide
aaacuccucgcugcgguuc

SEQ ID NO: 2525330 - RNA, 19 nt, Artificial Sequence
  Description of Artificial Sequence: Synthetic oligonucleotide
uuagcccuuaugaccaggu

SEQ ID NO: 2525331 - RNA, 19 nt, Artificial Sequence
  Description of Artificial Sequence: Synthetic oligonucleotide
gugaggaucugaucugucc

SEQ ID NO: 2525332 - RNA, 19 nt, Artificial Sequence
  Description of Artificial Sequence: Synthetic oligonucleotide
aggcgaaccggaaaucugc

SEQ ID NO: 2525333 - RNA, 19 nt, Artificial Sequence
  Description of Artificial Sequence: Synthetic oligonucleotide
uacgucuuugagaaggcuu

SEQ ID NO: 2525334 - RNA, 19 nt, Artificial Sequence
  Description of Artificial Sequence: Synthetic oligonucleotide
agcaggcaaaguuacggcu

SEQ ID NO: 2525335 - RNA, 19 nt, Artificial Sequence
  Description of Artificial Sequence: Synthetic oligonucleotide
ucugguagcccuucucaga

SEQ ID NO: 2525336 - RNA, 19 nt, Artificial Sequence
  Description of Artificial Sequence: Synthetic oligonucleotide
uagcccuucucagagcccg

SEQ ID NO: 2525337 - RNA, 19 nt, Artificial Sequence
  Description of Artificial Sequence: Synthetic oligonucleotide
uuugggucaucuaggcccu

SEQ ID NO: 2525338 - RNA, 19 nt, Artificial Sequence
  Description of Artificial Sequence: Synthetic oligonucleotide
ucauaacguugguauaagu

SEQ ID NO: 2525339 - RNA, 19 nt, Artificial Sequence
  Description of Artificial Sequence: Synthetic oligonucleotide
gauuccgaggcaagcaggc

SEQ ID NO: 2525340 - RNA, 19 nt, Artificial Sequence
  Description of Artificial Sequence: Synthetic oligonucleotide
ggccccaugaauuuagccc

SEQ ID NO: 2525341 - RNA, 19 nt, Artificial Sequence
  Description of Artificial Sequence: Synthetic oligonucleotide
cacacaacuguggauuccg

SEQ ID NO: 2525342 - RNA, 19 nt, Artificial Sequence
  Description of Artificial Sequence: Synthetic oligonucleotide
uggggcacagcuacaggcc

SEQ ID NO: 2525343 - RNA, 19 nt, Artificial Sequence
  Description of Artificial Sequence: Synthetic oligonucleotide
uuuagcccuuaugaccagg

SEQ ID NO: 2525344 - RNA, 19 nt, Artificial Sequence
  Description of Artificial Sequence: Synthetic oligonucleotide
guggggcacagcuacaggc

SEQ ID NO: 2525345 - RNA, 19 nt, Artificial Sequence
  Description of Artificial Sequence: Synthetic oligonucleotide
cucgcugcgguucugggac

SEQ ID NO: 2525346 - RNA, 19 nt, Artificial Sequence
  Description of Artificial Sequence: Synthetic oligonucleotide
uaggcgaaccggaaaucug

SEQ ID NO: 2525347 - RNA, 19 nt, Artificial Sequence
  Description of Artificial Sequence: Synthetic oligonucleotide
acagcgucgaauccuuuga

SEQ ID NO: 2525348 - RNA, 19 nt, Artificial Sequence
  Description of Artificial Sequence: Synthetic oligonucleotide
gugguaguucuuuauuuca

SEQ ID NO: 2525349 - RNA, 19 nt, Artificial Sequence
  Description of Artificial Sequence: Synthetic oligonucleotide
cacaacuguggauuccgag

SEQ ID NO: 2525350 - RNA, 19 nt, Artificial Sequence
  Description of Artificial Sequence: Synthetic oligonucleotide
ugggguaggcuuuggguca

SEQ ID NO: 2525351 - RNA, 19 nt, Artificial Sequence
  Description of Artificial Sequence: Synthetic oligonucleotide
cagcuacaggccuugcugg

SEQ ID NO: 2525352 - RNA, 19 nt, Artificial Sequence
  Description of Artificial Sequence: Synthetic oligonucleotide
uuccgaggcaagcaggcaa

SEQ ID NO: 2525353 - RNA, 19 nt, Artificial Sequence
  Description of Artificial Sequence: Synthetic oligonucleotide
ugauagcaacaagaggaug

SEQ ID NO: 2525354 - RNA, 19 nt, Artificial Sequence
  Description of Artificial Sequence: Synthetic oligonucleotide
cuacaggccuugcuggagg

SEQ ID NO: 2525355 - RNA, 19 nt, Artificial Sequence
  Description of Artificial Sequence: Synthetic oligonucleotide
gcaaacuuccauuccuuag

SEQ ID NO: 2525356 - RNA, 19 nt, Artificial Sequence
  Description of Artificial Sequence: Synthetic oligonucleotide
uguggauuccgaggcaagc

SEQ ID NO: 2525357 - RNA, 19 nt, Artificial Sequence
  Description of Artificial Sequence: Synthetic oligonucleotide
ucagagcccgugaggaucu

SEQ ID NO: 2525358 - RNA, 19 nt, Artificial Sequence
  Description of Artificial Sequence: Synthetic oligonucleotide
agcaucuuagucaucuuga

SEQ ID NO: 2525359 - RNA, 19 nt, Artificial Sequence
  Description of Artificial Sequence: Synthetic oligonucleotide
guuaucagugauagcaaca

SEQ ID NO: 2525360 - RNA, 19 nt, Artificial Sequence
  Description of Artificial Sequence: Synthetic oligonucleotide
caucuuagucaucuugauc

SEQ ID NO: 2525361 - RNA, 19 nt, Artificial Sequence
  Description of Artificial Sequence: Synthetic oligonucleotide
ggacuuguggacauauccg

SEQ ID NO: 2525362 - RNA, 19 nt, Artificial Sequence
  Description of Artificial Sequence: Synthetic oligonucleotide
uuaugaccaggucggaguu

SEQ ID NO: 2525363 - RNA, 19 nt, Artificial Sequence
  Description of Artificial Sequence: Synthetic oligonucleotide
ucuuagucaucuugaucuc

SEQ ID NO: 2525364 - RNA, 19 nt, Artificial Sequence
  Description of Artificial Sequence: Synthetic oligonucleotide
cauuccuuaggcgucccgc

SEQ ID NO: 2525365 - RNA, 19 nt, Artificial Sequence
  Description of Artificial Sequence: Synthetic oligonucleotide
aacuguggauuccgaggca

SEQ ID NO: 2525366 - RNA, 19 nt, Artificial Sequence
  Description of Artificial Sequence: Synthetic oligonucleotide
ggaaaucugcggcauuucc

SEQ ID NO: 2525367 - RNA, 19 nt, Artificial Sequence
  Description of Artificial Sequence: Synthetic oligonucleotide
gguuaucagugauagcaac

SEQ ID NO: 2525368 - RNA, 19 nt, Artificial Sequence
  Description of Artificial Sequence: Synthetic oligonucleotide
cucauaacguugguauaag

SEQ ID NO: 2525369 - RNA, 19 nt, Artificial Sequence
  Description of Artificial Sequence: Synthetic oligonucleotide
gugucucucuagaagcccg

SEQ ID NO: 2525370 - RNA, 19 nt, Artificial Sequence
  Description of Artificial Sequence: Synthetic oligonucleotide
gaaccggaaaucugcggca

SEQ ID NO: 2525371 - RNA, 19 nt, Artificial Sequence
  Description of Artificial Sequence: Synthetic oligonucleotide
uugaucucauaacguuggu

SEQ ID NO: 2525372 - RNA, 19 nt, Artificial Sequence
  Description of Artificial Sequence: Synthetic oligonucleotide
acuauacgucuuugagaag

SEQ ID NO: 2525373 - RNA, 19 nt, Artificial Sequence
  Description of Artificial Sequence: Synthetic oligonucleotide
cucugguagcccuucucag

SEQ ID NO: 2525374 - RNA, 19 nt, Artificial Sequence
  Description of Artificial Sequence: Synthetic oligonucleotide
cuuaugaccaggucggagu

SEQ ID NO: 2525375 - RNA, 19 nt, Artificial Sequence
  Description of Artificial Sequence: Synthetic oligonucleotide
accaggucggaguugcaga

SEQ ID NO: 2525376 - RNA, 19 nt, Artificial Sequence
  Description of Artificial Sequence: Synthetic oligonucleotide
ucucucuagaagcccgauc

SEQ ID NO: 2525377 - RNA, 19 nt, Artificial Sequence
  Description of Artificial Sequence: Synthetic oligonucleotide
caggggucaggcuauacca

SEQ ID NO: 2525378 - RNA, 19 nt, Artificial Sequence
  Description of Artificial Sequence: Synthetic oligonucleotide
guggacauauccgcagagg

SEQ ID NO: 2525379 - RNA, 19 nt, Artificial Sequence
  Description of Artificial Sequence: Synthetic oligonucleotide
cacagcgucgaauccuuug

SEQ ID NO: 2525380 - RNA, 19 nt, Artificial Sequence
  Description of Artificial Sequence: Synthetic oligonucleotide
cagggaaacacugugcaca

SEQ ID NO: 2525381 - RNA, 19 nt, Artificial Sequence
  Description of Artificial Sequence: Synthetic oligonucleotide
ugcaaacuuccauuccuua

SEQ ID NO: 2525382 - RNA, 19 nt, Artificial Sequence
  Description of Artificial Sequence: Synthetic oligonucleotide
ugagcaggggucaggcuau

SEQ ID NO: 2525383 - RNA, 19 nt, Artificial Sequence
  Description of Artificial Sequence: Synthetic oligonucleotide
aaccaagaagcugcaggca

SEQ ID NO: 2525384 - RNA, 19 nt, Artificial Sequence
  Description of Artificial Sequence: Synthetic oligonucleotide
uuaggcgucccgcgaugag

SEQ ID NO: 2525385 - RNA, 19 nt, Artificial Sequence
  Description of Artificial Sequence: Synthetic oligonucleotide
cauaacguugguauaaguu

SEQ ID NO: 2525386 - RNA, 19 nt, Artificial Sequence
  Description of Artificial Sequence: Synthetic oligonucleotide
ccuuugagcaucuuaguca

SEQ ID NO: 2525387 - RNA, 19 nt, Artificial Sequence
  Description of Artificial Sequence: Synthetic oligonucleotide
ucgaauccuuugagcaucu

SEQ ID NO: 2525388 - RNA, 19 nt, Artificial Sequence
  Description of Artificial Sequence: Synthetic oligonucleotide
gguucugggacuuguggac

SEQ ID NO: 2525389 - RNA, 19 nt, Artificial Sequence
  Description of Artificial Sequence: Synthetic oligonucleotide
ugaucucauaacguuggua

SEQ ID NO: 2525390 - RNA, 19 nt, Artificial Sequence
  Description of Artificial Sequence: Synthetic oligonucleotide
auuuagcccuuaugaccag

SEQ ID NO: 2525391 - RNA, 19 nt, Artificial Sequence
  Description of Artificial Sequence: Synthetic oligonucleotide
caggcacugaugugcaaac

SEQ ID NO: 2525392 - RNA, 19 nt, Artificial Sequence
  Description of Artificial Sequence: Synthetic oligonucleotide
uuccuuaggcgucccgcga

SEQ ID NO: 2525393 - RNA, 19 nt, Artificial Sequence
  Description of Artificial Sequence: Synthetic oligonucleotide
uaucacucuccaguuugca

SEQ ID NO: 2525394 - RNA, 19 nt, Artificial Sequence
  Description of Artificial Sequence: Synthetic oligonucleotide
ucuaggcccucagggauug

SEQ ID NO: 2525395 - RNA, 19 nt, Artificial Sequence
  Description of Artificial Sequence: Synthetic oligonucleotide
gucgaauccuuugagcauc

SEQ ID NO: 2525396 - RNA, 19 nt, Artificial Sequence
  Description of Artificial Sequence: Synthetic oligonucleotide
cacugugcacaccccacag

SEQ ID NO: 2525397 - RNA, 19 nt, Artificial Sequence
  Description of Artificial Sequence: Synthetic oligonucleotide
uuacggcucugguagcccu

SEQ ID NO: 2525398 - RNA, 19 nt, Artificial Sequence
  Description of Artificial Sequence: Synthetic oligonucleotide
caaaguuacggcucuggua

SEQ ID NO: 2525399 - RNA, 19 nt, Artificial Sequence
  Description of Artificial Sequence: Synthetic oligonucleotide
gcccuuaugaccaggucgg

SEQ ID NO: 2525400 - RNA, 19 nt, Artificial Sequence
  Description of Artificial Sequence: Synthetic oligonucleotide
gggauugccaggcacacaa

SEQ ID NO: 2525401 - RNA, 19 nt, Artificial Sequence
  Description of Artificial Sequence: Synthetic oligonucleotide
gcgucgaauccuuugagca

SEQ ID NO: 2525402 - RNA, 19 nt, Artificial Sequence
  Description of Artificial Sequence: Synthetic oligonucleotide
cuuugagcaucuuagucau

SEQ ID NO: 2525403 - RNA, 19 nt, Artificial Sequence
  Description of Artificial Sequence: Synthetic oligonucleotide
gcaaugaguaucacucucc

SEQ ID NO: 2525404 - RNA, 19 nt, Artificial Sequence
  Description of Artificial Sequence: Synthetic oligonucleotide
aggcacacaacuguggauu

SEQ ID NO: 2525405 - RNA, 19 nt, Artificial Sequence
  Description of Artificial Sequence: Synthetic oligonucleotide
acacugugcacaccccaca

SEQ ID NO: 2525406 - RNA, 19 nt, Artificial Sequence
  Description of Artificial Sequence: Synthetic oligonucleotide
cucagagcccgugaggauc

SEQ ID NO: 2525407 - RNA, 19 nt, Artificial Sequence
  Description of Artificial Sequence: Synthetic oligonucleotide
acugaugugcaaacuucca

SEQ ID NO: 2525408 - RNA, 19 nt, Artificial Sequence
  Description of Artificial Sequence: Synthetic oligonucleotide
auccgcagaggcucucaag

SEQ ID NO: 2525409 - RNA, 19 nt, Artificial Sequence
  Description of Artificial Sequence: Synthetic oligonucleotide
gcacuauacgucuuugaga

SEQ ID NO: 2525410 - RNA, 19 nt, Artificial Sequence
  Description of Artificial Sequence: Synthetic oligonucleotide
ggcauuucccacagcgucg

SEQ ID NO: 2525411 - RNA, 19 nt, Artificial Sequence
  Description of Artificial Sequence: Synthetic oligonucleotide
aacguugguauaaguugaa

SEQ ID NO: 2525412 - RNA, 19 nt, Artificial Sequence
  Description of Artificial Sequence: Synthetic oligonucleotide
uuugcaaggcaugguugaa

SEQ ID NO: 2525413 - RNA, 19 nt, Artificial Sequence
  Description of Artificial Sequence: Synthetic oligonucleotide
uccucgcugcgguucuggg

SEQ ID NO: 2525414 - RNA, 19 nt, Artificial Sequence
  Description of Artificial Sequence: Synthetic oligonucleotide
gcgaugagaaacuccucgc

SEQ ID NO: 2525415 - RNA, 19 nt, Artificial Sequence
  Description of Artificial Sequence: Synthetic oligonucleotide
cuauaccagggaaccaaga

SEQ ID NO: 2525416 - RNA, 19 nt, Artificial Sequence
  Description of Artificial Sequence: Synthetic oligonucleotide
uccuuaggcgucccgcgau

SEQ ID NO: 2525417 - RNA, 19 nt, Artificial Sequence
  Description of Artificial Sequence: Synthetic oligonucleotide
agcccgugaggaucugauc

SEQ ID NO: 2525418 - RNA, 19 nt, Artificial Sequence
  Description of Artificial Sequence: Synthetic oligonucleotide
uguaggcgaaccggaaauc

SEQ ID NO: 2525419 - RNA, 19 nt, Artificial Sequence
  Description of Artificial Sequence: Synthetic oligonucleotide
gcgguucugggacuugugg

SEQ ID NO: 2525420 - RNA, 19 nt, Artificial Sequence
  Description of Artificial Sequence: Synthetic oligonucleotide
guaucacucuccaguuugc

SEQ ID NO: 2525421 - RNA, 19 nt, Artificial Sequence
  Description of Artificial Sequence: Synthetic oligonucleotide
ugguaucugcucugguguc

SEQ ID NO: 2525422 - RNA, 19 nt, Artificial Sequence
  Description of Artificial Sequence: Synthetic oligonucleotide
cgaaccggaaaucugcggc

SEQ ID NO: 2525423 - RNA, 19 nt, Artificial Sequence
  Description of Artificial Sequence: Synthetic oligonucleotide
uauccgcagaggcucucaa

SEQ ID NO: 2525424 - RNA, 19 nt, Artificial Sequence
  Description of Artificial Sequence: Synthetic oligonucleotide
guauaaguugaaaaugauu

SEQ ID NO: 2525425 - RNA, 19 nt, Artificial Sequence
  Description of Artificial Sequence: Synthetic oligonucleotide
gucaggcuauaccagggaa

SEQ ID NO: 2525426 - RNA, 19 nt, Artificial Sequence
  Description of Artificial Sequence: Synthetic oligonucleotide
ggucaucuaggcccucagg

SEQ ID NO: 2525427 - RNA, 19 nt, Artificial Sequence
  Description of Artificial Sequence: Synthetic oligonucleotide
ggauuccgaggcaagcagg

SEQ ID NO: 2525428 - RNA, 19 nt, Artificial Sequence
  Description of Artificial Sequence: Synthetic oligonucleotide
uaggcgucccgcgaugaga

SEQ ID NO: 2525429 - RNA, 19 nt, Artificial Sequence
  Description of Artificial Sequence: Synthetic oligonucleotide
cagcgucgaauccuuugag

SEQ ID NO: 2525430 - RNA, 19 nt, Artificial Sequence
  Description of Artificial Sequence: Synthetic oligonucleotide
auuucccacagcgucgaau

SEQ ID NO: 2525431 - RNA, 19 nt, Artificial Sequence
  Description of Artificial Sequence: Synthetic oligonucleotide
cagugugcaggcuucagcu

SEQ ID NO: 2525432 - RNA, 19 nt, Artificial Sequence
  Description of Artificial Sequence: Synthetic oligonucleotide
aaccggaaaucugcggcau

SEQ ID NO: 2525433 - RNA, 19 nt, Artificial Sequence
  Description of Artificial Sequence: Synthetic oligonucleotide
ugguagcccuucucagagc

SEQ ID NO: 2525434 - RNA, 19 nt, Artificial Sequence
  Description of Artificial Sequence: Synthetic oligonucleotide
acgucuuugagaaggcuuu

SEQ ID NO: 2525435 - RNA, 19 nt, Artificial Sequence
  Description of Artificial Sequence: Synthetic oligonucleotide
uagcccuuaugaccagguc

SEQ ID NO: 2525436 - RNA, 19 nt, Artificial Sequence
  Description of Artificial Sequence: Synthetic oligonucleotide
ugcacaccccacagccagc

SEQ ID NO: 2525437 - RNA, 19 nt, Artificial Sequence
  Description of Artificial Sequence: Synthetic oligonucleotide
ugggacuuguggacauauc

SEQ ID NO: 2525438 - RNA, 19 nt, Artificial Sequence
  Description of Artificial Sequence: Synthetic oligonucleotide
auacgucuuugagaaggcu

SEQ ID NO: 2525439 - RNA, 19 nt, Artificial Sequence
  Description of Artificial Sequence: Synthetic oligonucleotide
aggaucugaucuguccaca

SEQ ID NO: 2525440 - RNA, 19 nt, Artificial Sequence
  Description of Artificial Sequence: Synthetic oligonucleotide
ggcaagcaggcaaaguuac

SEQ ID NO: 2525441 - RNA, 19 nt, Artificial Sequence
  Description of Artificial Sequence: Synthetic oligonucleotide
gcucucaagggcuggggug

SEQ ID NO: 2525442 - RNA, 19 nt, Artificial Sequence
  Description of Artificial Sequence: Synthetic oligonucleotide
uagcaacaagaggaugccu

SEQ ID NO: 2525443 - RNA, 19 nt, Artificial Sequence
  Description of Artificial Sequence: Synthetic oligonucleotide
guggauuccgaggcaagca

SEQ ID NO: 2525444 - RNA, 19 nt, Artificial Sequence
  Description of Artificial Sequence: Synthetic oligonucleotide
ggugucucucuagaagccc

SEQ ID NO: 2525445 - RNA, 19 nt, Artificial Sequence
  Description of Artificial Sequence: Synthetic oligonucleotide
gcuuugggucaucuaggcc

SEQ ID NO: 2525446 - RNA, 19 nt, Artificial Sequence
  Description of Artificial Sequence: Synthetic oligonucleotide
agugugcaggcuucagcuu

SEQ ID NO: 2525447 - RNA, 19 nt, Artificial Sequence
  Description of Artificial Sequence: Synthetic oligonucleotide
cagaggcucucaagggcug

SEQ ID NO: 2525448 - RNA, 19 nt, Artificial Sequence
  Description of Artificial Sequence: Synthetic oligonucleotide
gcaaggcaugguugaacag

SEQ ID NO: 2525449 - RNA, 19 nt, Artificial Sequence
  Description of Artificial Sequence: Synthetic oligonucleotide
gcuauaccagggaaccaag

SEQ ID NO: 2525450 - RNA, 19 nt, Artificial Sequence
  Description of Artificial Sequence: Synthetic oligonucleotide
gcgaaccggaaaucugcgg

SEQ ID NO: 2525451 - RNA, 19 nt, Artificial Sequence
  Description of Artificial Sequence: Synthetic oligonucleotide
cucuccaguuugcaaggca

SEQ ID NO: 2525452 - RNA, 19 nt, Artificial Sequence
  Description of Artificial Sequence: Synthetic oligonucleotide
ggcgaaccggaaaucugcg

SEQ ID NO: 2525453 - RNA, 19 nt, Artificial Sequence
  Description of Artificial Sequence: Synthetic oligonucleotide
guguaggcgaaccggaaau

SEQ ID NO: 2525454 - RNA, 19 nt, Artificial Sequence
  Description of Artificial Sequence: Synthetic oligonucleotide
cagggauugccaggcacac

SEQ ID NO: 2525455 - RNA, 19 nt, Artificial Sequence
  Description of Artificial Sequence: Synthetic oligonucleotide
ggagguuaucagugauagc

SEQ ID NO: 2525456 - RNA, 19 nt, Artificial Sequence
  Description of Artificial Sequence: Synthetic oligonucleotide
guaucugcucuggugucuc

SEQ ID NO: 2525457 - RNA, 19 nt, Artificial Sequence
  Description of Artificial Sequence: Synthetic oligonucleotide
cguugguauaaguugaaaa

SEQ ID NO: 2525458 - RNA, 19 nt, Artificial Sequence
  Description of Artificial Sequence: Synthetic oligonucleotide
aggcaagcaggcaaaguua

SEQ ID NO: 2525459 - RNA, 19 nt, Artificial Sequence
  Description of Artificial Sequence: Synthetic oligonucleotide
auauccgcagaggcucuca

SEQ ID NO: 2525460 - RNA, 19 nt, Artificial Sequence
  Description of Artificial Sequence: Synthetic oligonucleotide
acguugguauaaguugaaa

SEQ ID NO: 2525461 - RNA, 19 nt, Artificial Sequence
  Description of Artificial Sequence: Synthetic oligonucleotide
ugucugugugguaguucuu

SEQ ID NO: 2525462 - RNA, 19 nt, Artificial Sequence
  Description of Artificial Sequence: Synthetic oligonucleotide
ccacaagcaaugaguauca

SEQ ID NO: 2525463 - RNA, 19 nt, Artificial Sequence
  Description of Artificial Sequence: Synthetic oligonucleotide
gcaagcaggcaaaguuacg

SEQ ID NO: 2525464 - RNA, 19 nt, Artificial Sequence
  Description of Artificial Sequence: Synthetic oligonucleotide
guaggcgaaccggaaaucu

SEQ ID NO: 2525465 - RNA, 19 nt, Artificial Sequence
  Description of Artificial Sequence: Synthetic oligonucleotide
ggcuauaccagggaaccaa

SEQ ID NO: 2525466 - RNA, 19 nt, Artificial Sequence
  Description of Artificial Sequence: Synthetic oligonucleotide
acggcucugguagcccuuc

SEQ ID NO: 2525467 - RNA, 19 nt, Artificial Sequence
  Description of Artificial Sequence: Synthetic oligonucleotide
gguguaggcgaaccggaaa

SEQ ID NO: 2525468 - RNA, 19 nt, Artificial Sequence
  Description of Artificial Sequence: Synthetic oligonucleotide
gccccaugaauuuagcccu

SEQ ID NO: 2525469 - RNA, 19 nt, Artificial Sequence
  Description of Artificial Sequence: Synthetic oligonucleotide
auuccgaggcaagcaggca

SEQ ID NO: 2525470 - RNA, 19 nt, Artificial Sequence
  Description of Artificial Sequence: Synthetic oligonucleotide
cugaugugcaaacuuccau

SEQ ID NO: 2525471 - RNA, 19 nt, Artificial Sequence
  Description of Artificial Sequence: Synthetic oligonucleotide
gggucaucuaggcccucag

SEQ ID NO: 2525472 - RNA, 19 nt, Artificial Sequence
  Description of Artificial Sequence: Synthetic oligonucleotide
gcaggcaaaguuacggcuc

SEQ ID NO: 2525473 - RNA, 19 nt, Artificial Sequence
  Description of Artificial Sequence: Synthetic oligonucleotide
ccgcagaggcucucaaggg

SEQ ID NO: 2525474 - RNA, 19 nt, Artificial Sequence
  Description of Artificial Sequence: Synthetic oligonucleotide
gcccgugaggaucugaucu

SEQ ID NO: 2525475 - RNA, 19 nt, Artificial Sequence
  Description of Artificial Sequence: Synthetic oligonucleotide
caucuaggcccucagggau

SEQ ID NO: 2525476 - RNA, 19 nt, Artificial Sequence
  Description of Artificial Sequence: Synthetic oligonucleotide
ccuuaugaccaggucggag

SEQ ID NO: 2525477 - RNA, 19 nt, Artificial Sequence
  Description of Artificial Sequence: Synthetic oligonucleotide
ggaucugaucuguccacaa

SEQ ID NO: 2525478 - RNA, 19 nt, Artificial Sequence
  Description of Artificial Sequence: Synthetic oligonucleotide
gguugaacagggaaacacu

SEQ ID NO: 2525479 - RNA, 19 nt, Artificial Sequence
  Description of Artificial Sequence: Synthetic oligonucleotide
caggucggaguugcagaag

SEQ ID NO: 2525480 - RNA, 19 nt, Artificial Sequence
  Description of Artificial Sequence: Synthetic oligonucleotide
gcaugguugaacagggaaa

SEQ ID NO: 2525481 - RNA, 19 nt, Artificial Sequence
  Description of Artificial Sequence: Synthetic oligonucleotide
gguauaaguugaaaaugau

SEQ ID NO: 2525482 - RNA, 19 nt, Artificial Sequence
  Description of Artificial Sequence: Synthetic oligonucleotide
gucggaguugcagaaggcu

SEQ ID NO: 2525483 - RNA, 19 nt, Artificial Sequence
  Description of Artificial Sequence: Synthetic oligonucleotide
acauauccgcagaggcucu

SEQ ID NO: 2525484 - RNA, 19 nt, Artificial Sequence
  Description of Artificial Sequence: Synthetic oligonucleotide
aggcacugaugugcaaacu

SEQ ID NO: 2525485 - RNA, 19 nt, Artificial Sequence
  Description of Artificial Sequence: Synthetic oligonucleotide
ccacagccagcacuauacg

SEQ ID NO: 2525486 - RNA, 19 nt, Artificial Sequence
  Description of Artificial Sequence: Synthetic oligonucleotide
cagccagcacuauacgucu

SEQ ID NO: 2525487 - RNA, 19 nt, Artificial Sequence
  Description of Artificial Sequence: Synthetic oligonucleotide
ggggccauagugguaucug

SEQ ID NO: 2525488 - RNA, 19 nt, Artificial Sequence
  Description of Artificial Sequence: Synthetic oligonucleotide
gugauagcaacaagaggau

SEQ ID NO: 2525489 - RNA, 19 nt, Artificial Sequence
  Description of Artificial Sequence: Synthetic oligonucleotide
uacggcucugguagcccuu

SEQ ID NO: 2525490 - RNA, 19 nt, Artificial Sequence
  Description of Artificial Sequence: Synthetic oligonucleotide
gcuacaggccuugcuggag

SEQ ID NO: 2525491 - RNA, 19 nt, Artificial Sequence
  Description of Artificial Sequence: Synthetic oligonucleotide
gcucuggugucucucuaga

SEQ ID NO: 2525492 - RNA, 19 nt, Artificial Sequence
  Description of Artificial Sequence: Synthetic oligonucleotide
cccucagggauugccaggc

SEQ ID NO: 2525493 - RNA, 19 nt, Artificial Sequence
  Description of Artificial Sequence: Synthetic oligonucleotide
cuuaggcgucccgcgauga

SEQ ID NO: 2525494 - RNA, 19 nt, Artificial Sequence
  Description of Artificial Sequence: Synthetic oligonucleotide
ggcacugaugugcaaacuu

SEQ ID NO: 2525495 - RNA, 19 nt, Artificial Sequence
  Description of Artificial Sequence: Synthetic oligonucleotide
aggcgucccgcgaugagaa

SEQ ID NO: 2525496 - RNA, 19 nt, Artificial Sequence
  Description of Artificial Sequence: Synthetic oligonucleotide
cauauccgcagaggcucuc

SEQ ID NO: 2525497 - RNA, 19 nt, Artificial Sequence
  Description of Artificial Sequence: Synthetic oligonucleotide
gaguaucacucuccaguuu

SEQ ID NO: 2525498 - RNA, 19 nt, Artificial Sequence
  Description of Artificial Sequence: Synthetic oligonucleotide
ucugggacuuguggacaua

SEQ ID NO: 2525499 - RNA, 19 nt, Artificial Sequence
  Description of Artificial Sequence: Synthetic oligonucleotide
accggaaaucugcggcauu

SEQ ID NO: 2525500 - RNA, 19 nt, Artificial Sequence
  Description of Artificial Sequence: Synthetic oligonucleotide
cuuccacugggguaggcuu

SEQ ID NO: 2525501 - RNA, 19 nt, Artificial Sequence
  Description of Artificial Sequence: Synthetic oligonucleotide
ggucggaguugcagaaggc

SEQ ID NO: 2525502 - RNA, 19 nt, Artificial Sequence
  Description of Artificial Sequence: Synthetic oligonucleotide
ccaggcacacaacugugga

SEQ ID NO: 2525503 - RNA, 19 nt, Artificial Sequence
  Description of Artificial Sequence: Synthetic oligonucleotide
agagcccgugaggaucuga

SEQ ID NO: 2525504 - RNA, 19 nt, Artificial Sequence
  Description of Artificial Sequence: Synthetic oligonucleotide
gcacacaacuguggauucc

SEQ ID NO: 2525505 - RNA, 19 nt, Artificial Sequence
  Description of Artificial Sequence: Synthetic oligonucleotide
ucgcugcgguucugggacu

SEQ ID NO: 2525506 - RNA, 19 nt, Artificial Sequence
  Description of Artificial Sequence: Synthetic oligonucleotide
guccacaagcaaugaguau

SEQ ID NO: 2525507 - RNA, 19 nt, Artificial Sequence
  Description of Artificial Sequence: Synthetic oligonucleotide
aucuaggcccucagggauu

SEQ ID NO: 2525508 - RNA, 19 nt, Artificial Sequence
  Description of Artificial Sequence: Synthetic oligonucleotide
ccagcacuauacgucuuug

SEQ ID NO: 2525509 - RNA, 19 nt, Artificial Sequence
  Description of Artificial Sequence: Synthetic oligonucleotide
ccauuccuuaggcgucccg

SEQ ID NO: 2525510 - RNA, 19 nt, Artificial Sequence
  Description of Artificial Sequence: Synthetic oligonucleotide
ggaguugcagaaggcuguc

SEQ ID NO: 2525511 - RNA, 19 nt, Artificial Sequence
  Description of Artificial Sequence: Synthetic oligonucleotide
gaaacuccucgcugcgguu

SEQ ID NO: 2525512 - RNA, 19 nt, Artificial Sequence
  Description of Artificial Sequence: Synthetic oligonucleotide
gcaucuuagucaucuugau

SEQ ID NO: 2525513 - RNA, 19 nt, Artificial Sequence
  Description of Artificial Sequence: Synthetic oligonucleotide
ucucaagggcuggggugua

SEQ ID NO: 2525514 - RNA, 19 nt, Artificial Sequence
  Description of Artificial Sequence: Synthetic oligonucleotide
gggaaacacugugcacacc

SEQ ID NO: 2525515 - RNA, 19 nt, Artificial Sequence
  Description of Artificial Sequence: Synthetic oligonucleotide
ccauagugguaucugcucu

SEQ ID NO: 2525516 - RNA, 19 nt, Artificial Sequence
  Description of Artificial Sequence: Synthetic oligonucleotide
ccuuaggcgucccgcgaug

SEQ ID NO: 2525517 - RNA, 19 nt, Artificial Sequence
  Description of Artificial Sequence: Synthetic oligonucleotide
ccugaggccagagaugcaa

SEQ ID NO: 2525518 - RNA, 19 nt, Artificial Sequence
  Description of Artificial Sequence: Synthetic oligonucleotide
gagcccgugaggaucugau

SEQ ID NO: 2525519 - RNA, 19 nt, Artificial Sequence
  Description of Artificial Sequence: Synthetic oligonucleotide
gaguugcagaaggcugucu

SEQ ID NO: 2525520 - RNA, 19 nt, Artificial Sequence
  Description of Artificial Sequence: Synthetic oligonucleotide
gucccgcgaugagaaacuc

SEQ ID NO: 2525521 - RNA, 19 nt, Artificial Sequence
  Description of Artificial Sequence: Synthetic oligonucleotide
caggcacacaacuguggau

SEQ ID NO: 2525522 - RNA, 19 nt, Artificial Sequence
  Description of Artificial Sequence: Synthetic oligonucleotide
ggauugccaggcacacaac

SEQ ID NO: 2525523 - RNA, 19 nt, Artificial Sequence
  Description of Artificial Sequence: Synthetic oligonucleotide
cgugaggaucugaucuguc

SEQ ID NO: 2525524 - RNA, 19 nt, Artificial Sequence
  Description of Artificial Sequence: Synthetic oligonucleotide
ggcucucaagggcuggggu

SEQ ID NO: 2525525 - RNA, 19 nt, Artificial Sequence
  Description of Artificial Sequence: Synthetic oligonucleotide
cuaggcccucagggauugc

SEQ ID NO: 2525526 - RNA, 19 nt, Artificial Sequence
  Description of Artificial Sequence: Synthetic oligonucleotide
ccucgcugcgguucuggga

SEQ ID NO: 2525527 - RNA, 19 nt, Artificial Sequence
  Description of Artificial Sequence: Synthetic oligonucleotide
ccgcgaugagaaacuccuc

SEQ ID NO: 2525528 - RNA, 19 nt, Artificial Sequence
  Description of Artificial Sequence: Synthetic oligonucleotide
agccagcacuauacgucuu

SEQ ID NO: 2525529 - RNA, 19 nt, Artificial Sequence
  Description of Artificial Sequence: Synthetic oligonucleotide
cgaugagaaacuccucgcu

SEQ ID NO: 2525530 - RNA, 19 nt, Artificial Sequence
  Description of Artificial Sequence: Synthetic oligonucleotide
gccagcacuauacgucuuu

SEQ ID NO: 2525531 - RNA, 19 nt, Artificial Sequence
  Description of Artificial Sequence: Synthetic oligonucleotide
gucucucuagaagcccgau

SEQ ID NO: 2525532 - RNA, 19 nt, Artificial Sequence
  Description of Artificial Sequence: Synthetic oligonucleotide
cggaguugcagaaggcugu

SEQ ID NO: 2525533 - RNA, 19 nt, Artificial Sequence
  Description of Artificial Sequence: Synthetic oligonucleotide
cggaaaucugcggcauuuc

SEQ ID NO: 2525534 - RNA, 19 nt, Artificial Sequence
  Description of Artificial Sequence: Synthetic oligonucleotide
gcacagcuacaggccuugc

SEQ ID NO: 2525535 - RNA, 19 nt, Artificial Sequence
  Description of Artificial Sequence: Synthetic oligonucleotide
ccaugaauuuagcccuuau

SEQ ID NO: 2525536 - RNA, 19 nt, Artificial Sequence
  Description of Artificial Sequence: Synthetic oligonucleotide
gcggcauuucccacagcgu

SEQ ID NO: 2525537 - RNA, 19 nt, Artificial Sequence
  Description of Artificial Sequence: Synthetic oligonucleotide
cgucgaauccuuugagcau

SEQ ID NO: 2525538 - RNA, 19 nt, Artificial Sequence
  Description of Artificial Sequence: Synthetic oligonucleotide
ccucagggauugccaggca

SEQ ID NO: 2525539 - RNA, 19 nt, Artificial Sequence
  Description of Artificial Sequence: Synthetic oligonucleotide
cgucccgcgaugagaaacu

SEQ ID NO: 2525540 - RNA, 19 nt, Artificial Sequence
  Description of Artificial Sequence: Synthetic oligonucleotide
ccggaaaucugcggcauuu

SEQ ID NO: 2525541 - RNA, 19 nt, Artificial Sequence
  Description of Artificial Sequence: Synthetic oligonucleotide
cccaugaauuuagcccuua

SEQ ID NO: 2525542 - RNA, 19 nt, Artificial Sequence
  Description of Artificial Sequence: Synthetic oligonucleotide
ccccacagccagcacuaua

SEQ ID NO: 2525543 - RNA, 19 nt, Artificial Sequence
  Description of Artificial Sequence: Synthetic oligonucleotide
ccgugaggaucugaucugu

SEQ ID NO: 2525544 - RNA, 19 nt, Artificial Sequence
  Description of Artificial Sequence: Synthetic oligonucleotide
cccuuaugaccaggucgga

SEQ ID NO: 2525545 - RNA, 19 nt, Artificial Sequence
  Description of Artificial Sequence: Synthetic oligonucleotide
ggguaggcuuugggucauc

SEQ ID NO: 2525546 - RNA, 19 nt, Artificial Sequence
  Description of Artificial Sequence: Synthetic oligonucleotide
gggguaggcuuugggucau

SEQ ID NO: 2525547 - RNA, 19 nt, Artificial Sequence
  Description of Artificial Sequence: Synthetic oligonucleotide
cgaggcaagcaggcaaagu

SEQ ID NO: 2525548 - RNA, 19 nt, Artificial Sequence
  Description of Artificial Sequence: Synthetic oligonucleotide
ccccaugaauuuagcccuu

SEQ ID NO: 2525549 - RNA, 19 nt, Artificial Sequence
  Description of Artificial Sequence: Synthetic oligonucleotide
ccacagcgucgaauccuuu

SEQ ID NO: 2525550 - RNA, 19 nt, Artificial Sequence
  Description of Artificial Sequence: Synthetic oligonucleotide
cgaauccuuugagcaucuu

SEQ ID NO: 2525551 - RNA, 19 nt, Artificial Sequence
  Description of Artificial Sequence: Synthetic oligonucleotide
aaaugagacauccuaaaac

SEQ ID NO: 2525552 - RNA, 19 nt, Artificial Sequence
  Description of Artificial Sequence: Synthetic oligonucleotide
acauauaccaaauucaagg

SEQ ID NO: 2525553 - RNA, 19 nt, Artificial Sequence
  Description of Artificial Sequence: Synthetic oligonucleotide
aguuguuuuaauuccaucc

SEQ ID NO: 2525554 - RNA, 19 nt, Artificial Sequence
  Description of Artificial Sequence: Synthetic oligonucleotide
uauauaaguauuuaauuag

SEQ ID NO: 2525555 - RNA, 19 nt, Artificial Sequence
  Description of Artificial Sequence: Synthetic oligonucleotide
aaagcaaucacauaauagu

SEQ ID NO: 2525556 - RNA, 19 nt, Artificial Sequence
  Description of Artificial Sequence: Synthetic oligonucleotide
uuaacaaccucaaacauug

SEQ ID NO: 2525557 - RNA, 19 nt, Artificial Sequence
  Description of Artificial Sequence: Synthetic oligonucleotide
uucacuaauacacauauac

SEQ ID NO: 2525558 - RNA, 19 nt, Artificial Sequence
  Description of Artificial Sequence: Synthetic oligonucleotide
uuuaauuccauccuuuuca

SEQ ID NO: 2525559 - RNA, 19 nt, Artificial Sequence
  Description of Artificial Sequence: Synthetic oligonucleotide
aauaguuugcuuuacaaaa

SEQ ID NO: 2525560 - RNA, 19 nt, Artificial Sequence
  Description of Artificial Sequence: Synthetic oligonucleotide
aaucuuuacacccuuccac

SEQ ID NO: 2525561 - RNA, 19 nt, Artificial Sequence
  Description of Artificial Sequence: Synthetic oligonucleotide
ugaauaaaccuuuucaaag

SEQ ID NO: 2525562 - RNA, 19 nt, Artificial Sequence
  Description of Artificial Sequence: Synthetic oligonucleotide
caauguuucacuaauacac

SEQ ID NO: 2525563 - RNA, 19 nt, Artificial Sequence
  Description of Artificial Sequence: Synthetic oligonucleotide
ugaggauuggccuucaugg

SEQ ID NO: 2525564 - RNA, 19 nt, Artificial Sequence
  Description of Artificial Sequence: Synthetic oligonucleotide
aauuccauccuuuucagca

SEQ ID NO: 2525565 - RNA, 19 nt, Artificial Sequence
  Description of Artificial Sequence: Synthetic oligonucleotide
uaaguauuuaauuaguccu

SEQ ID NO: 2525566 - RNA, 19 nt, Artificial Sequence
  Description of Artificial Sequence: Synthetic oligonucleotide
acuaauucagaguuggcac

SEQ ID NO: 2525567 - RNA, 19 nt, Artificial Sequence
  Description of Artificial Sequence: Synthetic oligonucleotide
uuuuaaugcagaaauuccc

SEQ ID NO: 2525568 - RNA, 19 nt, Artificial Sequence
  Description of Artificial Sequence: Synthetic oligonucleotide
auacacauauaccaaauuc

SEQ ID NO: 2525569 - RNA, 19 nt, Artificial Sequence
  Description of Artificial Sequence: Synthetic oligonucleotide
uauuuaauuaguccucuag

SEQ ID NO: 2525570 - RNA, 19 nt, Artificial Sequence
  Description of Artificial Sequence: Synthetic oligonucleotide
aagaggaugguacacaugu

SEQ ID NO: 2525571 - RNA, 19 nt, Artificial Sequence
  Description of Artificial Sequence: Synthetic oligonucleotide
uucaaagaaaucuuuacac

SEQ ID NO: 2525572 - RNA, 19 nt, Artificial Sequence
  Description of Artificial Sequence: Synthetic oligonucleotide
auuuuaacaaccucaaaca

SEQ ID NO: 2525573 - RNA, 19 nt, Artificial Sequence
  Description of Artificial Sequence: Synthetic oligonucleotide
accaaaguuguuuuaauuc

SEQ ID NO: 2525574 - RNA, 19 nt, Artificial Sequence
  Description of Artificial Sequence: Synthetic oligonucleotide
uuauauaaguauuuaauua

SEQ ID NO: 2525575 - RNA, 19 nt, Artificial Sequence
  Description of Artificial Sequence: Synthetic oligonucleotide
aaugugaauaaaccuuuuc

SEQ ID NO: 2525576 - RNA, 19 nt, Artificial Sequence
  Description of Artificial Sequence: Synthetic oligonucleotide
caaagaaaucuuuacaccc

SEQ ID NO: 2525577 - RNA, 19 nt, Artificial Sequence
  Description of Artificial Sequence: Synthetic oligonucleotide
uuuacuggcacaguaaucc

SEQ ID NO: 2525578 - RNA, 19 nt, Artificial Sequence
  Description of Artificial Sequence: Synthetic oligonucleotide
uauaccaaauucaaggcac

SEQ ID NO: 2525579 - RNA, 19 nt, Artificial Sequence
  Description of Artificial Sequence: Synthetic oligonucleotide
uucacuuuuacaauguuuc

SEQ ID NO: 2525580 - RNA, 19 nt, Artificial Sequence
  Description of Artificial Sequence: Synthetic oligonucleotide
aaggucacgauguacauga

SEQ ID NO: 2525581 - RNA, 19 nt, Artificial Sequence
  Description of Artificial Sequence: Synthetic oligonucleotide
uucgugaaaacccacaacu

SEQ ID NO: 2525582 - RNA, 19 nt, Artificial Sequence
  Description of Artificial Sequence: Synthetic oligonucleotide
augguacacauguagauac

SEQ ID NO: 2525583 - RNA, 19 nt, Artificial Sequence
  Description of Artificial Sequence: Synthetic oligonucleotide
ucaauuucuuuucugauuc

SEQ ID NO: 2525584 - RNA, 19 nt, Artificial Sequence
  Description of Artificial Sequence: Synthetic oligonucleotide
uaauuaguccucuagaaaa

SEQ ID NO: 2525585 - RNA, 19 nt, Artificial Sequence
  Description of Artificial Sequence: Synthetic oligonucleotide
aaaauaguuugcuuuacaa

SEQ ID NO: 2525586 - RNA, 19 nt, Artificial Sequence
  Description of Artificial Sequence: Synthetic oligonucleotide
uaaaccuuuucaaagaaau

SEQ ID NO: 2525587 - RNA, 19 nt, Artificial Sequence
  Description of Artificial Sequence: Synthetic oligonucleotide
aaaguaggcuauuuuaaca

SEQ ID NO: 2525588 - RNA, 19 nt, Artificial Sequence
  Description of Artificial Sequence: Synthetic oligonucleotide
aaccuuuucaaagaaaucu

SEQ ID NO: 2525589 - RNA, 19 nt, Artificial Sequence
  Description of Artificial Sequence: Synthetic oligonucleotide
uuuaaugcagaaauuccca

SEQ ID NO: 2525590 - RNA, 19 nt, Artificial Sequence
  Description of Artificial Sequence: Synthetic oligonucleotide
aaaagcaaucacauaauag

SEQ ID NO: 2525591 - RNA, 19 nt, Artificial Sequence
  Description of Artificial Sequence: Synthetic oligonucleotide
ugcagaaauucccauuucg

SEQ ID NO: 2525592 - RNA, 19 nt, Artificial Sequence
  Description of Artificial Sequence: Synthetic oligonucleotide
acaacuccaaauuuacugg

SEQ ID NO: 2525593 - RNA, 19 nt, Artificial Sequence
  Description of Artificial Sequence: Synthetic oligonucleotide
auuuacaagaggaugguac

SEQ ID NO: 2525594 - RNA, 19 nt, Artificial Sequence
  Description of Artificial Sequence: Synthetic oligonucleotide
uuuacaauguuucacuaau

SEQ ID NO: 2525595 - RNA, 19 nt, Artificial Sequence
  Description of Artificial Sequence: Synthetic oligonucleotide
uacaauguuucacuaauac

SEQ ID NO: 2525596 - RNA, 19 nt, Artificial Sequence
  Description of Artificial Sequence: Synthetic oligonucleotide
uccugauuaguaaaaguag

SEQ ID NO: 2525597 - RNA, 19 nt, Artificial Sequence
  Description of Artificial Sequence: Synthetic oligonucleotide
cacauaauaguucauaguc

SEQ ID NO: 2525598 - RNA, 19 nt, Artificial Sequence
  Description of Artificial Sequence: Synthetic oligonucleotide
auaguucauagucauuuac

SEQ ID NO: 2525599 - RNA, 19 nt, Artificial Sequence
  Description of Artificial Sequence: Synthetic oligonucleotide
uuggucacgguuuaaauga

SEQ ID NO: 2525600 - RNA, 19 nt, Artificial Sequence
  Description of Artificial Sequence: Synthetic oligonucleotide
guagucaggcuucagaggg

SEQ ID NO: 2525601 - RNA, 19 nt, Artificial Sequence
  Description of Artificial Sequence: Synthetic oligonucleotide
uaauccucaacuccagccg

SEQ ID NO: 2525602 - RNA, 19 nt, Artificial Sequence
  Description of Artificial Sequence: Synthetic oligonucleotide
caaggcacaaaauaguuug

SEQ ID NO: 2525603 - RNA, 19 nt, Artificial Sequence
  Description of Artificial Sequence: Synthetic oligonucleotide
aucacauaauaguucauag

SEQ ID NO: 2525604 - RNA, 19 nt, Artificial Sequence
  Description of Artificial Sequence: Synthetic oligonucleotide
uaaaaguaggcuauuuuaa

SEQ ID NO: 2525605 - RNA, 19 nt, Artificial Sequence
  Description of Artificial Sequence: Synthetic oligonucleotide
aaauaguuugcuuuacaaa

SEQ ID NO: 2525606 - RNA, 19 nt, Artificial Sequence
  Description of Artificial Sequence: Synthetic oligonucleotide
ugugaauaaaccuuuucaa

SEQ ID NO: 2525607 - RNA, 19 nt, Artificial Sequence
  Description of Artificial Sequence: Synthetic oligonucleotide
cauauaccaaauucaaggc

SEQ ID NO: 2525608 - RNA, 19 nt, Artificial Sequence
  Description of Artificial Sequence: Synthetic oligonucleotide
gaaaucuuuacacccuucc

SEQ ID NO: 2525609 - RNA, 19 nt, Artificial Sequence
  Description of Artificial Sequence: Synthetic oligonucleotide
uacaaugugaauaaaccuu

SEQ ID NO: 2525610 - RNA, 19 nt, Artificial Sequence
  Description of Artificial Sequence: Synthetic oligonucleotide
gauacagagguagagauuc

SEQ ID NO: 2525611 - RNA, 19 nt, Artificial Sequence
  Description of Artificial Sequence: Synthetic oligonucleotide
cacaacuccaaauuuacug

SEQ ID NO: 2525612 - RNA, 19 nt, Artificial Sequence
  Description of Artificial Sequence: Synthetic oligonucleotide
gaaauucccauuucgguac

SEQ ID NO: 2525613 - RNA, 19 nt, Artificial Sequence
  Description of Artificial Sequence: Synthetic oligonucleotide
gucauuuacaagaggaugg

SEQ ID NO: 2525614 - RNA, 19 nt, Artificial Sequence
  Description of Artificial Sequence: Synthetic oligonucleotide
augugaauaaaccuuuuca

SEQ ID NO: 2525615 - RNA, 19 nt, Artificial Sequence
  Description of Artificial Sequence: Synthetic oligonucleotide
ucacuaauacacauauacc

SEQ ID NO: 2525616 - RNA, 19 nt, Artificial Sequence
  Description of Artificial Sequence: Synthetic oligonucleotide
cugauuaguaaaaguaggc

SEQ ID NO: 2525617 - RNA, 19 nt, Artificial Sequence
  Description of Artificial Sequence: Synthetic oligonucleotide
acuuuuacaauguuucacu

SEQ ID NO: 2525618 - RNA, 19 nt, Artificial Sequence
  Description of Artificial Sequence: Synthetic oligonucleotide
aauuuacuggcacaguaau

SEQ ID NO: 2525619 - RNA, 19 nt, Artificial Sequence
  Description of Artificial Sequence: Synthetic oligonucleotide
uguucuacaaugugaauaa

SEQ ID NO: 2525620 - RNA, 19 nt, Artificial Sequence
  Description of Artificial Sequence: Synthetic oligonucleotide
ucagaguuggcacaaacau

SEQ ID NO: 2525621 - RNA, 19 nt, Artificial Sequence
  Description of Artificial Sequence: Synthetic oligonucleotide
uuuagcucauggcucagag

SEQ ID NO: 2525622 - RNA, 19 nt, Artificial Sequence
  Description of Artificial Sequence: Synthetic oligonucleotide
aaguaggcuauuuuaacaa

SEQ ID NO: 2525623 - RNA, 19 nt, Artificial Sequence
  Description of Artificial Sequence: Synthetic oligonucleotide
aacaaccucaaacauuggu

SEQ ID NO: 2525624 - RNA, 19 nt, Artificial Sequence
  Description of Artificial Sequence: Synthetic oligonucleotide
ucauagucauuuacaagag

SEQ ID NO: 2525625 - RNA, 19 nt, Artificial Sequence
  Description of Artificial Sequence: Synthetic oligonucleotide
uuaauuaguccucuagaaa

SEQ ID NO: 2525626 - RNA, 19 nt, Artificial Sequence
  Description of Artificial Sequence: Synthetic oligonucleotide
gaggaugguacacauguag

SEQ ID NO: 2525627 - RNA, 19 nt, Artificial Sequence
  Description of Artificial Sequence: Synthetic oligonucleotide
gagauucacuuuuacaaug

SEQ ID NO: 2525628 - RNA, 19 nt, Artificial Sequence
  Description of Artificial Sequence: Synthetic oligonucleotide
uuaaaugagacauccuaaa

SEQ ID NO: 2525629 - RNA, 19 nt, Artificial Sequence
  Description of Artificial Sequence: Synthetic oligonucleotide
uucacacaagauuugcucc

SEQ ID NO: 2525630 - RNA, 19 nt, Artificial Sequence
  Description of Artificial Sequence: Synthetic oligonucleotide
uuuacaagaggaugguaca

SEQ ID NO: 2525631 - RNA, 19 nt, Artificial Sequence
  Description of Artificial Sequence: Synthetic oligonucleotide
uagcucauggcucagagau

SEQ ID NO: 2525632 - RNA, 19 nt, Artificial Sequence
  Description of Artificial Sequence: Synthetic oligonucleotide
aaaaccuccugauuaguaa

SEQ ID NO: 2525633 - RNA, 19 nt, Artificial Sequence
  Description of Artificial Sequence: Synthetic oligonucleotide
acuccaaauuuacuggcac

SEQ ID NO: 2525634 - RNA, 19 nt, Artificial Sequence
  Description of Artificial Sequence: Synthetic oligonucleotide
ucagagauucgugaaaacc

SEQ ID NO: 2525635 - RNA, 19 nt, Artificial Sequence
  Description of Artificial Sequence: Synthetic oligonucleotide
agaugcuucuucaugaagg

SEQ ID NO: 2525636 - RNA, 19 nt, Artificial Sequence
  Description of Artificial Sequence: Synthetic oligonucleotide
aguaggcuauuuuaacaac

SEQ ID NO: 2525637 - RNA, 19 nt, Artificial Sequence
  Description of Artificial Sequence: Synthetic oligonucleotide
cauguagauacagagguag

SEQ ID NO: 2525638 - RNA, 19 nt, Artificial Sequence
  Description of Artificial Sequence: Synthetic oligonucleotide
uguagauacagagguagag

SEQ ID NO: 2525639 - RNA, 19 nt, Artificial Sequence
  Description of Artificial Sequence: Synthetic oligonucleotide
gauuaguaaaaguaggcua

SEQ ID NO: 2525640 - RNA, 19 nt, Artificial Sequence
  Description of Artificial Sequence: Synthetic oligonucleotide
uuuuaacaaccucaaacau

SEQ ID NO: 2525641 - RNA, 19 nt, Artificial Sequence
  Description of Artificial Sequence: Synthetic oligonucleotide
auagucauuuacaagagga

SEQ ID NO: 2525642 - RNA, 19 nt, Artificial Sequence
  Description of Artificial Sequence: Synthetic oligonucleotide
ucaaacauuggucacgguu

SEQ ID NO: 2525643 - RNA, 19 nt, Artificial Sequence
  Description of Artificial Sequence: Synthetic oligonucleotide
uucuuuucugauucggcag

SEQ ID NO: 2525644 - RNA, 19 nt, Artificial Sequence
  Description of Artificial Sequence: Synthetic oligonucleotide
uccaaauuuacuggcacag

SEQ ID NO: 2525645 - RNA, 19 nt, Artificial Sequence
  Description of Artificial Sequence: Synthetic oligonucleotide
aaaucuuuacacccuucca

SEQ ID NO: 2525646 - RNA, 19 nt, Artificial Sequence
  Description of Artificial Sequence: Synthetic oligonucleotide
uaauaguucauagucauuu

SEQ ID NO: 2525647 - RNA, 19 nt, Artificial Sequence
  Description of Artificial Sequence: Synthetic oligonucleotide
guaauccucaacuccagcc

SEQ ID NO: 2525648 - RNA, 19 nt, Artificial Sequence
  Description of Artificial Sequence: Synthetic oligonucleotide
auuggucacgguuuaaaug

SEQ ID NO: 2525649 - RNA, 19 nt, Artificial Sequence
  Description of Artificial Sequence: Synthetic oligonucleotide
auauaccaaauucaaggca

SEQ ID NO: 2525650 - RNA, 19 nt, Artificial Sequence
  Description of Artificial Sequence: Synthetic oligonucleotide
ugagacauccuaaaacaaa

SEQ ID NO: 2525651 - RNA, 19 nt, Artificial Sequence
  Description of Artificial Sequence: Synthetic oligonucleotide
ugauuaguaaaaguaggcu

SEQ ID NO: 2525652 - RNA, 19 nt, Artificial Sequence
  Description of Artificial Sequence: Synthetic oligonucleotide
uagauacagagguagagau

SEQ ID NO: 2525653 - RNA, 19 nt, Artificial Sequence
  Description of Artificial Sequence: Synthetic oligonucleotide
uuucgguacaugcacacaa

SEQ ID NO: 2525654 - RNA, 19 nt, Artificial Sequence
  Description of Artificial Sequence: Synthetic oligonucleotide
aguaauccucaacuccagc

SEQ ID NO: 2525655 - RNA, 19 nt, Artificial Sequence
  Description of Artificial Sequence: Synthetic oligonucleotide
cacacuaauucagaguugg

SEQ ID NO: 2525656 - RNA, 19 nt, Artificial Sequence
  Description of Artificial Sequence: Synthetic oligonucleotide
aagaugcuucuucaugaag

SEQ ID NO: 2525657 - RNA, 19 nt, Artificial Sequence
  Description of Artificial Sequence: Synthetic oligonucleotide
auucgugaaaacccacaac

SEQ ID NO: 2525658 - RNA, 19 nt, Artificial Sequence
  Description of Artificial Sequence: Synthetic oligonucleotide
uaaaugagacauccuaaaa

SEQ ID NO: 2525659 - RNA, 19 nt, Artificial Sequence
  Description of Artificial Sequence: Synthetic oligonucleotide
cacaguaauccucaacucc

SEQ ID NO: 2525660 - RNA, 19 nt, Artificial Sequence
  Description of Artificial Sequence: Synthetic oligonucleotide
acaaccucaaacauugguc

SEQ ID NO: 2525661 - RNA, 19 nt, Artificial Sequence
  Description of Artificial Sequence: Synthetic oligonucleotide
gguacaugcacacaacugc

SEQ ID NO: 2525662 - RNA, 19 nt, Artificial Sequence
  Description of Artificial Sequence: Synthetic oligonucleotide
acaauguuucacuaauaca

SEQ ID NO: 2525663 - RNA, 19 nt, Artificial Sequence
  Description of Artificial Sequence: Synthetic oligonucleotide
guuuaaaugagacauccua

SEQ ID NO: 2525664 - RNA, 19 nt, Artificial Sequence
  Description of Artificial Sequence: Synthetic oligonucleotide
uaggcuauuuuaacaaccu

SEQ ID NO: 2525665 - RNA, 19 nt, Artificial Sequence
  Description of Artificial Sequence: Synthetic oligonucleotide
ugaacaaucccagggagcu

SEQ ID NO: 2525666 - RNA, 19 nt, Artificial Sequence
  Description of Artificial Sequence: Synthetic oligonucleotide
aaaccuuuucaaagaaauc

SEQ ID NO: 2525667 - RNA, 19 nt, Artificial Sequence
  Description of Artificial Sequence: Synthetic oligonucleotide
aguagucaggcuucagagg

SEQ ID NO: 2525668 - RNA, 19 nt, Artificial Sequence
  Description of Artificial Sequence: Synthetic oligonucleotide
uuuuacaauguuucacuaa

SEQ ID NO: 2525669 - RNA, 19 nt, Artificial Sequence
  Description of Artificial Sequence: Synthetic oligonucleotide
ucacauaauaguucauagu

SEQ ID NO: 2525670 - RNA, 19 nt, Artificial Sequence
  Description of Artificial Sequence: Synthetic oligonucleotide
cuucacacaagauuugcuc

SEQ ID NO: 2525671 - RNA, 19 nt, Artificial Sequence
  Description of Artificial Sequence: Synthetic oligonucleotide
ugcuguucuacaaugugaa

SEQ ID NO: 2525672 - RNA, 19 nt, Artificial Sequence
  Description of Artificial Sequence: Synthetic oligonucleotide
uucccauuucgguacaugc

SEQ ID NO: 2525673 - RNA, 19 nt, Artificial Sequence
  Description of Artificial Sequence: Synthetic oligonucleotide
uuuacacccuuccacaaua

SEQ ID NO: 2525674 - RNA, 19 nt, Artificial Sequence
  Description of Artificial Sequence: Synthetic oligonucleotide
gagacauccuaaaacaaac

SEQ ID NO: 2525675 - RNA, 19 nt, Artificial Sequence
  Description of Artificial Sequence: Synthetic oligonucleotide
aauguuucacuaauacaca

SEQ ID NO: 2525676 - RNA, 19 nt, Artificial Sequence
  Description of Artificial Sequence: Synthetic oligonucleotide
acaagguaagggcaaacca

SEQ ID NO: 2525677 - RNA, 19 nt, Artificial Sequence
  Description of Artificial Sequence: Synthetic oligonucleotide
gugcugaacaaucccaggg

SEQ ID NO: 2525678 - RNA, 19 nt, Artificial Sequence
  Description of Artificial Sequence: Synthetic oligonucleotide
uugcuguucuacaauguga

SEQ ID NO: 2525679 - RNA, 19 nt, Artificial Sequence
  Description of Artificial Sequence: Synthetic oligonucleotide
ucacacaagauuugcuccc

SEQ ID NO: 2525680 - RNA, 19 nt, Artificial Sequence
  Description of Artificial Sequence: Synthetic oligonucleotide
caguagucaggcuucagag

SEQ ID NO: 2525681 - RNA, 19 nt, Artificial Sequence
  Description of Artificial Sequence: Synthetic oligonucleotide
aaaccuccugauuaguaaa

SEQ ID NO: 2525682 - RNA, 19 nt, Artificial Sequence
  Description of Artificial Sequence: Synthetic oligonucleotide
gacauccuaaaacaaacaa

SEQ ID NO: 2525683 - RNA, 19 nt, Artificial Sequence
  Description of Artificial Sequence: Synthetic oligonucleotide
cauuugcuguucuacaaug

SEQ ID NO: 2525684 - RNA, 19 nt, Artificial Sequence
  Description of Artificial Sequence: Synthetic oligonucleotide
aaucacauaauaguucaua

SEQ ID NO: 2525685 - RNA, 19 nt, Artificial Sequence
  Description of Artificial Sequence: Synthetic oligonucleotide
aaggcacaaaauaguuugc

SEQ ID NO: 2525686 - RNA, 19 nt, Artificial Sequence
  Description of Artificial Sequence: Synthetic oligonucleotide
aaccaaaguuguuuuaauu

SEQ ID NO: 2525687 - RNA, 19 nt, Artificial Sequence
  Description of Artificial Sequence: Synthetic oligonucleotide
auuaguaaaaguaggcuau

SEQ ID NO: 2525688 - RNA, 19 nt, Artificial Sequence
  Description of Artificial Sequence: Synthetic oligonucleotide
aaaccaaaguuguuuuaau

SEQ ID NO: 2525689 - RNA, 19 nt, Artificial Sequence
  Description of Artificial Sequence: Synthetic oligonucleotide
ccugauuaguaaaaguagg

SEQ ID NO: 2525690 - RNA, 19 nt, Artificial Sequence
  Description of Artificial Sequence: Synthetic oligonucleotide
aucuuuacacccuuccaca

SEQ ID NO: 2525691 - RNA, 19 nt, Artificial Sequence
  Description of Artificial Sequence: Synthetic oligonucleotide
cacauauaccaaauucaag

SEQ ID NO: 2525692 - RNA, 19 nt, Artificial Sequence
  Description of Artificial Sequence: Synthetic oligonucleotide
cauagucauuuacaagagg

SEQ ID NO: 2525693 - RNA, 19 nt, Artificial Sequence
  Description of Artificial Sequence: Synthetic oligonucleotide
aguaaaaguaggcuauuuu

SEQ ID NO: 2525694 - RNA, 19 nt, Artificial Sequence
  Description of Artificial Sequence: Synthetic oligonucleotide
ugcugaacaaucccaggga

SEQ ID NO: 2525695 - RNA, 19 nt, Artificial Sequence
  Description of Artificial Sequence: Synthetic oligonucleotide
aauccucaacuccagccgu

SEQ ID NO: 2525696 - RNA, 19 nt, Artificial Sequence
  Description of Artificial Sequence: Synthetic oligonucleotide
auauaaguauuuaauuagu

SEQ ID NO: 2525697 - RNA, 19 nt, Artificial Sequence
  Description of Artificial Sequence: Synthetic oligonucleotide
caagauuugcuccccacac

SEQ ID NO: 2525698 - RNA, 19 nt, Artificial Sequence
  Description of Artificial Sequence: Synthetic oligonucleotide
caacuccaaauuuacuggc

SEQ ID NO: 2525699 - RNA, 19 nt, Artificial Sequence
  Description of Artificial Sequence: Synthetic oligonucleotide
aagaaaucuuuacacccuu

SEQ ID NO: 2525700 - RNA, 19 nt, Artificial Sequence
  Description of Artificial Sequence: Synthetic oligonucleotide
uacaagguaagggcaaacc

SEQ ID NO: 2525701 - RNA, 19 nt, Artificial Sequence
  Description of Artificial Sequence: Synthetic oligonucleotide
uuaaugcagaaauucccau

SEQ ID NO: 2525702 - RNA, 19 nt, Artificial Sequence
  Description of Artificial Sequence: Synthetic oligonucleotide
aguauuuaauuaguccucu

SEQ ID NO: 2525703 - RNA, 19 nt, Artificial Sequence
  Description of Artificial Sequence: Synthetic oligonucleotide
uguuucacuaauacacaua

SEQ ID NO: 2525704 - RNA, 19 nt, Artificial Sequence
  Description of Artificial Sequence: Synthetic oligonucleotide
uuccacaauacuucacaca

SEQ ID NO: 2525705 - RNA, 19 nt, Artificial Sequence
  Description of Artificial Sequence: Synthetic oligonucleotide
cacgauguacaugagcggg

SEQ ID NO: 2525706 - RNA, 19 nt, Artificial Sequence
  Description of Artificial Sequence: Synthetic oligonucleotide
aaauuuacuggcacaguaa

SEQ ID NO: 2525707 - RNA, 19 nt, Artificial Sequence
  Description of Artificial Sequence: Synthetic oligonucleotide
guuggcacaaacaugggga

SEQ ID NO: 2525708 - RNA, 19 nt, Artificial Sequence
  Description of Artificial Sequence: Synthetic oligonucleotide
cagccucugaacaugcccg

SEQ ID NO: 2525709 - RNA, 19 nt, Artificial Sequence
  Description of Artificial Sequence: Synthetic oligonucleotide
ucacuuuuacaauguuuca

SEQ ID NO: 2525710 - RNA, 19 nt, Artificial Sequence
  Description of Artificial Sequence: Synthetic oligonucleotide
agccgugcugaacaauccc

SEQ ID NO: 2525711 - RNA, 19 nt, Artificial Sequence
  Description of Artificial Sequence: Synthetic oligonucleotide
acaguagucaggcuucaga

SEQ ID NO: 2525712 - RNA, 19 nt, Artificial Sequence
  Description of Artificial Sequence: Synthetic oligonucleotide
caaccucaaacauugguca

SEQ ID NO: 2525713 - RNA, 19 nt, Artificial Sequence
  Description of Artificial Sequence: Synthetic oligonucleotide
cagaucaugggcuggucag

SEQ ID NO: 2525714 - RNA, 19 nt, Artificial Sequence
  Description of Artificial Sequence: Synthetic oligonucleotide
cuaauacacauauaccaaa

SEQ ID NO: 2525715 - RNA, 19 nt, Artificial Sequence
  Description of Artificial Sequence: Synthetic oligonucleotide
aggcuauuuuaacaaccuc

SEQ ID NO: 2525716 - RNA, 19 nt, Artificial Sequence
  Description of Artificial Sequence: Synthetic oligonucleotide
ucgguacaugcacacaacu

SEQ ID NO: 2525717 - RNA, 19 nt, Artificial Sequence
  Description of Artificial Sequence: Synthetic oligonucleotide
aaucccagggagcucgcga

SEQ ID NO: 2525718 - RNA, 19 nt, Artificial Sequence
  Description of Artificial Sequence: Synthetic oligonucleotide
gcaaucacauaauaguuca

SEQ ID NO: 2525719 - RNA, 19 nt, Artificial Sequence
  Description of Artificial Sequence: Synthetic oligonucleotide
acacauguagauacagagg

SEQ ID NO: 2525720 - RNA, 19 nt, Artificial Sequence
  Description of Artificial Sequence: Synthetic oligonucleotide
acauaauaguucauaguca

SEQ ID NO: 2525721 - RNA, 19 nt, Artificial Sequence
  Description of Artificial Sequence: Synthetic oligonucleotide
cauuucgguacaugcacac

SEQ ID NO: 2525722 - RNA, 19 nt, Artificial Sequence
  Description of Artificial Sequence: Synthetic oligonucleotide
gauucgugaaaacccacaa

SEQ ID NO: 2525723 - RNA, 19 nt, Artificial Sequence
  Description of Artificial Sequence: Synthetic oligonucleotide
uuucugauucggcagccuc

SEQ ID NO: 2525724 - RNA, 19 nt, Artificial Sequence
  Description of Artificial Sequence: Synthetic oligonucleotide
acaguaauccucaacucca

SEQ ID NO: 2525725 - RNA, 19 nt, Artificial Sequence
  Description of Artificial Sequence: Synthetic oligonucleotide
cacuuuuacaauguuucac

SEQ ID NO: 2525726 - RNA, 19 nt, Artificial Sequence
  Description of Artificial Sequence: Synthetic oligonucleotide
cacauguagauacagaggu

SEQ ID NO: 2525727 - RNA, 19 nt, Artificial Sequence
  Description of Artificial Sequence: Synthetic oligonucleotide
ucccauuucgguacaugca

SEQ ID NO: 2525728 - RNA, 19 nt, Artificial Sequence
  Description of Artificial Sequence: Synthetic oligonucleotide
cuuccacaauacuucacac

SEQ ID NO: 2525729 - RNA, 19 nt, Artificial Sequence
  Description of Artificial Sequence: Synthetic oligonucleotide
augaaggucacgauguaca

SEQ ID NO: 2525730 - RNA, 19 nt, Artificial Sequence
  Description of Artificial Sequence: Synthetic oligonucleotide
acuaauacacauauaccaa

SEQ ID NO: 2525731 - RNA, 19 nt, Artificial Sequence
  Description of Artificial Sequence: Synthetic oligonucleotide
aaaguuguuuuaauuccau

SEQ ID NO: 2525732 - RNA, 19 nt, Artificial Sequence
  Description of Artificial Sequence: Synthetic oligonucleotide
aaugucauuugcuguucua

SEQ ID NO: 2525733 - RNA, 19 nt, Artificial Sequence
  Description of Artificial Sequence: Synthetic oligonucleotide
cuccugauuaguaaaagua

SEQ ID NO: 2525734 - RNA, 19 nt, Artificial Sequence
  Description of Artificial Sequence: Synthetic oligonucleotide
ucgugaaaacccacaacuc

SEQ ID NO: 2525735 - RNA, 19 nt, Artificial Sequence
  Description of Artificial Sequence: Synthetic oligonucleotide
ucauuuacaagaggauggu

SEQ ID NO: 2525736 - RNA, 19 nt, Artificial Sequence
  Description of Artificial Sequence: Synthetic oligonucleotide
auggcucagagauucguga

SEQ ID NO: 2525737 - RNA, 19 nt, Artificial Sequence
  Description of Artificial Sequence: Synthetic oligonucleotide
caaaguuguuuuaauucca

SEQ ID NO: 2525738 - RNA, 19 nt, Artificial Sequence
  Description of Artificial Sequence: Synthetic oligonucleotide
uacaagaggaugguacaca

SEQ ID NO: 2525739 - RNA, 19 nt, Artificial Sequence
  Description of Artificial Sequence: Synthetic oligonucleotide
ucacgguuuaaaugagaca

SEQ ID NO: 2525740 - RNA, 19 nt, Artificial Sequence
  Description of Artificial Sequence: Synthetic oligonucleotide
ugauucggcagccucugaa

SEQ ID NO: 2525741 - RNA, 19 nt, Artificial Sequence
  Description of Artificial Sequence: Synthetic oligonucleotide
ucaacuccagccgugcuga

SEQ ID NO: 2525742 - RNA, 19 nt, Artificial Sequence
  Description of Artificial Sequence: Synthetic oligonucleotide
cacccuuccacaauacuuc

SEQ ID NO: 2525743 - RNA, 19 nt, Artificial Sequence
  Description of Artificial Sequence: Synthetic oligonucleotide
ggaagaugcuucuucauga

SEQ ID NO: 2525744 - RNA, 19 nt, Artificial Sequence
  Description of Artificial Sequence: Synthetic oligonucleotide
accucaaacauuggucacg

SEQ ID NO: 2525745 - RNA, 19 nt, Artificial Sequence
  Description of Artificial Sequence: Synthetic oligonucleotide
uucugauucggcagccucu

SEQ ID NO: 2525746 - RNA, 19 nt, Artificial Sequence
  Description of Artificial Sequence: Synthetic oligonucleotide
acaagaggaugguacacau

SEQ ID NO: 2525747 - RNA, 19 nt, Artificial Sequence
  Description of Artificial Sequence: Synthetic oligonucleotide
gauucggcagccucugaac

SEQ ID NO: 2525748 - RNA, 19 nt, Artificial Sequence
  Description of Artificial Sequence: Synthetic oligonucleotide
uaacaaccucaaacauugg

SEQ ID NO: 2525749 - RNA, 19 nt, Artificial Sequence
  Description of Artificial Sequence: Synthetic oligonucleotide
cuaauucagaguuggcaca

SEQ ID NO: 2525750 - RNA, 19 nt, Artificial Sequence
  Description of Artificial Sequence: Synthetic oligonucleotide
gucacgguuuaaaugagac

SEQ ID NO: 2525751 - RNA, 19 nt, Artificial Sequence
  Description of Artificial Sequence: Synthetic oligonucleotide
aagguaagggcaaaccaaa

SEQ ID NO: 2525752 - RNA, 19 nt, Artificial Sequence
  Description of Artificial Sequence: Synthetic oligonucleotide
uuacaauguuucacuaaua

SEQ ID NO: 2525753 - RNA, 19 nt, Artificial Sequence
  Description of Artificial Sequence: Synthetic oligonucleotide
uccccacacuaauucagag

SEQ ID NO: 2525754 - RNA, 19 nt, Artificial Sequence
  Description of Artificial Sequence: Synthetic oligonucleotide
uagucaggcuucagagggg

SEQ ID NO: 2525755 - RNA, 19 nt, Artificial Sequence
  Description of Artificial Sequence: Synthetic oligonucleotide
auuuacuggcacaguaauc

SEQ ID NO: 2525756 - RNA, 19 nt, Artificial Sequence
  Description of Artificial Sequence: Synthetic oligonucleotide
uuggcacaaacauggggac

SEQ ID NO: 2525757 - RNA, 19 nt, Artificial Sequence
  Description of Artificial Sequence: Synthetic oligonucleotide
cauaauaguucauagucau

SEQ ID NO: 2525758 - RNA, 19 nt, Artificial Sequence
  Description of Artificial Sequence: Synthetic oligonucleotide
aaauucccauuucgguaca

SEQ ID NO: 2525759 - RNA, 19 nt, Artificial Sequence
  Description of Artificial Sequence: Synthetic oligonucleotide
cacacaguagucaggcuuc

SEQ ID NO: 2525760 - RNA, 19 nt, Artificial Sequence
  Description of Artificial Sequence: Synthetic oligonucleotide
gugaggauuggccuucaug

SEQ ID NO: 2525761 - RNA, 19 nt, Artificial Sequence
  Description of Artificial Sequence: Synthetic oligonucleotide
uggucacgguuuaaaugag

SEQ ID NO: 2525762 - RNA, 19 nt, Artificial Sequence
  Description of Artificial Sequence: Synthetic oligonucleotide
caagguaagggcaaaccaa

SEQ ID NO: 2525763 - RNA, 19 nt, Artificial Sequence
  Description of Artificial Sequence: Synthetic oligonucleotide
uucgguacaugcacacaac

SEQ ID NO: 2525764 - RNA, 19 nt, Artificial Sequence
  Description of Artificial Sequence: Synthetic oligonucleotide
gcagaaauucccauuucgg

SEQ ID NO: 2525765 - RNA, 19 nt, Artificial Sequence
  Description of Artificial Sequence: Synthetic oligonucleotide
acauccuaaaacaaacaaa

SEQ ID NO: 2525766 - RNA, 19 nt, Artificial Sequence
  Description of Artificial Sequence: Synthetic oligonucleotide
aacuccaaauuuacuggca

SEQ ID NO: 2525767 - RNA, 19 nt, Artificial Sequence
  Description of Artificial Sequence: Synthetic oligonucleotide
acacauauaccaaauucaa

SEQ ID NO: 2525768 - RNA, 19 nt, Artificial Sequence
  Description of Artificial Sequence: Synthetic oligonucleotide
ggcuauuuuaacaaccuca

SEQ ID NO: 2525769 - RNA, 19 nt, Artificial Sequence
  Description of Artificial Sequence: Synthetic oligonucleotide
uaauucagaguuggcacaa

SEQ ID NO: 2525770 - RNA, 19 nt, Artificial Sequence
  Description of Artificial Sequence: Synthetic oligonucleotide
auucggcagccucugaaca

SEQ ID NO: 2525771 - RNA, 19 nt, Artificial Sequence
  Description of Artificial Sequence: Synthetic oligonucleotide
cuacaaugugaauaaaccu

SEQ ID NO: 2525772 - RNA, 19 nt, Artificial Sequence
  Description of Artificial Sequence: Synthetic oligonucleotide
acaaugugaauaaaccuuu

SEQ ID NO: 2525773 - RNA, 19 nt, Artificial Sequence
  Description of Artificial Sequence: Synthetic oligonucleotide
agauucacuuuuacaaugu

SEQ ID NO: 2525774 - RNA, 19 nt, Artificial Sequence
  Description of Artificial Sequence: Synthetic oligonucleotide
agagauucgugaaaaccca

SEQ ID NO: 2525775 - RNA, 19 nt, Artificial Sequence
  Description of Artificial Sequence: Synthetic oligonucleotide
auuugcuccccacacuaau

SEQ ID NO: 2525776 - RNA, 19 nt, Artificial Sequence
  Description of Artificial Sequence: Synthetic oligonucleotide
aacuccagccgugcugaac

SEQ ID NO: 2525777 - RNA, 19 nt, Artificial Sequence
  Description of Artificial Sequence: Synthetic oligonucleotide
guagauacagagguagaga

SEQ ID NO: 2525778 - RNA, 19 nt, Artificial Sequence
  Description of Artificial Sequence: Synthetic oligonucleotide
uuagcucauggcucagaga

SEQ ID NO: 2525779 - RNA, 19 nt, Artificial Sequence
  Description of Artificial Sequence: Synthetic oligonucleotide
gcaagaagggcucaauuuc

SEQ ID NO: 2525780 - RNA, 19 nt, Artificial Sequence
  Description of Artificial Sequence: Synthetic oligonucleotide
ucugauucggcagccucug

SEQ ID NO: 2525781 - RNA, 19 nt, Artificial Sequence
  Description of Artificial Sequence: Synthetic oligonucleotide
uacacccuuccacaauacu

SEQ ID NO: 2525782 - RNA, 19 nt, Artificial Sequence
  Description of Artificial Sequence: Synthetic oligonucleotide
ugguacacauguagauaca

SEQ ID NO: 2525783 - RNA, 19 nt, Artificial Sequence
  Description of Artificial Sequence: Synthetic oligonucleotide
agaaaucuuuacacccuuc

SEQ ID NO: 2525784 - RNA, 19 nt, Artificial Sequence
  Description of Artificial Sequence: Synthetic oligonucleotide
cauggcucagagauucgug

SEQ ID NO: 2525785 - RNA, 19 nt, Artificial Sequence
  Description of Artificial Sequence: Synthetic oligonucleotide
guaagggcaaaccaaaguu

SEQ ID NO: 2525786 - RNA, 19 nt, Artificial Sequence
  Description of Artificial Sequence: Synthetic oligonucleotide
uacagagguagagauucac

SEQ ID NO: 2525787 - RNA, 19 nt, Artificial Sequence
  Description of Artificial Sequence: Synthetic oligonucleotide
uuacuggcacaguaauccu

SEQ ID NO: 2525788 - RNA, 19 nt, Artificial Sequence
  Description of Artificial Sequence: Synthetic oligonucleotide
uacuggcacaguaauccuc

SEQ ID NO: 2525789 - RNA, 19 nt, Artificial Sequence
  Description of Artificial Sequence: Synthetic oligonucleotide
cacuaauucagaguuggca

SEQ ID NO: 2525790 - RNA, 19 nt, Artificial Sequence
  Description of Artificial Sequence: Synthetic oligonucleotide
ugaaggucacgauguacau

SEQ ID NO: 2525791 - RNA, 19 nt, Artificial Sequence
  Description of Artificial Sequence: Synthetic oligonucleotide
uuacacccuuccacaauac

SEQ ID NO: 2525792 - RNA, 19 nt, Artificial Sequence
  Description of Artificial Sequence: Synthetic oligonucleotide
gguacacauguagauacag

SEQ ID NO: 2525793 - RNA, 19 nt, Artificial Sequence
  Description of Artificial Sequence: Synthetic oligonucleotide
gcugaacaaucccagggag

SEQ ID NO: 2525794 - RNA, 19 nt, Artificial Sequence
  Description of Artificial Sequence: Synthetic oligonucleotide
agccuuuagcucauggcuc

SEQ ID NO: 2525795 - RNA, 19 nt, Artificial Sequence
  Description of Artificial Sequence: Synthetic oligonucleotide
aacaugcccgugucuacaa

SEQ ID NO: 2525796 - RNA, 19 nt, Artificial Sequence
  Description of Artificial Sequence: Synthetic oligonucleotide
ugaacaugcccgugucuac

SEQ ID NO: 2525797 - RNA, 19 nt, Artificial Sequence
  Description of Artificial Sequence: Synthetic oligonucleotide
uuucacuaauacacauaua

SEQ ID NO: 2525798 - RNA, 19 nt, Artificial Sequence
  Description of Artificial Sequence: Synthetic oligonucleotide
cacaagauuugcuccccac

SEQ ID NO: 2525799 - RNA, 19 nt, Artificial Sequence
  Description of Artificial Sequence: Synthetic oligonucleotide
gaagaugcuucuucaugaa

SEQ ID NO: 2525800 - RNA, 19 nt, Artificial Sequence
  Description of Artificial Sequence: Synthetic oligonucleotide
uuugcuccccacacuaauu

SEQ ID NO: 2525801 - RNA, 19 nt, Artificial Sequence
  Description of Artificial Sequence: Synthetic oligonucleotide
cucaacuccagccgugcug

SEQ ID NO: 2525802 - RNA, 19 nt, Artificial Sequence
  Description of Artificial Sequence: Synthetic oligonucleotide
ggcacaguaauccucaacu

SEQ ID NO: 2525803 - RNA, 19 nt, Artificial Sequence
  Description of Artificial Sequence: Synthetic oligonucleotide
gucauuugcuguucuacaa

SEQ ID NO: 2525804 - RNA, 19 nt, Artificial Sequence
  Description of Artificial Sequence: Synthetic oligonucleotide
gaaggucacgauguacaug

SEQ ID NO: 2525805 - RNA, 19 nt, Artificial Sequence
  Description of Artificial Sequence: Synthetic oligonucleotide
caugaaggucacgauguac

SEQ ID NO: 2525806 - RNA, 19 nt, Artificial Sequence
  Description of Artificial Sequence: Synthetic oligonucleotide
acacuaauucagaguuggc

SEQ ID NO: 2525807 - RNA, 19 nt, Artificial Sequence
  Description of Artificial Sequence: Synthetic oligonucleotide
acuggcacaguaauccuca

SEQ ID NO: 2525808 - RNA, 19 nt, Artificial Sequence
  Description of Artificial Sequence: Synthetic oligonucleotide
cgugaaaacccacaacucc

SEQ ID NO: 2525809 - RNA, 19 nt, Artificial Sequence
  Description of Artificial Sequence: Synthetic oligonucleotide
ccaaauucaaggcacaaaa

SEQ ID NO: 2525810 - RNA, 19 nt, Artificial Sequence
  Description of Artificial Sequence: Synthetic oligonucleotide
cacgguuuaaaugagacau

SEQ ID NO: 2525811 - RNA, 19 nt, Artificial Sequence
  Description of Artificial Sequence: Synthetic oligonucleotide
cucagagauucgugaaaac

SEQ ID NO: 2525812 - RNA, 19 nt, Artificial Sequence
  Description of Artificial Sequence: Synthetic oligonucleotide
cuguucuacaaugugaaua

SEQ ID NO: 2525813 - RNA, 19 nt, Artificial Sequence
  Description of Artificial Sequence: Synthetic oligonucleotide
cuuuuacaauguuucacua

SEQ ID NO: 2525814 - RNA, 19 nt, Artificial Sequence
  Description of Artificial Sequence: Synthetic oligonucleotide
gguagagauucacuuuuac

SEQ ID NO: 2525815 - RNA, 19 nt, Artificial Sequence
  Description of Artificial Sequence: Synthetic oligonucleotide
caaaccaaaguuguuuuaa

SEQ ID NO: 2525816 - RNA, 19 nt, Artificial Sequence
  Description of Artificial Sequence: Synthetic oligonucleotide
aggcacaaaauaguuugcu

SEQ ID NO: 2525817 - RNA, 19 nt, Artificial Sequence
  Description of Artificial Sequence: Synthetic oligonucleotide
ucuacaagguaagggcaaa

SEQ ID NO: 2525818 - RNA, 19 nt, Artificial Sequence
  Description of Artificial Sequence: Synthetic oligonucleotide
ucauggcucagagauucgu

SEQ ID NO: 2525819 - RNA, 19 nt, Artificial Sequence
  Description of Artificial Sequence: Synthetic oligonucleotide
caugggcuggucagugagg

SEQ ID NO: 2525820 - RNA, 19 nt, Artificial Sequence
  Description of Artificial Sequence: Synthetic oligonucleotide
accuccugauuaguaaaag

SEQ ID NO: 2525821 - RNA, 19 nt, Artificial Sequence
  Description of Artificial Sequence: Synthetic oligonucleotide
agauucgugaaaacccaca

SEQ ID NO: 2525822 - RNA, 19 nt, Artificial Sequence
  Description of Artificial Sequence: Synthetic oligonucleotide
gagguagagauucacuuuu

SEQ ID NO: 2525823 - RNA, 19 nt, Artificial Sequence
  Description of Artificial Sequence: Synthetic oligonucleotide
acgauguacaugagcgggg

SEQ ID NO: 2525824 - RNA, 19 nt, Artificial Sequence
  Description of Artificial Sequence: Synthetic oligonucleotide
caagaggaugguacacaug

SEQ ID NO: 2525825 - RNA, 19 nt, Artificial Sequence
  Description of Artificial Sequence: Synthetic oligonucleotide
auuugcuguucuacaaugu

SEQ ID NO: 2525826 - RNA, 19 nt, Artificial Sequence
  Description of Artificial Sequence: Synthetic oligonucleotide
auaaaccuuuucaaagaaa

SEQ ID NO: 2525827 - RNA, 19 nt, Artificial Sequence
  Description of Artificial Sequence: Synthetic oligonucleotide
uuaguaaaaguaggcuauu

SEQ ID NO: 2525828 - RNA, 19 nt, Artificial Sequence
  Description of Artificial Sequence: Synthetic oligonucleotide
agggcucaauuucuuuucu

SEQ ID NO: 2525829 - RNA, 19 nt, Artificial Sequence
  Description of Artificial Sequence: Synthetic oligonucleotide
aggaugguacacauguaga

SEQ ID NO: 2525830 - RNA, 19 nt, Artificial Sequence
  Description of Artificial Sequence: Synthetic oligonucleotide
acgguuuaaaugagacauc

SEQ ID NO: 2525831 - RNA, 19 nt, Artificial Sequence
  Description of Artificial Sequence: Synthetic oligonucleotide
uaguaaaaguaggcuauuu

SEQ ID NO: 2525832 - RNA, 19 nt, Artificial Sequence
  Description of Artificial Sequence: Synthetic oligonucleotide
agacauccuaaaacaaaca

SEQ ID NO: 2525833 - RNA, 19 nt, Artificial Sequence
  Description of Artificial Sequence: Synthetic oligonucleotide
uggcucagagauucgugaa

SEQ ID NO: 2525834 - RNA, 19 nt, Artificial Sequence
  Description of Artificial Sequence: Synthetic oligonucleotide
gagauucgugaaaacccac

SEQ ID NO: 2525835 - RNA, 19 nt, Artificial Sequence
  Description of Artificial Sequence: Synthetic oligonucleotide
acuucacacaagauuugcu

SEQ ID NO: 2525836 - RNA, 19 nt, Artificial Sequence
  Description of Artificial Sequence: Synthetic oligonucleotide
ucaugaaggucacgaugua

SEQ ID NO: 2525837 - RNA, 19 nt, Artificial Sequence
  Description of Artificial Sequence: Synthetic oligonucleotide
caugcacacaacugcuuca

SEQ ID NO: 2525838 - RNA, 19 nt, Artificial Sequence
  Description of Artificial Sequence: Synthetic oligonucleotide
auacuucacacaagauuug

SEQ ID NO: 2525839 - RNA, 19 nt, Artificial Sequence
  Description of Artificial Sequence: Synthetic oligonucleotide
cuccaaauuuacuggcaca

SEQ ID NO: 2525840 - RNA, 19 nt, Artificial Sequence
  Description of Artificial Sequence: Synthetic oligonucleotide
cagaaauucccauuucggu

SEQ ID NO: 2525841 - RNA, 19 nt, Artificial Sequence
  Description of Artificial Sequence: Synthetic oligonucleotide
cacacaagauuugcucccc

SEQ ID NO: 2525842 - RNA, 19 nt, Artificial Sequence
  Description of Artificial Sequence: Synthetic oligonucleotide
cccauuucgguacaugcac

SEQ ID NO: 2525843 - RNA, 19 nt, Artificial Sequence
  Description of Artificial Sequence: Synthetic oligonucleotide
gaguuggcacaaacauggg

SEQ ID NO: 2525844 - RNA, 19 nt, Artificial Sequence
  Description of Artificial Sequence: Synthetic oligonucleotide
cagccgugcugaacaaucc

SEQ ID NO: 2525845 - RNA, 19 nt, Artificial Sequence
  Description of Artificial Sequence: Synthetic oligonucleotide
accuuuucaaagaaaucuu

SEQ ID NO: 2525846 - RNA, 19 nt, Artificial Sequence
  Description of Artificial Sequence: Synthetic oligonucleotide
uaccaaauucaaggcacaa

SEQ ID NO: 2525847 - RNA, 19 nt, Artificial Sequence
  Description of Artificial Sequence: Synthetic oligonucleotide
aaccuccugauuaguaaaa

SEQ ID NO: 2525848 - RNA, 19 nt, Artificial Sequence
  Description of Artificial Sequence: Synthetic oligonucleotide
uucggcagccucugaacau

SEQ ID NO: 2525849 - RNA, 19 nt, Artificial Sequence
  Description of Artificial Sequence: Synthetic oligonucleotide
acccuuccacaauacuuca

SEQ ID NO: 2525850 - RNA, 19 nt, Artificial Sequence
  Description of Artificial Sequence: Synthetic oligonucleotide
gaagggcucaauuucuuuu

SEQ ID NO: 2525851 - RNA, 19 nt, Artificial Sequence
  Description of Artificial Sequence: Synthetic oligonucleotide
gcuauuuuaacaaccucaa

SEQ ID NO: 2525852 - RNA, 19 nt, Artificial Sequence
  Description of Artificial Sequence: Synthetic oligonucleotide
cucugaacaugcccguguc

SEQ ID NO: 2525853 - RNA, 19 nt, Artificial Sequence
  Description of Artificial Sequence: Synthetic oligonucleotide
auaccaaauucaaggcaca

SEQ ID NO: 2525854 - RNA, 19 nt, Artificial Sequence
  Description of Artificial Sequence: Synthetic oligonucleotide
accaaauucaaggcacaaa

SEQ ID NO: 2525855 - RNA, 19 nt, Artificial Sequence
  Description of Artificial Sequence: Synthetic oligonucleotide
acaugcccgugucuacaag

SEQ ID NO: 2525856 - RNA, 19 nt, Artificial Sequence
  Description of Artificial Sequence: Synthetic oligonucleotide
acacaagauuugcucccca

SEQ ID NO: 2525857 - RNA, 19 nt, Artificial Sequence
  Description of Artificial Sequence: Synthetic oligonucleotide
cgugucuacaagguaaggg

SEQ ID NO: 2525858 - RNA, 19 nt, Artificial Sequence
  Description of Artificial Sequence: Synthetic oligonucleotide
augagacauccuaaaacaa

SEQ ID NO: 2525859 - RNA, 19 nt, Artificial Sequence
  Description of Artificial Sequence: Synthetic oligonucleotide
ccucaaacauuggucacgg

SEQ ID NO: 2525860 - RNA, 19 nt, Artificial Sequence
  Description of Artificial Sequence: Synthetic oligonucleotide
guauuuaauuaguccucua

SEQ ID NO: 2525861 - RNA, 19 nt, Artificial Sequence
  Description of Artificial Sequence: Synthetic oligonucleotide
cuggucagugaggauuggc

SEQ ID NO: 2525862 - RNA, 19 nt, Artificial Sequence
  Description of Artificial Sequence: Synthetic oligonucleotide
aauucagaguuggcacaaa

SEQ ID NO: 2525863 - RNA, 19 nt, Artificial Sequence
  Description of Artificial Sequence: Synthetic oligonucleotide
auuucgguacaugcacaca

SEQ ID NO: 2525864 - RNA, 19 nt, Artificial Sequence
  Description of Artificial Sequence: Synthetic oligonucleotide
acaauacuucacacaagau

SEQ ID NO: 2525865 - RNA, 19 nt, Artificial Sequence
  Description of Artificial Sequence: Synthetic oligonucleotide
aucaugggcuggucaguga

SEQ ID NO: 2525866 - RNA, 19 nt, Artificial Sequence
  Description of Artificial Sequence: Synthetic oligonucleotide
gcacaaaauaguuugcuuu

SEQ ID NO: 2525867 - RNA, 19 nt, Artificial Sequence
  Description of Artificial Sequence: Synthetic oligonucleotide
aauucccauuucgguacau

SEQ ID NO: 2525868 - RNA, 19 nt, Artificial Sequence
  Description of Artificial Sequence: Synthetic oligonucleotide
agccucugaacaugcccgu

SEQ ID NO: 2525869 - RNA, 19 nt, Artificial Sequence
  Description of Artificial Sequence: Synthetic oligonucleotide
uggcacaaacauggggacu

SEQ ID NO: 2525870 - RNA, 19 nt, Artificial Sequence
  Description of Artificial Sequence: Synthetic oligonucleotide
gauucacuuuuacaauguu

SEQ ID NO: 2525871 - RNA, 19 nt, Artificial Sequence
  Description of Artificial Sequence: Synthetic oligonucleotide
ggugcagaucaugggcugg

SEQ ID NO: 2525872 - RNA, 19 nt, Artificial Sequence
  Description of Artificial Sequence: Synthetic oligonucleotide
acaaucccagggagcucgc

SEQ ID NO: 2525873 - RNA, 19 nt, Artificial Sequence
  Description of Artificial Sequence: Synthetic oligonucleotide
augcacacaacugcuucaa

SEQ ID NO: 2525874 - RNA, 19 nt, Artificial Sequence
  Description of Artificial Sequence: Synthetic oligonucleotide
gggcucaauuucuuuucug

SEQ ID NO: 2525875 - RNA, 19 nt, Artificial Sequence
  Description of Artificial Sequence: Synthetic oligonucleotide
gcacaguaauccucaacuc

SEQ ID NO: 2525876 - RNA, 19 nt, Artificial Sequence
  Description of Artificial Sequence: Synthetic oligonucleotide
ccagccgugcugaacaauc

SEQ ID NO: 2525877 - RNA, 19 nt, Artificial Sequence
  Description of Artificial Sequence: Synthetic oligonucleotide
cuccccacacuaauucaga

SEQ ID NO: 2525878 - RNA, 19 nt, Artificial Sequence
  Description of Artificial Sequence: Synthetic oligonucleotide
agauacagagguagagauu

SEQ ID NO: 2525879 - RNA, 19 nt, Artificial Sequence
  Description of Artificial Sequence: Synthetic oligonucleotide
acccacaacuccaaauuua

SEQ ID NO: 2525880 - RNA, 19 nt, Artificial Sequence
  Description of Artificial Sequence: Synthetic oligonucleotide
guacaugcacacaacugcu

SEQ ID NO: 2525881 - RNA, 19 nt, Artificial Sequence
  Description of Artificial Sequence: Synthetic oligonucleotide
ggaugguacacauguagau

SEQ ID NO: 2525882 - RNA, 19 nt, Artificial Sequence
  Description of Artificial Sequence: Synthetic oligonucleotide
ugcccgugucuacaaggua

SEQ ID NO: 2525883 - RNA, 19 nt, Artificial Sequence
  Description of Artificial Sequence: Synthetic oligonucleotide
gccuuuagcucauggcuca

SEQ ID NO: 2525884 - RNA, 19 nt, Artificial Sequence
  Description of Artificial Sequence: Synthetic oligonucleotide
ccgugcugaacaaucccag

SEQ ID NO: 2525885 - RNA, 19 nt, Artificial Sequence
  Description of Artificial Sequence: Synthetic oligonucleotide
acauguagauacagaggua

SEQ ID NO: 2525886 - RNA, 19 nt, Artificial Sequence
  Description of Artificial Sequence: Synthetic oligonucleotide
cccgugucuacaagguaag

SEQ ID NO: 2525887 - RNA, 19 nt, Artificial Sequence
  Description of Artificial Sequence: Synthetic oligonucleotide
cauuggucacgguuuaaau

SEQ ID NO: 2525888 - RNA, 19 nt, Artificial Sequence
  Description of Artificial Sequence: Synthetic oligonucleotide
gauuugcuccccacacuaa

SEQ ID NO: 2525889 - RNA, 19 nt, Artificial Sequence
  Description of Artificial Sequence: Synthetic oligonucleotide
auacagagguagagauuca

SEQ ID NO: 2525890 - RNA, 19 nt, Artificial Sequence
  Description of Artificial Sequence: Synthetic oligonucleotide
gggugcagaucaugggcug

SEQ ID NO: 2525891 - RNA, 19 nt, Artificial Sequence
  Description of Artificial Sequence: Synthetic oligonucleotide
ggcaagaagggcucaauuu

SEQ ID NO: 2525892 - RNA, 19 nt, Artificial Sequence
  Description of Artificial Sequence: Synthetic oligonucleotide
ggcuggucagugaggauug

SEQ ID NO: 2525893 - RNA, 19 nt, Artificial Sequence
  Description of Artificial Sequence: Synthetic oligonucleotide
cgguacaugcacacaacug

SEQ ID NO: 2525894 - RNA, 19 nt, Artificial Sequence
  Description of Artificial Sequence: Synthetic oligonucleotide
caaucccagggagcucgcg

SEQ ID NO: 2525895 - RNA, 19 nt, Artificial Sequence
  Description of Artificial Sequence: Synthetic oligonucleotide
cacaguagucaggcuucag

SEQ ID NO: 2525896 - RNA, 19 nt, Artificial Sequence
  Description of Artificial Sequence: Synthetic oligonucleotide
gcucagagauucgugaaaa

SEQ ID NO: 2525897 - RNA, 19 nt, Artificial Sequence
  Description of Artificial Sequence: Synthetic oligonucleotide
acacaguagucaggcuuca

SEQ ID NO: 2525898 - RNA, 19 nt, Artificial Sequence
  Description of Artificial Sequence: Synthetic oligonucleotide
gaacaaucccagggagcuc

SEQ ID NO: 2525899 - RNA, 19 nt, Artificial Sequence
  Description of Artificial Sequence: Synthetic oligonucleotide
ccacacuaauucagaguug

SEQ ID NO: 2525900 - RNA, 19 nt, Artificial Sequence
  Description of Artificial Sequence: Synthetic oligonucleotide
cauuuacaagaggauggua

SEQ ID NO: 2525901 - RNA, 19 nt, Artificial Sequence
  Description of Artificial Sequence: Synthetic oligonucleotide
ggcucagagauucgugaaa

SEQ ID NO: 2525902 - RNA, 19 nt, Artificial Sequence
  Description of Artificial Sequence: Synthetic oligonucleotide
cuuuagcucauggcucaga

SEQ ID NO: 2525903 - RNA, 19 nt, Artificial Sequence
  Description of Artificial Sequence: Synthetic oligonucleotide
cccacacuaauucagaguu

SEQ ID NO: 2525904 - RNA, 19 nt, Artificial Sequence
  Description of Artificial Sequence: Synthetic oligonucleotide
cuuuacacccuuccacaau

SEQ ID NO: 2525905 - RNA, 19 nt, Artificial Sequence
  Description of Artificial Sequence: Synthetic oligonucleotide
agguagagauucacuuuua

SEQ ID NO: 2525906 - RNA, 19 nt, Artificial Sequence
  Description of Artificial Sequence: Synthetic oligonucleotide
uccagccgugcugaacaau

SEQ ID NO: 2525907 - RNA, 19 nt, Artificial Sequence
  Description of Artificial Sequence: Synthetic oligonucleotide
caaugugaauaaaccuuuu

SEQ ID NO: 2525908 - RNA, 19 nt, Artificial Sequence
  Description of Artificial Sequence: Synthetic oligonucleotide
ccauuucgguacaugcaca

SEQ ID NO: 2525909 - RNA, 19 nt, Artificial Sequence
  Description of Artificial Sequence: Synthetic oligonucleotide
agaggaugguacacaugua

SEQ ID NO: 2525910 - RNA, 19 nt, Artificial Sequence
  Description of Artificial Sequence: Synthetic oligonucleotide
gcccgugucuacaagguaa

SEQ ID NO: 2525911 - RNA, 19 nt, Artificial Sequence
  Description of Artificial Sequence: Synthetic oligonucleotide
caaucacauaauaguucau

SEQ ID NO: 2525912 - RNA, 19 nt, Artificial Sequence
  Description of Artificial Sequence: Synthetic oligonucleotide
agggcaaaccaaaguuguu

SEQ ID NO: 2525913 - RNA, 19 nt, Artificial Sequence
  Description of Artificial Sequence: Synthetic oligonucleotide
gguuuaaaugagacauccu

SEQ ID NO: 2525914 - RNA, 19 nt, Artificial Sequence
  Description of Artificial Sequence: Synthetic oligonucleotide
cccuuccacaauacuucac

SEQ ID NO: 2525915 - RNA, 19 nt, Artificial Sequence
  Description of Artificial Sequence: Synthetic oligonucleotide
gccgugcugaacaauccca

SEQ ID NO: 2525916 - RNA, 19 nt, Artificial Sequence
  Description of Artificial Sequence: Synthetic oligonucleotide
ggcacaaacauggggacuu

SEQ ID NO: 2525917 - RNA, 19 nt, Artificial Sequence
  Description of Artificial Sequence: Synthetic oligonucleotide
ccuccugauuaguaaaagu

SEQ ID NO: 2525918 - RNA, 19 nt, Artificial Sequence
  Description of Artificial Sequence: Synthetic oligonucleotide
gggcaaaccaaaguuguuu

SEQ ID NO: 2525919 - RNA, 19 nt, Artificial Sequence
  Description of Artificial Sequence: Synthetic oligonucleotide
gcuggucagugaggauugg

SEQ ID NO: 2525920 - RNA, 19 nt, Artificial Sequence
  Description of Artificial Sequence: Synthetic oligonucleotide
ccgugucuacaagguaagg

SEQ ID NO: 2525921 - RNA, 19 nt, Artificial Sequence
  Description of Artificial Sequence: Synthetic oligonucleotide
cugauucggcagccucuga

SEQ ID NO: 2525922 - RNA, 19 nt, Artificial Sequence
  Description of Artificial Sequence: Synthetic oligonucleotide
ggggugcagaucaugggcu

SEQ ID NO: 2525923 - RNA, 19 nt, Artificial Sequence
  Description of Artificial Sequence: Synthetic oligonucleotide
gugcagaucaugggcuggu

SEQ ID NO: 2525924 - RNA, 19 nt, Artificial Sequence
  Description of Artificial Sequence: Synthetic oligonucleotide
ccuuuagcucauggcucag

SEQ ID NO: 2525925 - RNA, 19 nt, Artificial Sequence
  Description of Artificial Sequence: Synthetic oligonucleotide
gccucugaacaugcccgug

SEQ ID NO: 2525926 - RNA, 19 nt, Artificial Sequence
  Description of Artificial Sequence: Synthetic oligonucleotide
cucaaacauuggucacggu

SEQ ID NO: 2525927 - RNA, 19 nt, Artificial Sequence
  Description of Artificial Sequence: Synthetic oligonucleotide
gcuguucuacaaugugaau

SEQ ID NO: 2525928 - RNA, 19 nt, Artificial Sequence
  Description of Artificial Sequence: Synthetic oligonucleotide
gggcaagaagggcucaauu

SEQ ID NO: 2525929 - RNA, 19 nt, Artificial Sequence
  Description of Artificial Sequence: Synthetic oligonucleotide
cggcagccucugaacaugc

SEQ ID NO: 2525930 - RNA, 19 nt, Artificial Sequence
  Description of Artificial Sequence: Synthetic oligonucleotide
gggcuggucagugaggauu

SEQ ID NO: 2525931 - RNA, 19 nt, Artificial Sequence
  Description of Artificial Sequence: Synthetic oligonucleotide
ccccacacuaauucagagu

SEQ ID NO: 2525932 - RNA, 19 nt, Artificial Sequence
  Description of Artificial Sequence: Synthetic oligonucleotide
ccucugaacaugcccgugu

SEQ ID NO: 2525933 - RNA, 19 nt, Artificial Sequence
  Description of Artificial Sequence: Synthetic oligonucleotide
ccaaauuuacuggcacagu

SEQ ID NO: 2525934 - RNA, 19 nt, Artificial Sequence
  Description of Artificial Sequence: Synthetic oligonucleotide
ccucaacuccagccgugcu

SEQ ID NO: 2525935 - RNA, 19 nt, Artificial Sequence
  Description of Artificial Sequence: Synthetic oligonucleotide
aaagaauuuaaugucaugg

SEQ ID NO: 2525936 - RNA, 19 nt, Artificial Sequence
  Description of Artificial Sequence: Synthetic oligonucleotide
gaaggaaagacacuuaggg

SEQ ID NO: 2525937 - RNA, 19 nt, Artificial Sequence
  Description of Artificial Sequence: Synthetic oligonucleotide
aagaauuuaaugucauggg

SEQ ID NO: 2525938 - RNA, 19 nt, Artificial Sequence
  Description of Artificial Sequence: Synthetic oligonucleotide
aauuuaaugucaugggaag

SEQ ID NO: 2525939 - RNA, 19 nt, Artificial Sequence
  Description of Artificial Sequence: Synthetic oligonucleotide
aaugccaaaguuaagcgcg

SEQ ID NO: 2525940 - RNA, 19 nt, Artificial Sequence
  Description of Artificial Sequence: Synthetic oligonucleotide
ucugcaucuaagaaguggg

SEQ ID NO: 2525941 - RNA, 19 nt, Artificial Sequence
  Description of Artificial Sequence: Synthetic oligonucleotide
aggaaagacacuuagggug

SEQ ID NO: 2525942 - RNA, 19 nt, Artificial Sequence
  Description of Artificial Sequence: Synthetic oligonucleotide
gaaucgauggugcagagac

SEQ ID NO: 2525943 - RNA, 19 nt, Artificial Sequence
  Description of Artificial Sequence: Synthetic oligonucleotide
accaaugccaaaguuaagc

SEQ ID NO: 2525944 - RNA, 19 nt, Artificial Sequence
  Description of Artificial Sequence: Synthetic oligonucleotide
uucacaaguuguacaaugg

SEQ ID NO: 2525945 - RNA, 19 nt, Artificial Sequence
  Description of Artificial Sequence: Synthetic oligonucleotide
aagcaaggagugcagggcc

SEQ ID NO: 2525946 - RNA, 19 nt, Artificial Sequence
  Description of Artificial Sequence: Synthetic oligonucleotide
aaaagaauuuaaugucaug

SEQ ID NO: 2525947 - RNA, 19 nt, Artificial Sequence
  Description of Artificial Sequence: Synthetic oligonucleotide
aagagcucccgccagaucu

SEQ ID NO: 2525948 - RNA, 19 nt, Artificial Sequence
  Description of Artificial Sequence: Synthetic oligonucleotide
uguagguaaucguacaugu

SEQ ID NO: 2525949 - RNA, 19 nt, Artificial Sequence
  Description of Artificial Sequence: Synthetic oligonucleotide
agaauuuaaugucauggga

SEQ ID NO: 2525950 - RNA, 19 nt, Artificial Sequence
  Description of Artificial Sequence: Synthetic oligonucleotide
uaauggugccgucagagug

SEQ ID NO: 2525951 - RNA, 19 nt, Artificial Sequence
  Description of Artificial Sequence: Synthetic oligonucleotide
uuugaugccaccugucacc

SEQ ID NO: 2525952 - RNA, 19 nt, Artificial Sequence
  Description of Artificial Sequence: Synthetic oligonucleotide
uuuaaugucaugggaagga

SEQ ID NO: 2525953 - RNA, 19 nt, Artificial Sequence
  Description of Artificial Sequence: Synthetic oligonucleotide
aaguuaagcgcgugcagag

SEQ ID NO: 2525954 - RNA, 19 nt, Artificial Sequence
  Description of Artificial Sequence: Synthetic oligonucleotide
gaagacaacuucugguucc

SEQ ID NO: 2525955 - RNA, 19 nt, Artificial Sequence
  Description of Artificial Sequence: Synthetic oligonucleotide
acacuggugcauuagcugg

SEQ ID NO: 2525956 - RNA, 19 nt, Artificial Sequence
  Description of Artificial Sequence: Synthetic oligonucleotide
aauggugccgucagagugc

SEQ ID NO: 2525957 - RNA, 19 nt, Artificial Sequence
  Description of Artificial Sequence: Synthetic oligonucleotide
agaagcaaggagugcaggg

SEQ ID NO: 2525958 - RNA, 19 nt, Artificial Sequence
  Description of Artificial Sequence: Synthetic oligonucleotide
ugcauuagcuggaccaagg

SEQ ID NO: 2525959 - RNA, 19 nt, Artificial Sequence
  Description of Artificial Sequence: Synthetic oligonucleotide
gagucgaagaagcaaggag

SEQ ID NO: 2525960 - RNA, 19 nt, Artificial Sequence
  Description of Artificial Sequence: Synthetic oligonucleotide
ucacaaguuguacaauggc

SEQ ID NO: 2525961 - RNA, 19 nt, Artificial Sequence
  Description of Artificial Sequence: Synthetic oligonucleotide
ucagauguagguaaucgua

SEQ ID NO: 2525962 - RNA, 19 nt, Artificial Sequence
  Description of Artificial Sequence: Synthetic oligonucleotide
aaucuugggccggaugugc

SEQ ID NO: 2525963 - RNA, 19 nt, Artificial Sequence
  Description of Artificial Sequence: Synthetic oligonucleotide
ggaggaaaagaauuuaaug

SEQ ID NO: 2525964 - RNA, 19 nt, Artificial Sequence
  Description of Artificial Sequence: Synthetic oligonucleotide
gaugccaccugucaccugc

SEQ ID NO: 2525965 - RNA, 19 nt, Artificial Sequence
  Description of Artificial Sequence: Synthetic oligonucleotide
acaaucuugggccggaugu

SEQ ID NO: 2525966 - RNA, 19 nt, Artificial Sequence
  Description of Artificial Sequence: Synthetic oligonucleotide
guucacaaguuguacaaug

SEQ ID NO: 2525967 - RNA, 19 nt, Artificial Sequence
  Description of Artificial Sequence: Synthetic oligonucleotide
ucauccucaacaccgcagc

SEQ ID NO: 2525968 - RNA, 19 nt, Artificial Sequence
  Description of Artificial Sequence: Synthetic oligonucleotide
aaaguuaagcgcgugcaga

SEQ ID NO: 2525969 - RNA, 19 nt, Artificial Sequence
  Description of Artificial Sequence: Synthetic oligonucleotide
auuagcuggaccaaggagu

SEQ ID NO: 2525970 - RNA, 19 nt, Artificial Sequence
  Description of Artificial Sequence: Synthetic oligonucleotide
ucuccgcucauccucaaca

SEQ ID NO: 2525971 - RNA, 19 nt, Artificial Sequence
  Description of Artificial Sequence: Synthetic oligonucleotide
uuugcuguccgccacgaau

SEQ ID NO: 2525972 - RNA, 19 nt, Artificial Sequence
  Description of Artificial Sequence: Synthetic oligonucleotide
agguguguaccccaagcgg

SEQ ID NO: 2525973 - RNA, 19 nt, Artificial Sequence
  Description of Artificial Sequence: Synthetic oligonucleotide
caaugccaaaguuaagcgc

SEQ ID NO: 2525974 - RNA, 19 nt, Artificial Sequence
  Description of Artificial Sequence: Synthetic oligonucleotide
gaugaagacaacuucuggu

SEQ ID NO: 2525975 - RNA, 19 nt, Artificial Sequence
  Description of Artificial Sequence: Synthetic oligonucleotide
aacuucugguuccuugucu

SEQ ID NO: 2525976 - RNA, 19 nt, Artificial Sequence
  Description of Artificial Sequence: Synthetic oligonucleotide
cuaagaagugggcucgggg

SEQ ID NO: 2525977 - RNA, 19 nt, Artificial Sequence
  Description of Artificial Sequence: Synthetic oligonucleotide
caggagucgaagaagcaag

SEQ ID NO: 2525978 - RNA, 19 nt, Artificial Sequence
  Description of Artificial Sequence: Synthetic oligonucleotide
acaugcugugugcuguccc

SEQ ID NO: 2525979 - RNA, 19 nt, Artificial Sequence
  Description of Artificial Sequence: Synthetic oligonucleotide
aggagagaagagcucccgc

SEQ ID NO: 2525980 - RNA, 19 nt, Artificial Sequence
  Description of Artificial Sequence: Synthetic oligonucleotide
acagaggggugccuuggcc

SEQ ID NO: 2525981 - RNA, 19 nt, Artificial Sequence
  Description of Artificial Sequence: Synthetic oligonucleotide
aggguguggucucugacag

SEQ ID NO: 2525982 - RNA, 19 nt, Artificial Sequence
  Description of Artificial Sequence: Synthetic oligonucleotide
cagauguagguaaucguac

SEQ ID NO: 2525983 - RNA, 19 nt, Artificial Sequence
  Description of Artificial Sequence: Synthetic oligonucleotide
uuagcuggaccaaggaguc

SEQ ID NO: 2525984 - RNA, 19 nt, Artificial Sequence
  Description of Artificial Sequence: Synthetic oligonucleotide
augaagacaacuucugguu

SEQ ID NO: 2525985 - RNA, 19 nt, Artificial Sequence
  Description of Artificial Sequence: Synthetic oligonucleotide
aaccacccgugccuggggc

SEQ ID NO: 2525986 - RNA, 19 nt, Artificial Sequence
  Description of Artificial Sequence: Synthetic oligonucleotide
aagaagcaaggagugcagg

SEQ ID NO: 2525987 - RNA, 19 nt, Artificial Sequence
  Description of Artificial Sequence: Synthetic oligonucleotide
uucuccagccgccagagua

SEQ ID NO: 2525988 - RNA, 19 nt, Artificial Sequence
  Description of Artificial Sequence: Synthetic oligonucleotide
cauuagcuggaccaaggag

SEQ ID NO: 2525989 - RNA, 19 nt, Artificial Sequence
  Description of Artificial Sequence: Synthetic oligonucleotide
ucacacuggugcauuagcu

SEQ ID NO: 2525990 - RNA, 19 nt, Artificial Sequence
  Description of Artificial Sequence: Synthetic oligonucleotide
agucgaagaagcaaggagu

SEQ ID NO: 2525991 - RNA, 19 nt, Artificial Sequence
  Description of Artificial Sequence: Synthetic oligonucleotide
caucuaagaagugggcucg

SEQ ID NO: 2525992 - RNA, 19 nt, Artificial Sequence
  Description of Artificial Sequence: Synthetic oligonucleotide
guuguuggugcccacccag

SEQ ID NO: 2525993 - RNA, 19 nt, Artificial Sequence
  Description of Artificial Sequence: Synthetic oligonucleotide
acauccagcgcccgucgcc

SEQ ID NO: 2525994 - RNA, 19 nt, Artificial Sequence
  Description of Artificial Sequence: Synthetic oligonucleotide
agauguagguaaucguaca

SEQ ID NO: 2525995 - RNA, 19 nt, Artificial Sequence
  Description of Artificial Sequence: Synthetic oligonucleotide
aaagacacuuagggugugg

SEQ ID NO: 2525996 - RNA, 19 nt, Artificial Sequence
  Description of Artificial Sequence: Synthetic oligonucleotide
agcacaaccacccgugccu

SEQ ID NO: 2525997 - RNA, 19 nt, Artificial Sequence
  Description of Artificial Sequence: Synthetic oligonucleotide
gaagcaaggagugcagggc

SEQ ID NO: 2525998 - RNA, 19 nt, Artificial Sequence
  Description of Artificial Sequence: Synthetic oligonucleotide
ugucaugguggcuaauggu

SEQ ID NO: 2525999 - RNA, 19 nt, Artificial Sequence
  Description of Artificial Sequence: Synthetic oligonucleotide
cagaguacaugcugugugc

SEQ ID NO: 2526000 - RNA, 19 nt, Artificial Sequence
  Description of Artificial Sequence: Synthetic oligonucleotide
ugcaucuaagaagugggcu

SEQ ID NO: 2526001 - RNA, 19 nt, Artificial Sequence
  Description of Artificial Sequence: Synthetic oligonucleotide
gucaugguggcuaauggug

SEQ ID NO: 2526002 - RNA, 19 nt, Artificial Sequence
  Description of Artificial Sequence: Synthetic oligonucleotide
uggaagcaggcccagcaca

SEQ ID NO: 2526003 - RNA, 19 nt, Artificial Sequence
  Description of Artificial Sequence: Synthetic oligonucleotide
aguggguuggggugcuggc

SEQ ID NO: 2526004 - RNA, 19 nt, Artificial Sequence
  Description of Artificial Sequence: Synthetic oligonucleotide
ugguuguuggugcccaccc

SEQ ID NO: 2526005 - RNA, 19 nt, Artificial Sequence
  Description of Artificial Sequence: Synthetic oligonucleotide
aaguuguacaauggcuuug

SEQ ID NO: 2526006 - RNA, 19 nt, Artificial Sequence
  Description of Artificial Sequence: Synthetic oligonucleotide
uggcuaauggugccgucag

SEQ ID NO: 2526007 - RNA, 19 nt, Artificial Sequence
  Description of Artificial Sequence: Synthetic oligonucleotide
uuaagcgcgugcagaggag

SEQ ID NO: 2526008 - RNA, 19 nt, Artificial Sequence
  Description of Artificial Sequence: Synthetic oligonucleotide
cuuugaugccaccugucac

SEQ ID NO: 2526009 - RNA, 19 nt, Artificial Sequence
  Description of Artificial Sequence: Synthetic oligonucleotide
cagguguguaccccaagcg

SEQ ID NO: 2526010 - RNA, 19 nt, Artificial Sequence
  Description of Artificial Sequence: Synthetic oligonucleotide
acacuuaggguguggucuc

SEQ ID NO: 2526011 - RNA, 19 nt, Artificial Sequence
  Description of Artificial Sequence: Synthetic oligonucleotide
ucuucuccgcucauccuca

SEQ ID NO: 2526012 - RNA, 19 nt, Artificial Sequence
  Description of Artificial Sequence: Synthetic oligonucleotide
uacaaucuugggccggaug

SEQ ID NO: 2526013 - RNA, 19 nt, Artificial Sequence
  Description of Artificial Sequence: Synthetic oligonucleotide
uggucucugacagaggggu

SEQ ID NO: 2526014 - RNA, 19 nt, Artificial Sequence
  Description of Artificial Sequence: Synthetic oligonucleotide
accaaggaguccccgauga

SEQ ID NO: 2526015 - RNA, 19 nt, Artificial Sequence
  Description of Artificial Sequence: Synthetic oligonucleotide
guuaagcgcgugcagagga

SEQ ID NO: 2526016 - RNA, 19 nt, Artificial Sequence
  Description of Artificial Sequence: Synthetic oligonucleotide
caaaguuaagcgcgugcag

SEQ ID NO: 2526017 - RNA, 19 nt, Artificial Sequence
  Description of Artificial Sequence: Synthetic oligonucleotide
aucguacaugucauggugg

SEQ ID NO: 2526018 - RNA, 19 nt, Artificial Sequence
  Description of Artificial Sequence: Synthetic oligonucleotide
agagaagagcucccgccag

SEQ ID NO: 2526019 - RNA, 19 nt, Artificial Sequence
  Description of Artificial Sequence: Synthetic oligonucleotide
cacacuggugcauuagcug

SEQ ID NO: 2526020 - RNA, 19 nt, Artificial Sequence
  Description of Artificial Sequence: Synthetic oligonucleotide
uuaggguguggucucugac

SEQ ID NO: 2526021 - RNA, 19 nt, Artificial Sequence
  Description of Artificial Sequence: Synthetic oligonucleotide
agacacuuagggugugguc

SEQ ID NO: 2526022 - RNA, 19 nt, Artificial Sequence
  Description of Artificial Sequence: Synthetic oligonucleotide
aguacaugcugugugcugu

SEQ ID NO: 2526023 - RNA, 19 nt, Artificial Sequence
  Description of Artificial Sequence: Synthetic oligonucleotide
auggcuuugaugccaccug

SEQ ID NO: 2526024 - RNA, 19 nt, Artificial Sequence
  Description of Artificial Sequence: Synthetic oligonucleotide
ucuaagaagugggcucggg

SEQ ID NO: 2526025 - RNA, 19 nt, Artificial Sequence
  Description of Artificial Sequence: Synthetic oligonucleotide
uugcuguccgccacgaauc

SEQ ID NO: 2526026 - RNA, 19 nt, Artificial Sequence
  Description of Artificial Sequence: Synthetic oligonucleotide
ugcuguccgccacgaaucg

SEQ ID NO: 2526027 - RNA, 19 nt, Artificial Sequence
  Description of Artificial Sequence: Synthetic oligonucleotide
aagacacuuaggguguggu

SEQ ID NO: 2526028 - RNA, 19 nt, Artificial Sequence
  Description of Artificial Sequence: Synthetic oligonucleotide
acaaguuguacaauggcuu

SEQ ID NO: 2526029 - RNA, 19 nt, Artificial Sequence
  Description of Artificial Sequence: Synthetic oligonucleotide
gucgaagaagcaaggagug

SEQ ID NO: 2526030 - RNA, 19 nt, Artificial Sequence
  Description of Artificial Sequence: Synthetic oligonucleotide
caugguggcuaauggugcc

SEQ ID NO: 2526031 - RNA, 19 nt, Artificial Sequence
  Description of Artificial Sequence: Synthetic oligonucleotide
cucacacuggugcauuagc

SEQ ID NO: 2526032 - RNA, 19 nt, Artificial Sequence
  Description of Artificial Sequence: Synthetic oligonucleotide
auggugcagagacauccag

SEQ ID NO: 2526033 - RNA, 19 nt, Artificial Sequence
  Description of Artificial Sequence: Synthetic oligonucleotide
agagugcacaaagccaggg

SEQ ID NO: 2526034 - RNA, 19 nt, Artificial Sequence
  Description of Artificial Sequence: Synthetic oligonucleotide
gguguggucucugacagag

SEQ ID NO: 2526035 - RNA, 19 nt, Artificial Sequence
  Description of Artificial Sequence: Synthetic oligonucleotide
uuucucccgaaguggguug

SEQ ID NO: 2526036 - RNA, 19 nt, Artificial Sequence
  Description of Artificial Sequence: Synthetic oligonucleotide
ggagagaagagcucccgcc

SEQ ID NO: 2526037 - RNA, 19 nt, Artificial Sequence
  Description of Artificial Sequence: Synthetic oligonucleotide
ugggccaggagucgaagaa

SEQ ID NO: 2526038 - RNA, 19 nt, Artificial Sequence
  Description of Artificial Sequence: Synthetic oligonucleotide
agaggagagaagagcuccc

SEQ ID NO: 2526039 - RNA, 19 nt, Artificial Sequence
  Description of Artificial Sequence: Synthetic oligonucleotide
cacccagaccacuacaauc

SEQ ID NO: 2526040 - RNA, 19 nt, Artificial Sequence
  Description of Artificial Sequence: Synthetic oligonucleotide
aucgauggugcagagacau

SEQ ID NO: 2526041 - RNA, 19 nt, Artificial Sequence
  Description of Artificial Sequence: Synthetic oligonucleotide
aggaguccccgaugaagac

SEQ ID NO: 2526042 - RNA, 19 nt, Artificial Sequence
  Description of Artificial Sequence: Synthetic oligonucleotide
gagagaagagcucccgcca

SEQ ID NO: 2526043 - RNA, 19 nt, Artificial Sequence
  Description of Artificial Sequence: Synthetic oligonucleotide
caugucaugguggcuaaug

SEQ ID NO: 2526044 - RNA, 19 nt, Artificial Sequence
  Description of Artificial Sequence: Synthetic oligonucleotide
ugcgcguccugcacaggcg

SEQ ID NO: 2526045 - RNA, 19 nt, Artificial Sequence
  Description of Artificial Sequence: Synthetic oligonucleotide
agcuaacgcugcccggacc

SEQ ID NO: 2526046 - RNA, 19 nt, Artificial Sequence
  Description of Artificial Sequence: Synthetic oligonucleotide
uccgcucauccucaacacc

SEQ ID NO: 2526047 - RNA, 19 nt, Artificial Sequence
  Description of Artificial Sequence: Synthetic oligonucleotide
gcucagauguagguaaucg

SEQ ID NO: 2526048 - RNA, 19 nt, Artificial Sequence
  Description of Artificial Sequence: Synthetic oligonucleotide
gaguacaugcugugugcug

SEQ ID NO: 2526049 - RNA, 19 nt, Artificial Sequence
  Description of Artificial Sequence: Synthetic oligonucleotide
gacacuuaggguguggucu

SEQ ID NO: 2526050 - RNA, 19 nt, Artificial Sequence
  Description of Artificial Sequence: Synthetic oligonucleotide
uccgccacgaaucgauggu

SEQ ID NO: 2526051 - RNA, 19 nt, Artificial Sequence
  Description of Artificial Sequence: Synthetic oligonucleotide
gcuaauggugccgucagag

SEQ ID NO: 2526052 - RNA, 19 nt, Artificial Sequence
  Description of Artificial Sequence: Synthetic oligonucleotide
cugcaucuaagaagugggc

SEQ ID NO: 2526053 - RNA, 19 nt, Artificial Sequence
  Description of Artificial Sequence: Synthetic oligonucleotide
agacauccagcgcccgucg

SEQ ID NO: 2526054 - RNA, 19 nt, Artificial Sequence
  Description of Artificial Sequence: Synthetic oligonucleotide
ugacagaggggugccuugg

SEQ ID NO: 2526055 - RNA, 19 nt, Artificial Sequence
  Description of Artificial Sequence: Synthetic oligonucleotide
cucuucuccgcucauccuc

SEQ ID NO: 2526056 - RNA, 19 nt, Artificial Sequence
  Description of Artificial Sequence: Synthetic oligonucleotide
guccgccacgaaucgaugg

SEQ ID NO: 2526057 - RNA, 19 nt, Artificial Sequence
  Description of Artificial Sequence: Synthetic oligonucleotide
ucucacacuggugcauuag

SEQ ID NO: 2526058 - RNA, 19 nt, Artificial Sequence
  Description of Artificial Sequence: Synthetic oligonucleotide
ucggcuguguggcuguggu

SEQ ID NO: 2526059 - RNA, 19 nt, Artificial Sequence
  Description of Artificial Sequence: Synthetic oligonucleotide
uccccgaugaagacaacuu

SEQ ID NO: 2526060 - RNA, 19 nt, Artificial Sequence
  Description of Artificial Sequence: Synthetic oligonucleotide
agcucguuuaccugucggu

SEQ ID NO: 2526061 - RNA, 19 nt, Artificial Sequence
  Description of Artificial Sequence: Synthetic oligonucleotide
aguuaagcgcgugcagagg

SEQ ID NO: 2526062 - RNA, 19 nt, Artificial Sequence
  Description of Artificial Sequence: Synthetic oligonucleotide
agcaaggagugcagggccc

SEQ ID NO: 2526063 - RNA, 19 nt, Artificial Sequence
  Description of Artificial Sequence: Synthetic oligonucleotide
ucguuuaccugucgguuuu

SEQ ID NO: 2526064 - RNA, 19 nt, Artificial Sequence
  Description of Artificial Sequence: Synthetic oligonucleotide
ccgcucauccucaacaccg

SEQ ID NO: 2526065 - RNA, 19 nt, Artificial Sequence
  Description of Artificial Sequence: Synthetic oligonucleotide
gucucugacagaggggugc

SEQ ID NO: 2526066 - RNA, 19 nt, Artificial Sequence
  Description of Artificial Sequence: Synthetic oligonucleotide
uuuucucccgaaguggguu

SEQ ID NO: 2526067 - RNA, 19 nt, Artificial Sequence
  Description of Artificial Sequence: Synthetic oligonucleotide
ucgaagaagcaaggagugc

SEQ ID NO: 2526068 - RNA, 19 nt, Artificial Sequence
  Description of Artificial Sequence: Synthetic oligonucleotide
ugcacaaagccagggucug

SEQ ID NO: 2526069 - RNA, 19 nt, Artificial Sequence
  Description of Artificial Sequence: Synthetic oligonucleotide
cacaaguuguacaauggcu

SEQ ID NO: 2526070 - RNA, 19 nt, Artificial Sequence
  Description of Artificial Sequence: Synthetic oligonucleotide
caaacagguguguacccca

SEQ ID NO: 2526071 - RNA, 19 nt, Artificial Sequence
  Description of Artificial Sequence: Synthetic oligonucleotide
acuggugcauuagcuggac

SEQ ID NO: 2526072 - RNA, 19 nt, Artificial Sequence
  Description of Artificial Sequence: Synthetic oligonucleotide
gauguagguaaucguacau

SEQ ID NO: 2526073 - RNA, 19 nt, Artificial Sequence
  Description of Artificial Sequence: Synthetic oligonucleotide
gcaucuaagaagugggcuc

SEQ ID NO: 2526074 - RNA, 19 nt, Artificial Sequence
  Description of Artificial Sequence: Synthetic oligonucleotide
aggaggaaaagaauuuaau

SEQ ID NO: 2526075 - RNA, 19 nt, Artificial Sequence
  Description of Artificial Sequence: Synthetic oligonucleotide
cagcucguuuaccugucgg

SEQ ID NO: 2526076 - RNA, 19 nt, Artificial Sequence
  Description of Artificial Sequence: Synthetic oligonucleotide
uuguuggugcccacccaga

SEQ ID NO: 2526077 - RNA, 19 nt, Artificial Sequence
  Description of Artificial Sequence: Synthetic oligonucleotide
uggaccaaggaguccccga

SEQ ID NO: 2526078 - RNA, 19 nt, Artificial Sequence
  Description of Artificial Sequence: Synthetic oligonucleotide
gucagagugcacaaagcca

SEQ ID NO: 2526079 - RNA, 19 nt, Artificial Sequence
  Description of Artificial Sequence: Synthetic oligonucleotide
gguguguaccccaagcggc

SEQ ID NO: 2526080 - RNA, 19 nt, Artificial Sequence
  Description of Artificial Sequence: Synthetic oligonucleotide
cagccgccagaguacaugc

SEQ ID NO: 2526081 - RNA, 19 nt, Artificial Sequence
  Description of Artificial Sequence: Synthetic oligonucleotide
agugcagggcccggcaaac

SEQ ID NO: 2526082 - RNA, 19 nt, Artificial Sequence
  Description of Artificial Sequence: Synthetic oligonucleotide
uacaugucaugguggcuaa

SEQ ID NO: 2526083 - RNA, 19 nt, Artificial Sequence
  Description of Artificial Sequence: Synthetic oligonucleotide
gccgucagagugcacaaag

SEQ ID NO: 2526084 - RNA, 19 nt, Artificial Sequence
  Description of Artificial Sequence: Synthetic oligonucleotide
agaguacaugcugugugcu

SEQ ID NO: 2526085 - RNA, 19 nt, Artificial Sequence
  Description of Artificial Sequence: Synthetic oligonucleotide
uucucccgaaguggguugg

SEQ ID NO: 2526086 - RNA, 19 nt, Artificial Sequence
  Description of Artificial Sequence: Synthetic oligonucleotide
uaccccaagcggcucagau

SEQ ID NO: 2526087 - RNA, 19 nt, Artificial Sequence
  Description of Artificial Sequence: Synthetic oligonucleotide
acgaaucgauggugcagag

SEQ ID NO: 2526088 - RNA, 19 nt, Artificial Sequence
  Description of Artificial Sequence: Synthetic oligonucleotide
caaagccagggucugcauc

SEQ ID NO: 2526089 - RNA, 19 nt, Artificial Sequence
  Description of Artificial Sequence: Synthetic oligonucleotide
ugggaaggaaagacacuua

SEQ ID NO: 2526090 - RNA, 19 nt, Artificial Sequence
  Description of Artificial Sequence: Synthetic oligonucleotide
cauccucaacaccgcagcc

SEQ ID NO: 2526091 - RNA, 19 nt, Artificial Sequence
  Description of Artificial Sequence: Synthetic oligonucleotide
uaagcgcgugcagaggaga

SEQ ID NO: 2526092 - RNA, 19 nt, Artificial Sequence
  Description of Artificial Sequence: Synthetic oligonucleotide
guacaugucaugguggcua

SEQ ID NO: 2526093 - RNA, 19 nt, Artificial Sequence
  Description of Artificial Sequence: Synthetic oligonucleotide
ccggaugugcuccagcucc

SEQ ID NO: 2526094 - RNA, 19 nt, Artificial Sequence
  Description of Artificial Sequence: Synthetic oligonucleotide
ggcuguguggcugugguug

SEQ ID NO: 2526095 - RNA, 19 nt, Artificial Sequence
  Description of Artificial Sequence: Synthetic oligonucleotide
ccagaguacaugcugugug

SEQ ID NO: 2526096 - RNA, 19 nt, Artificial Sequence
  Description of Artificial Sequence: Synthetic oligonucleotide
uguucacaaguuguacaau

SEQ ID NO: 2526097 - RNA, 19 nt, Artificial Sequence
  Description of Artificial Sequence: Synthetic oligonucleotide
cugcgcguccugcacaggc

SEQ ID NO: 2526098 - RNA, 19 nt, Artificial Sequence
  Description of Artificial Sequence: Synthetic oligonucleotide
gaccaaggaguccccgaug

SEQ ID NO: 2526099 - RNA, 19 nt, Artificial Sequence
  Description of Artificial Sequence: Synthetic oligonucleotide
cagcacaaccacccgugcc

SEQ ID NO: 2526100 - RNA, 19 nt, Artificial Sequence
  Description of Artificial Sequence: Synthetic oligonucleotide
accccaagcggcucagaug

SEQ ID NO: 2526101 - RNA, 19 nt, Artificial Sequence
  Description of Artificial Sequence: Synthetic oligonucleotide
gaguccccgaugaagacaa

SEQ ID NO: 2526102 - RNA, 19 nt, Artificial Sequence
  Description of Artificial Sequence: Synthetic oligonucleotide
cgucagagugcacaaagcc

SEQ ID NO: 2526103 - RNA, 19 nt, Artificial Sequence
  Description of Artificial Sequence: Synthetic oligonucleotide
uguccgccacgaaucgaug

SEQ ID NO: 2526104 - RNA, 19 nt, Artificial Sequence
  Description of Artificial Sequence: Synthetic oligonucleotide
gacagaggggugccuuggc

SEQ ID NO: 2526105 - RNA, 19 nt, Artificial Sequence
  Description of Artificial Sequence: Synthetic oligonucleotide
agagacauccagcgcccgu

SEQ ID NO: 2526106 - RNA, 19 nt, Artificial Sequence
  Description of Artificial Sequence: Synthetic oligonucleotide
gaaagacacuuagggugug

SEQ ID NO: 2526107 - RNA, 19 nt, Artificial Sequence
  Description of Artificial Sequence: Synthetic oligonucleotide
cuccgcucauccucaacac

SEQ ID NO: 2526108 - RNA, 19 nt, Artificial Sequence
  Description of Artificial Sequence: Synthetic oligonucleotide
aagcgcgugcagaggagag

SEQ ID NO: 2526109 - RNA, 19 nt, Artificial Sequence
  Description of Artificial Sequence: Synthetic oligonucleotide
ucucuucuccgcucauccu

SEQ ID NO: 2526110 - RNA, 19 nt, Artificial Sequence
  Description of Artificial Sequence: Synthetic oligonucleotide
guaggaggaaaagaauuua

SEQ ID NO: 2526111 - RNA, 19 nt, Artificial Sequence
  Description of Artificial Sequence: Synthetic oligonucleotide
uccccaccaaugccaaagu

SEQ ID NO: 2526112 - RNA, 19 nt, Artificial Sequence
  Description of Artificial Sequence: Synthetic oligonucleotide
acuacaaucuugggccgga

SEQ ID NO: 2526113 - RNA, 19 nt, Artificial Sequence
  Description of Artificial Sequence: Synthetic oligonucleotide
uguaccccaagcggcucag

SEQ ID NO: 2526114 - RNA, 19 nt, Artificial Sequence
  Description of Artificial Sequence: Synthetic oligonucleotide
aucuaagaagugggcucgg

SEQ ID NO: 2526115 - RNA, 19 nt, Artificial Sequence
  Description of Artificial Sequence: Synthetic oligonucleotide
aaucgauggugcagagaca

SEQ ID NO: 2526116 - RNA, 19 nt, Artificial Sequence
  Description of Artificial Sequence: Synthetic oligonucleotide
uggccggguucucuucucc

SEQ ID NO: 2526117 - RNA, 19 nt, Artificial Sequence
  Description of Artificial Sequence: Synthetic oligonucleotide
cacuacaaucuugggccgg

SEQ ID NO: 2526118 - RNA, 19 nt, Artificial Sequence
  Description of Artificial Sequence: Synthetic oligonucleotide
gccaccugucaccugcucg

SEQ ID NO: 2526119 - RNA, 19 nt, Artificial Sequence
  Description of Artificial Sequence: Synthetic oligonucleotide
ggugccuuggcccuggucu

SEQ ID NO: 2526120 - RNA, 19 nt, Artificial Sequence
  Description of Artificial Sequence: Synthetic oligonucleotide
cugacagaggggugccuug

SEQ ID NO: 2526121 - RNA, 19 nt, Artificial Sequence
  Description of Artificial Sequence: Synthetic oligonucleotide
gagacauccagcgcccguc

SEQ ID NO: 2526122 - RNA, 19 nt, Artificial Sequence
  Description of Artificial Sequence: Synthetic oligonucleotide
gccccuuggaagcaggccc

SEQ ID NO: 2526123 - RNA, 19 nt, Artificial Sequence
  Description of Artificial Sequence: Synthetic oligonucleotide
aacgcugcccggaccagcu

SEQ ID NO: 2526124 - RNA, 19 nt, Artificial Sequence
  Description of Artificial Sequence: Synthetic oligonucleotide
ucuugggccggaugugcuc

SEQ ID NO: 2526125 - RNA, 19 nt, Artificial Sequence
  Description of Artificial Sequence: Synthetic oligonucleotide
ggccagcuaacgcugcccg

SEQ ID NO: 2526126 - RNA, 19 nt, Artificial Sequence
  Description of Artificial Sequence: Synthetic oligonucleotide
augugcuccagcuccccau

SEQ ID NO: 2526127 - RNA, 19 nt, Artificial Sequence
  Description of Artificial Sequence: Synthetic oligonucleotide
cacgaaucgauggugcaga

SEQ ID NO: 2526128 - RNA, 19 nt, Artificial Sequence
  Description of Artificial Sequence: Synthetic oligonucleotide
ccgaugaagacaacuucug

SEQ ID NO: 2526129 - RNA, 19 nt, Artificial Sequence
  Description of Artificial Sequence: Synthetic oligonucleotide
guggucucugacagagggg

SEQ ID NO: 2526130 - RNA, 19 nt, Artificial Sequence
  Description of Artificial Sequence: Synthetic oligonucleotide
caccaaugccaaaguuaag

SEQ ID NO: 2526131 - RNA, 19 nt, Artificial Sequence
  Description of Artificial Sequence: Synthetic oligonucleotide
caacuucugguuccuuguc

SEQ ID NO: 2526132 - RNA, 19 nt, Artificial Sequence
  Description of Artificial Sequence: Synthetic oligonucleotide
uucuccgcucauccucaac

SEQ ID NO: 2526133 - RNA, 19 nt, Artificial Sequence
  Description of Artificial Sequence: Synthetic oligonucleotide
cuuaggguguggucucuga

SEQ ID NO: 2526134 - RNA, 19 nt, Artificial Sequence
  Description of Artificial Sequence: Synthetic oligonucleotide
gugcauuagcuggaccaag

SEQ ID NO: 2526135 - RNA, 19 nt, Artificial Sequence
  Description of Artificial Sequence: Synthetic oligonucleotide
gaccagcucguuuaccugu

SEQ ID NO: 2526136 - RNA, 19 nt, Artificial Sequence
  Description of Artificial Sequence: Synthetic oligonucleotide
cagaucucacacuggugca

SEQ ID NO: 2526137 - RNA, 19 nt, Artificial Sequence
  Description of Artificial Sequence: Synthetic oligonucleotide
cucccgccagaucucacac

SEQ ID NO: 2526138 - RNA, 19 nt, Artificial Sequence
  Description of Artificial Sequence: Synthetic oligonucleotide
gacauccagcgcccgucgc

SEQ ID NO: 2526139 - RNA, 19 nt, Artificial Sequence
  Description of Artificial Sequence: Synthetic oligonucleotide
cuggugcauuagcuggacc

SEQ ID NO: 2526140 - RNA, 19 nt, Artificial Sequence
  Description of Artificial Sequence: Synthetic oligonucleotide
cucagauguagguaaucgu

SEQ ID NO: 2526141 - RNA, 19 nt, Artificial Sequence
  Description of Artificial Sequence: Synthetic oligonucleotide
gcuaacgcugcccggacca

SEQ ID NO: 2526142 - RNA, 19 nt, Artificial Sequence
  Description of Artificial Sequence: Synthetic oligonucleotide
cauccagcgcccgucgccc

SEQ ID NO: 2526143 - RNA, 19 nt, Artificial Sequence
  Description of Artificial Sequence: Synthetic oligonucleotide
caaucuugggccggaugug

SEQ ID NO: 2526144 - RNA, 19 nt, Artificial Sequence
  Description of Artificial Sequence: Synthetic oligonucleotide
ugccaaaguuaagcgcgug

SEQ ID NO: 2526145 - RNA, 19 nt, Artificial Sequence
  Description of Artificial Sequence: Synthetic oligonucleotide
aaacagguguguaccccaa

SEQ ID NO: 2526146 - RNA, 19 nt, Artificial Sequence
  Description of Artificial Sequence: Synthetic oligonucleotide
caggcgugggcuugcuggc

SEQ ID NO: 2526147 - RNA, 19 nt, Artificial Sequence
  Description of Artificial Sequence: Synthetic oligonucleotide
ugcugugugcuguccccac

SEQ ID NO: 2526148 - RNA, 19 nt, Artificial Sequence
  Description of Artificial Sequence: Synthetic oligonucleotide
gugcagagacauccagcgc

SEQ ID NO: 2526149 - RNA, 19 nt, Artificial Sequence
  Description of Artificial Sequence: Synthetic oligonucleotide
gccgccagaguacaugcug

SEQ ID NO: 2526150 - RNA, 19 nt, Artificial Sequence
  Description of Artificial Sequence: Synthetic oligonucleotide
cacaaccacccgugccugg

SEQ ID NO: 2526151 - RNA, 19 nt, Artificial Sequence
  Description of Artificial Sequence: Synthetic oligonucleotide
uggccccuuggaagcaggc

SEQ ID NO: 2526152 - RNA, 19 nt, Artificial Sequence
  Description of Artificial Sequence: Synthetic oligonucleotide
ugcccacccagaccacuac

SEQ ID NO: 2526153 - RNA, 19 nt, Artificial Sequence
  Description of Artificial Sequence: Synthetic oligonucleotide
ucucccgaaguggguuggg

SEQ ID NO: 2526154 - RNA, 19 nt, Artificial Sequence
  Description of Artificial Sequence: Synthetic oligonucleotide
caauggcuuugaugccacc

SEQ ID NO: 2526155 - RNA, 19 nt, Artificial Sequence
  Description of Artificial Sequence: Synthetic oligonucleotide
agaucucacacuggugcau

SEQ ID NO: 2526156 - RNA, 19 nt, Artificial Sequence
  Description of Artificial Sequence: Synthetic oligonucleotide
uggccagcuaacgcugccc

SEQ ID NO: 2526157 - RNA, 19 nt, Artificial Sequence
  Description of Artificial Sequence: Synthetic oligonucleotide
accagcucguuuaccuguc

SEQ ID NO: 2526158 - RNA, 19 nt, Artificial Sequence
  Description of Artificial Sequence: Synthetic oligonucleotide
gugguuguuggugcccacc

SEQ ID NO: 2526159 - RNA, 19 nt, Artificial Sequence
  Description of Artificial Sequence: Synthetic oligonucleotide
agagcucccgccagaucuc

SEQ ID NO: 2526160 - RNA, 19 nt, Artificial Sequence
  Description of Artificial Sequence: Synthetic oligonucleotide
uaacgcugcccggaccagc

SEQ ID NO: 2526161 - RNA, 19 nt, Artificial Sequence
  Description of Artificial Sequence: Synthetic oligonucleotide
ugguggcuaauggugccgu

SEQ ID NO: 2526162 - RNA, 19 nt, Artificial Sequence
  Description of Artificial Sequence: Synthetic oligonucleotide
ucgauggugcagagacauc

SEQ ID NO: 2526163 - RNA, 19 nt, Artificial Sequence
  Description of Artificial Sequence: Synthetic oligonucleotide
guggcuaauggugccguca

SEQ ID NO: 2526164 - RNA, 19 nt, Artificial Sequence
  Description of Artificial Sequence: Synthetic oligonucleotide
cugugugcuguccccacca

SEQ ID NO: 2526165 - RNA, 19 nt, Artificial Sequence
  Description of Artificial Sequence: Synthetic oligonucleotide
cccgccagaucucacacug

SEQ ID NO: 2526166 - RNA, 19 nt, Artificial Sequence
  Description of Artificial Sequence: Synthetic oligonucleotide
gaagagcucccgccagauc

SEQ ID NO: 2526167 - RNA, 19 nt, Artificial Sequence
  Description of Artificial Sequence: Synthetic oligonucleotide
ugcucggcuguguggcugu

SEQ ID NO: 2526168 - RNA, 19 nt, Artificial Sequence
  Description of Artificial Sequence: Synthetic oligonucleotide
cuugggccaggagucgaag

SEQ ID NO: 2526169 - RNA, 19 nt, Artificial Sequence
  Description of Artificial Sequence: Synthetic oligonucleotide
guacaugcugugugcuguc

SEQ ID NO: 2526170 - RNA, 19 nt, Artificial Sequence
  Description of Artificial Sequence: Synthetic oligonucleotide
acuuaggguguggucucug

SEQ ID NO: 2526171 - RNA, 19 nt, Artificial Sequence
  Description of Artificial Sequence: Synthetic oligonucleotide
caaccacccgugccugggg

SEQ ID NO: 2526172 - RNA, 19 nt, Artificial Sequence
  Description of Artificial Sequence: Synthetic oligonucleotide
cuggaccaaggaguccccg

SEQ ID NO: 2526173 - RNA, 19 nt, Artificial Sequence
  Description of Artificial Sequence: Synthetic oligonucleotide
guggccagcuaacgcugcc

SEQ ID NO: 2526174 - RNA, 19 nt, Artificial Sequence
  Description of Artificial Sequence: Synthetic oligonucleotide
agcuuguucacaaguugua

SEQ ID NO: 2526175 - RNA, 19 nt, Artificial Sequence
  Description of Artificial Sequence: Synthetic oligonucleotide
ggcgugggcuugcuggccg

SEQ ID NO: 2526176 - RNA, 19 nt, Artificial Sequence
  Description of Artificial Sequence: Synthetic oligonucleotide
gcauuagcuggaccaagga

SEQ ID NO: 2526177 - RNA, 19 nt, Artificial Sequence
  Description of Artificial Sequence: Synthetic oligonucleotide
gcgcccgucgcccugcgcg

SEQ ID NO: 2526178 - RNA, 19 nt, Artificial Sequence
  Description of Artificial Sequence: Synthetic oligonucleotide
cacuggugcauuagcugga

SEQ ID NO: 2526179 - RNA, 19 nt, Artificial Sequence
  Description of Artificial Sequence: Synthetic oligonucleotide
ccggcaaacagguguguac

SEQ ID NO: 2526180 - RNA, 19 nt, Artificial Sequence
  Description of Artificial Sequence: Synthetic oligonucleotide
ugcacaggcgugggcuugc

SEQ ID NO: 2526181 - RNA, 19 nt, Artificial Sequence
  Description of Artificial Sequence: Synthetic oligonucleotide
uuggggugcuggccccuug

SEQ ID NO: 2526182 - RNA, 19 nt, Artificial Sequence
  Description of Artificial Sequence: Synthetic oligonucleotide
cccgaaguggguuggggug

SEQ ID NO: 2526183 - RNA, 19 nt, Artificial Sequence
  Description of Artificial Sequence: Synthetic oligonucleotide
ccgucagagugcacaaagc

SEQ ID NO: 2526184 - RNA, 19 nt, Artificial Sequence
  Description of Artificial Sequence: Synthetic oligonucleotide
aggcgugggcuugcuggcc

SEQ ID NO: 2526185 - RNA, 19 nt, Artificial Sequence
  Description of Artificial Sequence: Synthetic oligonucleotide
ggccggguucucuucuccg

SEQ ID NO: 2526186 - RNA, 19 nt, Artificial Sequence
  Description of Artificial Sequence: Synthetic oligonucleotide
uguguaccccaagcggcuc

SEQ ID NO: 2526187 - RNA, 19 nt, Artificial Sequence
  Description of Artificial Sequence: Synthetic oligonucleotide
uccagcgcccgucgcccug

SEQ ID NO: 2526188 - RNA, 19 nt, Artificial Sequence
  Description of Artificial Sequence: Synthetic oligonucleotide
caaguuguacaauggcuuu

SEQ ID NO: 2526189 - RNA, 19 nt, Artificial Sequence
  Description of Artificial Sequence: Synthetic oligonucleotide
guggguuggggugcuggcc

SEQ ID NO: 2526190 - RNA, 19 nt, Artificial Sequence
  Description of Artificial Sequence: Synthetic oligonucleotide
ccaaaguuaagcgcgugca

SEQ ID NO: 2526191 - RNA, 19 nt, Artificial Sequence
  Description of Artificial Sequence: Synthetic oligonucleotide
cuaauggugccgucagagu

SEQ ID NO: 2526192 - RNA, 19 nt, Artificial Sequence
  Description of Artificial Sequence: Synthetic oligonucleotide
auggugccgucagagugca

SEQ ID NO: 2526193 - RNA, 19 nt, Artificial Sequence
  Description of Artificial Sequence: Synthetic oligonucleotide
ggaaagacacuuagggugu

SEQ ID NO: 2526194 - RNA, 19 nt, Artificial Sequence
  Description of Artificial Sequence: Synthetic oligonucleotide
accacccgugccuggggcu

SEQ ID NO: 2526195 - RNA, 19 nt, Artificial Sequence
  Description of Artificial Sequence: Synthetic oligonucleotide
ucccgccagaucucacacu

SEQ ID NO: 2526196 - RNA, 19 nt, Artificial Sequence
  Description of Artificial Sequence: Synthetic oligonucleotide
caugggaaggaaagacacu

SEQ ID NO: 2526197 - RNA, 19 nt, Artificial Sequence
  Description of Artificial Sequence: Synthetic oligonucleotide
gcaaggagugcagggcccg

SEQ ID NO: 2526198 - RNA, 19 nt, Artificial Sequence
  Description of Artificial Sequence: Synthetic oligonucleotide
gcgugcagaggagagaaga

SEQ ID NO: 2526199 - RNA, 19 nt, Artificial Sequence
  Description of Artificial Sequence: Synthetic oligonucleotide
augccaaaguuaagcgcgu

SEQ ID NO: 2526200 - RNA, 19 nt, Artificial Sequence
  Description of Artificial Sequence: Synthetic oligonucleotide
cccaccaaugccaaaguua

SEQ ID NO: 2526201 - RNA, 19 nt, Artificial Sequence
  Description of Artificial Sequence: Synthetic oligonucleotide
guguaccccaagcggcuca

SEQ ID NO: 2526202 - RNA, 19 nt, Artificial Sequence
  Description of Artificial Sequence: Synthetic oligonucleotide
ccaagcggcucagauguag

SEQ ID NO: 2526203 - RNA, 19 nt, Artificial Sequence
  Description of Artificial Sequence: Synthetic oligonucleotide
cagcuaacgcugcccggac

SEQ ID NO: 2526204 - RNA, 19 nt, Artificial Sequence
  Description of Artificial Sequence: Synthetic oligonucleotide
guguggucucugacagagg

SEQ ID NO: 2526205 - RNA, 19 nt, Artificial Sequence
  Description of Artificial Sequence: Synthetic oligonucleotide
cgaagaagcaaggagugca

SEQ ID NO: 2526206 - RNA, 19 nt, Artificial Sequence
  Description of Artificial Sequence: Synthetic oligonucleotide
cuaacgcugcccggaccag

SEQ ID NO: 2526207 - RNA, 19 nt, Artificial Sequence
  Description of Artificial Sequence: Synthetic oligonucleotide
aucuugggccggaugugcu

SEQ ID NO: 2526208 - RNA, 19 nt, Artificial Sequence
  Description of Artificial Sequence: Synthetic oligonucleotide
ggucuugggccaggagucg

SEQ ID NO: 2526209 - RNA, 19 nt, Artificial Sequence
  Description of Artificial Sequence: Synthetic oligonucleotide
cucggcuguguggcugugg

SEQ ID NO: 2526210 - RNA, 19 nt, Artificial Sequence
  Description of Artificial Sequence: Synthetic oligonucleotide
ugcccggaccagcucguuu

SEQ ID NO: 2526211 - RNA, 19 nt, Artificial Sequence
  Description of Artificial Sequence: Synthetic oligonucleotide
gccagcuaacgcugcccgg

SEQ ID NO: 2526212 - RNA, 19 nt, Artificial Sequence
  Description of Artificial Sequence: Synthetic oligonucleotide
gccggguucucuucuccgc

SEQ ID NO: 2526213 - RNA, 19 nt, Artificial Sequence
  Description of Artificial Sequence: Synthetic oligonucleotide
ccccgaugaagacaacuuc

SEQ ID NO: 2526214 - RNA, 19 nt, Artificial Sequence
  Description of Artificial Sequence: Synthetic oligonucleotide
agcgcccgucgcccugcgc

SEQ ID NO: 2526215 - RNA, 19 nt, Artificial Sequence
  Description of Artificial Sequence: Synthetic oligonucleotide
ccacgaaucgauggugcag

SEQ ID NO: 2526216 - RNA, 19 nt, Artificial Sequence
  Description of Artificial Sequence: Synthetic oligonucleotide
gcugugugcuguccccacc

SEQ ID NO: 2526217 - RNA, 19 nt, Artificial Sequence
  Description of Artificial Sequence: Synthetic oligonucleotide
cuguccgccacgaaucgau

SEQ ID NO: 2526218 - RNA, 19 nt, Artificial Sequence
  Description of Artificial Sequence: Synthetic oligonucleotide
gggguggccagcuaacgcu

SEQ ID NO: 2526219 - RNA, 19 nt, Artificial Sequence
  Description of Artificial Sequence: Synthetic oligonucleotide
agcgcgugcagaggagaga

SEQ ID NO: 2526220 - RNA, 19 nt, Artificial Sequence
  Description of Artificial Sequence: Synthetic oligonucleotide
ggguucucuucuccgcuca

SEQ ID NO: 2526221 - RNA, 19 nt, Artificial Sequence
  Description of Artificial Sequence: Synthetic oligonucleotide
cggcaaacagguguguacc

SEQ ID NO: 2526222 - RNA, 19 nt, Artificial Sequence
  Description of Artificial Sequence: Synthetic oligonucleotide
gguuguuggugcccaccca

SEQ ID NO: 2526223 - RNA, 19 nt, Artificial Sequence
  Description of Artificial Sequence: Synthetic oligonucleotide
cuggccggguucucuucuc

SEQ ID NO: 2526224 - RNA, 19 nt, Artificial Sequence
  Description of Artificial Sequence: Synthetic oligonucleotide
cccgaugaagacaacuucu

SEQ ID NO: 2526225 - RNA, 19 nt, Artificial Sequence
  Description of Artificial Sequence: Synthetic oligonucleotide
agccagggucugcaucuaa

SEQ ID NO: 2526226 - RNA, 19 nt, Artificial Sequence
  Description of Artificial Sequence: Synthetic oligonucleotide
ugucaccugcucggcugug

SEQ ID NO: 2526227 - RNA, 19 nt, Artificial Sequence
  Description of Artificial Sequence: Synthetic oligonucleotide
ggaguccccgaugaagaca

SEQ ID NO: 2526228 - RNA, 19 nt, Artificial Sequence
  Description of Artificial Sequence: Synthetic oligonucleotide
ccagggucugcaucuaaga

SEQ ID NO: 2526229 - RNA, 19 nt, Artificial Sequence
  Description of Artificial Sequence: Synthetic oligonucleotide
gugccgucagagugcacaa

SEQ ID NO: 2526230 - RNA, 19 nt, Artificial Sequence
  Description of Artificial Sequence: Synthetic oligonucleotide
gcguccugcacaggcgugg

SEQ ID NO: 2526231 - RNA, 19 nt, Artificial Sequence
  Description of Artificial Sequence: Synthetic oligonucleotide
ggugcauuagcuggaccaa

SEQ ID NO: 2526232 - RNA, 19 nt, Artificial Sequence
  Description of Artificial Sequence: Synthetic oligonucleotide
uccagccgccagaguacau

SEQ ID NO: 2526233 - RNA, 19 nt, Artificial Sequence
  Description of Artificial Sequence: Synthetic oligonucleotide
cucguuuaccugucgguuu

SEQ ID NO: 2526234 - RNA, 19 nt, Artificial Sequence
  Description of Artificial Sequence: Synthetic oligonucleotide
acgcugcccggaccagcuc

SEQ ID NO: 2526235 - RNA, 19 nt, Artificial Sequence
  Description of Artificial Sequence: Synthetic oligonucleotide
ugcuggccccuuggaagca

SEQ ID NO: 2526236 - RNA, 19 nt, Artificial Sequence
  Description of Artificial Sequence: Synthetic oligonucleotide
gccacgaaucgauggugca

SEQ ID NO: 2526237 - RNA, 19 nt, Artificial Sequence
  Description of Artificial Sequence: Synthetic oligonucleotide
ccagcucguuuaccugucg

SEQ ID NO: 2526238 - RNA, 19 nt, Artificial Sequence
  Description of Artificial Sequence: Synthetic oligonucleotide
cgccacgaaucgauggugc

SEQ ID NO: 2526239 - RNA, 19 nt, Artificial Sequence
  Description of Artificial Sequence: Synthetic oligonucleotide
ccccaagcggcucagaugu

SEQ ID NO: 2526240 - RNA, 19 nt, Artificial Sequence
  Description of Artificial Sequence: Synthetic oligonucleotide
ccgaaguggguuggggugc

SEQ ID NO: 2526241 - RNA, 19 nt, Artificial Sequence
  Description of Artificial Sequence: Synthetic oligonucleotide
guccccgaugaagacaacu

SEQ ID NO: 2526242 - RNA, 19 nt, Artificial Sequence
  Description of Artificial Sequence: Synthetic oligonucleotide
cagggcccggcaaacaggu

SEQ ID NO: 2526243 - RNA, 19 nt, Artificial Sequence
  Description of Artificial Sequence: Synthetic oligonucleotide
cugcacaggcgugggcuug

SEQ ID NO: 2526244 - RNA, 19 nt, Artificial Sequence
  Description of Artificial Sequence: Synthetic oligonucleotide
gaaguggguuggggugcug

SEQ ID NO: 2526245 - RNA, 19 nt, Artificial Sequence
  Description of Artificial Sequence: Synthetic oligonucleotide
gggcccggcaaacaggugu

SEQ ID NO: 2526246 - RNA, 19 nt, Artificial Sequence
  Description of Artificial Sequence: Synthetic oligonucleotide
gucuugggccaggagucga

SEQ ID NO: 2526247 - RNA, 19 nt, Artificial Sequence
  Description of Artificial Sequence: Synthetic oligonucleotide
cacaggcgugggcuugcug

SEQ ID NO: 2526248 - RNA, 19 nt, Artificial Sequence
  Description of Artificial Sequence: Synthetic oligonucleotide
ggaagcaggcccagcacaa

SEQ ID NO: 2526249 - RNA, 19 nt, Artificial Sequence
  Description of Artificial Sequence: Synthetic oligonucleotide
ugccgucagagugcacaaa

SEQ ID NO: 2526250 - RNA, 19 nt, Artificial Sequence
  Description of Artificial Sequence: Synthetic oligonucleotide
ccagcacaaccacccgugc

SEQ ID NO: 2526251 - RNA, 19 nt, Artificial Sequence
  Description of Artificial Sequence: Synthetic oligonucleotide
ccagccgccagaguacaug

SEQ ID NO: 2526252 - RNA, 19 nt, Artificial Sequence
  Description of Artificial Sequence: Synthetic oligonucleotide
gucgcccugcgcguccugc

SEQ ID NO: 2526253 - RNA, 19 nt, Artificial Sequence
  Description of Artificial Sequence: Synthetic oligonucleotide
aguccccgaugaagacaac

SEQ ID NO: 2526254 - RNA, 19 nt, Artificial Sequence
  Description of Artificial Sequence: Synthetic oligonucleotide
ggcucagauguagguaauc

SEQ ID NO: 2526255 - RNA, 19 nt, Artificial Sequence
  Description of Artificial Sequence: Synthetic oligonucleotide
gagcucccgccagaucuca

SEQ ID NO: 2526256 - RNA, 19 nt, Artificial Sequence
  Description of Artificial Sequence: Synthetic oligonucleotide
ggcccggcaaacaggugug

SEQ ID NO: 2526257 - RNA, 19 nt, Artificial Sequence
  Description of Artificial Sequence: Synthetic oligonucleotide
guguguaccccaagcggcu

SEQ ID NO: 2526258 - RNA, 19 nt, Artificial Sequence
  Description of Artificial Sequence: Synthetic oligonucleotide
cgcugcccggaccagcucg

SEQ ID NO: 2526259 - RNA, 19 nt, Artificial Sequence
  Description of Artificial Sequence: Synthetic oligonucleotide
cccugcgcguccugcacag

SEQ ID NO: 2526260 - RNA, 19 nt, Artificial Sequence
  Description of Artificial Sequence: Synthetic oligonucleotide
ccaggagucgaagaagcaa

SEQ ID NO: 2526261 - RNA, 19 nt, Artificial Sequence
  Description of Artificial Sequence: Synthetic oligonucleotide
gguggcuaauggugccguc

SEQ ID NO: 2526262 - RNA, 19 nt, Artificial Sequence
  Description of Artificial Sequence: Synthetic oligonucleotide
acaugucaugguggcuaau

SEQ ID NO: 2526263 - RNA, 19 nt, Artificial Sequence
  Description of Artificial Sequence: Synthetic oligonucleotide
ggucucugacagaggggug

SEQ ID NO: 2526264 - RNA, 19 nt, Artificial Sequence
  Description of Artificial Sequence: Synthetic oligonucleotide
ggcuaauggugccgucaga

SEQ ID NO: 2526265 - RNA, 19 nt, Artificial Sequence
  Description of Artificial Sequence: Synthetic oligonucleotide
ggucugcaucuaagaagug

SEQ ID NO: 2526266 - RNA, 19 nt, Artificial Sequence
  Description of Artificial Sequence: Synthetic oligonucleotide
gcgugggcuugcuggccgg

SEQ ID NO: 2526267 - RNA, 19 nt, Artificial Sequence
  Description of Artificial Sequence: Synthetic oligonucleotide
ggccggaugugcuccagcu

SEQ ID NO: 2526268 - RNA, 19 nt, Artificial Sequence
  Description of Artificial Sequence: Synthetic oligonucleotide
ccagcuaacgcugcccgga

SEQ ID NO: 2526269 - RNA, 19 nt, Artificial Sequence
  Description of Artificial Sequence: Synthetic oligonucleotide
ggaccaaggaguccccgau

SEQ ID NO: 2526270 - RNA, 19 nt, Artificial Sequence
  Description of Artificial Sequence: Synthetic oligonucleotide
agacaacuucugguuccuu

SEQ ID NO: 2526271 - RNA, 19 nt, Artificial Sequence
  Description of Artificial Sequence: Synthetic oligonucleotide
cugguuccuugucuuugcu

SEQ ID NO: 2526272 - RNA, 19 nt, Artificial Sequence
  Description of Artificial Sequence: Synthetic oligonucleotide
gggccggaugugcuccagc

SEQ ID NO: 2526273 - RNA, 19 nt, Artificial Sequence
  Description of Artificial Sequence: Synthetic oligonucleotide
gcgcgugcagaggagagaa

SEQ ID NO: 2526274 - RNA, 19 nt, Artificial Sequence
  Description of Artificial Sequence: Synthetic oligonucleotide
agccgccagaguacaugcu

SEQ ID NO: 2526275 - RNA, 19 nt, Artificial Sequence
  Description of Artificial Sequence: Synthetic oligonucleotide
gccggaugugcuccagcuc

SEQ ID NO: 2526276 - RNA, 19 nt, Artificial Sequence
  Description of Artificial Sequence: Synthetic oligonucleotide
cuucuccgcucauccucaa

SEQ ID NO: 2526277 - RNA, 19 nt, Artificial Sequence
  Description of Artificial Sequence: Synthetic oligonucleotide
cggaugugcuccagcuccc

SEQ ID NO: 2526278 - RNA, 19 nt, Artificial Sequence
  Description of Artificial Sequence: Synthetic oligonucleotide
cgccagaguacaugcugug

SEQ ID NO: 2526279 - RNA, 19 nt, Artificial Sequence
  Description of Artificial Sequence: Synthetic oligonucleotide
uggugccgucagagugcac

SEQ ID NO: 2526280 - RNA, 19 nt, Artificial Sequence
  Description of Artificial Sequence: Synthetic oligonucleotide
gccaggagucgaagaagca

SEQ ID NO: 2526281 - RNA, 19 nt, Artificial Sequence
  Description of Artificial Sequence: Synthetic oligonucleotide
ggguguggucucugacaga

SEQ ID NO: 2526282 - RNA, 19 nt, Artificial Sequence
  Description of Artificial Sequence: Synthetic oligonucleotide
gugcccacccagaccacua

SEQ ID NO: 2526283 - RNA, 19 nt, Artificial Sequence
  Description of Artificial Sequence: Synthetic oligonucleotide
ccgccacgaaucgauggug

SEQ ID NO: 2526284 - RNA, 19 nt, Artificial Sequence
  Description of Artificial Sequence: Synthetic oligonucleotide
ggggugcuggccccuugga

SEQ ID NO: 2526285 - RNA, 19 nt, Artificial Sequence
  Description of Artificial Sequence: Synthetic oligonucleotide
agggcccggcaaacaggug

SEQ ID NO: 2526286 - RNA, 19 nt, Artificial Sequence
  Description of Artificial Sequence: Synthetic oligonucleotide
cccggaccagcucguuuac

SEQ ID NO: 2526287 - RNA, 19 nt, Artificial Sequence
  Description of Artificial Sequence: Synthetic oligonucleotide
gcucguuuaccugucgguu

SEQ ID NO: 2526288 - RNA, 19 nt, Artificial Sequence
  Description of Artificial Sequence: Synthetic oligonucleotide
gccagaguacaugcugugu

SEQ ID NO: 2526289 - RNA, 19 nt, Artificial Sequence
  Description of Artificial Sequence: Synthetic oligonucleotide
cggguucucuucuccgcuc

SEQ ID NO: 2526290 - RNA, 19 nt, Artificial Sequence
  Description of Artificial Sequence: Synthetic oligonucleotide
gcccagcacaaccacccgu

SEQ ID NO: 2526291 - RNA, 19 nt, Artificial Sequence
  Description of Artificial Sequence: Synthetic oligonucleotide
ggcccuggucuugggccag

SEQ ID NO: 2526292 - RNA, 19 nt, Artificial Sequence
  Description of Artificial Sequence: Synthetic oligonucleotide
cguccugcacaggcguggg

SEQ ID NO: 2526293 - RNA, 19 nt, Artificial Sequence
  Description of Artificial Sequence: Synthetic oligonucleotide
gggugccuuggcccugguc

SEQ ID NO: 2526294 - RNA, 19 nt, Artificial Sequence
  Description of Artificial Sequence: Synthetic oligonucleotide
gcccugcgcguccugcaca

SEQ ID NO: 2526295 - RNA, 19 nt, Artificial Sequence
  Description of Artificial Sequence: Synthetic oligonucleotide
ccgccagaguacaugcugu

SEQ ID NO: 2526296 - RNA, 19 nt, Artificial Sequence
  Description of Artificial Sequence: Synthetic oligonucleotide
cccuuggaagcaggcccag

SEQ ID NO: 2526297 - RNA, 19 nt, Artificial Sequence
  Description of Artificial Sequence: Synthetic oligonucleotide
cgcgugcagaggagagaag

SEQ ID NO: 2526298 - RNA, 19 nt, Artificial Sequence
  Description of Artificial Sequence: Synthetic oligonucleotide
cacuuaggguguggucucu

SEQ ID NO: 2526299 - RNA, 19 nt, Artificial Sequence
  Description of Artificial Sequence: Synthetic oligonucleotide
ccaaggaguccccgaugaa

SEQ ID NO: 2526300 - RNA, 19 nt, Artificial Sequence
  Description of Artificial Sequence: Synthetic oligonucleotide
gguucucuucuccgcucau

SEQ ID NO: 2526301 - RNA, 19 nt, Artificial Sequence
  Description of Artificial Sequence: Synthetic oligonucleotide
cgaaucgauggugcagaga

SEQ ID NO: 2526302 - RNA, 19 nt, Artificial Sequence
  Description of Artificial Sequence: Synthetic oligonucleotide
cgccagaucucacacuggu

SEQ ID NO: 2526303 - RNA, 19 nt, Artificial Sequence
  Description of Artificial Sequence: Synthetic oligonucleotide
gcccuggucuugggccagg

SEQ ID NO: 2526304 - RNA, 19 nt, Artificial Sequence
  Description of Artificial Sequence: Synthetic oligonucleotide
cuacaaucuugggccggau

SEQ ID NO: 2526305 - RNA, 19 nt, Artificial Sequence
  Description of Artificial Sequence: Synthetic oligonucleotide
cgugccuggggcugcagcu

SEQ ID NO: 2526306 - RNA, 19 nt, Artificial Sequence
  Description of Artificial Sequence: Synthetic oligonucleotide
cucugacagaggggugccu

SEQ ID NO: 2526307 - RNA, 19 nt, Artificial Sequence
  Description of Artificial Sequence: Synthetic oligonucleotide
cgugggcuugcuggccggg

SEQ ID NO: 2526308 - RNA, 19 nt, Artificial Sequence
  Description of Artificial Sequence: Synthetic oligonucleotide
ccugcgcguccugcacagg

SEQ ID NO: 2526309 - RNA, 19 nt, Artificial Sequence
  Description of Artificial Sequence: Synthetic oligonucleotide
ccggguucucuucuccgcu

SEQ ID NO: 2526310 - RNA, 19 nt, Artificial Sequence
  Description of Artificial Sequence: Synthetic oligonucleotide
ccacccagaccacuacaau

SEQ ID NO: 2526311 - RNA, 19 nt, Artificial Sequence
  Description of Artificial Sequence: Synthetic oligonucleotide
gcucggcuguguggcugug

SEQ ID NO: 2526312 - RNA, 19 nt, Artificial Sequence
  Description of Artificial Sequence: Synthetic oligonucleotide
gugccuggggcugcagcuu

SEQ ID NO: 2526313 - RNA, 19 nt, Artificial Sequence
  Description of Artificial Sequence: Synthetic oligonucleotide
cccggcaaacaggugugua

SEQ ID NO: 2526314 - RNA, 19 nt, Artificial Sequence
  Description of Artificial Sequence: Synthetic oligonucleotide
guuggggugcuggccccuu

SEQ ID NO: 2526315 - RNA, 19 nt, Artificial Sequence
  Description of Artificial Sequence: Synthetic oligonucleotide
gcugcccggaccagcucgu

SEQ ID NO: 2526316 - RNA, 19 nt, Artificial Sequence
  Description of Artificial Sequence: Synthetic oligonucleotide
ccccaccaaugccaaaguu

SEQ ID NO: 2526317 - RNA, 19 nt, Artificial Sequence
  Description of Artificial Sequence: Synthetic oligonucleotide
ccugcucggcuguguggcu

SEQ ID NO: 2526318 - RNA, 19 nt, Artificial Sequence
  Description of Artificial Sequence: Synthetic oligonucleotide
cccaagcggcucagaugua

SEQ ID NO: 2526319 - RNA, 19 nt, Artificial Sequence
  Description of Artificial Sequence: Synthetic oligonucleotide
gcccgucgcccugcgcguc

SEQ ID NO: 2526320 - RNA, 19 nt, Artificial Sequence
  Description of Artificial Sequence: Synthetic oligonucleotide
gcccggcaaacaggugugu

SEQ ID NO: 2526321 - RNA, 19 nt, Artificial Sequence
  Description of Artificial Sequence: Synthetic oligonucleotide
gcacaggcgugggcuugcu

SEQ ID NO: 2526322 - RNA, 19 nt, Artificial Sequence
  Description of Artificial Sequence: Synthetic oligonucleotide
cgaaguggguuggggugcu

SEQ ID NO: 2526323 - RNA, 19 nt, Artificial Sequence
  Description of Artificial Sequence: Synthetic oligonucleotide
cggcucagauguagguaau

SEQ ID NO: 2526324 - RNA, 19 nt, Artificial Sequence
  Description of Artificial Sequence: Synthetic oligonucleotide
cugcccggaccagcucguu

SEQ ID NO: 2526325 - RNA, 19 nt, Artificial Sequence
  Description of Artificial Sequence: Synthetic oligonucleotide
cgcccgucgcccugcgcgu

SEQ ID NO: 2526326 - RNA, 19 nt, Artificial Sequence
  Description of Artificial Sequence: Synthetic oligonucleotide
uauaaaaucuuccagugcg

SEQ ID NO: 2526327 - RNA, 19 nt, Artificial Sequence
  Description of Artificial Sequence: Synthetic oligonucleotide
acauuauaaauuuauauuc

SEQ ID NO: 2526328 - RNA, 19 nt, Artificial Sequence
  Description of Artificial Sequence: Synthetic oligonucleotide
aaaauucucuuauaaaauc

SEQ ID NO: 2526329 - RNA, 19 nt, Artificial Sequence
  Description of Artificial Sequence: Synthetic oligonucleotide
aaaacuuucccaaagagaa

SEQ ID NO: 2526330 - RNA, 19 nt, Artificial Sequence
  Description of Artificial Sequence: Synthetic oligonucleotide
aacuuucccaaagagaaac

SEQ ID NO: 2526331 - RNA, 19 nt, Artificial Sequence
  Description of Artificial Sequence: Synthetic oligonucleotide
uccugaagaacccaagugg

SEQ ID NO: 2526332 - RNA, 19 nt, Artificial Sequence
  Description of Artificial Sequence: Synthetic oligonucleotide
uucucuuauaaaaucuucc

SEQ ID NO: 2526333 - RNA, 19 nt, Artificial Sequence
  Description of Artificial Sequence: Synthetic oligonucleotide
uccauguucacggacaugg

SEQ ID NO: 2526334 - RNA, 19 nt, Artificial Sequence
  Description of Artificial Sequence: Synthetic oligonucleotide
uacauuauaaauuuauauu

SEQ ID NO: 2526335 - RNA, 19 nt, Artificial Sequence
  Description of Artificial Sequence: Synthetic oligonucleotide
uauucauauauauuauagu

SEQ ID NO: 2526336 - RNA, 19 nt, Artificial Sequence
  Description of Artificial Sequence: Synthetic oligonucleotide
uucauauauauuauaguua

SEQ ID NO: 2526337 - RNA, 19 nt, Artificial Sequence
  Description of Artificial Sequence: Synthetic oligonucleotide
uccagugcgauaucgaacc

SEQ ID NO: 2526338 - RNA, 19 nt, Artificial Sequence
  Description of Artificial Sequence: Synthetic oligonucleotide
ucucuuauaaaaucuucca

SEQ ID NO: 2526339 - RNA, 19 nt, Artificial Sequence
  Description of Artificial Sequence: Synthetic oligonucleotide
aaaucuuccagugcgauau

SEQ ID NO: 2526340 - RNA, 19 nt, Artificial Sequence
  Description of Artificial Sequence: Synthetic oligonucleotide
aaauucucuuauaaaaucu

SEQ ID NO: 2526341 - RNA, 19 nt, Artificial Sequence
  Description of Artificial Sequence: Synthetic oligonucleotide
auauuauaguuauauauua

SEQ ID NO: 2526342 - RNA, 19 nt, Artificial Sequence
  Description of Artificial Sequence: Synthetic oligonucleotide
gagggugggauccagggcg

SEQ ID NO: 2526343 - RNA, 19 nt, Artificial Sequence
  Description of Artificial Sequence: Synthetic oligonucleotide
uugaucaucaccuggugcu

SEQ ID NO: 2526344 - RNA, 19 nt, Artificial Sequence
  Description of Artificial Sequence: Synthetic oligonucleotide
acccaaguggcucaggacg

SEQ ID NO: 2526345 - RNA, 19 nt, Artificial Sequence
  Description of Artificial Sequence: Synthetic oligonucleotide
agcucguccauguucacgg

SEQ ID NO: 2526346 - RNA, 19 nt, Artificial Sequence
  Description of Artificial Sequence: Synthetic oligonucleotide
aacugguugaucaucaccu

SEQ ID NO: 2526347 - RNA, 19 nt, Artificial Sequence
  Description of Artificial Sequence: Synthetic oligonucleotide
aagagaaacuccugaagaa

SEQ ID NO: 2526348 - RNA, 19 nt, Artificial Sequence
  Description of Artificial Sequence: Synthetic oligonucleotide
agagaaacuccugaagaac

SEQ ID NO: 2526349 - RNA, 19 nt, Artificial Sequence
  Description of Artificial Sequence: Synthetic oligonucleotide
acaacccuggacugcaccc

SEQ ID NO: 2526350 - RNA, 19 nt, Artificial Sequence
  Description of Artificial Sequence: Synthetic oligonucleotide
agcacgaacugguugauca

SEQ ID NO: 2526351 - RNA, 19 nt, Artificial Sequence
  Description of Artificial Sequence: Synthetic oligonucleotide
cauggcuagugcaucaggg

SEQ ID NO: 2526352 - RNA, 19 nt, Artificial Sequence
  Description of Artificial Sequence: Synthetic oligonucleotide
auguucacggacauggcgc

SEQ ID NO: 2526353 - RNA, 19 nt, Artificial Sequence
  Description of Artificial Sequence: Synthetic oligonucleotide
acagccagccgucagcacg

SEQ ID NO: 2526354 - RNA, 19 nt, Artificial Sequence
  Description of Artificial Sequence: Synthetic oligonucleotide
aacccaaguggcucaggac

SEQ ID NO: 2526355 - RNA, 19 nt, Artificial Sequence
  Description of Artificial Sequence: Synthetic oligonucleotide
agugcaucagggaaguugg

SEQ ID NO: 2526356 - RNA, 19 nt, Artificial Sequence
  Description of Artificial Sequence: Synthetic oligonucleotide
agugcacaucaucuggugg

SEQ ID NO: 2526357 - RNA, 19 nt, Artificial Sequence
  Description of Artificial Sequence: Synthetic oligonucleotide
aggggcugaaguuugcagg

SEQ ID NO: 2526358 - RNA, 19 nt, Artificial Sequence
  Description of Artificial Sequence: Synthetic oligonucleotide
gauccagggcgucuggugg

SEQ ID NO: 2526359 - RNA, 19 nt, Artificial Sequence
  Description of Artificial Sequence: Synthetic oligonucleotide
gaacugguugaucaucacc

SEQ ID NO: 2526360 - RNA, 19 nt, Artificial Sequence
  Description of Artificial Sequence: Synthetic oligonucleotide
acugcacccacuccagccc

SEQ ID NO: 2526361 - RNA, 19 nt, Artificial Sequence
  Description of Artificial Sequence: Synthetic oligonucleotide
cauguucacggacauggcg

SEQ ID NO: 2526362 - RNA, 19 nt, Artificial Sequence
  Description of Artificial Sequence: Synthetic oligonucleotide
agaaacuccugaagaaccc

SEQ ID NO: 2526363 - RNA, 19 nt, Artificial Sequence
  Description of Artificial Sequence: Synthetic oligonucleotide
ggggaugcggcccagaagg

SEQ ID NO: 2526364 - RNA, 19 nt, Artificial Sequence
  Description of Artificial Sequence: Synthetic oligonucleotide
aggacguuuacugcgcccc

SEQ ID NO: 2526365 - RNA, 19 nt, Artificial Sequence
  Description of Artificial Sequence: Synthetic oligonucleotide
uagugcaucagggaaguug

SEQ ID NO: 2526366 - RNA, 19 nt, Artificial Sequence
  Description of Artificial Sequence: Synthetic oligonucleotide
agaggcucgaagcuuggag

SEQ ID NO: 2526367 - RNA, 19 nt, Artificial Sequence
  Description of Artificial Sequence: Synthetic oligonucleotide
ucaucucuggccauccacu

SEQ ID NO: 2526368 - RNA, 19 nt, Artificial Sequence
  Description of Artificial Sequence: Synthetic oligonucleotide
guugaucaucaccuggugc

SEQ ID NO: 2526369 - RNA, 19 nt, Artificial Sequence
  Description of Artificial Sequence: Synthetic oligonucleotide
uuggcgggagugcacauca

SEQ ID NO: 2526370 - RNA, 19 nt, Artificial Sequence
  Description of Artificial Sequence: Synthetic oligonucleotide
ucgcgcauacauuauaaau

SEQ ID NO: 2526371 - RNA, 19 nt, Artificial Sequence
  Description of Artificial Sequence: Synthetic oligonucleotide
ucguccauguucacggaca

SEQ ID NO: 2526372 - RNA, 19 nt, Artificial Sequence
  Description of Artificial Sequence: Synthetic oligonucleotide
uuggagaacauggcuagug

SEQ ID NO: 2526373 - RNA, 19 nt, Artificial Sequence
  Description of Artificial Sequence: Synthetic oligonucleotide
cauccagucucaucucugg

SEQ ID NO: 2526374 - RNA, 19 nt, Artificial Sequence
  Description of Artificial Sequence: Synthetic oligonucleotide
gacugcacccacuccagcc

SEQ ID NO: 2526375 - RNA, 19 nt, Artificial Sequence
  Description of Artificial Sequence: Synthetic oligonucleotide
uggucggccgcacagccag

SEQ ID NO: 2526376 - RNA, 19 nt, Artificial Sequence
  Description of Artificial Sequence: Synthetic oligonucleotide
ugaagaacccaaguggcuc

SEQ ID NO: 2526377 - RNA, 19 nt, Artificial Sequence
  Description of Artificial Sequence: Synthetic oligonucleotide
aacccuggacugcacccac

SEQ ID NO: 2526378 - RNA, 19 nt, Artificial Sequence
  Description of Artificial Sequence: Synthetic oligonucleotide
aaaaucuuccagugcgaua

SEQ ID NO: 2526379 - RNA, 19 nt, Artificial Sequence
  Description of Artificial Sequence: Synthetic oligonucleotide
agugccauccagucucauc

SEQ ID NO: 2526380 - RNA, 19 nt, Artificial Sequence
  Description of Artificial Sequence: Synthetic oligonucleotide
agcugcuucgccuggucgg

SEQ ID NO: 2526381 - RNA, 19 nt, Artificial Sequence
  Description of Artificial Sequence: Synthetic oligonucleotide
ucucgaacugccagugggc

SEQ ID NO: 2526382 - RNA, 19 nt, Artificial Sequence
  Description of Artificial Sequence: Synthetic oligonucleotide
cuugagcucguccauguuc

SEQ ID NO: 2526383 - RNA, 19 nt, Artificial Sequence
  Description of Artificial Sequence: Synthetic oligonucleotide
uggugcuugagcucgucca

SEQ ID NO: 2526384 - RNA, 19 nt, Artificial Sequence
  Description of Artificial Sequence: Synthetic oligonucleotide
uuccagugcgauaucgaac

SEQ ID NO: 2526385 - RNA, 19 nt, Artificial Sequence
  Description of Artificial Sequence: Synthetic oligonucleotide
aguggcucaggacguuuac

SEQ ID NO: 2526386 - RNA, 19 nt, Artificial Sequence
  Description of Artificial Sequence: Synthetic oligonucleotide
aaucuuccagugcgauauc

SEQ ID NO: 2526387 - RNA, 19 nt, Artificial Sequence
  Description of Artificial Sequence: Synthetic oligonucleotide
acauggcuagugcaucagg

SEQ ID NO: 2526388 - RNA, 19 nt, Artificial Sequence
  Description of Artificial Sequence: Synthetic oligonucleotide
cucagaggcucgaagcuug

SEQ ID NO: 2526389 - RNA, 19 nt, Artificial Sequence
  Description of Artificial Sequence: Synthetic oligonucleotide
gucagcacgaacugguuga

SEQ ID NO: 2526390 - RNA, 19 nt, Artificial Sequence
  Description of Artificial Sequence: Synthetic oligonucleotide
aacauggcuagugcaucag

SEQ ID NO: 2526391 - RNA, 19 nt, Artificial Sequence
  Description of Artificial Sequence: Synthetic oligonucleotide
ccugaagaacccaaguggc

SEQ ID NO: 2526392 - RNA, 19 nt, Artificial Sequence
  Description of Artificial Sequence: Synthetic oligonucleotide
gcucaggacguuuacugcg

SEQ ID NO: 2526393 - RNA, 19 nt, Artificial Sequence
  Description of Artificial Sequence: Synthetic oligonucleotide
ucgaacugccagugggccg

SEQ ID NO: 2526394 - RNA, 19 nt, Artificial Sequence
  Description of Artificial Sequence: Synthetic oligonucleotide
uggacugcacccacuccag

SEQ ID NO: 2526395 - RNA, 19 nt, Artificial Sequence
  Description of Artificial Sequence: Synthetic oligonucleotide
gggagugcacaucaucugg

SEQ ID NO: 2526396 - RNA, 19 nt, Artificial Sequence
  Description of Artificial Sequence: Synthetic oligonucleotide
cucaggacguuuacugcgc

SEQ ID NO: 2526397 - RNA, 19 nt, Artificial Sequence
  Description of Artificial Sequence: Synthetic oligonucleotide
gauguuggucuccuggaaa

SEQ ID NO: 2526398 - RNA, 19 nt, Artificial Sequence
  Description of Artificial Sequence: Synthetic oligonucleotide
uaaaaucuuccagugcgau

SEQ ID NO: 2526399 - RNA, 19 nt, Artificial Sequence
  Description of Artificial Sequence: Synthetic oligonucleotide
gaugcggcccagaaggggc

SEQ ID NO: 2526400 - RNA, 19 nt, Artificial Sequence
  Description of Artificial Sequence: Synthetic oligonucleotide
auguuggucuccuggaaaa

SEQ ID NO: 2526401 - RNA, 19 nt, Artificial Sequence
  Description of Artificial Sequence: Synthetic oligonucleotide
ucccaaagagaaacuccug

SEQ ID NO: 2526402 - RNA, 19 nt, Artificial Sequence
  Description of Artificial Sequence: Synthetic oligonucleotide
ucagaggcucgaagcuugg

SEQ ID NO: 2526403 - RNA, 19 nt, Artificial Sequence
  Description of Artificial Sequence: Synthetic oligonucleotide
gcuuggagaacauggcuag

SEQ ID NO: 2526404 - RNA, 19 nt, Artificial Sequence
  Description of Artificial Sequence: Synthetic oligonucleotide
gaacccaaguggcucagga

SEQ ID NO: 2526405 - RNA, 19 nt, Artificial Sequence
  Description of Artificial Sequence: Synthetic oligonucleotide
ggggcugaaguuugcaggg

SEQ ID NO: 2526406 - RNA, 19 nt, Artificial Sequence
  Description of Artificial Sequence: Synthetic oligonucleotide
gaacauggcuagugcauca

SEQ ID NO: 2526407 - RNA, 19 nt, Artificial Sequence
  Description of Artificial Sequence: Synthetic oligonucleotide
ucaggacguuuacugcgcc

SEQ ID NO: 2526408 - RNA, 19 nt, Artificial Sequence
  Description of Artificial Sequence: Synthetic oligonucleotide
cucaucucuggccauccac

SEQ ID NO: 2526409 - RNA, 19 nt, Artificial Sequence
  Description of Artificial Sequence: Synthetic oligonucleotide
cagaaggggcugaaguuug

SEQ ID NO: 2526410 - RNA, 19 nt, Artificial Sequence
  Description of Artificial Sequence: Synthetic oligonucleotide
ugagggcugucucgaacug

SEQ ID NO: 2526411 - RNA, 19 nt, Artificial Sequence
  Description of Artificial Sequence: Synthetic oligonucleotide
ugcuucgccuggucggccg

SEQ ID NO: 2526412 - RNA, 19 nt, Artificial Sequence
  Description of Artificial Sequence: Synthetic oligonucleotide
uggggaugcggcccagaag

SEQ ID NO: 2526413 - RNA, 19 nt, Artificial Sequence
  Description of Artificial Sequence: Synthetic oligonucleotide
cuggccauccacugcugcc

SEQ ID NO: 2526414 - RNA, 19 nt, Artificial Sequence
  Description of Artificial Sequence: Synthetic oligonucleotide
caccuggugcuugagcucg

SEQ ID NO: 2526415 - RNA, 19 nt, Artificial Sequence
  Description of Artificial Sequence: Synthetic oligonucleotide
gagcucguccauguucacg

SEQ ID NO: 2526416 - RNA, 19 nt, Artificial Sequence
  Description of Artificial Sequence: Synthetic oligonucleotide
caucucuggccauccacug

SEQ ID NO: 2526417 - RNA, 19 nt, Artificial Sequence
  Description of Artificial Sequence: Synthetic oligonucleotide
cuguugcuguucugcaggc

SEQ ID NO: 2526418 - RNA, 19 nt, Artificial Sequence
  Description of Artificial Sequence: Synthetic oligonucleotide
cacaacccuggacugcacc

SEQ ID NO: 2526419 - RNA, 19 nt, Artificial Sequence
  Description of Artificial Sequence: Synthetic oligonucleotide
ugcacaucaucugguggug

SEQ ID NO: 2526420 - RNA, 19 nt, Artificial Sequence
  Description of Artificial Sequence: Synthetic oligonucleotide
auccacugcugccauggcu

SEQ ID NO: 2526421 - RNA, 19 nt, Artificial Sequence
  Description of Artificial Sequence: Synthetic oligonucleotide
uguccccacaacccuggac

SEQ ID NO: 2526422 - RNA, 19 nt, Artificial Sequence
  Description of Artificial Sequence: Synthetic oligonucleotide
agaaggggcugaaguuugc

SEQ ID NO: 2526423 - RNA, 19 nt, Artificial Sequence
  Description of Artificial Sequence: Synthetic oligonucleotide
guggaggcgauggaaggag

SEQ ID NO: 2526424 - RNA, 19 nt, Artificial Sequence
  Description of Artificial Sequence: Synthetic oligonucleotide
agucucaucucuggccauc

SEQ ID NO: 2526425 - RNA, 19 nt, Artificial Sequence
  Description of Artificial Sequence: Synthetic oligonucleotide
uguaggggauguuggucuc

SEQ ID NO: 2526426 - RNA, 19 nt, Artificial Sequence
  Description of Artificial Sequence: Synthetic oligonucleotide
aggcucgaagcuuggagaa

SEQ ID NO: 2526427 - RNA, 19 nt, Artificial Sequence
  Description of Artificial Sequence: Synthetic oligonucleotide
acgaacugguugaucauca

SEQ ID NO: 2526428 - RNA, 19 nt, Artificial Sequence
  Description of Artificial Sequence: Synthetic oligonucleotide
cagugcgauaucgaacccc

SEQ ID NO: 2526429 - RNA, 19 nt, Artificial Sequence
  Description of Artificial Sequence: Synthetic oligonucleotide
cuuccagugcgauaucgaa

SEQ ID NO: 2526430 - RNA, 19 nt, Artificial Sequence
  Description of Artificial Sequence: Synthetic oligonucleotide
ucgaagcuuggagaacaug

SEQ ID NO: 2526431 - RNA, 19 nt, Artificial Sequence
  Description of Artificial Sequence: Synthetic oligonucleotide
gugugcaggccccacucgc

SEQ ID NO: 2526432 - RNA, 19 nt, Artificial Sequence
  Description of Artificial Sequence: Synthetic oligonucleotide
caggacguuuacugcgccc

SEQ ID NO: 2526433 - RNA, 19 nt, Artificial Sequence
  Description of Artificial Sequence: Synthetic oligonucleotide
uccccacaacccuggacug

SEQ ID NO: 2526434 - RNA, 19 nt, Artificial Sequence
  Description of Artificial Sequence: Synthetic oligonucleotide
gguggcagggguguuggcg

SEQ ID NO: 2526435 - RNA, 19 nt, Artificial Sequence
  Description of Artificial Sequence: Synthetic oligonucleotide
cucguccauguucacggac

SEQ ID NO: 2526436 - RNA, 19 nt, Artificial Sequence
  Description of Artificial Sequence: Synthetic oligonucleotide
ggcugucucgaacugccag

SEQ ID NO: 2526437 - RNA, 19 nt, Artificial Sequence
  Description of Artificial Sequence: Synthetic oligonucleotide
cuggugcuugagcucgucc

SEQ ID NO: 2526438 - RNA, 19 nt, Artificial Sequence
  Description of Artificial Sequence: Synthetic oligonucleotide
uguugcuguucugcaggcc

SEQ ID NO: 2526439 - RNA, 19 nt, Artificial Sequence
  Description of Artificial Sequence: Synthetic oligonucleotide
ucucaucucuggccaucca

SEQ ID NO: 2526440 - RNA, 19 nt, Artificial Sequence
  Description of Artificial Sequence: Synthetic oligonucleotide
gcucuguguccccacaacc

SEQ ID NO: 2526441 - RNA, 19 nt, Artificial Sequence
  Description of Artificial Sequence: Synthetic oligonucleotide
ucaccuggugcuugagcuc

SEQ ID NO: 2526442 - RNA, 19 nt, Artificial Sequence
  Description of Artificial Sequence: Synthetic oligonucleotide
cccagugccauccagucuc

SEQ ID NO: 2526443 - RNA, 19 nt, Artificial Sequence
  Description of Artificial Sequence: Synthetic oligonucleotide
uggaggcgauggaaggagu

SEQ ID NO: 2526444 - RNA, 19 nt, Artificial Sequence
  Description of Artificial Sequence: Synthetic oligonucleotide
uggcuuucugcugggugcc

SEQ ID NO: 2526445 - RNA, 19 nt, Artificial Sequence
  Description of Artificial Sequence: Synthetic oligonucleotide
agggguguuggcgggagug

SEQ ID NO: 2526446 - RNA, 19 nt, Artificial Sequence
  Description of Artificial Sequence: Synthetic oligonucleotide
cuguguccccacaacccug

SEQ ID NO: 2526447 - RNA, 19 nt, Artificial Sequence
  Description of Artificial Sequence: Synthetic oligonucleotide
ggcgcugagggcugucucg

SEQ ID NO: 2526448 - RNA, 19 nt, Artificial Sequence
  Description of Artificial Sequence: Synthetic oligonucleotide
cuguaggggauguuggucu

SEQ ID NO: 2526449 - RNA, 19 nt, Artificial Sequence
  Description of Artificial Sequence: Synthetic oligonucleotide
acugccagugggccgccug

SEQ ID NO: 2526450 - RNA, 19 nt, Artificial Sequence
  Description of Artificial Sequence: Synthetic oligonucleotide
ggcucaggacguuuacugc

SEQ ID NO: 2526451 - RNA, 19 nt, Artificial Sequence
  Description of Artificial Sequence: Synthetic oligonucleotide
cacgaacugguugaucauc

SEQ ID NO: 2526452 - RNA, 19 nt, Artificial Sequence
  Description of Artificial Sequence: Synthetic oligonucleotide
acuuucccaaagagaaacu

SEQ ID NO: 2526453 - RNA, 19 nt, Artificial Sequence
  Description of Artificial Sequence: Synthetic oligonucleotide
ucggccgcacagccagccg

SEQ ID NO: 2526454 - RNA, 19 nt, Artificial Sequence
  Description of Artificial Sequence: Synthetic oligonucleotide
gccacagccgucauggggc

SEQ ID NO: 2526455 - RNA, 19 nt, Artificial Sequence
  Description of Artificial Sequence: Synthetic oligonucleotide
ggcuagugcaucagggaag

SEQ ID NO: 2526456 - RNA, 19 nt, Artificial Sequence
  Description of Artificial Sequence: Synthetic oligonucleotide
acucgcgcauacauuauaa

SEQ ID NO: 2526457 - RNA, 19 nt, Artificial Sequence
  Description of Artificial Sequence: Synthetic oligonucleotide
cagggcgucugguggcugg

SEQ ID NO: 2526458 - RNA, 19 nt, Artificial Sequence
  Description of Artificial Sequence: Synthetic oligonucleotide
ugcacccacuccagcccag

SEQ ID NO: 2526459 - RNA, 19 nt, Artificial Sequence
  Description of Artificial Sequence: Synthetic oligonucleotide
uaggggauguuggucuccu

SEQ ID NO: 2526460 - RNA, 19 nt, Artificial Sequence
  Description of Artificial Sequence: Synthetic oligonucleotide
ggggaagagggugggaucc

SEQ ID NO: 2526461 - RNA, 19 nt, Artificial Sequence
  Description of Artificial Sequence: Synthetic oligonucleotide
gccacgugggcugugggcg

SEQ ID NO: 2526462 - RNA, 19 nt, Artificial Sequence
  Description of Artificial Sequence: Synthetic oligonucleotide
acagccgucauggggcugu

SEQ ID NO: 2526463 - RNA, 19 nt, Artificial Sequence
  Description of Artificial Sequence: Synthetic oligonucleotide
gagggcugucucgaacugc

SEQ ID NO: 2526464 - RNA, 19 nt, Artificial Sequence
  Description of Artificial Sequence: Synthetic oligonucleotide
gagaacauggcuagugcau

SEQ ID NO: 2526465 - RNA, 19 nt, Artificial Sequence
  Description of Artificial Sequence: Synthetic oligonucleotide
gucucaucucuggccaucc

SEQ ID NO: 2526466 - RNA, 19 nt, Artificial Sequence
  Description of Artificial Sequence: Synthetic oligonucleotide
gcccucagaggcucgaagc

SEQ ID NO: 2526467 - RNA, 19 nt, Artificial Sequence
  Description of Artificial Sequence: Synthetic oligonucleotide
ggauccagggcgucuggug

SEQ ID NO: 2526468 - RNA, 19 nt, Artificial Sequence
  Description of Artificial Sequence: Synthetic oligonucleotide
cccaaagagaaacuccuga

SEQ ID NO: 2526469 - RNA, 19 nt, Artificial Sequence
  Description of Artificial Sequence: Synthetic oligonucleotide
aaggcgcugagggcugucu

SEQ ID NO: 2526470 - RNA, 19 nt, Artificial Sequence
  Description of Artificial Sequence: Synthetic oligonucleotide
gcgucugguggcugggugg

SEQ ID NO: 2526471 - RNA, 19 nt, Artificial Sequence
  Description of Artificial Sequence: Synthetic oligonucleotide
agccgucagcacgaacugg

SEQ ID NO: 2526472 - RNA, 19 nt, Artificial Sequence
  Description of Artificial Sequence: Synthetic oligonucleotide
aaaaggcgcugagggcugu

SEQ ID NO: 2526473 - RNA, 19 nt, Artificial Sequence
  Description of Artificial Sequence: Synthetic oligonucleotide
cugccagugggccgccugc

SEQ ID NO: 2526474 - RNA, 19 nt, Artificial Sequence
  Description of Artificial Sequence: Synthetic oligonucleotide
ugaucaucaccuggugcuu

SEQ ID NO: 2526475 - RNA, 19 nt, Artificial Sequence
  Description of Artificial Sequence: Synthetic oligonucleotide
guaggggauguuggucucc

SEQ ID NO: 2526476 - RNA, 19 nt, Artificial Sequence
  Description of Artificial Sequence: Synthetic oligonucleotide
ggaugcggcccagaagggg

SEQ ID NO: 2526477 - RNA, 19 nt, Artificial Sequence
  Description of Artificial Sequence: Synthetic oligonucleotide
cugagggcugucucgaacu

SEQ ID NO: 2526478 - RNA, 19 nt, Artificial Sequence
  Description of Artificial Sequence: Synthetic oligonucleotide
cucgcgcauacauuauaaa

SEQ ID NO: 2526479 - RNA, 19 nt, Artificial Sequence
  Description of Artificial Sequence: Synthetic oligonucleotide
cugaagaacccaaguggcu

SEQ ID NO: 2526480 - RNA, 19 nt, Artificial Sequence
  Description of Artificial Sequence: Synthetic oligonucleotide
aggccccacucgcgcauac

SEQ ID NO: 2526481 - RNA, 19 nt, Artificial Sequence
  Description of Artificial Sequence: Synthetic oligonucleotide
gcgcauacauuauaaauuu

SEQ ID NO: 2526482 - RNA, 19 nt, Artificial Sequence
  Description of Artificial Sequence: Synthetic oligonucleotide
ucagcacgaacugguugau

SEQ ID NO: 2526483 - RNA, 19 nt, Artificial Sequence
  Description of Artificial Sequence: Synthetic oligonucleotide
cagugggccgccugcagca

SEQ ID NO: 2526484 - RNA, 19 nt, Artificial Sequence
  Description of Artificial Sequence: Synthetic oligonucleotide
uguuggcgggagugcacau

SEQ ID NO: 2526485 - RNA, 19 nt, Artificial Sequence
  Description of Artificial Sequence: Synthetic oligonucleotide
ggcgauggaaggaguuggg

SEQ ID NO: 2526486 - RNA, 19 nt, Artificial Sequence
  Description of Artificial Sequence: Synthetic oligonucleotide
cauccacugcugccauggc

SEQ ID NO: 2526487 - RNA, 19 nt, Artificial Sequence
  Description of Artificial Sequence: Synthetic oligonucleotide
gcugagggcugucucgaac

SEQ ID NO: 2526488 - RNA, 19 nt, Artificial Sequence
  Description of Artificial Sequence: Synthetic oligonucleotide
ccauccagucucaucucug

SEQ ID NO: 2526489 - RNA, 19 nt, Artificial Sequence
  Description of Artificial Sequence: Synthetic oligonucleotide
ggaagagggugggauccag

SEQ ID NO: 2526490 - RNA, 19 nt, Artificial Sequence
  Description of Artificial Sequence: Synthetic oligonucleotide
cagccagccgucagcacga

SEQ ID NO: 2526491 - RNA, 19 nt, Artificial Sequence
  Description of Artificial Sequence: Synthetic oligonucleotide
ggcccucagaggcucgaag

SEQ ID NO: 2526492 - RNA, 19 nt, Artificial Sequence
  Description of Artificial Sequence: Synthetic oligonucleotide
guguuggcgggagugcaca

SEQ ID NO: 2526493 - RNA, 19 nt, Artificial Sequence
  Description of Artificial Sequence: Synthetic oligonucleotide
aggggauguuggucuccug

SEQ ID NO: 2526494 - RNA, 19 nt, Artificial Sequence
  Description of Artificial Sequence: Synthetic oligonucleotide
gccauggcuuucugcuggg

SEQ ID NO: 2526495 - RNA, 19 nt, Artificial Sequence
  Description of Artificial Sequence: Synthetic oligonucleotide
ccauguucacggacauggc

SEQ ID NO: 2526496 - RNA, 19 nt, Artificial Sequence
  Description of Artificial Sequence: Synthetic oligonucleotide
ggcgggagugcacaucauc

SEQ ID NO: 2526497 - RNA, 19 nt, Artificial Sequence
  Description of Artificial Sequence: Synthetic oligonucleotide
ccuggucggccgcacagcc

SEQ ID NO: 2526498 - RNA, 19 nt, Artificial Sequence
  Description of Artificial Sequence: Synthetic oligonucleotide
ggauguuggucuccuggaa

SEQ ID NO: 2526499 - RNA, 19 nt, Artificial Sequence
  Description of Artificial Sequence: Synthetic oligonucleotide
gcuguaggggauguugguc

SEQ ID NO: 2526500 - RNA, 19 nt, Artificial Sequence
  Description of Artificial Sequence: Synthetic oligonucleotide
gucggccgcacagccagcc

SEQ ID NO: 2526501 - RNA, 19 nt, Artificial Sequence
  Description of Artificial Sequence: Synthetic oligonucleotide
ugguggcuggguggggaug

SEQ ID NO: 2526502 - RNA, 19 nt, Artificial Sequence
  Description of Artificial Sequence: Synthetic oligonucleotide
gcgguggaggcgauggaag

SEQ ID NO: 2526503 - RNA, 19 nt, Artificial Sequence
  Description of Artificial Sequence: Synthetic oligonucleotide
ggcgucugguggcugggug

SEQ ID NO: 2526504 - RNA, 19 nt, Artificial Sequence
  Description of Artificial Sequence: Synthetic oligonucleotide
uccagggcgucugguggcu

SEQ ID NO: 2526505 - RNA, 19 nt, Artificial Sequence
  Description of Artificial Sequence: Synthetic oligonucleotide
guggggaugcggcccagaa

SEQ ID NO: 2526506 - RNA, 19 nt, Artificial Sequence
  Description of Artificial Sequence: Synthetic oligonucleotide
guuggcgggagugcacauc

SEQ ID NO: 2526507 - RNA, 19 nt, Artificial Sequence
  Description of Artificial Sequence: Synthetic oligonucleotide
gggcugaaguuugcagggg

SEQ ID NO: 2526508 - RNA, 19 nt, Artificial Sequence
  Description of Artificial Sequence: Synthetic oligonucleotide
ggccacgugggcugugggc

SEQ ID NO: 2526509 - RNA, 19 nt, Artificial Sequence
  Description of Artificial Sequence: Synthetic oligonucleotide
gugguggcuguaggggaug

SEQ ID NO: 2526510 - RNA, 19 nt, Artificial Sequence
  Description of Artificial Sequence: Synthetic oligonucleotide
cccacucgcgcauacauua

SEQ ID NO: 2526511 - RNA, 19 nt, Artificial Sequence
  Description of Artificial Sequence: Synthetic oligonucleotide
guccauguucacggacaug

SEQ ID NO: 2526512 - RNA, 19 nt, Artificial Sequence
  Description of Artificial Sequence: Synthetic oligonucleotide
gguggaggcgauggaagga

SEQ ID NO: 2526513 - RNA, 19 nt, Artificial Sequence
  Description of Artificial Sequence: Synthetic oligonucleotide
ccagugggccgccugcagc

SEQ ID NO: 2526514 - RNA, 19 nt, Artificial Sequence
  Description of Artificial Sequence: Synthetic oligonucleotide
ucgccuggucggccgcaca

SEQ ID NO: 2526515 - RNA, 19 nt, Artificial Sequence
  Description of Artificial Sequence: Synthetic oligonucleotide
gugggccgccugcagcagc

SEQ ID NO: 2526516 - RNA, 19 nt, Artificial Sequence
  Description of Artificial Sequence: Synthetic oligonucleotide
cacagccagccgucagcac

SEQ ID NO: 2526517 - RNA, 19 nt, Artificial Sequence
  Description of Artificial Sequence: Synthetic oligonucleotide
cacucgcgcauacauuaua

SEQ ID NO: 2526518 - RNA, 19 nt, Artificial Sequence
  Description of Artificial Sequence: Synthetic oligonucleotide
gcgguggcagggguguugg

SEQ ID NO: 2526519 - RNA, 19 nt, Artificial Sequence
  Description of Artificial Sequence: Synthetic oligonucleotide
caacccuggacugcaccca

SEQ ID NO: 2526520 - RNA, 19 nt, Artificial Sequence
  Description of Artificial Sequence: Synthetic oligonucleotide
cgucagcacgaacugguug

SEQ ID NO: 2526521 - RNA, 19 nt, Artificial Sequence
  Description of Artificial Sequence: Synthetic oligonucleotide
cugcacccacuccagccca

SEQ ID NO: 2526522 - RNA, 19 nt, Artificial Sequence
  Description of Artificial Sequence: Synthetic oligonucleotide
ccccuguggugcuccaggg

SEQ ID NO: 2526523 - RNA, 19 nt, Artificial Sequence
  Description of Artificial Sequence: Synthetic oligonucleotide
cugugggcgguggaggcga

SEQ ID NO: 2526524 - RNA, 19 nt, Artificial Sequence
  Description of Artificial Sequence: Synthetic oligonucleotide
ccagugcgauaucgaaccc

SEQ ID NO: 2526525 - RNA, 19 nt, Artificial Sequence
  Description of Artificial Sequence: Synthetic oligonucleotide
gggcuguugcuguucugca

SEQ ID NO: 2526526 - RNA, 19 nt, Artificial Sequence
  Description of Artificial Sequence: Synthetic oligonucleotide
ugcggcccagaaggggcug

SEQ ID NO: 2526527 - RNA, 19 nt, Artificial Sequence
  Description of Artificial Sequence: Synthetic oligonucleotide
gcugucucgaacugccagu

SEQ ID NO: 2526528 - RNA, 19 nt, Artificial Sequence
  Description of Artificial Sequence: Synthetic oligonucleotide
gcugcuucgccuggucggc

SEQ ID NO: 2526529 - RNA, 19 nt, Artificial Sequence
  Description of Artificial Sequence: Synthetic oligonucleotide
gcuagugcaucagggaagu

SEQ ID NO: 2526530 - RNA, 19 nt, Artificial Sequence
  Description of Artificial Sequence: Synthetic oligonucleotide
uggcgggagugcacaucau

SEQ ID NO: 2526531 - RNA, 19 nt, Artificial Sequence
  Description of Artificial Sequence: Synthetic oligonucleotide
uucgccuggucggccgcac

SEQ ID NO: 2526532 - RNA, 19 nt, Artificial Sequence
  Description of Artificial Sequence: Synthetic oligonucleotide
agggugggauccagggcgu

SEQ ID NO: 2526533 - RNA, 19 nt, Artificial Sequence
  Description of Artificial Sequence: Synthetic oligonucleotide
gguguuggcgggagugcac

SEQ ID NO: 2526534 - RNA, 19 nt, Artificial Sequence
  Description of Artificial Sequence: Synthetic oligonucleotide
cagcacgaacugguugauc

SEQ ID NO: 2526535 - RNA, 19 nt, Artificial Sequence
  Description of Artificial Sequence: Synthetic oligonucleotide
cugcuucgccuggucggcc

SEQ ID NO: 2526536 - RNA, 19 nt, Artificial Sequence
  Description of Artificial Sequence: Synthetic oligonucleotide
cgggagugcacaucaucug

SEQ ID NO: 2526537 - RNA, 19 nt, Artificial Sequence
  Description of Artificial Sequence: Synthetic oligonucleotide
cccuggacugcacccacuc

SEQ ID NO: 2526538 - RNA, 19 nt, Artificial Sequence
  Description of Artificial Sequence: Synthetic oligonucleotide
ugugggcgguggaggcgau

SEQ ID NO: 2526539 - RNA, 19 nt, Artificial Sequence
  Description of Artificial Sequence: Synthetic oligonucleotide
cgcgcauacauuauaaauu

SEQ ID NO: 2526540 - RNA, 19 nt, Artificial Sequence
  Description of Artificial Sequence: Synthetic oligonucleotide
cuggucggccgcacagcca

SEQ ID NO: 2526541 - RNA, 19 nt, Artificial Sequence
  Description of Artificial Sequence: Synthetic oligonucleotide
gcgggagugcacaucaucu

SEQ ID NO: 2526542 - RNA, 19 nt, Artificial Sequence
  Description of Artificial Sequence: Synthetic oligonucleotide
gggccacgugggcuguggg

SEQ ID NO: 2526543 - RNA, 19 nt, Artificial Sequence
  Description of Artificial Sequence: Synthetic oligonucleotide
ccacgugggcugugggcgg

SEQ ID NO: 2526544 - RNA, 19 nt, Artificial Sequence
  Description of Artificial Sequence: Synthetic oligonucleotide
ggagugcacaucaucuggu

SEQ ID NO: 2526545 - RNA, 19 nt, Artificial Sequence
  Description of Artificial Sequence: Synthetic oligonucleotide
ggggccacgugggcugugg

SEQ ID NO: 2526546 - RNA, 19 nt, Artificial Sequence
  Description of Artificial Sequence: Synthetic oligonucleotide
gcaggccacagccgucaug

SEQ ID NO: 2526547 - RNA, 19 nt, Artificial Sequence
  Description of Artificial Sequence: Synthetic oligonucleotide
augcggcccagaaggggcu

SEQ ID NO: 2526548 - RNA, 19 nt, Artificial Sequence
  Description of Artificial Sequence: Synthetic oligonucleotide
gcagggguguuggcgggag

SEQ ID NO: 2526549 - RNA, 19 nt, Artificial Sequence
  Description of Artificial Sequence: Synthetic oligonucleotide
gccagugggccgccugcag

SEQ ID NO: 2526550 - RNA, 19 nt, Artificial Sequence
  Description of Artificial Sequence: Synthetic oligonucleotide
ggcucgaagcuuggagaac

SEQ ID NO: 2526551 - RNA, 19 nt, Artificial Sequence
  Description of Artificial Sequence: Synthetic oligonucleotide
gcacagccagccgucagca

SEQ ID NO: 2526552 - RNA, 19 nt, Artificial Sequence
  Description of Artificial Sequence: Synthetic oligonucleotide
guggcucaggacguuuacu

SEQ ID NO: 2526553 - RNA, 19 nt, Artificial Sequence
  Description of Artificial Sequence: Synthetic oligonucleotide
ggcuguaggggauguuggu

SEQ ID NO: 2526554 - RNA, 19 nt, Artificial Sequence
  Description of Artificial Sequence: Synthetic oligonucleotide
gccauccagucucaucucu

SEQ ID NO: 2526555 - RNA, 19 nt, Artificial Sequence
  Description of Artificial Sequence: Synthetic oligonucleotide
ggguguuggcgggagugca

SEQ ID NO: 2526556 - RNA, 19 nt, Artificial Sequence
  Description of Artificial Sequence: Synthetic oligonucleotide
ggcgguggaggcgauggaa

SEQ ID NO: 2526557 - RNA, 19 nt, Artificial Sequence
  Description of Artificial Sequence: Synthetic oligonucleotide
gccgucagcacgaacuggu

SEQ ID NO: 2526558 - RNA, 19 nt, Artificial Sequence
  Description of Artificial Sequence: Synthetic oligonucleotide
ggcgguggcagggguguug

SEQ ID NO: 2526559 - RNA, 19 nt, Artificial Sequence
  Description of Artificial Sequence: Synthetic oligonucleotide
cccagcccugcucuguguc

SEQ ID NO: 2526560 - RNA, 19 nt, Artificial Sequence
  Description of Artificial Sequence: Synthetic oligonucleotide
cuuggagaacauggcuagu

SEQ ID NO: 2526561 - RNA, 19 nt, Artificial Sequence
  Description of Artificial Sequence: Synthetic oligonucleotide
cccacaacccuggacugca

SEQ ID NO: 2526562 - RNA, 19 nt, Artificial Sequence
  Description of Artificial Sequence: Synthetic oligonucleotide
cagaggcucgaagcuugga

SEQ ID NO: 2526563 - RNA, 19 nt, Artificial Sequence
  Description of Artificial Sequence: Synthetic oligonucleotide
agccgucauggggcuguug

SEQ ID NO: 2526564 - RNA, 19 nt, Artificial Sequence
  Description of Artificial Sequence: Synthetic oligonucleotide
cacagccgucauggggcug

SEQ ID NO: 2526565 - RNA, 19 nt, Artificial Sequence
  Description of Artificial Sequence: Synthetic oligonucleotide
ccccacaacccuggacugc

SEQ ID NO: 2526566 - RNA, 19 nt, Artificial Sequence
  Description of Artificial Sequence: Synthetic oligonucleotide
ggcuuucugcugggugccc

SEQ ID NO: 2526567 - RNA, 19 nt, Artificial Sequence
  Description of Artificial Sequence: Synthetic oligonucleotide
acgugggcugugggcggug

SEQ ID NO: 2526568 - RNA, 19 nt, Artificial Sequence
  Description of Artificial Sequence: Synthetic oligonucleotide
cccaaguggcucaggacgu

SEQ ID NO: 2526569 - RNA, 19 nt, Artificial Sequence
  Description of Artificial Sequence: Synthetic oligonucleotide
gugggcgguggaggcgaug

SEQ ID NO: 2526570 - RNA, 19 nt, Artificial Sequence
  Description of Artificial Sequence: Synthetic oligonucleotide
cacuccagcccagugccau

SEQ ID NO: 2526571 - RNA, 19 nt, Artificial Sequence
  Description of Artificial Sequence: Synthetic oligonucleotide
cgccuggucggccgcacag

SEQ ID NO: 2526572 - RNA, 19 nt, Artificial Sequence
  Description of Artificial Sequence: Synthetic oligonucleotide
ccugcucuguguccccaca

SEQ ID NO: 2526573 - RNA, 19 nt, Artificial Sequence
  Description of Artificial Sequence: Synthetic oligonucleotide
ccacaacccuggacugcac

SEQ ID NO: 2526574 - RNA, 19 nt, Artificial Sequence
  Description of Artificial Sequence: Synthetic oligonucleotide
gcaggcccucagaggcucg

SEQ ID NO: 2526575 - RNA, 19 nt, Artificial Sequence
  Description of Artificial Sequence: Synthetic oligonucleotide
accuggugcuugagcucgu

SEQ ID NO: 2526576 - RNA, 19 nt, Artificial Sequence
  Description of Artificial Sequence: Synthetic oligonucleotide
gccuggucggccgcacagc

SEQ ID NO: 2526577 - RNA, 19 nt, Artificial Sequence
  Description of Artificial Sequence: Synthetic oligonucleotide
ccgcacagccagccgucag

SEQ ID NO: 2526578 - RNA, 19 nt, Artificial Sequence
  Description of Artificial Sequence: Synthetic oligonucleotide
gccccacucgcgcauacau

SEQ ID NO: 2526579 - RNA, 19 nt, Artificial Sequence
  Description of Artificial Sequence: Synthetic oligonucleotide
aggcccucagaggcucgaa

SEQ ID NO: 2526580 - RNA, 19 nt, Artificial Sequence
  Description of Artificial Sequence: Synthetic oligonucleotide
gcgcugagggcugucucga

SEQ ID NO: 2526581 - RNA, 19 nt, Artificial Sequence
  Description of Artificial Sequence: Synthetic oligonucleotide
caggcccucagaggcucga

SEQ ID NO: 2526582 - RNA, 19 nt, Artificial Sequence
  Description of Artificial Sequence: Synthetic oligonucleotide
cuucgccuggucggccgca

SEQ ID NO: 2526583 - RNA, 19 nt, Artificial Sequence
  Description of Artificial Sequence: Synthetic oligonucleotide
gccagccgucagcacgaac

SEQ ID NO: 2526584 - RNA, 19 nt, Artificial Sequence
  Description of Artificial Sequence: Synthetic oligonucleotide
gcuguucugcaggcccuca

SEQ ID NO: 2526585 - RNA, 19 nt, Artificial Sequence
  Description of Artificial Sequence: Synthetic oligonucleotide
ggugggauccagggcgucu

SEQ ID NO: 2526586 - RNA, 19 nt, Artificial Sequence
  Description of Artificial Sequence: Synthetic oligonucleotide
caaguggcucaggacguuu

SEQ ID NO: 2526587 - RNA, 19 nt, Artificial Sequence
  Description of Artificial Sequence: Synthetic oligonucleotide
cccagaaggggcugaaguu

SEQ ID NO: 2526588 - RNA, 19 nt, Artificial Sequence
  Description of Artificial Sequence: Synthetic oligonucleotide
ccagugccauccagucuca

SEQ ID NO: 2526589 - RNA, 19 nt, Artificial Sequence
  Description of Artificial Sequence: Synthetic oligonucleotide
cugguggcuggguggggau

SEQ ID NO: 2526590 - RNA, 19 nt, Artificial Sequence
  Description of Artificial Sequence: Synthetic oligonucleotide
ggaggcgauggaaggaguu

SEQ ID NO: 2526591 - RNA, 19 nt, Artificial Sequence
  Description of Artificial Sequence: Synthetic oligonucleotide
ccagaaggggcugaaguuu

SEQ ID NO: 2526592 - RNA, 19 nt, Artificial Sequence
  Description of Artificial Sequence: Synthetic oligonucleotide
cagucucaucucuggccau

SEQ ID NO: 2526593 - RNA, 19 nt, Artificial Sequence
  Description of Artificial Sequence: Synthetic oligonucleotide
ggcagggguguuggcggga

SEQ ID NO: 2526594 - RNA, 19 nt, Artificial Sequence
  Description of Artificial Sequence: Synthetic oligonucleotide
cgugggcugugggcggugg

SEQ ID NO: 2526595 - RNA, 19 nt, Artificial Sequence
  Description of Artificial Sequence: Synthetic oligonucleotide
ccuccccagcccugcucug

SEQ ID NO: 2526596 - RNA, 19 nt, Artificial Sequence
  Description of Artificial Sequence: Synthetic oligonucleotide
gggcugucucgaacugcca

SEQ ID NO: 2526597 - RNA, 19 nt, Artificial Sequence
  Description of Artificial Sequence: Synthetic oligonucleotide
agccagccgucagcacgaa

SEQ ID NO: 2526598 - RNA, 19 nt, Artificial Sequence
  Description of Artificial Sequence: Synthetic oligonucleotide
ggucggccgcacagccagc

SEQ ID NO: 2526599 - RNA, 19 nt, Artificial Sequence
  Description of Artificial Sequence: Synthetic oligonucleotide
ccgucauggggcuguugcu

SEQ ID NO: 2526600 - RNA, 19 nt, Artificial Sequence
  Description of Artificial Sequence: Synthetic oligonucleotide
ggccccacucgcgcauaca

SEQ ID NO: 2526601 - RNA, 19 nt, Artificial Sequence
  Description of Artificial Sequence: Synthetic oligonucleotide
cagggguguuggcgggagu

SEQ ID NO: 2526602 - RNA, 19 nt, Artificial Sequence
  Description of Artificial Sequence: Synthetic oligonucleotide
gccgcacagccagccguca

SEQ ID NO: 2526603 - RNA, 19 nt, Artificial Sequence
  Description of Artificial Sequence: Synthetic oligonucleotide
gcccugcucugugucccca

SEQ ID NO: 2526604 - RNA, 19 nt, Artificial Sequence
  Description of Artificial Sequence: Synthetic oligonucleotide
ccagggcgucugguggcug

SEQ ID NO: 2526605 - RNA, 19 nt, Artificial Sequence
  Description of Artificial Sequence: Synthetic oligonucleotide
gcggcccagaaggggcuga

SEQ ID NO: 2526606 - RNA, 19 nt, Artificial Sequence
  Description of Artificial Sequence: Synthetic oligonucleotide
cacgugggcugugggcggu

SEQ ID NO: 2526607 - RNA, 19 nt, Artificial Sequence
  Description of Artificial Sequence: Synthetic oligonucleotide
cuagugcaucagggaaguu

SEQ ID NO: 2526608 - RNA, 19 nt, Artificial Sequence
  Description of Artificial Sequence: Synthetic oligonucleotide
cguccauguucacggacau

SEQ ID NO: 2526609 - RNA, 19 nt, Artificial Sequence
  Description of Artificial Sequence: Synthetic oligonucleotide
ccacucgcgcauacauuau

SEQ ID NO: 2526610 - RNA, 19 nt, Artificial Sequence
  Description of Artificial Sequence: Synthetic oligonucleotide
ccacagccgucauggggcu

SEQ ID NO: 2526611 - RNA, 19 nt, Artificial Sequence
  Description of Artificial Sequence: Synthetic oligonucleotide
caggccccacucgcgcaua

SEQ ID NO: 2526612 - RNA, 19 nt, Artificial Sequence
  Description of Artificial Sequence: Synthetic oligonucleotide
gcacccacuccagcccagu

SEQ ID NO: 2526613 - RNA, 19 nt, Artificial Sequence
  Description of Artificial Sequence: Synthetic oligonucleotide
cagugccauccagucucau

SEQ ID NO: 2526614 - RNA, 19 nt, Artificial Sequence
  Description of Artificial Sequence: Synthetic oligonucleotide
ccccacucgcgcauacauu

SEQ ID NO: 2526615 - RNA, 19 nt, Artificial Sequence
  Description of Artificial Sequence: Synthetic oligonucleotide
ccgucagcacgaacugguu

SEQ ID NO: 2526616 - RNA, 19 nt, Artificial Sequence
  Description of Artificial Sequence: Synthetic oligonucleotide
gggcgucugguggcugggu

SEQ ID NO: 2526617 - RNA, 19 nt, Artificial Sequence
  Description of Artificial Sequence: Synthetic oligonucleotide
ccaaguggcucaggacguu

SEQ ID NO: 2526618 - RNA, 19 nt, Artificial Sequence
  Description of Artificial Sequence: Synthetic oligonucleotide
cagccgucauggggcuguu

SEQ ID NO: 2526619 - RNA, 19 nt, Artificial Sequence
  Description of Artificial Sequence: Synthetic oligonucleotide
gggcgguggcagggguguu

SEQ ID NO: 2526620 - RNA, 19 nt, Artificial Sequence
  Description of Artificial Sequence: Synthetic oligonucleotide
aauucucuggaucuuauuc

SEQ ID NO: 2526621 - RNA, 19 nt, Artificial Sequence
  Description of Artificial Sequence: Synthetic oligonucleotide
ugaccuagaguaaauagcg

SEQ ID NO: 2526622 - RNA, 19 nt, Artificial Sequence
  Description of Artificial Sequence: Synthetic oligonucleotide
aaggagauuuuccaccugc

SEQ ID NO: 2526623 - RNA, 19 nt, Artificial Sequence
  Description of Artificial Sequence: Synthetic oligonucleotide
uucuucaagaguaugaaac

SEQ ID NO: 2526624 - RNA, 19 nt, Artificial Sequence
  Description of Artificial Sequence: Synthetic oligonucleotide
auagaaguaaucccuuccc

SEQ ID NO: 2526625 - RNA, 19 nt, Artificial Sequence
  Description of Artificial Sequence: Synthetic oligonucleotide
aguaaucccuucccgaucc

SEQ ID NO: 2526626 - RNA, 19 nt, Artificial Sequence
  Description of Artificial Sequence: Synthetic oligonucleotide
ucuaaauuccugauagaag

SEQ ID NO: 2526627 - RNA, 19 nt, Artificial Sequence
  Description of Artificial Sequence: Synthetic oligonucleotide
agcauucuuagcuuccucc

SEQ ID NO: 2526628 - RNA, 19 nt, Artificial Sequence
  Description of Artificial Sequence: Synthetic oligonucleotide
aaacuggagguacuggagg

SEQ ID NO: 2526629 - RNA, 19 nt, Artificial Sequence
  Description of Artificial Sequence: Synthetic oligonucleotide
aauauaggcugcuugucca

SEQ ID NO: 2526630 - RNA, 19 nt, Artificial Sequence
  Description of Artificial Sequence: Synthetic oligonucleotide
cuccuaaucaccaucuucc

SEQ ID NO: 2526631 - RNA, 19 nt, Artificial Sequence
  Description of Artificial Sequence: Synthetic oligonucleotide
gauagaaguaaucccuucc

SEQ ID NO: 2526632 - RNA, 19 nt, Artificial Sequence
  Description of Artificial Sequence: Synthetic oligonucleotide
acaucuuucugacaggucu

SEQ ID NO: 2526633 - RNA, 19 nt, Artificial Sequence
  Description of Artificial Sequence: Synthetic oligonucleotide
uagaaguaaucccuucccg

SEQ ID NO: 2526634 - RNA, 19 nt, Artificial Sequence
  Description of Artificial Sequence: Synthetic oligonucleotide
augaccuagaguaaauagc

SEQ ID NO: 2526635 - RNA, 19 nt, Artificial Sequence
  Description of Artificial Sequence: Synthetic oligonucleotide
cuuagcuuccuccucaccc

SEQ ID NO: 2526636 - RNA, 19 nt, Artificial Sequence
  Description of Artificial Sequence: Synthetic oligonucleotide
caugaccuagaguaaauag

SEQ ID NO: 2526637 - RNA, 19 nt, Artificial Sequence
  Description of Artificial Sequence: Synthetic oligonucleotide
ucaucugagguccagcgcu

SEQ ID NO: 2526638 - RNA, 19 nt, Artificial Sequence
  Description of Artificial Sequence: Synthetic oligonucleotide
ugaggagguggccuuaggg

SEQ ID NO: 2526639 - RNA, 19 nt, Artificial Sequence
  Description of Artificial Sequence: Synthetic oligonucleotide
gaagaauccucgcucugcg

SEQ ID NO: 2526640 - RNA, 19 nt, Artificial Sequence
  Description of Artificial Sequence: Synthetic oligonucleotide
uuccugauagaaguaaucc

SEQ ID NO: 2526641 - RNA, 19 nt, Artificial Sequence
  Description of Artificial Sequence: Synthetic oligonucleotide
aggauuuauccucaucauc

SEQ ID NO: 2526642 - RNA, 19 nt, Artificial Sequence
  Description of Artificial Sequence: Synthetic oligonucleotide
uuauccucaucaucugagg

SEQ ID NO: 2526643 - RNA, 19 nt, Artificial Sequence
  Description of Artificial Sequence: Synthetic oligonucleotide
uggaucuuauucaacugca

SEQ ID NO: 2526644 - RNA, 19 nt, Artificial Sequence
  Description of Artificial Sequence: Synthetic oligonucleotide
aaguaaucccuucccgauc

SEQ ID NO: 2526645 - RNA, 19 nt, Artificial Sequence
  Description of Artificial Sequence: Synthetic oligonucleotide
agugaggacaggcuguguc

SEQ ID NO: 2526646 - RNA, 19 nt, Artificial Sequence
  Description of Artificial Sequence: Synthetic oligonucleotide
cuaaauuccugauagaagu

SEQ ID NO: 2526647 - RNA, 19 nt, Artificial Sequence
  Description of Artificial Sequence: Synthetic oligonucleotide
uucugacaggucuucaucc

SEQ ID NO: 2526648 - RNA, 19 nt, Artificial Sequence
  Description of Artificial Sequence: Synthetic oligonucleotide
agaguaugaaacaucuuuc

SEQ ID NO: 2526649 - RNA, 19 nt, Artificial Sequence
  Description of Artificial Sequence: Synthetic oligonucleotide
gucaaggagauuuuccacc

SEQ ID NO: 2526650 - RNA, 19 nt, Artificial Sequence
  Description of Artificial Sequence: Synthetic oligonucleotide
uauucaacugcagguagag

SEQ ID NO: 2526651 - RNA, 19 nt, Artificial Sequence
  Description of Artificial Sequence: Synthetic oligonucleotide
agaggcugugaauauuccg

SEQ ID NO: 2526652 - RNA, 19 nt, Artificial Sequence
  Description of Artificial Sequence: Synthetic oligonucleotide
uguaguuccugcuccaggu

SEQ ID NO: 2526653 - RNA, 19 nt, Artificial Sequence
  Description of Artificial Sequence: Synthetic oligonucleotide
cuggaucuuauucaacugc

SEQ ID NO: 2526654 - RNA, 19 nt, Artificial Sequence
  Description of Artificial Sequence: Synthetic oligonucleotide
auucucuggaucuuauuca

SEQ ID NO: 2526655 - RNA, 19 nt, Artificial Sequence
  Description of Artificial Sequence: Synthetic oligonucleotide
caauauaggcugcuugucc

SEQ ID NO: 2526656 - RNA, 19 nt, Artificial Sequence
  Description of Artificial Sequence: Synthetic oligonucleotide
caugacaaguucucaauuc

SEQ ID NO: 2526657 - RNA, 19 nt, Artificial Sequence
  Description of Artificial Sequence: Synthetic oligonucleotide
agaaguaaucccuucccga

SEQ ID NO: 2526658 - RNA, 19 nt, Artificial Sequence
  Description of Artificial Sequence: Synthetic oligonucleotide
cugugaauauuccggaggc

SEQ ID NO: 2526659 - RNA, 19 nt, Artificial Sequence
  Description of Artificial Sequence: Synthetic oligonucleotide
ucuggaucuuauucaacug

SEQ ID NO: 2526660 - RNA, 19 nt, Artificial Sequence
  Description of Artificial Sequence: Synthetic oligonucleotide
aaacaucuuucugacaggu

SEQ ID NO: 2526661 - RNA, 19 nt, Artificial Sequence
  Description of Artificial Sequence: Synthetic oligonucleotide
ucaaggagauuuuccaccu

SEQ ID NO: 2526662 - RNA, 19 nt, Artificial Sequence
  Description of Artificial Sequence: Synthetic oligonucleotide
gauuuauccucaucaucug

SEQ ID NO: 2526663 - RNA, 19 nt, Artificial Sequence
  Description of Artificial Sequence: Synthetic oligonucleotide
agcgcuccaauauaggcug

SEQ ID NO: 2526664 - RNA, 19 nt, Artificial Sequence
  Description of Artificial Sequence: Synthetic oligonucleotide
aucaucugagguccagcgc

SEQ ID NO: 2526665 - RNA, 19 nt, Artificial Sequence
  Description of Artificial Sequence: Synthetic oligonucleotide
uuagcuuccuccucacccc

SEQ ID NO: 2526666 - RNA, 19 nt, Artificial Sequence
  Description of Artificial Sequence: Synthetic oligonucleotide
caucugaggauuuauccuc

SEQ ID NO: 2526667 - RNA, 19 nt, Artificial Sequence
  Description of Artificial Sequence: Synthetic oligonucleotide
uguacucugggcagcauuc

SEQ ID NO: 2526668 - RNA, 19 nt, Artificial Sequence
  Description of Artificial Sequence: Synthetic oligonucleotide
gaagaggugguccggguug

SEQ ID NO: 2526669 - RNA, 19 nt, Artificial Sequence
  Description of Artificial Sequence: Synthetic oligonucleotide
aagagcaguggcaggcucc

SEQ ID NO: 2526670 - RNA, 19 nt, Artificial Sequence
  Description of Artificial Sequence: Synthetic oligonucleotide
uccagguccuugaagaauc

SEQ ID NO: 2526671 - RNA, 19 nt, Artificial Sequence
  Description of Artificial Sequence: Synthetic oligonucleotide
agguccagaaacuggaggu

SEQ ID NO: 2526672 - RNA, 19 nt, Artificial Sequence
  Description of Artificial Sequence: Synthetic oligonucleotide
ugaugcaugacaaguucuc

SEQ ID NO: 2526673 - RNA, 19 nt, Artificial Sequence
  Description of Artificial Sequence: Synthetic oligonucleotide
aggcugcuuguccaggucc

SEQ ID NO: 2526674 - RNA, 19 nt, Artificial Sequence
  Description of Artificial Sequence: Synthetic oligonucleotide
gugaauauuccggaggccc

SEQ ID NO: 2526675 - RNA, 19 nt, Artificial Sequence
  Description of Artificial Sequence: Synthetic oligonucleotide
uuucugacaggucuucauc

SEQ ID NO: 2526676 - RNA, 19 nt, Artificial Sequence
  Description of Artificial Sequence: Synthetic oligonucleotide
agaauccucgcucugcgca

SEQ ID NO: 2526677 - RNA, 19 nt, Artificial Sequence
  Description of Artificial Sequence: Synthetic oligonucleotide
aggucaaggagauuuucca

SEQ ID NO: 2526678 - RNA, 19 nt, Artificial Sequence
  Description of Artificial Sequence: Synthetic oligonucleotide
uuucuugguagaagaggug

SEQ ID NO: 2526679 - RNA, 19 nt, Artificial Sequence
  Description of Artificial Sequence: Synthetic oligonucleotide
gaaacuggagguacuggag

SEQ ID NO: 2526680 - RNA, 19 nt, Artificial Sequence
  Description of Artificial Sequence: Synthetic oligonucleotide
gguacuggaggucaaggag

SEQ ID NO: 2526681 - RNA, 19 nt, Artificial Sequence
  Description of Artificial Sequence: Synthetic oligonucleotide
aucagggcuucagugaugg

SEQ ID NO: 2526682 - RNA, 19 nt, Artificial Sequence
  Description of Artificial Sequence: Synthetic oligonucleotide
ugcagucccgggccgaugg

SEQ ID NO: 2526683 - RNA, 19 nt, Artificial Sequence
  Description of Artificial Sequence: Synthetic oligonucleotide
gcugugaauauuccggagg

SEQ ID NO: 2526684 - RNA, 19 nt, Artificial Sequence
  Description of Artificial Sequence: Synthetic oligonucleotide
ugaagaauccucgcucugc

SEQ ID NO: 2526685 - RNA, 19 nt, Artificial Sequence
  Description of Artificial Sequence: Synthetic oligonucleotide
ugaauauuccggaggcccu

SEQ ID NO: 2526686 - RNA, 19 nt, Artificial Sequence
  Description of Artificial Sequence: Synthetic oligonucleotide
uaaauuccugauagaagua

SEQ ID NO: 2526687 - RNA, 19 nt, Artificial Sequence
  Description of Artificial Sequence: Synthetic oligonucleotide
cuaaucaccaucuuccugu

SEQ ID NO: 2526688 - RNA, 19 nt, Artificial Sequence
  Description of Artificial Sequence: Synthetic oligonucleotide
uugguagaagagguggucc

SEQ ID NO: 2526689 - RNA, 19 nt, Artificial Sequence
  Description of Artificial Sequence: Synthetic oligonucleotide
auuccugauagaaguaauc

SEQ ID NO: 2526690 - RNA, 19 nt, Artificial Sequence
  Description of Artificial Sequence: Synthetic oligonucleotide
ugacaaguucucaauucuc

SEQ ID NO: 2526691 - RNA, 19 nt, Artificial Sequence
  Description of Artificial Sequence: Synthetic oligonucleotide
ugaucagggcuucagugau

SEQ ID NO: 2526692 - RNA, 19 nt, Artificial Sequence
  Description of Artificial Sequence: Synthetic oligonucleotide
uccaagagcaguggcaggc

SEQ ID NO: 2526693 - RNA, 19 nt, Artificial Sequence
  Description of Artificial Sequence: Synthetic oligonucleotide
cuuccuguguacucugggc

SEQ ID NO: 2526694 - RNA, 19 nt, Artificial Sequence
  Description of Artificial Sequence: Synthetic oligonucleotide
uccagcgcuccaauauagg

SEQ ID NO: 2526695 - RNA, 19 nt, Artificial Sequence
  Description of Artificial Sequence: Synthetic oligonucleotide
ugauagaaguaaucccuuc

SEQ ID NO: 2526696 - RNA, 19 nt, Artificial Sequence
  Description of Artificial Sequence: Synthetic oligonucleotide
uccuguguacucugggcag

SEQ ID NO: 2526697 - RNA, 19 nt, Artificial Sequence
  Description of Artificial Sequence: Synthetic oligonucleotide
ugcagguagaggcugugaa

SEQ ID NO: 2526698 - RNA, 19 nt, Artificial Sequence
  Description of Artificial Sequence: Synthetic oligonucleotide
caagugcucugccaggacc

SEQ ID NO: 2526699 - RNA, 19 nt, Artificial Sequence
  Description of Artificial Sequence: Synthetic oligonucleotide
auauaggcugcuuguccag

SEQ ID NO: 2526700 - RNA, 19 nt, Artificial Sequence
  Description of Artificial Sequence: Synthetic oligonucleotide
gaggucaaggagauuuucc

SEQ ID NO: 2526701 - RNA, 19 nt, Artificial Sequence
  Description of Artificial Sequence: Synthetic oligonucleotide
agugauggggaccuccccu

SEQ ID NO: 2526702 - RNA, 19 nt, Artificial Sequence
  Description of Artificial Sequence: Synthetic oligonucleotide
ucaauucucuggaucuuau

SEQ ID NO: 2526703 - RNA, 19 nt, Artificial Sequence
  Description of Artificial Sequence: Synthetic oligonucleotide
uugaagaauccucgcucug

SEQ ID NO: 2526704 - RNA, 19 nt, Artificial Sequence
  Description of Artificial Sequence: Synthetic oligonucleotide
uagaggcugugaauauucc

SEQ ID NO: 2526705 - RNA, 19 nt, Artificial Sequence
  Description of Artificial Sequence: Synthetic oligonucleotide
guucucaauucucuggauc

SEQ ID NO: 2526706 - RNA, 19 nt, Artificial Sequence
  Description of Artificial Sequence: Synthetic oligonucleotide
ccuguagagguccagaaac

SEQ ID NO: 2526707 - RNA, 19 nt, Artificial Sequence
  Description of Artificial Sequence: Synthetic oligonucleotide
uauaggcugcuuguccagg

SEQ ID NO: 2526708 - RNA, 19 nt, Artificial Sequence
  Description of Artificial Sequence: Synthetic oligonucleotide
aauuccugauagaaguaau

SEQ ID NO: 2526709 - RNA, 19 nt, Artificial Sequence
  Description of Artificial Sequence: Synthetic oligonucleotide
gaguaugaaacaucuuucu

SEQ ID NO: 2526710 - RNA, 19 nt, Artificial Sequence
  Description of Artificial Sequence: Synthetic oligonucleotide
gguccuugaagaauccucg

SEQ ID NO: 2526711 - RNA, 19 nt, Artificial Sequence
  Description of Artificial Sequence: Synthetic oligonucleotide
aacaucuuucugacagguc

SEQ ID NO: 2526712 - RNA, 19 nt, Artificial Sequence
  Description of Artificial Sequence: Synthetic oligonucleotide
agguccuugaagaauccuc

SEQ ID NO: 2526713 - RNA, 19 nt, Artificial Sequence
  Description of Artificial Sequence: Synthetic oligonucleotide
uggccuuaggggcugacuc

SEQ ID NO: 2526714 - RNA, 19 nt, Artificial Sequence
  Description of Artificial Sequence: Synthetic oligonucleotide
ggagaggcaggucagugag

SEQ ID NO: 2526715 - RNA, 19 nt, Artificial Sequence
  Description of Artificial Sequence: Synthetic oligonucleotide
aguucuucaagaguaugaa

SEQ ID NO: 2526716 - RNA, 19 nt, Artificial Sequence
  Description of Artificial Sequence: Synthetic oligonucleotide
aggagauuuuccaccugcc

SEQ ID NO: 2526717 - RNA, 19 nt, Artificial Sequence
  Description of Artificial Sequence: Synthetic oligonucleotide
cucugggcagcauucuuag

SEQ ID NO: 2526718 - RNA, 19 nt, Artificial Sequence
  Description of Artificial Sequence: Synthetic oligonucleotide
gaaggucaaguuccucuug

SEQ ID NO: 2526719 - RNA, 19 nt, Artificial Sequence
  Description of Artificial Sequence: Synthetic oligonucleotide
gaauccucgcucugcgcag

SEQ ID NO: 2526720 - RNA, 19 nt, Artificial Sequence
  Description of Artificial Sequence: Synthetic oligonucleotide
uguugcuguaguuccugcu

SEQ ID NO: 2526721 - RNA, 19 nt, Artificial Sequence
  Description of Artificial Sequence: Synthetic oligonucleotide
guugcuguaguuccugcuc

SEQ ID NO: 2526722 - RNA, 19 nt, Artificial Sequence
  Description of Artificial Sequence: Synthetic oligonucleotide
cucuaaauuccugauagaa

SEQ ID NO: 2526723 - RNA, 19 nt, Artificial Sequence
  Description of Artificial Sequence: Synthetic oligonucleotide
ccuggcaugaccuagagua

SEQ ID NO: 2526724 - RNA, 19 nt, Artificial Sequence
  Description of Artificial Sequence: Synthetic oligonucleotide
accugccugaucugguuuc

SEQ ID NO: 2526725 - RNA, 19 nt, Artificial Sequence
  Description of Artificial Sequence: Synthetic oligonucleotide
uccagaaacuggagguacu

SEQ ID NO: 2526726 - RNA, 19 nt, Artificial Sequence
  Description of Artificial Sequence: Synthetic oligonucleotide
ugugaauauuccggaggcc

SEQ ID NO: 2526727 - RNA, 19 nt, Artificial Sequence
  Description of Artificial Sequence: Synthetic oligonucleotide
cucgcucugcgcagaaugg

SEQ ID NO: 2526728 - RNA, 19 nt, Artificial Sequence
  Description of Artificial Sequence: Synthetic oligonucleotide
caguucuucaagaguauga

SEQ ID NO: 2526729 - RNA, 19 nt, Artificial Sequence
  Description of Artificial Sequence: Synthetic oligonucleotide
cuguaguuccugcuccagg

SEQ ID NO: 2526730 - RNA, 19 nt, Artificial Sequence
  Description of Artificial Sequence: Synthetic oligonucleotide
augcaugacaaguucucaa

SEQ ID NO: 2526731 - RNA, 19 nt, Artificial Sequence
  Description of Artificial Sequence: Synthetic oligonucleotide
agaggcaggucagugagga

SEQ ID NO: 2526732 - RNA, 19 nt, Artificial Sequence
  Description of Artificial Sequence: Synthetic oligonucleotide
agguacuggaggucaagga

SEQ ID NO: 2526733 - RNA, 19 nt, Artificial Sequence
  Description of Artificial Sequence: Synthetic oligonucleotide
acagucuccaguucuucaa

SEQ ID NO: 2526734 - RNA, 19 nt, Artificial Sequence
  Description of Artificial Sequence: Synthetic oligonucleotide
uccuaaucaccaucuuccu

SEQ ID NO: 2526735 - RNA, 19 nt, Artificial Sequence
  Description of Artificial Sequence: Synthetic oligonucleotide
agucuccaguucuucaaga

SEQ ID NO: 2526736 - RNA, 19 nt, Artificial Sequence
  Description of Artificial Sequence: Synthetic oligonucleotide
uuccuguagagguccagaa

SEQ ID NO: 2526737 - RNA, 19 nt, Artificial Sequence
  Description of Artificial Sequence: Synthetic oligonucleotide
uccuguagagguccagaaa

SEQ ID NO: 2526738 - RNA, 19 nt, Artificial Sequence
  Description of Artificial Sequence: Synthetic oligonucleotide
cuucucaggcucugcagug

SEQ ID NO: 2526739 - RNA, 19 nt, Artificial Sequence
  Description of Artificial Sequence: Synthetic oligonucleotide
aggcaggucagugaggaca

SEQ ID NO: 2526740 - RNA, 19 nt, Artificial Sequence
  Description of Artificial Sequence: Synthetic oligonucleotide
aagugcucugccaggacca

SEQ ID NO: 2526741 - RNA, 19 nt, Artificial Sequence
  Description of Artificial Sequence: Synthetic oligonucleotide
gaugggcacagcaggcagg

SEQ ID NO: 2526742 - RNA, 19 nt, Artificial Sequence
  Description of Artificial Sequence: Synthetic oligonucleotide
ucccuucccgauccaggcg

SEQ ID NO: 2526743 - RNA, 19 nt, Artificial Sequence
  Description of Artificial Sequence: Synthetic oligonucleotide
ggugaugcaugacaaguuc

SEQ ID NO: 2526744 - RNA, 19 nt, Artificial Sequence
  Description of Artificial Sequence: Synthetic oligonucleotide
uuaggggcugacuccuucu

SEQ ID NO: 2526745 - RNA, 19 nt, Artificial Sequence
  Description of Artificial Sequence: Synthetic oligonucleotide
agguccagcgcuccaauau

SEQ ID NO: 2526746 - RNA, 19 nt, Artificial Sequence
  Description of Artificial Sequence: Synthetic oligonucleotide
guuucuugguagaagaggu

SEQ ID NO: 2526747 - RNA, 19 nt, Artificial Sequence
  Description of Artificial Sequence: Synthetic oligonucleotide
gaugcaugacaaguucuca

SEQ ID NO: 2526748 - RNA, 19 nt, Artificial Sequence
  Description of Artificial Sequence: Synthetic oligonucleotide
ugccugaucugguuuccug

SEQ ID NO: 2526749 - RNA, 19 nt, Artificial Sequence
  Description of Artificial Sequence: Synthetic oligonucleotide
aauauuccggaggcccucu

SEQ ID NO: 2526750 - RNA, 19 nt, Artificial Sequence
  Description of Artificial Sequence: Synthetic oligonucleotide
aggcccucuaaauuccuga

SEQ ID NO: 2526751 - RNA, 19 nt, Artificial Sequence
  Description of Artificial Sequence: Synthetic oligonucleotide
gauggggaccuccccuucc

SEQ ID NO: 2526752 - RNA, 19 nt, Artificial Sequence
  Description of Artificial Sequence: Synthetic oligonucleotide
uuccaccugccugaucugg

SEQ ID NO: 2526753 - RNA, 19 nt, Artificial Sequence
  Description of Artificial Sequence: Synthetic oligonucleotide
aggcugugaauauuccgga

SEQ ID NO: 2526754 - RNA, 19 nt, Artificial Sequence
  Description of Artificial Sequence: Synthetic oligonucleotide
gaaguaaucccuucccgau

SEQ ID NO: 2526755 - RNA, 19 nt, Artificial Sequence
  Description of Artificial Sequence: Synthetic oligonucleotide
cugccagagacaggaagcg

SEQ ID NO: 2526756 - RNA, 19 nt, Artificial Sequence
  Description of Artificial Sequence: Synthetic oligonucleotide
ucagugaggacaggcugug

SEQ ID NO: 2526757 - RNA, 19 nt, Artificial Sequence
  Description of Artificial Sequence: Synthetic oligonucleotide
auucaacugcagguagagg

SEQ ID NO: 2526758 - RNA, 19 nt, Artificial Sequence
  Description of Artificial Sequence: Synthetic oligonucleotide
uggugaucagggcuucagu

SEQ ID NO: 2526759 - RNA, 19 nt, Artificial Sequence
  Description of Artificial Sequence: Synthetic oligonucleotide
ccugccagagacaggaagc

SEQ ID NO: 2526760 - RNA, 19 nt, Artificial Sequence
  Description of Artificial Sequence: Synthetic oligonucleotide
augaaacaucuuucugaca

SEQ ID NO: 2526761 - RNA, 19 nt, Artificial Sequence
  Description of Artificial Sequence: Synthetic oligonucleotide
ggucaaguuccucuuggug

SEQ ID NO: 2526762 - RNA, 19 nt, Artificial Sequence
  Description of Artificial Sequence: Synthetic oligonucleotide
cauucuuagcuuccuccuc

SEQ ID NO: 2526763 - RNA, 19 nt, Artificial Sequence
  Description of Artificial Sequence: Synthetic oligonucleotide
ucgcucugcgcagaauggg

SEQ ID NO: 2526764 - RNA, 19 nt, Artificial Sequence
  Description of Artificial Sequence: Synthetic oligonucleotide
cuugguagaagaggugguc

SEQ ID NO: 2526765 - RNA, 19 nt, Artificial Sequence
  Description of Artificial Sequence: Synthetic oligonucleotide
gaggugaugcaugacaagu

SEQ ID NO: 2526766 - RNA, 19 nt, Artificial Sequence
  Description of Artificial Sequence: Synthetic oligonucleotide
guacuggaggucaaggaga

SEQ ID NO: 2526767 - RNA, 19 nt, Artificial Sequence
  Description of Artificial Sequence: Synthetic oligonucleotide
cagucuccaguucuucaag

SEQ ID NO: 2526768 - RNA, 19 nt, Artificial Sequence
  Description of Artificial Sequence: Synthetic oligonucleotide
ugggccauucagcuccgga

SEQ ID NO: 2526769 - RNA, 19 nt, Artificial Sequence
  Description of Artificial Sequence: Synthetic oligonucleotide
gguccaagagcaguggcag

SEQ ID NO: 2526770 - RNA, 19 nt, Artificial Sequence
  Description of Artificial Sequence: Synthetic oligonucleotide
uccggaggcccucuaaauu

SEQ ID NO: 2526771 - RNA, 19 nt, Artificial Sequence
  Description of Artificial Sequence: Synthetic oligonucleotide
ucuuucugacaggucuuca

SEQ ID NO: 2526772 - RNA, 19 nt, Artificial Sequence
  Description of Artificial Sequence: Synthetic oligonucleotide
auccuugccaagugcucug

SEQ ID NO: 2526773 - RNA, 19 nt, Artificial Sequence
  Description of Artificial Sequence: Synthetic oligonucleotide
ggucaaggagauuuuccac

SEQ ID NO: 2526774 - RNA, 19 nt, Artificial Sequence
  Description of Artificial Sequence: Synthetic oligonucleotide
uagaagaggugguccgggu

SEQ ID NO: 2526775 - RNA, 19 nt, Artificial Sequence
  Description of Artificial Sequence: Synthetic oligonucleotide
ugcuguaguuccugcucca

SEQ ID NO: 2526776 - RNA, 19 nt, Artificial Sequence
  Description of Artificial Sequence: Synthetic oligonucleotide
cuugaagaauccucgcucu

SEQ ID NO: 2526777 - RNA, 19 nt, Artificial Sequence
  Description of Artificial Sequence: Synthetic oligonucleotide
aucugagguccagcgcucc

SEQ ID NO: 2526778 - RNA, 19 nt, Artificial Sequence
  Description of Artificial Sequence: Synthetic oligonucleotide
ccagcgcuccaauauaggc

SEQ ID NO: 2526779 - RNA, 19 nt, Artificial Sequence
  Description of Artificial Sequence: Synthetic oligonucleotide
cuuaggggcugacuccuuc

SEQ ID NO: 2526780 - RNA, 19 nt, Artificial Sequence
  Description of Artificial Sequence: Synthetic oligonucleotide
ggccgaugggcacagcagg

SEQ ID NO: 2526781 - RNA, 19 nt, Artificial Sequence
  Description of Artificial Sequence: Synthetic oligonucleotide
cagcuccggaaauuccucc

SEQ ID NO: 2526782 - RNA, 19 nt, Artificial Sequence
  Description of Artificial Sequence: Synthetic oligonucleotide
caggcuccuaaucaccauc

SEQ ID NO: 2526783 - RNA, 19 nt, Artificial Sequence
  Description of Artificial Sequence: Synthetic oligonucleotide
ugguuuccugccagagaca

SEQ ID NO: 2526784 - RNA, 19 nt, Artificial Sequence
  Description of Artificial Sequence: Synthetic oligonucleotide
guccggguugaggaggugg

SEQ ID NO: 2526785 - RNA, 19 nt, Artificial Sequence
  Description of Artificial Sequence: Synthetic oligonucleotide
agaagaggugguccggguu

SEQ ID NO: 2526786 - RNA, 19 nt, Artificial Sequence
  Description of Artificial Sequence: Synthetic oligonucleotide
cugaggauuuauccucauc

SEQ ID NO: 2526787 - RNA, 19 nt, Artificial Sequence
  Description of Artificial Sequence: Synthetic oligonucleotide
aaugggccauucagcuccg

SEQ ID NO: 2526788 - RNA, 19 nt, Artificial Sequence
  Description of Artificial Sequence: Synthetic oligonucleotide
gaggugguccggguugagg

SEQ ID NO: 2526789 - RNA, 19 nt, Artificial Sequence
  Description of Artificial Sequence: Synthetic oligonucleotide
ugggcagcauucuuagcuu

SEQ ID NO: 2526790 - RNA, 19 nt, Artificial Sequence
  Description of Artificial Sequence: Synthetic oligonucleotide
uggcaugaccuagaguaaa

SEQ ID NO: 2526791 - RNA, 19 nt, Artificial Sequence
  Description of Artificial Sequence: Synthetic oligonucleotide
uaaucaccaucuuccugua

SEQ ID NO: 2526792 - RNA, 19 nt, Artificial Sequence
  Description of Artificial Sequence: Synthetic oligonucleotide
guccagcgcuccaauauag

SEQ ID NO: 2526793 - RNA, 19 nt, Artificial Sequence
  Description of Artificial Sequence: Synthetic oligonucleotide
gaauauuccggaggcccuc

SEQ ID NO: 2526794 - RNA, 19 nt, Artificial Sequence
  Description of Artificial Sequence: Synthetic oligonucleotide
ucugggcagcauucuuagc

SEQ ID NO: 2526795 - RNA, 19 nt, Artificial Sequence
  Description of Artificial Sequence: Synthetic oligonucleotide
agguagaggcugugaauau

SEQ ID NO: 2526796 - RNA, 19 nt, Artificial Sequence
  Description of Artificial Sequence: Synthetic oligonucleotide
accaccugcugccuucgcu

SEQ ID NO: 2526797 - RNA, 19 nt, Artificial Sequence
  Description of Artificial Sequence: Synthetic oligonucleotide
gguagaagaggugguccgg

SEQ ID NO: 2526798 - RNA, 19 nt, Artificial Sequence
  Description of Artificial Sequence: Synthetic oligonucleotide
ggaucuuauucaacugcag

SEQ ID NO: 2526799 - RNA, 19 nt, Artificial Sequence
  Description of Artificial Sequence: Synthetic oligonucleotide
gugguccggguugaggagg

SEQ ID NO: 2526800 - RNA, 19 nt, Artificial Sequence
  Description of Artificial Sequence: Synthetic oligonucleotide
gaggauuuauccucaucau

SEQ ID NO: 2526801 - RNA, 19 nt, Artificial Sequence
  Description of Artificial Sequence: Synthetic oligonucleotide
ccugauagaaguaaucccu

SEQ ID NO: 2526802 - RNA, 19 nt, Artificial Sequence
  Description of Artificial Sequence: Synthetic oligonucleotide
aagaggugguccggguuga

SEQ ID NO: 2526803 - RNA, 19 nt, Artificial Sequence
  Description of Artificial Sequence: Synthetic oligonucleotide
gcagaaugggccauucagc

SEQ ID NO: 2526804 - RNA, 19 nt, Artificial Sequence
  Description of Artificial Sequence: Synthetic oligonucleotide
uuccggaggcccucuaaau

SEQ ID NO: 2526805 - RNA, 19 nt, Artificial Sequence
  Description of Artificial Sequence: Synthetic oligonucleotide
gcuccuaaucaccaucuuc

SEQ ID NO: 2526806 - RNA, 19 nt, Artificial Sequence
  Description of Artificial Sequence: Synthetic oligonucleotide
uggaggucaaggagauuuu

SEQ ID NO: 2526807 - RNA, 19 nt, Artificial Sequence
  Description of Artificial Sequence: Synthetic oligonucleotide
uucgcuccugguguugcug

SEQ ID NO: 2526808 - RNA, 19 nt, Artificial Sequence
  Description of Artificial Sequence: Synthetic oligonucleotide
caaggagauuuuccaccug

SEQ ID NO: 2526809 - RNA, 19 nt, Artificial Sequence
  Description of Artificial Sequence: Synthetic oligonucleotide
uaggcugcuuguccagguc

SEQ ID NO: 2526810 - RNA, 19 nt, Artificial Sequence
  Description of Artificial Sequence: Synthetic oligonucleotide
gccugaucugguuuccugc

SEQ ID NO: 2526811 - RNA, 19 nt, Artificial Sequence
  Description of Artificial Sequence: Synthetic oligonucleotide
uaggggcugacuccuucuc

SEQ ID NO: 2526812 - RNA, 19 nt, Artificial Sequence
  Description of Artificial Sequence: Synthetic oligonucleotide
ucgcuccugguguugcugu

SEQ ID NO: 2526813 - RNA, 19 nt, Artificial Sequence
  Description of Artificial Sequence: Synthetic oligonucleotide
uccccuuccuguguacucu

SEQ ID NO: 2526814 - RNA, 19 nt, Artificial Sequence
  Description of Artificial Sequence: Synthetic oligonucleotide
agagguccagaaacuggag

SEQ ID NO: 2526815 - RNA, 19 nt, Artificial Sequence
  Description of Artificial Sequence: Synthetic oligonucleotide
aggaagcgcagggagguga

SEQ ID NO: 2526816 - RNA, 19 nt, Artificial Sequence
  Description of Artificial Sequence: Synthetic oligonucleotide
ugccagagacaggaagcgc

SEQ ID NO: 2526817 - RNA, 19 nt, Artificial Sequence
  Description of Artificial Sequence: Synthetic oligonucleotide
caagagcaguggcaggcuc

SEQ ID NO: 2526818 - RNA, 19 nt, Artificial Sequence
  Description of Artificial Sequence: Synthetic oligonucleotide
accuccccuuccuguguac

SEQ ID NO: 2526819 - RNA, 19 nt, Artificial Sequence
  Description of Artificial Sequence: Synthetic oligonucleotide
ugauggggaccuccccuuc

SEQ ID NO: 2526820 - RNA, 19 nt, Artificial Sequence
  Description of Artificial Sequence: Synthetic oligonucleotide
cagguagaggcugugaaua

SEQ ID NO: 2526821 - RNA, 19 nt, Artificial Sequence
  Description of Artificial Sequence: Synthetic oligonucleotide
aauccucgcucugcgcaga

SEQ ID NO: 2526822 - RNA, 19 nt, Artificial Sequence
  Description of Artificial Sequence: Synthetic oligonucleotide
auggggaccuccccuuccu

SEQ ID NO: 2526823 - RNA, 19 nt, Artificial Sequence
  Description of Artificial Sequence: Synthetic oligonucleotide
gaucagggcuucagugaug

SEQ ID NO: 2526824 - RNA, 19 nt, Artificial Sequence
  Description of Artificial Sequence: Synthetic oligonucleotide
aggcuccuaaucaccaucu

SEQ ID NO: 2526825 - RNA, 19 nt, Artificial Sequence
  Description of Artificial Sequence: Synthetic oligonucleotide
caucugagguccagcgcuc

SEQ ID NO: 2526826 - RNA, 19 nt, Artificial Sequence
  Description of Artificial Sequence: Synthetic oligonucleotide
uggagguacuggaggucaa

SEQ ID NO: 2526827 - RNA, 19 nt, Artificial Sequence
  Description of Artificial Sequence: Synthetic oligonucleotide
cagugauggggaccucccc

SEQ ID NO: 2526828 - RNA, 19 nt, Artificial Sequence
  Description of Artificial Sequence: Synthetic oligonucleotide
caggagaggcaggucagug

SEQ ID NO: 2526829 - RNA, 19 nt, Artificial Sequence
  Description of Artificial Sequence: Synthetic oligonucleotide
ccuuccuguguacucuggg

SEQ ID NO: 2526830 - RNA, 19 nt, Artificial Sequence
  Description of Artificial Sequence: Synthetic oligonucleotide
cccuucccgauccaggcgg

SEQ ID NO: 2526831 - RNA, 19 nt, Artificial Sequence
  Description of Artificial Sequence: Synthetic oligonucleotide
ucucaauucucuggaucuu

SEQ ID NO: 2526832 - RNA, 19 nt, Artificial Sequence
  Description of Artificial Sequence: Synthetic oligonucleotide
gaggcccucuaaauuccug

SEQ ID NO: 2526833 - RNA, 19 nt, Artificial Sequence
  Description of Artificial Sequence: Synthetic oligonucleotide
agagcaguggcaggcuccu

SEQ ID NO: 2526834 - RNA, 19 nt, Artificial Sequence
  Description of Artificial Sequence: Synthetic oligonucleotide
uccuugccaagugcucugc

SEQ ID NO: 2526835 - RNA, 19 nt, Artificial Sequence
  Description of Artificial Sequence: Synthetic oligonucleotide
gugucuccauccuugccaa

SEQ ID NO: 2526836 - RNA, 19 nt, Artificial Sequence
  Description of Artificial Sequence: Synthetic oligonucleotide
ccggaggcccucuaaauuc

SEQ ID NO: 2526837 - RNA, 19 nt, Artificial Sequence
  Description of Artificial Sequence: Synthetic oligonucleotide
ucuuggugaucagggcuuc

SEQ ID NO: 2526838 - RNA, 19 nt, Artificial Sequence
  Description of Artificial Sequence: Synthetic oligonucleotide
ccucgcucugcgcagaaug

SEQ ID NO: 2526839 - RNA, 19 nt, Artificial Sequence
  Description of Artificial Sequence: Synthetic oligonucleotide
ggugguccggguugaggag

SEQ ID NO: 2526840 - RNA, 19 nt, Artificial Sequence
  Description of Artificial Sequence: Synthetic oligonucleotide
ggccuuaggggcugacucc

SEQ ID NO: 2526841 - RNA, 19 nt, Artificial Sequence
  Description of Artificial Sequence: Synthetic oligonucleotide
cuguagagguccagaaacu

SEQ ID NO: 2526842 - RNA, 19 nt, Artificial Sequence
  Description of Artificial Sequence: Synthetic oligonucleotide
aggugaugcaugacaaguu

SEQ ID NO: 2526843 - RNA, 19 nt, Artificial Sequence
  Description of Artificial Sequence: Synthetic oligonucleotide
cauccucagagaaggucaa

SEQ ID NO: 2526844 - RNA, 19 nt, Artificial Sequence
  Description of Artificial Sequence: Synthetic oligonucleotide
ccugguguugcuguaguuc

SEQ ID NO: 2526845 - RNA, 19 nt, Artificial Sequence
  Description of Artificial Sequence: Synthetic oligonucleotide
cagcgcuccaauauaggcu

SEQ ID NO: 2526846 - RNA, 19 nt, Artificial Sequence
  Description of Artificial Sequence: Synthetic oligonucleotide
ucugcgcagaaugggccau

SEQ ID NO: 2526847 - RNA, 19 nt, Artificial Sequence
  Description of Artificial Sequence: Synthetic oligonucleotide
ugcgcagaaugggccauuc

SEQ ID NO: 2526848 - RNA, 19 nt, Artificial Sequence
  Description of Artificial Sequence: Synthetic oligonucleotide
gugaugcaugacaaguucu

SEQ ID NO: 2526849 - RNA, 19 nt, Artificial Sequence
  Description of Artificial Sequence: Synthetic oligonucleotide
gcagugacagcagggcugc

SEQ ID NO: 2526850 - RNA, 19 nt, Artificial Sequence
  Description of Artificial Sequence: Synthetic oligonucleotide
caguggcaggcuccuaauc

SEQ ID NO: 2526851 - RNA, 19 nt, Artificial Sequence
  Description of Artificial Sequence: Synthetic oligonucleotide
cugauagaaguaaucccuu

SEQ ID NO: 2526852 - RNA, 19 nt, Artificial Sequence
  Description of Artificial Sequence: Synthetic oligonucleotide
cuggcaugaccuagaguaa

SEQ ID NO: 2526853 - RNA, 19 nt, Artificial Sequence
  Description of Artificial Sequence: Synthetic oligonucleotide
caggcucugcagugacagc

SEQ ID NO: 2526854 - RNA, 19 nt, Artificial Sequence
  Description of Artificial Sequence: Synthetic oligonucleotide
gggaccuccccuuccugug

SEQ ID NO: 2526855 - RNA, 19 nt, Artificial Sequence
  Description of Artificial Sequence: Synthetic oligonucleotide
gagguggccuuaggggcug

SEQ ID NO: 2526856 - RNA, 19 nt, Artificial Sequence
  Description of Artificial Sequence: Synthetic oligonucleotide
ggagauuuuccaccugccu

SEQ ID NO: 2526857 - RNA, 19 nt, Artificial Sequence
  Description of Artificial Sequence: Synthetic oligonucleotide
ccaauauaggcugcuuguc

SEQ ID NO: 2526858 - RNA, 19 nt, Artificial Sequence
  Description of Artificial Sequence: Synthetic oligonucleotide
gcauucuuagcuuccuccu

SEQ ID NO: 2526859 - RNA, 19 nt, Artificial Sequence
  Description of Artificial Sequence: Synthetic oligonucleotide
gggccauucagcuccggaa

SEQ ID NO: 2526860 - RNA, 19 nt, Artificial Sequence
  Description of Artificial Sequence: Synthetic oligonucleotide
gucagugaggacaggcugu

SEQ ID NO: 2526861 - RNA, 19 nt, Artificial Sequence
  Description of Artificial Sequence: Synthetic oligonucleotide
ggaggucaaggagauuuuc

SEQ ID NO: 2526862 - RNA, 19 nt, Artificial Sequence
  Description of Artificial Sequence: Synthetic oligonucleotide
cagucccgggccgaugggc

SEQ ID NO: 2526863 - RNA, 19 nt, Artificial Sequence
  Description of Artificial Sequence: Synthetic oligonucleotide
guaaucccuucccgaucca

SEQ ID NO: 2526864 - RNA, 19 nt, Artificial Sequence
  Description of Artificial Sequence: Synthetic oligonucleotide
gggaggugaugcaugacaa

SEQ ID NO: 2526865 - RNA, 19 nt, Artificial Sequence
  Description of Artificial Sequence: Synthetic oligonucleotide
agucccgggccgaugggca

SEQ ID NO: 2526866 - RNA, 19 nt, Artificial Sequence
  Description of Artificial Sequence: Synthetic oligonucleotide
ucaccccuggcaugaccua

SEQ ID NO: 2526867 - RNA, 19 nt, Artificial Sequence
  Description of Artificial Sequence: Synthetic oligonucleotide
uguguacucugggcagcau

SEQ ID NO: 2526868 - RNA, 19 nt, Artificial Sequence
  Description of Artificial Sequence: Synthetic oligonucleotide
auauuccggaggcccucua

SEQ ID NO: 2526869 - RNA, 19 nt, Artificial Sequence
  Description of Artificial Sequence: Synthetic oligonucleotide
cauccuugccaagugcucu

SEQ ID NO: 2526870 - RNA, 19 nt, Artificial Sequence
  Description of Artificial Sequence: Synthetic oligonucleotide
gaccaccugcugccuucgc

SEQ ID NO: 2526871 - RNA, 19 nt, Artificial Sequence
  Description of Artificial Sequence: Synthetic oligonucleotide
gcuucagugauggggaccu

SEQ ID NO: 2526872 - RNA, 19 nt, Artificial Sequence
  Description of Artificial Sequence: Synthetic oligonucleotide
cgcucugcgcagaaugggc

SEQ ID NO: 2526873 - RNA, 19 nt, Artificial Sequence
  Description of Artificial Sequence: Synthetic oligonucleotide
cggaaauuccuccuccuca

SEQ ID NO: 2526874 - RNA, 19 nt, Artificial Sequence
  Description of Artificial Sequence: Synthetic oligonucleotide
cagagaaggucaaguuccu

SEQ ID NO: 2526875 - RNA, 19 nt, Artificial Sequence
  Description of Artificial Sequence: Synthetic oligonucleotide
ggcaggcuccuaaucacca

SEQ ID NO: 2526876 - RNA, 19 nt, Artificial Sequence
  Description of Artificial Sequence: Synthetic oligonucleotide
cuguguacucugggcagca

SEQ ID NO: 2526877 - RNA, 19 nt, Artificial Sequence
  Description of Artificial Sequence: Synthetic oligonucleotide
gggccgaugggcacagcag

SEQ ID NO: 2526878 - RNA, 19 nt, Artificial Sequence
  Description of Artificial Sequence: Synthetic oligonucleotide
ccuguguacucugggcagc

SEQ ID NO: 2526879 - RNA, 19 nt, Artificial Sequence
  Description of Artificial Sequence: Synthetic oligonucleotide
cggaggcccucuaaauucc

SEQ ID NO: 2526880 - RNA, 19 nt, Artificial Sequence
  Description of Artificial Sequence: Synthetic oligonucleotide
gguccagcgcuccaauaua

SEQ ID NO: 2526881 - RNA, 19 nt, Artificial Sequence
  Description of Artificial Sequence: Synthetic oligonucleotide
caagaguaugaaacaucuu

SEQ ID NO: 2526882 - RNA, 19 nt, Artificial Sequence
  Description of Artificial Sequence: Synthetic oligonucleotide
ccuugccaagugcucugcc

SEQ ID NO: 2526883 - RNA, 19 nt, Artificial Sequence
  Description of Artificial Sequence: Synthetic oligonucleotide
guguacucugggcagcauu

SEQ ID NO: 2526884 - RNA, 19 nt, Artificial Sequence
  Description of Artificial Sequence: Synthetic oligonucleotide
ugccuucgcuccugguguu

SEQ ID NO: 2526885 - RNA, 19 nt, Artificial Sequence
  Description of Artificial Sequence: Synthetic oligonucleotide
ucccgggccgaugggcaca

SEQ ID NO: 2526886 - RNA, 19 nt, Artificial Sequence
  Description of Artificial Sequence: Synthetic oligonucleotide
gccgaugggcacagcaggc

SEQ ID NO: 2526887 - RNA, 19 nt, Artificial Sequence
  Description of Artificial Sequence: Synthetic oligonucleotide
auccucgcucugcgcagaa

SEQ ID NO: 2526888 - RNA, 19 nt, Artificial Sequence
  Description of Artificial Sequence: Synthetic oligonucleotide
cugcagugacagcagggcu

SEQ ID NO: 2526889 - RNA, 19 nt, Artificial Sequence
  Description of Artificial Sequence: Synthetic oligonucleotide
gcaugacaaguucucaauu

SEQ ID NO: 2526890 - RNA, 19 nt, Artificial Sequence
  Description of Artificial Sequence: Synthetic oligonucleotide
cuucccgauccaggcggac

SEQ ID NO: 2526891 - RNA, 19 nt, Artificial Sequence
  Description of Artificial Sequence: Synthetic oligonucleotide
ccuucgcuccugguguugc

SEQ ID NO: 2526892 - RNA, 19 nt, Artificial Sequence
  Description of Artificial Sequence: Synthetic oligonucleotide
caauucucuggaucuuauu

SEQ ID NO: 2526893 - RNA, 19 nt, Artificial Sequence
  Description of Artificial Sequence: Synthetic oligonucleotide
augggccauucagcuccgg

SEQ ID NO: 2526894 - RNA, 19 nt, Artificial Sequence
  Description of Artificial Sequence: Synthetic oligonucleotide
gcagucccgggccgauggg

SEQ ID NO: 2526895 - RNA, 19 nt, Artificial Sequence
  Description of Artificial Sequence: Synthetic oligonucleotide
gucccgggccgaugggcac

SEQ ID NO: 2526896 - RNA, 19 nt, Artificial Sequence
  Description of Artificial Sequence: Synthetic oligonucleotide
gugauggggaccuccccuu

SEQ ID NO: 2526897 - RNA, 19 nt, Artificial Sequence
  Description of Artificial Sequence: Synthetic oligonucleotide
gcaugaccuagaguaaaua

SEQ ID NO: 2526898 - RNA, 19 nt, Artificial Sequence
  Description of Artificial Sequence: Synthetic oligonucleotide
ccaagugcucugccaggac

SEQ ID NO: 2526899 - RNA, 19 nt, Artificial Sequence
  Description of Artificial Sequence: Synthetic oligonucleotide
ccugccugaucugguuucc

SEQ ID NO: 2526900 - RNA, 19 nt, Artificial Sequence
  Description of Artificial Sequence: Synthetic oligonucleotide
ccucaccccuggcaugacc

SEQ ID NO: 2526901 - RNA, 19 nt, Artificial Sequence
  Description of Artificial Sequence: Synthetic oligonucleotide
caggaagcgcagggaggug

SEQ ID NO: 2526902 - RNA, 19 nt, Artificial Sequence
  Description of Artificial Sequence: Synthetic oligonucleotide
cuccugguguugcuguagu

SEQ ID NO: 2526903 - RNA, 19 nt, Artificial Sequence
  Description of Artificial Sequence: Synthetic oligonucleotide
gcccucuaaauuccugaua

SEQ ID NO: 2526904 - RNA, 19 nt, Artificial Sequence
  Description of Artificial Sequence: Synthetic oligonucleotide
guacucugggcagcauucu

SEQ ID NO: 2526905 - RNA, 19 nt, Artificial Sequence
  Description of Artificial Sequence: Synthetic oligonucleotide
ggcggacagucuccaguuc

SEQ ID NO: 2526906 - RNA, 19 nt, Artificial Sequence
  Description of Artificial Sequence: Synthetic oligonucleotide
acuggaggucaaggagauu

SEQ ID NO: 2526907 - RNA, 19 nt, Artificial Sequence
  Description of Artificial Sequence: Synthetic oligonucleotide
uccucaccccuggcaugac

SEQ ID NO: 2526908 - RNA, 19 nt, Artificial Sequence
  Description of Artificial Sequence: Synthetic oligonucleotide
ccgauccaggcggacaguc

SEQ ID NO: 2526909 - RNA, 19 nt, Artificial Sequence
  Description of Artificial Sequence: Synthetic oligonucleotide
ggggaccuccccuuccugu

SEQ ID NO: 2526910 - RNA, 19 nt, Artificial Sequence
  Description of Artificial Sequence: Synthetic oligonucleotide
gguagaggcugugaauauu

SEQ ID NO: 2526911 - RNA, 19 nt, Artificial Sequence
  Description of Artificial Sequence: Synthetic oligonucleotide
cugcagucccgggccgaug

SEQ ID NO: 2526912 - RNA, 19 nt, Artificial Sequence
  Description of Artificial Sequence: Synthetic oligonucleotide
gcgcagaaugggccauuca

SEQ ID NO: 2526913 - RNA, 19 nt, Artificial Sequence
  Description of Artificial Sequence: Synthetic oligonucleotide
ggcaugaccuagaguaaau

SEQ ID NO: 2526914 - RNA, 19 nt, Artificial Sequence
  Description of Artificial Sequence: Synthetic oligonucleotide
cuucgcuccugguguugcu

SEQ ID NO: 2526915 - RNA, 19 nt, Artificial Sequence
  Description of Artificial Sequence: Synthetic oligonucleotide
ggagguggccuuaggggcu

SEQ ID NO: 2526916 - RNA, 19 nt, Artificial Sequence
  Description of Artificial Sequence: Synthetic oligonucleotide
ccggguugaggagguggcc

SEQ ID NO: 2526917 - RNA, 19 nt, Artificial Sequence
  Description of Artificial Sequence: Synthetic oligonucleotide
gccuuaggggcugacuccu

SEQ ID NO: 2526918 - RNA, 19 nt, Artificial Sequence
  Description of Artificial Sequence: Synthetic oligonucleotide
gccuucgcuccugguguug

SEQ ID NO: 2526919 - RNA, 19 nt, Artificial Sequence
  Description of Artificial Sequence: Synthetic oligonucleotide
caccugccugaucugguuu

SEQ ID NO: 2526920 - RNA, 19 nt, Artificial Sequence
  Description of Artificial Sequence: Synthetic oligonucleotide
gguugaggagguggccuua

SEQ ID NO: 2526921 - RNA, 19 nt, Artificial Sequence
  Description of Artificial Sequence: Synthetic oligonucleotide
ggaccuccccuuccugugu

SEQ ID NO: 2526922 - RNA, 19 nt, Artificial Sequence
  Description of Artificial Sequence: Synthetic oligonucleotide
gcgcuccaauauaggcugc

SEQ ID NO: 2526923 - RNA, 19 nt, Artificial Sequence
  Description of Artificial Sequence: Synthetic oligonucleotide
gcaguggcaggcuccuaau

SEQ ID NO: 2526924 - RNA, 19 nt, Artificial Sequence
  Description of Artificial Sequence: Synthetic oligonucleotide
gguggccuuaggggcugac

SEQ ID NO: 2526925 - RNA, 19 nt, Artificial Sequence
  Description of Artificial Sequence: Synthetic oligonucleotide
ccgaugggcacagcaggca

SEQ ID NO: 2526926 - RNA, 19 nt, Artificial Sequence
  Description of Artificial Sequence: Synthetic oligonucleotide
gcaggcuccuaaucaccau

SEQ ID NO: 2526927 - RNA, 19 nt, Artificial Sequence
  Description of Artificial Sequence: Synthetic oligonucleotide
cgggccgaugggcacagca

SEQ ID NO: 2526928 - RNA, 19 nt, Artificial Sequence
  Description of Artificial Sequence: Synthetic oligonucleotide
agguggccuuaggggcuga

SEQ ID NO: 2526929 - RNA, 19 nt, Artificial Sequence
  Description of Artificial Sequence: Synthetic oligonucleotide
ccuucccgauccaggcgga

SEQ ID NO: 2526930 - RNA, 19 nt, Artificial Sequence
  Description of Artificial Sequence: Synthetic oligonucleotide
gguccggguugaggaggug

SEQ ID NO: 2526931 - RNA, 19 nt, Artificial Sequence
  Description of Artificial Sequence: Synthetic oligonucleotide
ggaggcccucuaaauuccu

SEQ ID NO: 2526932 - RNA, 19 nt, Artificial Sequence
  Description of Artificial Sequence: Synthetic oligonucleotide
cugccugaucugguuuccu

SEQ ID NO: 2526933 - RNA, 19 nt, Artificial Sequence
  Description of Artificial Sequence: Synthetic oligonucleotide
ggcuccuaaucaccaucuu

SEQ ID NO: 2526934 - RNA, 19 nt, Artificial Sequence
  Description of Artificial Sequence: Synthetic oligonucleotide
ggaagcgcagggaggugau

SEQ ID NO: 2526935 - RNA, 19 nt, Artificial Sequence
  Description of Artificial Sequence: Synthetic oligonucleotide
gagcaguggcaggcuccua

SEQ ID NO: 2526936 - RNA, 19 nt, Artificial Sequence
  Description of Artificial Sequence: Synthetic oligonucleotide
gcaggagaggcaggucagu

SEQ ID NO: 2526937 - RNA, 19 nt, Artificial Sequence
  Description of Artificial Sequence: Synthetic oligonucleotide
cagugaggacaggcugugu

SEQ ID NO: 2526938 - RNA, 19 nt, Artificial Sequence
  Description of Artificial Sequence: Synthetic oligonucleotide
caggaccaccugcugccuu

SEQ ID NO: 2526939 - RNA, 19 nt, Artificial Sequence
  Description of Artificial Sequence: Synthetic oligonucleotide
cccgggccgaugggcacag

SEQ ID NO: 2526940 - RNA, 19 nt, Artificial Sequence
  Description of Artificial Sequence: Synthetic oligonucleotide
cagugacagcagggcugca

SEQ ID NO: 2526941 - RNA, 19 nt, Artificial Sequence
  Description of Artificial Sequence: Synthetic oligonucleotide
ccaagagcaguggcaggcu

SEQ ID NO: 2526942 - RNA, 19 nt, Artificial Sequence
  Description of Artificial Sequence: Synthetic oligonucleotide
cgauccaggcggacagucu

SEQ ID NO: 2526943 - RNA, 19 nt, Artificial Sequence
  Description of Artificial Sequence: Synthetic oligonucleotide
gcgcagggaggugaugcau

SEQ ID NO: 2526944 - RNA, 19 nt, Artificial Sequence
  Description of Artificial Sequence: Synthetic oligonucleotide
cggguugaggagguggccu

SEQ ID NO: 2526945 - RNA, 19 nt, Artificial Sequence
  Description of Artificial Sequence: Synthetic oligonucleotide
cccuggcaugaccuagagu

SEQ ID NO: 2526946 - RNA, 19 nt, Artificial Sequence
  Description of Artificial Sequence: Synthetic oligonucleotide
ccuccccuuccuguguacu

SEQ ID NO: 2526947 - RNA, 19 nt, Artificial Sequence
  Description of Artificial Sequence: Synthetic oligonucleotide
gcugcagucccgggccgau

SEQ ID NO: 2526948 - RNA, 19 nt, Artificial Sequence
  Description of Artificial Sequence: Synthetic oligonucleotide
ccuuaggggcugacuccuu

SEQ ID NO: 2526949 - RNA, 19 nt, Artificial Sequence
  Description of Artificial Sequence: Synthetic oligonucleotide
ccgggccgaugggcacagc

SEQ ID NO: 2526950 - RNA, 19 nt, Artificial Sequence
  Description of Artificial Sequence: Synthetic oligonucleotide
cccgauccaggcggacagu

SEQ ID NO: 2526951 - RNA, 19 nt, Artificial Sequence
  Description of Artificial Sequence: Synthetic oligonucleotide
ucgaacuucaccaagacga

SEQ ID NO: 2526952 - RNA, 19 nt, Artificial Sequence
  Description of Artificial Sequence: Synthetic oligonucleotide
aaagugauuguguccaagg

SEQ ID NO: 2526953 - RNA, 19 nt, Artificial Sequence
  Description of Artificial Sequence: Synthetic oligonucleotide
auagaaagugauugugucc

SEQ ID NO: 2526954 - RNA, 19 nt, Artificial Sequence
  Description of Artificial Sequence: Synthetic oligonucleotide
gaagagguagaauacuggg

SEQ ID NO: 2526955 - RNA, 19 nt, Artificial Sequence
  Description of Artificial Sequence: Synthetic oligonucleotide
gauguuuaagcucuucugc

SEQ ID NO: 2526956 - RNA, 19 nt, Artificial Sequence
  Description of Artificial Sequence: Synthetic oligonucleotide
uucaccaagacgaacuugc

SEQ ID NO: 2526957 - RNA, 19 nt, Artificial Sequence
  Description of Artificial Sequence: Synthetic oligonucleotide
aagagaucaucgcuggagg

SEQ ID NO: 2526958 - RNA, 19 nt, Artificial Sequence
  Description of Artificial Sequence: Synthetic oligonucleotide
gagaauagacagcaguggg

SEQ ID NO: 2526959 - RNA, 19 nt, Artificial Sequence
  Description of Artificial Sequence: Synthetic oligonucleotide
uuuggggaugaccuuauag

SEQ ID NO: 2526960 - RNA, 19 nt, Artificial Sequence
  Description of Artificial Sequence: Synthetic oligonucleotide
uccgauucguuucugaggc

SEQ ID NO: 2526961 - RNA, 19 nt, Artificial Sequence
  Description of Artificial Sequence: Synthetic oligonucleotide
uucaagauggccuggcggg

SEQ ID NO: 2526962 - RNA, 19 nt, Artificial Sequence
  Description of Artificial Sequence: Synthetic oligonucleotide
aagacgaacuugcuuuugg

SEQ ID NO: 2526963 - RNA, 19 nt, Artificial Sequence
  Description of Artificial Sequence: Synthetic oligonucleotide
cuuugaugaacucaccugc

SEQ ID NO: 2526964 - RNA, 19 nt, Artificial Sequence
  Description of Artificial Sequence: Synthetic oligonucleotide
uuauagaaagugauugugu

SEQ ID NO: 2526965 - RNA, 19 nt, Artificial Sequence
  Description of Artificial Sequence: Synthetic oligonucleotide
uucucaaucagcuugccaa

SEQ ID NO: 2526966 - RNA, 19 nt, Artificial Sequence
  Description of Artificial Sequence: Synthetic oligonucleotide
uagaauacuggguaguucu

SEQ ID NO: 2526967 - RNA, 19 nt, Artificial Sequence
  Description of Artificial Sequence: Synthetic oligonucleotide
aauccgauucguuucugag

SEQ ID NO: 2526968 - RNA, 19 nt, Artificial Sequence
  Description of Artificial Sequence: Synthetic oligonucleotide
uccauguucagcuugucac

SEQ ID NO: 2526969 - RNA, 19 nt, Artificial Sequence
  Description of Artificial Sequence: Synthetic oligonucleotide
auaggguucucaaaguccc

SEQ ID NO: 2526970 - RNA, 19 nt, Artificial Sequence
  Description of Artificial Sequence: Synthetic oligonucleotide
ucacuuagcuccauguuca

SEQ ID NO: 2526971 - RNA, 19 nt, Artificial Sequence
  Description of Artificial Sequence: Synthetic oligonucleotide
uagaaagugauugugucca

SEQ ID NO: 2526972 - RNA, 19 nt, Artificial Sequence
  Description of Artificial Sequence: Synthetic oligonucleotide
uccaagaucuuccccauga

SEQ ID NO: 2526973 - RNA, 19 nt, Artificial Sequence
  Description of Artificial Sequence: Synthetic oligonucleotide
ugaugaacucaccugccag

SEQ ID NO: 2526974 - RNA, 19 nt, Artificial Sequence
  Description of Artificial Sequence: Synthetic oligonucleotide
uguuuaagcucuucugcag

SEQ ID NO: 2526975 - RNA, 19 nt, Artificial Sequence
  Description of Artificial Sequence: Synthetic oligonucleotide
ugccccuguuucaagaugg

SEQ ID NO: 2526976 - RNA, 19 nt, Artificial Sequence
  Description of Artificial Sequence: Synthetic oligonucleotide
uugcuuuuggggaugaccu

SEQ ID NO: 2526977 - RNA, 19 nt, Artificial Sequence
  Description of Artificial Sequence: Synthetic oligonucleotide
uuggggaugaccuuauaga

SEQ ID NO: 2526978 - RNA, 19 nt, Artificial Sequence
  Description of Artificial Sequence: Synthetic oligonucleotide
gacgaacuugcuuuugggg

SEQ ID NO: 2526979 - RNA, 19 nt, Artificial Sequence
  Description of Artificial Sequence: Synthetic oligonucleotide
uuaaucgccccacuguaug

SEQ ID NO: 2526980 - RNA, 19 nt, Artificial Sequence
  Description of Artificial Sequence: Synthetic oligonucleotide
aacucguccugcuucucac

SEQ ID NO: 2526981 - RNA, 19 nt, Artificial Sequence
  Description of Artificial Sequence: Synthetic oligonucleotide
ugaccuuauagaaagugau

SEQ ID NO: 2526982 - RNA, 19 nt, Artificial Sequence
  Description of Artificial Sequence: Synthetic oligonucleotide
uucacuuagcuccauguuc

SEQ ID NO: 2526983 - RNA, 19 nt, Artificial Sequence
  Description of Artificial Sequence: Synthetic oligonucleotide
cuuauagaaagugauugug

SEQ ID NO: 2526984 - RNA, 19 nt, Artificial Sequence
  Description of Artificial Sequence: Synthetic oligonucleotide
ucaaucagcuugccaaucc

SEQ ID NO: 2526985 - RNA, 19 nt, Artificial Sequence
  Description of Artificial Sequence: Synthetic oligonucleotide
uguguccaagggaagggcg

SEQ ID NO: 2526986 - RNA, 19 nt, Artificial Sequence
  Description of Artificial Sequence: Synthetic oligonucleotide
ugggugucgaacuucacca

SEQ ID NO: 2526987 - RNA, 19 nt, Artificial Sequence
  Description of Artificial Sequence: Synthetic oligonucleotide
ucaccgugguccaagaucu

SEQ ID NO: 2526988 - RNA, 19 nt, Artificial Sequence
  Description of Artificial Sequence: Synthetic oligonucleotide
gggaugaccuuauagaaag

SEQ ID NO: 2526989 - RNA, 19 nt, Artificial Sequence
  Description of Artificial Sequence: Synthetic oligonucleotide
agagaucaucgcuggaggc

SEQ ID NO: 2526990 - RNA, 19 nt, Artificial Sequence
  Description of Artificial Sequence: Synthetic oligonucleotide
gaugaccuuauagaaagug

SEQ ID NO: 2526991 - RNA, 19 nt, Artificial Sequence
  Description of Artificial Sequence: Synthetic oligonucleotide
ucuuccggaaggcagucag

SEQ ID NO: 2526992 - RNA, 19 nt, Artificial Sequence
  Description of Artificial Sequence: Synthetic oligonucleotide
agucaggauguuuaagcuc

SEQ ID NO: 2526993 - RNA, 19 nt, Artificial Sequence
  Description of Artificial Sequence: Synthetic oligonucleotide
ucaccguagucugagaucc

SEQ ID NO: 2526994 - RNA, 19 nt, Artificial Sequence
  Description of Artificial Sequence: Synthetic oligonucleotide
ucagccagccgcuugaacu

SEQ ID NO: 2526995 - RNA, 19 nt, Artificial Sequence
  Description of Artificial Sequence: Synthetic oligonucleotide
accauagggauacugggug

SEQ ID NO: 2526996 - RNA, 19 nt, Artificial Sequence
  Description of Artificial Sequence: Synthetic oligonucleotide
uccuucacaccugagaggc

SEQ ID NO: 2526997 - RNA, 19 nt, Artificial Sequence
  Description of Artificial Sequence: Synthetic oligonucleotide
aacuucaccaagacgaacu

SEQ ID NO: 2526998 - RNA, 19 nt, Artificial Sequence
  Description of Artificial Sequence: Synthetic oligonucleotide
uggggagagggaaacggcg

SEQ ID NO: 2526999 - RNA, 19 nt, Artificial Sequence
  Description of Artificial Sequence: Synthetic oligonucleotide
agugauuguguccaaggga

SEQ ID NO: 2527000 - RNA, 19 nt, Artificial Sequence
  Description of Artificial Sequence: Synthetic oligonucleotide
accaagagaucaucgcugg

SEQ ID NO: 2527001 - RNA, 19 nt, Artificial Sequence
  Description of Artificial Sequence: Synthetic oligonucleotide
accaagacgaacuugcuuu

SEQ ID NO: 2527002 - RNA, 19 nt, Artificial Sequence
  Description of Artificial Sequence: Synthetic oligonucleotide
uagucugagauccccaccu

SEQ ID NO: 2527003 - RNA, 19 nt, Artificial Sequence
  Description of Artificial Sequence: Synthetic oligonucleotide
acgaacuugcuuuugggga

SEQ ID NO: 2527004 - RNA, 19 nt, Artificial Sequence
  Description of Artificial Sequence: Synthetic oligonucleotide
auguuuaagcucuucugca

SEQ ID NO: 2527005 - RNA, 19 nt, Artificial Sequence
  Description of Artificial Sequence: Synthetic oligonucleotide
uuuucagccagccgcuuga

SEQ ID NO: 2527006 - RNA, 19 nt, Artificial Sequence
  Description of Artificial Sequence: Synthetic oligonucleotide
agacgaacuugcuuuuggg

SEQ ID NO: 2527007 - RNA, 19 nt, Artificial Sequence
  Description of Artificial Sequence: Synthetic oligonucleotide
uacuggguaguucucuuug

SEQ ID NO: 2527008 - RNA, 19 nt, Artificial Sequence
  Description of Artificial Sequence: Synthetic oligonucleotide
uggguaguucucuuugucc

SEQ ID NO: 2527009 - RNA, 19 nt, Artificial Sequence
  Description of Artificial Sequence: Synthetic oligonucleotide
agaauagacagcagugggg

SEQ ID NO: 2527010 - RNA, 19 nt, Artificial Sequence
  Description of Artificial Sequence: Synthetic oligonucleotide
ucugagauccccaccucug

SEQ ID NO: 2527011 - RNA, 19 nt, Artificial Sequence
  Description of Artificial Sequence: Synthetic oligonucleotide
aagggaagggcgcccuucg

SEQ ID NO: 2527012 - RNA, 19 nt, Artificial Sequence
  Description of Artificial Sequence: Synthetic oligonucleotide
ugccaccaagagaucaucg

SEQ ID NO: 2527013 - RNA, 19 nt, Artificial Sequence
  Description of Artificial Sequence: Synthetic oligonucleotide
gaauagacagcagugggga

SEQ ID NO: 2527014 - RNA, 19 nt, Artificial Sequence
  Description of Artificial Sequence: Synthetic oligonucleotide
uucucaaaguccccauccc

SEQ ID NO: 2527015 - RNA, 19 nt, Artificial Sequence
  Description of Artificial Sequence: Synthetic oligonucleotide
aggauguuuaagcucuucu

SEQ ID NO: 2527016 - RNA, 19 nt, Artificial Sequence
  Description of Artificial Sequence: Synthetic oligonucleotide
uaaucgccccacuguaugg

SEQ ID NO: 2527017 - RNA, 19 nt, Artificial Sequence
  Description of Artificial Sequence: Synthetic oligonucleotide
uugaugaacucaccugcca

SEQ ID NO: 2527018 - RNA, 19 nt, Artificial Sequence
  Description of Artificial Sequence: Synthetic oligonucleotide
caggcaaccaggcaugccc

SEQ ID NO: 2527019 - RNA, 19 nt, Artificial Sequence
  Description of Artificial Sequence: Synthetic oligonucleotide
aauacuggguaguucucuu

SEQ ID NO: 2527020 - RNA, 19 nt, Artificial Sequence
  Description of Artificial Sequence: Synthetic oligonucleotide
uggggaugaccuuauagaa

SEQ ID NO: 2527021 - RNA, 19 nt, Artificial Sequence
  Description of Artificial Sequence: Synthetic oligonucleotide
cgaauuuucagccagccgc

SEQ ID NO: 2527022 - RNA, 19 nt, Artificial Sequence
  Description of Artificial Sequence: Synthetic oligonucleotide
caagagaucaucgcuggag

SEQ ID NO: 2527023 - RNA, 19 nt, Artificial Sequence
  Description of Artificial Sequence: Synthetic oligonucleotide
ucuuuguccagcuuauauu

SEQ ID NO: 2527024 - RNA, 19 nt, Artificial Sequence
  Description of Artificial Sequence: Synthetic oligonucleotide
uaugggauaggguucucaa

SEQ ID NO: 2527025 - RNA, 19 nt, Artificial Sequence
  Description of Artificial Sequence: Synthetic oligonucleotide
cuugaacucguccugcuuc

SEQ ID NO: 2527026 - RNA, 19 nt, Artificial Sequence
  Description of Artificial Sequence: Synthetic oligonucleotide
gaacucaccugccagggca

SEQ ID NO: 2527027 - RNA, 19 nt, Artificial Sequence
  Description of Artificial Sequence: Synthetic oligonucleotide
ugccccuuuagccagcgcu

SEQ ID NO: 2527028 - RNA, 19 nt, Artificial Sequence
  Description of Artificial Sequence: Synthetic oligonucleotide
ucccggaagagguagaaua

SEQ ID NO: 2527029 - RNA, 19 nt, Artificial Sequence
  Description of Artificial Sequence: Synthetic oligonucleotide
accucugccaccaagagau

SEQ ID NO: 2527030 - RNA, 19 nt, Artificial Sequence
  Description of Artificial Sequence: Synthetic oligonucleotide
caaucagcuugccaauccg

SEQ ID NO: 2527031 - RNA, 19 nt, Artificial Sequence
  Description of Artificial Sequence: Synthetic oligonucleotide
agaucaucgcuggaggccg

SEQ ID NO: 2527032 - RNA, 19 nt, Artificial Sequence
  Description of Artificial Sequence: Synthetic oligonucleotide
ugucgaacuucaccaagac

SEQ ID NO: 2527033 - RNA, 19 nt, Artificial Sequence
  Description of Artificial Sequence: Synthetic oligonucleotide
gcagucaggauguuuaagc

SEQ ID NO: 2527034 - RNA, 19 nt, Artificial Sequence
  Description of Artificial Sequence: Synthetic oligonucleotide
aaucgccccacuguauggg

SEQ ID NO: 2527035 - RNA, 19 nt, Artificial Sequence
  Description of Artificial Sequence: Synthetic oligonucleotide
gaaagugauuguguccaag

SEQ ID NO: 2527036 - RNA, 19 nt, Artificial Sequence
  Description of Artificial Sequence: Synthetic oligonucleotide
gucgaacuucaccaagacg

SEQ ID NO: 2527037 - RNA, 19 nt, Artificial Sequence
  Description of Artificial Sequence: Synthetic oligonucleotide
aagagguagaauacugggu

SEQ ID NO: 2527038 - RNA, 19 nt, Artificial Sequence
  Description of Artificial Sequence: Synthetic oligonucleotide
ugagguacuggcuggccca

SEQ ID NO: 2527039 - RNA, 19 nt, Artificial Sequence
  Description of Artificial Sequence: Synthetic oligonucleotide
cauguucagcuugucaccg

SEQ ID NO: 2527040 - RNA, 19 nt, Artificial Sequence
  Description of Artificial Sequence: Synthetic oligonucleotide
acuguaugggauaggguuc

SEQ ID NO: 2527041 - RNA, 19 nt, Artificial Sequence
  Description of Artificial Sequence: Synthetic oligonucleotide
aggcggagcagagaggagc

SEQ ID NO: 2527042 - RNA, 19 nt, Artificial Sequence
  Description of Artificial Sequence: Synthetic oligonucleotide
aggagaauagacagcagug

SEQ ID NO: 2527043 - RNA, 19 nt, Artificial Sequence
  Description of Artificial Sequence: Synthetic oligonucleotide
ugcuucucaccauagggau

SEQ ID NO: 2527044 - RNA, 19 nt, Artificial Sequence
  Description of Artificial Sequence: Synthetic oligonucleotide
ugucaccguagucugagau

SEQ ID NO: 2527045 - RNA, 19 nt, Artificial Sequence
  Description of Artificial Sequence: Synthetic oligonucleotide
caccaagagaucaucgcug

SEQ ID NO: 2527046 - RNA, 19 nt, Artificial Sequence
  Description of Artificial Sequence: Synthetic oligonucleotide
ggauguuuaagcucuucug

SEQ ID NO: 2527047 - RNA, 19 nt, Artificial Sequence
  Description of Artificial Sequence: Synthetic oligonucleotide
accuuaaucgccccacugu

SEQ ID NO: 2527048 - RNA, 19 nt, Artificial Sequence
  Description of Artificial Sequence: Synthetic oligonucleotide
uacugggugucgaacuuca

SEQ ID NO: 2527049 - RNA, 19 nt, Artificial Sequence
  Description of Artificial Sequence: Synthetic oligonucleotide
cagcuugccaauccgauuc

SEQ ID NO: 2527050 - RNA, 19 nt, Artificial Sequence
  Description of Artificial Sequence: Synthetic oligonucleotide
ggagaauagacagcagugg

SEQ ID NO: 2527051 - RNA, 19 nt, Artificial Sequence
  Description of Artificial Sequence: Synthetic oligonucleotide
augaacucaccugccaggg

SEQ ID NO: 2527052 - RNA, 19 nt, Artificial Sequence
  Description of Artificial Sequence: Synthetic oligonucleotide
gagaucaucgcuggaggcc

SEQ ID NO: 2527053 - RNA, 19 nt, Artificial Sequence
  Description of Artificial Sequence: Synthetic oligonucleotide
accguagucugagaucccc

SEQ ID NO: 2527054 - RNA, 19 nt, Artificial Sequence
  Description of Artificial Sequence: Synthetic oligonucleotide
agauccccaccucugccac

SEQ ID NO: 2527055 - RNA, 19 nt, Artificial Sequence
  Description of Artificial Sequence: Synthetic oligonucleotide
uggcgggccucuaugcugg

SEQ ID NO: 2527056 - RNA, 19 nt, Artificial Sequence
  Description of Artificial Sequence: Synthetic oligonucleotide
gauucguuucugaggcugg

SEQ ID NO: 2527057 - RNA, 19 nt, Artificial Sequence
  Description of Artificial Sequence: Synthetic oligonucleotide
uggaggccgaauuuucagc

SEQ ID NO: 2527058 - RNA, 19 nt, Artificial Sequence
  Description of Artificial Sequence: Synthetic oligonucleotide
cuugucaccguagucugag

SEQ ID NO: 2527059 - RNA, 19 nt, Artificial Sequence
  Description of Artificial Sequence: Synthetic oligonucleotide
accugagaggccauccugc

SEQ ID NO: 2527060 - RNA, 19 nt, Artificial Sequence
  Description of Artificial Sequence: Synthetic oligonucleotide
uuucacuuagcuccauguu

SEQ ID NO: 2527061 - RNA, 19 nt, Artificial Sequence
  Description of Artificial Sequence: Synthetic oligonucleotide
auuuucagccagccgcuug

SEQ ID NO: 2527062 - RNA, 19 nt, Artificial Sequence
  Description of Artificial Sequence: Synthetic oligonucleotide
aggccgaauuuucagccag

SEQ ID NO: 2527063 - RNA, 19 nt, Artificial Sequence
  Description of Artificial Sequence: Synthetic oligonucleotide
aaggcagucaggauguuua

SEQ ID NO: 2527064 - RNA, 19 nt, Artificial Sequence
  Description of Artificial Sequence: Synthetic oligonucleotide
uucgugugcaggccgcugc

SEQ ID NO: 2527065 - RNA, 19 nt, Artificial Sequence
  Description of Artificial Sequence: Synthetic oligonucleotide
uagacagcaguggggagag

SEQ ID NO: 2527066 - RNA, 19 nt, Artificial Sequence
  Description of Artificial Sequence: Synthetic oligonucleotide
agcuugucaccguagucug

SEQ ID NO: 2527067 - RNA, 19 nt, Artificial Sequence
  Description of Artificial Sequence: Synthetic oligonucleotide
ccugcuucucaccauaggg

SEQ ID NO: 2527068 - RNA, 19 nt, Artificial Sequence
  Description of Artificial Sequence: Synthetic oligonucleotide
cucaccgugguccaagauc

SEQ ID NO: 2527069 - RNA, 19 nt, Artificial Sequence
  Description of Artificial Sequence: Synthetic oligonucleotide
gcuuugaugaacucaccug

SEQ ID NO: 2527070 - RNA, 19 nt, Artificial Sequence
  Description of Artificial Sequence: Synthetic oligonucleotide
acucguccugcuucucacc

SEQ ID NO: 2527071 - RNA, 19 nt, Artificial Sequence
  Description of Artificial Sequence: Synthetic oligonucleotide
ugccaauccgauucguuuc

SEQ ID NO: 2527072 - RNA, 19 nt, Artificial Sequence
  Description of Artificial Sequence: Synthetic oligonucleotide
cuggaggccgaauuuucag

SEQ ID NO: 2527073 - RNA, 19 nt, Artificial Sequence
  Description of Artificial Sequence: Synthetic oligonucleotide
ucauacgcaggcaggcaac

SEQ ID NO: 2527074 - RNA, 19 nt, Artificial Sequence
  Description of Artificial Sequence: Synthetic oligonucleotide
gaccuuaaucgccccacug

SEQ ID NO: 2527075 - RNA, 19 nt, Artificial Sequence
  Description of Artificial Sequence: Synthetic oligonucleotide
uugaacucguccugcuucu

SEQ ID NO: 2527076 - RNA, 19 nt, Artificial Sequence
  Description of Artificial Sequence: Synthetic oligonucleotide
uugccaauccgauucguuu

SEQ ID NO: 2527077 - RNA, 19 nt, Artificial Sequence
  Description of Artificial Sequence: Synthetic oligonucleotide
ugccagggcaucauacgca

SEQ ID NO: 2527078 - RNA, 19 nt, Artificial Sequence
  Description of Artificial Sequence: Synthetic oligonucleotide
ucacucaucuuguucucaa

SEQ ID NO: 2527079 - RNA, 19 nt, Artificial Sequence
  Description of Artificial Sequence: Synthetic oligonucleotide
gugauuguguccaagggaa

SEQ ID NO: 2527080 - RNA, 19 nt, Artificial Sequence
  Description of Artificial Sequence: Synthetic oligonucleotide
uguucagcuugucaccgua

SEQ ID NO: 2527081 - RNA, 19 nt, Artificial Sequence
  Description of Artificial Sequence: Synthetic oligonucleotide
ggaggccgaauuuucagcc

SEQ ID NO: 2527082 - RNA, 19 nt, Artificial Sequence
  Description of Artificial Sequence: Synthetic oligonucleotide
aucauacgcaggcaggcaa

SEQ ID NO: 2527083 - RNA, 19 nt, Artificial Sequence
  Description of Artificial Sequence: Synthetic oligonucleotide
augaccuuauagaaaguga

SEQ ID NO: 2527084 - RNA, 19 nt, Artificial Sequence
  Description of Artificial Sequence: Synthetic oligonucleotide
ucugccaccaagagaucau

SEQ ID NO: 2527085 - RNA, 19 nt, Artificial Sequence
  Description of Artificial Sequence: Synthetic oligonucleotide
aaucagcuugccaauccga

SEQ ID NO: 2527086 - RNA, 19 nt, Artificial Sequence
  Description of Artificial Sequence: Synthetic oligonucleotide
cugccagggcaucauacgc

SEQ ID NO: 2527087 - RNA, 19 nt, Artificial Sequence
  Description of Artificial Sequence: Synthetic oligonucleotide
auagggauacugggugucg

SEQ ID NO: 2527088 - RNA, 19 nt, Artificial Sequence
  Description of Artificial Sequence: Synthetic oligonucleotide
uugcugucacucaucuugu

SEQ ID NO: 2527089 - RNA, 19 nt, Artificial Sequence
  Description of Artificial Sequence: Synthetic oligonucleotide
agcuugccaauccgauucg

SEQ ID NO: 2527090 - RNA, 19 nt, Artificial Sequence
  Description of Artificial Sequence: Synthetic oligonucleotide
ugaacucaccugccagggc

SEQ ID NO: 2527091 - RNA, 19 nt, Artificial Sequence
  Description of Artificial Sequence: Synthetic oligonucleotide
cuuccccaugaucuugagg

SEQ ID NO: 2527092 - RNA, 19 nt, Artificial Sequence
  Description of Artificial Sequence: Synthetic oligonucleotide
ucucaccauagggauacug

SEQ ID NO: 2527093 - RNA, 19 nt, Artificial Sequence
  Description of Artificial Sequence: Synthetic oligonucleotide
guagucugagauccccacc

SEQ ID NO: 2527094 - RNA, 19 nt, Artificial Sequence
  Description of Artificial Sequence: Synthetic oligonucleotide
agccgcuugaacucguccu

SEQ ID NO: 2527095 - RNA, 19 nt, Artificial Sequence
  Description of Artificial Sequence: Synthetic oligonucleotide
agucugagauccccaccuc

SEQ ID NO: 2527096 - RNA, 19 nt, Artificial Sequence
  Description of Artificial Sequence: Synthetic oligonucleotide
uuuguccagcuuauauuuu

SEQ ID NO: 2527097 - RNA, 19 nt, Artificial Sequence
  Description of Artificial Sequence: Synthetic oligonucleotide
aaguccucaccguggucca

SEQ ID NO: 2527098 - RNA, 19 nt, Artificial Sequence
  Description of Artificial Sequence: Synthetic oligonucleotide
ucaccaagacgaacuugcu

SEQ ID NO: 2527099 - RNA, 19 nt, Artificial Sequence
  Description of Artificial Sequence: Synthetic oligonucleotide
uuguguccaagggaagggc

SEQ ID NO: 2527100 - RNA, 19 nt, Artificial Sequence
  Description of Artificial Sequence: Synthetic oligonucleotide
agaauacuggguaguucuc

SEQ ID NO: 2527101 - RNA, 19 nt, Artificial Sequence
  Description of Artificial Sequence: Synthetic oligonucleotide
gucuccuucacaccugaga

SEQ ID NO: 2527102 - RNA, 19 nt, Artificial Sequence
  Description of Artificial Sequence: Synthetic oligonucleotide
auacugggugucgaacuuc

SEQ ID NO: 2527103 - RNA, 19 nt, Artificial Sequence
  Description of Artificial Sequence: Synthetic oligonucleotide
cugagauccccaccucugc

SEQ ID NO: 2527104 - RNA, 19 nt, Artificial Sequence
  Description of Artificial Sequence: Synthetic oligonucleotide
uaggguucucaaagucccc

SEQ ID NO: 2527105 - RNA, 19 nt, Artificial Sequence
  Description of Artificial Sequence: Synthetic oligonucleotide
cugcuucucaccauaggga

SEQ ID NO: 2527106 - RNA, 19 nt, Artificial Sequence
  Description of Artificial Sequence: Synthetic oligonucleotide
guaguucucuuuguccagc

SEQ ID NO: 2527107 - RNA, 19 nt, Artificial Sequence
  Description of Artificial Sequence: Synthetic oligonucleotide
cuuuguccagcuuauauuu

SEQ ID NO: 2527108 - RNA, 19 nt, Artificial Sequence
  Description of Artificial Sequence: Synthetic oligonucleotide
auucguuucugaggcuggg

SEQ ID NO: 2527109 - RNA, 19 nt, Artificial Sequence
  Description of Artificial Sequence: Synthetic oligonucleotide
uguccaagggaagggcgcc

SEQ ID NO: 2527110 - RNA, 19 nt, Artificial Sequence
  Description of Artificial Sequence: Synthetic oligonucleotide
ggguaguucucuuugucca

SEQ ID NO: 2527111 - RNA, 19 nt, Artificial Sequence
  Description of Artificial Sequence: Synthetic oligonucleotide
ggauaggguucucaaaguc

SEQ ID NO: 2527112 - RNA, 19 nt, Artificial Sequence
  Description of Artificial Sequence: Synthetic oligonucleotide
accgugguccaagaucuuc

SEQ ID NO: 2527113 - RNA, 19 nt, Artificial Sequence
  Description of Artificial Sequence: Synthetic oligonucleotide
gagauccccaccucugcca

SEQ ID NO: 2527114 - RNA, 19 nt, Artificial Sequence
  Description of Artificial Sequence: Synthetic oligonucleotide
agcgcuggauggcuccgac

SEQ ID NO: 2527115 - RNA, 19 nt, Artificial Sequence
  Description of Artificial Sequence: Synthetic oligonucleotide
gaacucguccugcuucuca

SEQ ID NO: 2527116 - RNA, 19 nt, Artificial Sequence
  Description of Artificial Sequence: Synthetic oligonucleotide
cuggguaguucucuuuguc

SEQ ID NO: 2527117 - RNA, 19 nt, Artificial Sequence
  Description of Artificial Sequence: Synthetic oligonucleotide
ccuguuucaagauggccug

SEQ ID NO: 2527118 - RNA, 19 nt, Artificial Sequence
  Description of Artificial Sequence: Synthetic oligonucleotide
guagaauacuggguaguuc

SEQ ID NO: 2527119 - RNA, 19 nt, Artificial Sequence
  Description of Artificial Sequence: Synthetic oligonucleotide
cacuguaugggauaggguu

SEQ ID NO: 2527120 - RNA, 19 nt, Artificial Sequence
  Description of Artificial Sequence: Synthetic oligonucleotide
aggcaugcccagguagacc

SEQ ID NO: 2527121 - RNA, 19 nt, Artificial Sequence
  Description of Artificial Sequence: Synthetic oligonucleotide
gaggcugggaaguccucac

SEQ ID NO: 2527122 - RNA, 19 nt, Artificial Sequence
  Description of Artificial Sequence: Synthetic oligonucleotide
acuucaccaagacgaacuu

SEQ ID NO: 2527123 - RNA, 19 nt, Artificial Sequence
  Description of Artificial Sequence: Synthetic oligonucleotide
ucaagauggccuggcgggc

SEQ ID NO: 2527124 - RNA, 19 nt, Artificial Sequence
  Description of Artificial Sequence: Synthetic oligonucleotide
gucaccguagucugagauc

SEQ ID NO: 2527125 - RNA, 19 nt, Artificial Sequence
  Description of Artificial Sequence: Synthetic oligonucleotide
gaacuucaccaagacgaac

SEQ ID NO: 2527126 - RNA, 19 nt, Artificial Sequence
  Description of Artificial Sequence: Synthetic oligonucleotide
guccccaucccggaagagg

SEQ ID NO: 2527127 - RNA, 19 nt, Artificial Sequence
  Description of Artificial Sequence: Synthetic oligonucleotide
cauagggauacuggguguc

SEQ ID NO: 2527128 - RNA, 19 nt, Artificial Sequence
  Description of Artificial Sequence: Synthetic oligonucleotide
ucgugugcaggccgcugcc

SEQ ID NO: 2527129 - RNA, 19 nt, Artificial Sequence
  Description of Artificial Sequence: Synthetic oligonucleotide
ugucuccuucacaccugag

SEQ ID NO: 2527130 - RNA, 19 nt, Artificial Sequence
  Description of Artificial Sequence: Synthetic oligonucleotide
cauacgcaggcaggcaacc

SEQ ID NO: 2527131 - RNA, 19 nt, Artificial Sequence
  Description of Artificial Sequence: Synthetic oligonucleotide
uccgaccuuaaucgcccca

SEQ ID NO: 2527132 - RNA, 19 nt, Artificial Sequence
  Description of Artificial Sequence: Synthetic oligonucleotide
augggauaggguucucaaa

SEQ ID NO: 2527133 - RNA, 19 nt, Artificial Sequence
  Description of Artificial Sequence: Synthetic oligonucleotide
gccaccaagagaucaucgc

SEQ ID NO: 2527134 - RNA, 19 nt, Artificial Sequence
  Description of Artificial Sequence: Synthetic oligonucleotide
cacaccugagaggccaucc

SEQ ID NO: 2527135 - RNA, 19 nt, Artificial Sequence
  Description of Artificial Sequence: Synthetic oligonucleotide
ccauguucagcuugucacc

SEQ ID NO: 2527136 - RNA, 19 nt, Artificial Sequence
  Description of Artificial Sequence: Synthetic oligonucleotide
cugagaggccauccugccc

SEQ ID NO: 2527137 - RNA, 19 nt, Artificial Sequence
  Description of Artificial Sequence: Synthetic oligonucleotide
cuucaccaagacgaacuug

SEQ ID NO: 2527138 - RNA, 19 nt, Artificial Sequence
  Description of Artificial Sequence: Synthetic oligonucleotide
acaccugagaggccauccu

SEQ ID NO: 2527139 - RNA, 19 nt, Artificial Sequence
  Description of Artificial Sequence: Synthetic oligonucleotide
cuggcgggccucuaugcug

SEQ ID NO: 2527140 - RNA, 19 nt, Artificial Sequence
  Description of Artificial Sequence: Synthetic oligonucleotide
cccacuguaugggauaggg

SEQ ID NO: 2527141 - RNA, 19 nt, Artificial Sequence
  Description of Artificial Sequence: Synthetic oligonucleotide
aucgcuggaggccgaauuu

SEQ ID NO: 2527142 - RNA, 19 nt, Artificial Sequence
  Description of Artificial Sequence: Synthetic oligonucleotide
aggcuuugaugaacucacc

SEQ ID NO: 2527143 - RNA, 19 nt, Artificial Sequence
  Description of Artificial Sequence: Synthetic oligonucleotide
uagggauacugggugucga

SEQ ID NO: 2527144 - RNA, 19 nt, Artificial Sequence
  Description of Artificial Sequence: Synthetic oligonucleotide
gaggccgaauuuucagcca

SEQ ID NO: 2527145 - RNA, 19 nt, Artificial Sequence
  Description of Artificial Sequence: Synthetic oligonucleotide
uuagcuccauguucagcuu

SEQ ID NO: 2527146 - RNA, 19 nt, Artificial Sequence
  Description of Artificial Sequence: Synthetic oligonucleotide
uggcuggcccacuucuucu

SEQ ID NO: 2527147 - RNA, 19 nt, Artificial Sequence
  Description of Artificial Sequence: Synthetic oligonucleotide
gaagggcgcccuucgugug

SEQ ID NO: 2527148 - RNA, 19 nt, Artificial Sequence
  Description of Artificial Sequence: Synthetic oligonucleotide
gaauacuggguaguucucu

SEQ ID NO: 2527149 - RNA, 19 nt, Artificial Sequence
  Description of Artificial Sequence: Synthetic oligonucleotide
agaaagugauuguguccaa

SEQ ID NO: 2527150 - RNA, 19 nt, Artificial Sequence
  Description of Artificial Sequence: Synthetic oligonucleotide
uucguuucugaggcuggga

SEQ ID NO: 2527151 - RNA, 19 nt, Artificial Sequence
  Description of Artificial Sequence: Synthetic oligonucleotide
guguccaagggaagggcgc

SEQ ID NO: 2527152 - RNA, 19 nt, Artificial Sequence
  Description of Artificial Sequence: Synthetic oligonucleotide
auacuggguaguucucuuu

SEQ ID NO: 2527153 - RNA, 19 nt, Artificial Sequence
  Description of Artificial Sequence: Synthetic oligonucleotide
ucuaugcuggaggcuuuga

SEQ ID NO: 2527154 - RNA, 19 nt, Artificial Sequence
  Description of Artificial Sequence: Synthetic oligonucleotide
caauccgauucguuucuga

SEQ ID NO: 2527155 - RNA, 19 nt, Artificial Sequence
  Description of Artificial Sequence: Synthetic oligonucleotide
gccagggcaucauacgcag

SEQ ID NO: 2527156 - RNA, 19 nt, Artificial Sequence
  Description of Artificial Sequence: Synthetic oligonucleotide
cuguuucaagauggccugg

SEQ ID NO: 2527157 - RNA, 19 nt, Artificial Sequence
  Description of Artificial Sequence: Synthetic oligonucleotide
caagauggccuggcgggcc

SEQ ID NO: 2527158 - RNA, 19 nt, Artificial Sequence
  Description of Artificial Sequence: Synthetic oligonucleotide
gugucgaacuucaccaaga

SEQ ID NO: 2527159 - RNA, 19 nt, Artificial Sequence
  Description of Artificial Sequence: Synthetic oligonucleotide
auguucagcuugucaccgu

SEQ ID NO: 2527160 - RNA, 19 nt, Artificial Sequence
  Description of Artificial Sequence: Synthetic oligonucleotide
uggcuccgaccuuaaucgc

SEQ ID NO: 2527161 - RNA, 19 nt, Artificial Sequence
  Description of Artificial Sequence: Synthetic oligonucleotide
cuggcuggcccacuucuuc

SEQ ID NO: 2527162 - RNA, 19 nt, Artificial Sequence
  Description of Artificial Sequence: Synthetic oligonucleotide
uuuuggggaugaccuuaua

SEQ ID NO: 2527163 - RNA, 19 nt, Artificial Sequence
  Description of Artificial Sequence: Synthetic oligonucleotide
caagacgaacuugcuuuug

SEQ ID NO: 2527164 - RNA, 19 nt, Artificial Sequence
  Description of Artificial Sequence: Synthetic oligonucleotide
cagccgcuugaacucgucc

SEQ ID NO: 2527165 - RNA, 19 nt, Artificial Sequence
  Description of Artificial Sequence: Synthetic oligonucleotide
gugugcaggccgcugccgc

SEQ ID NO: 2527166 - RNA, 19 nt, Artificial Sequence
  Description of Artificial Sequence: Synthetic oligonucleotide
aucagcuugccaauccgau

SEQ ID NO: 2527167 - RNA, 19 nt, Artificial Sequence
  Description of Artificial Sequence: Synthetic oligonucleotide
cagucaggauguuuaagcu

SEQ ID NO: 2527168 - RNA, 19 nt, Artificial Sequence
  Description of Artificial Sequence: Synthetic oligonucleotide
agggauacugggugucgaa

SEQ ID NO: 2527169 - RNA, 19 nt, Artificial Sequence
  Description of Artificial Sequence: Synthetic oligonucleotide
cccuucuuccggaaggcag

SEQ ID NO: 2527170 - RNA, 19 nt, Artificial Sequence
  Description of Artificial Sequence: Synthetic oligonucleotide
ggaggcuuugaugaacuca

SEQ ID NO: 2527171 - RNA, 19 nt, Artificial Sequence
  Description of Artificial Sequence: Synthetic oligonucleotide
ggggagagggaaacggcgg

SEQ ID NO: 2527172 - RNA, 19 nt, Artificial Sequence
  Description of Artificial Sequence: Synthetic oligonucleotide
ccgugguccaagaucuucc

SEQ ID NO: 2527173 - RNA, 19 nt, Artificial Sequence
  Description of Artificial Sequence: Synthetic oligonucleotide
cucguccugcuucucacca

SEQ ID NO: 2527174 - RNA, 19 nt, Artificial Sequence
  Description of Artificial Sequence: Synthetic oligonucleotide
cucuuuguccagcuuauau

SEQ ID NO: 2527175 - RNA, 19 nt, Artificial Sequence
  Description of Artificial Sequence: Synthetic oligonucleotide
aucgccccacuguauggga

SEQ ID NO: 2527176 - RNA, 19 nt, Artificial Sequence
  Description of Artificial Sequence: Synthetic oligonucleotide
uugucaccguagucugaga

SEQ ID NO: 2527177 - RNA, 19 nt, Artificial Sequence
  Description of Artificial Sequence: Synthetic oligonucleotide
uccucaccgugguccaaga

SEQ ID NO: 2527178 - RNA, 19 nt, Artificial Sequence
  Description of Artificial Sequence: Synthetic oligonucleotide
cugccccuguuucaagaug

SEQ ID NO: 2527179 - RNA, 19 nt, Artificial Sequence
  Description of Artificial Sequence: Synthetic oligonucleotide
guaugggauaggguucuca

SEQ ID NO: 2527180 - RNA, 19 nt, Artificial Sequence
  Description of Artificial Sequence: Synthetic oligonucleotide
cccggaagagguagaauac

SEQ ID NO: 2527181 - RNA, 19 nt, Artificial Sequence
  Description of Artificial Sequence: Synthetic oligonucleotide
ugcuuuuggggaugaccuu

SEQ ID NO: 2527182 - RNA, 19 nt, Artificial Sequence
  Description of Artificial Sequence: Synthetic oligonucleotide
cggaagagguagaauacug

SEQ ID NO: 2527183 - RNA, 19 nt, Artificial Sequence
  Description of Artificial Sequence: Synthetic oligonucleotide
uggaggcuuugaugaacuc

SEQ ID NO: 2527184 - RNA, 19 nt, Artificial Sequence
  Description of Artificial Sequence: Synthetic oligonucleotide
uccaagggaagggcgcccu

SEQ ID NO: 2527185 - RNA, 19 nt, Artificial Sequence
  Description of Artificial Sequence: Synthetic oligonucleotide
ccgaauuuucagccagccg

SEQ ID NO: 2527186 - RNA, 19 nt, Artificial Sequence
  Description of Artificial Sequence: Synthetic oligonucleotide
aucuuccccaugaucuuga

SEQ ID NO: 2527187 - RNA, 19 nt, Artificial Sequence
  Description of Artificial Sequence: Synthetic oligonucleotide
gggaagggcgcccuucgug

SEQ ID NO: 2527188 - RNA, 19 nt, Artificial Sequence
  Description of Artificial Sequence: Synthetic oligonucleotide
cucugccaccaagagauca

SEQ ID NO: 2527189 - RNA, 19 nt, Artificial Sequence
  Description of Artificial Sequence: Synthetic oligonucleotide
agccagccgcuugaacucg

SEQ ID NO: 2527190 - RNA, 19 nt, Artificial Sequence
  Description of Artificial Sequence: Synthetic oligonucleotide
ggauacugggugucgaacu

SEQ ID NO: 2527191 - RNA, 19 nt, Artificial Sequence
  Description of Artificial Sequence: Synthetic oligonucleotide
gccgaauuuucagccagcc

SEQ ID NO: 2527192 - RNA, 19 nt, Artificial Sequence
  Description of Artificial Sequence: Synthetic oligonucleotide
guccucaccgugguccaag

SEQ ID NO: 2527193 - RNA, 19 nt, Artificial Sequence
  Description of Artificial Sequence: Synthetic oligonucleotide
uccccaugaucuugaggua

SEQ ID NO: 2527194 - RNA, 19 nt, Artificial Sequence
  Description of Artificial Sequence: Synthetic oligonucleotide
ucgccccacuguaugggau

SEQ ID NO: 2527195 - RNA, 19 nt, Artificial Sequence
  Description of Artificial Sequence: Synthetic oligonucleotide
cuggaggcuuugaugaacu

SEQ ID NO: 2527196 - RNA, 19 nt, Artificial Sequence
  Description of Artificial Sequence: Synthetic oligonucleotide
ggcagucaggauguuuaag

SEQ ID NO: 2527197 - RNA, 19 nt, Artificial Sequence
  Description of Artificial Sequence: Synthetic oligonucleotide
cccaggagaauagacagca

SEQ ID NO: 2527198 - RNA, 19 nt, Artificial Sequence
  Description of Artificial Sequence: Synthetic oligonucleotide
acugggugucgaacuucac

SEQ ID NO: 2527199 - RNA, 19 nt, Artificial Sequence
  Description of Artificial Sequence: Synthetic oligonucleotide
aacucaccugccagggcau

SEQ ID NO: 2527200 - RNA, 19 nt, Artificial Sequence
  Description of Artificial Sequence: Synthetic oligonucleotide
gggccucuaugcuggaggc

SEQ ID NO: 2527201 - RNA, 19 nt, Artificial Sequence
  Description of Artificial Sequence: Synthetic oligonucleotide
cucuaugcuggaggcuuug

SEQ ID NO: 2527202 - RNA, 19 nt, Artificial Sequence
  Description of Artificial Sequence: Synthetic oligonucleotide
gcuccgaccuuaaucgccc

SEQ ID NO: 2527203 - RNA, 19 nt, Artificial Sequence
  Description of Artificial Sequence: Synthetic oligonucleotide
ggcuccgaccuuaaucgcc

SEQ ID NO: 2527204 - RNA, 19 nt, Artificial Sequence
  Description of Artificial Sequence: Synthetic oligonucleotide
cuucuuccggaaggcaguc

SEQ ID NO: 2527205 - RNA, 19 nt, Artificial Sequence
  Description of Artificial Sequence: Synthetic oligonucleotide
caagggaagggcgcccuuc

SEQ ID NO: 2527206 - RNA, 19 nt, Artificial Sequence
  Description of Artificial Sequence: Synthetic oligonucleotide
gccgcuugaacucguccug

SEQ ID NO: 2527207 - RNA, 19 nt, Artificial Sequence
  Description of Artificial Sequence: Synthetic oligonucleotide
gucacucaucuuguucuca

SEQ ID NO: 2527208 - RNA, 19 nt, Artificial Sequence
  Description of Artificial Sequence: Synthetic oligonucleotide
caccguagucugagauccc

SEQ ID NO: 2527209 - RNA, 19 nt, Artificial Sequence
  Description of Artificial Sequence: Synthetic oligonucleotide
cuccgaccuuaaucgcccc

SEQ ID NO: 2527210 - RNA, 19 nt, Artificial Sequence
  Description of Artificial Sequence: Synthetic oligonucleotide
agggcaucauacgcaggca

SEQ ID NO: 2527211 - RNA, 19 nt, Artificial Sequence
  Description of Artificial Sequence: Synthetic oligonucleotide
caggcaugcccagguagac

SEQ ID NO: 2527212 - RNA, 19 nt, Artificial Sequence
  Description of Artificial Sequence: Synthetic oligonucleotide
ucguccugcuucucaccau

SEQ ID NO: 2527213 - RNA, 19 nt, Artificial Sequence
  Description of Artificial Sequence: Synthetic oligonucleotide
gaccuuauagaaagugauu

SEQ ID NO: 2527214 - RNA, 19 nt, Artificial Sequence
  Description of Artificial Sequence: Synthetic oligonucleotide
ugcugucacucaucuuguu

SEQ ID NO: 2527215 - RNA, 19 nt, Artificial Sequence
  Description of Artificial Sequence: Synthetic oligonucleotide
ucgcuggaggccgaauuuu

SEQ ID NO: 2527216 - RNA, 19 nt, Artificial Sequence
  Description of Artificial Sequence: Synthetic oligonucleotide
cccuguuucaagauggccu

SEQ ID NO: 2527217 - RNA, 19 nt, Artificial Sequence
  Description of Artificial Sequence: Synthetic oligonucleotide
cuuaaucgccccacuguau

SEQ ID NO: 2527218 - RNA, 19 nt, Artificial Sequence
  Description of Artificial Sequence: Synthetic oligonucleotide
cugccaccaagagaucauc

SEQ ID NO: 2527219 - RNA, 19 nt, Artificial Sequence
  Description of Artificial Sequence: Synthetic oligonucleotide
gcaaccaggcaugcccagg

SEQ ID NO: 2527220 - RNA, 19 nt, Artificial Sequence
  Description of Artificial Sequence: Synthetic oligonucleotide
cguagucugagauccccac

SEQ ID NO: 2527221 - RNA, 19 nt, Artificial Sequence
  Description of Artificial Sequence: Synthetic oligonucleotide
gggauacugggugucgaac

SEQ ID NO: 2527222 - RNA, 19 nt, Artificial Sequence
  Description of Artificial Sequence: Synthetic oligonucleotide
ucaccugccagggcaucau

SEQ ID NO: 2527223 - RNA, 19 nt, Artificial Sequence
  Description of Artificial Sequence: Synthetic oligonucleotide
caggccgcugccgccaggc

SEQ ID NO: 2527224 - RNA, 19 nt, Artificial Sequence
  Description of Artificial Sequence: Synthetic oligonucleotide
gcuggaggcuuugaugaac

SEQ ID NO: 2527225 - RNA, 19 nt, Artificial Sequence
  Description of Artificial Sequence: Synthetic oligonucleotide
caucauacgcaggcaggca

SEQ ID NO: 2527226 - RNA, 19 nt, Artificial Sequence
  Description of Artificial Sequence: Synthetic oligonucleotide
uuucagccagccgcuugaa

SEQ ID NO: 2527227 - RNA, 19 nt, Artificial Sequence
  Description of Artificial Sequence: Synthetic oligonucleotide
guacuggcuggcccacuuc

SEQ ID NO: 2527228 - RNA, 19 nt, Artificial Sequence
  Description of Artificial Sequence: Synthetic oligonucleotide
agggaagggcgcccuucgu

SEQ ID NO: 2527229 - RNA, 19 nt, Artificial Sequence
  Description of Artificial Sequence: Synthetic oligonucleotide
gcccuucgugugcaggccg

SEQ ID NO: 2527230 - RNA, 19 nt, Artificial Sequence
  Description of Artificial Sequence: Synthetic oligonucleotide
aggcaaccaggcaugccca

SEQ ID NO: 2527231 - RNA, 19 nt, Artificial Sequence
  Description of Artificial Sequence: Synthetic oligonucleotide
cgggccucuaugcuggagg

SEQ ID NO: 2527232 - RNA, 19 nt, Artificial Sequence
  Description of Artificial Sequence: Synthetic oligonucleotide
uguaugggauaggguucuc

SEQ ID NO: 2527233 - RNA, 19 nt, Artificial Sequence
  Description of Artificial Sequence: Synthetic oligonucleotide
ggcaaccaggcaugcccag

SEQ ID NO: 2527234 - RNA, 19 nt, Artificial Sequence
  Description of Artificial Sequence: Synthetic oligonucleotide
cuucgugugcaggccgcug

SEQ ID NO: 2527235 - RNA, 19 nt, Artificial Sequence
  Description of Artificial Sequence: Synthetic oligonucleotide
ggaagggcgcccuucgugu

SEQ ID NO: 2527236 - RNA, 19 nt, Artificial Sequence
  Description of Artificial Sequence: Synthetic oligonucleotide
cgauucguuucugaggcug

SEQ ID NO: 2527237 - RNA, 19 nt, Artificial Sequence
  Description of Artificial Sequence: Synthetic oligonucleotide
cgugguccaagaucuuccc

SEQ ID NO: 2527238 - RNA, 19 nt, Artificial Sequence
  Description of Artificial Sequence: Synthetic oligonucleotide
ggggaugaccuuauagaaa

SEQ ID NO: 2527239 - RNA, 19 nt, Artificial Sequence
  Description of Artificial Sequence: Synthetic oligonucleotide
cccaucccggaagagguag

SEQ ID NO: 2527240 - RNA, 19 nt, Artificial Sequence
  Description of Artificial Sequence: Synthetic oligonucleotide
ucacaccugagaggccauc

SEQ ID NO: 2527241 - RNA, 19 nt, Artificial Sequence
  Description of Artificial Sequence: Synthetic oligonucleotide
gggauaggguucucaaagu

SEQ ID NO: 2527242 - RNA, 19 nt, Artificial Sequence
  Description of Artificial Sequence: Synthetic oligonucleotide
cuguaugggauaggguucu

SEQ ID NO: 2527243 - RNA, 19 nt, Artificial Sequence
  Description of Artificial Sequence: Synthetic oligonucleotide
caaccaggcaugcccaggu

SEQ ID NO: 2527244 - RNA, 19 nt, Artificial Sequence
  Description of Artificial Sequence: Synthetic oligonucleotide
agcaguggggagagggaaa

SEQ ID NO: 2527245 - RNA, 19 nt, Artificial Sequence
  Description of Artificial Sequence: Synthetic oligonucleotide
guccaagggaagggcgccc

SEQ ID NO: 2527246 - RNA, 19 nt, Artificial Sequence
  Description of Artificial Sequence: Synthetic oligonucleotide
cuaugcuggaggcuuugau

SEQ ID NO: 2527247 - RNA, 19 nt, Artificial Sequence
  Description of Artificial Sequence: Synthetic oligonucleotide
cauccugccccuguuucaa

SEQ ID NO: 2527248 - RNA, 19 nt, Artificial Sequence
  Description of Artificial Sequence: Synthetic oligonucleotide
cuugccaauccgauucguu

SEQ ID NO: 2527249 - RNA, 19 nt, Artificial Sequence
  Description of Artificial Sequence: Synthetic oligonucleotide
cuggauggcuccgaccuua

SEQ ID NO: 2527250 - RNA, 19 nt, Artificial Sequence
  Description of Artificial Sequence: Synthetic oligonucleotide
uggccuggcgggccucuau

SEQ ID NO: 2527251 - RNA, 19 nt, Artificial Sequence
  Description of Artificial Sequence: Synthetic oligonucleotide
ccuuaaucgccccacugua

SEQ ID NO: 2527252 - RNA, 19 nt, Artificial Sequence
  Description of Artificial Sequence: Synthetic oligonucleotide
ucaucgcuggaggccgaau

SEQ ID NO: 2527253 - RNA, 19 nt, Artificial Sequence
  Description of Artificial Sequence: Synthetic oligonucleotide
gccuggcgggccucuaugc

SEQ ID NO: 2527254 - RNA, 19 nt, Artificial Sequence
  Description of Artificial Sequence: Synthetic oligonucleotide
ccaggcggagcagagagga

SEQ ID NO: 2527255 - RNA, 19 nt, Artificial Sequence
  Description of Artificial Sequence: Synthetic oligonucleotide
gaaggcagucaggauguuu

SEQ ID NO: 2527256 - RNA, 19 nt, Artificial Sequence
  Description of Artificial Sequence: Synthetic oligonucleotide
cucaccugccagggcauca

SEQ ID NO: 2527257 - RNA, 19 nt, Artificial Sequence
  Description of Artificial Sequence: Synthetic oligonucleotide
ccaggcaugcccagguaga

SEQ ID NO: 2527258 - RNA, 19 nt, Artificial Sequence
  Description of Artificial Sequence: Synthetic oligonucleotide
ccagggcaucauacgcagg

SEQ ID NO: 2527259 - RNA, 19 nt, Artificial Sequence
  Description of Artificial Sequence: Synthetic oligonucleotide
gccccuuuagccagcgcug

SEQ ID NO: 2527260 - RNA, 19 nt, Artificial Sequence
  Description of Artificial Sequence: Synthetic oligonucleotide
gccccacuguaugggauag

SEQ ID NO: 2527261 - RNA, 19 nt, Artificial Sequence
  Description of Artificial Sequence: Synthetic oligonucleotide
ccccuguuucaagauggcc

SEQ ID NO: 2527262 - RNA, 19 nt, Artificial Sequence
  Description of Artificial Sequence: Synthetic oligonucleotide
ccgaccuuaaucgccccac

SEQ ID NO: 2527263 - RNA, 19 nt, Artificial Sequence
  Description of Artificial Sequence: Synthetic oligonucleotide
ggcggagcagagaggagca

SEQ ID NO: 2527264 - RNA, 19 nt, Artificial Sequence
  Description of Artificial Sequence: Synthetic oligonucleotide
cccuucgugugcaggccgc

SEQ ID NO: 2527265 - RNA, 19 nt, Artificial Sequence
  Description of Artificial Sequence: Synthetic oligonucleotide
ggccuggcgggccucuaug

SEQ ID NO: 2527266 - RNA, 19 nt, Artificial Sequence
  Description of Artificial Sequence: Synthetic oligonucleotide
gaucaucgcuggaggccga

SEQ ID NO: 2527267 - RNA, 19 nt, Artificial Sequence
  Description of Artificial Sequence: Synthetic oligonucleotide
agggcgcccuucgugugca

SEQ ID NO: 2527268 - RNA, 19 nt, Artificial Sequence
  Description of Artificial Sequence: Synthetic oligonucleotide
gcuggaggccgaauuuuca

SEQ ID NO: 2527269 - RNA, 19 nt, Artificial Sequence
  Description of Artificial Sequence: Synthetic oligonucleotide
ccuucacaccugagaggcc

SEQ ID NO: 2527270 - RNA, 19 nt, Artificial Sequence
  Description of Artificial Sequence: Synthetic oligonucleotide
ggccgaauuuucagccagc

SEQ ID NO: 2527271 - RNA, 19 nt, Artificial Sequence
  Description of Artificial Sequence: Synthetic oligonucleotide
ccccuuuagccagcgcugg

SEQ ID NO: 2527272 - RNA, 19 nt, Artificial Sequence
  Description of Artificial Sequence: Synthetic oligonucleotide
gcccaggagaauagacagc

SEQ ID NO: 2527273 - RNA, 19 nt, Artificial Sequence
  Description of Artificial Sequence: Synthetic oligonucleotide
gccaauccgauucguuucu

SEQ ID NO: 2527274 - RNA, 19 nt, Artificial Sequence
  Description of Artificial Sequence: Synthetic oligonucleotide
ccaccaagagaucaucgcu

SEQ ID NO: 2527275 - RNA, 19 nt, Artificial Sequence
  Description of Artificial Sequence: Synthetic oligonucleotide
cggagcagagaggagcagc

SEQ ID NO: 2527276 - RNA, 19 nt, Artificial Sequence
  Description of Artificial Sequence: Synthetic oligonucleotide
gggugucgaacuucaccaa

SEQ ID NO: 2527277 - RNA, 19 nt, Artificial Sequence
  Description of Artificial Sequence: Synthetic oligonucleotide
aucaucgcuggaggccgaa

SEQ ID NO: 2527278 - RNA, 19 nt, Artificial Sequence
  Description of Artificial Sequence: Synthetic oligonucleotide
caccaagacgaacuugcuu

SEQ ID NO: 2527279 - RNA, 19 nt, Artificial Sequence
  Description of Artificial Sequence: Synthetic oligonucleotide
gguagaauacuggguaguu

SEQ ID NO: 2527280 - RNA, 19 nt, Artificial Sequence
  Description of Artificial Sequence: Synthetic oligonucleotide
cugccccuuuagccagcgc

SEQ ID NO: 2527281 - RNA, 19 nt, Artificial Sequence
  Description of Artificial Sequence: Synthetic oligonucleotide
caucgcuggaggccgaauu

SEQ ID NO: 2527282 - RNA, 19 nt, Artificial Sequence
  Description of Artificial Sequence: Synthetic oligonucleotide
ggcaggcaaccaggcaugc

SEQ ID NO: 2527283 - RNA, 19 nt, Artificial Sequence
  Description of Artificial Sequence: Synthetic oligonucleotide
ccgcuugaacucguccugc

SEQ ID NO: 2527284 - RNA, 19 nt, Artificial Sequence
  Description of Artificial Sequence: Synthetic oligonucleotide
cacucaucuuguucucaau

SEQ ID NO: 2527285 - RNA, 19 nt, Artificial Sequence
  Description of Artificial Sequence: Synthetic oligonucleotide
ccuucuuccggaaggcagu

SEQ ID NO: 2527286 - RNA, 19 nt, Artificial Sequence
  Description of Artificial Sequence: Synthetic oligonucleotide
gccaggcggagcagagagg

SEQ ID NO: 2527287 - RNA, 19 nt, Artificial Sequence
  Description of Artificial Sequence: Synthetic oligonucleotide
gcugggaaguccucaccgu

SEQ ID NO: 2527288 - RNA, 19 nt, Artificial Sequence
  Description of Artificial Sequence: Synthetic oligonucleotide
agaggccauccugccccug

SEQ ID NO: 2527289 - RNA, 19 nt, Artificial Sequence
  Description of Artificial Sequence: Synthetic oligonucleotide
gcccacuucuucucugucu

SEQ ID NO: 2527290 - RNA, 19 nt, Artificial Sequence
  Description of Artificial Sequence: Synthetic oligonucleotide
agguacuggcuggcccacu

SEQ ID NO: 2527291 - RNA, 19 nt, Artificial Sequence
  Description of Artificial Sequence: Synthetic oligonucleotide
ccugccccuuuagccagcg

SEQ ID NO: 2527292 - RNA, 19 nt, Artificial Sequence
  Description of Artificial Sequence: Synthetic oligonucleotide
cgcuggaggccgaauuuuc

SEQ ID NO: 2527293 - RNA, 19 nt, Artificial Sequence
  Description of Artificial Sequence: Synthetic oligonucleotide
ccguagucugagaucccca

SEQ ID NO: 2527294 - RNA, 19 nt, Artificial Sequence
  Description of Artificial Sequence: Synthetic oligonucleotide
cgaacuucaccaagacgaa

SEQ ID NO: 2527295 - RNA, 19 nt, Artificial Sequence
  Description of Artificial Sequence: Synthetic oligonucleotide
gccccuguuucaagauggc

SEQ ID NO: 2527296 - RNA, 19 nt, Artificial Sequence
  Description of Artificial Sequence: Synthetic oligonucleotide
ccaauccgauucguuucug

SEQ ID NO: 2527297 - RNA, 19 nt, Artificial Sequence
  Description of Artificial Sequence: Synthetic oligonucleotide
ccaagagaucaucgcugga

SEQ ID NO: 2527298 - RNA, 19 nt, Artificial Sequence
  Description of Artificial Sequence: Synthetic oligonucleotide
ccagcgcuggauggcuccg

SEQ ID NO: 2527299 - RNA, 19 nt, Artificial Sequence
  Description of Artificial Sequence: Synthetic oligonucleotide
ggguucucaaaguccccau

SEQ ID NO: 2527300 - RNA, 19 nt, Artificial Sequence
  Description of Artificial Sequence: Synthetic oligonucleotide
ccauagggauacugggugu

SEQ ID NO: 2527301 - RNA, 19 nt, Artificial Sequence
  Description of Artificial Sequence: Synthetic oligonucleotide
uccccaccucugccaccaa

SEQ ID NO: 2527302 - RNA, 19 nt, Artificial Sequence
  Description of Artificial Sequence: Synthetic oligonucleotide
gcuucucaccauagggaua

SEQ ID NO: 2527303 - RNA, 19 nt, Artificial Sequence
  Description of Artificial Sequence: Synthetic oligonucleotide
gccucuaugcuggaggcuu

SEQ ID NO: 2527304 - RNA, 19 nt, Artificial Sequence
  Description of Artificial Sequence: Synthetic oligonucleotide
cgcuggauggcuccgaccu

SEQ ID NO: 2527305 - RNA, 19 nt, Artificial Sequence
  Description of Artificial Sequence: Synthetic oligonucleotide
ccagccgcuugaacucguc

SEQ ID NO: 2527306 - RNA, 19 nt, Artificial Sequence
  Description of Artificial Sequence: Synthetic oligonucleotide
gcuugucaccguagucuga

SEQ ID NO: 2527307 - RNA, 19 nt, Artificial Sequence
  Description of Artificial Sequence: Synthetic oligonucleotide
ggaugaccuuauagaaagu

SEQ ID NO: 2527308 - RNA, 19 nt, Artificial Sequence
  Description of Artificial Sequence: Synthetic oligonucleotide
gauggccuggcgggccucu

SEQ ID NO: 2527309 - RNA, 19 nt, Artificial Sequence
  Description of Artificial Sequence: Synthetic oligonucleotide
cgaacuugcuuuuggggau

SEQ ID NO: 2527310 - RNA, 19 nt, Artificial Sequence
  Description of Artificial Sequence: Synthetic oligonucleotide
gccgcugccgccaggcgga

SEQ ID NO: 2527311 - RNA, 19 nt, Artificial Sequence
  Description of Artificial Sequence: Synthetic oligonucleotide
gcuggcccacuucuucucu

SEQ ID NO: 2527312 - RNA, 19 nt, Artificial Sequence
  Description of Artificial Sequence: Synthetic oligonucleotide
ccaucccggaagagguaga

SEQ ID NO: 2527313 - RNA, 19 nt, Artificial Sequence
  Description of Artificial Sequence: Synthetic oligonucleotide
cgugugcaggccgcugccg

SEQ ID NO: 2527314 - RNA, 19 nt, Artificial Sequence
  Description of Artificial Sequence: Synthetic oligonucleotide
cugccgccaggcggagcag

SEQ ID NO: 2527315 - RNA, 19 nt, Artificial Sequence
  Description of Artificial Sequence: Synthetic oligonucleotide
ccccacuguaugggauagg

SEQ ID NO: 2527316 - RNA, 19 nt, Artificial Sequence
  Description of Artificial Sequence: Synthetic oligonucleotide
ccacuguaugggauagggu

SEQ ID NO: 2527317 - RNA, 19 nt, Artificial Sequence
  Description of Artificial Sequence: Synthetic oligonucleotide
gcgggccucuaugcuggag

SEQ ID NO: 2527318 - RNA, 19 nt, Artificial Sequence
  Description of Artificial Sequence: Synthetic oligonucleotide
ccucugccaccaagagauc

SEQ ID NO: 2527319 - RNA, 19 nt, Artificial Sequence
  Description of Artificial Sequence: Synthetic oligonucleotide
ccggaagagguagaauacu

SEQ ID NO: 2527320 - RNA, 19 nt, Artificial Sequence
  Description of Artificial Sequence: Synthetic oligonucleotide
cccugccccuuuagccagc

SEQ ID NO: 2527321 - RNA, 19 nt, Artificial Sequence
  Description of Artificial Sequence: Synthetic oligonucleotide
ccaagacgaacuugcuuuu

SEQ ID NO: 2527322 - RNA, 19 nt, Artificial Sequence
  Description of Artificial Sequence: Synthetic oligonucleotide
cagcgcuggauggcuccga

SEQ ID NO: 2527323 - RNA, 19 nt, Artificial Sequence
  Description of Artificial Sequence: Synthetic oligonucleotide
gcuugccaauccgauucgu

SEQ ID NO: 2527324 - RNA, 19 nt, Artificial Sequence
  Description of Artificial Sequence: Synthetic oligonucleotide
cgcccuucgugugcaggcc

SEQ ID NO: 2527325 - RNA, 19 nt, Artificial Sequence
  Description of Artificial Sequence: Synthetic oligonucleotide
ccugccccuguuucaagau

SEQ ID NO: 2527326 - RNA, 19 nt, Artificial Sequence
  Description of Artificial Sequence: Synthetic oligonucleotide
gggcgcccuucgugugcag

SEQ ID NO: 2527327 - RNA, 19 nt, Artificial Sequence
  Description of Artificial Sequence: Synthetic oligonucleotide
ccuggcgggccucuaugcu

SEQ ID NO: 2527328 - RNA, 19 nt, Artificial Sequence
  Description of Artificial Sequence: Synthetic oligonucleotide
auggccuggcgggccucua

SEQ ID NO: 2527329 - RNA, 19 nt, Artificial Sequence
  Description of Artificial Sequence: Synthetic oligonucleotide
ggccucuaugcuggaggcu

SEQ ID NO: 2527330 - RNA, 19 nt, Artificial Sequence
  Description of Artificial Sequence: Synthetic oligonucleotide
ggcgggccucuaugcugga

SEQ ID NO: 2527331 - RNA, 19 nt, Artificial Sequence
  Description of Artificial Sequence: Synthetic oligonucleotide
cgccccacuguaugggaua

SEQ ID NO: 2527332 - RNA, 19 nt, Artificial Sequence
  Description of Artificial Sequence: Synthetic oligonucleotide
ccgauucguuucugaggcu

SEQ ID NO: 2527333 - RNA, 19 nt, Artificial Sequence
  Description of Artificial Sequence: Synthetic oligonucleotide
cgcuugaacucguccugcu

SEQ ID NO: 2527334 - RNA, 19 nt, Artificial Sequence
  Description of Artificial Sequence: Synthetic oligonucleotide
caccgugguccaagaucuu

SEQ ID NO: 2527335 - RNA, 19 nt, Artificial Sequence
  Description of Artificial Sequence: Synthetic oligonucleotide
ccucuaugcuggaggcuuu

SEQ ID NO: 2527336 - RNA, 19 nt, Artificial Sequence
  Description of Artificial Sequence: Synthetic oligonucleotide
cgaccuuaaucgccccacu

SEQ ID NO: 2527337 - RNA, 19 nt, Artificial Sequence
  Description of Artificial Sequence: Synthetic oligonucleotide
gccagccgcuugaacucgu

SEQ ID NO: 2527338 - RNA, 19 nt, Artificial Sequence
  Description of Artificial Sequence: Synthetic oligonucleotide
ccucaccgugguccaagau

SEQ ID NO: 2527339 - RNA, 19 nt, Artificial Sequence
  Description of Artificial Sequence: Synthetic oligonucleotide
ccuucgugugcaggccgcu

SEQ ID NO: 2527340 - RNA, 19 nt, Artificial Sequence
  Description of Artificial Sequence: Synthetic oligonucleotide
ccgccaggcggagcagaga

SEQ ID NO: 2527341 - RNA, 19 nt, Artificial Sequence
  Description of Artificial Sequence: Synthetic oligonucleotide
ccaagggaagggcgcccuu

SEQ ID NO: 2527342 - RNA, 19 nt, Artificial Sequence
  Description of Artificial Sequence: Synthetic oligonucleotide
ccgcugccgccaggcggag

SEQ ID NO: 2527343 - RNA, 19 nt, Artificial Sequence
  Description of Artificial Sequence: Synthetic oligonucleotide
cgcugccgccaggcggagc

SEQ ID NO: 2527344 - RNA, 19 nt, Artificial Sequence
  Description of Artificial Sequence: Synthetic oligonucleotide
aauuuuguuaaaagcagcc

SEQ ID NO: 2527345 - RNA, 19 nt, Artificial Sequence
  Description of Artificial Sequence: Synthetic oligonucleotide
uauucaagugcacugacca

SEQ ID NO: 2527346 - RNA, 19 nt, Artificial Sequence
  Description of Artificial Sequence: Synthetic oligonucleotide
aauuuugucaugucugucu

SEQ ID NO: 2527347 - RNA, 19 nt, Artificial Sequence
  Description of Artificial Sequence: Synthetic oligonucleotide
aagacuuggcaacaaccgc

SEQ ID NO: 2527348 - RNA, 19 nt, Artificial Sequence
  Description of Artificial Sequence: Synthetic oligonucleotide
uucaaagacggccacaucu

SEQ ID NO: 2527349 - RNA, 19 nt, Artificial Sequence
  Description of Artificial Sequence: Synthetic oligonucleotide
aauuccauaucccaccgga

SEQ ID NO: 2527350 - RNA, 19 nt, Artificial Sequence
  Description of Artificial Sequence: Synthetic oligonucleotide
ucuucaacuacacacugga

SEQ ID NO: 2527351 - RNA, 19 nt, Artificial Sequence
  Description of Artificial Sequence: Synthetic oligonucleotide
ucaacuacacacuggaucu

SEQ ID NO: 2527352 - RNA, 19 nt, Artificial Sequence
  Description of Artificial Sequence: Synthetic oligonucleotide
guaccuuuuauucaagugc

SEQ ID NO: 2527353 - RNA, 19 nt, Artificial Sequence
  Description of Artificial Sequence: Synthetic oligonucleotide
uguggugucuuccacacug

SEQ ID NO: 2527354 - RNA, 19 nt, Artificial Sequence
  Description of Artificial Sequence: Synthetic oligonucleotide
guaaucauugagcaccugg

SEQ ID NO: 2527355 - RNA, 19 nt, Artificial Sequence
  Description of Artificial Sequence: Synthetic oligonucleotide
ugucaugucugucucauca

SEQ ID NO: 2527356 - RNA, 19 nt, Artificial Sequence
  Description of Artificial Sequence: Synthetic oligonucleotide
uucaacuacacacuggauc

SEQ ID NO: 2527357 - RNA, 19 nt, Artificial Sequence
  Description of Artificial Sequence: Synthetic oligonucleotide
uccgaagagaucaauguca

SEQ ID NO: 2527358 - RNA, 19 nt, Artificial Sequence
  Description of Artificial Sequence: Synthetic oligonucleotide
uucucguaagacuugaugu

SEQ ID NO: 2527359 - RNA, 19 nt, Artificial Sequence
  Description of Artificial Sequence: Synthetic oligonucleotide
uaagauggaagacuuggca

SEQ ID NO: 2527360 - RNA, 19 nt, Artificial Sequence
  Description of Artificial Sequence: Synthetic oligonucleotide
aguaaucugcuccucuagc

SEQ ID NO: 2527361 - RNA, 19 nt, Artificial Sequence
  Description of Artificial Sequence: Synthetic oligonucleotide
accggaaccaacuuggaag

SEQ ID NO: 2527362 - RNA, 19 nt, Artificial Sequence
  Description of Artificial Sequence: Synthetic oligonucleotide
cuugaugugguuauaccag

SEQ ID NO: 2527363 - RNA, 19 nt, Artificial Sequence
  Description of Artificial Sequence: Synthetic oligonucleotide
gaagacuuggcaacaaccg

SEQ ID NO: 2527364 - RNA, 19 nt, Artificial Sequence
  Description of Artificial Sequence: Synthetic oligonucleotide
cuuuuauucaagugcacug

SEQ ID NO: 2527365 - RNA, 19 nt, Artificial Sequence
  Description of Artificial Sequence: Synthetic oligonucleotide
uguaccuuuuauucaagug

SEQ ID NO: 2527366 - RNA, 19 nt, Artificial Sequence
  Description of Artificial Sequence: Synthetic oligonucleotide
uuucucguaagacuugaug

SEQ ID NO: 2527367 - RNA, 19 nt, Artificial Sequence
  Description of Artificial Sequence: Synthetic oligonucleotide
ugauucauacugugcaagg

SEQ ID NO: 2527368 - RNA, 19 nt, Artificial Sequence
  Description of Artificial Sequence: Synthetic oligonucleotide
ucuaguaagauggaagacu

SEQ ID NO: 2527369 - RNA, 19 nt, Artificial Sequence
  Description of Artificial Sequence: Synthetic oligonucleotide
cagguaaucauugagcacc

SEQ ID NO: 2527370 - RNA, 19 nt, Artificial Sequence
  Description of Artificial Sequence: Synthetic oligonucleotide
cucgauguagcucuugucc

SEQ ID NO: 2527371 - RNA, 19 nt, Artificial Sequence
  Description of Artificial Sequence: Synthetic oligonucleotide
uucauacugugcaaggcgc

SEQ ID NO: 2527372 - RNA, 19 nt, Artificial Sequence
  Description of Artificial Sequence: Synthetic oligonucleotide
ugaugugguuauaccagcg

SEQ ID NO: 2527373 - RNA, 19 nt, Artificial Sequence
  Description of Artificial Sequence: Synthetic oligonucleotide
uuaaaagcagccacaucca

SEQ ID NO: 2527374 - RNA, 19 nt, Artificial Sequence
  Description of Artificial Sequence: Synthetic oligonucleotide
ucaucuucaacuacacacu

SEQ ID NO: 2527375 - RNA, 19 nt, Artificial Sequence
  Description of Artificial Sequence: Synthetic oligonucleotide
aagauggaagacuuggcaa

SEQ ID NO: 2527376 - RNA, 19 nt, Artificial Sequence
  Description of Artificial Sequence: Synthetic oligonucleotide
ucgauguagcucuuguccg

SEQ ID NO: 2527377 - RNA, 19 nt, Artificial Sequence
  Description of Artificial Sequence: Synthetic oligonucleotide
ugugguuauaccagcgcag

SEQ ID NO: 2527378 - RNA, 19 nt, Artificial Sequence
  Description of Artificial Sequence: Synthetic oligonucleotide
acuugaugugguuauacca

SEQ ID NO: 2527379 - RNA, 19 nt, Artificial Sequence
  Description of Artificial Sequence: Synthetic oligonucleotide
ucaagugcacugaccaagg

SEQ ID NO: 2527380 - RNA, 19 nt, Artificial Sequence
  Description of Artificial Sequence: Synthetic oligonucleotide
uauaccagcgcagagcaug

SEQ ID NO: 2527381 - RNA, 19 nt, Artificial Sequence
  Description of Artificial Sequence: Synthetic oligonucleotide
ugauccgaagagaucaaug

SEQ ID NO: 2527382 - RNA, 19 nt, Artificial Sequence
  Description of Artificial Sequence: Synthetic oligonucleotide
accagagacggcuucaaag

SEQ ID NO: 2527383 - RNA, 19 nt, Artificial Sequence
  Description of Artificial Sequence: Synthetic oligonucleotide
ugcacguaguccucaaagg

SEQ ID NO: 2527384 - RNA, 19 nt, Artificial Sequence
  Description of Artificial Sequence: Synthetic oligonucleotide
uuauucaagugcacugacc

SEQ ID NO: 2527385 - RNA, 19 nt, Artificial Sequence
  Description of Artificial Sequence: Synthetic oligonucleotide
uucaagugcacugaccaag

SEQ ID NO: 2527386 - RNA, 19 nt, Artificial Sequence
  Description of Artificial Sequence: Synthetic oligonucleotide
gucuccgaaacccauggcg

SEQ ID NO: 2527387 - RNA, 19 nt, Artificial Sequence
  Description of Artificial Sequence: Synthetic oligonucleotide
gagacggcuucaaagacgg

SEQ ID NO: 2527388 - RNA, 19 nt, Artificial Sequence
  Description of Artificial Sequence: Synthetic oligonucleotide
ucucguaagacuugaugug

SEQ ID NO: 2527389 - RNA, 19 nt, Artificial Sequence
  Description of Artificial Sequence: Synthetic oligonucleotide
ucaucugauccgaagagau

SEQ ID NO: 2527390 - RNA, 19 nt, Artificial Sequence
  Description of Artificial Sequence: Synthetic oligonucleotide
uuuuauucaagugcacuga

SEQ ID NO: 2527391 - RNA, 19 nt, Artificial Sequence
  Description of Artificial Sequence: Synthetic oligonucleotide
ucaaagacggccacaucug

SEQ ID NO: 2527392 - RNA, 19 nt, Artificial Sequence
  Description of Artificial Sequence: Synthetic oligonucleotide
gaaccaacuuggaagagcc

SEQ ID NO: 2527393 - RNA, 19 nt, Artificial Sequence
  Description of Artificial Sequence: Synthetic oligonucleotide
uguuccaacuuugucaucu

SEQ ID NO: 2527394 - RNA, 19 nt, Artificial Sequence
  Description of Artificial Sequence: Synthetic oligonucleotide
uuucuuugauucauacugu

SEQ ID NO: 2527395 - RNA, 19 nt, Artificial Sequence
  Description of Artificial Sequence: Synthetic oligonucleotide
cuugcgauggcacguaccc

SEQ ID NO: 2527396 - RNA, 19 nt, Artificial Sequence
  Description of Artificial Sequence: Synthetic oligonucleotide
ucuguuccaacuuugucau

SEQ ID NO: 2527397 - RNA, 19 nt, Artificial Sequence
  Description of Artificial Sequence: Synthetic oligonucleotide
aaggcgcucuucucggagc

SEQ ID NO: 2527398 - RNA, 19 nt, Artificial Sequence
  Description of Artificial Sequence: Synthetic oligonucleotide
cuucacaucuaguaagaug

SEQ ID NO: 2527399 - RNA, 19 nt, Artificial Sequence
  Description of Artificial Sequence: Synthetic oligonucleotide
uucuuugauucauacugug

SEQ ID NO: 2527400 - RNA, 19 nt, Artificial Sequence
  Description of Artificial Sequence: Synthetic oligonucleotide
acaucuaguaagauggaag

SEQ ID NO: 2527401 - RNA, 19 nt, Artificial Sequence
  Description of Artificial Sequence: Synthetic oligonucleotide
uugauucauacugugcaag

SEQ ID NO: 2527402 - RNA, 19 nt, Artificial Sequence
  Description of Artificial Sequence: Synthetic oligonucleotide
aaggcaguaaucugcuccu

SEQ ID NO: 2527403 - RNA, 19 nt, Artificial Sequence
  Description of Artificial Sequence: Synthetic oligonucleotide
gagaucaaugucaucauca

SEQ ID NO: 2527404 - RNA, 19 nt, Artificial Sequence
  Description of Artificial Sequence: Synthetic oligonucleotide
uccucaaaggcaguaaucu

SEQ ID NO: 2527405 - RNA, 19 nt, Artificial Sequence
  Description of Artificial Sequence: Synthetic oligonucleotide
uuuguaccuuuuauucaag

SEQ ID NO: 2527406 - RNA, 19 nt, Artificial Sequence
  Description of Artificial Sequence: Synthetic oligonucleotide
auccgaagagaucaauguc

SEQ ID NO: 2527407 - RNA, 19 nt, Artificial Sequence
  Description of Artificial Sequence: Synthetic oligonucleotide
aucugauccgaagagauca

SEQ ID NO: 2527408 - RNA, 19 nt, Artificial Sequence
  Description of Artificial Sequence: Synthetic oligonucleotide
gaugugguuauaccagcgc

SEQ ID NO: 2527409 - RNA, 19 nt, Artificial Sequence
  Description of Artificial Sequence: Synthetic oligonucleotide
agagaucaaugucaucauc

SEQ ID NO: 2527410 - RNA, 19 nt, Artificial Sequence
  Description of Artificial Sequence: Synthetic oligonucleotide
aggcuucacaucuaguaag

SEQ ID NO: 2527411 - RNA, 19 nt, Artificial Sequence
  Description of Artificial Sequence: Synthetic oligonucleotide
uaagacuugaugugguuau

SEQ ID NO: 2527412 - RNA, 19 nt, Artificial Sequence
  Description of Artificial Sequence: Synthetic oligonucleotide
uugaaugcuucugacacac

SEQ ID NO: 2527413 - RNA, 19 nt, Artificial Sequence
  Description of Artificial Sequence: Synthetic oligonucleotide
cauaucuguuccaacuuug

SEQ ID NO: 2527414 - RNA, 19 nt, Artificial Sequence
  Description of Artificial Sequence: Synthetic oligonucleotide
uuuagcauccgcaguucca

SEQ ID NO: 2527415 - RNA, 19 nt, Artificial Sequence
  Description of Artificial Sequence: Synthetic oligonucleotide
uuccauaucccaccggaac

SEQ ID NO: 2527416 - RNA, 19 nt, Artificial Sequence
  Description of Artificial Sequence: Synthetic oligonucleotide
uugaugugguuauaccagc

SEQ ID NO: 2527417 - RNA, 19 nt, Artificial Sequence
  Description of Artificial Sequence: Synthetic oligonucleotide
uuuaucuuuguaccuuuua

SEQ ID NO: 2527418 - RNA, 19 nt, Artificial Sequence
  Description of Artificial Sequence: Synthetic oligonucleotide
acauccauggacugcacgu

SEQ ID NO: 2527419 - RNA, 19 nt, Artificial Sequence
  Description of Artificial Sequence: Synthetic oligonucleotide
gacuugaugugguuauacc

SEQ ID NO: 2527420 - RNA, 19 nt, Artificial Sequence
  Description of Artificial Sequence: Synthetic oligonucleotide
uuuucaggucuccgaaacc

SEQ ID NO: 2527421 - RNA, 19 nt, Artificial Sequence
  Description of Artificial Sequence: Synthetic oligonucleotide
guuuucaggucuccgaaac

SEQ ID NO: 2527422 - RNA, 19 nt, Artificial Sequence
  Description of Artificial Sequence: Synthetic oligonucleotide
caucuaguaagauggaaga

SEQ ID NO: 2527423 - RNA, 19 nt, Artificial Sequence
  Description of Artificial Sequence: Synthetic oligonucleotide
aggucuccgaaacccaugg

SEQ ID NO: 2527424 - RNA, 19 nt, Artificial Sequence
  Description of Artificial Sequence: Synthetic oligonucleotide
uaauuccauaucccaccgg

SEQ ID NO: 2527425 - RNA, 19 nt, Artificial Sequence
  Description of Artificial Sequence: Synthetic oligonucleotide
gauucauacugugcaaggc

SEQ ID NO: 2527426 - RNA, 19 nt, Artificial Sequence
  Description of Artificial Sequence: Synthetic oligonucleotide
uaucccaccggaaccaacu

SEQ ID NO: 2527427 - RNA, 19 nt, Artificial Sequence
  Description of Artificial Sequence: Synthetic oligonucleotide
aagugcacugaccaaggau

SEQ ID NO: 2527428 - RNA, 19 nt, Artificial Sequence
  Description of Artificial Sequence: Synthetic oligonucleotide
uccucuagcauaucuguuc

SEQ ID NO: 2527429 - RNA, 19 nt, Artificial Sequence
  Description of Artificial Sequence: Synthetic oligonucleotide
uuugauucauacugugcaa

SEQ ID NO: 2527430 - RNA, 19 nt, Artificial Sequence
  Description of Artificial Sequence: Synthetic oligonucleotide
uccucuaauuuugucaugu

SEQ ID NO: 2527431 - RNA, 19 nt, Artificial Sequence
  Description of Artificial Sequence: Synthetic oligonucleotide
gcuugaaugcuucugacac

SEQ ID NO: 2527432 - RNA, 19 nt, Artificial Sequence
  Description of Artificial Sequence: Synthetic oligonucleotide
gacggcuucaaagacggcc

SEQ ID NO: 2527433 - RNA, 19 nt, Artificial Sequence
  Description of Artificial Sequence: Synthetic oligonucleotide
caucaucugauccgaagag

SEQ ID NO: 2527434 - RNA, 19 nt, Artificial Sequence
  Description of Artificial Sequence: Synthetic oligonucleotide
acuccucuaauuuugucau

SEQ ID NO: 2527435 - RNA, 19 nt, Artificial Sequence
  Description of Artificial Sequence: Synthetic oligonucleotide
aaaagcagccacauccaug

SEQ ID NO: 2527436 - RNA, 19 nt, Artificial Sequence
  Description of Artificial Sequence: Synthetic oligonucleotide
cucguaagacuugaugugg

SEQ ID NO: 2527437 - RNA, 19 nt, Artificial Sequence
  Description of Artificial Sequence: Synthetic oligonucleotide
ugcaaggcgcucuucucgg

SEQ ID NO: 2527438 - RNA, 19 nt, Artificial Sequence
  Description of Artificial Sequence: Synthetic oligonucleotide
aucuaguaagauggaagac

SEQ ID NO: 2527439 - RNA, 19 nt, Artificial Sequence
  Description of Artificial Sequence: Synthetic oligonucleotide
uuucuucacuccuggcagg

SEQ ID NO: 2527440 - RNA, 19 nt, Artificial Sequence
  Description of Artificial Sequence: Synthetic oligonucleotide
ugacacacuccucuaauuu

SEQ ID NO: 2527441 - RNA, 19 nt, Artificial Sequence
  Description of Artificial Sequence: Synthetic oligonucleotide
acaccaagccaucugcuug

SEQ ID NO: 2527442 - RNA, 19 nt, Artificial Sequence
  Description of Artificial Sequence: Synthetic oligonucleotide
uaccccucgauguagcucu

SEQ ID NO: 2527443 - RNA, 19 nt, Artificial Sequence
  Description of Artificial Sequence: Synthetic oligonucleotide
augugguuauaccagcgca

SEQ ID NO: 2527444 - RNA, 19 nt, Artificial Sequence
  Description of Artificial Sequence: Synthetic oligonucleotide
cuuuguaccuuuuauucaa

SEQ ID NO: 2527445 - RNA, 19 nt, Artificial Sequence
  Description of Artificial Sequence: Synthetic oligonucleotide
uugcccagagauuucuuca

SEQ ID NO: 2527446 - RNA, 19 nt, Artificial Sequence
  Description of Artificial Sequence: Synthetic oligonucleotide
agcaugacacaggucagcg

SEQ ID NO: 2527447 - RNA, 19 nt, Artificial Sequence
  Description of Artificial Sequence: Synthetic oligonucleotide
accaaggaugguuuuaaau

SEQ ID NO: 2527448 - RNA, 19 nt, Artificial Sequence
  Description of Artificial Sequence: Synthetic oligonucleotide
ugcgauggcacguaccccu

SEQ ID NO: 2527449 - RNA, 19 nt, Artificial Sequence
  Description of Artificial Sequence: Synthetic oligonucleotide
gauccgaagagaucaaugu

SEQ ID NO: 2527450 - RNA, 19 nt, Artificial Sequence
  Description of Artificial Sequence: Synthetic oligonucleotide
aucuuuagcauccgcaguu

SEQ ID NO: 2527451 - RNA, 19 nt, Artificial Sequence
  Description of Artificial Sequence: Synthetic oligonucleotide
uaucuguuccaacuuuguc

SEQ ID NO: 2527452 - RNA, 19 nt, Artificial Sequence
  Description of Artificial Sequence: Synthetic oligonucleotide
ugcuugaaugcuucugaca

SEQ ID NO: 2527453 - RNA, 19 nt, Artificial Sequence
  Description of Artificial Sequence: Synthetic oligonucleotide
cugcacguaguccucaaag

SEQ ID NO: 2527454 - RNA, 19 nt, Artificial Sequence
  Description of Artificial Sequence: Synthetic oligonucleotide
ucuagcauaucuguuccaa

SEQ ID NO: 2527455 - RNA, 19 nt, Artificial Sequence
  Description of Artificial Sequence: Synthetic oligonucleotide
guaaucugcuccucuagca

SEQ ID NO: 2527456 - RNA, 19 nt, Artificial Sequence
  Description of Artificial Sequence: Synthetic oligonucleotide
cuuggaagagccccacacc

SEQ ID NO: 2527457 - RNA, 19 nt, Artificial Sequence
  Description of Artificial Sequence: Synthetic oligonucleotide
agaucaaugucaucaucau

SEQ ID NO: 2527458 - RNA, 19 nt, Artificial Sequence
  Description of Artificial Sequence: Synthetic oligonucleotide
ugguuauaccagcgcagag

SEQ ID NO: 2527459 - RNA, 19 nt, Artificial Sequence
  Description of Artificial Sequence: Synthetic oligonucleotide
ucguaagacuugauguggu

SEQ ID NO: 2527460 - RNA, 19 nt, Artificial Sequence
  Description of Artificial Sequence: Synthetic oligonucleotide
agagacggcuucaaagacg

SEQ ID NO: 2527461 - RNA, 19 nt, Artificial Sequence
  Description of Artificial Sequence: Synthetic oligonucleotide
uuagcauccgcaguuccac

SEQ ID NO: 2527462 - RNA, 19 nt, Artificial Sequence
  Description of Artificial Sequence: Synthetic oligonucleotide
ucuuucucguaagacuuga

SEQ ID NO: 2527463 - RNA, 19 nt, Artificial Sequence
  Description of Artificial Sequence: Synthetic oligonucleotide
gugcaaggcgcucuucucg

SEQ ID NO: 2527464 - RNA, 19 nt, Artificial Sequence
  Description of Artificial Sequence: Synthetic oligonucleotide
caucuucaacuacacacug

SEQ ID NO: 2527465 - RNA, 19 nt, Artificial Sequence
  Description of Artificial Sequence: Synthetic oligonucleotide
cacuccucuaauuuuguca

SEQ ID NO: 2527466 - RNA, 19 nt, Artificial Sequence
  Description of Artificial Sequence: Synthetic oligonucleotide
aucugcuugcgauggcacg

SEQ ID NO: 2527467 - RNA, 19 nt, Artificial Sequence
  Description of Artificial Sequence: Synthetic oligonucleotide
augcuucugacacacuccu

SEQ ID NO: 2527468 - RNA, 19 nt, Artificial Sequence
  Description of Artificial Sequence: Synthetic oligonucleotide
uguuaaaagcagccacauc

SEQ ID NO: 2527469 - RNA, 19 nt, Artificial Sequence
  Description of Artificial Sequence: Synthetic oligonucleotide
cuuuagcauccgcaguucc

SEQ ID NO: 2527470 - RNA, 19 nt, Artificial Sequence
  Description of Artificial Sequence: Synthetic oligonucleotide
aacuacacacuggaucuga

SEQ ID NO: 2527471 - RNA, 19 nt, Artificial Sequence
  Description of Artificial Sequence: Synthetic oligonucleotide
ucauacugugcaaggcgcu

SEQ ID NO: 2527472 - RNA, 19 nt, Artificial Sequence
  Description of Artificial Sequence: Synthetic oligonucleotide
uggaagacuuggcaacaac

SEQ ID NO: 2527473 - RNA, 19 nt, Artificial Sequence
  Description of Artificial Sequence: Synthetic oligonucleotide
uuuugucaugucugucuca

SEQ ID NO: 2527474 - RNA, 19 nt, Artificial Sequence
  Description of Artificial Sequence: Synthetic oligonucleotide
uuggcaacaaccgcaggcu

SEQ ID NO: 2527475 - RNA, 19 nt, Artificial Sequence
  Description of Artificial Sequence: Synthetic oligonucleotide
aguuccacuuccuguggug

SEQ ID NO: 2527476 - RNA, 19 nt, Artificial Sequence
  Description of Artificial Sequence: Synthetic oligonucleotide
auccauggacugcacguag

SEQ ID NO: 2527477 - RNA, 19 nt, Artificial Sequence
  Description of Artificial Sequence: Synthetic oligonucleotide
cuugcccagagauuucuuc

SEQ ID NO: 2527478 - RNA, 19 nt, Artificial Sequence
  Description of Artificial Sequence: Synthetic oligonucleotide
cuggcagggccauacuugc

SEQ ID NO: 2527479 - RNA, 19 nt, Artificial Sequence
  Description of Artificial Sequence: Synthetic oligonucleotide
acacuccucuaauuuuguc

SEQ ID NO: 2527480 - RNA, 19 nt, Artificial Sequence
  Description of Artificial Sequence: Synthetic oligonucleotide
uucuucgcuuuccuccuca

SEQ ID NO: 2527481 - RNA, 19 nt, Artificial Sequence
  Description of Artificial Sequence: Synthetic oligonucleotide
ugacacaggucagcgggcg

SEQ ID NO: 2527482 - RNA, 19 nt, Artificial Sequence
  Description of Artificial Sequence: Synthetic oligonucleotide
agcgcagagcaugacacag

SEQ ID NO: 2527483 - RNA, 19 nt, Artificial Sequence
  Description of Artificial Sequence: Synthetic oligonucleotide
ucacaucuaguaagaugga

SEQ ID NO: 2527484 - RNA, 19 nt, Artificial Sequence
  Description of Artificial Sequence: Synthetic oligonucleotide
acguaguccucaaaggcag

SEQ ID NO: 2527485 - RNA, 19 nt, Artificial Sequence
  Description of Artificial Sequence: Synthetic oligonucleotide
gauguagcucuuguccgcc

SEQ ID NO: 2527486 - RNA, 19 nt, Artificial Sequence
  Description of Artificial Sequence: Synthetic oligonucleotide
uucucggagccucuuugcu

SEQ ID NO: 2527487 - RNA, 19 nt, Artificial Sequence
  Description of Artificial Sequence: Synthetic oligonucleotide
uccgcaguuccacuuccug

SEQ ID NO: 2527488 - RNA, 19 nt, Artificial Sequence
  Description of Artificial Sequence: Synthetic oligonucleotide
guaagauggaagacuuggc

SEQ ID NO: 2527489 - RNA, 19 nt, Artificial Sequence
  Description of Artificial Sequence: Synthetic oligonucleotide
gguuauaccagcgcagagc

SEQ ID NO: 2527490 - RNA, 19 nt, Artificial Sequence
  Description of Artificial Sequence: Synthetic oligonucleotide
agcauaucuguuccaacuu

SEQ ID NO: 2527491 - RNA, 19 nt, Artificial Sequence
  Description of Artificial Sequence: Synthetic oligonucleotide
caguaaucugcuccucuag

SEQ ID NO: 2527492 - RNA, 19 nt, Artificial Sequence
  Description of Artificial Sequence: Synthetic oligonucleotide
gacuuggcaacaaccgcag

SEQ ID NO: 2527493 - RNA, 19 nt, Artificial Sequence
  Description of Artificial Sequence: Synthetic oligonucleotide
agacuuggcaacaaccgca

SEQ ID NO: 2527494 - RNA, 19 nt, Artificial Sequence
  Description of Artificial Sequence: Synthetic oligonucleotide
uggugucuuccacacuggc

SEQ ID NO: 2527495 - RNA, 19 nt, Artificial Sequence
  Description of Artificial Sequence: Synthetic oligonucleotide
agagauuucuucacuccug

SEQ ID NO: 2527496 - RNA, 19 nt, Artificial Sequence
  Description of Artificial Sequence: Synthetic oligonucleotide
ucugcuugcgauggcacgu

SEQ ID NO: 2527497 - RNA, 19 nt, Artificial Sequence
  Description of Artificial Sequence: Synthetic oligonucleotide
uucugacacacuccucuaa

SEQ ID NO: 2527498 - RNA, 19 nt, Artificial Sequence
  Description of Artificial Sequence: Synthetic oligonucleotide
cuucucggagccucuuugc

SEQ ID NO: 2527499 - RNA, 19 nt, Artificial Sequence
  Description of Artificial Sequence: Synthetic oligonucleotide
cacguaguccucaaaggca

SEQ ID NO: 2527500 - RNA, 19 nt, Artificial Sequence
  Description of Artificial Sequence: Synthetic oligonucleotide
uaauuuugucaugucuguc

SEQ ID NO: 2527501 - RNA, 19 nt, Artificial Sequence
  Description of Artificial Sequence: Synthetic oligonucleotide
uccuguggugucuuccaca

SEQ ID NO: 2527502 - RNA, 19 nt, Artificial Sequence
  Description of Artificial Sequence: Synthetic oligonucleotide
cacauccauggacugcacg

SEQ ID NO: 2527503 - RNA, 19 nt, Artificial Sequence
  Description of Artificial Sequence: Synthetic oligonucleotide
uggcacguaccccucgaug

SEQ ID NO: 2527504 - RNA, 19 nt, Artificial Sequence
  Description of Artificial Sequence: Synthetic oligonucleotide
ugaccaaggaugguuuuaa

SEQ ID NO: 2527505 - RNA, 19 nt, Artificial Sequence
  Description of Artificial Sequence: Synthetic oligonucleotide
uuguccgccagguaaucau

SEQ ID NO: 2527506 - RNA, 19 nt, Artificial Sequence
  Description of Artificial Sequence: Synthetic oligonucleotide
ucccaccggaaccaacuug

SEQ ID NO: 2527507 - RNA, 19 nt, Artificial Sequence
  Description of Artificial Sequence: Synthetic oligonucleotide
uuccaacuuugucaucuuc

SEQ ID NO: 2527508 - RNA, 19 nt, Artificial Sequence
  Description of Artificial Sequence: Synthetic oligonucleotide
ugcccagagauuucuucac

SEQ ID NO: 2527509 - RNA, 19 nt, Artificial Sequence
  Description of Artificial Sequence: Synthetic oligonucleotide
cccaccggaaccaacuugg

SEQ ID NO: 2527510 - RNA, 19 nt, Artificial Sequence
  Description of Artificial Sequence: Synthetic oligonucleotide
aacuuggaagagccccaca

SEQ ID NO: 2527511 - RNA, 19 nt, Artificial Sequence
  Description of Artificial Sequence: Synthetic oligonucleotide
uucuucacuccuggcaggc

SEQ ID NO: 2527512 - RNA, 19 nt, Artificial Sequence
  Description of Artificial Sequence: Synthetic oligonucleotide
uccauggacugcacguagu

SEQ ID NO: 2527513 - RNA, 19 nt, Artificial Sequence
  Description of Artificial Sequence: Synthetic oligonucleotide
gauggaagacuuggcaaca

SEQ ID NO: 2527514 - RNA, 19 nt, Artificial Sequence
  Description of Artificial Sequence: Synthetic oligonucleotide
caacuuugucaucuucaac

SEQ ID NO: 2527515 - RNA, 19 nt, Artificial Sequence
  Description of Artificial Sequence: Synthetic oligonucleotide
cagagacggcuucaaagac

SEQ ID NO: 2527516 - RNA, 19 nt, Artificial Sequence
  Description of Artificial Sequence: Synthetic oligonucleotide
ucugauccgaagagaucaa

SEQ ID NO: 2527517 - RNA, 19 nt, Artificial Sequence
  Description of Artificial Sequence: Synthetic oligonucleotide
agcaccuggaggcccgcgg

SEQ ID NO: 2527518 - RNA, 19 nt, Artificial Sequence
  Description of Artificial Sequence: Synthetic oligonucleotide
gccagguaaucauugagca

SEQ ID NO: 2527519 - RNA, 19 nt, Artificial Sequence
  Description of Artificial Sequence: Synthetic oligonucleotide
aucaucugauccgaagaga

SEQ ID NO: 2527520 - RNA, 19 nt, Artificial Sequence
  Description of Artificial Sequence: Synthetic oligonucleotide
agccacauccauggacugc

SEQ ID NO: 2527521 - RNA, 19 nt, Artificial Sequence
  Description of Artificial Sequence: Synthetic oligonucleotide
accagcgcagagcaugaca

SEQ ID NO: 2527522 - RNA, 19 nt, Artificial Sequence
  Description of Artificial Sequence: Synthetic oligonucleotide
cauggacugcacguagucc

SEQ ID NO: 2527523 - RNA, 19 nt, Artificial Sequence
  Description of Artificial Sequence: Synthetic oligonucleotide
ugugcaaggcgcucuucuc

SEQ ID NO: 2527524 - RNA, 19 nt, Artificial Sequence
  Description of Artificial Sequence: Synthetic oligonucleotide
accuuuuauucaagugcac

SEQ ID NO: 2527525 - RNA, 19 nt, Artificial Sequence
  Description of Artificial Sequence: Synthetic oligonucleotide
augacacaggucagcgggc

SEQ ID NO: 2527526 - RNA, 19 nt, Artificial Sequence
  Description of Artificial Sequence: Synthetic oligonucleotide
caucugcuugcgauggcac

SEQ ID NO: 2527527 - RNA, 19 nt, Artificial Sequence
  Description of Artificial Sequence: Synthetic oligonucleotide
auaucuguuccaacuuugu

SEQ ID NO: 2527528 - RNA, 19 nt, Artificial Sequence
  Description of Artificial Sequence: Synthetic oligonucleotide
auucaagugcacugaccaa

SEQ ID NO: 2527529 - RNA, 19 nt, Artificial Sequence
  Description of Artificial Sequence: Synthetic oligonucleotide
ggaaccaacuuggaagagc

SEQ ID NO: 2527530 - RNA, 19 nt, Artificial Sequence
  Description of Artificial Sequence: Synthetic oligonucleotide
uccgccagguaaucauuga

SEQ ID NO: 2527531 - RNA, 19 nt, Artificial Sequence
  Description of Artificial Sequence: Synthetic oligonucleotide
cuugaaugcuucugacaca

SEQ ID NO: 2527532 - RNA, 19 nt, Artificial Sequence
  Description of Artificial Sequence: Synthetic oligonucleotide
gacggccacaucugcuugc

SEQ ID NO: 2527533 - RNA, 19 nt, Artificial Sequence
  Description of Artificial Sequence: Synthetic oligonucleotide
cauccgcaguuccacuucc

SEQ ID NO: 2527534 - RNA, 19 nt, Artificial Sequence
  Description of Artificial Sequence: Synthetic oligonucleotide
ccucuagcauaucuguucc

SEQ ID NO: 2527535 - RNA, 19 nt, Artificial Sequence
  Description of Artificial Sequence: Synthetic oligonucleotide
acaucugcuugcgauggca

SEQ ID NO: 2527536 - RNA, 19 nt, Artificial Sequence
  Description of Artificial Sequence: Synthetic oligonucleotide
caaggcgcucuucucggag

SEQ ID NO: 2527537 - RNA, 19 nt, Artificial Sequence
  Description of Artificial Sequence: Synthetic oligonucleotide
gagcaugacacaggucagc

SEQ ID NO: 2527538 - RNA, 19 nt, Artificial Sequence
  Description of Artificial Sequence: Synthetic oligonucleotide
cacacuggcagggccauac

SEQ ID NO: 2527539 - RNA, 19 nt, Artificial Sequence
  Description of Artificial Sequence: Synthetic oligonucleotide
gauggcacguaccccucga

SEQ ID NO: 2527540 - RNA, 19 nt, Artificial Sequence
  Description of Artificial Sequence: Synthetic oligonucleotide
ccagcgcagagcaugacac

SEQ ID NO: 2527541 - RNA, 19 nt, Artificial Sequence
  Description of Artificial Sequence: Synthetic oligonucleotide
cauacuugcccagagauuu

SEQ ID NO: 2527542 - RNA, 19 nt, Artificial Sequence
  Description of Artificial Sequence: Synthetic oligonucleotide
guaagacuugaugugguua

SEQ ID NO: 2527543 - RNA, 19 nt, Artificial Sequence
  Description of Artificial Sequence: Synthetic oligonucleotide
ucuuccacacuggcagggc

SEQ ID NO: 2527544 - RNA, 19 nt, Artificial Sequence
  Description of Artificial Sequence: Synthetic oligonucleotide
agacggccacaucugcuug

SEQ ID NO: 2527545 - RNA, 19 nt, Artificial Sequence
  Description of Artificial Sequence: Synthetic oligonucleotide
ggcggaggaccagagacgg

SEQ ID NO: 2527546 - RNA, 19 nt, Artificial Sequence
  Description of Artificial Sequence: Synthetic oligonucleotide
auaucccaccggaaccaac

SEQ ID NO: 2527547 - RNA, 19 nt, Artificial Sequence
  Description of Artificial Sequence: Synthetic oligonucleotide
acggcuucaaagacggcca

SEQ ID NO: 2527548 - RNA, 19 nt, Artificial Sequence
  Description of Artificial Sequence: Synthetic oligonucleotide
cauugagcaccuggaggcc

SEQ ID NO: 2527549 - RNA, 19 nt, Artificial Sequence
  Description of Artificial Sequence: Synthetic oligonucleotide
agcauccgcaguuccacuu

SEQ ID NO: 2527550 - RNA, 19 nt, Artificial Sequence
  Description of Artificial Sequence: Synthetic oligonucleotide
acguaccccucgauguagc

SEQ ID NO: 2527551 - RNA, 19 nt, Artificial Sequence
  Description of Artificial Sequence: Synthetic oligonucleotide
auacugugcaaggcgcucu

SEQ ID NO: 2527552 - RNA, 19 nt, Artificial Sequence
  Description of Artificial Sequence: Synthetic oligonucleotide
uuccacuuccugugguguc

SEQ ID NO: 2527553 - RNA, 19 nt, Artificial Sequence
  Description of Artificial Sequence: Synthetic oligonucleotide
ucuuugcuucuucgcuuuc

SEQ ID NO: 2527554 - RNA, 19 nt, Artificial Sequence
  Description of Artificial Sequence: Synthetic oligonucleotide
caggucuccgaaacccaug

SEQ ID NO: 2527555 - RNA, 19 nt, Artificial Sequence
  Description of Artificial Sequence: Synthetic oligonucleotide
cauacugugcaaggcgcuc

SEQ ID NO: 2527556 - RNA, 19 nt, Artificial Sequence
  Description of Artificial Sequence: Synthetic oligonucleotide
uguccgccagguaaucauu

SEQ ID NO: 2527557 - RNA, 19 nt, Artificial Sequence
  Description of Artificial Sequence: Synthetic oligonucleotide
gugguuauaccagcgcaga

SEQ ID NO: 2527558 - RNA, 19 nt, Artificial Sequence
  Description of Artificial Sequence: Synthetic oligonucleotide
acggccacaucugcuugcg

SEQ ID NO: 2527559 - RNA, 19 nt, Artificial Sequence
  Description of Artificial Sequence: Synthetic oligonucleotide
gcuucugacacacuccucu

SEQ ID NO: 2527560 - RNA, 19 nt, Artificial Sequence
  Description of Artificial Sequence: Synthetic oligonucleotide
uagcucuuguccgccaggu

SEQ ID NO: 2527561 - RNA, 19 nt, Artificial Sequence
  Description of Artificial Sequence: Synthetic oligonucleotide
cuccucuaauuuugucaug

SEQ ID NO: 2527562 - RNA, 19 nt, Artificial Sequence
  Description of Artificial Sequence: Synthetic oligonucleotide
auacuugcccagagauuuc

SEQ ID NO: 2527563 - RNA, 19 nt, Artificial Sequence
  Description of Artificial Sequence: Synthetic oligonucleotide
gcucuuguccgccagguaa

SEQ ID NO: 2527564 - RNA, 19 nt, Artificial Sequence
  Description of Artificial Sequence: Synthetic oligonucleotide
ccagagacggcuucaaaga

SEQ ID NO: 2527565 - RNA, 19 nt, Artificial Sequence
  Description of Artificial Sequence: Synthetic oligonucleotide
guggugucuuccacacugg

SEQ ID NO: 2527566 - RNA, 19 nt, Artificial Sequence
  Description of Artificial Sequence: Synthetic oligonucleotide
gaggaccagagacggcuuc

SEQ ID NO: 2527567 - RNA, 19 nt, Artificial Sequence
  Description of Artificial Sequence: Synthetic oligonucleotide
cccacaccaagccaucugc

SEQ ID NO: 2527568 - RNA, 19 nt, Artificial Sequence
  Description of Artificial Sequence: Synthetic oligonucleotide
acugaccaaggaugguuuu

SEQ ID NO: 2527569 - RNA, 19 nt, Artificial Sequence
  Description of Artificial Sequence: Synthetic oligonucleotide
cacguaccccucgauguag

SEQ ID NO: 2527570 - RNA, 19 nt, Artificial Sequence
  Description of Artificial Sequence: Synthetic oligonucleotide
gcaugacacaggucagcgg

SEQ ID NO: 2527571 - RNA, 19 nt, Artificial Sequence
  Description of Artificial Sequence: Synthetic oligonucleotide
ugcuugcgauggcacguac

SEQ ID NO: 2527572 - RNA, 19 nt, Artificial Sequence
  Description of Artificial Sequence: Synthetic oligonucleotide
uggcagggccauacuugcc

SEQ ID NO: 2527573 - RNA, 19 nt, Artificial Sequence
  Description of Artificial Sequence: Synthetic oligonucleotide
aagacuugaugugguuaua

SEQ ID NO: 2527574 - RNA, 19 nt, Artificial Sequence
  Description of Artificial Sequence: Synthetic oligonucleotide
agguaaucauugagcaccu

SEQ ID NO: 2527575 - RNA, 19 nt, Artificial Sequence
  Description of Artificial Sequence: Synthetic oligonucleotide
ugcuucugacacacuccuc

SEQ ID NO: 2527576 - RNA, 19 nt, Artificial Sequence
  Description of Artificial Sequence: Synthetic oligonucleotide
ccaucugcuugaaugcuuc

SEQ ID NO: 2527577 - RNA, 19 nt, Artificial Sequence
  Description of Artificial Sequence: Synthetic oligonucleotide
cccagagauuucuucacuc

SEQ ID NO: 2527578 - RNA, 19 nt, Artificial Sequence
  Description of Artificial Sequence: Synthetic oligonucleotide
cgccagguaaucauugagc

SEQ ID NO: 2527579 - RNA, 19 nt, Artificial Sequence
  Description of Artificial Sequence: Synthetic oligonucleotide
cuucaaagacggccacauc

SEQ ID NO: 2527580 - RNA, 19 nt, Artificial Sequence
  Description of Artificial Sequence: Synthetic oligonucleotide
uugcgauggcacguacccc

SEQ ID NO: 2527581 - RNA, 19 nt, Artificial Sequence
  Description of Artificial Sequence: Synthetic oligonucleotide
gccacaucugcuugcgaug

SEQ ID NO: 2527582 - RNA, 19 nt, Artificial Sequence
  Description of Artificial Sequence: Synthetic oligonucleotide
uagcauccgcaguuccacu

SEQ ID NO: 2527583 - RNA, 19 nt, Artificial Sequence
  Description of Artificial Sequence: Synthetic oligonucleotide
uacugugcaaggcgcucuu

SEQ ID NO: 2527584 - RNA, 19 nt, Artificial Sequence
  Description of Artificial Sequence: Synthetic oligonucleotide
acacaggucagcgggcgga

SEQ ID NO: 2527585 - RNA, 19 nt, Artificial Sequence
  Description of Artificial Sequence: Synthetic oligonucleotide
cagagauuucuucacuccu

SEQ ID NO: 2527586 - RNA, 19 nt, Artificial Sequence
  Description of Artificial Sequence: Synthetic oligonucleotide
guccgccagguaaucauug

SEQ ID NO: 2527587 - RNA, 19 nt, Artificial Sequence
  Description of Artificial Sequence: Synthetic oligonucleotide
aagcagccacauccaugga

SEQ ID NO: 2527588 - RNA, 19 nt, Artificial Sequence
  Description of Artificial Sequence: Synthetic oligonucleotide
ucuucgcuuuccuccucau

SEQ ID NO: 2527589 - RNA, 19 nt, Artificial Sequence
  Description of Artificial Sequence: Synthetic oligonucleotide
gggguuuucaggucuccga

SEQ ID NO: 2527590 - RNA, 19 nt, Artificial Sequence
  Description of Artificial Sequence: Synthetic oligonucleotide
uggcaacaaccgcaggcuu

SEQ ID NO: 2527591 - RNA, 19 nt, Artificial Sequence
  Description of Artificial Sequence: Synthetic oligonucleotide
ugcacugaccaaggauggu

SEQ ID NO: 2527592 - RNA, 19 nt, Artificial Sequence
  Description of Artificial Sequence: Synthetic oligonucleotide
caacuuggaagagccccac

SEQ ID NO: 2527593 - RNA, 19 nt, Artificial Sequence
  Description of Artificial Sequence: Synthetic oligonucleotide
cacaucuaguaagauggaa

SEQ ID NO: 2527594 - RNA, 19 nt, Artificial Sequence
  Description of Artificial Sequence: Synthetic oligonucleotide
acugugcaaggcgcucuuc

SEQ ID NO: 2527595 - RNA, 19 nt, Artificial Sequence
  Description of Artificial Sequence: Synthetic oligonucleotide
cacaucugcuugcgauggc

SEQ ID NO: 2527596 - RNA, 19 nt, Artificial Sequence
  Description of Artificial Sequence: Synthetic oligonucleotide
ccacaucugcuugcgaugg

SEQ ID NO: 2527597 - RNA, 19 nt, Artificial Sequence
  Description of Artificial Sequence: Synthetic oligonucleotide
agccaucugcuugaaugcu

SEQ ID NO: 2527598 - RNA, 19 nt, Artificial Sequence
  Description of Artificial Sequence: Synthetic oligonucleotide
gaccaaggaugguuuuaaa

SEQ ID NO: 2527599 - RNA, 19 nt, Artificial Sequence
  Description of Artificial Sequence: Synthetic oligonucleotide
ccaaggaugguuuuaaauu

SEQ ID NO: 2527600 - RNA, 19 nt, Artificial Sequence
  Description of Artificial Sequence: Synthetic oligonucleotide
ucuuguccgccagguaauc

SEQ ID NO: 2527601 - RNA, 19 nt, Artificial Sequence
  Description of Artificial Sequence: Synthetic oligonucleotide
aggaccagagacggcuuca

SEQ ID NO: 2527602 - RNA, 19 nt, Artificial Sequence
  Description of Artificial Sequence: Synthetic oligonucleotide
caacuacacacuggaucug

SEQ ID NO: 2527603 - RNA, 19 nt, Artificial Sequence
  Description of Artificial Sequence: Synthetic oligonucleotide
auaccagcgcagagcauga

SEQ ID NO: 2527604 - RNA, 19 nt, Artificial Sequence
  Description of Artificial Sequence: Synthetic oligonucleotide
ggcacguaccccucgaugu

SEQ ID NO: 2527605 - RNA, 19 nt, Artificial Sequence
  Description of Artificial Sequence: Synthetic oligonucleotide
ggguuuucaggucuccgaa

SEQ ID NO: 2527606 - RNA, 19 nt, Artificial Sequence
  Description of Artificial Sequence: Synthetic oligonucleotide
cagggccauacuugcccag

SEQ ID NO: 2527607 - RNA, 19 nt, Artificial Sequence
  Description of Artificial Sequence: Synthetic oligonucleotide
aggcaguaaucugcuccuc

SEQ ID NO: 2527608 - RNA, 19 nt, Artificial Sequence
  Description of Artificial Sequence: Synthetic oligonucleotide
caccuggaggcccgcgggg

SEQ ID NO: 2527609 - RNA, 19 nt, Artificial Sequence
  Description of Artificial Sequence: Synthetic oligonucleotide
cucuagcauaucuguucca

SEQ ID NO: 2527610 - RNA, 19 nt, Artificial Sequence
  Description of Artificial Sequence: Synthetic oligonucleotide
auggaagacuuggcaacaa

SEQ ID NO: 2527611 - RNA, 19 nt, Artificial Sequence
  Description of Artificial Sequence: Synthetic oligonucleotide
gccauacuugcccagagau

SEQ ID NO: 2527612 - RNA, 19 nt, Artificial Sequence
  Description of Artificial Sequence: Synthetic oligonucleotide
ggcuuucucuuucucguaa

SEQ ID NO: 2527613 - RNA, 19 nt, Artificial Sequence
  Description of Artificial Sequence: Synthetic oligonucleotide
gcaccuggaggcccgcggg

SEQ ID NO: 2527614 - RNA, 19 nt, Artificial Sequence
  Description of Artificial Sequence: Synthetic oligonucleotide
gggccauacuugcccagag

SEQ ID NO: 2527615 - RNA, 19 nt, Artificial Sequence
  Description of Artificial Sequence: Synthetic oligonucleotide
gacugcacguaguccucaa

SEQ ID NO: 2527616 - RNA, 19 nt, Artificial Sequence
  Description of Artificial Sequence: Synthetic oligonucleotide
guaguccucaaaggcagua

SEQ ID NO: 2527617 - RNA, 19 nt, Artificial Sequence
  Description of Artificial Sequence: Synthetic oligonucleotide
ucccaaggcuucacaucua

SEQ ID NO: 2527618 - RNA, 19 nt, Artificial Sequence
  Description of Artificial Sequence: Synthetic oligonucleotide
ggcuucacaucuaguaaga

SEQ ID NO: 2527619 - RNA, 19 nt, Artificial Sequence
  Description of Artificial Sequence: Synthetic oligonucleotide
gguuuucaggucuccgaaa

SEQ ID NO: 2527620 - RNA, 19 nt, Artificial Sequence
  Description of Artificial Sequence: Synthetic oligonucleotide
caagugcacugaccaagga

SEQ ID NO: 2527621 - RNA, 19 nt, Artificial Sequence
  Description of Artificial Sequence: Synthetic oligonucleotide
ccgccagguaaucauugag

SEQ ID NO: 2527622 - RNA, 19 nt, Artificial Sequence
  Description of Artificial Sequence: Synthetic oligonucleotide
acacuggcagggccauacu

SEQ ID NO: 2527623 - RNA, 19 nt, Artificial Sequence
  Description of Artificial Sequence: Synthetic oligonucleotide
acaggucagcgggcggagg

SEQ ID NO: 2527624 - RNA, 19 nt, Artificial Sequence
  Description of Artificial Sequence: Synthetic oligonucleotide
ccaacuuugucaucuucaa

SEQ ID NO: 2527625 - RNA, 19 nt, Artificial Sequence
  Description of Artificial Sequence: Synthetic oligonucleotide
ucagcgggcggaggaccag

SEQ ID NO: 2527626 - RNA, 19 nt, Artificial Sequence
  Description of Artificial Sequence: Synthetic oligonucleotide
cuucugacacacuccucua

SEQ ID NO: 2527627 - RNA, 19 nt, Artificial Sequence
  Description of Artificial Sequence: Synthetic oligonucleotide
cgauguagcucuuguccgc

SEQ ID NO: 2527628 - RNA, 19 nt, Artificial Sequence
  Description of Artificial Sequence: Synthetic oligonucleotide
ccggaaccaacuuggaaga

SEQ ID NO: 2527629 - RNA, 19 nt, Artificial Sequence
  Description of Artificial Sequence: Synthetic oligonucleotide
agggccauacuugcccaga

SEQ ID NO: 2527630 - RNA, 19 nt, Artificial Sequence
  Description of Artificial Sequence: Synthetic oligonucleotide
acuacacacuggaucugaa

SEQ ID NO: 2527631 - RNA, 19 nt, Artificial Sequence
  Description of Artificial Sequence: Synthetic oligonucleotide
gaccagagacggcuucaaa

SEQ ID NO: 2527632 - RNA, 19 nt, Artificial Sequence
  Description of Artificial Sequence: Synthetic oligonucleotide
guaccccucgauguagcuc

SEQ ID NO: 2527633 - RNA, 19 nt, Artificial Sequence
  Description of Artificial Sequence: Synthetic oligonucleotide
auggcacguaccccucgau

SEQ ID NO: 2527634 - RNA, 19 nt, Artificial Sequence
  Description of Artificial Sequence: Synthetic oligonucleotide
gcuccucuagcauaucugu

SEQ ID NO: 2527635 - RNA, 19 nt, Artificial Sequence
  Description of Artificial Sequence: Synthetic oligonucleotide
gcaguaaucugcuccucua

SEQ ID NO: 2527636 - RNA, 19 nt, Artificial Sequence
  Description of Artificial Sequence: Synthetic oligonucleotide
cgggcggaggaccagagac

SEQ ID NO: 2527637 - RNA, 19 nt, Artificial Sequence
  Description of Artificial Sequence: Synthetic oligonucleotide
aucccaccggaaccaacuu

SEQ ID NO: 2527638 - RNA, 19 nt, Artificial Sequence
  Description of Artificial Sequence: Synthetic oligonucleotide
cuuguccgccagguaauca

SEQ ID NO: 2527639 - RNA, 19 nt, Artificial Sequence
  Description of Artificial Sequence: Synthetic oligonucleotide
agacggcuucaaagacggc

SEQ ID NO: 2527640 - RNA, 19 nt, Artificial Sequence
  Description of Artificial Sequence: Synthetic oligonucleotide
gggcggaggaccagagacg

SEQ ID NO: 2527641 - RNA, 19 nt, Artificial Sequence
  Description of Artificial Sequence: Synthetic oligonucleotide
cuguuccaacuuugucauc

SEQ ID NO: 2527642 - RNA, 19 nt, Artificial Sequence
  Description of Artificial Sequence: Synthetic oligonucleotide
cuggcaggcuggcuuucuc

SEQ ID NO: 2527643 - RNA, 19 nt, Artificial Sequence
  Description of Artificial Sequence: Synthetic oligonucleotide
ggucuccgaaacccauggc

SEQ ID NO: 2527644 - RNA, 19 nt, Artificial Sequence
  Description of Artificial Sequence: Synthetic oligonucleotide
cugugcaaggcgcucuucu

SEQ ID NO: 2527645 - RNA, 19 nt, Artificial Sequence
  Description of Artificial Sequence: Synthetic oligonucleotide
caccggaaccaacuuggaa

SEQ ID NO: 2527646 - RNA, 19 nt, Artificial Sequence
  Description of Artificial Sequence: Synthetic oligonucleotide
guuccacuuccuguggugu

SEQ ID NO: 2527647 - RNA, 19 nt, Artificial Sequence
  Description of Artificial Sequence: Synthetic oligonucleotide
agccccacaccaagccauc

SEQ ID NO: 2527648 - RNA, 19 nt, Artificial Sequence
  Description of Artificial Sequence: Synthetic oligonucleotide
ccaacuuggaagagcccca

SEQ ID NO: 2527649 - RNA, 19 nt, Artificial Sequence
  Description of Artificial Sequence: Synthetic oligonucleotide
gcuugcgauggcacguacc

SEQ ID NO: 2527650 - RNA, 19 nt, Artificial Sequence
  Description of Artificial Sequence: Synthetic oligonucleotide
gucaugucugucucaucau

SEQ ID NO: 2527651 - RNA, 19 nt, Artificial Sequence
  Description of Artificial Sequence: Synthetic oligonucleotide
gcauccgcaguuccacuuc

SEQ ID NO: 2527652 - RNA, 19 nt, Artificial Sequence
  Description of Artificial Sequence: Synthetic oligonucleotide
ugagcaccuggaggcccgc

SEQ ID NO: 2527653 - RNA, 19 nt, Artificial Sequence
  Description of Artificial Sequence: Synthetic oligonucleotide
gagcaccuggaggcccgcg

SEQ ID NO: 2527654 - RNA, 19 nt, Artificial Sequence
  Description of Artificial Sequence: Synthetic oligonucleotide
cugaccaaggaugguuuua

SEQ ID NO: 2527655 - RNA, 19 nt, Artificial Sequence
  Description of Artificial Sequence: Synthetic oligonucleotide
ccucgauguagcucuuguc

SEQ ID NO: 2527656 - RNA, 19 nt, Artificial Sequence
  Description of Artificial Sequence: Synthetic oligonucleotide
ggaugguuuuaaauuuugu

SEQ ID NO: 2527657 - RNA, 19 nt, Artificial Sequence
  Description of Artificial Sequence: Synthetic oligonucleotide
gguaaucauugagcaccug

SEQ ID NO: 2527658 - RNA, 19 nt, Artificial Sequence
  Description of Artificial Sequence: Synthetic oligonucleotide
gcgcagagcaugacacagg

SEQ ID NO: 2527659 - RNA, 19 nt, Artificial Sequence
  Description of Artificial Sequence: Synthetic oligonucleotide
cauccauggacugcacgua

SEQ ID NO: 2527660 - RNA, 19 nt, Artificial Sequence
  Description of Artificial Sequence: Synthetic oligonucleotide
ggccacaucugcuugcgau

SEQ ID NO: 2527661 - RNA, 19 nt, Artificial Sequence
  Description of Artificial Sequence: Synthetic oligonucleotide
ccuuuuauucaagugcacu

SEQ ID NO: 2527662 - RNA, 19 nt, Artificial Sequence
  Description of Artificial Sequence: Synthetic oligonucleotide
cacugaccaaggaugguuu

SEQ ID NO: 2527663 - RNA, 19 nt, Artificial Sequence
  Description of Artificial Sequence: Synthetic oligonucleotide
cucuuguccgccagguaau

SEQ ID NO: 2527664 - RNA, 19 nt, Artificial Sequence
  Description of Artificial Sequence: Synthetic oligonucleotide
cuucaacuacacacuggau

SEQ ID NO: 2527665 - RNA, 19 nt, Artificial Sequence
  Description of Artificial Sequence: Synthetic oligonucleotide
agcgggcggaggaccagag

SEQ ID NO: 2527666 - RNA, 19 nt, Artificial Sequence
  Description of Artificial Sequence: Synthetic oligonucleotide
gagccccacaccaagccau

SEQ ID NO: 2527667 - RNA, 19 nt, Artificial Sequence
  Description of Artificial Sequence: Synthetic oligonucleotide
ggucagcgggcggaggacc

SEQ ID NO: 2527668 - RNA, 19 nt, Artificial Sequence
  Description of Artificial Sequence: Synthetic oligonucleotide
cugacacacuccucuaauu

SEQ ID NO: 2527669 - RNA, 19 nt, Artificial Sequence
  Description of Artificial Sequence: Synthetic oligonucleotide
uaccagcgcagagcaugac

SEQ ID NO: 2527670 - RNA, 19 nt, Artificial Sequence
  Description of Artificial Sequence: Synthetic oligonucleotide
gcauaucuguuccaacuuu

SEQ ID NO: 2527671 - RNA, 19 nt, Artificial Sequence
  Description of Artificial Sequence: Synthetic oligonucleotide
cacaccaagccaucugcuu

SEQ ID NO: 2527672 - RNA, 19 nt, Artificial Sequence
  Description of Artificial Sequence: Synthetic oligonucleotide
cauaucccaccggaaccaa

SEQ ID NO: 2527673 - RNA, 19 nt, Artificial Sequence
  Description of Artificial Sequence: Synthetic oligonucleotide
gucagcgggcggaggacca

SEQ ID NO: 2527674 - RNA, 19 nt, Artificial Sequence
  Description of Artificial Sequence: Synthetic oligonucleotide
auccgcaguuccacuuccu

SEQ ID NO: 2527675 - RNA, 19 nt, Artificial Sequence
  Description of Artificial Sequence: Synthetic oligonucleotide
caucugcuugaaugcuucu

SEQ ID NO: 2527676 - RNA, 19 nt, Artificial Sequence
  Description of Artificial Sequence: Synthetic oligonucleotide
ccccacaccaagccaucug

SEQ ID NO: 2527677 - RNA, 19 nt, Artificial Sequence
  Description of Artificial Sequence: Synthetic oligonucleotide
accaagccaucugcuugaa

SEQ ID NO: 2527678 - RNA, 19 nt, Artificial Sequence
  Description of Artificial Sequence: Synthetic oligonucleotide
caguuccacuuccuguggu

SEQ ID NO: 2527679 - RNA, 19 nt, Artificial Sequence
  Description of Artificial Sequence: Synthetic oligonucleotide
cgaagagaucaaugucauc

SEQ ID NO: 2527680 - RNA, 19 nt, Artificial Sequence
  Description of Artificial Sequence: Synthetic oligonucleotide
cuccucuagcauaucuguu

SEQ ID NO: 2527681 - RNA, 19 nt, Artificial Sequence
  Description of Artificial Sequence: Synthetic oligonucleotide
ccgaagagaucaaugucau

SEQ ID NO: 2527682 - RNA, 19 nt, Artificial Sequence
  Description of Artificial Sequence: Synthetic oligonucleotide
cgauggcacguaccccucg

SEQ ID NO: 2527683 - RNA, 19 nt, Artificial Sequence
  Description of Artificial Sequence: Synthetic oligonucleotide
cacuggcagggccauacuu

SEQ ID NO: 2527684 - RNA, 19 nt, Artificial Sequence
  Description of Artificial Sequence: Synthetic oligonucleotide
gcaaggcgcucuucucgga

SEQ ID NO: 2527685 - RNA, 19 nt, Artificial Sequence
  Description of Artificial Sequence: Synthetic oligonucleotide
cugauccgaagagaucaau

SEQ ID NO: 2527686 - RNA, 19 nt, Artificial Sequence
  Description of Artificial Sequence: Synthetic oligonucleotide
gcccagagauuucuucacu

SEQ ID NO: 2527687 - RNA, 19 nt, Artificial Sequence
  Description of Artificial Sequence: Synthetic oligonucleotide
gcacguaccccucgaugua

SEQ ID NO: 2527688 - RNA, 19 nt, Artificial Sequence
  Description of Artificial Sequence: Synthetic oligonucleotide
gcagagcaugacacagguc

SEQ ID NO: 2527689 - RNA, 19 nt, Artificial Sequence
  Description of Artificial Sequence: Synthetic oligonucleotide
gcacugaccaaggaugguu

SEQ ID NO: 2527690 - RNA, 19 nt, Artificial Sequence
  Description of Artificial Sequence: Synthetic oligonucleotide
ggaccagagacggcuucaa

SEQ ID NO: 2527691 - RNA, 19 nt, Artificial Sequence
  Description of Artificial Sequence: Synthetic oligonucleotide
gcaacaaccgcaggcuuuu

SEQ ID NO: 2527692 - RNA, 19 nt, Artificial Sequence
  Description of Artificial Sequence: Synthetic oligonucleotide
cugcuugcgauggcacgua

SEQ ID NO: 2527693 - RNA, 19 nt, Artificial Sequence
  Description of Artificial Sequence: Synthetic oligonucleotide
gcuucacaucuaguaagau

SEQ ID NO: 2527694 - RNA, 19 nt, Artificial Sequence
  Description of Artificial Sequence: Synthetic oligonucleotide
ggcaacaaccgcaggcuuu

SEQ ID NO: 2527695 - RNA, 19 nt, Artificial Sequence
  Description of Artificial Sequence: Synthetic oligonucleotide
cggaaccaacuuggaagag

SEQ ID NO: 2527696 - RNA, 19 nt, Artificial Sequence
  Description of Artificial Sequence: Synthetic oligonucleotide
cuguggugucuuccacacu

SEQ ID NO: 2527697 - RNA, 19 nt, Artificial Sequence
  Description of Artificial Sequence: Synthetic oligonucleotide
ccgcaguuccacuuccugu

SEQ ID NO: 2527698 - RNA, 19 nt, Artificial Sequence
  Description of Artificial Sequence: Synthetic oligonucleotide
cccucgauguagcucuugu

SEQ ID NO: 2527699 - RNA, 19 nt, Artificial Sequence
  Description of Artificial Sequence: Synthetic oligonucleotide
ccaccggaaccaacuugga

SEQ ID NO: 2527700 - RNA, 19 nt, Artificial Sequence
  Description of Artificial Sequence: Synthetic oligonucleotide
cagcgggcggaggaccaga

SEQ ID NO: 2527701 - RNA, 19 nt, Artificial Sequence
  Description of Artificial Sequence: Synthetic oligonucleotide
cggcuucaaagacggccac

SEQ ID NO: 2527702 - RNA, 19 nt, Artificial Sequence
  Description of Artificial Sequence: Synthetic oligonucleotide
ccaaggcuucacaucuagu

SEQ ID NO: 2527703 - RNA, 19 nt, Artificial Sequence
  Description of Artificial Sequence: Synthetic oligonucleotide
ccacaccaagccaucugcu

SEQ ID NO: 2527704 - RNA, 19 nt, Artificial Sequence
  Description of Artificial Sequence: Synthetic oligonucleotide
gcgauggcacguaccccuc

SEQ ID NO: 2527705 - RNA, 19 nt, Artificial Sequence
  Description of Artificial Sequence: Synthetic oligonucleotide
gcggaggaccagagacggc

SEQ ID NO: 2527706 - RNA, 19 nt, Artificial Sequence
  Description of Artificial Sequence: Synthetic oligonucleotide
gcgggcggaggaccagaga

SEQ ID NO: 2527707 - RNA, 19 nt, Artificial Sequence
  Description of Artificial Sequence: Synthetic oligonucleotide
cguaagacuugaugugguu

SEQ ID NO: 2527708 - RNA, 19 nt, Artificial Sequence
  Description of Artificial Sequence: Synthetic oligonucleotide
ccccucgauguagcucuug

SEQ ID NO: 2527709 - RNA, 19 nt, Artificial Sequence
  Description of Artificial Sequence: Synthetic oligonucleotide
accccucgauguagcucuu

SEQ ID NO: 2527710 - RNA, 19 nt, Artificial Sequence
  Description of Artificial Sequence: Synthetic oligonucleotide
cguaguccucaaaggcagu

SEQ ID NO: 2527711 - RNA, 19 nt, Artificial Sequence
  Description of Artificial Sequence: Synthetic oligonucleotide
cguaccccucgauguagcu

SEQ ID NO: 2527712 - RNA, 19 nt, Artificial Sequence
  Description of Artificial Sequence: Synthetic oligonucleotide
ggcgcucuucucggagccu

SEQ ID NO: 2527713 - RNA, 19 nt, Artificial Sequence
  Description of Artificial Sequence: Synthetic oligonucleotide
ccaagccaucugcuugaau

SEQ ID NO: 2527714 - RNA, 19 nt, Artificial Sequence
  Description of Artificial Sequence: Synthetic oligonucleotide
ccuggcaggcuggcuuucu

SEQ ID NO: 2527715 - RNA, 19 nt, Artificial Sequence
  Description of Artificial Sequence: Synthetic oligonucleotide
ccacuuccuguggugucuu

SEQ ID NO: 2527716 - RNA, 19 nt, Artificial Sequence
  Description of Artificial Sequence: Synthetic oligonucleotide
agcaagaugaguuucaggg

SEQ ID NO: 2527717 - RNA, 19 nt, Artificial Sequence
  Description of Artificial Sequence: Synthetic oligonucleotide
agaauuugggcuuuagcac

SEQ ID NO: 2527718 - RNA, 19 nt, Artificial Sequence
  Description of Artificial Sequence: Synthetic oligonucleotide
aaaauugcugauuccagca

SEQ ID NO: 2527719 - RNA, 19 nt, Artificial Sequence
  Description of Artificial Sequence: Synthetic oligonucleotide
agaaacauggacguagagc

SEQ ID NO: 2527720 - RNA, 19 nt, Artificial Sequence
  Description of Artificial Sequence: Synthetic oligonucleotide
agacaugugguacaguggg

SEQ ID NO: 2527721 - RNA, 19 nt, Artificial Sequence
  Description of Artificial Sequence: Synthetic oligonucleotide
uguacuggaacacugucac

SEQ ID NO: 2527722 - RNA, 19 nt, Artificial Sequence
  Description of Artificial Sequence: Synthetic oligonucleotide
uguuugaaggucucgguag

SEQ ID NO: 2527723 - RNA, 19 nt, Artificial Sequence
  Description of Artificial Sequence: Synthetic oligonucleotide
gaaacauggacguagagcu

SEQ ID NO: 2527724 - RNA, 19 nt, Artificial Sequence
  Description of Artificial Sequence: Synthetic oligonucleotide
gaauuugggcuuuagcacc

SEQ ID NO: 2527725 - RNA, 19 nt, Artificial Sequence
  Description of Artificial Sequence: Synthetic oligonucleotide
accaccguggcaccgaugc

SEQ ID NO: 2527726 - RNA, 19 nt, Artificial Sequence
  Description of Artificial Sequence: Synthetic oligonucleotide
acagaaaauugcugauucc

SEQ ID NO: 2527727 - RNA, 19 nt, Artificial Sequence
  Description of Artificial Sequence: Synthetic oligonucleotide
uugggcuuuagcaccaccg

SEQ ID NO: 2527728 - RNA, 19 nt, Artificial Sequence
  Description of Artificial Sequence: Synthetic oligonucleotide
uuuagcaccaccguggcac

SEQ ID NO: 2527729 - RNA, 19 nt, Artificial Sequence
  Description of Artificial Sequence: Synthetic oligonucleotide
gacagaaaauugcugauuc

SEQ ID NO: 2527730 - RNA, 19 nt, Artificial Sequence
  Description of Artificial Sequence: Synthetic oligonucleotide
caaggagccagacaugugg

SEQ ID NO: 2527731 - RNA, 19 nt, Artificial Sequence
  Description of Artificial Sequence: Synthetic oligonucleotide
aucgaggucgggcauaagg

SEQ ID NO: 2527732 - RNA, 19 nt, Artificial Sequence
  Description of Artificial Sequence: Synthetic oligonucleotide
uccugaaggaaguccaggg

SEQ ID NO: 2527733 - RNA, 19 nt, Artificial Sequence
  Description of Artificial Sequence: Synthetic oligonucleotide
ugaguuucagggccugucg

SEQ ID NO: 2527734 - RNA, 19 nt, Artificial Sequence
  Description of Artificial Sequence: Synthetic oligonucleotide
uugucagaaacauggacgu

SEQ ID NO: 2527735 - RNA, 19 nt, Artificial Sequence
  Description of Artificial Sequence: Synthetic oligonucleotide
uguccauuauacucugggg

SEQ ID NO: 2527736 - RNA, 19 nt, Artificial Sequence
  Description of Artificial Sequence: Synthetic oligonucleotide
gacguucaccuccugaagg

SEQ ID NO: 2527737 - RNA, 19 nt, Artificial Sequence
  Description of Artificial Sequence: Synthetic oligonucleotide
ugagaauuugggcuuuagc

SEQ ID NO: 2527738 - RNA, 19 nt, Artificial Sequence
  Description of Artificial Sequence: Synthetic oligonucleotide
guguccauuauacucuggg

SEQ ID NO: 2527739 - RNA, 19 nt, Artificial Sequence
  Description of Artificial Sequence: Synthetic oligonucleotide
gacguagagcugcacaagg

SEQ ID NO: 2527740 - RNA, 19 nt, Artificial Sequence
  Description of Artificial Sequence: Synthetic oligonucleotide
cugaaggaaguccagggcc

SEQ ID NO: 2527741 - RNA, 19 nt, Artificial Sequence
  Description of Artificial Sequence: Synthetic oligonucleotide
uccguagacguucaccucc

SEQ ID NO: 2527742 - RNA, 19 nt, Artificial Sequence
  Description of Artificial Sequence: Synthetic oligonucleotide
ucaguuguggcuacauucu

SEQ ID NO: 2527743 - RNA, 19 nt, Artificial Sequence
  Description of Artificial Sequence: Synthetic oligonucleotide
guuuccuggagucugagga

SEQ ID NO: 2527744 - RNA, 19 nt, Artificial Sequence
  Description of Artificial Sequence: Synthetic oligonucleotide
cugcacaagguccaaagcc

SEQ ID NO: 2527745 - RNA, 19 nt, Artificial Sequence
  Description of Artificial Sequence: Synthetic oligonucleotide
uggcaaucuucccagaacu

SEQ ID NO: 2527746 - RNA, 19 nt, Artificial Sequence
  Description of Artificial Sequence: Synthetic oligonucleotide
ugguugacaagguaucggc

SEQ ID NO: 2527747 - RNA, 19 nt, Artificial Sequence
  Description of Artificial Sequence: Synthetic oligonucleotide
ugucacuccgugcuucugg

SEQ ID NO: 2527748 - RNA, 19 nt, Artificial Sequence
  Description of Artificial Sequence: Synthetic oligonucleotide
ucgaggucgggcauaaggc

SEQ ID NO: 2527749 - RNA, 19 nt, Artificial Sequence
  Description of Artificial Sequence: Synthetic oligonucleotide
caagguaucggcacaacuc

SEQ ID NO: 2527750 - RNA, 19 nt, Artificial Sequence
  Description of Artificial Sequence: Synthetic oligonucleotide
acagugacuccguagacgu

SEQ ID NO: 2527751 - RNA, 19 nt, Artificial Sequence
  Description of Artificial Sequence: Synthetic oligonucleotide
uggagucugaggaaucgag

SEQ ID NO: 2527752 - RNA, 19 nt, Artificial Sequence
  Description of Artificial Sequence: Synthetic oligonucleotide
gucugaggaaucgaggucg

SEQ ID NO: 2527753 - RNA, 19 nt, Artificial Sequence
  Description of Artificial Sequence: Synthetic oligonucleotide
agcacacuggggucaaagc

SEQ ID NO: 2527754 - RNA, 19 nt, Artificial Sequence
  Description of Artificial Sequence: Synthetic oligonucleotide
guagaucacauccuccuug

SEQ ID NO: 2527755 - RNA, 19 nt, Artificial Sequence
  Description of Artificial Sequence: Synthetic oligonucleotide
uccaccugaaucugccugg

SEQ ID NO: 2527756 - RNA, 19 nt, Artificial Sequence
  Description of Artificial Sequence: Synthetic oligonucleotide
guuguggcuacauucuccc

SEQ ID NO: 2527757 - RNA, 19 nt, Artificial Sequence
  Description of Artificial Sequence: Synthetic oligonucleotide
ugcugccucagacagaaaa

SEQ ID NO: 2527758 - RNA, 19 nt, Artificial Sequence
  Description of Artificial Sequence: Synthetic oligonucleotide
gaaucugccuggcucgggg

SEQ ID NO: 2527759 - RNA, 19 nt, Artificial Sequence
  Description of Artificial Sequence: Synthetic oligonucleotide
acuccguagacguucaccu

SEQ ID NO: 2527760 - RNA, 19 nt, Artificial Sequence
  Description of Artificial Sequence: Synthetic oligonucleotide
agugacuccguagacguuc

SEQ ID NO: 2527761 - RNA, 19 nt, Artificial Sequence
  Description of Artificial Sequence: Synthetic oligonucleotide
guugacaagguaucggcac

SEQ ID NO: 2527762 - RNA, 19 nt, Artificial Sequence
  Description of Artificial Sequence: Synthetic oligonucleotide
gaugcgagcggccuugggc

SEQ ID NO: 2527763 - RNA, 19 nt, Artificial Sequence
  Description of Artificial Sequence: Synthetic oligonucleotide
aguuguggcuacauucucc

SEQ ID NO: 2527764 - RNA, 19 nt, Artificial Sequence
  Description of Artificial Sequence: Synthetic oligonucleotide
caaucuucccagaacuggc

SEQ ID NO: 2527765 - RNA, 19 nt, Artificial Sequence
  Description of Artificial Sequence: Synthetic oligonucleotide
ugaaggaaguccagggccu

SEQ ID NO: 2527766 - RNA, 19 nt, Artificial Sequence
  Description of Artificial Sequence: Synthetic oligonucleotide
uacuggaacacugucacuc

SEQ ID NO: 2527767 - RNA, 19 nt, Artificial Sequence
  Description of Artificial Sequence: Synthetic oligonucleotide
uugaaggucucgguagugg

SEQ ID NO: 2527768 - RNA, 19 nt, Artificial Sequence
  Description of Artificial Sequence: Synthetic oligonucleotide
agguagaucacauccuccu

SEQ ID NO: 2527769 - RNA, 19 nt, Artificial Sequence
  Description of Artificial Sequence: Synthetic oligonucleotide
ugaaggucucgguaguggc

SEQ ID NO: 2527770 - RNA, 19 nt, Artificial Sequence
  Description of Artificial Sequence: Synthetic oligonucleotide
agucugaggaaucgagguc

SEQ ID NO: 2527771 - RNA, 19 nt, Artificial Sequence
  Description of Artificial Sequence: Synthetic oligonucleotide
uggcuagcugagaauuugg

SEQ ID NO: 2527772 - RNA, 19 nt, Artificial Sequence
  Description of Artificial Sequence: Synthetic oligonucleotide
agcugguagaaccccuggc

SEQ ID NO: 2527773 - RNA, 19 nt, Artificial Sequence
  Description of Artificial Sequence: Synthetic oligonucleotide
ugaggaaucgaggucgggc

SEQ ID NO: 2527774 - RNA, 19 nt, Artificial Sequence
  Description of Artificial Sequence: Synthetic oligonucleotide
uugacaagguaucggcaca

SEQ ID NO: 2527775 - RNA, 19 nt, Artificial Sequence
  Description of Artificial Sequence: Synthetic oligonucleotide
cuagcugagaauuugggcu

SEQ ID NO: 2527776 - RNA, 19 nt, Artificial Sequence
  Description of Artificial Sequence: Synthetic oligonucleotide
ucugaggaaucgaggucgg

SEQ ID NO: 2527777 - RNA, 19 nt, Artificial Sequence
  Description of Artificial Sequence: Synthetic oligonucleotide
uagacguucaccuccugaa

SEQ ID NO: 2527778 - RNA, 19 nt, Artificial Sequence
  Description of Artificial Sequence: Synthetic oligonucleotide
agaaaauugcugauuccag

SEQ ID NO: 2527779 - RNA, 19 nt, Artificial Sequence
  Description of Artificial Sequence: Synthetic oligonucleotide
ucgguaguggccaaaguuu

SEQ ID NO: 2527780 - RNA, 19 nt, Artificial Sequence
  Description of Artificial Sequence: Synthetic oligonucleotide
agguccaaagccugugggg

SEQ ID NO: 2527781 - RNA, 19 nt, Artificial Sequence
  Description of Artificial Sequence: Synthetic oligonucleotide
acaugugguacagugggag

SEQ ID NO: 2527782 - RNA, 19 nt, Artificial Sequence
  Description of Artificial Sequence: Synthetic oligonucleotide
cucagacagaaaauugcug

SEQ ID NO: 2527783 - RNA, 19 nt, Artificial Sequence
  Description of Artificial Sequence: Synthetic oligonucleotide
ggucaaagcccucagcugc

SEQ ID NO: 2527784 - RNA, 19 nt, Artificial Sequence
  Description of Artificial Sequence: Synthetic oligonucleotide
caaaguuuccuggagucug

SEQ ID NO: 2527785 - RNA, 19 nt, Artificial Sequence
  Description of Artificial Sequence: Synthetic oligonucleotide
acaagguaucggcacaacu

SEQ ID NO: 2527786 - RNA, 19 nt, Artificial Sequence
  Description of Artificial Sequence: Synthetic oligonucleotide
gugaagauguacaggcagg

SEQ ID NO: 2527787 - RNA, 19 nt, Artificial Sequence
  Description of Artificial Sequence: Synthetic oligonucleotide
cacuggcucauccacuugg

SEQ ID NO: 2527788 - RNA, 19 nt, Artificial Sequence
  Description of Artificial Sequence: Synthetic oligonucleotide
uucugcuguuugaaggucu

SEQ ID NO: 2527789 - RNA, 19 nt, Artificial Sequence
  Description of Artificial Sequence: Synthetic oligonucleotide
ugaagauguacaggcaggu

SEQ ID NO: 2527790 - RNA, 19 nt, Artificial Sequence
  Description of Artificial Sequence: Synthetic oligonucleotide
guagagcugcacaaggucc

SEQ ID NO: 2527791 - RNA, 19 nt, Artificial Sequence
  Description of Artificial Sequence: Synthetic oligonucleotide
ucgggcauaaggcggcaag

SEQ ID NO: 2527792 - RNA, 19 nt, Artificial Sequence
  Description of Artificial Sequence: Synthetic oligonucleotide
agauguacaggcagguguc

SEQ ID NO: 2527793 - RNA, 19 nt, Artificial Sequence
  Description of Artificial Sequence: Synthetic oligonucleotide
ucuggcaaucuucccagaa

SEQ ID NO: 2527794 - RNA, 19 nt, Artificial Sequence
  Description of Artificial Sequence: Synthetic oligonucleotide
auugcaggaccuucaggug

SEQ ID NO: 2527795 - RNA, 19 nt, Artificial Sequence
  Description of Artificial Sequence: Synthetic oligonucleotide
uccuuguggacuccacuca

SEQ ID NO: 2527796 - RNA, 19 nt, Artificial Sequence
  Description of Artificial Sequence: Synthetic oligonucleotide
gaguuucagggccugucgc

SEQ ID NO: 2527797 - RNA, 19 nt, Artificial Sequence
  Description of Artificial Sequence: Synthetic oligonucleotide
uggccaaaguuuccuggag

SEQ ID NO: 2527798 - RNA, 19 nt, Artificial Sequence
  Description of Artificial Sequence: Synthetic oligonucleotide
gaggucgggcauaaggcgg

SEQ ID NO: 2527799 - RNA, 19 nt, Artificial Sequence
  Description of Artificial Sequence: Synthetic oligonucleotide
uacagugggagcgcgaggu

SEQ ID NO: 2527800 - RNA, 19 nt, Artificial Sequence
  Description of Artificial Sequence: Synthetic oligonucleotide
aaggucucgguaguggcca

SEQ ID NO: 2527801 - RNA, 19 nt, Artificial Sequence
  Description of Artificial Sequence: Synthetic oligonucleotide
cauugcaggaccuucaggu

SEQ ID NO: 2527802 - RNA, 19 nt, Artificial Sequence
  Description of Artificial Sequence: Synthetic oligonucleotide
cagaaaauugcugauucca

SEQ ID NO: 2527803 - RNA, 19 nt, Artificial Sequence
  Description of Artificial Sequence: Synthetic oligonucleotide
caggugacugaugcgagcg

SEQ ID NO: 2527804 - RNA, 19 nt, Artificial Sequence
  Description of Artificial Sequence: Synthetic oligonucleotide
aaggcggcaaguugucaga

SEQ ID NO: 2527805 - RNA, 19 nt, Artificial Sequence
  Description of Artificial Sequence: Synthetic oligonucleotide
auggacguagagcugcaca

SEQ ID NO: 2527806 - RNA, 19 nt, Artificial Sequence
  Description of Artificial Sequence: Synthetic oligonucleotide
aauuugggcuuuagcacca

SEQ ID NO: 2527807 - RNA, 19 nt, Artificial Sequence
  Description of Artificial Sequence: Synthetic oligonucleotide
cacagugacuccguagacg

SEQ ID NO: 2527808 - RNA, 19 nt, Artificial Sequence
  Description of Artificial Sequence: Synthetic oligonucleotide
caugcccuggcacagugac

SEQ ID NO: 2527809 - RNA, 19 nt, Artificial Sequence
  Description of Artificial Sequence: Synthetic oligonucleotide
gcagguguccauuauacuc

SEQ ID NO: 2527810 - RNA, 19 nt, Artificial Sequence
  Description of Artificial Sequence: Synthetic oligonucleotide
caugugguacagugggagc

SEQ ID NO: 2527811 - RNA, 19 nt, Artificial Sequence
  Description of Artificial Sequence: Synthetic oligonucleotide
ugggcuuuagcaccaccgu

SEQ ID NO: 2527812 - RNA, 19 nt, Artificial Sequence
  Description of Artificial Sequence: Synthetic oligonucleotide
acucagcugguagaacccc

SEQ ID NO: 2527813 - RNA, 19 nt, Artificial Sequence
  Description of Artificial Sequence: Synthetic oligonucleotide
agacguucaccuccugaag

SEQ ID NO: 2527814 - RNA, 19 nt, Artificial Sequence
  Description of Artificial Sequence: Synthetic oligonucleotide
uggaacacugucacuccgu

SEQ ID NO: 2527815 - RNA, 19 nt, Artificial Sequence
  Description of Artificial Sequence: Synthetic oligonucleotide
ggcuuuagcaccaccgugg

SEQ ID NO: 2527816 - RNA, 19 nt, Artificial Sequence
  Description of Artificial Sequence: Synthetic oligonucleotide
caagguccaaagccugugg

SEQ ID NO: 2527817 - RNA, 19 nt, Artificial Sequence
  Description of Artificial Sequence: Synthetic oligonucleotide
cuuguggacuccacucagc

SEQ ID NO: 2527818 - RNA, 19 nt, Artificial Sequence
  Description of Artificial Sequence: Synthetic oligonucleotide
ucugcuguuugaaggucuc

SEQ ID NO: 2527819 - RNA, 19 nt, Artificial Sequence
  Description of Artificial Sequence: Synthetic oligonucleotide
cuccuuguggacuccacuc

SEQ ID NO: 2527820 - RNA, 19 nt, Artificial Sequence
  Description of Artificial Sequence: Synthetic oligonucleotide
ugcaggaccuucaggugac

SEQ ID NO: 2527821 - RNA, 19 nt, Artificial Sequence
  Description of Artificial Sequence: Synthetic oligonucleotide
augcgagcggccuugggca

SEQ ID NO: 2527822 - RNA, 19 nt, Artificial Sequence
  Description of Artificial Sequence: Synthetic oligonucleotide
gaacacugucacuccgugc

SEQ ID NO: 2527823 - RNA, 19 nt, Artificial Sequence
  Description of Artificial Sequence: Synthetic oligonucleotide
gcuagcugagaauuugggc

SEQ ID NO: 2527824 - RNA, 19 nt, Artificial Sequence
  Description of Artificial Sequence: Synthetic oligonucleotide
cuccccaauguacuggaac

SEQ ID NO: 2527825 - RNA, 19 nt, Artificial Sequence
  Description of Artificial Sequence: Synthetic oligonucleotide
uuugaaggucucgguagug

SEQ ID NO: 2527826 - RNA, 19 nt, Artificial Sequence
  Description of Artificial Sequence: Synthetic oligonucleotide
acguucaccuccugaagga

SEQ ID NO: 2527827 - RNA, 19 nt, Artificial Sequence
  Description of Artificial Sequence: Synthetic oligonucleotide
gggagcgcgagguagauca

SEQ ID NO: 2527828 - RNA, 19 nt, Artificial Sequence
  Description of Artificial Sequence: Synthetic oligonucleotide
gaccuucugcuguuugaag

SEQ ID NO: 2527829 - RNA, 19 nt, Artificial Sequence
  Description of Artificial Sequence: Synthetic oligonucleotide
cuggcaaucuucccagaac

SEQ ID NO: 2527830 - RNA, 19 nt, Artificial Sequence
  Description of Artificial Sequence: Synthetic oligonucleotide
gagguagaucacauccucc

SEQ ID NO: 2527831 - RNA, 19 nt, Artificial Sequence
  Description of Artificial Sequence: Synthetic oligonucleotide
ugcccuggcacagugacuc

SEQ ID NO: 2527832 - RNA, 19 nt, Artificial Sequence
  Description of Artificial Sequence: Synthetic oligonucleotide
gacuccguagacguucacc

SEQ ID NO: 2527833 - RNA, 19 nt, Artificial Sequence
  Description of Artificial Sequence: Synthetic oligonucleotide
ccugaaucugccuggcucg

SEQ ID NO: 2527834 - RNA, 19 nt, Artificial Sequence
  Description of Artificial Sequence: Synthetic oligonucleotide
uuuccuggagucugaggaa

SEQ ID NO: 2527835 - RNA, 19 nt, Artificial Sequence
  Description of Artificial Sequence: Synthetic oligonucleotide
aaccccuggcauugcagga

SEQ ID NO: 2527836 - RNA, 19 nt, Artificial Sequence
  Description of Artificial Sequence: Synthetic oligonucleotide
cauaaggcggcaaguuguc

SEQ ID NO: 2527837 - RNA, 19 nt, Artificial Sequence
  Description of Artificial Sequence: Synthetic oligonucleotide
uugggcaggccaguggugc

SEQ ID NO: 2527838 - RNA, 19 nt, Artificial Sequence
  Description of Artificial Sequence: Synthetic oligonucleotide
aagaugaguuucagggccu

SEQ ID NO: 2527839 - RNA, 19 nt, Artificial Sequence
  Description of Artificial Sequence: Synthetic oligonucleotide
acuccacucagcugguaga

SEQ ID NO: 2527840 - RNA, 19 nt, Artificial Sequence
  Description of Artificial Sequence: Synthetic oligonucleotide
gaaggucucgguaguggcc

SEQ ID NO: 2527841 - RNA, 19 nt, Artificial Sequence
  Description of Artificial Sequence: Synthetic oligonucleotide
gcaagaugaguuucagggc

SEQ ID NO: 2527842 - RNA, 19 nt, Artificial Sequence
  Description of Artificial Sequence: Synthetic oligonucleotide
ugugguacagugggagcgc

SEQ ID NO: 2527843 - RNA, 19 nt, Artificial Sequence
  Description of Artificial Sequence: Synthetic oligonucleotide
ccacucagcugguagaacc

SEQ ID NO: 2527844 - RNA, 19 nt, Artificial Sequence
  Description of Artificial Sequence: Synthetic oligonucleotide
cugauuccagcaagaugag

SEQ ID NO: 2527845 - RNA, 19 nt, Artificial Sequence
  Description of Artificial Sequence: Synthetic oligonucleotide
agguaucggcacaacuccc

SEQ ID NO: 2527846 - RNA, 19 nt, Artificial Sequence
  Description of Artificial Sequence: Synthetic oligonucleotide
gauguacaggcaggugucc

SEQ ID NO: 2527847 - RNA, 19 nt, Artificial Sequence
  Description of Artificial Sequence: Synthetic oligonucleotide
agguguccauuauacucug

SEQ ID NO: 2527848 - RNA, 19 nt, Artificial Sequence
  Description of Artificial Sequence: Synthetic oligonucleotide
guagacguucaccuccuga

SEQ ID NO: 2527849 - RNA, 19 nt, Artificial Sequence
  Description of Artificial Sequence: Synthetic oligonucleotide
uaguggccaaaguuuccug

SEQ ID NO: 2527850 - RNA, 19 nt, Artificial Sequence
  Description of Artificial Sequence: Synthetic oligonucleotide
augcccagcaaggagccag

SEQ ID NO: 2527851 - RNA, 19 nt, Artificial Sequence
  Description of Artificial Sequence: Synthetic oligonucleotide
uagaaccccuggcauugca

SEQ ID NO: 2527852 - RNA, 19 nt, Artificial Sequence
  Description of Artificial Sequence: Synthetic oligonucleotide
aaguugucagaaacaugga

SEQ ID NO: 2527853 - RNA, 19 nt, Artificial Sequence
  Description of Artificial Sequence: Synthetic oligonucleotide
ugaccuucugcuguuugaa

SEQ ID NO: 2527854 - RNA, 19 nt, Artificial Sequence
  Description of Artificial Sequence: Synthetic oligonucleotide
aucggcacaacuccccaau

SEQ ID NO: 2527855 - RNA, 19 nt, Artificial Sequence
  Description of Artificial Sequence: Synthetic oligonucleotide
uuagcaccaccguggcacc

SEQ ID NO: 2527856 - RNA, 19 nt, Artificial Sequence
  Description of Artificial Sequence: Synthetic oligonucleotide
gguagaaccccuggcauug

SEQ ID NO: 2527857 - RNA, 19 nt, Artificial Sequence
  Description of Artificial Sequence: Synthetic oligonucleotide
cuggcuagcugagaauuug

SEQ ID NO: 2527858 - RNA, 19 nt, Artificial Sequence
  Description of Artificial Sequence: Synthetic oligonucleotide
gucacuccgugcuucuggc

SEQ ID NO: 2527859 - RNA, 19 nt, Artificial Sequence
  Description of Artificial Sequence: Synthetic oligonucleotide
uggggucaaagcccucagc

SEQ ID NO: 2527860 - RNA, 19 nt, Artificial Sequence
  Description of Artificial Sequence: Synthetic oligonucleotide
agagguacccaggcacugg

SEQ ID NO: 2527861 - RNA, 19 nt, Artificial Sequence
  Description of Artificial Sequence: Synthetic oligonucleotide
cgcgagguagaucacaucc

SEQ ID NO: 2527862 - RNA, 19 nt, Artificial Sequence
  Description of Artificial Sequence: Synthetic oligonucleotide
ugaugcgagcggccuuggg

SEQ ID NO: 2527863 - RNA, 19 nt, Artificial Sequence
  Description of Artificial Sequence: Synthetic oligonucleotide
aggugacugaugcgagcgg

SEQ ID NO: 2527864 - RNA, 19 nt, Artificial Sequence
  Description of Artificial Sequence: Synthetic oligonucleotide
ggagucugaggaaucgagg

SEQ ID NO: 2527865 - RNA, 19 nt, Artificial Sequence
  Description of Artificial Sequence: Synthetic oligonucleotide
ggcauaaggcggcaaguug

SEQ ID NO: 2527866 - RNA, 19 nt, Artificial Sequence
  Description of Artificial Sequence: Synthetic oligonucleotide
gcggcaaguugucagaaac

SEQ ID NO: 2527867 - RNA, 19 nt, Artificial Sequence
  Description of Artificial Sequence: Synthetic oligonucleotide
acugaugcgagcggccuug

SEQ ID NO: 2527868 - RNA, 19 nt, Artificial Sequence
  Description of Artificial Sequence: Synthetic oligonucleotide
ggcacagugacuccguaga

SEQ ID NO: 2527869 - RNA, 19 nt, Artificial Sequence
  Description of Artificial Sequence: Synthetic oligonucleotide
aggucgggcauaaggcggc

SEQ ID NO: 2527870 - RNA, 19 nt, Artificial Sequence
  Description of Artificial Sequence: Synthetic oligonucleotide
ucggcacaacuccccaaug

SEQ ID NO: 2527871 - RNA, 19 nt, Artificial Sequence
  Description of Artificial Sequence: Synthetic oligonucleotide
accgaugcccaagcagccc

SEQ ID NO: 2527872 - RNA, 19 nt, Artificial Sequence
  Description of Artificial Sequence: Synthetic oligonucleotide
ugcuucuggcaaucuuccc

SEQ ID NO: 2527873 - RNA, 19 nt, Artificial Sequence
  Description of Artificial Sequence: Synthetic oligonucleotide
ggcaccgaugcccaagcag

SEQ ID NO: 2527874 - RNA, 19 nt, Artificial Sequence
  Description of Artificial Sequence: Synthetic oligonucleotide
ugaaucugccuggcucggg

SEQ ID NO: 2527875 - RNA, 19 nt, Artificial Sequence
  Description of Artificial Sequence: Synthetic oligonucleotide
caccguggcaccgaugccc

SEQ ID NO: 2527876 - RNA, 19 nt, Artificial Sequence
  Description of Artificial Sequence: Synthetic oligonucleotide
gagccagacaugugguaca

SEQ ID NO: 2527877 - RNA, 19 nt, Artificial Sequence
  Description of Artificial Sequence: Synthetic oligonucleotide
ucucgguaguggccaaagu

SEQ ID NO: 2527878 - RNA, 19 nt, Artificial Sequence
  Description of Artificial Sequence: Synthetic oligonucleotide
gccaaaguuuccuggaguc

SEQ ID NO: 2527879 - RNA, 19 nt, Artificial Sequence
  Description of Artificial Sequence: Synthetic oligonucleotide
ugacaagguaucggcacaa

SEQ ID NO: 2527880 - RNA, 19 nt, Artificial Sequence
  Description of Artificial Sequence: Synthetic oligonucleotide
ggaacacugucacuccgug

SEQ ID NO: 2527881 - RNA, 19 nt, Artificial Sequence
  Description of Artificial Sequence: Synthetic oligonucleotide
acuggcucauccacuuggg

SEQ ID NO: 2527882 - RNA, 19 nt, Artificial Sequence
  Description of Artificial Sequence: Synthetic oligonucleotide
gugcuucuggcaaucuucc

SEQ ID NO: 2527883 - RNA, 19 nt, Artificial Sequence
  Description of Artificial Sequence: Synthetic oligonucleotide
uuguggcuacauucucccc

SEQ ID NO: 2527884 - RNA, 19 nt, Artificial Sequence
  Description of Artificial Sequence: Synthetic oligonucleotide
guggccaaaguuuccugga

SEQ ID NO: 2527885 - RNA, 19 nt, Artificial Sequence
  Description of Artificial Sequence: Synthetic oligonucleotide
agacagaaaauugcugauu

SEQ ID NO: 2527886 - RNA, 19 nt, Artificial Sequence
  Description of Artificial Sequence: Synthetic oligonucleotide
caccgaugcccaagcagcc

SEQ ID NO: 2527887 - RNA, 19 nt, Artificial Sequence
  Description of Artificial Sequence: Synthetic oligonucleotide
gaggaccucugccaccuca

SEQ ID NO: 2527888 - RNA, 19 nt, Artificial Sequence
  Description of Artificial Sequence: Synthetic oligonucleotide
gaugcccaagcagcccacg

SEQ ID NO: 2527889 - RNA, 19 nt, Artificial Sequence
  Description of Artificial Sequence: Synthetic oligonucleotide
gguacagugggagcgcgag

SEQ ID NO: 2527890 - RNA, 19 nt, Artificial Sequence
  Description of Artificial Sequence: Synthetic oligonucleotide
ugacugaugcgagcggccu

SEQ ID NO: 2527891 - RNA, 19 nt, Artificial Sequence
  Description of Artificial Sequence: Synthetic oligonucleotide
ggcuagcugagaauuuggg

SEQ ID NO: 2527892 - RNA, 19 nt, Artificial Sequence
  Description of Artificial Sequence: Synthetic oligonucleotide
gcugguagaaccccuggca

SEQ ID NO: 2527893 - RNA, 19 nt, Artificial Sequence
  Description of Artificial Sequence: Synthetic oligonucleotide
guacagugggagcgcgagg

SEQ ID NO: 2527894 - RNA, 19 nt, Artificial Sequence
  Description of Artificial Sequence: Synthetic oligonucleotide
ugcccaagcagcccacgau

SEQ ID NO: 2527895 - RNA, 19 nt, Artificial Sequence
  Description of Artificial Sequence: Synthetic oligonucleotide
cagguguccauuauacucu

SEQ ID NO: 2527896 - RNA, 19 nt, Artificial Sequence
  Description of Artificial Sequence: Synthetic oligonucleotide
ugccaccucaguuguggcu

SEQ ID NO: 2527897 - RNA, 19 nt, Artificial Sequence
  Description of Artificial Sequence: Synthetic oligonucleotide
acuggggucaaagcccuca

SEQ ID NO: 2527898 - RNA, 19 nt, Artificial Sequence
  Description of Artificial Sequence: Synthetic oligonucleotide
cuggcucauccacuugggc

SEQ ID NO: 2527899 - RNA, 19 nt, Artificial Sequence
  Description of Artificial Sequence: Synthetic oligonucleotide
agaaccccuggcauugcag

SEQ ID NO: 2527900 - RNA, 19 nt, Artificial Sequence
  Description of Artificial Sequence: Synthetic oligonucleotide
cugagaauuugggcuuuag

SEQ ID NO: 2527901 - RNA, 19 nt, Artificial Sequence
  Description of Artificial Sequence: Synthetic oligonucleotide
ucaugcccuggcacaguga

SEQ ID NO: 2527902 - RNA, 19 nt, Artificial Sequence
  Description of Artificial Sequence: Synthetic oligonucleotide
gagagguacccaggcacug

SEQ ID NO: 2527903 - RNA, 19 nt, Artificial Sequence
  Description of Artificial Sequence: Synthetic oligonucleotide
ccugaaggaaguccagggc

SEQ ID NO: 2527904 - RNA, 19 nt, Artificial Sequence
  Description of Artificial Sequence: Synthetic oligonucleotide
gcugguugacaagguaucg

SEQ ID NO: 2527905 - RNA, 19 nt, Artificial Sequence
  Description of Artificial Sequence: Synthetic oligonucleotide
gguaucggcacaacucccc

SEQ ID NO: 2527906 - RNA, 19 nt, Artificial Sequence
  Description of Artificial Sequence: Synthetic oligonucleotide
aagcagcccacgaugccca

SEQ ID NO: 2527907 - RNA, 19 nt, Artificial Sequence
  Description of Artificial Sequence: Synthetic oligonucleotide
cucgaggaccucugccacc

SEQ ID NO: 2527908 - RNA, 19 nt, Artificial Sequence
  Description of Artificial Sequence: Synthetic oligonucleotide
auuugggcuuuagcaccac

SEQ ID NO: 2527909 - RNA, 19 nt, Artificial Sequence
  Description of Artificial Sequence: Synthetic oligonucleotide
cacaacuccccaauguacu

SEQ ID NO: 2527910 - RNA, 19 nt, Artificial Sequence
  Description of Artificial Sequence: Synthetic oligonucleotide
uaucggcacaacuccccaa

SEQ ID NO: 2527911 - RNA, 19 nt, Artificial Sequence
  Description of Artificial Sequence: Synthetic oligonucleotide
gcaccgaugcccaagcagc

SEQ ID NO: 2527912 - RNA, 19 nt, Artificial Sequence
  Description of Artificial Sequence: Synthetic oligonucleotide
gcauugcaggaccuucagg

SEQ ID NO: 2527913 - RNA, 19 nt, Artificial Sequence
  Description of Artificial Sequence: Synthetic oligonucleotide
cugaccuucugcuguuuga

SEQ ID NO: 2527914 - RNA, 19 nt, Artificial Sequence
  Description of Artificial Sequence: Synthetic oligonucleotide
gucucgguaguggccaaag

SEQ ID NO: 2527915 - RNA, 19 nt, Artificial Sequence
  Description of Artificial Sequence: Synthetic oligonucleotide
cagcacacuggggucaaag

SEQ ID NO: 2527916 - RNA, 19 nt, Artificial Sequence
  Description of Artificial Sequence: Synthetic oligonucleotide
cagugggagcgcgagguag

SEQ ID NO: 2527917 - RNA, 19 nt, Artificial Sequence
  Description of Artificial Sequence: Synthetic oligonucleotide
agccagacaugugguacag

SEQ ID NO: 2527918 - RNA, 19 nt, Artificial Sequence
  Description of Artificial Sequence: Synthetic oligonucleotide
ggugacugaugcgagcggc

SEQ ID NO: 2527919 - RNA, 19 nt, Artificial Sequence
  Description of Artificial Sequence: Synthetic oligonucleotide
gcugcacaagguccaaagc

SEQ ID NO: 2527920 - RNA, 19 nt, Artificial Sequence
  Description of Artificial Sequence: Synthetic oligonucleotide
ugguacagugggagcgcga

SEQ ID NO: 2527921 - RNA, 19 nt, Artificial Sequence
  Description of Artificial Sequence: Synthetic oligonucleotide
agaugaguuucagggccug

SEQ ID NO: 2527922 - RNA, 19 nt, Artificial Sequence
  Description of Artificial Sequence: Synthetic oligonucleotide
agagagguacccaggcacu

SEQ ID NO: 2527923 - RNA, 19 nt, Artificial Sequence
  Description of Artificial Sequence: Synthetic oligonucleotide
cuguuugaaggucucggua

SEQ ID NO: 2527924 - RNA, 19 nt, Artificial Sequence
  Description of Artificial Sequence: Synthetic oligonucleotide
gcuuuagcaccaccguggc

SEQ ID NO: 2527925 - RNA, 19 nt, Artificial Sequence
  Description of Artificial Sequence: Synthetic oligonucleotide
gggucaaagcccucagcug

SEQ ID NO: 2527926 - RNA, 19 nt, Artificial Sequence
  Description of Artificial Sequence: Synthetic oligonucleotide
cugaaucugccuggcucgg

SEQ ID NO: 2527927 - RNA, 19 nt, Artificial Sequence
  Description of Artificial Sequence: Synthetic oligonucleotide
caguuguggcuacauucuc

SEQ ID NO: 2527928 - RNA, 19 nt, Artificial Sequence
  Description of Artificial Sequence: Synthetic oligonucleotide
gguacccaggcacuggcuc

SEQ ID NO: 2527929 - RNA, 19 nt, Artificial Sequence
  Description of Artificial Sequence: Synthetic oligonucleotide
guacccaggcacuggcuca

SEQ ID NO: 2527930 - RNA, 19 nt, Artificial Sequence
  Description of Artificial Sequence: Synthetic oligonucleotide
auguacaggcaggugucca

SEQ ID NO: 2527931 - RNA, 19 nt, Artificial Sequence
  Description of Artificial Sequence: Synthetic oligonucleotide
aggaaucgaggucgggcau

SEQ ID NO: 2527932 - RNA, 19 nt, Artificial Sequence
  Description of Artificial Sequence: Synthetic oligonucleotide
cuggcauugcaggaccuuc

SEQ ID NO: 2527933 - RNA, 19 nt, Artificial Sequence
  Description of Artificial Sequence: Synthetic oligonucleotide
gugguacagugggagcgcg

SEQ ID NO: 2527934 - RNA, 19 nt, Artificial Sequence
  Description of Artificial Sequence: Synthetic oligonucleotide
uucuggcaaucuucccaga

SEQ ID NO: 2527935 - RNA, 19 nt, Artificial Sequence
  Description of Artificial Sequence: Synthetic oligonucleotide
acaggcagguguccauuau

SEQ ID NO: 2527936 - RNA, 19 nt, Artificial Sequence
  Description of Artificial Sequence: Synthetic oligonucleotide
ugggcaggccaguggugcc

SEQ ID NO: 2527937 - RNA, 19 nt, Artificial Sequence
  Description of Artificial Sequence: Synthetic oligonucleotide
ucacuccgugcuucuggca

SEQ ID NO: 2527938 - RNA, 19 nt, Artificial Sequence
  Description of Artificial Sequence: Synthetic oligonucleotide
augcccaagcagcccacga

SEQ ID NO: 2527939 - RNA, 19 nt, Artificial Sequence
  Description of Artificial Sequence: Synthetic oligonucleotide
gggcuuuagcaccaccgug

SEQ ID NO: 2527940 - RNA, 19 nt, Artificial Sequence
  Description of Artificial Sequence: Synthetic oligonucleotide
gacaagguaucggcacaac

SEQ ID NO: 2527941 - RNA, 19 nt, Artificial Sequence
  Description of Artificial Sequence: Synthetic oligonucleotide
ccuucaggugacugaugcg

SEQ ID NO: 2527942 - RNA, 19 nt, Artificial Sequence
  Description of Artificial Sequence: Synthetic oligonucleotide
cgugcuucuggcaaucuuc

SEQ ID NO: 2527943 - RNA, 19 nt, Artificial Sequence
  Description of Artificial Sequence: Synthetic oligonucleotide
gcccaagcagcccacgaug

SEQ ID NO: 2527944 - RNA, 19 nt, Artificial Sequence
  Description of Artificial Sequence: Synthetic oligonucleotide
gaaucgaggucgggcauaa

SEQ ID NO: 2527945 - RNA, 19 nt, Artificial Sequence
  Description of Artificial Sequence: Synthetic oligonucleotide
gguaguggccaaaguuucc

SEQ ID NO: 2527946 - RNA, 19 nt, Artificial Sequence
  Description of Artificial Sequence: Synthetic oligonucleotide
cccaagcagcccacgaugc

SEQ ID NO: 2527947 - RNA, 19 nt, Artificial Sequence
  Description of Artificial Sequence: Synthetic oligonucleotide
aggaccucugccaccucag

SEQ ID NO: 2527948 - RNA, 19 nt, Artificial Sequence
  Description of Artificial Sequence: Synthetic oligonucleotide
ccuuguggacuccacucag

SEQ ID NO: 2527949 - RNA, 19 nt, Artificial Sequence
  Description of Artificial Sequence: Synthetic oligonucleotide
gacaugugguacaguggga

SEQ ID NO: 2527950 - RNA, 19 nt, Artificial Sequence
  Description of Artificial Sequence: Synthetic oligonucleotide
cugccaccucaguuguggc

SEQ ID NO: 2527951 - RNA, 19 nt, Artificial Sequence
  Description of Artificial Sequence: Synthetic oligonucleotide
cgaggucgggcauaaggcg

SEQ ID NO: 2527952 - RNA, 19 nt, Artificial Sequence
  Description of Artificial Sequence: Synthetic oligonucleotide
cuccguagacguucaccuc

SEQ ID NO: 2527953 - RNA, 19 nt, Artificial Sequence
  Description of Artificial Sequence: Synthetic oligonucleotide
gcccacgaugcccagcaag

SEQ ID NO: 2527954 - RNA, 19 nt, Artificial Sequence
  Description of Artificial Sequence: Synthetic oligonucleotide
uucccagaacuggcuagcu

SEQ ID NO: 2527955 - RNA, 19 nt, Artificial Sequence
  Description of Artificial Sequence: Synthetic oligonucleotide
cacuccgugcuucuggcaa

SEQ ID NO: 2527956 - RNA, 19 nt, Artificial Sequence
  Description of Artificial Sequence: Synthetic oligonucleotide
uccacucagcugguagaac

SEQ ID NO: 2527957 - RNA, 19 nt, Artificial Sequence
  Description of Artificial Sequence: Synthetic oligonucleotide
ccugccuucaugcccuggc

SEQ ID NO: 2527958 - RNA, 19 nt, Artificial Sequence
  Description of Artificial Sequence: Synthetic oligonucleotide
gccaaggcugccaugccag

SEQ ID NO: 2527959 - RNA, 19 nt, Artificial Sequence
  Description of Artificial Sequence: Synthetic oligonucleotide
gcaaguugucagaaacaug

SEQ ID NO: 2527960 - RNA, 19 nt, Artificial Sequence
  Description of Artificial Sequence: Synthetic oligonucleotide
guaguggccaaaguuuccu

SEQ ID NO: 2527961 - RNA, 19 nt, Artificial Sequence
  Description of Artificial Sequence: Synthetic oligonucleotide
ugucagaaacauggacgua

SEQ ID NO: 2527962 - RNA, 19 nt, Artificial Sequence
  Description of Artificial Sequence: Synthetic oligonucleotide
acuccgugcuucuggcaau

SEQ ID NO: 2527963 - RNA, 19 nt, Artificial Sequence
  Description of Artificial Sequence: Synthetic oligonucleotide
uggugccagaggugaagau

SEQ ID NO: 2527964 - RNA, 19 nt, Artificial Sequence
  Description of Artificial Sequence: Synthetic oligonucleotide
aaucgaggucgggcauaag

SEQ ID NO: 2527965 - RNA, 19 nt, Artificial Sequence
  Description of Artificial Sequence: Synthetic oligonucleotide
agcccugccuucaugcccu

SEQ ID NO: 2527966 - RNA, 19 nt, Artificial Sequence
  Description of Artificial Sequence: Synthetic oligonucleotide
cugaggaaucgaggucggg

SEQ ID NO: 2527967 - RNA, 19 nt, Artificial Sequence
  Description of Artificial Sequence: Synthetic oligonucleotide
ggcacaacuccccaaugua

SEQ ID NO: 2527968 - RNA, 19 nt, Artificial Sequence
  Description of Artificial Sequence: Synthetic oligonucleotide
cucgguaguggccaaaguu

SEQ ID NO: 2527969 - RNA, 19 nt, Artificial Sequence
  Description of Artificial Sequence: Synthetic oligonucleotide
agggccugucgcccacagg

SEQ ID NO: 2527970 - RNA, 19 nt, Artificial Sequence
  Description of Artificial Sequence: Synthetic oligonucleotide
gcacaacuccccaauguac

SEQ ID NO: 2527971 - RNA, 19 nt, Artificial Sequence
  Description of Artificial Sequence: Synthetic oligonucleotide
uggcaccgaugcccaagca

SEQ ID NO: 2527972 - RNA, 19 nt, Artificial Sequence
  Description of Artificial Sequence: Synthetic oligonucleotide
agugggagcgcgagguaga

SEQ ID NO: 2527973 - RNA, 19 nt, Artificial Sequence
  Description of Artificial Sequence: Synthetic oligonucleotide
cguagagcugcacaagguc

SEQ ID NO: 2527974 - RNA, 19 nt, Artificial Sequence
  Description of Artificial Sequence: Synthetic oligonucleotide
agcgcgagguagaucacau

SEQ ID NO: 2527975 - RNA, 19 nt, Artificial Sequence
  Description of Artificial Sequence: Synthetic oligonucleotide
gguugacaagguaucggca

SEQ ID NO: 2527976 - RNA, 19 nt, Artificial Sequence
  Description of Artificial Sequence: Synthetic oligonucleotide
gggccugucgcccacaggu

SEQ ID NO: 2527977 - RNA, 19 nt, Artificial Sequence
  Description of Artificial Sequence: Synthetic oligonucleotide
auccugaccuucugcuguu

SEQ ID NO: 2527978 - RNA, 19 nt, Artificial Sequence
  Description of Artificial Sequence: Synthetic oligonucleotide
gaacuggcuagcugagaau

SEQ ID NO: 2527979 - RNA, 19 nt, Artificial Sequence
  Description of Artificial Sequence: Synthetic oligonucleotide
accucaguuguggcuacau

SEQ ID NO: 2527980 - RNA, 19 nt, Artificial Sequence
  Description of Artificial Sequence: Synthetic oligonucleotide
gagcgcgagguagaucaca

SEQ ID NO: 2527981 - RNA, 19 nt, Artificial Sequence
  Description of Artificial Sequence: Synthetic oligonucleotide
gccucgaggaccucugcca

SEQ ID NO: 2527982 - RNA, 19 nt, Artificial Sequence
  Description of Artificial Sequence: Synthetic oligonucleotide
ggcugguugacaagguauc

SEQ ID NO: 2527983 - RNA, 19 nt, Artificial Sequence
  Description of Artificial Sequence: Synthetic oligonucleotide
gcauaaggcggcaaguugu

SEQ ID NO: 2527984 - RNA, 19 nt, Artificial Sequence
  Description of Artificial Sequence: Synthetic oligonucleotide
cuuuagcaccaccguggca

SEQ ID NO: 2527985 - RNA, 19 nt, Artificial Sequence
  Description of Artificial Sequence: Synthetic oligonucleotide
guggugccagaggugaaga

SEQ ID NO: 2527986 - RNA, 19 nt, Artificial Sequence
  Description of Artificial Sequence: Synthetic oligonucleotide
ggcaaguugucagaaacau

SEQ ID NO: 2527987 - RNA, 19 nt, Artificial Sequence
  Description of Artificial Sequence: Synthetic oligonucleotide
cgagguagaucacauccuc

SEQ ID NO: 2527988 - RNA, 19 nt, Artificial Sequence
  Description of Artificial Sequence: Synthetic oligonucleotide
guagaaccccuggcauugc

SEQ ID NO: 2527989 - RNA, 19 nt, Artificial Sequence
  Description of Artificial Sequence: Synthetic oligonucleotide
gccagaggugaagauguac

SEQ ID NO: 2527990 - RNA, 19 nt, Artificial Sequence
  Description of Artificial Sequence: Synthetic oligonucleotide
caugccagcccugccuuca

SEQ ID NO: 2527991 - RNA, 19 nt, Artificial Sequence
  Description of Artificial Sequence: Synthetic oligonucleotide
agcaccaccguggcaccga

SEQ ID NO: 2527992 - RNA, 19 nt, Artificial Sequence
  Description of Artificial Sequence: Synthetic oligonucleotide
cugguagaaccccuggcau

SEQ ID NO: 2527993 - RNA, 19 nt, Artificial Sequence
  Description of Artificial Sequence: Synthetic oligonucleotide
acacugucacuccgugcuu

SEQ ID NO: 2527994 - RNA, 19 nt, Artificial Sequence
  Description of Artificial Sequence: Synthetic oligonucleotide
acauggacguagagcugca

SEQ ID NO: 2527995 - RNA, 19 nt, Artificial Sequence
  Description of Artificial Sequence: Synthetic oligonucleotide
acuggcuagcugagaauuu

SEQ ID NO: 2527996 - RNA, 19 nt, Artificial Sequence
  Description of Artificial Sequence: Synthetic oligonucleotide
uacccaggcacuggcucau

SEQ ID NO: 2527997 - RNA, 19 nt, Artificial Sequence
  Description of Artificial Sequence: Synthetic oligonucleotide
uccgugcuucuggcaaucu

SEQ ID NO: 2527998 - RNA, 19 nt, Artificial Sequence
  Description of Artificial Sequence: Synthetic oligonucleotide
gcacagugacuccguagac

SEQ ID NO: 2527999 - RNA, 19 nt, Artificial Sequence
  Description of Artificial Sequence: Synthetic oligonucleotide
gcugccaugccagcccugc

SEQ ID NO: 2528000 - RNA, 19 nt, Artificial Sequence
  Description of Artificial Sequence: Synthetic oligonucleotide
gaccucugccaccucaguu

SEQ ID NO: 2528001 - RNA, 19 nt, Artificial Sequence
  Description of Artificial Sequence: Synthetic oligonucleotide
gugacuccguagacguuca

SEQ ID NO: 2528002 - RNA, 19 nt, Artificial Sequence
  Description of Artificial Sequence: Synthetic oligonucleotide
caggcagguguccauuaua

SEQ ID NO: 2528003 - RNA, 19 nt, Artificial Sequence
  Description of Artificial Sequence: Synthetic oligonucleotide
gccauccugaccuucugcu

SEQ ID NO: 2528004 - RNA, 19 nt, Artificial Sequence
  Description of Artificial Sequence: Synthetic oligonucleotide
accguggcaccgaugccca

SEQ ID NO: 2528005 - RNA, 19 nt, Artificial Sequence
  Description of Artificial Sequence: Synthetic oligonucleotide
cgguaguggccaaaguuuc

SEQ ID NO: 2528006 - RNA, 19 nt, Artificial Sequence
  Description of Artificial Sequence: Synthetic oligonucleotide
agcugagaauuugggcuuu

SEQ ID NO: 2528007 - RNA, 19 nt, Artificial Sequence
  Description of Artificial Sequence: Synthetic oligonucleotide
agagcugcacaagguccaa

SEQ ID NO: 2528008 - RNA, 19 nt, Artificial Sequence
  Description of Artificial Sequence: Synthetic oligonucleotide
gcuguuugaaggucucggu

SEQ ID NO: 2528009 - RNA, 19 nt, Artificial Sequence
  Description of Artificial Sequence: Synthetic oligonucleotide
ggccaaaguuuccuggagu

SEQ ID NO: 2528010 - RNA, 19 nt, Artificial Sequence
  Description of Artificial Sequence: Synthetic oligonucleotide
cuccgugcuucuggcaauc

SEQ ID NO: 2528011 - RNA, 19 nt, Artificial Sequence
  Description of Artificial Sequence: Synthetic oligonucleotide
gcccucagcugccauccug

SEQ ID NO: 2528012 - RNA, 19 nt, Artificial Sequence
  Description of Artificial Sequence: Synthetic oligonucleotide
aggcggcaaguugucagaa

SEQ ID NO: 2528013 - RNA, 19 nt, Artificial Sequence
  Description of Artificial Sequence: Synthetic oligonucleotide
gaugaguuucagggccugu

SEQ ID NO: 2528014 - RNA, 19 nt, Artificial Sequence
  Description of Artificial Sequence: Synthetic oligonucleotide
guacuggaacacugucacu

SEQ ID NO: 2528015 - RNA, 19 nt, Artificial Sequence
  Description of Artificial Sequence: Synthetic oligonucleotide
ccccaauguacuggaacac

SEQ ID NO: 2528016 - RNA, 19 nt, Artificial Sequence
  Description of Artificial Sequence: Synthetic oligonucleotide
gaugcccagcaaggagcca

SEQ ID NO: 2528017 - RNA, 19 nt, Artificial Sequence
  Description of Artificial Sequence: Synthetic oligonucleotide
cccuggcacagugacuccg

SEQ ID NO: 2528018 - RNA, 19 nt, Artificial Sequence
  Description of Artificial Sequence: Synthetic oligonucleotide
cacauccuccuuguggacu

SEQ ID NO: 2528019 - RNA, 19 nt, Artificial Sequence
  Description of Artificial Sequence: Synthetic oligonucleotide
ucagggccugucgcccaca

SEQ ID NO: 2528020 - RNA, 19 nt, Artificial Sequence
  Description of Artificial Sequence: Synthetic oligonucleotide
agguacccaggcacuggcu

SEQ ID NO: 2528021 - RNA, 19 nt, Artificial Sequence
  Description of Artificial Sequence: Synthetic oligonucleotide
gcaaggagccagacaugug

SEQ ID NO: 2528022 - RNA, 19 nt, Artificial Sequence
  Description of Artificial Sequence: Synthetic oligonucleotide
ugggagcgcgagguagauc

SEQ ID NO: 2528023 - RNA, 19 nt, Artificial Sequence
  Description of Artificial Sequence: Synthetic oligonucleotide
aggucucgguaguggccaa

SEQ ID NO: 2528024 - RNA, 19 nt, Artificial Sequence
  Description of Artificial Sequence: Synthetic oligonucleotide
cugccucagacagaaaauu

SEQ ID NO: 2528025 - RNA, 19 nt, Artificial Sequence
  Description of Artificial Sequence: Synthetic oligonucleotide
augccagcccugccuucau

SEQ ID NO: 2528026 - RNA, 19 nt, Artificial Sequence
  Description of Artificial Sequence: Synthetic oligonucleotide
gcggccuugggcaggccag

SEQ ID NO: 2528027 - RNA, 19 nt, Artificial Sequence
  Description of Artificial Sequence: Synthetic oligonucleotide
caccaccguggcaccgaug

SEQ ID NO: 2528028 - RNA, 19 nt, Artificial Sequence
  Description of Artificial Sequence: Synthetic oligonucleotide
ggcagguguccauuauacu

SEQ ID NO: 2528029 - RNA, 19 nt, Artificial Sequence
  Description of Artificial Sequence: Synthetic oligonucleotide
ccaccugaaucugccuggc

SEQ ID NO: 2528030 - RNA, 19 nt, Artificial Sequence
  Description of Artificial Sequence: Synthetic oligonucleotide
ccgaugcccaagcagccca

SEQ ID NO: 2528031 - RNA, 19 nt, Artificial Sequence
  Description of Artificial Sequence: Synthetic oligonucleotide
ggggcugguugacaaggua

SEQ ID NO: 2528032 - RNA, 19 nt, Artificial Sequence
  Description of Artificial Sequence: Synthetic oligonucleotide
ggaccuucaggugacugau

SEQ ID NO: 2528033 - RNA, 19 nt, Artificial Sequence
  Description of Artificial Sequence: Synthetic oligonucleotide
ggcggcaaguugucagaaa

SEQ ID NO: 2528034 - RNA, 19 nt, Artificial Sequence
  Description of Artificial Sequence: Synthetic oligonucleotide
gacugaugcgagcggccuu

SEQ ID NO: 2528035 - RNA, 19 nt, Artificial Sequence
  Description of Artificial Sequence: Synthetic oligonucleotide
uccugaccuucugcuguuu

SEQ ID NO: 2528036 - RNA, 19 nt, Artificial Sequence
  Description of Artificial Sequence: Synthetic oligonucleotide
acccaggcacuggcucauc

SEQ ID NO: 2528037 - RNA, 19 nt, Artificial Sequence
  Description of Artificial Sequence: Synthetic oligonucleotide
ggaaucgaggucgggcaua

SEQ ID NO: 2528038 - RNA, 19 nt, Artificial Sequence
  Description of Artificial Sequence: Synthetic oligonucleotide
gggcugguugacaagguau

SEQ ID NO: 2528039 - RNA, 19 nt, Artificial Sequence
  Description of Artificial Sequence: Synthetic oligonucleotide
cuugggcugcugccucaga

SEQ ID NO: 2528040 - RNA, 19 nt, Artificial Sequence
  Description of Artificial Sequence: Synthetic oligonucleotide
ccaccucaguuguggcuac

SEQ ID NO: 2528041 - RNA, 19 nt, Artificial Sequence
  Description of Artificial Sequence: Synthetic oligonucleotide
acuccccaauguacuggaa

SEQ ID NO: 2528042 - RNA, 19 nt, Artificial Sequence
  Description of Artificial Sequence: Synthetic oligonucleotide
caguggugccagaggugaa

SEQ ID NO: 2528043 - RNA, 19 nt, Artificial Sequence
  Description of Artificial Sequence: Synthetic oligonucleotide
cguggcaccgaugcccaag

SEQ ID NO: 2528044 - RNA, 19 nt, Artificial Sequence
  Description of Artificial Sequence: Synthetic oligonucleotide
cccagcaaggagccagaca

SEQ ID NO: 2528045 - RNA, 19 nt, Artificial Sequence
  Description of Artificial Sequence: Synthetic oligonucleotide
guacaggcagguguccauu

SEQ ID NO: 2528046 - RNA, 19 nt, Artificial Sequence
  Description of Artificial Sequence: Synthetic oligonucleotide
gcgagcggccuugggcagg

SEQ ID NO: 2528047 - RNA, 19 nt, Artificial Sequence
  Description of Artificial Sequence: Synthetic oligonucleotide
gcgagguagaucacauccu

SEQ ID NO: 2528048 - RNA, 19 nt, Artificial Sequence
  Description of Artificial Sequence: Synthetic oligonucleotide
gcgcgagguagaucacauc

SEQ ID NO: 2528049 - RNA, 19 nt, Artificial Sequence
  Description of Artificial Sequence: Synthetic oligonucleotide
ccaccguggcaccgaugcc

SEQ ID NO: 2528050 - RNA, 19 nt, Artificial Sequence
  Description of Artificial Sequence: Synthetic oligonucleotide
gucgggcauaaggcggcaa

SEQ ID NO: 2528051 - RNA, 19 nt, Artificial Sequence
  Description of Artificial Sequence: Synthetic oligonucleotide
ggagcgcgagguagaucac

SEQ ID NO: 2528052 - RNA, 19 nt, Artificial Sequence
  Description of Artificial Sequence: Synthetic oligonucleotide
ccaaaguuuccuggagucu

SEQ ID NO: 2528053 - RNA, 19 nt, Artificial Sequence
  Description of Artificial Sequence: Synthetic oligonucleotide
caccugaaucugccuggcu

SEQ ID NO: 2528054 - RNA, 19 nt, Artificial Sequence
  Description of Artificial Sequence: Synthetic oligonucleotide
ccccuuccaccugaaucug

SEQ ID NO: 2528055 - RNA, 19 nt, Artificial Sequence
  Description of Artificial Sequence: Synthetic oligonucleotide
caccucaguuguggcuaca

SEQ ID NO: 2528056 - RNA, 19 nt, Artificial Sequence
  Description of Artificial Sequence: Synthetic oligonucleotide
ccaugccagcccugccuuc

SEQ ID NO: 2528057 - RNA, 19 nt, Artificial Sequence
  Description of Artificial Sequence: Synthetic oligonucleotide
gggcauaaggcggcaaguu

SEQ ID NO: 2528058 - RNA, 19 nt, Artificial Sequence
  Description of Artificial Sequence: Synthetic oligonucleotide
ggaccucugccaccucagu

SEQ ID NO: 2528059 - RNA, 19 nt, Artificial Sequence
  Description of Artificial Sequence: Synthetic oligonucleotide
cguagacguucaccuccug

SEQ ID NO: 2528060 - RNA, 19 nt, Artificial Sequence
  Description of Artificial Sequence: Synthetic oligonucleotide
gcugagaauuugggcuuua

SEQ ID NO: 2528061 - RNA, 19 nt, Artificial Sequence
  Description of Artificial Sequence: Synthetic oligonucleotide
ggucgggcauaaggcggca

SEQ ID NO: 2528062 - RNA, 19 nt, Artificial Sequence
  Description of Artificial Sequence: Synthetic oligonucleotide
ggucucgguaguggccaaa

SEQ ID NO: 2528063 - RNA, 19 nt, Artificial Sequence
  Description of Artificial Sequence: Synthetic oligonucleotide
ccuggcacagugacuccgu

SEQ ID NO: 2528064 - RNA, 19 nt, Artificial Sequence
  Description of Artificial Sequence: Synthetic oligonucleotide
gugggagcgcgagguagau

SEQ ID NO: 2528065 - RNA, 19 nt, Artificial Sequence
  Description of Artificial Sequence: Synthetic oligonucleotide
gagcggccuugggcaggcc

SEQ ID NO: 2528066 - RNA, 19 nt, Artificial Sequence
  Description of Artificial Sequence: Synthetic oligonucleotide
gccaugccagcccugccuu

SEQ ID NO: 2528067 - RNA, 19 nt, Artificial Sequence
  Description of Artificial Sequence: Synthetic oligonucleotide
cgagcggccuugggcaggc

SEQ ID NO: 2528068 - RNA, 19 nt, Artificial Sequence
  Description of Artificial Sequence: Synthetic oligonucleotide
cugcugccucagacagaaa

SEQ ID NO: 2528069 - RNA, 19 nt, Artificial Sequence
  Description of Artificial Sequence: Synthetic oligonucleotide
cagugacuccguagacguu

SEQ ID NO: 2528070 - RNA, 19 nt, Artificial Sequence
  Description of Artificial Sequence: Synthetic oligonucleotide
cggcacaacuccccaaugu

SEQ ID NO: 2528071 - RNA, 19 nt, Artificial Sequence
  Description of Artificial Sequence: Synthetic oligonucleotide
cguucaccuccugaaggaa

SEQ ID NO: 2528072 - RNA, 19 nt, Artificial Sequence
  Description of Artificial Sequence: Synthetic oligonucleotide
gcaccaccguggcaccgau

SEQ ID NO: 2528073 - RNA, 19 nt, Artificial Sequence
  Description of Artificial Sequence: Synthetic oligonucleotide
cccuggcauugcaggaccu

SEQ ID NO: 2528074 - RNA, 19 nt, Artificial Sequence
  Description of Artificial Sequence: Synthetic oligonucleotide
ccgugcuucuggcaaucuu

SEQ ID NO: 2528075 - RNA, 19 nt, Artificial Sequence
  Description of Artificial Sequence: Synthetic oligonucleotide
cgggcauaaggcggcaagu

SEQ ID NO: 2528076 - RNA, 19 nt, Artificial Sequence
  Description of Artificial Sequence: Synthetic oligonucleotide
cgaggaccucugccaccuc

SEQ ID NO: 2528077 - RNA, 19 nt, Artificial Sequence
  Description of Artificial Sequence: Synthetic oligonucleotide
ccuggcauugcaggaccuu

SEQ ID NO: 2528078 - RNA, 19 nt, Artificial Sequence
  Description of Artificial Sequence: Synthetic oligonucleotide
ccguggcaccgaugcccaa

SEQ ID NO: 2528079 - RNA, 19 nt, Artificial Sequence
  Description of Artificial Sequence: Synthetic oligonucleotide
aauaagaucaucuuuuaag

SEQ ID NO: 2528080 - RNA, 19 nt, Artificial Sequence
  Description of Artificial Sequence: Synthetic oligonucleotide
aaaaguaaaggcauuaggc

SEQ ID NO: 2528081 - RNA, 19 nt, Artificial Sequence
  Description of Artificial Sequence: Synthetic oligonucleotide
  modified_base (6)..(6): a, c, u, g, unknown or other
aacuunuucauauauauga

SEQ ID NO: 2528082 - RNA, 19 nt, Artificial Sequence
  Description of Artificial Sequence: Synthetic oligonucleotide
acagucacuaucuauaucc

SEQ ID NO: 2528083 - RNA, 19 nt, Artificial Sequence
  Description of Artificial Sequence: Synthetic oligonucleotide
aaccuuucgauauagaguc

SEQ ID NO: 2528084 - RNA, 19 nt, Artificial Sequence
  Description of Artificial Sequence: Synthetic oligonucleotide
auaagaucaucuuuuaagc

SEQ ID NO: 2528085 - RNA, 19 nt, Artificial Sequence
  Description of Artificial Sequence: Synthetic oligonucleotide
  modified_base (8)..(8): a, c, u, g, unknown or other
aaaacuunuucauauauau

SEQ ID NO: 2528086 - RNA, 19 nt, Artificial Sequence
  Description of Artificial Sequence: Synthetic oligonucleotide
uccuauuucaaaaucaccc

SEQ ID NO: 2528087 - RNA, 19 nt, Artificial Sequence
  Description of Artificial Sequence: Synthetic oligonucleotide
agaaaacaaaguuggagcc

SEQ ID NO: 2528088 - RNA, 19 nt, Artificial Sequence
  Description of Artificial Sequence: Synthetic oligonucleotide
aauuacaaagaagugcggc

SEQ ID NO: 2528089 - RNA, 19 nt, Artificial Sequence
  Description of Artificial Sequence: Synthetic oligonucleotide
uuggaauaaacuuagaaaa

SEQ ID NO: 2528090 - RNA, 19 nt, Artificial Sequence
  Description of Artificial Sequence: Synthetic oligonucleotide
gaaaccauucuguauaagg

SEQ ID NO: 2528091 - RNA, 19 nt, Artificial Sequence
  Description of Artificial Sequence: Synthetic oligonucleotide
  modified_base (3)..(3): a, c, u, g, unknown or other
uunuucauauauaugaaaa

SEQ ID NO: 2528092 - RNA, 19 nt, Artificial Sequence
  Description of Artificial Sequence: Synthetic oligonucleotide
ucgauauagagucuggagg

SEQ ID NO: 2528093 - RNA, 19 nt, Artificial Sequence
  Description of Artificial Sequence: Synthetic oligonucleotide
uuuaauaagaucaucuuuu

SEQ ID NO: 2528094 - RNA, 19 nt, Artificial Sequence
  Description of Artificial Sequence: Synthetic oligonucleotide
aaaguaaaggcauuaggcu

SEQ ID NO: 2528095 - RNA, 19 nt, Artificial Sequence
  Description of Artificial Sequence: Synthetic oligonucleotide
aaagcuuuuguuucuaugu

SEQ ID NO: 2528096 - RNA, 19 nt, Artificial Sequence
  Description of Artificial Sequence: Synthetic oligonucleotide
gaagaaaguacuucaacag

SEQ ID NO: 2528097 - RNA, 19 nt, Artificial Sequence
  Description of Artificial Sequence: Synthetic oligonucleotide
aaugcucccauauacuguc

SEQ ID NO: 2528098 - RNA, 19 nt, Artificial Sequence
  Description of Artificial Sequence: Synthetic oligonucleotide
acuuagaaaacaaaguugg

SEQ ID NO: 2528099 - RNA, 19 nt, Artificial Sequence
  Description of Artificial Sequence: Synthetic oligonucleotide
aauauuaaaccuuucgaua

SEQ ID NO: 2528100 - RNA, 19 nt, Artificial Sequence
  Description of Artificial Sequence: Synthetic oligonucleotide
uaaaccuuucgauauagag

SEQ ID NO: 2528101 - RNA, 19 nt, Artificial Sequence
  Description of Artificial Sequence: Synthetic oligonucleotide
uuuggaauaaacuuagaaa

SEQ ID NO: 2528102 - RNA, 19 nt, Artificial Sequence
  Description of Artificial Sequence: Synthetic oligonucleotide
aguuggagccaucugaacc

SEQ ID NO: 2528103 - RNA, 19 nt, Artificial Sequence
  Description of Artificial Sequence: Synthetic oligonucleotide
acuguuauaagccaacuca

SEQ ID NO: 2528104 - RNA, 19 nt, Artificial Sequence
  Description of Artificial Sequence: Synthetic oligonucleotide
aaaguucagauuccacagc

SEQ ID NO: 2528105 - RNA, 19 nt, Artificial Sequence
  Description of Artificial Sequence: Synthetic oligonucleotide
aaccauucuguauaagguc

SEQ ID NO: 2528106 - RNA, 19 nt, Artificial Sequence
  Description of Artificial Sequence: Synthetic oligonucleotide
aaaugugcuugucugcaac

SEQ ID NO: 2528107 - RNA, 19 nt, Artificial Sequence
  Description of Artificial Sequence: Synthetic oligonucleotide
uaauauuaaaccuuucgau

SEQ ID NO: 2528108 - RNA, 19 nt, Artificial Sequence
  Description of Artificial Sequence: Synthetic oligonucleotide
uaaaagauuguccuauuuc

SEQ ID NO: 2528109 - RNA, 19 nt, Artificial Sequence
  Description of Artificial Sequence: Synthetic oligonucleotide
gaaggugugaccugaaaug

SEQ ID NO: 2528110 - RNA, 19 nt, Artificial Sequence
  Description of Artificial Sequence: Synthetic oligonucleotide
uuuuaauaagaucaucuuu

SEQ ID NO: 2528111 - RNA, 19 nt, Artificial Sequence
  Description of Artificial Sequence: Synthetic oligonucleotide
agaaaguucagauuccaca

SEQ ID NO: 2528112 - RNA, 19 nt, Artificial Sequence
  Description of Artificial Sequence: Synthetic oligonucleotide
ucuucucuccggaagaaag

SEQ ID NO: 2528113 - RNA, 19 nt, Artificial Sequence
  Description of Artificial Sequence: Synthetic oligonucleotide
aaugugcuugucugcaacg

SEQ ID NO: 2528114 - RNA, 19 nt, Artificial Sequence
  Description of Artificial Sequence: Synthetic oligonucleotide
auuguccuauuucaaaauc

SEQ ID NO: 2528115 - RNA, 19 nt, Artificial Sequence
  Description of Artificial Sequence: Synthetic oligonucleotide
ucuguauaaggucucuuug

SEQ ID NO: 2528116 - RNA, 19 nt, Artificial Sequence
  Description of Artificial Sequence: Synthetic oligonucleotide
gcuaauauuaaaccuuucg

SEQ ID NO: 2528117 - RNA, 19 nt, Artificial Sequence
  Description of Artificial Sequence: Synthetic oligonucleotide
ucuguuaaagcuuuuguuu

SEQ ID NO: 2528118 - RNA, 19 nt, Artificial Sequence
  Description of Artificial Sequence: Synthetic oligonucleotide
agauuccacagcuggaggc

SEQ ID NO: 2528119 - RNA, 19 nt, Artificial Sequence
  Description of Artificial Sequence: Synthetic oligonucleotide
ucugaacccauucuggucu

SEQ ID NO: 2528120 - RNA, 19 nt, Artificial Sequence
  Description of Artificial Sequence: Synthetic oligonucleotide
ucaacagucacuaucuaua

SEQ ID NO: 2528121 - RNA, 19 nt, Artificial Sequence
  Description of Artificial Sequence: Synthetic oligonucleotide
aucuauauccccuggaacu

SEQ ID NO: 2528122 - RNA, 19 nt, Artificial Sequence
  Description of Artificial Sequence: Synthetic oligonucleotide
uauuugccauaguugaagg

SEQ ID NO: 2528123 - RNA, 19 nt, Artificial Sequence
  Description of Artificial Sequence: Synthetic oligonucleotide
uuuuaagcucuguuaaagc

SEQ ID NO: 2528124 - RNA, 19 nt, Artificial Sequence
  Description of Artificial Sequence: Synthetic oligonucleotide
guucagauuccacagcugg

SEQ ID NO: 2528125 - RNA, 19 nt, Artificial Sequence
  Description of Artificial Sequence: Synthetic oligonucleotide
agaaaguacuucaacaguc

SEQ ID NO: 2528126 - RNA, 19 nt, Artificial Sequence
  Description of Artificial Sequence: Synthetic oligonucleotide
uuugccauaguugaaggug

SEQ ID NO: 2528127 - RNA, 19 nt, Artificial Sequence
  Description of Artificial Sequence: Synthetic oligonucleotide
uucgauauagagucuggag

SEQ ID NO: 2528128 - RNA, 19 nt, Artificial Sequence
  Description of Artificial Sequence: Synthetic oligonucleotide
uuguccuauuucaaaauca

SEQ ID NO: 2528129 - RNA, 19 nt, Artificial Sequence
  Description of Artificial Sequence: Synthetic oligonucleotide
uggaauaaacuuagaaaac

SEQ ID NO: 2528130 - RNA, 19 nt, Artificial Sequence
  Description of Artificial Sequence: Synthetic oligonucleotide
aaggugugaccugaaaugg

SEQ ID NO: 2528131 - RNA, 19 nt, Artificial Sequence
  Description of Artificial Sequence: Synthetic oligonucleotide
aaaggcauuaggcuguaaa

SEQ ID NO: 2528132 - RNA, 19 nt, Artificial Sequence
  Description of Artificial Sequence: Synthetic oligonucleotide
uguuccguaaaacagcuuu

SEQ ID NO: 2528133 - RNA, 19 nt, Artificial Sequence
  Description of Artificial Sequence: Synthetic oligonucleotide
auuacaaagaagugcggca

SEQ ID NO: 2528134 - RNA, 19 nt, Artificial Sequence
  Description of Artificial Sequence: Synthetic oligonucleotide
uauagagucuggaggcugg

SEQ ID NO: 2528135 - RNA, 19 nt, Artificial Sequence
  Description of Artificial Sequence: Synthetic oligonucleotide
agucacuaucuauaucccc

SEQ ID NO: 2528136 - RNA, 19 nt, Artificial Sequence
  Description of Artificial Sequence: Synthetic oligonucleotide
aacguguuccguaaaacag

SEQ ID NO: 2528137 - RNA, 19 nt, Artificial Sequence
  Description of Artificial Sequence: Synthetic oligonucleotide
uguccuauuucaaaaucac

SEQ ID NO: 2528138 - RNA, 19 nt, Artificial Sequence
  Description of Artificial Sequence: Synthetic oligonucleotide
aauguuuggaauaaacuua

SEQ ID NO: 2528139 - RNA, 19 nt, Artificial Sequence
  Description of Artificial Sequence: Synthetic oligonucleotide
ucugagaguguacaggccu

SEQ ID NO: 2528140 - RNA, 19 nt, Artificial Sequence
  Description of Artificial Sequence: Synthetic oligonucleotide
ugugucuucucuccggaag

SEQ ID NO: 2528141 - RNA, 19 nt, Artificial Sequence
  Description of Artificial Sequence: Synthetic oligonucleotide
uguauaaggucucuuugaa

SEQ ID NO: 2528142 - RNA, 19 nt, Artificial Sequence
  Description of Artificial Sequence: Synthetic oligonucleotide
  modified_base (7)..(7): a, c, u, g, unknown or other
aaacuunuucauauauaug

SEQ ID NO: 2528143 - RNA, 19 nt, Artificial Sequence
  Description of Artificial Sequence: Synthetic oligonucleotide
ugucccagagcuaauauua

SEQ ID NO: 2528144 - RNA, 19 nt, Artificial Sequence
  Description of Artificial Sequence: Synthetic oligonucleotide
uuaggcuguaaaaugugcu

SEQ ID NO: 2528145 - RNA, 19 nt, Artificial Sequence
  Description of Artificial Sequence: Synthetic oligonucleotide
aacagucacuaucuauauc

SEQ ID NO: 2528146 - RNA, 19 nt, Artificial Sequence
  Description of Artificial Sequence: Synthetic oligonucleotide
uacuucaacagucacuauc

SEQ ID NO: 2528147 - RNA, 19 nt, Artificial Sequence
  Description of Artificial Sequence: Synthetic oligonucleotide
uggaacuugcacaagcgga

SEQ ID NO: 2528148 - RNA, 19 nt, Artificial Sequence
  Description of Artificial Sequence: Synthetic oligonucleotide
cuuuuaagcucuguuaaag

SEQ ID NO: 2528149 - RNA, 19 nt, Artificial Sequence
  Description of Artificial Sequence: Synthetic oligonucleotide
aaaccauucuguauaaggu

SEQ ID NO: 2528150 - RNA, 19 nt, Artificial Sequence
  Description of Artificial Sequence: Synthetic oligonucleotide
aaaccuuucgauauagagu

SEQ ID NO: 2528151 - RNA, 19 nt, Artificial Sequence
  Description of Artificial Sequence: Synthetic oligonucleotide
aagauuguccuauuucaaa

SEQ ID NO: 2528152 - RNA, 19 nt, Artificial Sequence
  Description of Artificial Sequence: Synthetic oligonucleotide
uaaagcuuuuguuucuaug

SEQ ID NO: 2528153 - RNA, 19 nt, Artificial Sequence
  Description of Artificial Sequence: Synthetic oligonucleotide
uaagaucaucuuuuaagcu

SEQ ID NO: 2528154 - RNA, 19 nt, Artificial Sequence
  Description of Artificial Sequence: Synthetic oligonucleotide
auauuugccauaguugaag

SEQ ID NO: 2528155 - RNA, 19 nt, Artificial Sequence
  Description of Artificial Sequence: Synthetic oligonucleotide
aacuugcacaagcggacgg

SEQ ID NO: 2528156 - RNA, 19 nt, Artificial Sequence
  Description of Artificial Sequence: Synthetic oligonucleotide
auuaggcuguaaaaugugc

SEQ ID NO: 2528157 - RNA, 19 nt, Artificial Sequence
  Description of Artificial Sequence: Synthetic oligonucleotide
acaauauuugccauaguug

SEQ ID NO: 2528158 - RNA, 19 nt, Artificial Sequence
  Description of Artificial Sequence: Synthetic oligonucleotide
acccauucuggucugagag

SEQ ID NO: 2528159 - RNA, 19 nt, Artificial Sequence
  Description of Artificial Sequence: Synthetic oligonucleotide
auaguugaaggugugaccu

SEQ ID NO: 2528160 - RNA, 19 nt, Artificial Sequence
  Description of Artificial Sequence: Synthetic oligonucleotide
uaucuauauccccuggaac

SEQ ID NO: 2528161 - RNA, 19 nt, Artificial Sequence
  Description of Artificial Sequence: Synthetic oligonucleotide
uccggaagaaaguacuuca

SEQ ID NO: 2528162 - RNA, 19 nt, Artificial Sequence
  Description of Artificial Sequence: Synthetic oligonucleotide
uucagaaaguucagauucc

SEQ ID NO: 2528163 - RNA, 19 nt, Artificial Sequence
  Description of Artificial Sequence: Synthetic oligonucleotide
ugaaggugugaccugaaau

SEQ ID NO: 2528164 - RNA, 19 nt, Artificial Sequence
  Description of Artificial Sequence: Synthetic oligonucleotide
uaaaaugugcuugucugca

SEQ ID NO: 2528165 - RNA, 19 nt, Artificial Sequence
  Description of Artificial Sequence: Synthetic oligonucleotide
aaggcauuaggcuguaaaa

SEQ ID NO: 2528166 - RNA, 19 nt, Artificial Sequence
  Description of Artificial Sequence: Synthetic oligonucleotide
guuggagccaucugaaccc

SEQ ID NO: 2528167 - RNA, 19 nt, Artificial Sequence
  Description of Artificial Sequence: Synthetic oligonucleotide
caaugcucugcaaugcucc

SEQ ID NO: 2528168 - RNA, 19 nt, Artificial Sequence
  Description of Artificial Sequence: Synthetic oligonucleotide
ugcacaagcggacggacug

SEQ ID NO: 2528169 - RNA, 19 nt, Artificial Sequence
  Description of Artificial Sequence: Synthetic oligonucleotide
ucuugagcggcguauucag

SEQ ID NO: 2528170 - RNA, 19 nt, Artificial Sequence
  Description of Artificial Sequence: Synthetic oligonucleotide
ucagauuccacagcuggag

SEQ ID NO: 2528171 - RNA, 19 nt, Artificial Sequence
  Description of Artificial Sequence: Synthetic oligonucleotide
uaauaagaucaucuuuuaa

SEQ ID NO: 2528172 - RNA, 19 nt, Artificial Sequence
  Description of Artificial Sequence: Synthetic oligonucleotide
aaauuacaaagaagugcgg

SEQ ID NO: 2528173 - RNA, 19 nt, Artificial Sequence
  Description of Artificial Sequence: Synthetic oligonucleotide
uuugacagagcuccugagu

SEQ ID NO: 2528174 - RNA, 19 nt, Artificial Sequence
  Description of Artificial Sequence: Synthetic oligonucleotide
aaguuggagccaucugaac

SEQ ID NO: 2528175 - RNA, 19 nt, Artificial Sequence
  Description of Artificial Sequence: Synthetic oligonucleotide
cauaguugaaggugugacc

SEQ ID NO: 2528176 - RNA, 19 nt, Artificial Sequence
  Description of Artificial Sequence: Synthetic oligonucleotide
uuaagcucuguuaaagcuu

SEQ ID NO: 2528177 - RNA, 19 nt, Artificial Sequence
  Description of Artificial Sequence: Synthetic oligonucleotide
aacaaaguuggagccaucu

SEQ ID NO: 2528178 - RNA, 19 nt, Artificial Sequence
  Description of Artificial Sequence: Synthetic oligonucleotide
aguacuucaacagucacua

SEQ ID NO: 2528179 - RNA, 19 nt, Artificial Sequence
  Description of Artificial Sequence: Synthetic oligonucleotide
aaaugguguugacugggcu

SEQ ID NO: 2528180 - RNA, 19 nt, Artificial Sequence
  Description of Artificial Sequence: Synthetic oligonucleotide
agauuguccuauuucaaaa

SEQ ID NO: 2528181 - RNA, 19 nt, Artificial Sequence
  Description of Artificial Sequence: Synthetic oligonucleotide
uuaauaagaucaucuuuua

SEQ ID NO: 2528182 - RNA, 19 nt, Artificial Sequence
  Description of Artificial Sequence: Synthetic oligonucleotide
aagccaacucauccccagc

SEQ ID NO: 2528183 - RNA, 19 nt, Artificial Sequence
  Description of Artificial Sequence: Synthetic oligonucleotide
aaugguguugacugggcuu

SEQ ID NO: 2528184 - RNA, 19 nt, Artificial Sequence
  Description of Artificial Sequence: Synthetic oligonucleotide
  modified_base (4)..(4): a, c, u, g, unknown or other
cuunuucauauauaugaaa

SEQ ID NO: 2528185 - RNA, 19 nt, Artificial Sequence
  Description of Artificial Sequence: Synthetic oligonucleotide
ggaagaaaguacuucaaca

SEQ ID NO: 2528186 - RNA, 19 nt, Artificial Sequence
  Description of Artificial Sequence: Synthetic oligonucleotide
cuuucgauauagagucugg

SEQ ID NO: 2528187 - RNA, 19 nt, Artificial Sequence
  Description of Artificial Sequence: Synthetic oligonucleotide
uuuugacagagcuccugag

SEQ ID NO: 2528188 - RNA, 19 nt, Artificial Sequence
  Description of Artificial Sequence: Synthetic oligonucleotide
guauaaggucucuuugaag

SEQ ID NO: 2528189 - RNA, 19 nt, Artificial Sequence
  Description of Artificial Sequence: Synthetic oligonucleotide
aucugaacccauucugguc

SEQ ID NO: 2528190 - RNA, 19 nt, Artificial Sequence
  Description of Artificial Sequence: Synthetic oligonucleotide
uaagcucuguuaaagcuuu

SEQ ID NO: 2528191 - RNA, 19 nt, Artificial Sequence
  Description of Artificial Sequence: Synthetic oligonucleotide
uggucugagaguguacagg

SEQ ID NO: 2528192 - RNA, 19 nt, Artificial Sequence
  Description of Artificial Sequence: Synthetic oligonucleotide
ugacagagcuccugagugg

SEQ ID NO: 2528193 - RNA, 19 nt, Artificial Sequence
  Description of Artificial Sequence: Synthetic oligonucleotide
uauauccccuggaacuugc

SEQ ID NO: 2528194 - RNA, 19 nt, Artificial Sequence
  Description of Artificial Sequence: Synthetic oligonucleotide
cauuaggcuguaaaaugug

SEQ ID NO: 2528195 - RNA, 19 nt, Artificial Sequence
  Description of Artificial Sequence: Synthetic oligonucleotide
caaaguuggagccaucuga

SEQ ID NO: 2528196 - RNA, 19 nt, Artificial Sequence
  Description of Artificial Sequence: Synthetic oligonucleotide
acguguuccguaaaacagc

SEQ ID NO: 2528197 - RNA, 19 nt, Artificial Sequence
  Description of Artificial Sequence: Synthetic oligonucleotide
ugcaaugcucccauauacu

SEQ ID NO: 2528198 - RNA, 19 nt, Artificial Sequence
  Description of Artificial Sequence: Synthetic oligonucleotide
aagucuagcagcaauuguu

SEQ ID NO: 2528199 - RNA, 19 nt, Artificial Sequence
  Description of Artificial Sequence: Synthetic oligonucleotide
auaaggucucuuugaagcu

SEQ ID NO: 2528200 - RNA, 19 nt, Artificial Sequence
  Description of Artificial Sequence: Synthetic oligonucleotide
cugcaaugcucccauauac

SEQ ID NO: 2528201 - RNA, 19 nt, Artificial Sequence
  Description of Artificial Sequence: Synthetic oligonucleotide
ggcauuaggcuguaaaaug

SEQ ID NO: 2528202 - RNA, 19 nt, Artificial Sequence
  Description of Artificial Sequence: Synthetic oligonucleotide
acuaucuauauccccugga

SEQ ID NO: 2528203 - RNA, 19 nt, Artificial Sequence
  Description of Artificial Sequence: Synthetic oligonucleotide
gaguguacaggccuuucac

SEQ ID NO: 2528204 - RNA, 19 nt, Artificial Sequence
  Description of Artificial Sequence: Synthetic oligonucleotide
ccagagcuaauauuaaacc

SEQ ID NO: 2528205 - RNA, 19 nt, Artificial Sequence
  Description of Artificial Sequence: Synthetic oligonucleotide
ucauccccagcucucuucc

SEQ ID NO: 2528206 - RNA, 19 nt, Artificial Sequence
  Description of Artificial Sequence: Synthetic oligonucleotide
ucacuaucuauauccccug

SEQ ID NO: 2528207 - RNA, 19 nt, Artificial Sequence
  Description of Artificial Sequence: Synthetic oligonucleotide
ccuauuucaaaaucacccc

SEQ ID NO: 2528208 - RNA, 19 nt, Artificial Sequence
  Description of Artificial Sequence: Synthetic oligonucleotide
ggaauaaacuuagaaaaca

SEQ ID NO: 2528209 - RNA, 19 nt, Artificial Sequence
  Description of Artificial Sequence: Synthetic oligonucleotide
ugaccugaaaugguguuga

SEQ ID NO: 2528210 - RNA, 19 nt, Artificial Sequence
  Description of Artificial Sequence: Synthetic oligonucleotide
ugugcuugucugcaacgug

SEQ ID NO: 2528211 - RNA, 19 nt, Artificial Sequence
  Description of Artificial Sequence: Synthetic oligonucleotide
cugaaaugguguugacugg

SEQ ID NO: 2528212 - RNA, 19 nt, Artificial Sequence
  Description of Artificial Sequence: Synthetic oligonucleotide
uugagcggcguauucagaa

SEQ ID NO: 2528213 - RNA, 19 nt, Artificial Sequence
  Description of Artificial Sequence: Synthetic oligonucleotide
agcuuuuaauaagaucauc

SEQ ID NO: 2528214 - RNA, 19 nt, Artificial Sequence
  Description of Artificial Sequence: Synthetic oligonucleotide
gagcggcguauucagaaag

SEQ ID NO: 2528215 - RNA, 19 nt, Artificial Sequence
  Description of Artificial Sequence: Synthetic oligonucleotide
uucuguauaaggucucuuu

SEQ ID NO: 2528216 - RNA, 19 nt, Artificial Sequence
  Description of Artificial Sequence: Synthetic oligonucleotide
ucugcaacguguuccguaa

SEQ ID NO: 2528217 - RNA, 19 nt, Artificial Sequence
  Description of Artificial Sequence: Synthetic oligonucleotide
uucagauuccacagcugga

SEQ ID NO: 2528218 - RNA, 19 nt, Artificial Sequence
  Description of Artificial Sequence: Synthetic oligonucleotide
agagcuaauauuaaaccuu

SEQ ID NO: 2528219 - RNA, 19 nt, Artificial Sequence
  Description of Artificial Sequence: Synthetic oligonucleotide
aaaaugugcuugucugcaa

SEQ ID NO: 2528220 - RNA, 19 nt, Artificial Sequence
  Description of Artificial Sequence: Synthetic oligonucleotide
aaaguuggagccaucugaa

SEQ ID NO: 2528221 - RNA, 19 nt, Artificial Sequence
  Description of Artificial Sequence: Synthetic oligonucleotide
uuucacaauauuugccaua

SEQ ID NO: 2528222 - RNA, 19 nt, Artificial Sequence
  Description of Artificial Sequence: Synthetic oligonucleotide
cuucugaucuugagcggcg

SEQ ID NO: 2528223 - RNA, 19 nt, Artificial Sequence
  Description of Artificial Sequence: Synthetic oligonucleotide
augguguugacugggcuuc

SEQ ID NO: 2528224 - RNA, 19 nt, Artificial Sequence
  Description of Artificial Sequence: Synthetic oligonucleotide
ggugaaaccauucuguaua

SEQ ID NO: 2528225 - RNA, 19 nt, Artificial Sequence
  Description of Artificial Sequence: Synthetic oligonucleotide
uuucgauauagagucugga

SEQ ID NO: 2528226 - RNA, 19 nt, Artificial Sequence
  Description of Artificial Sequence: Synthetic oligonucleotide
aggccuuucacaauauuug

SEQ ID NO: 2528227 - RNA, 19 nt, Artificial Sequence
  Description of Artificial Sequence: Synthetic oligonucleotide
acaaaguuggagccaucug

SEQ ID NO: 2528228 - RNA, 19 nt, Artificial Sequence
  Description of Artificial Sequence: Synthetic oligonucleotide
ggucugagaguguacaggc

SEQ ID NO: 2528229 - RNA, 19 nt, Artificial Sequence
  Description of Artificial Sequence: Synthetic oligonucleotide
uccguaaaacagcuuuuaa

SEQ ID NO: 2528230 - RNA, 19 nt, Artificial Sequence
  Description of Artificial Sequence: Synthetic oligonucleotide
accauucuguauaaggucu

SEQ ID NO: 2528231 - RNA, 19 nt, Artificial Sequence
  Description of Artificial Sequence: Synthetic oligonucleotide
auccccuggaacuugcaca

SEQ ID NO: 2528232 - RNA, 19 nt, Artificial Sequence
  Description of Artificial Sequence: Synthetic oligonucleotide
auuugccauaguugaaggu

SEQ ID NO: 2528233 - RNA, 19 nt, Artificial Sequence
  Description of Artificial Sequence: Synthetic oligonucleotide
gaacuugcacaagcggacg

SEQ ID NO: 2528234 - RNA, 19 nt, Artificial Sequence
  Description of Artificial Sequence: Synthetic oligonucleotide
ugcaacguguuccguaaaa

SEQ ID NO: 2528235 - RNA, 19 nt, Artificial Sequence
  Description of Artificial Sequence: Synthetic oligonucleotide
ucugcaaugcucccauaua

SEQ ID NO: 2528236 - RNA, 19 nt, Artificial Sequence
  Description of Artificial Sequence: Synthetic oligonucleotide
cuguauaaggucucuuuga

SEQ ID NO: 2528237 - RNA, 19 nt, Artificial Sequence
  Description of Artificial Sequence: Synthetic oligonucleotide
cagucacuaucuauauccc

SEQ ID NO: 2528238 - RNA, 19 nt, Artificial Sequence
  Description of Artificial Sequence: Synthetic oligonucleotide
ucucuccggaagaaaguac

SEQ ID NO: 2528239 - RNA, 19 nt, Artificial Sequence
  Description of Artificial Sequence: Synthetic oligonucleotide
uccgggacuggucaccucu

SEQ ID NO: 2528240 - RNA, 19 nt, Artificial Sequence
  Description of Artificial Sequence: Synthetic oligonucleotide
cgauauagagucuggaggc

SEQ ID NO: 2528241 - RNA, 19 nt, Artificial Sequence
  Description of Artificial Sequence: Synthetic oligonucleotide
ugcagcuccuuagagacuc

SEQ ID NO: 2528242 - RNA, 19 nt, Artificial Sequence
  Description of Artificial Sequence: Synthetic oligonucleotide
uguugacugggcuucuaaa

SEQ ID NO: 2528243 - RNA, 19 nt, Artificial Sequence
  Description of Artificial Sequence: Synthetic oligonucleotide
gacuggucaccucugguga

SEQ ID NO: 2528244 - RNA, 19 nt, Artificial Sequence
  Description of Artificial Sequence: Synthetic oligonucleotide
  modified_base (5)..(5): a, c, u, g, unknown or other
acuunuucauauauaugaa

SEQ ID NO: 2528245 - RNA, 19 nt, Artificial Sequence
  Description of Artificial Sequence: Synthetic oligonucleotide
agaguguacaggccuuuca

SEQ ID NO: 2528246 - RNA, 19 nt, Artificial Sequence
  Description of Artificial Sequence: Synthetic oligonucleotide
guugacugggcuucuaaaa

SEQ ID NO: 2528247 - RNA, 19 nt, Artificial Sequence
  Description of Artificial Sequence: Synthetic oligonucleotide
uaggcuguaaaaugugcuu

SEQ ID NO: 2528248 - RNA, 19 nt, Artificial Sequence
  Description of Artificial Sequence: Synthetic oligonucleotide
caacguguuccguaaaaca

SEQ ID NO: 2528249 - RNA, 19 nt, Artificial Sequence
  Description of Artificial Sequence: Synthetic oligonucleotide
auauagagucuggaggcug

SEQ ID NO: 2528250 - RNA, 19 nt, Artificial Sequence
  Description of Artificial Sequence: Synthetic oligonucleotide
agcuucugaucuugagcgg

SEQ ID NO: 2528251 - RNA, 19 nt, Artificial Sequence
  Description of Artificial Sequence: Synthetic oligonucleotide
uauccccuggaacuugcac

SEQ ID NO: 2528252 - RNA, 19 nt, Artificial Sequence
  Description of Artificial Sequence: Synthetic oligonucleotide
aacccauucuggucugaga

SEQ ID NO: 2528253 - RNA, 19 nt, Artificial Sequence
  Description of Artificial Sequence: Synthetic oligonucleotide
ugaaaccauucuguauaag

SEQ ID NO: 2528254 - RNA, 19 nt, Artificial Sequence
  Description of Artificial Sequence: Synthetic oligonucleotide
cagauuccacagcuggagg

SEQ ID NO: 2528255 - RNA, 19 nt, Artificial Sequence
  Description of Artificial Sequence: Synthetic oligonucleotide
cccagagcuaauauuaaac

SEQ ID NO: 2528256 - RNA, 19 nt, Artificial Sequence
  Description of Artificial Sequence: Synthetic oligonucleotide
cagaaaguucagauuccac

SEQ ID NO: 2528257 - RNA, 19 nt, Artificial Sequence
  Description of Artificial Sequence: Synthetic oligonucleotide
uggugaaaccauucuguau

SEQ ID NO: 2528258 - RNA, 19 nt, Artificial Sequence
  Description of Artificial Sequence: Synthetic oligonucleotide
agugugucuucucuccgga

SEQ ID NO: 2528259 - RNA, 19 nt, Artificial Sequence
  Description of Artificial Sequence: Synthetic oligonucleotide
cagugugucuucucuccgg

SEQ ID NO: 2528260 - RNA, 19 nt, Artificial Sequence
  Description of Artificial Sequence: Synthetic oligonucleotide
cacuaucuauauccccugg

SEQ ID NO: 2528261 - RNA, 19 nt, Artificial Sequence
  Description of Artificial Sequence: Synthetic oligonucleotide
agccaacucauccccagcu

SEQ ID NO: 2528262 - RNA, 19 nt, Artificial Sequence
  Description of Artificial Sequence: Synthetic oligonucleotide
uugaagcuucugaucuuga

SEQ ID NO: 2528263 - RNA, 19 nt, Artificial Sequence
  Description of Artificial Sequence: Synthetic oligonucleotide
cuaucuauauccccuggaa

SEQ ID NO: 2528264 - RNA, 19 nt, Artificial Sequence
  Description of Artificial Sequence: Synthetic oligonucleotide
ugcucugcaaugcucccau

SEQ ID NO: 2528265 - RNA, 19 nt, Artificial Sequence
  Description of Artificial Sequence: Synthetic oligonucleotide
ccaucugaacccauucugg

SEQ ID NO: 2528266 - RNA, 19 nt, Artificial Sequence
  Description of Artificial Sequence: Synthetic oligonucleotide
uccccuggaacuugcacaa

SEQ ID NO: 2528267 - RNA, 19 nt, Artificial Sequence
  Description of Artificial Sequence: Synthetic oligonucleotide
gacggacuguuauaagcca

SEQ ID NO: 2528268 - RNA, 19 nt, Artificial Sequence
  Description of Artificial Sequence: Synthetic oligonucleotide
aaacagcuuuuaauaagau

SEQ ID NO: 2528269 - RNA, 19 nt, Artificial Sequence
  Description of Artificial Sequence: Synthetic oligonucleotide
guguacaggccuuucacaa

SEQ ID NO: 2528270 - RNA, 19 nt, Artificial Sequence
  Description of Artificial Sequence: Synthetic oligonucleotide
ugugaccugaaaugguguu

SEQ ID NO: 2528271 - RNA, 19 nt, Artificial Sequence
  Description of Artificial Sequence: Synthetic oligonucleotide
auagagucuggaggcuggc

SEQ ID NO: 2528272 - RNA, 19 nt, Artificial Sequence
  Description of Artificial Sequence: Synthetic oligonucleotide
ugccauaguugaaggugug

SEQ ID NO: 2528273 - RNA, 19 nt, Artificial Sequence
  Description of Artificial Sequence: Synthetic oligonucleotide
ucccagagcuaauauuaaa

SEQ ID NO: 2528274 - RNA, 19 nt, Artificial Sequence
  Description of Artificial Sequence: Synthetic oligonucleotide
ugcggcauccucucugaga

SEQ ID NO: 2528275 - RNA, 19 nt, Artificial Sequence
  Description of Artificial Sequence: Synthetic oligonucleotide
guccuauuucaaaaucacc

SEQ ID NO: 2528276 - RNA, 19 nt, Artificial Sequence
  Description of Artificial Sequence: Synthetic oligonucleotide
uguacaggccuuucacaau

SEQ ID NO: 2528277 - RNA, 19 nt, Artificial Sequence
  Description of Artificial Sequence: Synthetic oligonucleotide
ucccauauacugucccaga

SEQ ID NO: 2528278 - RNA, 19 nt, Artificial Sequence
  Description of Artificial Sequence: Synthetic oligonucleotide
ggccuuucacaauauuugc

SEQ ID NO: 2528279 - RNA, 19 nt, Artificial Sequence
  Description of Artificial Sequence: Synthetic oligonucleotide
cagagcuaauauuaaaccu

SEQ ID NO: 2528280 - RNA, 19 nt, Artificial Sequence
  Description of Artificial Sequence: Synthetic oligonucleotide
ucuauauccccuggaacuu

SEQ ID NO: 2528281 - RNA, 19 nt, Artificial Sequence
  Description of Artificial Sequence: Synthetic oligonucleotide
gauuguccuauuucaaaau

SEQ ID NO: 2528282 - RNA, 19 nt, Artificial Sequence
  Description of Artificial Sequence: Synthetic oligonucleotide
aggcauuaggcuguaaaau

SEQ ID NO: 2528283 - RNA, 19 nt, Artificial Sequence
  Description of Artificial Sequence: Synthetic oligonucleotide
aggcacaaugcucugcaau

SEQ ID NO: 2528284 - RNA, 19 nt, Artificial Sequence
  Description of Artificial Sequence: Synthetic oligonucleotide
cacaauauuugccauaguu

SEQ ID NO: 2528285 - RNA, 19 nt, Artificial Sequence
  Description of Artificial Sequence: Synthetic oligonucleotide
ccuuucacaauauuugcca

SEQ ID NO: 2528286 - RNA, 19 nt, Artificial Sequence
  Description of Artificial Sequence: Synthetic oligonucleotide
cuuuuguuucuauguaaaa

SEQ ID NO: 2528287 - RNA, 19 nt, Artificial Sequence
  Description of Artificial Sequence: Synthetic oligonucleotide
acugucccagagcuaauau

SEQ ID NO: 2528288 - RNA, 19 nt, Artificial Sequence
  Description of Artificial Sequence: Synthetic oligonucleotide
agcucuguuaaagcuuuug

SEQ ID NO: 2528289 - RNA, 19 nt, Artificial Sequence
  Description of Artificial Sequence: Synthetic oligonucleotide
cuggucugagaguguacag

SEQ ID NO: 2528290 - RNA, 19 nt, Artificial Sequence
  Description of Artificial Sequence: Synthetic oligonucleotide
cguaaaacagcuuuuaaua

SEQ ID NO: 2528291 - RNA, 19 nt, Artificial Sequence
  Description of Artificial Sequence: Synthetic oligonucleotide
ggacggacuguuauaagcc

SEQ ID NO: 2528292 - RNA, 19 nt, Artificial Sequence
  Description of Artificial Sequence: Synthetic oligonucleotide
gccaucugaacccauucug

SEQ ID NO: 2528293 - RNA, 19 nt, Artificial Sequence
  Description of Artificial Sequence: Synthetic oligonucleotide
cucccauauacugucccag

SEQ ID NO: 2528294 - RNA, 19 nt, Artificial Sequence
  Description of Artificial Sequence: Synthetic oligonucleotide
uucucuccggaagaaagua

SEQ ID NO: 2528295 - RNA, 19 nt, Artificial Sequence
  Description of Artificial Sequence: Synthetic oligonucleotide
agcuaauauuaaaccuuuc

SEQ ID NO: 2528296 - RNA, 19 nt, Artificial Sequence
  Description of Artificial Sequence: Synthetic oligonucleotide
gauuccacagcuggaggca

SEQ ID NO: 2528297 - RNA, 19 nt, Artificial Sequence
  Description of Artificial Sequence: Synthetic oligonucleotide
gaucuugagcggcguauuc

SEQ ID NO: 2528298 - RNA, 19 nt, Artificial Sequence
  Description of Artificial Sequence: Synthetic oligonucleotide
accucuggugaaaccauuc

SEQ ID NO: 2528299 - RNA, 19 nt, Artificial Sequence
  Description of Artificial Sequence: Synthetic oligonucleotide
ucaccucuggugaaaccau

SEQ ID NO: 2528300 - RNA, 19 nt, Artificial Sequence
  Description of Artificial Sequence: Synthetic oligonucleotide
gaacccauucuggucugag

SEQ ID NO: 2528301 - RNA, 19 nt, Artificial Sequence
  Description of Artificial Sequence: Synthetic oligonucleotide
uuccguaaaacagcuuuua

SEQ ID NO: 2528302 - RNA, 19 nt, Artificial Sequence
  Description of Artificial Sequence: Synthetic oligonucleotide
ggugugaccugaaauggug

SEQ ID NO: 2528303 - RNA, 19 nt, Artificial Sequence
  Description of Artificial Sequence: Synthetic oligonucleotide
cuggaggcuggccugcagc

SEQ ID NO: 2528304 - RNA, 19 nt, Artificial Sequence
  Description of Artificial Sequence: Synthetic oligonucleotide
ucacaauauuugccauagu

SEQ ID NO: 2528305 - RNA, 19 nt, Artificial Sequence
  Description of Artificial Sequence: Synthetic oligonucleotide
uugcacaagcggacggacu

SEQ ID NO: 2528306 - RNA, 19 nt, Artificial Sequence
  Description of Artificial Sequence: Synthetic oligonucleotide
ggacuggucaccucuggug

SEQ ID NO: 2528307 - RNA, 19 nt, Artificial Sequence
  Description of Artificial Sequence: Synthetic oligonucleotide
gucacuaucuauauccccu

SEQ ID NO: 2528308 - RNA, 19 nt, Artificial Sequence
  Description of Artificial Sequence: Synthetic oligonucleotide
accugaaaugguguugacu

SEQ ID NO: 2528309 - RNA, 19 nt, Artificial Sequence
  Description of Artificial Sequence: Synthetic oligonucleotide
ucuccggaagaaaguacuu

SEQ ID NO: 2528310 - RNA, 19 nt, Artificial Sequence
  Description of Artificial Sequence: Synthetic oligonucleotide
agugcggcauccucucuga

SEQ ID NO: 2528311 - RNA, 19 nt, Artificial Sequence
  Description of Artificial Sequence: Synthetic oligonucleotide
guacaggccuuucacaaua

SEQ ID NO: 2528312 - RNA, 19 nt, Artificial Sequence
  Description of Artificial Sequence: Synthetic oligonucleotide
agucuggaggcuggccugc

SEQ ID NO: 2528313 - RNA, 19 nt, Artificial Sequence
  Description of Artificial Sequence: Synthetic oligonucleotide
ccauauacugucccagagc

SEQ ID NO: 2528314 - RNA, 19 nt, Artificial Sequence
  Description of Artificial Sequence: Synthetic oligonucleotide
aucuugagcggcguauuca

SEQ ID NO: 2528315 - RNA, 19 nt, Artificial Sequence
  Description of Artificial Sequence: Synthetic oligonucleotide
ugagcggcguauucagaaa

SEQ ID NO: 2528316 - RNA, 19 nt, Artificial Sequence
  Description of Artificial Sequence: Synthetic oligonucleotide
uaaggucucuuugaagcuu

SEQ ID NO: 2528317 - RNA, 19 nt, Artificial Sequence
  Description of Artificial Sequence: Synthetic oligonucleotide
uucuggucugagaguguac

SEQ ID NO: 2528318 - RNA, 19 nt, Artificial Sequence
  Description of Artificial Sequence: Synthetic oligonucleotide
gugaccugaaaugguguug

SEQ ID NO: 2528319 - RNA, 19 nt, Artificial Sequence
  Description of Artificial Sequence: Synthetic oligonucleotide
ggaacuugcacaagcggac

SEQ ID NO: 2528320 - RNA, 19 nt, Artificial Sequence
  Description of Artificial Sequence: Synthetic oligonucleotide
gcuggaggcagaauguuug

SEQ ID NO: 2528321 - RNA, 19 nt, Artificial Sequence
  Description of Artificial Sequence: Synthetic oligonucleotide
agcuccugaguggugcagg

SEQ ID NO: 2528322 - RNA, 19 nt, Artificial Sequence
  Description of Artificial Sequence: Synthetic oligonucleotide
uggaggcagaauguuugga

SEQ ID NO: 2528323 - RNA, 19 nt, Artificial Sequence
  Description of Artificial Sequence: Synthetic oligonucleotide
ucugaucuugagcggcgua

SEQ ID NO: 2528324 - RNA, 19 nt, Artificial Sequence
  Description of Artificial Sequence: Synthetic oligonucleotide
gaggcagaauguuuggaau

SEQ ID NO: 2528325 - RNA, 19 nt, Artificial Sequence
  Description of Artificial Sequence: Synthetic oligonucleotide
cuugcacaagcggacggac

SEQ ID NO: 2528326 - RNA, 19 nt, Artificial Sequence
  Description of Artificial Sequence: Synthetic oligonucleotide
uacaggccuuucacaauau

SEQ ID NO: 2528327 - RNA, 19 nt, Artificial Sequence
  Description of Artificial Sequence: Synthetic oligonucleotide
cuauauccccuggaacuug

SEQ ID NO: 2528328 - RNA, 19 nt, Artificial Sequence
  Description of Artificial Sequence: Synthetic oligonucleotide
cucauccccagcucucuuc

SEQ ID NO: 2528329 - RNA, 19 nt, Artificial Sequence
  Description of Artificial Sequence: Synthetic oligonucleotide
agucuagcagcaauuguuu

SEQ ID NO: 2528330 - RNA, 19 nt, Artificial Sequence
  Description of Artificial Sequence: Synthetic oligonucleotide
aguucagauuccacagcug

SEQ ID NO: 2528331 - RNA, 19 nt, Artificial Sequence
  Description of Artificial Sequence: Synthetic oligonucleotide
cuccggaagaaaguacuuc

SEQ ID NO: 2528332 - RNA, 19 nt, Artificial Sequence
  Description of Artificial Sequence: Synthetic oligonucleotide
cucucuuccgggacugguc

SEQ ID NO: 2528333 - RNA, 19 nt, Artificial Sequence
  Description of Artificial Sequence: Synthetic oligonucleotide
gcuccuuagagacucgcuc

SEQ ID NO: 2528334 - RNA, 19 nt, Artificial Sequence
  Description of Artificial Sequence: Synthetic oligonucleotide
ggaggcagaauguuuggaa

SEQ ID NO: 2528335 - RNA, 19 nt, Artificial Sequence
  Description of Artificial Sequence: Synthetic oligonucleotide
augugcuugucugcaacgu

SEQ ID NO: 2528336 - RNA, 19 nt, Artificial Sequence
  Description of Artificial Sequence: Synthetic oligonucleotide
ccauaguugaaggugugac

SEQ ID NO: 2528337 - RNA, 19 nt, Artificial Sequence
  Description of Artificial Sequence: Synthetic oligonucleotide
ccauucuggucugagagug

SEQ ID NO: 2528338 - RNA, 19 nt, Artificial Sequence
  Description of Artificial Sequence: Synthetic oligonucleotide
gcuucugaucuugagcggc

SEQ ID NO: 2528339 - RNA, 19 nt, Artificial Sequence
  Description of Artificial Sequence: Synthetic oligonucleotide
cggacggacuguuauaagc

SEQ ID NO: 2528340 - RNA, 19 nt, Artificial Sequence
  Description of Artificial Sequence: Synthetic oligonucleotide
aagcggacggacuguuaua

SEQ ID NO: 2528341 - RNA, 19 nt, Artificial Sequence
  Description of Artificial Sequence: Synthetic oligonucleotide
cucuccggaagaaaguacu

SEQ ID NO: 2528342 - RNA, 19 nt, Artificial Sequence
  Description of Artificial Sequence: Synthetic oligonucleotide
cuguuauaagccaacucau

SEQ ID NO: 2528343 - RNA, 19 nt, Artificial Sequence
  Description of Artificial Sequence: Synthetic oligonucleotide
gccuuucacaauauuugcc

SEQ ID NO: 2528344 - RNA, 19 nt, Artificial Sequence
  Description of Artificial Sequence: Synthetic oligonucleotide
agcggacggacuguuauaa

SEQ ID NO: 2528345 - RNA, 19 nt, Artificial Sequence
  Description of Artificial Sequence: Synthetic oligonucleotide
acuugcacaagcggacgga

SEQ ID NO: 2528346 - RNA, 19 nt, Artificial Sequence
  Description of Artificial Sequence: Synthetic oligonucleotide
ugucuucucuccggaagaa

SEQ ID NO: 2528347 - RNA, 19 nt, Artificial Sequence
  Description of Artificial Sequence: Synthetic oligonucleotide
gauauagagucuggaggcu

SEQ ID NO: 2528348 - RNA, 19 nt, Artificial Sequence
  Description of Artificial Sequence: Synthetic oligonucleotide
cucuguuaaagcuuuuguu

SEQ ID NO: 2528349 - RNA, 19 nt, Artificial Sequence
  Description of Artificial Sequence: Synthetic oligonucleotide
ccuuucgauauagagucug

SEQ ID NO: 2528350 - RNA, 19 nt, Artificial Sequence
  Description of Artificial Sequence: Synthetic oligonucleotide
uucugaucuugagcggcgu

SEQ ID NO: 2528351 - RNA, 19 nt, Artificial Sequence
  Description of Artificial Sequence: Synthetic oligonucleotide
cuggugaaaccauucugua

SEQ ID NO: 2528352 - RNA, 19 nt, Artificial Sequence
  Description of Artificial Sequence: Synthetic oligonucleotide
gucugagaguguacaggcc

SEQ ID NO: 2528353 - RNA, 19 nt, Artificial Sequence
  Description of Artificial Sequence: Synthetic oligonucleotide
cauccccagcucucuuccg

SEQ ID NO: 2528354 - RNA, 19 nt, Artificial Sequence
  Description of Artificial Sequence: Synthetic oligonucleotide
acuggucaccucuggugaa

SEQ ID NO: 2528355 - RNA, 19 nt, Artificial Sequence
  Description of Artificial Sequence: Synthetic oligonucleotide
cuuucacaauauuugccau

SEQ ID NO: 2528356 - RNA, 19 nt, Artificial Sequence
  Description of Artificial Sequence: Synthetic oligonucleotide
gcggcauccucucugagaa

SEQ ID NO: 2528357 - RNA, 19 nt, Artificial Sequence
  Description of Artificial Sequence: Synthetic oligonucleotide
caucugaacccauucuggu

SEQ ID NO: 2528358 - RNA, 19 nt, Artificial Sequence
  Description of Artificial Sequence: Synthetic oligonucleotide
auucuguauaaggucucuu

SEQ ID NO: 2528359 - RNA, 19 nt, Artificial Sequence
  Description of Artificial Sequence: Synthetic oligonucleotide
uggugcaggccccgcugug

SEQ ID NO: 2528360 - RNA, 19 nt, Artificial Sequence
  Description of Artificial Sequence: Synthetic oligonucleotide
ugagaguguacaggccuuu

SEQ ID NO: 2528361 - RNA, 19 nt, Artificial Sequence
  Description of Artificial Sequence: Synthetic oligonucleotide
gucugcaacguguuccgua

SEQ ID NO: 2528362 - RNA, 19 nt, Artificial Sequence
  Description of Artificial Sequence: Synthetic oligonucleotide
acaggccuuucacaauauu

SEQ ID NO: 2528363 - RNA, 19 nt, Artificial Sequence
  Description of Artificial Sequence: Synthetic oligonucleotide
gugcaggccccgcugugcc

SEQ ID NO: 2528364 - RNA, 19 nt, Artificial Sequence
  Description of Artificial Sequence: Synthetic oligonucleotide
guguugacugggcuucuaa

SEQ ID NO: 2528365 - RNA, 19 nt, Artificial Sequence
  Description of Artificial Sequence: Synthetic oligonucleotide
caggccuuucacaauauuu

SEQ ID NO: 2528366 - RNA, 19 nt, Artificial Sequence
  Description of Artificial Sequence: Synthetic oligonucleotide
ccaagucuagcagcaauug

SEQ ID NO: 2528367 - RNA, 19 nt, Artificial Sequence
  Description of Artificial Sequence: Synthetic oligonucleotide
gagaguguacaggccuuuc

SEQ ID NO: 2528368 - RNA, 19 nt, Artificial Sequence
  Description of Artificial Sequence: Synthetic oligonucleotide
aggugugaccugaaauggu

SEQ ID NO: 2528369 - RNA, 19 nt, Artificial Sequence
  Description of Artificial Sequence: Synthetic oligonucleotide
ggcagaauguuuggaauaa

SEQ ID NO: 2528370 - RNA, 19 nt, Artificial Sequence
  Description of Artificial Sequence: Synthetic oligonucleotide
cagcuccuuagagacucgc

SEQ ID NO: 2528371 - RNA, 19 nt, Artificial Sequence
  Description of Artificial Sequence: Synthetic oligonucleotide
ccagugugucuucucuccg

SEQ ID NO: 2528372 - RNA, 19 nt, Artificial Sequence
  Description of Artificial Sequence: Synthetic oligonucleotide
ugaacccauucuggucuga

SEQ ID NO: 2528373 - RNA, 19 nt, Artificial Sequence
  Description of Artificial Sequence: Synthetic oligonucleotide
cuugagcggcguauucaga

SEQ ID NO: 2528374 - RNA, 19 nt, Artificial Sequence
  Description of Artificial Sequence: Synthetic oligonucleotide
agcggcguauucagaaagu

SEQ ID NO: 2528375 - RNA, 19 nt, Artificial Sequence
  Description of Artificial Sequence: Synthetic oligonucleotide
caagucuagcagcaauugu

SEQ ID NO: 2528376 - RNA, 19 nt, Artificial Sequence
  Description of Artificial Sequence: Synthetic oligonucleotide
gcauuaggcuguaaaaugu

SEQ ID NO: 2528377 - RNA, 19 nt, Artificial Sequence
  Description of Artificial Sequence: Synthetic oligonucleotide
ccauucuguauaaggucuc

SEQ ID NO: 2528378 - RNA, 19 nt, Artificial Sequence
  Description of Artificial Sequence: Synthetic oligonucleotide
caacagucacuaucuauau

SEQ ID NO: 2528379 - RNA, 19 nt, Artificial Sequence
  Description of Artificial Sequence: Synthetic oligonucleotide
ggucaccucuggugaaacc

SEQ ID NO: 2528380 - RNA, 19 nt, Artificial Sequence
  Description of Artificial Sequence: Synthetic oligonucleotide
gcguauucagaaaguucag

SEQ ID NO: 2528381 - RNA, 19 nt, Artificial Sequence
  Description of Artificial Sequence: Synthetic oligonucleotide
ugaguggugcaggccccgc

SEQ ID NO: 2528382 - RNA, 19 nt, Artificial Sequence
  Description of Artificial Sequence: Synthetic oligonucleotide
agcuccuuagagacucgcu

SEQ ID NO: 2528383 - RNA, 19 nt, Artificial Sequence
  Description of Artificial Sequence: Synthetic oligonucleotide
gugcuugucugcaacgugu

SEQ ID NO: 2528384 - RNA, 19 nt, Artificial Sequence
  Description of Artificial Sequence: Synthetic oligonucleotide
gcuccugaguggugcaggc

SEQ ID NO: 2528385 - RNA, 19 nt, Artificial Sequence
  Description of Artificial Sequence: Synthetic oligonucleotide
cuccugaguggugcaggcc

SEQ ID NO: 2528386 - RNA, 19 nt, Artificial Sequence
  Description of Artificial Sequence: Synthetic oligonucleotide
ggcuguaaaaugugcuugu

SEQ ID NO: 2528387 - RNA, 19 nt, Artificial Sequence
  Description of Artificial Sequence: Synthetic oligonucleotide
uggagccaucugaacccau

SEQ ID NO: 2528388 - RNA, 19 nt, Artificial Sequence
  Description of Artificial Sequence: Synthetic oligonucleotide
caagcggacggacuguuau

SEQ ID NO: 2528389 - RNA, 19 nt, Artificial Sequence
  Description of Artificial Sequence: Synthetic oligonucleotide
cacaaugcucugcaaugcu

SEQ ID NO: 2528390 - RNA, 19 nt, Artificial Sequence
  Description of Artificial Sequence: Synthetic oligonucleotide
cagcuuuuaauaagaucau

SEQ ID NO: 2528391 - RNA, 19 nt, Artificial Sequence
  Description of Artificial Sequence: Synthetic oligonucleotide
cccgcugugccuuggaaca

SEQ ID NO: 2528392 - RNA, 19 nt, Artificial Sequence
  Description of Artificial Sequence: Synthetic oligonucleotide
ugucugcaacguguuccgu

SEQ ID NO: 2528393 - RNA, 19 nt, Artificial Sequence
  Description of Artificial Sequence: Synthetic oligonucleotide
cggacuguuauaagccaac

SEQ ID NO: 2528394 - RNA, 19 nt, Artificial Sequence
  Description of Artificial Sequence: Synthetic oligonucleotide
uaaaggcauuaggcuguaa

SEQ ID NO: 2528395 - RNA, 19 nt, Artificial Sequence
  Description of Artificial Sequence: Synthetic oligonucleotide
ccugaguggugcaggcccc

SEQ ID NO: 2528396 - RNA, 19 nt, Artificial Sequence
  Description of Artificial Sequence: Synthetic oligonucleotide
gcucccauauacuguccca

SEQ ID NO: 2528397 - RNA, 19 nt, Artificial Sequence
  Description of Artificial Sequence: Synthetic oligonucleotide
gcuguaaaaugugcuuguc

SEQ ID NO: 2528398 - RNA, 19 nt, Artificial Sequence
  Description of Artificial Sequence: Synthetic oligonucleotide
accuuucgauauagagucu

SEQ ID NO: 2528399 - RNA, 19 nt, Artificial Sequence
  Description of Artificial Sequence: Synthetic oligonucleotide
ccguaaaacagcuuuuaau

SEQ ID NO: 2528400 - RNA, 19 nt, Artificial Sequence
  Description of Artificial Sequence: Synthetic oligonucleotide
agcucucuuccgggacugg

SEQ ID NO: 2528401 - RNA, 19 nt, Artificial Sequence
  Description of Artificial Sequence: Synthetic oligonucleotide
gucccagagcuaauauuaa

SEQ ID NO: 2528402 - RNA, 19 nt, Artificial Sequence
  Description of Artificial Sequence: Synthetic oligonucleotide
auauacugucccagagcua

SEQ ID NO: 2528403 - RNA, 19 nt, Artificial Sequence
  Description of Artificial Sequence: Synthetic oligonucleotide
gcggacggacuguuauaag

SEQ ID NO: 2528404 - RNA, 19 nt, Artificial Sequence
  Description of Artificial Sequence: Synthetic oligonucleotide
cauucuguauaaggucucu

SEQ ID NO: 2528405 - RNA, 19 nt, Artificial Sequence
  Description of Artificial Sequence: Synthetic oligonucleotide
gugcggcauccucucugag

SEQ ID NO: 2528406 - RNA, 19 nt, Artificial Sequence
  Description of Artificial Sequence: Synthetic oligonucleotide
auauccccuggaacuugca

SEQ ID NO: 2528407 - RNA, 19 nt, Artificial Sequence
  Description of Artificial Sequence: Synthetic oligonucleotide
ugguguugacugggcuucu

SEQ ID NO: 2528408 - RNA, 19 nt, Artificial Sequence
  Description of Artificial Sequence: Synthetic oligonucleotide
guugaaggugugaccugaa

SEQ ID NO: 2528409 - RNA, 19 nt, Artificial Sequence
  Description of Artificial Sequence: Synthetic oligonucleotide
gugugaccugaaauggugu

SEQ ID NO: 2528410 - RNA, 19 nt, Artificial Sequence
  Description of Artificial Sequence: Synthetic oligonucleotide
gucuagcagcaauuguuuu

SEQ ID NO: 2528411 - RNA, 19 nt, Artificial Sequence
  Description of Artificial Sequence: Synthetic oligonucleotide
cggcguauucagaaaguuc

SEQ ID NO: 2528412 - RNA, 19 nt, Artificial Sequence
  Description of Artificial Sequence: Synthetic oligonucleotide
ccccgcugugccuuggaac

SEQ ID NO: 2528413 - RNA, 19 nt, Artificial Sequence
  Description of Artificial Sequence: Synthetic oligonucleotide
cugaucuugagcggcguau

SEQ ID NO: 2528414 - RNA, 19 nt, Artificial Sequence
  Description of Artificial Sequence: Synthetic oligonucleotide
guuccguaaaacagcuuuu

SEQ ID NO: 2528415 - RNA, 19 nt, Artificial Sequence
  Description of Artificial Sequence: Synthetic oligonucleotide
cugucccagagcuaauauu

SEQ ID NO: 2528416 - RNA, 19 nt, Artificial Sequence
  Description of Artificial Sequence: Synthetic oligonucleotide
cauucuggucugagagugu

SEQ ID NO: 2528417 - RNA, 19 nt, Artificial Sequence
  Description of Artificial Sequence: Synthetic oligonucleotide
gccauaguugaagguguga

SEQ ID NO: 2528418 - RNA, 19 nt, Artificial Sequence
  Description of Artificial Sequence: Synthetic oligonucleotide
uuccgggacuggucaccuc

SEQ ID NO: 2528419 - RNA, 19 nt, Artificial Sequence
  Description of Artificial Sequence: Synthetic oligonucleotide
cguauucagaaaguucaga

SEQ ID NO: 2528420 - RNA, 19 nt, Artificial Sequence
  Description of Artificial Sequence: Synthetic oligonucleotide
cugagaguguacaggccuu

SEQ ID NO: 2528421 - RNA, 19 nt, Artificial Sequence
  Description of Artificial Sequence: Synthetic oligonucleotide
ccggaagaaaguacuucaa

SEQ ID NO: 2528422 - RNA, 19 nt, Artificial Sequence
  Description of Artificial Sequence: Synthetic oligonucleotide
ggacuguuauaagccaacu

SEQ ID NO: 2528423 - RNA, 19 nt, Artificial Sequence
  Description of Artificial Sequence: Synthetic oligonucleotide
caaagaagugcggcauccu

SEQ ID NO: 2528424 - RNA, 19 nt, Artificial Sequence
  Description of Artificial Sequence: Synthetic oligonucleotide
ccaacucauccccagcucu

SEQ ID NO: 2528425 - RNA, 19 nt, Artificial Sequence
  Description of Artificial Sequence: Synthetic oligonucleotide
cguguuccguaaaacagcu

SEQ ID NO: 2528426 - RNA, 19 nt, Artificial Sequence
  Description of Artificial Sequence: Synthetic oligonucleotide
gcagaauguuuggaauaaa

SEQ ID NO: 2528427 - RNA, 19 nt, Artificial Sequence
  Description of Artificial Sequence: Synthetic oligonucleotide
guacuucaacagucacuau

SEQ ID NO: 2528428 - RNA, 19 nt, Artificial Sequence
  Description of Artificial Sequence: Synthetic oligonucleotide
acaagcggacggacuguua

SEQ ID NO: 2528429 - RNA, 19 nt, Artificial Sequence
  Description of Artificial Sequence: Synthetic oligonucleotide
cugcaacguguuccguaaa

SEQ ID NO: 2528430 - RNA, 19 nt, Artificial Sequence
  Description of Artificial Sequence: Synthetic oligonucleotide
guggugcaggccccgcugu

SEQ ID NO: 2528431 - RNA, 19 nt, Artificial Sequence
  Description of Artificial Sequence: Synthetic oligonucleotide
gggacuggucaccucuggu

SEQ ID NO: 2528432 - RNA, 19 nt, Artificial Sequence
  Description of Artificial Sequence: Synthetic oligonucleotide
caggccccgcugugccuug

SEQ ID NO: 2528433 - RNA, 19 nt, Artificial Sequence
  Description of Artificial Sequence: Synthetic oligonucleotide
ccucuggugaaaccauucu

SEQ ID NO: 2528434 - RNA, 19 nt, Artificial Sequence
  Description of Artificial Sequence: Synthetic oligonucleotide
cuuccgggacuggucaccu

SEQ ID NO: 2528435 - RNA, 19 nt, Artificial Sequence
  Description of Artificial Sequence: Synthetic oligonucleotide
ccgggacuggucaccucug

SEQ ID NO: 2528436 - RNA, 19 nt, Artificial Sequence
  Description of Artificial Sequence: Synthetic oligonucleotide
aggccccgcugugccuugg

SEQ ID NO: 2528437 - RNA, 19 nt, Artificial Sequence
  Description of Artificial Sequence: Synthetic oligonucleotide
cccaagucuagcagcaauu

SEQ ID NO: 2528438 - RNA, 19 nt, Artificial Sequence
  Description of Artificial Sequence: Synthetic oligonucleotide
cccauucuggucugagagu

SEQ ID NO: 2528439 - RNA, 19 nt, Artificial Sequence
  Description of Artificial Sequence: Synthetic oligonucleotide
gguguugacugggcuucua

SEQ ID NO: 2528440 - RNA, 19 nt, Artificial Sequence
  Description of Artificial Sequence: Synthetic oligonucleotide
cugugccuuggaacaguuu

SEQ ID NO: 2528441 - RNA, 19 nt, Artificial Sequence
  Description of Artificial Sequence: Synthetic oligonucleotide
ccgcugugccuuggaacag

SEQ ID NO: 2528442 - RNA, 19 nt, Artificial Sequence
  Description of Artificial Sequence: Synthetic oligonucleotide
cacaagcggacggacuguu

SEQ ID NO: 2528443 - RNA, 19 nt, Artificial Sequence
  Description of Artificial Sequence: Synthetic oligonucleotide
gcggcguauucagaaaguu

SEQ ID NO: 2528444 - RNA, 19 nt, Artificial Sequence
  Description of Artificial Sequence: Synthetic oligonucleotide
gcucucuuccgggacuggu

SEQ ID NO: 2528445 - RNA, 19 nt, Artificial Sequence
  Description of Artificial Sequence: Synthetic oligonucleotide
ccccaagucuagcagcaau

SEQ ID NO: 2528446 - RNA, 19 nt, Artificial Sequence
  Description of Artificial Sequence: Synthetic oligonucleotide
guguuccguaaaacagcuu

SEQ ID NO: 2528447 - RNA, 19 nt, Artificial Sequence
  Description of Artificial Sequence: Synthetic oligonucleotide
ccccuggaacuugcacaag

SEQ ID NO: 2528448 - RNA, 19 nt, Artificial Sequence
  Description of Artificial Sequence: Synthetic oligonucleotide
gccccgcugugccuuggaa

SEQ ID NO: 2528449 - RNA, 19 nt, Artificial Sequence
  Description of Artificial Sequence: Synthetic oligonucleotide
gcucugcaaugcucccaua

SEQ ID NO: 2528450 - RNA, 19 nt, Artificial Sequence
  Description of Artificial Sequence: Synthetic oligonucleotide
ggccccgcugugccuugga

SEQ ID NO: 2528451 - RNA, 19 nt, Artificial Sequence
  Description of Artificial Sequence: Synthetic oligonucleotide
cggcauccucucugagaac

SEQ ID NO: 2528452 - RNA, 19 nt, Artificial Sequence
  Description of Artificial Sequence: Synthetic oligonucleotide
gcugugccuuggaacaguu

SEQ ID NO: 2528453 - RNA, 19 nt, Artificial Sequence
  Description of Artificial Sequence: Synthetic oligonucleotide
ggcuggccugcagcuccuu

SEQ ID NO: 2528454 - RNA, 19 nt, Artificial Sequence
  Description of Artificial Sequence: Synthetic oligonucleotide
aauagugggaaugugaucc

SEQ ID NO: 2528455 - RNA, 19 nt, Artificial Sequence
  Description of Artificial Sequence: Synthetic oligonucleotide
aucauauuaaucugaaucc

SEQ ID NO: 2528456 - RNA, 19 nt, Artificial Sequence
  Description of Artificial Sequence: Synthetic oligonucleotide
aaggacauguccaagaagc

SEQ ID NO: 2528457 - RNA, 19 nt, Artificial Sequence
  Description of Artificial Sequence: Synthetic oligonucleotide
ugauuuugguauauaaugg

SEQ ID NO: 2528458 - RNA, 19 nt, Artificial Sequence
  Description of Artificial Sequence: Synthetic oligonucleotide
ugaagucugaacaucacgg

SEQ ID NO: 2528459 - RNA, 19 nt, Artificial Sequence
  Description of Artificial Sequence: Synthetic oligonucleotide
aguucaaaccaucaaagcg

SEQ ID NO: 2528460 - RNA, 19 nt, Artificial Sequence
  Description of Artificial Sequence: Synthetic oligonucleotide
aacaucacggauuaaagca

SEQ ID NO: 2528461 - RNA, 19 nt, Artificial Sequence
  Description of Artificial Sequence: Synthetic oligonucleotide
ucagauuguacaaauaaga

SEQ ID NO: 2528462 - RNA, 19 nt, Artificial Sequence
  Description of Artificial Sequence: Synthetic oligonucleotide
uuaaucugaauccagcagc

SEQ ID NO: 2528463 - RNA, 19 nt, Artificial Sequence
  Description of Artificial Sequence: Synthetic oligonucleotide
gauuuugguauauaauggg

SEQ ID NO: 2528464 - RNA, 19 nt, Artificial Sequence
  Description of Artificial Sequence: Synthetic oligonucleotide
aaugcuaucuugguguccc

SEQ ID NO: 2528465 - RNA, 19 nt, Artificial Sequence
  Description of Artificial Sequence: Synthetic oligonucleotide
agguaagugaguucaaacc

SEQ ID NO: 2528466 - RNA, 19 nt, Artificial Sequence
  Description of Artificial Sequence: Synthetic oligonucleotide
uuuggagguaacacgaagg

SEQ ID NO: 2528467 - RNA, 19 nt, Artificial Sequence
  Description of Artificial Sequence: Synthetic oligonucleotide
ugaguucaaaccaucaaag

SEQ ID NO: 2528468 - RNA, 19 nt, Artificial Sequence
  Description of Artificial Sequence: Synthetic oligonucleotide
gugauuuugguauauaaug

SEQ ID NO: 2528469 - RNA, 19 nt, Artificial Sequence
  Description of Artificial Sequence: Synthetic oligonucleotide
uuuacacuggacaacaccu

SEQ ID NO: 2528470 - RNA, 19 nt, Artificial Sequence
  Description of Artificial Sequence: Synthetic oligonucleotide
uuaugaacuauucuguuaa

SEQ ID NO: 2528471 - RNA, 19 nt, Artificial Sequence
  Description of Artificial Sequence: Synthetic oligonucleotide
uauauaauggguaucucuc

SEQ ID NO: 2528472 - RNA, 19 nt, Artificial Sequence
  Description of Artificial Sequence: Synthetic oligonucleotide
cuuugugugagcaauccgg

SEQ ID NO: 2528473 - RNA, 19 nt, Artificial Sequence
  Description of Artificial Sequence: Synthetic oligonucleotide
uaaguuuugacuuguguac

SEQ ID NO: 2528474 - RNA, 19 nt, Artificial Sequence
  Description of Artificial Sequence: Synthetic oligonucleotide
cagaacaugagacugacug

SEQ ID NO: 2528475 - RNA, 19 nt, Artificial Sequence
  Description of Artificial Sequence: Synthetic oligonucleotide
aaagcaaaguucuuaccca

SEQ ID NO: 2528476 - RNA, 19 nt, Artificial Sequence
  Description of Artificial Sequence: Synthetic oligonucleotide
aaaccaucaaagcgcauag

SEQ ID NO: 2528477 - RNA, 19 nt, Artificial Sequence
  Description of Artificial Sequence: Synthetic oligonucleotide
ugaacaucacggauuaaag

SEQ ID NO: 2528478 - RNA, 19 nt, Artificial Sequence
  Description of Artificial Sequence: Synthetic oligonucleotide
aacuauucuguuaaaaugu

SEQ ID NO: 2528479 - RNA, 19 nt, Artificial Sequence
  Description of Artificial Sequence: Synthetic oligonucleotide
uuuuacacuggacaacacc

SEQ ID NO: 2528480 - RNA, 19 nt, Artificial Sequence
  Description of Artificial Sequence: Synthetic oligonucleotide
aagggaaacuaucauucag

SEQ ID NO: 2528481 - RNA, 19 nt, Artificial Sequence
  Description of Artificial Sequence: Synthetic oligonucleotide
ucccuuaugaacuauucug

SEQ ID NO: 2528482 - RNA, 19 nt, Artificial Sequence
  Description of Artificial Sequence: Synthetic oligonucleotide
auuugggcgugauauagac

SEQ ID NO: 2528483 - RNA, 19 nt, Artificial Sequence
  Description of Artificial Sequence: Synthetic oligonucleotide
aauguugcauucaccaugg

SEQ ID NO: 2528484 - RNA, 19 nt, Artificial Sequence
  Description of Artificial Sequence: Synthetic oligonucleotide
uugucgugaagucugaaca

SEQ ID NO: 2528485 - RNA, 19 nt, Artificial Sequence
  Description of Artificial Sequence: Synthetic oligonucleotide
auauuaaucugaauccagc

SEQ ID NO: 2528486 - RNA, 19 nt, Artificial Sequence
  Description of Artificial Sequence: Synthetic oligonucleotide
uauuaaucugaauccagca

SEQ ID NO: 2528487 - RNA, 19 nt, Artificial Sequence
  Description of Artificial Sequence: Synthetic oligonucleotide
uucaauagugggaauguga

SEQ ID NO: 2528488 - RNA, 19 nt, Artificial Sequence
  Description of Artificial Sequence: Synthetic oligonucleotide
agucgauuggcagagacac

SEQ ID NO: 2528489 - RNA, 19 nt, Artificial Sequence
  Description of Artificial Sequence: Synthetic oligonucleotide
uaauggguaucucucuacg

SEQ ID NO: 2528490 - RNA, 19 nt, Artificial Sequence
  Description of Artificial Sequence: Synthetic oligonucleotide
auucagauuguacaaauaa

SEQ ID NO: 2528491 - RNA, 19 nt, Artificial Sequence
  Description of Artificial Sequence: Synthetic oligonucleotide
uagacauucccuuaugaac

SEQ ID NO: 2528492 - RNA, 19 nt, Artificial Sequence
  Description of Artificial Sequence: Synthetic oligonucleotide
auaucugaggccccuggcc

SEQ ID NO: 2528493 - RNA, 19 nt, Artificial Sequence
  Description of Artificial Sequence: Synthetic oligonucleotide
uugacuuguguacaguucu

SEQ ID NO: 2528494 - RNA, 19 nt, Artificial Sequence
  Description of Artificial Sequence: Synthetic oligonucleotide
aacuacagcauuugggcgu

SEQ ID NO: 2528495 - RNA, 19 nt, Artificial Sequence
  Description of Artificial Sequence: Synthetic oligonucleotide
aacagaacaugagacugac

SEQ ID NO: 2528496 - RNA, 19 nt, Artificial Sequence
  Description of Artificial Sequence: Synthetic oligonucleotide
uucacaauuuagcaguuuc

SEQ ID NO: 2528497 - RNA, 19 nt, Artificial Sequence
  Description of Artificial Sequence: Synthetic oligonucleotide
cuaucauucagauuguaca

SEQ ID NO: 2528498 - RNA, 19 nt, Artificial Sequence
  Description of Artificial Sequence: Synthetic oligonucleotide
cauauuaaucugaauccag

SEQ ID NO: 2528499 - RNA, 19 nt, Artificial Sequence
  Description of Artificial Sequence: Synthetic oligonucleotide
uguugcauucaccaugggc

SEQ ID NO: 2528500 - RNA, 19 nt, Artificial Sequence
  Description of Artificial Sequence: Synthetic oligonucleotide
auaauggguaucucucuac

SEQ ID NO: 2528501 - RNA, 19 nt, Artificial Sequence
  Description of Artificial Sequence: Synthetic oligonucleotide
uugagugucguaucaugcg

SEQ ID NO: 2528502 - RNA, 19 nt, Artificial Sequence
  Description of Artificial Sequence: Synthetic oligonucleotide
uacaguucugcuucuuugg

SEQ ID NO: 2528503 - RNA, 19 nt, Artificial Sequence
  Description of Artificial Sequence: Synthetic oligonucleotide
ucaauagugggaaugugau

SEQ ID NO: 2528504 - RNA, 19 nt, Artificial Sequence
  Description of Artificial Sequence: Synthetic oligonucleotide
uauagacauucccuuauga

SEQ ID NO: 2528505 - RNA, 19 nt, Artificial Sequence
  Description of Artificial Sequence: Synthetic oligonucleotide
uugggcgugauauagacau

SEQ ID NO: 2528506 - RNA, 19 nt, Artificial Sequence
  Description of Artificial Sequence: Synthetic oligonucleotide
uaucucucuacguucaaca

SEQ ID NO: 2528507 - RNA, 19 nt, Artificial Sequence
  Description of Artificial Sequence: Synthetic oligonucleotide
ucuaaguuuugacuugugu

SEQ ID NO: 2528508 - RNA, 19 nt, Artificial Sequence
  Description of Artificial Sequence: Synthetic oligonucleotide
uaacacgaaggacaugucc

SEQ ID NO: 2528509 - RNA, 19 nt, Artificial Sequence
  Description of Artificial Sequence: Synthetic oligonucleotide
agaguaucauauuaaucug

SEQ ID NO: 2528510 - RNA, 19 nt, Artificial Sequence
  Description of Artificial Sequence: Synthetic oligonucleotide
gaacaucacggauuaaagc

SEQ ID NO: 2528511 - RNA, 19 nt, Artificial Sequence
  Description of Artificial Sequence: Synthetic oligonucleotide
uuguguacaguucugcuuc

SEQ ID NO: 2528512 - RNA, 19 nt, Artificial Sequence
  Description of Artificial Sequence: Synthetic oligonucleotide
caauuugucgugaagucug

SEQ ID NO: 2528513 - RNA, 19 nt, Artificial Sequence
  Description of Artificial Sequence: Synthetic oligonucleotide
ucuacguucaacaccuggu

SEQ ID NO: 2528514 - RNA, 19 nt, Artificial Sequence
  Description of Artificial Sequence: Synthetic oligonucleotide
acggauuaaagcaaaguuc

SEQ ID NO: 2528515 - RNA, 19 nt, Artificial Sequence
  Description of Artificial Sequence: Synthetic oligonucleotide
ugagcaauccggucaaacc

SEQ ID NO: 2528516 - RNA, 19 nt, Artificial Sequence
  Description of Artificial Sequence: Synthetic oligonucleotide
uuaaagcaaaguucuuacc

SEQ ID NO: 2528517 - RNA, 19 nt, Artificial Sequence
  Description of Artificial Sequence: Synthetic oligonucleotide
cuugagugucguaucaugc

SEQ ID NO: 2528518 - RNA, 19 nt, Artificial Sequence
  Description of Artificial Sequence: Synthetic oligonucleotide
acguucaacaccugguagg

SEQ ID NO: 2528519 - RNA, 19 nt, Artificial Sequence
  Description of Artificial Sequence: Synthetic oligonucleotide
uucaacaccugguagguaa

SEQ ID NO: 2528520 - RNA, 19 nt, Artificial Sequence
  Description of Artificial Sequence: Synthetic oligonucleotide
uacccauuucacaauuuag

SEQ ID NO: 2528521 - RNA, 19 nt, Artificial Sequence
  Description of Artificial Sequence: Synthetic oligonucleotide
uauuuguuccacaaugcua

SEQ ID NO: 2528522 - RNA, 19 nt, Artificial Sequence
  Description of Artificial Sequence: Synthetic oligonucleotide
uaucauucagauuguacaa

SEQ ID NO: 2528523 - RNA, 19 nt, Artificial Sequence
  Description of Artificial Sequence: Synthetic oligonucleotide
uuggagguaacacgaagga

SEQ ID NO: 2528524 - RNA, 19 nt, Artificial Sequence
  Description of Artificial Sequence: Synthetic oligonucleotide
agagggaccagcccagucg

SEQ ID NO: 2528525 - RNA, 19 nt, Artificial Sequence
  Description of Artificial Sequence: Synthetic oligonucleotide
ucaagaguaucauauuaau

SEQ ID NO: 2528526 - RNA, 19 nt, Artificial Sequence
  Description of Artificial Sequence: Synthetic oligonucleotide
ucauauuaaucugaaucca

SEQ ID NO: 2528527 - RNA, 19 nt, Artificial Sequence
  Description of Artificial Sequence: Synthetic oligonucleotide
ugauccacagucucuaagu

SEQ ID NO: 2528528 - RNA, 19 nt, Artificial Sequence
  Description of Artificial Sequence: Synthetic oligonucleotide
aaguucuuacccauuucac

SEQ ID NO: 2528529 - RNA, 19 nt, Artificial Sequence
  Description of Artificial Sequence: Synthetic oligonucleotide
acuaucauucagauuguac

SEQ ID NO: 2528530 - RNA, 19 nt, Artificial Sequence
  Description of Artificial Sequence: Synthetic oligonucleotide
ucacaauuuagcaguuuca

SEQ ID NO: 2528531 - RNA, 19 nt, Artificial Sequence
  Description of Artificial Sequence: Synthetic oligonucleotide
ugcgacaucuuccaacuac

SEQ ID NO: 2528532 - RNA, 19 nt, Artificial Sequence
  Description of Artificial Sequence: Synthetic oligonucleotide
aacacgaaggacaugucca

SEQ ID NO: 2528533 - RNA, 19 nt, Artificial Sequence
  Description of Artificial Sequence: Synthetic oligonucleotide
uacguucaacaccugguag

SEQ ID NO: 2528534 - RNA, 19 nt, Artificial Sequence
  Description of Artificial Sequence: Synthetic oligonucleotide
auuuucaggucucuuauuu

SEQ ID NO: 2528535 - RNA, 19 nt, Artificial Sequence
  Description of Artificial Sequence: Synthetic oligonucleotide
aauggguaucucucuacgu

SEQ ID NO: 2528536 - RNA, 19 nt, Artificial Sequence
  Description of Artificial Sequence: Synthetic oligonucleotide
ugguagguaagugaguuca

SEQ ID NO: 2528537 - RNA, 19 nt, Artificial Sequence
  Description of Artificial Sequence: Synthetic oligonucleotide
gugaagucugaacaucacg

SEQ ID NO: 2528538 - RNA, 19 nt, Artificial Sequence
  Description of Artificial Sequence: Synthetic oligonucleotide
ugguauauaauggguaucu

SEQ ID NO: 2528539 - RNA, 19 nt, Artificial Sequence
  Description of Artificial Sequence: Synthetic oligonucleotide
aguucuuacccauuucaca

SEQ ID NO: 2528540 - RNA, 19 nt, Artificial Sequence
  Description of Artificial Sequence: Synthetic oligonucleotide
aauucaagaguaucauauu

SEQ ID NO: 2528541 - RNA, 19 nt, Artificial Sequence
  Description of Artificial Sequence: Synthetic oligonucleotide
cugaaugacagcaagggaa

SEQ ID NO: 2528542 - RNA, 19 nt, Artificial Sequence
  Description of Artificial Sequence: Synthetic oligonucleotide
uaucaugcgacaucuucca

SEQ ID NO: 2528543 - RNA, 19 nt, Artificial Sequence
  Description of Artificial Sequence: Synthetic oligonucleotide
uaucuuggugucccgaugu

SEQ ID NO: 2528544 - RNA, 19 nt, Artificial Sequence
  Description of Artificial Sequence: Synthetic oligonucleotide
ugagugucguaucaugcga

SEQ ID NO: 2528545 - RNA, 19 nt, Artificial Sequence
  Description of Artificial Sequence: Synthetic oligonucleotide
uagguaagugaguucaaac

SEQ ID NO: 2528546 - RNA, 19 nt, Artificial Sequence
  Description of Artificial Sequence: Synthetic oligonucleotide
uacacuggacaacaccuug

SEQ ID NO: 2528547 - RNA, 19 nt, Artificial Sequence
  Description of Artificial Sequence: Synthetic oligonucleotide
agucucuaaguuuugacuu

SEQ ID NO: 2528548 - RNA, 19 nt, Artificial Sequence
  Description of Artificial Sequence: Synthetic oligonucleotide
uuuucaggucucuuauuug

SEQ ID NO: 2528549 - RNA, 19 nt, Artificial Sequence
  Description of Artificial Sequence: Synthetic oligonucleotide
ucugaaugacagcaaggga

SEQ ID NO: 2528550 - RNA, 19 nt, Artificial Sequence
  Description of Artificial Sequence: Synthetic oligonucleotide
aguuuugacuuguguacag

SEQ ID NO: 2528551 - RNA, 19 nt, Artificial Sequence
  Description of Artificial Sequence: Synthetic oligonucleotide
uggacaacaccuuggagaa

SEQ ID NO: 2528552 - RNA, 19 nt, Artificial Sequence
  Description of Artificial Sequence: Synthetic oligonucleotide
auuuguuccacaaugcuau

SEQ ID NO: 2528553 - RNA, 19 nt, Artificial Sequence
  Description of Artificial Sequence: Synthetic oligonucleotide
ucauucagauuguacaaau

SEQ ID NO: 2528554 - RNA, 19 nt, Artificial Sequence
  Description of Artificial Sequence: Synthetic oligonucleotide
uuugugugagcaauccggu

SEQ ID NO: 2528555 - RNA, 19 nt, Artificial Sequence
  Description of Artificial Sequence: Synthetic oligonucleotide
aagcgcauaguuuccuuug

SEQ ID NO: 2528556 - RNA, 19 nt, Artificial Sequence
  Description of Artificial Sequence: Synthetic oligonucleotide
uuugacuuguguacaguuc

SEQ ID NO: 2528557 - RNA, 19 nt, Artificial Sequence
  Description of Artificial Sequence: Synthetic oligonucleotide
ucucuuauuuguuccacaa

SEQ ID NO: 2528558 - RNA, 19 nt, Artificial Sequence
  Description of Artificial Sequence: Synthetic oligonucleotide
cuggacaacaccuuggaga

SEQ ID NO: 2528559 - RNA, 19 nt, Artificial Sequence
  Description of Artificial Sequence: Synthetic oligonucleotide
aucucucuacguucaacac

SEQ ID NO: 2528560 - RNA, 19 nt, Artificial Sequence
  Description of Artificial Sequence: Synthetic oligonucleotide
uuugucgugaagucugaac

SEQ ID NO: 2528561 - RNA, 19 nt, Artificial Sequence
  Description of Artificial Sequence: Synthetic oligonucleotide
ucgugaagucugaacauca

SEQ ID NO: 2528562 - RNA, 19 nt, Artificial Sequence
  Description of Artificial Sequence: Synthetic oligonucleotide
uauaauggguaucucucua

SEQ ID NO: 2528563 - RNA, 19 nt, Artificial Sequence
  Description of Artificial Sequence: Synthetic oligonucleotide
auauaauggguaucucucu

SEQ ID NO: 2528564 - RNA, 19 nt, Artificial Sequence
  Description of Artificial Sequence: Synthetic oligonucleotide
ucaugcgacaucuuccaac

SEQ ID NO: 2528565 - RNA, 19 nt, Artificial Sequence
  Description of Artificial Sequence: Synthetic oligonucleotide
uaucugaggccccuggcca

SEQ ID NO: 2528566 - RNA, 19 nt, Artificial Sequence
  Description of Artificial Sequence: Synthetic oligonucleotide
caacuacagcauuugggcg

SEQ ID NO: 2528567 - RNA, 19 nt, Artificial Sequence
  Description of Artificial Sequence: Synthetic oligonucleotide
cuaaguuuugacuugugua

SEQ ID NO: 2528568 - RNA, 19 nt, Artificial Sequence
  Description of Artificial Sequence: Synthetic oligonucleotide
ucaauuugucgugaagucu

SEQ ID NO: 2528569 - RNA, 19 nt, Artificial Sequence
  Description of Artificial Sequence: Synthetic oligonucleotide
aagcaaaguucuuacccau

SEQ ID NO: 2528570 - RNA, 19 nt, Artificial Sequence
  Description of Artificial Sequence: Synthetic oligonucleotide
cuuuggagguaacacgaag

SEQ ID NO: 2528571 - RNA, 19 nt, Artificial Sequence
  Description of Artificial Sequence: Synthetic oligonucleotide
ucuugucucuugagugucg

SEQ ID NO: 2528572 - RNA, 19 nt, Artificial Sequence
  Description of Artificial Sequence: Synthetic oligonucleotide
uucccuuaugaacuauucu

SEQ ID NO: 2528573 - RNA, 19 nt, Artificial Sequence
  Description of Artificial Sequence: Synthetic oligonucleotide
aggaacagaacaugagacu

SEQ ID NO: 2528574 - RNA, 19 nt, Artificial Sequence
  Description of Artificial Sequence: Synthetic oligonucleotide
caggucucuuauuuguucc

SEQ ID NO: 2528575 - RNA, 19 nt, Artificial Sequence
  Description of Artificial Sequence: Synthetic oligonucleotide
acaaugcuaucuugguguc

SEQ ID NO: 2528576 - RNA, 19 nt, Artificial Sequence
  Description of Artificial Sequence: Synthetic oligonucleotide
acaugagacugacugaaau

SEQ ID NO: 2528577 - RNA, 19 nt, Artificial Sequence
  Description of Artificial Sequence: Synthetic oligonucleotide
accaucaaagcgcauaguu

SEQ ID NO: 2528578 - RNA, 19 nt, Artificial Sequence
  Description of Artificial Sequence: Synthetic oligonucleotide
gauuaaagcaaaguucuua

SEQ ID NO: 2528579 - RNA, 19 nt, Artificial Sequence
  Description of Artificial Sequence: Synthetic oligonucleotide
auauagacauucccuuaug

SEQ ID NO: 2528580 - RNA, 19 nt, Artificial Sequence
  Description of Artificial Sequence: Synthetic oligonucleotide
guaucaugcgacaucuucc

SEQ ID NO: 2528581 - RNA, 19 nt, Artificial Sequence
  Description of Artificial Sequence: Synthetic oligonucleotide
cugggaaggugucugaaug

SEQ ID NO: 2528582 - RNA, 19 nt, Artificial Sequence
  Description of Artificial Sequence: Synthetic oligonucleotide
agaacaugagacugacuga

SEQ ID NO: 2528583 - RNA, 19 nt, Artificial Sequence
  Description of Artificial Sequence: Synthetic oligonucleotide
aaagcgcauaguuuccuuu

SEQ ID NO: 2528584 - RNA, 19 nt, Artificial Sequence
  Description of Artificial Sequence: Synthetic oligonucleotide
cucuacguucaacaccugg

SEQ ID NO: 2528585 - RNA, 19 nt, Artificial Sequence
  Description of Artificial Sequence: Synthetic oligonucleotide
ugauauagacauucccuua

SEQ ID NO: 2528586 - RNA, 19 nt, Artificial Sequence
  Description of Artificial Sequence: Synthetic oligonucleotide
ucaacaccugguagguaag

SEQ ID NO: 2528587 - RNA, 19 nt, Artificial Sequence
  Description of Artificial Sequence: Synthetic oligonucleotide
aucaaagcgcauaguuucc

SEQ ID NO: 2528588 - RNA, 19 nt, Artificial Sequence
  Description of Artificial Sequence: Synthetic oligonucleotide
guauauaauggguaucucu

SEQ ID NO: 2528589 - RNA, 19 nt, Artificial Sequence
  Description of Artificial Sequence: Synthetic oligonucleotide
agugaguucaaaccaucaa

SEQ ID NO: 2528590 - RNA, 19 nt, Artificial Sequence
  Description of Artificial Sequence: Synthetic oligonucleotide
ucgauuggcagagacacau

SEQ ID NO: 2528591 - RNA, 19 nt, Artificial Sequence
  Description of Artificial Sequence: Synthetic oligonucleotide
auucccuuaugaacuauuc

SEQ ID NO: 2528592 - RNA, 19 nt, Artificial Sequence
  Description of Artificial Sequence: Synthetic oligonucleotide
gugaguucaaaccaucaaa

SEQ ID NO: 2528593 - RNA, 19 nt, Artificial Sequence
  Description of Artificial Sequence: Synthetic oligonucleotide
gagacacauaucugaggcc

SEQ ID NO: 2528594 - RNA, 19 nt, Artificial Sequence
  Description of Artificial Sequence: Synthetic oligonucleotide
gaagucugaacaucacgga

SEQ ID NO: 2528595 - RNA, 19 nt, Artificial Sequence
  Description of Artificial Sequence: Synthetic oligonucleotide
uccagcagcagucuucaau

SEQ ID NO: 2528596 - RNA, 19 nt, Artificial Sequence
  Description of Artificial Sequence: Synthetic oligonucleotide
ucuuacccauuucacaauu

SEQ ID NO: 2528597 - RNA, 19 nt, Artificial Sequence
  Description of Artificial Sequence: Synthetic oligonucleotide
ugucguaucaugcgacauc

SEQ ID NO: 2528598 - RNA, 19 nt, Artificial Sequence
  Description of Artificial Sequence: Synthetic oligonucleotide
aacaccugguagguaagug

SEQ ID NO: 2528599 - RNA, 19 nt, Artificial Sequence
  Description of Artificial Sequence: Synthetic oligonucleotide
acaccugguagguaaguga

SEQ ID NO: 2528600 - RNA, 19 nt, Artificial Sequence
  Description of Artificial Sequence: Synthetic oligonucleotide
cacaaugcuaucuuggugu

SEQ ID NO: 2528601 - RNA, 19 nt, Artificial Sequence
  Description of Artificial Sequence: Synthetic oligonucleotide
ugucccgauguccacugug

SEQ ID NO: 2528602 - RNA, 19 nt, Artificial Sequence
  Description of Artificial Sequence: Synthetic oligonucleotide
ggagguaacacgaaggaca

SEQ ID NO: 2528603 - RNA, 19 nt, Artificial Sequence
  Description of Artificial Sequence: Synthetic oligonucleotide
gaguaucauauuaaucuga

SEQ ID NO: 2528604 - RNA, 19 nt, Artificial Sequence
  Description of Artificial Sequence: Synthetic oligonucleotide
agcaagggaaacuaucauu

SEQ ID NO: 2528605 - RNA, 19 nt, Artificial Sequence
  Description of Artificial Sequence: Synthetic oligonucleotide
gaacaugagacugacugaa

SEQ ID NO: 2528606 - RNA, 19 nt, Artificial Sequence
  Description of Artificial Sequence: Synthetic oligonucleotide
gauauagacauucccuuau

SEQ ID NO: 2528607 - RNA, 19 nt, Artificial Sequence
  Description of Artificial Sequence: Synthetic oligonucleotide
ugucucuugagugucguau

SEQ ID NO: 2528608 - RNA, 19 nt, Artificial Sequence
  Description of Artificial Sequence: Synthetic oligonucleotide
uggguaucucucuacguuc

SEQ ID NO: 2528609 - RNA, 19 nt, Artificial Sequence
  Description of Artificial Sequence: Synthetic oligonucleotide
ucacggauuaaagcaaagu

SEQ ID NO: 2528610 - RNA, 19 nt, Artificial Sequence
  Description of Artificial Sequence: Synthetic oligonucleotide
uuucaauagugggaaugug

SEQ ID NO: 2528611 - RNA, 19 nt, Artificial Sequence
  Description of Artificial Sequence: Synthetic oligonucleotide
ugacuuguguacaguucug

SEQ ID NO: 2528612 - RNA, 19 nt, Artificial Sequence
  Description of Artificial Sequence: Synthetic oligonucleotide
uuugggcgugauauagaca

SEQ ID NO: 2528613 - RNA, 19 nt, Artificial Sequence
  Description of Artificial Sequence: Synthetic oligonucleotide
acagcaagggaaacuauca

SEQ ID NO: 2528614 - RNA, 19 nt, Artificial Sequence
  Description of Artificial Sequence: Synthetic oligonucleotide
aggacauguccaagaagcc

SEQ ID NO: 2528615 - RNA, 19 nt, Artificial Sequence
  Description of Artificial Sequence: Synthetic oligonucleotide
uguacaguucugcuucuuu

SEQ ID NO: 2528616 - RNA, 19 nt, Artificial Sequence
  Description of Artificial Sequence: Synthetic oligonucleotide
ugggaaggugucugaauga

SEQ ID NO: 2528617 - RNA, 19 nt, Artificial Sequence
  Description of Artificial Sequence: Synthetic oligonucleotide
gacuuguguacaguucugc

SEQ ID NO: 2528618 - RNA, 19 nt, Artificial Sequence
  Description of Artificial Sequence: Synthetic oligonucleotide
agcaguuucaauaguggga

SEQ ID NO: 2528619 - RNA, 19 nt, Artificial Sequence
  Description of Artificial Sequence: Synthetic oligonucleotide
aaucugaauccagcagcag

SEQ ID NO: 2528620 - RNA, 19 nt, Artificial Sequence
  Description of Artificial Sequence: Synthetic oligonucleotide
gcauaguuuccuuugugug

SEQ ID NO: 2528621 - RNA, 19 nt, Artificial Sequence
  Description of Artificial Sequence: Synthetic oligonucleotide
auggguaucucucuacguu

SEQ ID NO: 2528622 - RNA, 19 nt, Artificial Sequence
  Description of Artificial Sequence: Synthetic oligonucleotide
ugucgugaagucugaacau

SEQ ID NO: 2528623 - RNA, 19 nt, Artificial Sequence
  Description of Artificial Sequence: Synthetic oligonucleotide
cuuaugaacuauucuguua

SEQ ID NO: 2528624 - RNA, 19 nt, Artificial Sequence
  Description of Artificial Sequence: Synthetic oligonucleotide
agaauguugcauucaccau

SEQ ID NO: 2528625 - RNA, 19 nt, Artificial Sequence
  Description of Artificial Sequence: Synthetic oligonucleotide
agggaaacuaucauucaga

SEQ ID NO: 2528626 - RNA, 19 nt, Artificial Sequence
  Description of Artificial Sequence: Synthetic oligonucleotide
gagcaauccggucaaaccu

SEQ ID NO: 2528627 - RNA, 19 nt, Artificial Sequence
  Description of Artificial Sequence: Synthetic oligonucleotide
ucuuggugucccgaugucc

SEQ ID NO: 2528628 - RNA, 19 nt, Artificial Sequence
  Description of Artificial Sequence: Synthetic oligonucleotide
cucucuacguucaacaccu

SEQ ID NO: 2528629 - RNA, 19 nt, Artificial Sequence
  Description of Artificial Sequence: Synthetic oligonucleotide
cauaucugaggccccuggc

SEQ ID NO: 2528630 - RNA, 19 nt, Artificial Sequence
  Description of Artificial Sequence: Synthetic oligonucleotide
ugaggauugggcucauuuu

SEQ ID NO: 2528631 - RNA, 19 nt, Artificial Sequence
  Description of Artificial Sequence: Synthetic oligonucleotide
guuccacaaugcuaucuug

SEQ ID NO: 2528632 - RNA, 19 nt, Artificial Sequence
  Description of Artificial Sequence: Synthetic oligonucleotide
gcaagggaaacuaucauuc

SEQ ID NO: 2528633 - RNA, 19 nt, Artificial Sequence
  Description of Artificial Sequence: Synthetic oligonucleotide
uaugaacuauucuguuaaa

SEQ ID NO: 2528634 - RNA, 19 nt, Artificial Sequence
  Description of Artificial Sequence: Synthetic oligonucleotide
agcaauccggucaaaccuc

SEQ ID NO: 2528635 - RNA, 19 nt, Artificial Sequence
  Description of Artificial Sequence: Synthetic oligonucleotide
augaacuauucuguuaaaa

SEQ ID NO: 2528636 - RNA, 19 nt, Artificial Sequence
  Description of Artificial Sequence: Synthetic oligonucleotide
auuggcagagacacauauc

SEQ ID NO: 2528637 - RNA, 19 nt, Artificial Sequence
  Description of Artificial Sequence: Synthetic oligonucleotide
gauuggcagagacacauau

SEQ ID NO: 2528638 - RNA, 19 nt, Artificial Sequence
  Description of Artificial Sequence: Synthetic oligonucleotide
aguuuccuuugugugagca

SEQ ID NO: 2528639 - RNA, 19 nt, Artificial Sequence
  Description of Artificial Sequence: Synthetic oligonucleotide
cuuccaacuacagcauuug

SEQ ID NO: 2528640 - RNA, 19 nt, Artificial Sequence
  Description of Artificial Sequence: Synthetic oligonucleotide
agaauuucauccagugcca

SEQ ID NO: 2528641 - RNA, 19 nt, Artificial Sequence
  Description of Artificial Sequence: Synthetic oligonucleotide
ucaaagcgcauaguuuccu

SEQ ID NO: 2528642 - RNA, 19 nt, Artificial Sequence
  Description of Artificial Sequence: Synthetic oligonucleotide
acacuggacaacaccuugg

SEQ ID NO: 2528643 - RNA, 19 nt, Artificial Sequence
  Description of Artificial Sequence: Synthetic oligonucleotide
ucaaaccucugaggauugg

SEQ ID NO: 2528644 - RNA, 19 nt, Artificial Sequence
  Description of Artificial Sequence: Synthetic oligonucleotide
aauuugucgugaagucuga

SEQ ID NO: 2528645 - RNA, 19 nt, Artificial Sequence
  Description of Artificial Sequence: Synthetic oligonucleotide
auagugggaaugugaucca

SEQ ID NO: 2528646 - RNA, 19 nt, Artificial Sequence
  Description of Artificial Sequence: Synthetic oligonucleotide
caauagugggaaugugauc

SEQ ID NO: 2528647 - RNA, 19 nt, Artificial Sequence
  Description of Artificial Sequence: Synthetic oligonucleotide
uucuuacccauuucacaau

SEQ ID NO: 2528648 - RNA, 19 nt, Artificial Sequence
  Description of Artificial Sequence: Synthetic oligonucleotide
cugaacaucacggauuaaa

SEQ ID NO: 2528649 - RNA, 19 nt, Artificial Sequence
  Description of Artificial Sequence: Synthetic oligonucleotide
gguaacacgaaggacaugu

SEQ ID NO: 2528650 - RNA, 19 nt, Artificial Sequence
  Description of Artificial Sequence: Synthetic oligonucleotide
cuaucuuggugucccgaug

SEQ ID NO: 2528651 - RNA, 19 nt, Artificial Sequence
  Description of Artificial Sequence: Synthetic oligonucleotide
ucugggaaggugucugaau

SEQ ID NO: 2528652 - RNA, 19 nt, Artificial Sequence
  Description of Artificial Sequence: Synthetic oligonucleotide
gcauuugggcgugauauag

SEQ ID NO: 2528653 - RNA, 19 nt, Artificial Sequence
  Description of Artificial Sequence: Synthetic oligonucleotide
uggagguaacacgaaggac

SEQ ID NO: 2528654 - RNA, 19 nt, Artificial Sequence
  Description of Artificial Sequence: Synthetic oligonucleotide
aggucucuuauuuguucca

SEQ ID NO: 2528655 - RNA, 19 nt, Artificial Sequence
  Description of Artificial Sequence: Synthetic oligonucleotide
uguguacaguucugcuucu

SEQ ID NO: 2528656 - RNA, 19 nt, Artificial Sequence
  Description of Artificial Sequence: Synthetic oligonucleotide
auuguacaaauaagaggga

SEQ ID NO: 2528657 - RNA, 19 nt, Artificial Sequence
  Description of Artificial Sequence: Synthetic oligonucleotide
gcagucuucaauuugucgu

SEQ ID NO: 2528658 - RNA, 19 nt, Artificial Sequence
  Description of Artificial Sequence: Synthetic oligonucleotide
accagcccagucgauuggc

SEQ ID NO: 2528659 - RNA, 19 nt, Artificial Sequence
  Description of Artificial Sequence: Synthetic oligonucleotide
agcgcauaguuuccuuugu

SEQ ID NO: 2528660 - RNA, 19 nt, Artificial Sequence
  Description of Artificial Sequence: Synthetic oligonucleotide
uuccuuugugugagcaauc

SEQ ID NO: 2528661 - RNA, 19 nt, Artificial Sequence
  Description of Artificial Sequence: Synthetic oligonucleotide
auccacagucucuaaguuu

SEQ ID NO: 2528662 - RNA, 19 nt, Artificial Sequence
  Description of Artificial Sequence: Synthetic oligonucleotide
gcgugauauagacauuccc

SEQ ID NO: 2528663 - RNA, 19 nt, Artificial Sequence
  Description of Artificial Sequence: Synthetic oligonucleotide
gaccagcccagucgauugg

SEQ ID NO: 2528664 - RNA, 19 nt, Artificial Sequence
  Description of Artificial Sequence: Synthetic oligonucleotide
caagaagccuccaaaggcu

SEQ ID NO: 2528665 - RNA, 19 nt, Artificial Sequence
  Description of Artificial Sequence: Synthetic oligonucleotide
ugaauccagcagcagucuu

SEQ ID NO: 2528666 - RNA, 19 nt, Artificial Sequence
  Description of Artificial Sequence: Synthetic oligonucleotide
gggagaauguugcauucac

SEQ ID NO: 2528667 - RNA, 19 nt, Artificial Sequence
  Description of Artificial Sequence: Synthetic oligonucleotide
agcccagucgauuggcaga

SEQ ID NO: 2528668 - RNA, 19 nt, Artificial Sequence
  Description of Artificial Sequence: Synthetic oligonucleotide
acuacagcauuugggcgug

SEQ ID NO: 2528669 - RNA, 19 nt, Artificial Sequence
  Description of Artificial Sequence: Synthetic oligonucleotide
caagggaaacuaucauuca

SEQ ID NO: 2528670 - RNA, 19 nt, Artificial Sequence
  Description of Artificial Sequence: Synthetic oligonucleotide
gucucuuauuuguuccaca

SEQ ID NO: 2528671 - RNA, 19 nt, Artificial Sequence
  Description of Artificial Sequence: Synthetic oligonucleotide
caaaccaucaaagcgcaua

SEQ ID NO: 2528672 - RNA, 19 nt, Artificial Sequence
  Description of Artificial Sequence: Synthetic oligonucleotide
gacacauaucugaggcccc

SEQ ID NO: 2528673 - RNA, 19 nt, Artificial Sequence
  Description of Artificial Sequence: Synthetic oligonucleotide
gagggaccagcccagucga

SEQ ID NO: 2528674 - RNA, 19 nt, Artificial Sequence
  Description of Artificial Sequence: Synthetic oligonucleotide
caugcgacaucuuccaacu

SEQ ID NO: 2528675 - RNA, 19 nt, Artificial Sequence
  Description of Artificial Sequence: Synthetic oligonucleotide
aucacggauuaaagcaaag

SEQ ID NO: 2528676 - RNA, 19 nt, Artificial Sequence
  Description of Artificial Sequence: Synthetic oligonucleotide
acaucacggauuaaagcaa

SEQ ID NO: 2528677 - RNA, 19 nt, Artificial Sequence
  Description of Artificial Sequence: Synthetic oligonucleotide
cagugccaagccagguugg

SEQ ID NO: 2528678 - RNA, 19 nt, Artificial Sequence
  Description of Artificial Sequence: Synthetic oligonucleotide
aacuaucauucagauugua

SEQ ID NO: 2528679 - RNA, 19 nt, Artificial Sequence
  Description of Artificial Sequence: Synthetic oligonucleotide
cagucucuaaguuuugacu

SEQ ID NO: 2528680 - RNA, 19 nt, Artificial Sequence
  Description of Artificial Sequence: Synthetic oligonucleotide
gacaacaccuuggagaauu

SEQ ID NO: 2528681 - RNA, 19 nt, Artificial Sequence
  Description of Artificial Sequence: Synthetic oligonucleotide
aaccaucaaagcgcauagu

SEQ ID NO: 2528682 - RNA, 19 nt, Artificial Sequence
  Description of Artificial Sequence: Synthetic oligonucleotide
guaucucucuacguucaac

SEQ ID NO: 2528683 - RNA, 19 nt, Artificial Sequence
  Description of Artificial Sequence: Synthetic oligonucleotide
cugguagguaagugaguuc

SEQ ID NO: 2528684 - RNA, 19 nt, Artificial Sequence
  Description of Artificial Sequence: Synthetic oligonucleotide
ugcuaucuuggugucccga

SEQ ID NO: 2528685 - RNA, 19 nt, Artificial Sequence
  Description of Artificial Sequence: Synthetic oligonucleotide
gcaguuucaauagugggaa

SEQ ID NO: 2528686 - RNA, 19 nt, Artificial Sequence
  Description of Artificial Sequence: Synthetic oligonucleotide
agucuucaauuugucguga

SEQ ID NO: 2528687 - RNA, 19 nt, Artificial Sequence
  Description of Artificial Sequence: Synthetic oligonucleotide
cacggauuaaagcaaaguu

SEQ ID NO: 2528688 - RNA, 19 nt, Artificial Sequence
  Description of Artificial Sequence: Synthetic oligonucleotide
gacauucccuuaugaacua

SEQ ID NO: 2528689 - RNA, 19 nt, Artificial Sequence
  Description of Artificial Sequence: Synthetic oligonucleotide
augcuaucuuggugucccg

SEQ ID NO: 2528690 - RNA, 19 nt, Artificial Sequence
  Description of Artificial Sequence: Synthetic oligonucleotide
cauuugggcgugauauaga

SEQ ID NO: 2528691 - RNA, 19 nt, Artificial Sequence
  Description of Artificial Sequence: Synthetic oligonucleotide
ggaccagcccagucgauug

SEQ ID NO: 2528692 - RNA, 19 nt, Artificial Sequence
  Description of Artificial Sequence: Synthetic oligonucleotide
caaugcuaucuuggugucc

SEQ ID NO: 2528693 - RNA, 19 nt, Artificial Sequence
  Description of Artificial Sequence: Synthetic oligonucleotide
aacaugagacugacugaaa

SEQ ID NO: 2528694 - RNA, 19 nt, Artificial Sequence
  Description of Artificial Sequence: Synthetic oligonucleotide
gucgugaagucugaacauc

SEQ ID NO: 2528695 - RNA, 19 nt, Artificial Sequence
  Description of Artificial Sequence: Synthetic oligonucleotide
ggagaauguugcauucacc

SEQ ID NO: 2528696 - RNA, 19 nt, Artificial Sequence
  Description of Artificial Sequence: Synthetic oligonucleotide
gucguaucaugcgacaucu

SEQ ID NO: 2528697 - RNA, 19 nt, Artificial Sequence
  Description of Artificial Sequence: Synthetic oligonucleotide
uagugggaaugugauccac

SEQ ID NO: 2528698 - RNA, 19 nt, Artificial Sequence
  Description of Artificial Sequence: Synthetic oligonucleotide
ccuuugugugagcaauccg

SEQ ID NO: 2528699 - RNA, 19 nt, Artificial Sequence
  Description of Artificial Sequence: Synthetic oligonucleotide
ccagugccaagccagguug

SEQ ID NO: 2528700 - RNA, 19 nt, Artificial Sequence
  Description of Artificial Sequence: Synthetic oligonucleotide
guagguaagugaguucaaa

SEQ ID NO: 2528701 - RNA, 19 nt, Artificial Sequence
  Description of Artificial Sequence: Synthetic oligonucleotide
cguaucaugcgacaucuuc

SEQ ID NO: 2528702 - RNA, 19 nt, Artificial Sequence
  Description of Artificial Sequence: Synthetic oligonucleotide
cuacguucaacaccuggua

SEQ ID NO: 2528703 - RNA, 19 nt, Artificial Sequence
  Description of Artificial Sequence: Synthetic oligonucleotide
cacuggacaacaccuugga

SEQ ID NO: 2528704 - RNA, 19 nt, Artificial Sequence
  Description of Artificial Sequence: Synthetic oligonucleotide
cagcagucuucaauuuguc

SEQ ID NO: 2528705 - RNA, 19 nt, Artificial Sequence
  Description of Artificial Sequence: Synthetic oligonucleotide
agcauuugggcgugauaua

SEQ ID NO: 2528706 - RNA, 19 nt, Artificial Sequence
  Description of Artificial Sequence: Synthetic oligonucleotide
ucucuacguucaacaccug

SEQ ID NO: 2528707 - RNA, 19 nt, Artificial Sequence
  Description of Artificial Sequence: Synthetic oligonucleotide
cagucgauuggcagagaca

SEQ ID NO: 2528708 - RNA, 19 nt, Artificial Sequence
  Description of Artificial Sequence: Synthetic oligonucleotide
acagcauuugggcgugaua

SEQ ID NO: 2528709 - RNA, 19 nt, Artificial Sequence
  Description of Artificial Sequence: Synthetic oligonucleotide
ccagucgauuggcagagac

SEQ ID NO: 2528710 - RNA, 19 nt, Artificial Sequence
  Description of Artificial Sequence: Synthetic oligonucleotide
guaagugaguucaaaccau

SEQ ID NO: 2528711 - RNA, 19 nt, Artificial Sequence
  Description of Artificial Sequence: Synthetic oligonucleotide
auuucacaauuuagcaguu

SEQ ID NO: 2528712 - RNA, 19 nt, Artificial Sequence
  Description of Artificial Sequence: Synthetic oligonucleotide
guaucauauuaaucugaau

SEQ ID NO: 2528713 - RNA, 19 nt, Artificial Sequence
  Description of Artificial Sequence: Synthetic oligonucleotide
caugagacugacugaaauu

SEQ ID NO: 2528714 - RNA, 19 nt, Artificial Sequence
  Description of Artificial Sequence: Synthetic oligonucleotide
gggaaggugucugaaugac

SEQ ID NO: 2528715 - RNA, 19 nt, Artificial Sequence
  Description of Artificial Sequence: Synthetic oligonucleotide
aucaugcgacaucuuccaa

SEQ ID NO: 2528716 - RNA, 19 nt, Artificial Sequence
  Description of Artificial Sequence: Synthetic oligonucleotide
cagcauuugggcgugauau

SEQ ID NO: 2528717 - RNA, 19 nt, Artificial Sequence
  Description of Artificial Sequence: Synthetic oligonucleotide
caauccggucaaaccucug

SEQ ID NO: 2528718 - RNA, 19 nt, Artificial Sequence
  Description of Artificial Sequence: Synthetic oligonucleotide
uggugucccgauguccacu

SEQ ID NO: 2528719 - RNA, 19 nt, Artificial Sequence
  Description of Artificial Sequence: Synthetic oligonucleotide
gagguaacacgaaggacau

SEQ ID NO: 2528720 - RNA, 19 nt, Artificial Sequence
  Description of Artificial Sequence: Synthetic oligonucleotide
gggaaacuaucauucagau

SEQ ID NO: 2528721 - RNA, 19 nt, Artificial Sequence
  Description of Artificial Sequence: Synthetic oligonucleotide
ggucucuuauuuguuccac

SEQ ID NO: 2528722 - RNA, 19 nt, Artificial Sequence
  Description of Artificial Sequence: Synthetic oligonucleotide
guaacacgaaggacauguc

SEQ ID NO: 2528723 - RNA, 19 nt, Artificial Sequence
  Description of Artificial Sequence: Synthetic oligonucleotide
cgugauauagacauucccu

SEQ ID NO: 2528724 - RNA, 19 nt, Artificial Sequence
  Description of Artificial Sequence: Synthetic oligonucleotide
auuugucgugaagucugaa

SEQ ID NO: 2528725 - RNA, 19 nt, Artificial Sequence
  Description of Artificial Sequence: Synthetic oligonucleotide
uugucucuugagugucgua

SEQ ID NO: 2528726 - RNA, 19 nt, Artificial Sequence
  Description of Artificial Sequence: Synthetic oligonucleotide
gcgcauaguuuccuuugug

SEQ ID NO: 2528727 - RNA, 19 nt, Artificial Sequence
  Description of Artificial Sequence: Synthetic oligonucleotide
cugaggauugggcucauuu

SEQ ID NO: 2528728 - RNA, 19 nt, Artificial Sequence
  Description of Artificial Sequence: Synthetic oligonucleotide
acauucccuuaugaacuau

SEQ ID NO: 2528729 - RNA, 19 nt, Artificial Sequence
  Description of Artificial Sequence: Synthetic oligonucleotide
ucugaacaucacggauuaa

SEQ ID NO: 2528730 - RNA, 19 nt, Artificial Sequence
  Description of Artificial Sequence: Synthetic oligonucleotide
ucguaucaugcgacaucuu

SEQ ID NO: 2528731 - RNA, 19 nt, Artificial Sequence
  Description of Artificial Sequence: Synthetic oligonucleotide
ugggcgugauauagacauu

SEQ ID NO: 2528732 - RNA, 19 nt, Artificial Sequence
  Description of Artificial Sequence: Synthetic oligonucleotide
gcaaaguucuuacccauuu

SEQ ID NO: 2528733 - RNA, 19 nt, Artificial Sequence
  Description of Artificial Sequence: Synthetic oligonucleotide
cugcuucuuuggagguaac

SEQ ID NO: 2528734 - RNA, 19 nt, Artificial Sequence
  Description of Artificial Sequence: Synthetic oligonucleotide
gcccagucgauuggcagag

SEQ ID NO: 2528735 - RNA, 19 nt, Artificial Sequence
  Description of Artificial Sequence: Synthetic oligonucleotide
cccuuaugaacuauucugu

SEQ ID NO: 2528736 - RNA, 19 nt, Artificial Sequence
  Description of Artificial Sequence: Synthetic oligonucleotide
ggguaucucucuacguuca

SEQ ID NO: 2528737 - RNA, 19 nt, Artificial Sequence
  Description of Artificial Sequence: Synthetic oligonucleotide
cgugaagucugaacaucac

SEQ ID NO: 2528738 - RNA, 19 nt, Artificial Sequence
  Description of Artificial Sequence: Synthetic oligonucleotide
agguaacacgaaggacaug

SEQ ID NO: 2528739 - RNA, 19 nt, Artificial Sequence
  Description of Artificial Sequence: Synthetic oligonucleotide
ugugagcaauccggucaaa

SEQ ID NO: 2528740 - RNA, 19 nt, Artificial Sequence
  Description of Artificial Sequence: Synthetic oligonucleotide
augcgacaucuuccaacua

SEQ ID NO: 2528741 - RNA, 19 nt, Artificial Sequence
  Description of Artificial Sequence: Synthetic oligonucleotide
gguaucucucuacguucaa

SEQ ID NO: 2528742 - RNA, 19 nt, Artificial Sequence
  Description of Artificial Sequence: Synthetic oligonucleotide
ggggagaauguugcauuca

SEQ ID NO: 2528743 - RNA, 19 nt, Artificial Sequence
  Description of Artificial Sequence: Synthetic oligonucleotide
acaacaccuuggagaauuu

SEQ ID NO: 2528744 - RNA, 19 nt, Artificial Sequence
  Description of Artificial Sequence: Synthetic oligonucleotide
gucgauuggcagagacaca

SEQ ID NO: 2528745 - RNA, 19 nt, Artificial Sequence
  Description of Artificial Sequence: Synthetic oligonucleotide
cagcaagggaaacuaucau

SEQ ID NO: 2528746 - RNA, 19 nt, Artificial Sequence
  Description of Artificial Sequence: Synthetic oligonucleotide
caaagcgcauaguuuccuu

SEQ ID NO: 2528747 - RNA, 19 nt, Artificial Sequence
  Description of Artificial Sequence: Synthetic oligonucleotide
gcuaucuuggugucccgau

SEQ ID NO: 2528748 - RNA, 19 nt, Artificial Sequence
  Description of Artificial Sequence: Synthetic oligonucleotide
cuccaaaggcugaccauuu

SEQ ID NO: 2528749 - RNA, 19 nt, Artificial Sequence
  Description of Artificial Sequence: Synthetic oligonucleotide
ucugaggauugggcucauu

SEQ ID NO: 2528750 - RNA, 19 nt, Artificial Sequence
  Description of Artificial Sequence: Synthetic oligonucleotide
gguagguaagugaguucaa

SEQ ID NO: 2528751 - RNA, 19 nt, Artificial Sequence
  Description of Artificial Sequence: Synthetic oligonucleotide
ccccuggccauuuucaggu

SEQ ID NO: 2528752 - RNA, 19 nt, Artificial Sequence
  Description of Artificial Sequence: Synthetic oligonucleotide
gugucguaucaugcgacau

SEQ ID NO: 2528753 - RNA, 19 nt, Artificial Sequence
  Description of Artificial Sequence: Synthetic oligonucleotide
cgcauaguuuccuuugugu

SEQ ID NO: 2528754 - RNA, 19 nt, Artificial Sequence
  Description of Artificial Sequence: Synthetic oligonucleotide
ccuuaugaacuauucuguu

SEQ ID NO: 2528755 - RNA, 19 nt, Artificial Sequence
  Description of Artificial Sequence: Synthetic oligonucleotide
cucuugagugucguaucau

SEQ ID NO: 2528756 - RNA, 19 nt, Artificial Sequence
  Description of Artificial Sequence: Synthetic oligonucleotide
caguuucaauagugggaau

SEQ ID NO: 2528757 - RNA, 19 nt, Artificial Sequence
  Description of Artificial Sequence: Synthetic oligonucleotide
ggauuaaagcaaaguucuu

SEQ ID NO: 2528758 - RNA, 19 nt, Artificial Sequence
  Description of Artificial Sequence: Synthetic oligonucleotide
gcaauccggucaaaccucu

SEQ ID NO: 2528759 - RNA, 19 nt, Artificial Sequence
  Description of Artificial Sequence: Synthetic oligonucleotide
agggaccagcccagucgau

SEQ ID NO: 2528760 - RNA, 19 nt, Artificial Sequence
  Description of Artificial Sequence: Synthetic oligonucleotide
cuacagcauuugggcguga

SEQ ID NO: 2528761 - RNA, 19 nt, Artificial Sequence
  Description of Artificial Sequence: Synthetic oligonucleotide
gugucccgauguccacugu

SEQ ID NO: 2528762 - RNA, 19 nt, Artificial Sequence
  Description of Artificial Sequence: Synthetic oligonucleotide
ggacaacaccuuggagaau

SEQ ID NO: 2528763 - RNA, 19 nt, Artificial Sequence
  Description of Artificial Sequence: Synthetic oligonucleotide
cccagucgauuggcagaga

SEQ ID NO: 2528764 - RNA, 19 nt, Artificial Sequence
  Description of Artificial Sequence: Synthetic oligonucleotide
uuaauuaacagacuaauac

SEQ ID NO: 2528765 - RNA, 19 nt, Artificial Sequence
  Description of Artificial Sequence: Synthetic oligonucleotide
aacagacuaauacacacgg

SEQ ID NO: 2528766 - RNA, 19 nt, Artificial Sequence
  Description of Artificial Sequence: Synthetic oligonucleotide
aauuaacagacuaauacac

SEQ ID NO: 2528767 - RNA, 19 nt, Artificial Sequence
  Description of Artificial Sequence: Synthetic oligonucleotide
uauacuauggagcucaagu

SEQ ID NO: 2528768 - RNA, 19 nt, Artificial Sequence
  Description of Artificial Sequence: Synthetic oligonucleotide
uuuuguaaccuuuaaugag

SEQ ID NO: 2528769 - RNA, 19 nt, Artificial Sequence
  Description of Artificial Sequence: Synthetic oligonucleotide
ugacauauuuaauuaacag

SEQ ID NO: 2528770 - RNA, 19 nt, Artificial Sequence
  Description of Artificial Sequence: Synthetic oligonucleotide
uaauuaacagacuaauaca

SEQ ID NO: 2528771 - RNA, 19 nt, Artificial Sequence
  Description of Artificial Sequence: Synthetic oligonucleotide
uuuguaaccuuuaaugaga

SEQ ID NO: 2528772 - RNA, 19 nt, Artificial Sequence
  Description of Artificial Sequence: Synthetic oligonucleotide
ucaaccucaagcaacacgu

SEQ ID NO: 2528773 - RNA, 19 nt, Artificial Sequence
  Description of Artificial Sequence: Synthetic oligonucleotide
uuaacagacuaauacacac

SEQ ID NO: 2528774 - RNA, 19 nt, Artificial Sequence
  Description of Artificial Sequence: Synthetic oligonucleotide
aaguccuaauaccggaagc

SEQ ID NO: 2528775 - RNA, 19 nt, Artificial Sequence
  Description of Artificial Sequence: Synthetic oligonucleotide
ucucagggagaucacaacg

SEQ ID NO: 2528776 - RNA, 19 nt, Artificial Sequence
  Description of Artificial Sequence: Synthetic oligonucleotide
ucgucauucagcaacauau

SEQ ID NO: 2528777 - RNA, 19 nt, Artificial Sequence
  Description of Artificial Sequence: Synthetic oligonucleotide
auggagcucaaguacaugg

SEQ ID NO: 2528778 - RNA, 19 nt, Artificial Sequence
  Description of Artificial Sequence: Synthetic oligonucleotide
auauuuaauuaacagacua

SEQ ID NO: 2528779 - RNA, 19 nt, Artificial Sequence
  Description of Artificial Sequence: Synthetic oligonucleotide
uucuucgucauucagcaac

SEQ ID NO: 2528780 - RNA, 19 nt, Artificial Sequence
  Description of Artificial Sequence: Synthetic oligonucleotide
aaccucaagcaacacgugg

SEQ ID NO: 2528781 - RNA, 19 nt, Artificial Sequence
  Description of Artificial Sequence: Synthetic oligonucleotide
aacauauuggggaucccgc

SEQ ID NO: 2528782 - RNA, 19 nt, Artificial Sequence
  Description of Artificial Sequence: Synthetic oligonucleotide
uacacacgguaccaaaugg

SEQ ID NO: 2528783 - RNA, 19 nt, Artificial Sequence
  Description of Artificial Sequence: Synthetic oligonucleotide
auacacacggcugauacac

SEQ ID NO: 2528784 - RNA, 19 nt, Artificial Sequence
  Description of Artificial Sequence: Synthetic oligonucleotide
ucucauaccacuuccgcug

SEQ ID NO: 2528785 - RNA, 19 nt, Artificial Sequence
  Description of Artificial Sequence: Synthetic oligonucleotide
cagcacaucaaccucaagc

SEQ ID NO: 2528786 - RNA, 19 nt, Artificial Sequence
  Description of Artificial Sequence: Synthetic oligonucleotide
acgaaaucaggguugaacu

SEQ ID NO: 2528787 - RNA, 19 nt, Artificial Sequence
  Description of Artificial Sequence: Synthetic oligonucleotide
aaaauauacuauggagcuc

SEQ ID NO: 2528788 - RNA, 19 nt, Artificial Sequence
  Description of Artificial Sequence: Synthetic oligonucleotide
gaaaucaggguugaacucc

SEQ ID NO: 2528789 - RNA, 19 nt, Artificial Sequence
  Description of Artificial Sequence: Synthetic oligonucleotide
auauuggggaucccgcggc

SEQ ID NO: 2528790 - RNA, 19 nt, Artificial Sequence
  Description of Artificial Sequence: Synthetic oligonucleotide
uuuugcggcagcaaaggga

SEQ ID NO: 2528791 - RNA, 19 nt, Artificial Sequence
  Description of Artificial Sequence: Synthetic oligonucleotide
aauaccggaagcguuucuc

SEQ ID NO: 2528792 - RNA, 19 nt, Artificial Sequence
  Description of Artificial Sequence: Synthetic oligonucleotide
agcaacauauuggggaucc

SEQ ID NO: 2528793 - RNA, 19 nt, Artificial Sequence
  Description of Artificial Sequence: Synthetic oligonucleotide
ugcucauagccuucggucg

SEQ ID NO: 2528794 - RNA, 19 nt, Artificial Sequence
  Description of Artificial Sequence: Synthetic oligonucleotide
aucaaccucaagcaacacg

SEQ ID NO: 2528795 - RNA, 19 nt, Artificial Sequence
  Description of Artificial Sequence: Synthetic oligonucleotide
guuucuucgucauucagca

SEQ ID NO: 2528796 - RNA, 19 nt, Artificial Sequence
  Description of Artificial Sequence: Synthetic oligonucleotide
gaagccguuggacacuccg

SEQ ID NO: 2528797 - RNA, 19 nt, Artificial Sequence
  Description of Artificial Sequence: Synthetic oligonucleotide
acacaugacauauuuaauu

SEQ ID NO: 2528798 - RNA, 19 nt, Artificial Sequence
  Description of Artificial Sequence: Synthetic oligonucleotide
gaaaagacggcccgacucc

SEQ ID NO: 2528799 - RNA, 19 nt, Artificial Sequence
  Description of Artificial Sequence: Synthetic oligonucleotide
uuugcggcagcaaagggau

SEQ ID NO: 2528800 - RNA, 19 nt, Artificial Sequence
  Description of Artificial Sequence: Synthetic oligonucleotide
aguccuaauaccggaagcg

SEQ ID NO: 2528801 - RNA, 19 nt, Artificial Sequence
  Description of Artificial Sequence: Synthetic oligonucleotide
aacacguggugcaucuucc

SEQ ID NO: 2528802 - RNA, 19 nt, Artificial Sequence
  Description of Artificial Sequence: Synthetic oligonucleotide
aucggguucacacaugaca

SEQ ID NO: 2528803 - RNA, 19 nt, Artificial Sequence
  Description of Artificial Sequence: Synthetic oligonucleotide
cauguugccacucgggagc

SEQ ID NO: 2528804 - RNA, 19 nt, Artificial Sequence
  Description of Artificial Sequence: Synthetic oligonucleotide
uucauguugccacucggga

SEQ ID NO: 2528805 - RNA, 19 nt, Artificial Sequence
  Description of Artificial Sequence: Synthetic oligonucleotide
cacaucaaccucaagcaac

SEQ ID NO: 2528806 - RNA, 19 nt, Artificial Sequence
  Description of Artificial Sequence: Synthetic oligonucleotide
ugggucaaguccuaauacc

SEQ ID NO: 2528807 - RNA, 19 nt, Artificial Sequence
  Description of Artificial Sequence: Synthetic oligonucleotide
aguuucauguugccacucg

SEQ ID NO: 2528808 - RNA, 19 nt, Artificial Sequence
  Description of Artificial Sequence: Synthetic oligonucleotide
aaaacgucucgucgugcuc

SEQ ID NO: 2528809 - RNA, 19 nt, Artificial Sequence
  Description of Artificial Sequence: Synthetic oligonucleotide
aguacauggugguugguga

SEQ ID NO: 2528810 - RNA, 19 nt, Artificial Sequence
  Description of Artificial Sequence: Synthetic oligonucleotide
acauauuggggaucccgcg

SEQ ID NO: 2528811 - RNA, 19 nt, Artificial Sequence
  Description of Artificial Sequence: Synthetic oligonucleotide
gaaagacugagcuggguca

SEQ ID NO: 2528812 - RNA, 19 nt, Artificial Sequence
  Description of Artificial Sequence: Synthetic oligonucleotide
uguugaagccguuggacac

SEQ ID NO: 2528813 - RNA, 19 nt, Artificial Sequence
  Description of Artificial Sequence: Synthetic oligonucleotide
agccguuggacacuccgcc

SEQ ID NO: 2528814 - RNA, 19 nt, Artificial Sequence
  Description of Artificial Sequence: Synthetic oligonucleotide
gaacuucugggguuuugcg

SEQ ID NO: 2528815 - RNA, 19 nt, Artificial Sequence
  Description of Artificial Sequence: Synthetic oligonucleotide
ucauguugccacucgggag

SEQ ID NO: 2528816 - RNA, 19 nt, Artificial Sequence
  Description of Artificial Sequence: Synthetic oligonucleotide
auacacacgguaccaaaug

SEQ ID NO: 2528817 - RNA, 19 nt, Artificial Sequence
  Description of Artificial Sequence: Synthetic oligonucleotide
ucucgucgugcucauagcc

SEQ ID NO: 2528818 - RNA, 19 nt, Artificial Sequence
  Description of Artificial Sequence: Synthetic oligonucleotide
agcaaguuuauguuucagu

SEQ ID NO: 2528819 - RNA, 19 nt, Artificial Sequence
  Description of Artificial Sequence: Synthetic oligonucleotide
aucacaacggcgugcgccg

SEQ ID NO: 2528820 - RNA, 19 nt, Artificial Sequence
  Description of Artificial Sequence: Synthetic oligonucleotide
gcugauggggaaaagacgg

SEQ ID NO: 2528821 - RNA, 19 nt, Artificial Sequence
  Description of Artificial Sequence: Synthetic oligonucleotide
cucuuugggaaccucggcc

SEQ ID NO: 2528822 - RNA, 19 nt, Artificial Sequence
  Description of Artificial Sequence: Synthetic oligonucleotide
guugaugcggaccucggug

SEQ ID NO: 2528823 - RNA, 19 nt, Artificial Sequence
  Description of Artificial Sequence: Synthetic oligonucleotide
gacuaauacacacggcuga

SEQ ID NO: 2528824 - RNA, 19 nt, Artificial Sequence
  Description of Artificial Sequence: Synthetic oligonucleotide
aaguacauggugguuggug

SEQ ID NO: 2528825 - RNA, 19 nt, Artificial Sequence
  Description of Artificial Sequence: Synthetic oligonucleotide
gagaucacaacggcgugcg

SEQ ID NO: 2528826 - RNA, 19 nt, Artificial Sequence
  Description of Artificial Sequence: Synthetic oligonucleotide
ucuucgucauucagcaaca

SEQ ID NO: 2528827 - RNA, 19 nt, Artificial Sequence
  Description of Artificial Sequence: Synthetic oligonucleotide
accucggccagguuuaaag

SEQ ID NO: 2528828 - RNA, 19 nt, Artificial Sequence
  Description of Artificial Sequence: Synthetic oligonucleotide
auggggaaaagacggcccg

SEQ ID NO: 2528829 - RNA, 19 nt, Artificial Sequence
  Description of Artificial Sequence: Synthetic oligonucleotide
aggguugaacuccaccggg

SEQ ID NO: 2528830 - RNA, 19 nt, Artificial Sequence
  Description of Artificial Sequence: Synthetic oligonucleotide
cuucucauaccacuuccgc

SEQ ID NO: 2528831 - RNA, 19 nt, Artificial Sequence
  Description of Artificial Sequence: Synthetic oligonucleotide
uggacacuccgccggaccg

SEQ ID NO: 2528832 - RNA, 19 nt, Artificial Sequence
  Description of Artificial Sequence: Synthetic oligonucleotide
gaucacaacggcgugcgcc

SEQ ID NO: 2528833 - RNA, 19 nt, Artificial Sequence
  Description of Artificial Sequence: Synthetic oligonucleotide
uuagcaaguuuauguuuca

SEQ ID NO: 2528834 - RNA, 19 nt, Artificial Sequence
  Description of Artificial Sequence: Synthetic oligonucleotide
aaaagacggcccgacuccg

SEQ ID NO: 2528835 - RNA, 19 nt, Artificial Sequence
  Description of Artificial Sequence: Synthetic oligonucleotide
acaugacauauuuaauuaa

SEQ ID NO: 2528836 - RNA, 19 nt, Artificial Sequence
  Description of Artificial Sequence: Synthetic oligonucleotide
ggaagcguuucucagggag

SEQ ID NO: 2528837 - RNA, 19 nt, Artificial Sequence
  Description of Artificial Sequence: Synthetic oligonucleotide
ucggccagguuuaaagugu

SEQ ID NO: 2528838 - RNA, 19 nt, Artificial Sequence
  Description of Artificial Sequence: Synthetic oligonucleotide
gugguuagcaaguuuaugu

SEQ ID NO: 2528839 - RNA, 19 nt, Artificial Sequence
  Description of Artificial Sequence: Synthetic oligonucleotide
agaucggguucacacauga

SEQ ID NO: 2528840 - RNA, 19 nt, Artificial Sequence
  Description of Artificial Sequence: Synthetic oligonucleotide
aaggagcgcacacuucuca

SEQ ID NO: 2528841 - RNA, 19 nt, Artificial Sequence
  Description of Artificial Sequence: Synthetic oligonucleotide
uuuaaaguguccgccgccu

SEQ ID NO: 2528842 - RNA, 19 nt, Artificial Sequence
  Description of Artificial Sequence: Synthetic oligonucleotide
aauggugguuagcaaguuu

SEQ ID NO: 2528843 - RNA, 19 nt, Artificial Sequence
  Description of Artificial Sequence: Synthetic oligonucleotide
auagccuucggucggcucu

SEQ ID NO: 2528844 - RNA, 19 nt, Artificial Sequence
  Description of Artificial Sequence: Synthetic oligonucleotide
cagguuuaaaguguccgcc

SEQ ID NO: 2528845 - RNA, 19 nt, Artificial Sequence
  Description of Artificial Sequence: Synthetic oligonucleotide
augacauauuuaauuaaca

SEQ ID NO: 2528846 - RNA, 19 nt, Artificial Sequence
  Description of Artificial Sequence: Synthetic oligonucleotide
auacuauggagcucaagua

SEQ ID NO: 2528847 - RNA, 19 nt, Artificial Sequence
  Description of Artificial Sequence: Synthetic oligonucleotide
accacuuccgcuguugaag

SEQ ID NO: 2528848 - RNA, 19 nt, Artificial Sequence
  Description of Artificial Sequence: Synthetic oligonucleotide
acuuuggggaucauccgcg

SEQ ID NO: 2528849 - RNA, 19 nt, Artificial Sequence
  Description of Artificial Sequence: Synthetic oligonucleotide
caaguccuaauaccggaag

SEQ ID NO: 2528850 - RNA, 19 nt, Artificial Sequence
  Description of Artificial Sequence: Synthetic oligonucleotide
ugagcaguuucauguugcc

SEQ ID NO: 2528851 - RNA, 19 nt, Artificial Sequence
  Description of Artificial Sequence: Synthetic oligonucleotide
aaacgucucgucgugcuca

SEQ ID NO: 2528852 - RNA, 19 nt, Artificial Sequence
  Description of Artificial Sequence: Synthetic oligonucleotide
auuaacagacuaauacaca

SEQ ID NO: 2528853 - RNA, 19 nt, Artificial Sequence
  Description of Artificial Sequence: Synthetic oligonucleotide
ucaaguccuaauaccggaa

SEQ ID NO: 2528854 - RNA, 19 nt, Artificial Sequence
  Description of Artificial Sequence: Synthetic oligonucleotide
cacgaaaucaggguugaac

SEQ ID NO: 2528855 - RNA, 19 nt, Artificial Sequence
  Description of Artificial Sequence: Synthetic oligonucleotide
gaucccgcggcugaugggg

SEQ ID NO: 2528856 - RNA, 19 nt, Artificial Sequence
  Description of Artificial Sequence: Synthetic oligonucleotide
agcucaaguacaugguggu

SEQ ID NO: 2528857 - RNA, 19 nt, Artificial Sequence
  Description of Artificial Sequence: Synthetic oligonucleotide
cuucggucggcucuuuggg

SEQ ID NO: 2528858 - RNA, 19 nt, Artificial Sequence
  Description of Artificial Sequence: Synthetic oligonucleotide
ccaaauggugguuagcaag

SEQ ID NO: 2528859 - RNA, 19 nt, Artificial Sequence
  Description of Artificial Sequence: Synthetic oligonucleotide
guuuaaaguguccgccgcc

SEQ ID NO: 2528860 - RNA, 19 nt, Artificial Sequence
  Description of Artificial Sequence: Synthetic oligonucleotide
uugugggugagcaguuuca

SEQ ID NO: 2528861 - RNA, 19 nt, Artificial Sequence
  Description of Artificial Sequence: Synthetic oligonucleotide
guuuugcggcagcaaaggg

SEQ ID NO: 2528862 - RNA, 19 nt, Artificial Sequence
  Description of Artificial Sequence: Synthetic oligonucleotide
gauggggaaaagacggccc

SEQ ID NO: 2528863 - RNA, 19 nt, Artificial Sequence
  Description of Artificial Sequence: Synthetic oligonucleotide
ugguuagcaaguuuauguu

SEQ ID NO: 2528864 - RNA, 19 nt, Artificial Sequence
  Description of Artificial Sequence: Synthetic oligonucleotide
uuaaaguguccgccgccug

SEQ ID NO: 2528865 - RNA, 19 nt, Artificial Sequence
  Description of Artificial Sequence: Synthetic oligonucleotide
uggagcucaaguacauggu

SEQ ID NO: 2528866 - RNA, 19 nt, Artificial Sequence
  Description of Artificial Sequence: Synthetic oligonucleotide
gggucaaguccuaauaccg

SEQ ID NO: 2528867 - RNA, 19 nt, Artificial Sequence
  Description of Artificial Sequence: Synthetic oligonucleotide
aagccguuggacacuccgc

SEQ ID NO: 2528868 - RNA, 19 nt, Artificial Sequence
  Description of Artificial Sequence: Synthetic oligonucleotide
cugggucaaguccuaauac

SEQ ID NO: 2528869 - RNA, 19 nt, Artificial Sequence
  Description of Artificial Sequence: Synthetic oligonucleotide
acaagcgccgcccacucca

SEQ ID NO: 2528870 - RNA, 19 nt, Artificial Sequence
  Description of Artificial Sequence: Synthetic oligonucleotide
gacuccgggcauugcaggg

SEQ ID NO: 2528871 - RNA, 19 nt, Artificial Sequence
  Description of Artificial Sequence: Synthetic oligonucleotide
agcaacacguggugcaucu

SEQ ID NO: 2528872 - RNA, 19 nt, Artificial Sequence
  Description of Artificial Sequence: Synthetic oligonucleotide
aagccacgcgugcccacgc

SEQ ID NO: 2528873 - RNA, 19 nt, Artificial Sequence
  Description of Artificial Sequence: Synthetic oligonucleotide
acacgguaccaaauggugg

SEQ ID NO: 2528874 - RNA, 19 nt, Artificial Sequence
  Description of Artificial Sequence: Synthetic oligonucleotide
cagacuaauacacacggcu

SEQ ID NO: 2528875 - RNA, 19 nt, Artificial Sequence
  Description of Artificial Sequence: Synthetic oligonucleotide
uaccggaagcguuucucag

SEQ ID NO: 2528876 - RNA, 19 nt, Artificial Sequence
  Description of Artificial Sequence: Synthetic oligonucleotide
gucaaguccuaauaccgga

SEQ ID NO: 2528877 - RNA, 19 nt, Artificial Sequence
  Description of Artificial Sequence: Synthetic oligonucleotide
acguggugcaucuuccuca

SEQ ID NO: 2528878 - RNA, 19 nt, Artificial Sequence
  Description of Artificial Sequence: Synthetic oligonucleotide
caggguugaacuccaccgg

SEQ ID NO: 2528879 - RNA, 19 nt, Artificial Sequence
  Description of Artificial Sequence: Synthetic oligonucleotide
auaccggaagcguuucuca

SEQ ID NO: 2528880 - RNA, 19 nt, Artificial Sequence
  Description of Artificial Sequence: Synthetic oligonucleotide
agcgggaagccacgcgugc

SEQ ID NO: 2528881 - RNA, 19 nt, Artificial Sequence
  Description of Artificial Sequence: Synthetic oligonucleotide
guacauggugguuggugag

SEQ ID NO: 2528882 - RNA, 19 nt, Artificial Sequence
  Description of Artificial Sequence: Synthetic oligonucleotide
aggagauugugggugagca

SEQ ID NO: 2528883 - RNA, 19 nt, Artificial Sequence
  Description of Artificial Sequence: Synthetic oligonucleotide
uuggacacuccgccggacc

SEQ ID NO: 2528884 - RNA, 19 nt, Artificial Sequence
  Description of Artificial Sequence: Synthetic oligonucleotide
uccuaauaccggaagcguu

SEQ ID NO: 2528885 - RNA, 19 nt, Artificial Sequence
  Description of Artificial Sequence: Synthetic oligonucleotide
ggaaaagacggcccgacuc

SEQ ID NO: 2528886 - RNA, 19 nt, Artificial Sequence
  Description of Artificial Sequence: Synthetic oligonucleotide
gguaccaaauggugguuag

SEQ ID NO: 2528887 - RNA, 19 nt, Artificial Sequence
  Description of Artificial Sequence: Synthetic oligonucleotide
gguuuaaaguguccgccgc

SEQ ID NO: 2528888 - RNA, 19 nt, Artificial Sequence
  Description of Artificial Sequence: Synthetic oligonucleotide
uucgucauucagcaacaua

SEQ ID NO: 2528889 - RNA, 19 nt, Artificial Sequence
  Description of Artificial Sequence: Synthetic oligonucleotide
accggguugaugcggaccu

SEQ ID NO: 2528890 - RNA, 19 nt, Artificial Sequence
  Description of Artificial Sequence: Synthetic oligonucleotide
gguuuugcggcagcaaagg

SEQ ID NO: 2528891 - RNA, 19 nt, Artificial Sequence
  Description of Artificial Sequence: Synthetic oligonucleotide
agcucgcgaggccggaacc

SEQ ID NO: 2528892 - RNA, 19 nt, Artificial Sequence
  Description of Artificial Sequence: Synthetic oligonucleotide
cacacggcugauacacacg

SEQ ID NO: 2528893 - RNA, 19 nt, Artificial Sequence
  Description of Artificial Sequence: Synthetic oligonucleotide
gugagcaguuucauguugc

SEQ ID NO: 2528894 - RNA, 19 nt, Artificial Sequence
  Description of Artificial Sequence: Synthetic oligonucleotide
acggcugauacacacggua

SEQ ID NO: 2528895 - RNA, 19 nt, Artificial Sequence
  Description of Artificial Sequence: Synthetic oligonucleotide
ggaaagacugagcuggguc

SEQ ID NO: 2528896 - RNA, 19 nt, Artificial Sequence
  Description of Artificial Sequence: Synthetic oligonucleotide
auucagcaacauauugggg

SEQ ID NO: 2528897 - RNA, 19 nt, Artificial Sequence
  Description of Artificial Sequence: Synthetic oligonucleotide
ggcgagaucggguucacac

SEQ ID NO: 2528898 - RNA, 19 nt, Artificial Sequence
  Description of Artificial Sequence: Synthetic oligonucleotide
guggugaacuugcuggaac

SEQ ID NO: 2528899 - RNA, 19 nt, Artificial Sequence
  Description of Artificial Sequence: Synthetic oligonucleotide
aagcaacacguggugcauc

SEQ ID NO: 2528900 - RNA, 19 nt, Artificial Sequence
  Description of Artificial Sequence: Synthetic oligonucleotide
aagcguuucucagggagau

SEQ ID NO: 2528901 - RNA, 19 nt, Artificial Sequence
  Description of Artificial Sequence: Synthetic oligonucleotide
gagauugugggugagcagu

SEQ ID NO: 2528902 - RNA, 19 nt, Artificial Sequence
  Description of Artificial Sequence: Synthetic oligonucleotide
gccagguuuaaaguguccg

SEQ ID NO: 2528903 - RNA, 19 nt, Artificial Sequence
  Description of Artificial Sequence: Synthetic oligonucleotide
cauauuuaauuaacagacu

SEQ ID NO: 2528904 - RNA, 19 nt, Artificial Sequence
  Description of Artificial Sequence: Synthetic oligonucleotide
uccgcgccacgaaaucagg

SEQ ID NO: 2528905 - RNA, 19 nt, Artificial Sequence
  Description of Artificial Sequence: Synthetic oligonucleotide
caacacguggugcaucuuc

SEQ ID NO: 2528906 - RNA, 19 nt, Artificial Sequence
  Description of Artificial Sequence: Synthetic oligonucleotide
ggagcucaaguacauggug

SEQ ID NO: 2528907 - RNA, 19 nt, Artificial Sequence
  Description of Artificial Sequence: Synthetic oligonucleotide
uauggagcucaaguacaug

SEQ ID NO: 2528908 - RNA, 19 nt, Artificial Sequence
  Description of Artificial Sequence: Synthetic oligonucleotide
ucggucggcucuuugggaa

SEQ ID NO: 2528909 - RNA, 19 nt, Artificial Sequence
  Description of Artificial Sequence: Synthetic oligonucleotide
uaauaccggaagcguuucu

SEQ ID NO: 2528910 - RNA, 19 nt, Artificial Sequence
  Description of Artificial Sequence: Synthetic oligonucleotide
cuuuggggaucauccgcgc

SEQ ID NO: 2528911 - RNA, 19 nt, Artificial Sequence
  Description of Artificial Sequence: Synthetic oligonucleotide
ugaugcggaccucgguggc

SEQ ID NO: 2528912 - RNA, 19 nt, Artificial Sequence
  Description of Artificial Sequence: Synthetic oligonucleotide
auauacuauggagcucaag

SEQ ID NO: 2528913 - RNA, 19 nt, Artificial Sequence
  Description of Artificial Sequence: Synthetic oligonucleotide
caguuucuucgucauucag

SEQ ID NO: 2528914 - RNA, 19 nt, Artificial Sequence
  Description of Artificial Sequence: Synthetic oligonucleotide
ggucaaguccuaauaccgg

SEQ ID NO: 2528915 - RNA, 19 nt, Artificial Sequence
  Description of Artificial Sequence: Synthetic oligonucleotide
auggugguuagcaaguuua

SEQ ID NO: 2528916 - RNA, 19 nt, Artificial Sequence
  Description of Artificial Sequence: Synthetic oligonucleotide
ucgggagcucgcgaggccg

SEQ ID NO: 2528917 - RNA, 19 nt, Artificial Sequence
  Description of Artificial Sequence: Synthetic oligonucleotide
ggcugauacacacgguacc

SEQ ID NO: 2528918 - RNA, 19 nt, Artificial Sequence
  Description of Artificial Sequence: Synthetic oligonucleotide
gaagccacgcgugcccacg

SEQ ID NO: 2528919 - RNA, 19 nt, Artificial Sequence
  Description of Artificial Sequence: Synthetic oligonucleotide
agaucacaacggcgugcgc

SEQ ID NO: 2528920 - RNA, 19 nt, Artificial Sequence
  Description of Artificial Sequence: Synthetic oligonucleotide
accaaauggugguuagcaa

SEQ ID NO: 2528921 - RNA, 19 nt, Artificial Sequence
  Description of Artificial Sequence: Synthetic oligonucleotide
uggugguuagcaaguuuau

SEQ ID NO: 2528922 - RNA, 19 nt, Artificial Sequence
  Description of Artificial Sequence: Synthetic oligonucleotide
ucauccgcgccacgaaauc

SEQ ID NO: 2528923 - RNA, 19 nt, Artificial Sequence
  Description of Artificial Sequence: Synthetic oligonucleotide
auaccacuuccgcuguuga

SEQ ID NO: 2528924 - RNA, 19 nt, Artificial Sequence
  Description of Artificial Sequence: Synthetic oligonucleotide
cauaccacuuccgcuguug

SEQ ID NO: 2528925 - RNA, 19 nt, Artificial Sequence
  Description of Artificial Sequence: Synthetic oligonucleotide
aaagacggcccgacuccgg

SEQ ID NO: 2528926 - RNA, 19 nt, Artificial Sequence
  Description of Artificial Sequence: Synthetic oligonucleotide
caaauggugguuagcaagu

SEQ ID NO: 2528927 - RNA, 19 nt, Artificial Sequence
  Description of Artificial Sequence: Synthetic oligonucleotide
guucacacaugacauauuu

SEQ ID NO: 2528928 - RNA, 19 nt, Artificial Sequence
  Description of Artificial Sequence: Synthetic oligonucleotide
ggcugauggggaaaagacg

SEQ ID NO: 2528929 - RNA, 19 nt, Artificial Sequence
  Description of Artificial Sequence: Synthetic oligonucleotide
ggaugggaaagacugagcu

SEQ ID NO: 2528930 - RNA, 19 nt, Artificial Sequence
  Description of Artificial Sequence: Synthetic oligonucleotide
uauuggggaucccgcggcu

SEQ ID NO: 2528931 - RNA, 19 nt, Artificial Sequence
  Description of Artificial Sequence: Synthetic oligonucleotide
uucggucggcucuuuggga

SEQ ID NO: 2528932 - RNA, 19 nt, Artificial Sequence
  Description of Artificial Sequence: Synthetic oligonucleotide
uacauggugguuggugagu

SEQ ID NO: 2528933 - RNA, 19 nt, Artificial Sequence
  Description of Artificial Sequence: Synthetic oligonucleotide
accggaaguggugaacuug

SEQ ID NO: 2528934 - RNA, 19 nt, Artificial Sequence
  Description of Artificial Sequence: Synthetic oligonucleotide
gcucauagccuucggucgg

SEQ ID NO: 2528935 - RNA, 19 nt, Artificial Sequence
  Description of Artificial Sequence: Synthetic oligonucleotide
ccagguuuaaaguguccgc

SEQ ID NO: 2528936 - RNA, 19 nt, Artificial Sequence
  Description of Artificial Sequence: Synthetic oligonucleotide
ucgucgugcucauagccuu

SEQ ID NO: 2528937 - RNA, 19 nt, Artificial Sequence
  Description of Artificial Sequence: Synthetic oligonucleotide
aaauggugguuagcaaguu

SEQ ID NO: 2528938 - RNA, 19 nt, Artificial Sequence
  Description of Artificial Sequence: Synthetic oligonucleotide
gaagcguuucucagggaga

SEQ ID NO: 2528939 - RNA, 19 nt, Artificial Sequence
  Description of Artificial Sequence: Synthetic oligonucleotide
ccggaaguggugaacuugc

SEQ ID NO: 2528940 - RNA, 19 nt, Artificial Sequence
  Description of Artificial Sequence: Synthetic oligonucleotide
cuaauaccggaagcguuuc

SEQ ID NO: 2528941 - RNA, 19 nt, Artificial Sequence
  Description of Artificial Sequence: Synthetic oligonucleotide
cucgguggccugcagccgc

SEQ ID NO: 2528942 - RNA, 19 nt, Artificial Sequence
  Description of Artificial Sequence: Synthetic oligonucleotide
gaccucgguggccugcagc

SEQ ID NO: 2528943 - RNA, 19 nt, Artificial Sequence
  Description of Artificial Sequence: Synthetic oligonucleotide
ugcacaagcgccgcccacu

SEQ ID NO: 2528944 - RNA, 19 nt, Artificial Sequence
  Description of Artificial Sequence: Synthetic oligonucleotide
gaucauccgcgccacgaaa

SEQ ID NO: 2528945 - RNA, 19 nt, Artificial Sequence
  Description of Artificial Sequence: Synthetic oligonucleotide
gccggaaccggaaggagcg

SEQ ID NO: 2528946 - RNA, 19 nt, Artificial Sequence
  Description of Artificial Sequence: Synthetic oligonucleotide
gcaaguuuauguuucaguu

SEQ ID NO: 2528947 - RNA, 19 nt, Artificial Sequence
  Description of Artificial Sequence: Synthetic oligonucleotide
uccgccggaccggaagugg

SEQ ID NO: 2528948 - RNA, 19 nt, Artificial Sequence
  Description of Artificial Sequence: Synthetic oligonucleotide
ccuucggucggcucuuugg

SEQ ID NO: 2528949 - RNA, 19 nt, Artificial Sequence
  Description of Artificial Sequence: Synthetic oligonucleotide
aauauacuauggagcucaa

SEQ ID NO: 2528950 - RNA, 19 nt, Artificial Sequence
  Description of Artificial Sequence: Synthetic oligonucleotide
uggugguuggugagucacu

SEQ ID NO: 2528951 - RNA, 19 nt, Artificial Sequence
  Description of Artificial Sequence: Synthetic oligonucleotide
gggaucccgcggcugaugg

SEQ ID NO: 2528952 - RNA, 19 nt, Artificial Sequence
  Description of Artificial Sequence: Synthetic oligonucleotide
guaccaaauggugguuagc

SEQ ID NO: 2528953 - RNA, 19 nt, Artificial Sequence
  Description of Artificial Sequence: Synthetic oligonucleotide
agccacgcgugcccacgcc

SEQ ID NO: 2528954 - RNA, 19 nt, Artificial Sequence
  Description of Artificial Sequence: Synthetic oligonucleotide
ggagauugugggugagcag

SEQ ID NO: 2528955 - RNA, 19 nt, Artificial Sequence
  Description of Artificial Sequence: Synthetic oligonucleotide
cacuuccgcuguugaagcc

SEQ ID NO: 2528956 - RNA, 19 nt, Artificial Sequence
  Description of Artificial Sequence: Synthetic oligonucleotide
aacgucucgucgugcucau

SEQ ID NO: 2528957 - RNA, 19 nt, Artificial Sequence
  Description of Artificial Sequence: Synthetic oligonucleotide
uuucuucgucauucagcaa

SEQ ID NO: 2528958 - RNA, 19 nt, Artificial Sequence
  Description of Artificial Sequence: Synthetic oligonucleotide
cacgguaccaaaugguggu

SEQ ID NO: 2528959 - RNA, 19 nt, Artificial Sequence
  Description of Artificial Sequence: Synthetic oligonucleotide
auccgcgccacgaaaucag

SEQ ID NO: 2528960 - RNA, 19 nt, Artificial Sequence
  Description of Artificial Sequence: Synthetic oligonucleotide
gucucgucgugcucauagc

SEQ ID NO: 2528961 - RNA, 19 nt, Artificial Sequence
  Description of Artificial Sequence: Synthetic oligonucleotide
uugaagccguuggacacuc

SEQ ID NO: 2528962 - RNA, 19 nt, Artificial Sequence
  Description of Artificial Sequence: Synthetic oligonucleotide
ggugguuggugagucacug

SEQ ID NO: 2528963 - RNA, 19 nt, Artificial Sequence
  Description of Artificial Sequence: Synthetic oligonucleotide
agccgcagcgggaagccac

SEQ ID NO: 2528964 - RNA, 19 nt, Artificial Sequence
  Description of Artificial Sequence: Synthetic oligonucleotide
acacguggugcaucuuccu

SEQ ID NO: 2528965 - RNA, 19 nt, Artificial Sequence
  Description of Artificial Sequence: Synthetic oligonucleotide
aggagcgcacacuucucau

SEQ ID NO: 2528966 - RNA, 19 nt, Artificial Sequence
  Description of Artificial Sequence: Synthetic oligonucleotide
cacuccgccggaccggaag

SEQ ID NO: 2528967 - RNA, 19 nt, Artificial Sequence
  Description of Artificial Sequence: Synthetic oligonucleotide
gcguuucucagggagauca

SEQ ID NO: 2528968 - RNA, 19 nt, Artificial Sequence
  Description of Artificial Sequence: Synthetic oligonucleotide
ggaaggagcgcacacuucu

SEQ ID NO: 2528969 - RNA, 19 nt, Artificial Sequence
  Description of Artificial Sequence: Synthetic oligonucleotide
gcacgugcgagcucaggag

SEQ ID NO: 2528970 - RNA, 19 nt, Artificial Sequence
  Description of Artificial Sequence: Synthetic oligonucleotide
cacucgggagcucgcgagg

SEQ ID NO: 2528971 - RNA, 19 nt, Artificial Sequence
  Description of Artificial Sequence: Synthetic oligonucleotide
gaugcggaccucgguggcc

SEQ ID NO: 2528972 - RNA, 19 nt, Artificial Sequence
  Description of Artificial Sequence: Synthetic oligonucleotide
ggugguuagcaaguuuaug

SEQ ID NO: 2528973 - RNA, 19 nt, Artificial Sequence
  Description of Artificial Sequence: Synthetic oligonucleotide
ccacuuccgcuguugaagc

SEQ ID NO: 2528974 - RNA, 19 nt, Artificial Sequence
  Description of Artificial Sequence: Synthetic oligonucleotide
ggguuuugcggcagcaaag

SEQ ID NO: 2528975 - RNA, 19 nt, Artificial Sequence
  Description of Artificial Sequence: Synthetic oligonucleotide
gacggcccgacuccgggca

SEQ ID NO: 2528976 - RNA, 19 nt, Artificial Sequence
  Description of Artificial Sequence: Synthetic oligonucleotide
acuccgccggaccggaagu

SEQ ID NO: 2528977 - RNA, 19 nt, Artificial Sequence
  Description of Artificial Sequence: Synthetic oligonucleotide
gagcucgcgaggccggaac

SEQ ID NO: 2528978 - RNA, 19 nt, Artificial Sequence
  Description of Artificial Sequence: Synthetic oligonucleotide
ugaagccguuggacacucc

SEQ ID NO: 2528979 - RNA, 19 nt, Artificial Sequence
  Description of Artificial Sequence: Synthetic oligonucleotide
ggugcccuccagcacauca

SEQ ID NO: 2528980 - RNA, 19 nt, Artificial Sequence
  Description of Artificial Sequence: Synthetic oligonucleotide
uggggaaaagacggcccga

SEQ ID NO: 2528981 - RNA, 19 nt, Artificial Sequence
  Description of Artificial Sequence: Synthetic oligonucleotide
ggagaucacaacggcgugc

SEQ ID NO: 2528982 - RNA, 19 nt, Artificial Sequence
  Description of Artificial Sequence: Synthetic oligonucleotide
caaagggaugggaaagacu

SEQ ID NO: 2528983 - RNA, 19 nt, Artificial Sequence
  Description of Artificial Sequence: Synthetic oligonucleotide
gagaucggguucacacaug

SEQ ID NO: 2528984 - RNA, 19 nt, Artificial Sequence
  Description of Artificial Sequence: Synthetic oligonucleotide
cuccgggcauugcagggug

SEQ ID NO: 2528985 - RNA, 19 nt, Artificial Sequence
  Description of Artificial Sequence: Synthetic oligonucleotide
cucgcgaggccggaaccgg

SEQ ID NO: 2528986 - RNA, 19 nt, Artificial Sequence
  Description of Artificial Sequence: Synthetic oligonucleotide
gaaggagcgcacacuucuc

SEQ ID NO: 2528987 - RNA, 19 nt, Artificial Sequence
  Description of Artificial Sequence: Synthetic oligonucleotide
gaggccggaaccggaagga

SEQ ID NO: 2528988 - RNA, 19 nt, Artificial Sequence
  Description of Artificial Sequence: Synthetic oligonucleotide
uccgggcauugcagggugc

SEQ ID NO: 2528989 - RNA, 19 nt, Artificial Sequence
  Description of Artificial Sequence: Synthetic oligonucleotide
aguggugaacuugcuggaa

SEQ ID NO: 2528990 - RNA, 19 nt, Artificial Sequence
  Description of Artificial Sequence: Synthetic oligonucleotide
cauagccuucggucggcuc

SEQ ID NO: 2528991 - RNA, 19 nt, Artificial Sequence
  Description of Artificial Sequence: Synthetic oligonucleotide
cacgugcgagcucaggaga

SEQ ID NO: 2528992 - RNA, 19 nt, Artificial Sequence
  Description of Artificial Sequence: Synthetic oligonucleotide
aucauccgcgccacgaaau

SEQ ID NO: 2528993 - RNA, 19 nt, Artificial Sequence
  Description of Artificial Sequence: Synthetic oligonucleotide
gaucggguucacacaugac

SEQ ID NO: 2528994 - RNA, 19 nt, Artificial Sequence
  Description of Artificial Sequence: Synthetic oligonucleotide
cgucucgucgugcucauag

SEQ ID NO: 2528995 - RNA, 19 nt, Artificial Sequence
  Description of Artificial Sequence: Synthetic oligonucleotide
ccguuggacacuccgccgg

SEQ ID NO: 2528996 - RNA, 19 nt, Artificial Sequence
  Description of Artificial Sequence: Synthetic oligonucleotide
uugccacucgggagcucgc

SEQ ID NO: 2528997 - RNA, 19 nt, Artificial Sequence
  Description of Artificial Sequence: Synthetic oligonucleotide
gccguuggacacuccgccg

SEQ ID NO: 2528998 - RNA, 19 nt, Artificial Sequence
  Description of Artificial Sequence: Synthetic oligonucleotide
gggagaucacaacggcgug

SEQ ID NO: 2528999 - RNA, 19 nt, Artificial Sequence
  Description of Artificial Sequence: Synthetic oligonucleotide
uugcggcagcaaagggaug

SEQ ID NO: 2529000 - RNA, 19 nt, Artificial Sequence
  Description of Artificial Sequence: Synthetic oligonucleotide
ccgcuguugaagccguugg

SEQ ID NO: 2529001 - RNA, 19 nt, Artificial Sequence
  Description of Artificial Sequence: Synthetic oligonucleotide
cggcugauggggaaaagac

SEQ ID NO: 2529002 - RNA, 19 nt, Artificial Sequence
  Description of Artificial Sequence: Synthetic oligonucleotide
agcguuucucagggagauc

SEQ ID NO: 2529003 - RNA, 19 nt, Artificial Sequence
  Description of Artificial Sequence: Synthetic oligonucleotide
ucgcgaggccggaaccgga

SEQ ID NO: 2529004 - RNA, 19 nt, Artificial Sequence
  Description of Artificial Sequence: Synthetic oligonucleotide
guguccgccgccugcacaa

SEQ ID NO: 2529005 - RNA, 19 nt, Artificial Sequence
  Description of Artificial Sequence: Synthetic oligonucleotide
caccggguugaugcggacc

SEQ ID NO: 2529006 - RNA, 19 nt, Artificial Sequence
  Description of Artificial Sequence: Synthetic oligonucleotide
gggguuuugcggcagcaaa

SEQ ID NO: 2529007 - RNA, 19 nt, Artificial Sequence
  Description of Artificial Sequence: Synthetic oligonucleotide
ucauagccuucggucggcu

SEQ ID NO: 2529008 - RNA, 19 nt, Artificial Sequence
  Description of Artificial Sequence: Synthetic oligonucleotide
gaaccggaaggagcgcaca

SEQ ID NO: 2529009 - RNA, 19 nt, Artificial Sequence
  Description of Artificial Sequence: Synthetic oligonucleotide
cucgggagcucgcgaggcc

SEQ ID NO: 2529010 - RNA, 19 nt, Artificial Sequence
  Description of Artificial Sequence: Synthetic oligonucleotide
ugggguuuugcggcagcaa

SEQ ID NO: 2529011 - RNA, 19 nt, Artificial Sequence
  Description of Artificial Sequence: Synthetic oligonucleotide
ucauaccacuuccgcuguu

SEQ ID NO: 2529012 - RNA, 19 nt, Artificial Sequence
  Description of Artificial Sequence: Synthetic oligonucleotide
gguuagcaaguuuauguuu

SEQ ID NO: 2529013 - RNA, 19 nt, Artificial Sequence
  Description of Artificial Sequence: Synthetic oligonucleotide
cacaacggcgugcgccgag

SEQ ID NO: 2529014 - RNA, 19 nt, Artificial Sequence
  Description of Artificial Sequence: Synthetic oligonucleotide
cuccacuuuggggaucauc

SEQ ID NO: 2529015 - RNA, 19 nt, Artificial Sequence
  Description of Artificial Sequence: Synthetic oligonucleotide
caucaaccucaagcaacac

SEQ ID NO: 2529016 - RNA, 19 nt, Artificial Sequence
  Description of Artificial Sequence: Synthetic oligonucleotide
cuauggagcucaaguacau

SEQ ID NO: 2529017 - RNA, 19 nt, Artificial Sequence
  Description of Artificial Sequence: Synthetic oligonucleotide
aagcgccgcccacuccacu

SEQ ID NO: 2529018 - RNA, 19 nt, Artificial Sequence
  Description of Artificial Sequence: Synthetic oligonucleotide
cauggugguuggugaguca

SEQ ID NO: 2529019 - RNA, 19 nt, Artificial Sequence
  Description of Artificial Sequence: Synthetic oligonucleotide
cucgucgugcucauagccu

SEQ ID NO: 2529020 - RNA, 19 nt, Artificial Sequence
  Description of Artificial Sequence: Synthetic oligonucleotide
augcggaccucgguggccu

SEQ ID NO: 2529021 - RNA, 19 nt, Artificial Sequence
  Description of Artificial Sequence: Synthetic oligonucleotide
agcgccgcccacuccacuu

SEQ ID NO: 2529022 - RNA, 19 nt, Artificial Sequence
  Description of Artificial Sequence: Synthetic oligonucleotide
ccgacuccgggcauugcag

SEQ ID NO: 2529023 - RNA, 19 nt, Artificial Sequence
  Description of Artificial Sequence: Synthetic oligonucleotide
cacaagcgccgcccacucc

SEQ ID NO: 2529024 - RNA, 19 nt, Artificial Sequence
  Description of Artificial Sequence: Synthetic oligonucleotide
agauugugggugagcaguu

SEQ ID NO: 2529025 - RNA, 19 nt, Artificial Sequence
  Description of Artificial Sequence: Synthetic oligonucleotide
cacgcgugcccacgccccg

SEQ ID NO: 2529026 - RNA, 19 nt, Artificial Sequence
  Description of Artificial Sequence: Synthetic oligonucleotide
aggccggaaccggaaggag

SEQ ID NO: 2529027 - RNA, 19 nt, Artificial Sequence
  Description of Artificial Sequence: Synthetic oligonucleotide
cacacuucucauaccacuu

SEQ ID NO: 2529028 - RNA, 19 nt, Artificial Sequence
  Description of Artificial Sequence: Synthetic oligonucleotide
guccuaauaccggaagcgu

SEQ ID NO: 2529029 - RNA, 19 nt, Artificial Sequence
  Description of Artificial Sequence: Synthetic oligonucleotide
ggaucccgcggcugauggg

SEQ ID NO: 2529030 - RNA, 19 nt, Artificial Sequence
  Description of Artificial Sequence: Synthetic oligonucleotide
ccacucgggagcucgcgag

SEQ ID NO: 2529031 - RNA, 19 nt, Artificial Sequence
  Description of Artificial Sequence: Synthetic oligonucleotide
cagcaacauauuggggauc

SEQ ID NO: 2529032 - RNA, 19 nt, Artificial Sequence
  Description of Artificial Sequence: Synthetic oligonucleotide
cauccgcgccacgaaauca

SEQ ID NO: 2529033 - RNA, 19 nt, Artificial Sequence
  Description of Artificial Sequence: Synthetic oligonucleotide
caagcgccgcccacuccac

SEQ ID NO: 2529034 - RNA, 19 nt, Artificial Sequence
  Description of Artificial Sequence: Synthetic oligonucleotide
gcgagaucggguucacaca

SEQ ID NO: 2529035 - RNA, 19 nt, Artificial Sequence
  Description of Artificial Sequence: Synthetic oligonucleotide
guccgccgccugcacaagc

SEQ ID NO: 2529036 - RNA, 19 nt, Artificial Sequence
  Description of Artificial Sequence: Synthetic oligonucleotide
ccgcgccacgaaaucaggg

SEQ ID NO: 2529037 - RNA, 19 nt, Artificial Sequence
  Description of Artificial Sequence: Synthetic oligonucleotide
gcgagcucaggagauugug

SEQ ID NO: 2529038 - RNA, 19 nt, Artificial Sequence
  Description of Artificial Sequence: Synthetic oligonucleotide
gggaucauccgcgccacga

SEQ ID NO: 2529039 - RNA, 19 nt, Artificial Sequence
  Description of Artificial Sequence: Synthetic oligonucleotide
cugcacaagcgccgcccac

SEQ ID NO: 2529040 - RNA, 19 nt, Artificial Sequence
  Description of Artificial Sequence: Synthetic oligonucleotide
guuggacacuccgccggac

SEQ ID NO: 2529041 - RNA, 19 nt, Artificial Sequence
  Description of Artificial Sequence: Synthetic oligonucleotide
gccgccugcacaagcgccg

SEQ ID NO: 2529042 - RNA, 19 nt, Artificial Sequence
  Description of Artificial Sequence: Synthetic oligonucleotide
ggacacuccgccggaccgg

SEQ ID NO: 2529043 - RNA, 19 nt, Artificial Sequence
  Description of Artificial Sequence: Synthetic oligonucleotide
ggucggcucuuugggaacc

SEQ ID NO: 2529044 - RNA, 19 nt, Artificial Sequence
  Description of Artificial Sequence: Synthetic oligonucleotide
acgcgugcccacgccccgc

SEQ ID NO: 2529045 - RNA, 19 nt, Artificial Sequence
  Description of Artificial Sequence: Synthetic oligonucleotide
ggguucacacaugacauau

SEQ ID NO: 2529046 - RNA, 19 nt, Artificial Sequence
  Description of Artificial Sequence: Synthetic oligonucleotide
gcucgcgaggccggaaccg

SEQ ID NO: 2529047 - RNA, 19 nt, Artificial Sequence
  Description of Artificial Sequence: Synthetic oligonucleotide
aaccucggccagguuuaaa

SEQ ID NO: 2529048 - RNA, 19 nt, Artificial Sequence
  Description of Artificial Sequence: Synthetic oligonucleotide
ggaaccucggccagguuua

SEQ ID NO: 2529049 - RNA, 19 nt, Artificial Sequence
  Description of Artificial Sequence: Synthetic oligonucleotide
ugaacuccaccggguugau

SEQ ID NO: 2529050 - RNA, 19 nt, Artificial Sequence
  Description of Artificial Sequence: Synthetic oligonucleotide
ggaucauccgcgccacgaa

SEQ ID NO: 2529051 - RNA, 19 nt, Artificial Sequence
  Description of Artificial Sequence: Synthetic oligonucleotide
cgaggccggaaccggaagg

SEQ ID NO: 2529052 - RNA, 19 nt, Artificial Sequence
  Description of Artificial Sequence: Synthetic oligonucleotide
ucacaacggcgugcgccga

SEQ ID NO: 2529053 - RNA, 19 nt, Artificial Sequence
  Description of Artificial Sequence: Synthetic oligonucleotide
uguccgccgccugcacaag

SEQ ID NO: 2529054 - RNA, 19 nt, Artificial Sequence
  Description of Artificial Sequence: Synthetic oligonucleotide
acgugcgagcucaggagau

SEQ ID NO: 2529055 - RNA, 19 nt, Artificial Sequence
  Description of Artificial Sequence: Synthetic oligonucleotide
ucggcucuuugggaaccuc

SEQ ID NO: 2529056 - RNA, 19 nt, Artificial Sequence
  Description of Artificial Sequence: Synthetic oligonucleotide
ggaaccggaaggagcgcac

SEQ ID NO: 2529057 - RNA, 19 nt, Artificial Sequence
  Description of Artificial Sequence: Synthetic oligonucleotide
ggcauugcagggugcccuc

SEQ ID NO: 2529058 - RNA, 19 nt, Artificial Sequence
  Description of Artificial Sequence: Synthetic oligonucleotide
ucccgcggcugauggggaa

SEQ ID NO: 2529059 - RNA, 19 nt, Artificial Sequence
  Description of Artificial Sequence: Synthetic oligonucleotide
cgacuccgggcauugcagg

SEQ ID NO: 2529060 - RNA, 19 nt, Artificial Sequence
  Description of Artificial Sequence: Synthetic oligonucleotide
ggagcgcacacuucucaua

SEQ ID NO: 2529061 - RNA, 19 nt, Artificial Sequence
  Description of Artificial Sequence: Synthetic oligonucleotide
cacgccccgcacgugcgag

SEQ ID NO: 2529062 - RNA, 19 nt, Artificial Sequence
  Description of Artificial Sequence: Synthetic oligonucleotide
gccugcacaagcgccgccc

SEQ ID NO: 2529063 - RNA, 19 nt, Artificial Sequence
  Description of Artificial Sequence: Synthetic oligonucleotide
gggaaccucggccagguuu

SEQ ID NO: 2529064 - RNA, 19 nt, Artificial Sequence
  Description of Artificial Sequence: Synthetic oligonucleotide
ccuaauaccggaagcguuu

SEQ ID NO: 2529065 - RNA, 19 nt, Artificial Sequence
  Description of Artificial Sequence: Synthetic oligonucleotide
gcggcugauggggaaaaga

SEQ ID NO: 2529066 - RNA, 19 nt, Artificial Sequence
  Description of Artificial Sequence: Synthetic oligonucleotide
gcgaggccggaaccggaag

SEQ ID NO: 2529067 - RNA, 19 nt, Artificial Sequence
  Description of Artificial Sequence: Synthetic oligonucleotide
cugggguuuugcggcagca

SEQ ID NO: 2529068 - RNA, 19 nt, Artificial Sequence
  Description of Artificial Sequence: Synthetic oligonucleotide
acgguaccaaauggugguu

SEQ ID NO: 2529069 - RNA, 19 nt, Artificial Sequence
  Description of Artificial Sequence: Synthetic oligonucleotide
gccacgaaaucaggguuga

SEQ ID NO: 2529070 - RNA, 19 nt, Artificial Sequence
  Description of Artificial Sequence: Synthetic oligonucleotide
uagccuucggucggcucuu

SEQ ID NO: 2529071 - RNA, 19 nt, Artificial Sequence
  Description of Artificial Sequence: Synthetic oligonucleotide
gcccacgccccgcacgugc

SEQ ID NO: 2529072 - RNA, 19 nt, Artificial Sequence
  Description of Artificial Sequence: Synthetic oligonucleotide
gcagccgcagcgggaagcc

SEQ ID NO: 2529073 - RNA, 19 nt, Artificial Sequence
  Description of Artificial Sequence: Synthetic oligonucleotide
gcacaagcgccgcccacuc

SEQ ID NO: 2529074 - RNA, 19 nt, Artificial Sequence
  Description of Artificial Sequence: Synthetic oligonucleotide
gauugugggugagcaguuu

SEQ ID NO: 2529075 - RNA, 19 nt, Artificial Sequence
  Description of Artificial Sequence: Synthetic oligonucleotide
gugcccuccagcacaucaa

SEQ ID NO: 2529076 - RNA, 19 nt, Artificial Sequence
  Description of Artificial Sequence: Synthetic oligonucleotide
cuccgccggaccggaagug

SEQ ID NO: 2529077 - RNA, 19 nt, Artificial Sequence
  Description of Artificial Sequence: Synthetic oligonucleotide
ggggaucauccgcgccacg

SEQ ID NO: 2529078 - RNA, 19 nt, Artificial Sequence
  Description of Artificial Sequence: Synthetic oligonucleotide
gguugaugcggaccucggu

SEQ ID NO: 2529079 - RNA, 19 nt, Artificial Sequence
  Description of Artificial Sequence: Synthetic oligonucleotide
uuccgcuguugaagccguu

SEQ ID NO: 2529080 - RNA, 19 nt, Artificial Sequence
  Description of Artificial Sequence: Synthetic oligonucleotide
gccgcagcgggaagccacg

SEQ ID NO: 2529081 - RNA, 19 nt, Artificial Sequence
  Description of Artificial Sequence: Synthetic oligonucleotide
gaccggaaguggugaacuu

SEQ ID NO: 2529082 - RNA, 19 nt, Artificial Sequence
  Description of Artificial Sequence: Synthetic oligonucleotide
ccgggcauugcagggugcc

SEQ ID NO: 2529083 - RNA, 19 nt, Artificial Sequence
  Description of Artificial Sequence: Synthetic oligonucleotide
cccacgccccgcacgugcg

SEQ ID NO: 2529084 - RNA, 19 nt, Artificial Sequence
  Description of Artificial Sequence: Synthetic oligonucleotide
uggggaucccgcggcugau

SEQ ID NO: 2529085 - RNA, 19 nt, Artificial Sequence
  Description of Artificial Sequence: Synthetic oligonucleotide
gcgggaagccacgcgugcc

SEQ ID NO: 2529086 - RNA, 19 nt, Artificial Sequence
  Description of Artificial Sequence: Synthetic oligonucleotide
gccacucgggagcucgcga

SEQ ID NO: 2529087 - RNA, 19 nt, Artificial Sequence
  Description of Artificial Sequence: Synthetic oligonucleotide
cccgacuccgggcauugca

SEQ ID NO: 2529088 - RNA, 19 nt, Artificial Sequence
  Description of Artificial Sequence: Synthetic oligonucleotide
gaaccucggccagguuuaa

SEQ ID NO: 2529089 - RNA, 19 nt, Artificial Sequence
  Description of Artificial Sequence: Synthetic oligonucleotide
gccuucggucggcucuuug

SEQ ID NO: 2529090 - RNA, 19 nt, Artificial Sequence
  Description of Artificial Sequence: Synthetic oligonucleotide
agggugcccuccagcacau

SEQ ID NO: 2529091 - RNA, 19 nt, Artificial Sequence
  Description of Artificial Sequence: Synthetic oligonucleotide
cgcacgugcgagcucagga

SEQ ID NO: 2529092 - RNA, 19 nt, Artificial Sequence
  Description of Artificial Sequence: Synthetic oligonucleotide
aucccgcggcugaugggga

SEQ ID NO: 2529093 - RNA, 19 nt, Artificial Sequence
  Description of Artificial Sequence: Synthetic oligonucleotide
gccggaccggaagugguga

SEQ ID NO: 2529094 - RNA, 19 nt, Artificial Sequence
  Description of Artificial Sequence: Synthetic oligonucleotide
acggcccgacuccgggcau

SEQ ID NO: 2529095 - RNA, 19 nt, Artificial Sequence
  Description of Artificial Sequence: Synthetic oligonucleotide
ggcccgacuccgggcauug

SEQ ID NO: 2529096 - RNA, 19 nt, Artificial Sequence
  Description of Artificial Sequence: Synthetic oligonucleotide
ccucggccagguuuaaagu

SEQ ID NO: 2529097 - RNA, 19 nt, Artificial Sequence
  Description of Artificial Sequence: Synthetic oligonucleotide
gcgccacgaaaucaggguu

SEQ ID NO: 2529098 - RNA, 19 nt, Artificial Sequence
  Description of Artificial Sequence: Synthetic oligonucleotide
cgagaucggguucacacau

SEQ ID NO: 2529099 - RNA, 19 nt, Artificial Sequence
  Description of Artificial Sequence: Synthetic oligonucleotide
cgggagcucgcgaggccgg

SEQ ID NO: 2529100 - RNA, 19 nt, Artificial Sequence
  Description of Artificial Sequence: Synthetic oligonucleotide
cggucggcucuuugggaac

SEQ ID NO: 2529101 - RNA, 19 nt, Artificial Sequence
  Description of Artificial Sequence: Synthetic oligonucleotide
ccugcacaagcgccgccca

SEQ ID NO: 2529102 - RNA, 19 nt, Artificial Sequence
  Description of Artificial Sequence: Synthetic oligonucleotide
cgucgugcucauagccuuc

SEQ ID NO: 2529103 - RNA, 19 nt, Artificial Sequence
  Description of Artificial Sequence: Synthetic oligonucleotide
caaguacauggugguuggu

SEQ ID NO: 2529104 - RNA, 19 nt, Artificial Sequence
  Description of Artificial Sequence: Synthetic oligonucleotide
cuucgucauucagcaacau

SEQ ID NO: 2529105 - RNA, 19 nt, Artificial Sequence
  Description of Artificial Sequence: Synthetic oligonucleotide
ccaccggguugaugcggac

SEQ ID NO: 2529106 - RNA, 19 nt, Artificial Sequence
  Description of Artificial Sequence: Synthetic oligonucleotide
gucggcucuuugggaaccu

SEQ ID NO: 2529107 - RNA, 19 nt, Artificial Sequence
  Description of Artificial Sequence: Synthetic oligonucleotide
gcggaccucgguggccugc

SEQ ID NO: 2529108 - RNA, 19 nt, Artificial Sequence
  Description of Artificial Sequence: Synthetic oligonucleotide
cgcgccacgaaaucagggu

SEQ ID NO: 2529109 - RNA, 19 nt, Artificial Sequence
  Description of Artificial Sequence: Synthetic oligonucleotide
ccccgcacgugcgagcuca

SEQ ID NO: 2529110 - RNA, 19 nt, Artificial Sequence
  Description of Artificial Sequence: Synthetic oligonucleotide
ccggaaccggaaggagcgc

SEQ ID NO: 2529111 - RNA, 19 nt, Artificial Sequence
  Description of Artificial Sequence: Synthetic oligonucleotide
cgugcucauagccuucggu

SEQ ID NO: 2529112 - RNA, 19 nt, Artificial Sequence
  Description of Artificial Sequence: Synthetic oligonucleotide
ccgccugcacaagcgccgc

SEQ ID NO: 2529113 - RNA, 19 nt, Artificial Sequence
  Description of Artificial Sequence: Synthetic oligonucleotide
ggggcgagaucggguucac

SEQ ID NO: 2529114 - RNA, 19 nt, Artificial Sequence
  Description of Artificial Sequence: Synthetic oligonucleotide
cguuggacacuccgccgga

SEQ ID NO: 2529115 - RNA, 19 nt, Artificial Sequence
  Description of Artificial Sequence: Synthetic oligonucleotide
cgugcgccgagccccgcuc

SEQ ID NO: 2529116 - RNA, 19 nt, Artificial Sequence
  Description of Artificial Sequence: Synthetic oligonucleotide
cgucauucagcaacauauu

SEQ ID NO: 2529117 - RNA, 19 nt, Artificial Sequence
  Description of Artificial Sequence: Synthetic oligonucleotide
cggaaccggaaggagcgca

SEQ ID NO: 2529118 - RNA, 19 nt, Artificial Sequence
  Description of Artificial Sequence: Synthetic oligonucleotide
cccgcacgugcgagcucag

SEQ ID NO: 2529119 - RNA, 19 nt, Artificial Sequence
  Description of Artificial Sequence: Synthetic oligonucleotide
acgucucgucgugcucaua

SEQ ID NO: 2529120 - RNA, 19 nt, Artificial Sequence
  Description of Artificial Sequence: Synthetic oligonucleotide
ccacuccacuuuggggauc

SEQ ID NO: 2529121 - RNA, 19 nt, Artificial Sequence
  Description of Artificial Sequence: Synthetic oligonucleotide
ggagcucgcgaggccggaa

SEQ ID NO: 2529122 - RNA, 19 nt, Artificial Sequence
  Description of Artificial Sequence: Synthetic oligonucleotide
cggguucacacaugacaua

SEQ ID NO: 2529123 - RNA, 19 nt, Artificial Sequence
  Description of Artificial Sequence: Synthetic oligonucleotide
agccuucggucggcucuuu

SEQ ID NO: 2529124 - RNA, 19 nt, Artificial Sequence
  Description of Artificial Sequence: Synthetic oligonucleotide
gggcgagaucggguucaca

SEQ ID NO: 2529125 - RNA, 19 nt, Artificial Sequence
  Description of Artificial Sequence: Synthetic oligonucleotide
acacuccgccggaccggaa

SEQ ID NO: 2529126 - RNA, 19 nt, Artificial Sequence
  Description of Artificial Sequence: Synthetic oligonucleotide
gggagcucgcgaggccgga

SEQ ID NO: 2529127 - RNA, 19 nt, Artificial Sequence
  Description of Artificial Sequence: Synthetic oligonucleotide
ccggaccggaaguggugaa

SEQ ID NO: 2529128 - RNA, 19 nt, Artificial Sequence
  Description of Artificial Sequence: Synthetic oligonucleotide
cgccgcccacuccacuuug

SEQ ID NO: 2529129 - RNA, 19 nt, Artificial Sequence
  Description of Artificial Sequence: Synthetic oligonucleotide
cggcgugcgccgagccccg

SEQ ID NO: 2529130 - RNA, 19 nt, Artificial Sequence
  Description of Artificial Sequence: Synthetic oligonucleotide
gcgugcccacgccccgcac

SEQ ID NO: 2529131 - RNA, 19 nt, Artificial Sequence
  Description of Artificial Sequence: Synthetic oligonucleotide
cgcggcugauggggaaaag

SEQ ID NO: 2529132 - RNA, 19 nt, Artificial Sequence
  Description of Artificial Sequence: Synthetic oligonucleotide
cgcgaggccggaaccggaa

SEQ ID NO: 2529133 - RNA, 19 nt, Artificial Sequence
  Description of Artificial Sequence: Synthetic oligonucleotide
gcccgacuccgggcauugc

SEQ ID NO: 2529134 - RNA, 19 nt, Artificial Sequence
  Description of Artificial Sequence: Synthetic oligonucleotide
ccgccggaccggaaguggu

SEQ ID NO: 2529135 - RNA, 19 nt, Artificial Sequence
  Description of Artificial Sequence: Synthetic oligonucleotide
cggcagcaaagggauggga

SEQ ID NO: 2529136 - RNA, 19 nt, Artificial Sequence
  Description of Artificial Sequence: Synthetic oligonucleotide
ccacgaaaucaggguugaa

SEQ ID NO: 2529137 - RNA, 19 nt, Artificial Sequence
  Description of Artificial Sequence: Synthetic oligonucleotide
ggcgugcgccgagccccgc

SEQ ID NO: 2529138 - RNA, 19 nt, Artificial Sequence
  Description of Artificial Sequence: Synthetic oligonucleotide
cccgcggcugauggggaaa

SEQ ID NO: 2529139 - RNA, 19 nt, Artificial Sequence
  Description of Artificial Sequence: Synthetic oligonucleotide
ccacgccccgcacgugcga

SEQ ID NO: 2529140 - RNA, 19 nt, Artificial Sequence
  Description of Artificial Sequence: Synthetic oligonucleotide
gccccgcacgugcgagcuc

SEQ ID NO: 2529141 - RNA, 19 nt, Artificial Sequence
  Description of Artificial Sequence: Synthetic oligonucleotide
gcgugcgccgagccccgcu

SEQ ID NO: 2529142 - RNA, 19 nt, Artificial Sequence
  Description of Artificial Sequence: Synthetic oligonucleotide
ccgcggcugauggggaaaa

SEQ ID NO: 2529143 - RNA, 19 nt, Artificial Sequence
  Description of Artificial Sequence: Synthetic oligonucleotide
gcaacacguggugcaucuu

SEQ ID NO: 2529144 - RNA, 19 nt, Artificial Sequence
  Description of Artificial Sequence: Synthetic oligonucleotide
gcgccgcccacuccacuuu

SEQ ID NO: 2529145 - RNA, 19 nt, Artificial Sequence
  Description of Artificial Sequence: Synthetic oligonucleotide
cgcgugcccacgccccgca

SEQ ID NO: 2529146 - RNA, 19 nt, Artificial Sequence
  Description of Artificial Sequence: Synthetic oligonucleotide
cgccccgcacgugcgagcu

SEQ ID NO: 2529147 - RNA, 19 nt, Artificial Sequence
  Description of Artificial Sequence: Synthetic oligonucleotide
cggcccgacuccgggcauu

SEQ ID NO: 2529148 - RNA, 19 nt, Artificial Sequence
  Description of Artificial Sequence: Synthetic oligonucleotide
aucaguauccuccaggccc

SEQ ID NO: 2529149 - RNA, 19 nt, Artificial Sequence
  Description of Artificial Sequence: Synthetic oligonucleotide
uuguucaacucuaagaucu

SEQ ID NO: 2529150 - RNA, 19 nt, Artificial Sequence
  Description of Artificial Sequence: Synthetic oligonucleotide
auagcuauggucccuaggg

SEQ ID NO: 2529151 - RNA, 19 nt, Artificial Sequence
  Description of Artificial Sequence: Synthetic oligonucleotide
uguguguagacucagggac

SEQ ID NO: 2529152 - RNA, 19 nt, Artificial Sequence
  Description of Artificial Sequence: Synthetic oligonucleotide
agggcaagaggcuauaugg

SEQ ID NO: 2529153 - RNA, 19 nt, Artificial Sequence
  Description of Artificial Sequence: Synthetic oligonucleotide
auguuugcuggucagcucc

SEQ ID NO: 2529154 - RNA, 19 nt, Artificial Sequence
  Description of Artificial Sequence: Synthetic oligonucleotide
aacucuaagaucugagugu

SEQ ID NO: 2529155 - RNA, 19 nt, Artificial Sequence
  Description of Artificial Sequence: Synthetic oligonucleotide
ucaucugugcucauuguag

SEQ ID NO: 2529156 - RNA, 19 nt, Artificial Sequence
  Description of Artificial Sequence: Synthetic oligonucleotide
aaugcuggaaggcugcucu

SEQ ID NO: 2529157 - RNA, 19 nt, Artificial Sequence
  Description of Artificial Sequence: Synthetic oligonucleotide
agcuauggucccuagggcc

SEQ ID NO: 2529158 - RNA, 19 nt, Artificial Sequence
  Description of Artificial Sequence: Synthetic oligonucleotide
uuuuguacaccaucugucc

SEQ ID NO: 2529159 - RNA, 19 nt, Artificial Sequence
  Description of Artificial Sequence: Synthetic oligonucleotide
auuguaguccaucguaggg

SEQ ID NO: 2529160 - RNA, 19 nt, Artificial Sequence
  Description of Artificial Sequence: Synthetic oligonucleotide
ugcaucaguauccuccagg

SEQ ID NO: 2529161 - RNA, 19 nt, Artificial Sequence
  Description of Artificial Sequence: Synthetic oligonucleotide
agaucugagugucuggcac

SEQ ID NO: 2529162 - RNA, 19 nt, Artificial Sequence
  Description of Artificial Sequence: Synthetic oligonucleotide
uucaacucuaagaucugag

SEQ ID NO: 2529163 - RNA, 19 nt, Artificial Sequence
  Description of Artificial Sequence: Synthetic oligonucleotide
uuugcuuuuguacaccauc

SEQ ID NO: 2529164 - RNA, 19 nt, Artificial Sequence
  Description of Artificial Sequence: Synthetic oligonucleotide
ucucuuggaaugcuggaag

SEQ ID NO: 2529165 - RNA, 19 nt, Artificial Sequence
  Description of Artificial Sequence: Synthetic oligonucleotide
ucaucuucugaugaggugc

SEQ ID NO: 2529166 - RNA, 19 nt, Artificial Sequence
  Description of Artificial Sequence: Synthetic oligonucleotide
aagcccuugcaucaguauc

SEQ ID NO: 2529167 - RNA, 19 nt, Artificial Sequence
  Description of Artificial Sequence: Synthetic oligonucleotide
uggagugacaccccaaagc

SEQ ID NO: 2529168 - RNA, 19 nt, Artificial Sequence
  Description of Artificial Sequence: Synthetic oligonucleotide
ugcucauuguaguccaucg

SEQ ID NO: 2529169 - RNA, 19 nt, Artificial Sequence
  Description of Artificial Sequence: Synthetic oligonucleotide
uguagacucagggacagag

SEQ ID NO: 2529170 - RNA, 19 nt, Artificial Sequence
  Description of Artificial Sequence: Synthetic oligonucleotide
ucuaagaucugagugucug

SEQ ID NO: 2529171 - RNA, 19 nt, Artificial Sequence
  Description of Artificial Sequence: Synthetic oligonucleotide
cuuuuguacaccaucuguc

SEQ ID NO: 2529172 - RNA, 19 nt, Artificial Sequence
  Description of Artificial Sequence: Synthetic oligonucleotide
uuguaguccaucguagggg

SEQ ID NO: 2529173 - RNA, 19 nt, Artificial Sequence
  Description of Artificial Sequence: Synthetic oligonucleotide
caacucuaagaucugagug

SEQ ID NO: 2529174 - RNA, 19 nt, Artificial Sequence
  Description of Artificial Sequence: Synthetic oligonucleotide
aggcuguuugcuuuuguac

SEQ ID NO: 2529175 - RNA, 19 nt, Artificial Sequence
  Description of Artificial Sequence: Synthetic oligonucleotide
ugcaggaugcuccgggugg

SEQ ID NO: 2529176 - RNA, 19 nt, Artificial Sequence
  Description of Artificial Sequence: Synthetic oligonucleotide
gagugucuggcacagcccg

SEQ ID NO: 2529177 - RNA, 19 nt, Artificial Sequence
  Description of Artificial Sequence: Synthetic oligonucleotide
uccacaacugguuccuggg

SEQ ID NO: 2529178 - RNA, 19 nt, Artificial Sequence
  Description of Artificial Sequence: Synthetic oligonucleotide
uugcuuuuguacaccaucu

SEQ ID NO: 2529179 - RNA, 19 nt, Artificial Sequence
  Description of Artificial Sequence: Synthetic oligonucleotide
ugugauuccacaacugguu

SEQ ID NO: 2529180 - RNA, 19 nt, Artificial Sequence
  Description of Artificial Sequence: Synthetic oligonucleotide
ugugaggggaggcuguuug

SEQ ID NO: 2529181 - RNA, 19 nt, Artificial Sequence
  Description of Artificial Sequence: Synthetic oligonucleotide
ucaacucuaagaucugagu

SEQ ID NO: 2529182 - RNA, 19 nt, Artificial Sequence
  Description of Artificial Sequence: Synthetic oligonucleotide
uaagaucugagugucuggc

SEQ ID NO: 2529183 - RNA, 19 nt, Artificial Sequence
  Description of Artificial Sequence: Synthetic oligonucleotide
uuggaaugcuggaaggcug

SEQ ID NO: 2529184 - RNA, 19 nt, Artificial Sequence
  Description of Artificial Sequence: Synthetic oligonucleotide
acaucagccagguacugug

SEQ ID NO: 2529185 - RNA, 19 nt, Artificial Sequence
  Description of Artificial Sequence: Synthetic oligonucleotide
ucugugcacaccucugggg

SEQ ID NO: 2529186 - RNA, 19 nt, Artificial Sequence
  Description of Artificial Sequence: Synthetic oligonucleotide
ugauuccacaacugguucc

SEQ ID NO: 2529187 - RNA, 19 nt, Artificial Sequence
  Description of Artificial Sequence: Synthetic oligonucleotide
ucugugcucauuguagucc

SEQ ID NO: 2529188 - RNA, 19 nt, Artificial Sequence
  Description of Artificial Sequence: Synthetic oligonucleotide
acucuaagaucugaguguc

SEQ ID NO: 2529189 - RNA, 19 nt, Artificial Sequence
  Description of Artificial Sequence: Synthetic oligonucleotide
uguaguccaucguaggggu

SEQ ID NO: 2529190 - RNA, 19 nt, Artificial Sequence
  Description of Artificial Sequence: Synthetic oligonucleotide
ucucaucuucugaugaggu

SEQ ID NO: 2529191 - RNA, 19 nt, Artificial Sequence
  Description of Artificial Sequence: Synthetic oligonucleotide
uggucucaucuucugauga

SEQ ID NO: 2529192 - RNA, 19 nt, Artificial Sequence
  Description of Artificial Sequence: Synthetic oligonucleotide
ccaggcauagcuauggucc

SEQ ID NO: 2529193 - RNA, 19 nt, Artificial Sequence
  Description of Artificial Sequence: Synthetic oligonucleotide
agcccuugcaucaguaucc

SEQ ID NO: 2529194 - RNA, 19 nt, Artificial Sequence
  Description of Artificial Sequence: Synthetic oligonucleotide
caagaggcuauauggcugc

SEQ ID NO: 2529195 - RNA, 19 nt, Artificial Sequence
  Description of Artificial Sequence: Synthetic oligonucleotide
acugauguuugcuggucag

SEQ ID NO: 2529196 - RNA, 19 nt, Artificial Sequence
  Description of Artificial Sequence: Synthetic oligonucleotide
cuaagaucugagugucugg

SEQ ID NO: 2529197 - RNA, 19 nt, Artificial Sequence
  Description of Artificial Sequence: Synthetic oligonucleotide
ugcucuucuggacuggagu

SEQ ID NO: 2529198 - RNA, 19 nt, Artificial Sequence
  Description of Artificial Sequence: Synthetic oligonucleotide
accccaaagcccuugcauc

SEQ ID NO: 2529199 - RNA, 19 nt, Artificial Sequence
  Description of Artificial Sequence: Synthetic oligonucleotide
uguguagacucagggacag

SEQ ID NO: 2529200 - RNA, 19 nt, Artificial Sequence
  Description of Artificial Sequence: Synthetic oligonucleotide
ccuugcaucaguauccucc

SEQ ID NO: 2529201 - RNA, 19 nt, Artificial Sequence
  Description of Artificial Sequence: Synthetic oligonucleotide
cuucugaugaggugccagg

SEQ ID NO: 2529202 - RNA, 19 nt, Artificial Sequence
  Description of Artificial Sequence: Synthetic oligonucleotide
gacagugccucaucugugc

SEQ ID NO: 2529203 - RNA, 19 nt, Artificial Sequence
  Description of Artificial Sequence: Synthetic oligonucleotide
cucuuggaaugcuggaagg

SEQ ID NO: 2529204 - RNA, 19 nt, Artificial Sequence
  Description of Artificial Sequence: Synthetic oligonucleotide
cuggacuggagugacaccc

SEQ ID NO: 2529205 - RNA, 19 nt, Artificial Sequence
  Description of Artificial Sequence: Synthetic oligonucleotide
aucugugcucauuguaguc

SEQ ID NO: 2529206 - RNA, 19 nt, Artificial Sequence
  Description of Artificial Sequence: Synthetic oligonucleotide
cuuguucaacucuaagauc

SEQ ID NO: 2529207 - RNA, 19 nt, Artificial Sequence
  Description of Artificial Sequence: Synthetic oligonucleotide
ugcuuuuguacaccaucug

SEQ ID NO: 2529208 - RNA, 19 nt, Artificial Sequence
  Description of Artificial Sequence: Synthetic oligonucleotide
aagaucugagugucuggca

SEQ ID NO: 2529209 - RNA, 19 nt, Artificial Sequence
  Description of Artificial Sequence: Synthetic oligonucleotide
gagggugccaccuggcuug

SEQ ID NO: 2529210 - RNA, 19 nt, Artificial Sequence
  Description of Artificial Sequence: Synthetic oligonucleotide
uguucaacucuaagaucug

SEQ ID NO: 2529211 - RNA, 19 nt, Artificial Sequence
  Description of Artificial Sequence: Synthetic oligonucleotide
ugaggugccagggucacug

SEQ ID NO: 2529212 - RNA, 19 nt, Artificial Sequence
  Description of Artificial Sequence: Synthetic oligonucleotide
ugagagggacugcaggcug

SEQ ID NO: 2529213 - RNA, 19 nt, Artificial Sequence
  Description of Artificial Sequence: Synthetic oligonucleotide
gcugugauuccacaacugg

SEQ ID NO: 2529214 - RNA, 19 nt, Artificial Sequence
  Description of Artificial Sequence: Synthetic oligonucleotide
gcuguguguagacucaggg

SEQ ID NO: 2529215 - RNA, 19 nt, Artificial Sequence
  Description of Artificial Sequence: Synthetic oligonucleotide
ugaugaggugccaggguca

SEQ ID NO: 2529216 - RNA, 19 nt, Artificial Sequence
  Description of Artificial Sequence: Synthetic oligonucleotide
ucugacagugccucaucug

SEQ ID NO: 2529217 - RNA, 19 nt, Artificial Sequence
  Description of Artificial Sequence: Synthetic oligonucleotide
ugagcguccuccuccuccg

SEQ ID NO: 2529218 - RNA, 19 nt, Artificial Sequence
  Description of Artificial Sequence: Synthetic oligonucleotide
ucuucugaugaggugccag

SEQ ID NO: 2529219 - RNA, 19 nt, Artificial Sequence
  Description of Artificial Sequence: Synthetic oligonucleotide
ucaguauccuccaggcccu

SEQ ID NO: 2529220 - RNA, 19 nt, Artificial Sequence
  Description of Artificial Sequence: Synthetic oligonucleotide
uccgugucugcacugggcu

SEQ ID NO: 2529221 - RNA, 19 nt, Artificial Sequence
  Description of Artificial Sequence: Synthetic oligonucleotide
uggaaggcugcucugggau

SEQ ID NO: 2529222 - RNA, 19 nt, Artificial Sequence
  Description of Artificial Sequence: Synthetic oligonucleotide
ggucacugauguuugcugg

SEQ ID NO: 2529223 - RNA, 19 nt, Artificial Sequence
  Description of Artificial Sequence: Synthetic oligonucleotide
ugagugucuggcacagccc

SEQ ID NO: 2529224 - RNA, 19 nt, Artificial Sequence
  Description of Artificial Sequence: Synthetic oligonucleotide
gagggcaagaggcuauaug

SEQ ID NO: 2529225 - RNA, 19 nt, Artificial Sequence
  Description of Artificial Sequence: Synthetic oligonucleotide
cagccagguacugugaggg

SEQ ID NO: 2529226 - RNA, 19 nt, Artificial Sequence
  Description of Artificial Sequence: Synthetic oligonucleotide
caucuucugaugaggugcc

SEQ ID NO: 2529227 - RNA, 19 nt, Artificial Sequence
  Description of Artificial Sequence: Synthetic oligonucleotide
ugugcccugugucugugca

SEQ ID NO: 2529228 - RNA, 19 nt, Artificial Sequence
  Description of Artificial Sequence: Synthetic oligonucleotide
cauagcuauggucccuagg

SEQ ID NO: 2529229 - RNA, 19 nt, Artificial Sequence
  Description of Artificial Sequence: Synthetic oligonucleotide
gucucaucuucugaugagg

SEQ ID NO: 2529230 - RNA, 19 nt, Artificial Sequence
  Description of Artificial Sequence: Synthetic oligonucleotide
aaagcccuugcaucaguau

SEQ ID NO: 2529231 - RNA, 19 nt, Artificial Sequence
  Description of Artificial Sequence: Synthetic oligonucleotide
agugacaccccaaagcccu

SEQ ID NO: 2529232 - RNA, 19 nt, Artificial Sequence
  Description of Artificial Sequence: Synthetic oligonucleotide
cauggagggugccaccugg

SEQ ID NO: 2529233 - RNA, 19 nt, Artificial Sequence
  Description of Artificial Sequence: Synthetic oligonucleotide
acaacugguuccugggcug

SEQ ID NO: 2529234 - RNA, 19 nt, Artificial Sequence
  Description of Artificial Sequence: Synthetic oligonucleotide
ugacagugccucaucugug

SEQ ID NO: 2529235 - RNA, 19 nt, Artificial Sequence
  Description of Artificial Sequence: Synthetic oligonucleotide
aucagccagguacugugag

SEQ ID NO: 2529236 - RNA, 19 nt, Artificial Sequence
  Description of Artificial Sequence: Synthetic oligonucleotide
gaaggcugcucugggaucc

SEQ ID NO: 2529237 - RNA, 19 nt, Artificial Sequence
  Description of Artificial Sequence: Synthetic oligonucleotide
uguacaccaucugucccag

SEQ ID NO: 2529238 - RNA, 19 nt, Artificial Sequence
  Description of Artificial Sequence: Synthetic oligonucleotide
aggcgguauccucagagca

SEQ ID NO: 2529239 - RNA, 19 nt, Artificial Sequence
  Description of Artificial Sequence: Synthetic oligonucleotide
uauggcugcucuucuggac

SEQ ID NO: 2529240 - RNA, 19 nt, Artificial Sequence
  Description of Artificial Sequence: Synthetic oligonucleotide
agggacugcaggcugugug

SEQ ID NO: 2529241 - RNA, 19 nt, Artificial Sequence
  Description of Artificial Sequence: Synthetic oligonucleotide
gucccuagggcccucuugc

SEQ ID NO: 2529242 - RNA, 19 nt, Artificial Sequence
  Description of Artificial Sequence: Synthetic oligonucleotide
uucccugugucuccaugug

SEQ ID NO: 2529243 - RNA, 19 nt, Artificial Sequence
  Description of Artificial Sequence: Synthetic oligonucleotide
aucguagggguuccccagg

SEQ ID NO: 2529244 - RNA, 19 nt, Artificial Sequence
  Description of Artificial Sequence: Synthetic oligonucleotide
cuauauggcugcucuucug

SEQ ID NO: 2529245 - RNA, 19 nt, Artificial Sequence
  Description of Artificial Sequence: Synthetic oligonucleotide
cugagcguccuccuccucc

SEQ ID NO: 2529246 - RNA, 19 nt, Artificial Sequence
  Description of Artificial Sequence: Synthetic oligonucleotide
cacaccucuggggacaccg

SEQ ID NO: 2529247 - RNA, 19 nt, Artificial Sequence
  Description of Artificial Sequence: Synthetic oligonucleotide
uugcaggaugcuccgggug

SEQ ID NO: 2529248 - RNA, 19 nt, Artificial Sequence
  Description of Artificial Sequence: Synthetic oligonucleotide
gcugacaugcgcuuguuca

SEQ ID NO: 2529249 - RNA, 19 nt, Artificial Sequence
  Description of Artificial Sequence: Synthetic oligonucleotide
agugccucaucugugcuca

SEQ ID NO: 2529250 - RNA, 19 nt, Artificial Sequence
  Description of Artificial Sequence: Synthetic oligonucleotide
caucguagggguuccccag

SEQ ID NO: 2529251 - RNA, 19 nt, Artificial Sequence
  Description of Artificial Sequence: Synthetic oligonucleotide
acuggagugacaccccaaa

SEQ ID NO: 2529252 - RNA, 19 nt, Artificial Sequence
  Description of Artificial Sequence: Synthetic oligonucleotide
acagcugacaugcgcuugu

SEQ ID NO: 2529253 - RNA, 19 nt, Artificial Sequence
  Description of Artificial Sequence: Synthetic oligonucleotide
gaggcuauauggcugcucu

SEQ ID NO: 2529254 - RNA, 19 nt, Artificial Sequence
  Description of Artificial Sequence: Synthetic oligonucleotide
ucuucuggacuggagugac

SEQ ID NO: 2529255 - RNA, 19 nt, Artificial Sequence
  Description of Artificial Sequence: Synthetic oligonucleotide
gauguuugcuggucagcuc

SEQ ID NO: 2529256 - RNA, 19 nt, Artificial Sequence
  Description of Artificial Sequence: Synthetic oligonucleotide
gaucugagugucuggcaca

SEQ ID NO: 2529257 - RNA, 19 nt, Artificial Sequence
  Description of Artificial Sequence: Synthetic oligonucleotide
uucucuuggaaugcuggaa

SEQ ID NO: 2529258 - RNA, 19 nt, Artificial Sequence
  Description of Artificial Sequence: Synthetic oligonucleotide
guccuccacucucugacag

SEQ ID NO: 2529259 - RNA, 19 nt, Artificial Sequence
  Description of Artificial Sequence: Synthetic oligonucleotide
gugauuccacaacugguuc

SEQ ID NO: 2529260 - RNA, 19 nt, Artificial Sequence
  Description of Artificial Sequence: Synthetic oligonucleotide
aguccaucguagggguucc

SEQ ID NO: 2529261 - RNA, 19 nt, Artificial Sequence
  Description of Artificial Sequence: Synthetic oligonucleotide
caggcauagcuaugguccc

SEQ ID NO: 2529262 - RNA, 19 nt, Artificial Sequence
  Description of Artificial Sequence: Synthetic oligonucleotide
guagacucagggacagagg

SEQ ID NO: 2529263 - RNA, 19 nt, Artificial Sequence
  Description of Artificial Sequence: Synthetic oligonucleotide
agguacugugaggggaggc

SEQ ID NO: 2529264 - RNA, 19 nt, Artificial Sequence
  Description of Artificial Sequence: Synthetic oligonucleotide
agcugacaugcgcuuguuc

SEQ ID NO: 2529265 - RNA, 19 nt, Artificial Sequence
  Description of Artificial Sequence: Synthetic oligonucleotide
gauccuggagacugucuuc

SEQ ID NO: 2529266 - RNA, 19 nt, Artificial Sequence
  Description of Artificial Sequence: Synthetic oligonucleotide
ucguagggguuccccaggc

SEQ ID NO: 2529267 - RNA, 19 nt, Artificial Sequence
  Description of Artificial Sequence: Synthetic oligonucleotide
agaggacaggcccagggua

SEQ ID NO: 2529268 - RNA, 19 nt, Artificial Sequence
  Description of Artificial Sequence: Synthetic oligonucleotide
accgcauggagggugccac

SEQ ID NO: 2529269 - RNA, 19 nt, Artificial Sequence
  Description of Artificial Sequence: Synthetic oligonucleotide
uaguccaucguagggguuc

SEQ ID NO: 2529270 - RNA, 19 nt, Artificial Sequence
  Description of Artificial Sequence: Synthetic oligonucleotide
uacugugaggggaggcugu

SEQ ID NO: 2529271 - RNA, 19 nt, Artificial Sequence
  Description of Artificial Sequence: Synthetic oligonucleotide
caguaccacguucuccagg

SEQ ID NO: 2529272 - RNA, 19 nt, Artificial Sequence
  Description of Artificial Sequence: Synthetic oligonucleotide
aucugagugucuggcacag

SEQ ID NO: 2529273 - RNA, 19 nt, Artificial Sequence
  Description of Artificial Sequence: Synthetic oligonucleotide
ugugcacaccucuggggac

SEQ ID NO: 2529274 - RNA, 19 nt, Artificial Sequence
  Description of Artificial Sequence: Synthetic oligonucleotide
gcaggcgguauccucagag

SEQ ID NO: 2529275 - RNA, 19 nt, Artificial Sequence
  Description of Artificial Sequence: Synthetic oligonucleotide
guauccucagagcagggcu

SEQ ID NO: 2529276 - RNA, 19 nt, Artificial Sequence
  Description of Artificial Sequence: Synthetic oligonucleotide
cuggggacaccgcauggag

SEQ ID NO: 2529277 - RNA, 19 nt, Artificial Sequence
  Description of Artificial Sequence: Synthetic oligonucleotide
cuggagugacaccccaaag

SEQ ID NO: 2529278 - RNA, 19 nt, Artificial Sequence
  Description of Artificial Sequence: Synthetic oligonucleotide
gcuuguucaacucuaagau

SEQ ID NO: 2529279 - RNA, 19 nt, Artificial Sequence
  Description of Artificial Sequence: Synthetic oligonucleotide
uugccugagagggacugca

SEQ ID NO: 2529280 - RNA, 19 nt, Artificial Sequence
  Description of Artificial Sequence: Synthetic oligonucleotide
uccaucguagggguucccc

SEQ ID NO: 2529281 - RNA, 19 nt, Artificial Sequence
  Description of Artificial Sequence: Synthetic oligonucleotide
caggcgguauccucagagc

SEQ ID NO: 2529282 - RNA, 19 nt, Artificial Sequence
  Description of Artificial Sequence: Synthetic oligonucleotide
gacugcaggcuguguguag

SEQ ID NO: 2529283 - RNA, 19 nt, Artificial Sequence
  Description of Artificial Sequence: Synthetic oligonucleotide
ugacaugcgcuuguucaac

SEQ ID NO: 2529284 - RNA, 19 nt, Artificial Sequence
  Description of Artificial Sequence: Synthetic oligonucleotide
ggucucaucuucugaugag

SEQ ID NO: 2529285 - RNA, 19 nt, Artificial Sequence
  Description of Artificial Sequence: Synthetic oligonucleotide
cagagguguccacaucagc

SEQ ID NO: 2529286 - RNA, 19 nt, Artificial Sequence
  Description of Artificial Sequence: Synthetic oligonucleotide
cuguguguagacucaggga

SEQ ID NO: 2529287 - RNA, 19 nt, Artificial Sequence
  Description of Artificial Sequence: Synthetic oligonucleotide
uccuccgugucugcacugg

SEQ ID NO: 2529288 - RNA, 19 nt, Artificial Sequence
  Description of Artificial Sequence: Synthetic oligonucleotide
cagcucagugugagcaucc

SEQ ID NO: 2529289 - RNA, 19 nt, Artificial Sequence
  Description of Artificial Sequence: Synthetic oligonucleotide
ucuggggacaccgcaugga

SEQ ID NO: 2529290 - RNA, 19 nt, Artificial Sequence
  Description of Artificial Sequence: Synthetic oligonucleotide
agaggcuauauggcugcuc

SEQ ID NO: 2529291 - RNA, 19 nt, Artificial Sequence
  Description of Artificial Sequence: Synthetic oligonucleotide
cuccgugucugcacugggc

SEQ ID NO: 2529292 - RNA, 19 nt, Artificial Sequence
  Description of Artificial Sequence: Synthetic oligonucleotide
ugcgcuuguucaacucuaa

SEQ ID NO: 2529293 - RNA, 19 nt, Artificial Sequence
  Description of Artificial Sequence: Synthetic oligonucleotide
cugugcacaccucugggga

SEQ ID NO: 2529294 - RNA, 19 nt, Artificial Sequence
  Description of Artificial Sequence: Synthetic oligonucleotide
cugauguuugcuggucagc

SEQ ID NO: 2529295 - RNA, 19 nt, Artificial Sequence
  Description of Artificial Sequence: Synthetic oligonucleotide
cucuggggacaccgcaugg

SEQ ID NO: 2529296 - RNA, 19 nt, Artificial Sequence
  Description of Artificial Sequence: Synthetic oligonucleotide
acagugccucaucugugcu

SEQ ID NO: 2529297 - RNA, 19 nt, Artificial Sequence
  Description of Artificial Sequence: Synthetic oligonucleotide
agggcccucuugcaggaug

SEQ ID NO: 2529298 - RNA, 19 nt, Artificial Sequence
  Description of Artificial Sequence: Synthetic oligonucleotide
uggcaguaccacguucucc

SEQ ID NO: 2529299 - RNA, 19 nt, Artificial Sequence
  Description of Artificial Sequence: Synthetic oligonucleotide
agccagguacugugagggg

SEQ ID NO: 2529300 - RNA, 19 nt, Artificial Sequence
  Description of Artificial Sequence: Synthetic oligonucleotide
cugugcucauuguagucca

SEQ ID NO: 2529301 - RNA, 19 nt, Artificial Sequence
  Description of Artificial Sequence: Synthetic oligonucleotide
ucacugauguuugcugguc

SEQ ID NO: 2529302 - RNA, 19 nt, Artificial Sequence
  Description of Artificial Sequence: Synthetic oligonucleotide
gccugagagggacugcagg

SEQ ID NO: 2529303 - RNA, 19 nt, Artificial Sequence
  Description of Artificial Sequence: Synthetic oligonucleotide
gggucacugauguuugcug

SEQ ID NO: 2529304 - RNA, 19 nt, Artificial Sequence
  Description of Artificial Sequence: Synthetic oligonucleotide
gauuccacaacugguuccu

SEQ ID NO: 2529305 - RNA, 19 nt, Artificial Sequence
  Description of Artificial Sequence: Synthetic oligonucleotide
cagguggaccagcagguuc

SEQ ID NO: 2529306 - RNA, 19 nt, Artificial Sequence
  Description of Artificial Sequence: Synthetic oligonucleotide
gcaagaggcuauauggcug

SEQ ID NO: 2529307 - RNA, 19 nt, Artificial Sequence
  Description of Artificial Sequence: Synthetic oligonucleotide
acugguuccugggcugagg

SEQ ID NO: 2529308 - RNA, 19 nt, Artificial Sequence
  Description of Artificial Sequence: Synthetic oligonucleotide
agggucacugauguuugcu

SEQ ID NO: 2529309 - RNA, 19 nt, Artificial Sequence
  Description of Artificial Sequence: Synthetic oligonucleotide
guacugugaggggaggcug

SEQ ID NO: 2529310 - RNA, 19 nt, Artificial Sequence
  Description of Artificial Sequence: Synthetic oligonucleotide
agguggaccagcagguucu

SEQ ID NO: 2529311 - RNA, 19 nt, Artificial Sequence
  Description of Artificial Sequence: Synthetic oligonucleotide
guucaacucuaagaucuga

SEQ ID NO: 2529312 - RNA, 19 nt, Artificial Sequence
  Description of Artificial Sequence: Synthetic oligonucleotide
uccuccuccgugucugcac

SEQ ID NO: 2529313 - RNA, 19 nt, Artificial Sequence
  Description of Artificial Sequence: Synthetic oligonucleotide
cucagggacagaggacagg

SEQ ID NO: 2529314 - RNA, 19 nt, Artificial Sequence
  Description of Artificial Sequence: Synthetic oligonucleotide
auggagggugccaccuggc

SEQ ID NO: 2529315 - RNA, 19 nt, Artificial Sequence
  Description of Artificial Sequence: Synthetic oligonucleotide
cugacagugccucaucugu

SEQ ID NO: 2529316 - RNA, 19 nt, Artificial Sequence
  Description of Artificial Sequence: Synthetic oligonucleotide
gacaccgcauggagggugc

SEQ ID NO: 2529317 - RNA, 19 nt, Artificial Sequence
  Description of Artificial Sequence: Synthetic oligonucleotide
gcgguauccucagagcagg

SEQ ID NO: 2529318 - RNA, 19 nt, Artificial Sequence
  Description of Artificial Sequence: Synthetic oligonucleotide
agguucuccacagcugaca

SEQ ID NO: 2529319 - RNA, 19 nt, Artificial Sequence
  Description of Artificial Sequence: Synthetic oligonucleotide
gugaggggaggcuguuugc

SEQ ID NO: 2529320 - RNA, 19 nt, Artificial Sequence
  Description of Artificial Sequence: Synthetic oligonucleotide
ggaugcuccgggugggucc

SEQ ID NO: 2529321 - RNA, 19 nt, Artificial Sequence
  Description of Artificial Sequence: Synthetic oligonucleotide
cugugauuccacaacuggu

SEQ ID NO: 2529322 - RNA, 19 nt, Artificial Sequence
  Description of Artificial Sequence: Synthetic oligonucleotide
aacugguuccugggcugag

SEQ ID NO: 2529323 - RNA, 19 nt, Artificial Sequence
  Description of Artificial Sequence: Synthetic oligonucleotide
uccugagcguccuccuccu

SEQ ID NO: 2529324 - RNA, 19 nt, Artificial Sequence
  Description of Artificial Sequence: Synthetic oligonucleotide
caggcaggcgguauccuca

SEQ ID NO: 2529325 - RNA, 19 nt, Artificial Sequence
  Description of Artificial Sequence: Synthetic oligonucleotide
cucaucugugcucauugua

SEQ ID NO: 2529326 - RNA, 19 nt, Artificial Sequence
  Description of Artificial Sequence: Synthetic oligonucleotide
gcuuuuguacaccaucugu

SEQ ID NO: 2529327 - RNA, 19 nt, Artificial Sequence
  Description of Artificial Sequence: Synthetic oligonucleotide
uccuccacucucugacagu

SEQ ID NO: 2529328 - RNA, 19 nt, Artificial Sequence
  Description of Artificial Sequence: Synthetic oligonucleotide
gcuauggucccuagggccc

SEQ ID NO: 2529329 - RNA, 19 nt, Artificial Sequence
  Description of Artificial Sequence: Synthetic oligonucleotide
ucccaggcauagcuauggu

SEQ ID NO: 2529330 - RNA, 19 nt, Artificial Sequence
  Description of Artificial Sequence: Synthetic oligonucleotide
cacugauguuugcugguca

SEQ ID NO: 2529331 - RNA, 19 nt, Artificial Sequence
  Description of Artificial Sequence: Synthetic oligonucleotide
ccagguacugugaggggag

SEQ ID NO: 2529332 - RNA, 19 nt, Artificial Sequence
  Description of Artificial Sequence: Synthetic oligonucleotide
ggcuauauggcugcucuuc

SEQ ID NO: 2529333 - RNA, 19 nt, Artificial Sequence
  Description of Artificial Sequence: Synthetic oligonucleotide
uccagcucagugugagcau

SEQ ID NO: 2529334 - RNA, 19 nt, Artificial Sequence
  Description of Artificial Sequence: Synthetic oligonucleotide
ugacaccccaaagcccuug

SEQ ID NO: 2529335 - RNA, 19 nt, Artificial Sequence
  Description of Artificial Sequence: Synthetic oligonucleotide
ugugcucauuguaguccau

SEQ ID NO: 2529336 - RNA, 19 nt, Artificial Sequence
  Description of Artificial Sequence: Synthetic oligonucleotide
cugacaugcgcuuguucaa

SEQ ID NO: 2529337 - RNA, 19 nt, Artificial Sequence
  Description of Artificial Sequence: Synthetic oligonucleotide
gaaugcuggaaggcugcuc

SEQ ID NO: 2529338 - RNA, 19 nt, Artificial Sequence
  Description of Artificial Sequence: Synthetic oligonucleotide
aggaugcuccggguggguc

SEQ ID NO: 2529339 - RNA, 19 nt, Artificial Sequence
  Description of Artificial Sequence: Synthetic oligonucleotide
accacguucuccaggugga

SEQ ID NO: 2529340 - RNA, 19 nt, Artificial Sequence
  Description of Artificial Sequence: Synthetic oligonucleotide
gguauccucagagcagggc

SEQ ID NO: 2529341 - RNA, 19 nt, Artificial Sequence
  Description of Artificial Sequence: Synthetic oligonucleotide
gacaugcgcuuguucaacu

SEQ ID NO: 2529342 - RNA, 19 nt, Artificial Sequence
  Description of Artificial Sequence: Synthetic oligonucleotide
cugcaggcuguguguagac

SEQ ID NO: 2529343 - RNA, 19 nt, Artificial Sequence
  Description of Artificial Sequence: Synthetic oligonucleotide
caucagagguguccacauc

SEQ ID NO: 2529344 - RNA, 19 nt, Artificial Sequence
  Description of Artificial Sequence: Synthetic oligonucleotide
ggagacugucuucaucaga

SEQ ID NO: 2529345 - RNA, 19 nt, Artificial Sequence
  Description of Artificial Sequence: Synthetic oligonucleotide
augcuggaaggcugcucug

SEQ ID NO: 2529346 - RNA, 19 nt, Artificial Sequence
  Description of Artificial Sequence: Synthetic oligonucleotide
cagugccucaucugugcuc

SEQ ID NO: 2529347 - RNA, 19 nt, Artificial Sequence
  Description of Artificial Sequence: Synthetic oligonucleotide
cuuggaaugcuggaaggcu

SEQ ID NO: 2529348 - RNA, 19 nt, Artificial Sequence
  Description of Artificial Sequence: Synthetic oligonucleotide
auccucagagcagggcuug

SEQ ID NO: 2529349 - RNA, 19 nt, Artificial Sequence
  Description of Artificial Sequence: Synthetic oligonucleotide
guguguagacucagggaca

SEQ ID NO: 2529350 - RNA, 19 nt, Artificial Sequence
  Description of Artificial Sequence: Synthetic oligonucleotide
cacugggcugugauuccac

SEQ ID NO: 2529351 - RNA, 19 nt, Artificial Sequence
  Description of Artificial Sequence: Synthetic oligonucleotide
ucccuagggcccucuugca

SEQ ID NO: 2529352 - RNA, 19 nt, Artificial Sequence
  Description of Artificial Sequence: Synthetic oligonucleotide
acaccccaaagcccuugca

SEQ ID NO: 2529353 - RNA, 19 nt, Artificial Sequence
  Description of Artificial Sequence: Synthetic oligonucleotide
aagaggcuauauggcugcu

SEQ ID NO: 2529354 - RNA, 19 nt, Artificial Sequence
  Description of Artificial Sequence: Synthetic oligonucleotide
cuugccugagagggacugc

SEQ ID NO: 2529355 - RNA, 19 nt, Artificial Sequence
  Description of Artificial Sequence: Synthetic oligonucleotide
gacagaggacaggcccagg

SEQ ID NO: 2529356 - RNA, 19 nt, Artificial Sequence
  Description of Artificial Sequence: Synthetic oligonucleotide
gggcaagaggcuauauggc

SEQ ID NO: 2529357 - RNA, 19 nt, Artificial Sequence
  Description of Artificial Sequence: Synthetic oligonucleotide
cacaacugguuccugggcu

SEQ ID NO: 2529358 - RNA, 19 nt, Artificial Sequence
  Description of Artificial Sequence: Synthetic oligonucleotide
gaggguggcaguaccacgu

SEQ ID NO: 2529359 - RNA, 19 nt, Artificial Sequence
  Description of Artificial Sequence: Synthetic oligonucleotide
uggguccagcucaguguga

SEQ ID NO: 2529360 - RNA, 19 nt, Artificial Sequence
  Description of Artificial Sequence: Synthetic oligonucleotide
ggcgguauccucagagcag

SEQ ID NO: 2529361 - RNA, 19 nt, Artificial Sequence
  Description of Artificial Sequence: Synthetic oligonucleotide
aggcuguguguagacucag

SEQ ID NO: 2529362 - RNA, 19 nt, Artificial Sequence
  Description of Artificial Sequence: Synthetic oligonucleotide
ggguggguccagcucagug

SEQ ID NO: 2529363 - RNA, 19 nt, Artificial Sequence
  Description of Artificial Sequence: Synthetic oligonucleotide
ugucuccaugugcccugug

SEQ ID NO: 2529364 - RNA, 19 nt, Artificial Sequence
  Description of Artificial Sequence: Synthetic oligonucleotide
ccucuugcaggaugcuccg

SEQ ID NO: 2529365 - RNA, 19 nt, Artificial Sequence
  Description of Artificial Sequence: Synthetic oligonucleotide
gucacugauguuugcuggu

SEQ ID NO: 2529366 - RNA, 19 nt, Artificial Sequence
  Description of Artificial Sequence: Synthetic oligonucleotide
caaagcccuugcaucagua

SEQ ID NO: 2529367 - RNA, 19 nt, Artificial Sequence
  Description of Artificial Sequence: Synthetic oligonucleotide
ggcuuggucucaucuucug

SEQ ID NO: 2529368 - RNA, 19 nt, Artificial Sequence
  Description of Artificial Sequence: Synthetic oligonucleotide
guacaccaucugucccagg

SEQ ID NO: 2529369 - RNA, 19 nt, Artificial Sequence
  Description of Artificial Sequence: Synthetic oligonucleotide
caugcgcuuguucaacucu

SEQ ID NO: 2529370 - RNA, 19 nt, Artificial Sequence
  Description of Artificial Sequence: Synthetic oligonucleotide
cagguacugugaggggagg

SEQ ID NO: 2529371 - RNA, 19 nt, Artificial Sequence
  Description of Artificial Sequence: Synthetic oligonucleotide
ggugccaccuggcuugguc

SEQ ID NO: 2529372 - RNA, 19 nt, Artificial Sequence
  Description of Artificial Sequence: Synthetic oligonucleotide
ggcugaggguggcaguacc

SEQ ID NO: 2529373 - RNA, 19 nt, Artificial Sequence
  Description of Artificial Sequence: Synthetic oligonucleotide
gugcucauuguaguccauc

SEQ ID NO: 2529374 - RNA, 19 nt, Artificial Sequence
  Description of Artificial Sequence: Synthetic oligonucleotide
cuagggcccucuugcagga

SEQ ID NO: 2529375 - RNA, 19 nt, Artificial Sequence
  Description of Artificial Sequence: Synthetic oligonucleotide
cgcuuguucaacucuaaga

SEQ ID NO: 2529376 - RNA, 19 nt, Artificial Sequence
  Description of Artificial Sequence: Synthetic oligonucleotide
gcgcuuguucaacucuaag

SEQ ID NO: 2529377 - RNA, 19 nt, Artificial Sequence
  Description of Artificial Sequence: Synthetic oligonucleotide
gcucugggauccuggagac

SEQ ID NO: 2529378 - RNA, 19 nt, Artificial Sequence
  Description of Artificial Sequence: Synthetic oligonucleotide
gacgggcuccuucccugug

SEQ ID NO: 2529379 - RNA, 19 nt, Artificial Sequence
  Description of Artificial Sequence: Synthetic oligonucleotide
cugggcugugauuccacaa

SEQ ID NO: 2529380 - RNA, 19 nt, Artificial Sequence
  Description of Artificial Sequence: Synthetic oligonucleotide
acaccgcauggagggugcc

SEQ ID NO: 2529381 - RNA, 19 nt, Artificial Sequence
  Description of Artificial Sequence: Synthetic oligonucleotide
guggcaguaccacguucuc

SEQ ID NO: 2529382 - RNA, 19 nt, Artificial Sequence
  Description of Artificial Sequence: Synthetic oligonucleotide
ggcugugauuccacaacug

SEQ ID NO: 2529383 - RNA, 19 nt, Artificial Sequence
  Description of Artificial Sequence: Synthetic oligonucleotide
gucuccaugugcccugugu

SEQ ID NO: 2529384 - RNA, 19 nt, Artificial Sequence
  Description of Artificial Sequence: Synthetic oligonucleotide
ggaccagcagguucuccac

SEQ ID NO: 2529385 - RNA, 19 nt, Artificial Sequence
  Description of Artificial Sequence: Synthetic oligonucleotide
ggucccuagggcccucuug

SEQ ID NO: 2529386 - RNA, 19 nt, Artificial Sequence
  Description of Artificial Sequence: Synthetic oligonucleotide
guaccacguucuccaggug

SEQ ID NO: 2529387 - RNA, 19 nt, Artificial Sequence
  Description of Artificial Sequence: Synthetic oligonucleotide
caugugcccugugucugug

SEQ ID NO: 2529388 - RNA, 19 nt, Artificial Sequence
  Description of Artificial Sequence: Synthetic oligonucleotide
ucccagccuccuccugagc

SEQ ID NO: 2529389 - RNA, 19 nt, Artificial Sequence
  Description of Artificial Sequence: Synthetic oligonucleotide
ggcuguguguagacucagg

SEQ ID NO: 2529390 - RNA, 19 nt, Artificial Sequence
  Description of Artificial Sequence: Synthetic oligonucleotide
gcuugccugagagggacug

SEQ ID NO: 2529391 - RNA, 19 nt, Artificial Sequence
  Description of Artificial Sequence: Synthetic oligonucleotide
ggacagaggacaggcccag

SEQ ID NO: 2529392 - RNA, 19 nt, Artificial Sequence
  Description of Artificial Sequence: Synthetic oligonucleotide
gcauagcuauggucccuag

SEQ ID NO: 2529393 - RNA, 19 nt, Artificial Sequence
  Description of Artificial Sequence: Synthetic oligonucleotide
ugcacaccucuggggacac

SEQ ID NO: 2529394 - RNA, 19 nt, Artificial Sequence
  Description of Artificial Sequence: Synthetic oligonucleotide
ccacaacugguuccugggc

SEQ ID NO: 2529395 - RNA, 19 nt, Artificial Sequence
  Description of Artificial Sequence: Synthetic oligonucleotide
cccaggcauagcuaugguc

SEQ ID NO: 2529396 - RNA, 19 nt, Artificial Sequence
  Description of Artificial Sequence: Synthetic oligonucleotide
aggcauagcuauggucccu

SEQ ID NO: 2529397 - RNA, 19 nt, Artificial Sequence
  Description of Artificial Sequence: Synthetic oligonucleotide
ggaaggcugcucugggauc

SEQ ID NO: 2529398 - RNA, 19 nt, Artificial Sequence
  Description of Artificial Sequence: Synthetic oligonucleotide
ggacaccgcauggagggug

SEQ ID NO: 2529399 - RNA, 19 nt, Artificial Sequence
  Description of Artificial Sequence: Synthetic oligonucleotide
cucugacagugccucaucu

SEQ ID NO: 2529400 - RNA, 19 nt, Artificial Sequence
  Description of Artificial Sequence: Synthetic oligonucleotide
aggcuauauggcugcucuu

SEQ ID NO: 2529401 - RNA, 19 nt, Artificial Sequence
  Description of Artificial Sequence: Synthetic oligonucleotide
gcaguaccacguucuccag

SEQ ID NO: 2529402 - RNA, 19 nt, Artificial Sequence
  Description of Artificial Sequence: Synthetic oligonucleotide
caccucuggggacaccgca

SEQ ID NO: 2529403 - RNA, 19 nt, Artificial Sequence
  Description of Artificial Sequence: Synthetic oligonucleotide
cuccuccgugucugcacug

SEQ ID NO: 2529404 - RNA, 19 nt, Artificial Sequence
  Description of Artificial Sequence: Synthetic oligonucleotide
gcaggaugcuccggguggg

SEQ ID NO: 2529405 - RNA, 19 nt, Artificial Sequence
  Description of Artificial Sequence: Synthetic oligonucleotide
augcgcuuguucaacucua

SEQ ID NO: 2529406 - RNA, 19 nt, Artificial Sequence
  Description of Artificial Sequence: Synthetic oligonucleotide
gcuauauggcugcucuucu

SEQ ID NO: 2529407 - RNA, 19 nt, Artificial Sequence
  Description of Artificial Sequence: Synthetic oligonucleotide
gugcacaccucuggggaca

SEQ ID NO: 2529408 - RNA, 19 nt, Artificial Sequence
  Description of Artificial Sequence: Synthetic oligonucleotide
cuugcaggaugcuccgggu

SEQ ID NO: 2529409 - RNA, 19 nt, Artificial Sequence
  Description of Artificial Sequence: Synthetic oligonucleotide
aucuucugaugaggugcca

SEQ ID NO: 2529410 - RNA, 19 nt, Artificial Sequence
  Description of Artificial Sequence: Synthetic oligonucleotide
cucagagcagggcuugccu

SEQ ID NO: 2529411 - RNA, 19 nt, Artificial Sequence
  Description of Artificial Sequence: Synthetic oligonucleotide
ggacuggagugacacccca

SEQ ID NO: 2529412 - RNA, 19 nt, Artificial Sequence
  Description of Artificial Sequence: Synthetic oligonucleotide
gguggcaguaccacguucu

SEQ ID NO: 2529413 - RNA, 19 nt, Artificial Sequence
  Description of Artificial Sequence: Synthetic oligonucleotide
aggguggcaguaccacguu

SEQ ID NO: 2529414 - RNA, 19 nt, Artificial Sequence
  Description of Artificial Sequence: Synthetic oligonucleotide
gccagguacugugagggga

SEQ ID NO: 2529415 - RNA, 19 nt, Artificial Sequence
  Description of Artificial Sequence: Synthetic oligonucleotide
uggagggcaagaggcuaua

SEQ ID NO: 2529416 - RNA, 19 nt, Artificial Sequence
  Description of Artificial Sequence: Synthetic oligonucleotide
gugccaccuggcuuggucu

SEQ ID NO: 2529417 - RNA, 19 nt, Artificial Sequence
  Description of Artificial Sequence: Synthetic oligonucleotide
ggcccuucucuuggaaugc

SEQ ID NO: 2529418 - RNA, 19 nt, Artificial Sequence
  Description of Artificial Sequence: Synthetic oligonucleotide
gggcuugccugagagggac

SEQ ID NO: 2529419 - RNA, 19 nt, Artificial Sequence
  Description of Artificial Sequence: Synthetic oligonucleotide
ggauccuggagacugucuu

SEQ ID NO: 2529420 - RNA, 19 nt, Artificial Sequence
  Description of Artificial Sequence: Synthetic oligonucleotide
ccccaaagcccuugcauca

SEQ ID NO: 2529421 - RNA, 19 nt, Artificial Sequence
  Description of Artificial Sequence: Synthetic oligonucleotide
gguucuccacagcugacau

SEQ ID NO: 2529422 - RNA, 19 nt, Artificial Sequence
  Description of Artificial Sequence: Synthetic oligonucleotide
ugcuccggguggguccagc

SEQ ID NO: 2529423 - RNA, 19 nt, Artificial Sequence
  Description of Artificial Sequence: Synthetic oligonucleotide
gcucagugugagcauccuc

SEQ ID NO: 2529424 - RNA, 19 nt, Artificial Sequence
  Description of Artificial Sequence: Synthetic oligonucleotide
cccuagggcccucuugcag

SEQ ID NO: 2529425 - RNA, 19 nt, Artificial Sequence
  Description of Artificial Sequence: Synthetic oligonucleotide
gucugcacugggcugugau

SEQ ID NO: 2529426 - RNA, 19 nt, Artificial Sequence
  Description of Artificial Sequence: Synthetic oligonucleotide
ccucuggggacaccgcaug

SEQ ID NO: 2529427 - RNA, 19 nt, Artificial Sequence
  Description of Artificial Sequence: Synthetic oligonucleotide
gguacugugaggggaggcu

SEQ ID NO: 2529428 - RNA, 19 nt, Artificial Sequence
  Description of Artificial Sequence: Synthetic oligonucleotide
cucuaagaucugagugucu

SEQ ID NO: 2529429 - RNA, 19 nt, Artificial Sequence
  Description of Artificial Sequence: Synthetic oligonucleotide
gggcugugauuccacaacu

SEQ ID NO: 2529430 - RNA, 19 nt, Artificial Sequence
  Description of Artificial Sequence: Synthetic oligonucleotide
cccucggggcuccaggcag

SEQ ID NO: 2529431 - RNA, 19 nt, Artificial Sequence
  Description of Artificial Sequence: Synthetic oligonucleotide
caccccaaagcccuugcau

SEQ ID NO: 2529432 - RNA, 19 nt, Artificial Sequence
  Description of Artificial Sequence: Synthetic oligonucleotide
ugucugcacugggcuguga

SEQ ID NO: 2529433 - RNA, 19 nt, Artificial Sequence
  Description of Artificial Sequence: Synthetic oligonucleotide
ccuucccugugucuccaug

SEQ ID NO: 2529434 - RNA, 19 nt, Artificial Sequence
  Description of Artificial Sequence: Synthetic oligonucleotide
caacugguuccugggcuga

SEQ ID NO: 2529435 - RNA, 19 nt, Artificial Sequence
  Description of Artificial Sequence: Synthetic oligonucleotide
acugugaggggaggcuguu

SEQ ID NO: 2529436 - RNA, 19 nt, Artificial Sequence
  Description of Artificial Sequence: Synthetic oligonucleotide
ccuccgugucugcacuggg

SEQ ID NO: 2529437 - RNA, 19 nt, Artificial Sequence
  Description of Artificial Sequence: Synthetic oligonucleotide
cagaggacaggcccagggu

SEQ ID NO: 2529438 - RNA, 19 nt, Artificial Sequence
  Description of Artificial Sequence: Synthetic oligonucleotide
gagcagggcuugccugaga

SEQ ID NO: 2529439 - RNA, 19 nt, Artificial Sequence
  Description of Artificial Sequence: Synthetic oligonucleotide
ccaucguagggguucccca

SEQ ID NO: 2529440 - RNA, 19 nt, Artificial Sequence
  Description of Artificial Sequence: Synthetic oligonucleotide
cugagagggacugcaggcu

SEQ ID NO: 2529441 - RNA, 19 nt, Artificial Sequence
  Description of Artificial Sequence: Synthetic oligonucleotide
ggguggcaguaccacguuc

SEQ ID NO: 2529442 - RNA, 19 nt, Artificial Sequence
  Description of Artificial Sequence: Synthetic oligonucleotide
ccaggcaggcgguauccuc

SEQ ID NO: 2529443 - RNA, 19 nt, Artificial Sequence
  Description of Artificial Sequence: Synthetic oligonucleotide
gaggggaggcuguuugcuu

SEQ ID NO: 2529444 - RNA, 19 nt, Artificial Sequence
  Description of Artificial Sequence: Synthetic oligonucleotide
ccgacgggcuccuucccug

SEQ ID NO: 2529445 - RNA, 19 nt, Artificial Sequence
  Description of Artificial Sequence: Synthetic oligonucleotide
ccucagagcagggcuugcc

SEQ ID NO: 2529446 - RNA, 19 nt, Artificial Sequence
  Description of Artificial Sequence: Synthetic oligonucleotide
agggcuugccugagaggga

SEQ ID NO: 2529447 - RNA, 19 nt, Artificial Sequence
  Description of Artificial Sequence: Synthetic oligonucleotide
gugucugcacugggcugug

SEQ ID NO: 2529448 - RNA, 19 nt, Artificial Sequence
  Description of Artificial Sequence: Synthetic oligonucleotide
uauggucccuagggcccuc

SEQ ID NO: 2529449 - RNA, 19 nt, Artificial Sequence
  Description of Artificial Sequence: Synthetic oligonucleotide
cagugugagcauccucucu

SEQ ID NO: 2529450 - RNA, 19 nt, Artificial Sequence
  Description of Artificial Sequence: Synthetic oligonucleotide
cacagcccgggcccuucuc

SEQ ID NO: 2529451 - RNA, 19 nt, Artificial Sequence
  Description of Artificial Sequence: Synthetic oligonucleotide
cccaaagcccuugcaucag

SEQ ID NO: 2529452 - RNA, 19 nt, Artificial Sequence
  Description of Artificial Sequence: Synthetic oligonucleotide
ccgugucugcacugggcug

SEQ ID NO: 2529453 - RNA, 19 nt, Artificial Sequence
  Description of Artificial Sequence: Synthetic oligonucleotide
ggcauagcuauggucccua

SEQ ID NO: 2529454 - RNA, 19 nt, Artificial Sequence
  Description of Artificial Sequence: Synthetic oligonucleotide
caccuggcuuggucucauc

SEQ ID NO: 2529455 - RNA, 19 nt, Artificial Sequence
  Description of Artificial Sequence: Synthetic oligonucleotide
cguagggguuccccaggcc

SEQ ID NO: 2529456 - RNA, 19 nt, Artificial Sequence
  Description of Artificial Sequence: Synthetic oligonucleotide
guccaucguagggguuccc

SEQ ID NO: 2529457 - RNA, 19 nt, Artificial Sequence
  Description of Artificial Sequence: Synthetic oligonucleotide
cucucugacagugccucau

SEQ ID NO: 2529458 - RNA, 19 nt, Artificial Sequence
  Description of Artificial Sequence: Synthetic oligonucleotide
guguagacucagggacaga

SEQ ID NO: 2529459 - RNA, 19 nt, Artificial Sequence
  Description of Artificial Sequence: Synthetic oligonucleotide
cgguauccucagagcaggg

SEQ ID NO: 2529460 - RNA, 19 nt, Artificial Sequence
  Description of Artificial Sequence: Synthetic oligonucleotide
gggaggcuguuugcuuuug

SEQ ID NO: 2529461 - RNA, 19 nt, Artificial Sequence
  Description of Artificial Sequence: Synthetic oligonucleotide
cuccaggcccucggggcuc

SEQ ID NO: 2529462 - RNA, 19 nt, Artificial Sequence
  Description of Artificial Sequence: Synthetic oligonucleotide
ggaggcuguuugcuuuugu

SEQ ID NO: 2529463 - RNA, 19 nt, Artificial Sequence
  Description of Artificial Sequence: Synthetic oligonucleotide
ggagggugccaccuggcuu

SEQ ID NO: 2529464 - RNA, 19 nt, Artificial Sequence
  Description of Artificial Sequence: Synthetic oligonucleotide
caccgcauggagggugcca

SEQ ID NO: 2529465 - RNA, 19 nt, Artificial Sequence
  Description of Artificial Sequence: Synthetic oligonucleotide
ccuccugagcguccuccuc

SEQ ID NO: 2529466 - RNA, 19 nt, Artificial Sequence
  Description of Artificial Sequence: Synthetic oligonucleotide
gcacugggcugugauucca

SEQ ID NO: 2529467 - RNA, 19 nt, Artificial Sequence
  Description of Artificial Sequence: Synthetic oligonucleotide
cuauggucccuagggcccu

SEQ ID NO: 2529468 - RNA, 19 nt, Artificial Sequence
  Description of Artificial Sequence: Synthetic oligonucleotide
ccggguggguccagcucag

SEQ ID NO: 2529469 - RNA, 19 nt, Artificial Sequence
  Description of Artificial Sequence: Synthetic oligonucleotide
ggacugcaggcugugugua

SEQ ID NO: 2529470 - RNA, 19 nt, Artificial Sequence
  Description of Artificial Sequence: Synthetic oligonucleotide
caguauccuccaggcccuc

SEQ ID NO: 2529471 - RNA, 19 nt, Artificial Sequence
  Description of Artificial Sequence: Synthetic oligonucleotide
gcccucuugcaggaugcuc

SEQ ID NO: 2529472 - RNA, 19 nt, Artificial Sequence
  Description of Artificial Sequence: Synthetic oligonucleotide
gguggaccagcagguucuc

SEQ ID NO: 2529473 - RNA, 19 nt, Artificial Sequence
  Description of Artificial Sequence: Synthetic oligonucleotide
gggcugaggguggcaguac

SEQ ID NO: 2529474 - RNA, 19 nt, Artificial Sequence
  Description of Artificial Sequence: Synthetic oligonucleotide
ggaaugcuggaaggcugcu

SEQ ID NO: 2529475 - RNA, 19 nt, Artificial Sequence
  Description of Artificial Sequence: Synthetic oligonucleotide
ggucagcuccucccagccu

SEQ ID NO: 2529476 - RNA, 19 nt, Artificial Sequence
  Description of Artificial Sequence: Synthetic oligonucleotide
gcccucggggcuccaggca

SEQ ID NO: 2529477 - RNA, 19 nt, Artificial Sequence
  Description of Artificial Sequence: Synthetic oligonucleotide
ggcaggcgguauccucaga

SEQ ID NO: 2529478 - RNA, 19 nt, Artificial Sequence
  Description of Artificial Sequence: Synthetic oligonucleotide
augcuccggguggguccag

SEQ ID NO: 2529479 - RNA, 19 nt, Artificial Sequence
  Description of Artificial Sequence: Synthetic oligonucleotide
gggauccuggagacugucu

SEQ ID NO: 2529480 - RNA, 19 nt, Artificial Sequence
  Description of Artificial Sequence: Synthetic oligonucleotide
gugucuccaugugcccugu

SEQ ID NO: 2529481 - RNA, 19 nt, Artificial Sequence
  Description of Artificial Sequence: Synthetic oligonucleotide
guaguccaucguagggguu

SEQ ID NO: 2529482 - RNA, 19 nt, Artificial Sequence
  Description of Artificial Sequence: Synthetic oligonucleotide
ggcacagcccgggcccuuc

SEQ ID NO: 2529483 - RNA, 19 nt, Artificial Sequence
  Description of Artificial Sequence: Synthetic oligonucleotide
gcuccggguggguccagcu

SEQ ID NO: 2529484 - RNA, 19 nt, Artificial Sequence
  Description of Artificial Sequence: Synthetic oligonucleotide
ggggaggcuguuugcuuuu

SEQ ID NO: 2529485 - RNA, 19 nt, Artificial Sequence
  Description of Artificial Sequence: Synthetic oligonucleotide
ccccgacgggcuccuuccc

SEQ ID NO: 2529486 - RNA, 19 nt, Artificial Sequence
  Description of Artificial Sequence: Synthetic oligonucleotide
gcccuugcaucaguauccu

SEQ ID NO: 2529487 - RNA, 19 nt, Artificial Sequence
  Description of Artificial Sequence: Synthetic oligonucleotide
ccugagcguccuccuccuc

SEQ ID NO: 2529488 - RNA, 19 nt, Artificial Sequence
  Description of Artificial Sequence: Synthetic oligonucleotide
ccuccuccgugucugcacu

SEQ ID NO: 2529489 - RNA, 19 nt, Artificial Sequence
  Description of Artificial Sequence: Synthetic oligonucleotide
ggagggcaagaggcuauau

SEQ ID NO: 2529490 - RNA, 19 nt, Artificial Sequence
  Description of Artificial Sequence: Synthetic oligonucleotide
gcacaccucuggggacacc

SEQ ID NO: 2529491 - RNA, 19 nt, Artificial Sequence
  Description of Artificial Sequence: Synthetic oligonucleotide
cgugucugcacugggcugu

SEQ ID NO: 2529492 - RNA, 19 nt, Artificial Sequence
  Description of Artificial Sequence: Synthetic oligonucleotide
caggaugcuccgggugggu

SEQ ID NO: 2529493 - RNA, 19 nt, Artificial Sequence
  Description of Artificial Sequence: Synthetic oligonucleotide
cugugaggggaggcuguuu

SEQ ID NO: 2529494 - RNA, 19 nt, Artificial Sequence
  Description of Artificial Sequence: Synthetic oligonucleotide
gcccaggguauggcuguaa

SEQ ID NO: 2529495 - RNA, 19 nt, Artificial Sequence
  Description of Artificial Sequence: Synthetic oligonucleotide
cuggcacagcccgggcccu

SEQ ID NO: 2529496 - RNA, 19 nt, Artificial Sequence
  Description of Artificial Sequence: Synthetic oligonucleotide
ggcuccaggcaggcgguau

SEQ ID NO: 2529497 - RNA, 19 nt, Artificial Sequence
  Description of Artificial Sequence: Synthetic oligonucleotide
gggacaccgcauggagggu

SEQ ID NO: 2529498 - RNA, 19 nt, Artificial Sequence
  Description of Artificial Sequence: Synthetic oligonucleotide
cagcugacaugcgcuuguu

SEQ ID NO: 2529499 - RNA, 19 nt, Artificial Sequence
  Description of Artificial Sequence: Synthetic oligonucleotide
ccgggcccuucucuuggaa

SEQ ID NO: 2529500 - RNA, 19 nt, Artificial Sequence
  Description of Artificial Sequence: Synthetic oligonucleotide
cccgggcccuucucuugga

SEQ ID NO: 2529501 - RNA, 19 nt, Artificial Sequence
  Description of Artificial Sequence: Synthetic oligonucleotide
gcacagcccgggcccuucu

SEQ ID NO: 2529502 - RNA, 19 nt, Artificial Sequence
  Description of Artificial Sequence: Synthetic oligonucleotide
cccgacgggcuccuucccu

SEQ ID NO: 2529503 - RNA, 19 nt, Artificial Sequence
  Description of Artificial Sequence: Synthetic oligonucleotide
ggcccucuugcaggaugcu

SEQ ID NO: 2529504 - RNA, 19 nt, Artificial Sequence
  Description of Artificial Sequence: Synthetic oligonucleotide
ggcccaggguauggcugua

SEQ ID NO: 2529505 - RNA, 19 nt, Artificial Sequence
  Description of Artificial Sequence: Synthetic oligonucleotide
cgggcccuucucuuggaau

SEQ ID NO: 2529506 - RNA, 19 nt, Artificial Sequence
  Description of Artificial Sequence: Synthetic oligonucleotide
cgacgggcuccuucccugu

SEQ ID NO: 2529507 - RNA, 19 nt, Artificial Sequence
  Description of Artificial Sequence: Synthetic oligonucleotide
cggguggguccagcucagu

SEQ ID NO: 2529508 - RNA, 19 nt, Artificial Sequence
  Description of Artificial Sequence: Synthetic oligonucleotide
cuguaaaugauguugagag

SEQ ID NO: 2529509 - RNA, 19 nt, Artificial Sequence
  Description of Artificial Sequence: Synthetic oligonucleotide
uuuaugucgagaaagucug

SEQ ID NO: 2529510 - RNA, 19 nt, Artificial Sequence
  Description of Artificial Sequence: Synthetic oligonucleotide
aguguaaguagccaauggc

SEQ ID NO: 2529511 - RNA, 19 nt, Artificial Sequence
  Description of Artificial Sequence: Synthetic oligonucleotide
uuuaugauggacuucuucu

SEQ ID NO: 2529512 - RNA, 19 nt, Artificial Sequence
  Description of Artificial Sequence: Synthetic oligonucleotide
uuuaugggacuaaagaaca

SEQ ID NO: 2529513 - RNA, 19 nt, Artificial Sequence
  Description of Artificial Sequence: Synthetic oligonucleotide
guaaaugauguugagagag

SEQ ID NO: 2529514 - RNA, 19 nt, Artificial Sequence
  Description of Artificial Sequence: Synthetic oligonucleotide
uucugaagcaccuucacug

SEQ ID NO: 2529515 - RNA, 19 nt, Artificial Sequence
  Description of Artificial Sequence: Synthetic oligonucleotide
aaaguagagcuucucuggg

SEQ ID NO: 2529516 - RNA, 19 nt, Artificial Sequence
  Description of Artificial Sequence: Synthetic oligonucleotide
acacauuccuugcaaaggc

SEQ ID NO: 2529517 - RNA, 19 nt, Artificial Sequence
  Description of Artificial Sequence: Synthetic oligonucleotide
aaaaucugucaguaccacg

SEQ ID NO: 2529518 - RNA, 19 nt, Artificial Sequence
  Description of Artificial Sequence: Synthetic oligonucleotide
gggacuaaagaacacaugg

SEQ ID NO: 2529519 - RNA, 19 nt, Artificial Sequence
  Description of Artificial Sequence: Synthetic oligonucleotide
ugcauagaaggcuccaucg

SEQ ID NO: 2529520 - RNA, 19 nt, Artificial Sequence
  Description of Artificial Sequence: Synthetic oligonucleotide
agccaauggacuuggauac

SEQ ID NO: 2529521 - RNA, 19 nt, Artificial Sequence
  Description of Artificial Sequence: Synthetic oligonucleotide
uggaguuagccucuugugg

SEQ ID NO: 2529522 - RNA, 19 nt, Artificial Sequence
  Description of Artificial Sequence: Synthetic oligonucleotide
uguaaguagccaauggcac

SEQ ID NO: 2529523 - RNA, 19 nt, Artificial Sequence
  Description of Artificial Sequence: Synthetic oligonucleotide
  modified_base (10)..(10): a, c, u, g, unknown or other
augugguucngcucuuugc

SEQ ID NO: 2529524 - RNA, 19 nt, Artificial Sequence
  Description of Artificial Sequence: Synthetic oligonucleotide
aaaucugucaguaccacgu

SEQ ID NO: 2529525 - RNA, 19 nt, Artificial Sequence
  Description of Artificial Sequence: Synthetic oligonucleotide
gacuaaagaacacaugguc

SEQ ID NO: 2529526 - RNA, 19 nt, Artificial Sequence
  Description of Artificial Sequence: Synthetic oligonucleotide
guugagagaguguaaguag

SEQ ID NO: 2529527 - RNA, 19 nt, Artificial Sequence
  Description of Artificial Sequence: Synthetic oligonucleotide
gauguugagagaguguaag

SEQ ID NO: 2529528 - RNA, 19 nt, Artificial Sequence
  Description of Artificial Sequence: Synthetic oligonucleotide
uugagagaguguaaguagc

SEQ ID NO: 2529529 - RNA, 19 nt, Artificial Sequence
  Description of Artificial Sequence: Synthetic oligonucleotide
gaucuguaguggcugaagg

SEQ ID NO: 2529530 - RNA, 19 nt, Artificial Sequence
  Description of Artificial Sequence: Synthetic oligonucleotide
aaguagagcuucucugggg

SEQ ID NO: 2529531 - RNA, 19 nt, Artificial Sequence
  Description of Artificial Sequence: Synthetic oligonucleotide
  modified_base (9)..(9): a, c, u, g, unknown or other
ugugguucngcucuuugcu

SEQ ID NO: 2529532 - RNA, 19 nt, Artificial Sequence
  Description of Artificial Sequence: Synthetic oligonucleotide
uucaagucucuguaaauga

SEQ ID NO: 2529533 - RNA, 19 nt, Artificial Sequence
  Description of Artificial Sequence: Synthetic oligonucleotide
uucaguaggacauugcguu

SEQ ID NO: 2529534 - RNA, 19 nt, Artificial Sequence
  Description of Artificial Sequence: Synthetic oligonucleotide
uugcguucugccaugaugu

SEQ ID NO: 2529535 - RNA, 19 nt, Artificial Sequence
  Description of Artificial Sequence: Synthetic oligonucleotide
cugugcauaggaaaauccg

SEQ ID NO: 2529536 - RNA, 19 nt, Artificial Sequence
  Description of Artificial Sequence: Synthetic oligonucleotide
gaguguaaguagccaaugg

SEQ ID NO: 2529537 - RNA, 19 nt, Artificial Sequence
  Description of Artificial Sequence: Synthetic oligonucleotide
gaacacaugguccuuuaug

SEQ ID NO: 2529538 - RNA, 19 nt, Artificial Sequence
  Description of Artificial Sequence: Synthetic oligonucleotide
guuuaugggacuaaagaac

SEQ ID NO: 2529539 - RNA, 19 nt, Artificial Sequence
  Description of Artificial Sequence: Synthetic oligonucleotide
uguagaaccgggcccgggg

SEQ ID NO: 2529540 - RNA, 19 nt, Artificial Sequence
  Description of Artificial Sequence: Synthetic oligonucleotide
cacauuugggguugaaggg

SEQ ID NO: 2529541 - RNA, 19 nt, Artificial Sequence
  Description of Artificial Sequence: Synthetic oligonucleotide
ugcaguguagaaccgggcc

SEQ ID NO: 2529542 - RNA, 19 nt, Artificial Sequence
  Description of Artificial Sequence: Synthetic oligonucleotide
gguccuuccacauuugggg

SEQ ID NO: 2529543 - RNA, 19 nt, Artificial Sequence
  Description of Artificial Sequence: Synthetic oligonucleotide
ugcacauucuucaguagga

SEQ ID NO: 2529544 - RNA, 19 nt, Artificial Sequence
  Description of Artificial Sequence: Synthetic oligonucleotide
auugcguucugccaugaug

SEQ ID NO: 2529545 - RNA, 19 nt, Artificial Sequence
  Description of Artificial Sequence: Synthetic oligonucleotide
aguaccacgugucccuggc

SEQ ID NO: 2529546 - RNA, 19 nt, Artificial Sequence
  Description of Artificial Sequence: Synthetic oligonucleotide
uccguugacauagucaagc

SEQ ID NO: 2529547 - RNA, 19 nt, Artificial Sequence
  Description of Artificial Sequence: Synthetic oligonucleotide
guugacauagucaagcaca

SEQ ID NO: 2529548 - RNA, 19 nt, Artificial Sequence
  Description of Artificial Sequence: Synthetic oligonucleotide
aggagguucacaggcagcc

SEQ ID NO: 2529549 - RNA, 19 nt, Artificial Sequence
  Description of Artificial Sequence: Synthetic oligonucleotide
uaggacauugcguucugcc

SEQ ID NO: 2529550 - RNA, 19 nt, Artificial Sequence
  Description of Artificial Sequence: Synthetic oligonucleotide
uugcucuuuaugauggacu

SEQ ID NO: 2529551 - RNA, 19 nt, Artificial Sequence
  Description of Artificial Sequence: Synthetic oligonucleotide
gucaaaguguuucaaguca

SEQ ID NO: 2529552 - RNA, 19 nt, Artificial Sequence
  Description of Artificial Sequence: Synthetic oligonucleotide
uguaaaugauguugagaga

SEQ ID NO: 2529553 - RNA, 19 nt, Artificial Sequence
  Description of Artificial Sequence: Synthetic oligonucleotide
uaugucgagaaagucugcc

SEQ ID NO: 2529554 - RNA, 19 nt, Artificial Sequence
  Description of Artificial Sequence: Synthetic oligonucleotide
uaaaugauguugagagagu

SEQ ID NO: 2529555 - RNA, 19 nt, Artificial Sequence
  Description of Artificial Sequence: Synthetic oligonucleotide
uaaguagccaauggcacug

SEQ ID NO: 2529556 - RNA, 19 nt, Artificial Sequence
  Description of Artificial Sequence: Synthetic oligonucleotide
gccaaaaucugucaguacc

SEQ ID NO: 2529557 - RNA, 19 nt, Artificial Sequence
  Description of Artificial Sequence: Synthetic oligonucleotide
  modified_base (7)..(7): a, c, u, g, unknown or other
ugguucngcucuuugcucu

SEQ ID NO: 2529558 - RNA, 19 nt, Artificial Sequence
  Description of Artificial Sequence: Synthetic oligonucleotide
uccuuuaugucgagaaagu

SEQ ID NO: 2529559 - RNA, 19 nt, Artificial Sequence
  Description of Artificial Sequence: Synthetic oligonucleotide
gaaaauccgaggaaugcac

SEQ ID NO: 2529560 - RNA, 19 nt, Artificial Sequence
  Description of Artificial Sequence: Synthetic oligonucleotide
ucugucaguaccacguguc

SEQ ID NO: 2529561 - RNA, 19 nt, Artificial Sequence
  Description of Artificial Sequence: Synthetic oligonucleotide
ugggucaaaguguuucaag

SEQ ID NO: 2529562 - RNA, 19 nt, Artificial Sequence
  Description of Artificial Sequence: Synthetic oligonucleotide
gaaccuacguucccgcugc

SEQ ID NO: 2529563 - RNA, 19 nt, Artificial Sequence
  Description of Artificial Sequence: Synthetic oligonucleotide
uaccacgugucccuggcag

SEQ ID NO: 2529564 - RNA, 19 nt, Artificial Sequence
  Description of Artificial Sequence: Synthetic oligonucleotide
uccuccguugacauaguca

SEQ ID NO: 2529565 - RNA, 19 nt, Artificial Sequence
  Description of Artificial Sequence: Synthetic oligonucleotide
uguugagagaguguaagua

SEQ ID NO: 2529566 - RNA, 19 nt, Artificial Sequence
  Description of Artificial Sequence: Synthetic oligonucleotide
cuuuaugauggacuucuuc

SEQ ID NO: 2529567 - RNA, 19 nt, Artificial Sequence
  Description of Artificial Sequence: Synthetic oligonucleotide
uacaggucaucccaguuua

SEQ ID NO: 2529568 - RNA, 19 nt, Artificial Sequence
  Description of Artificial Sequence: Synthetic oligonucleotide
aaauccgaggaaugcacuu

SEQ ID NO: 2529569 - RNA, 19 nt, Artificial Sequence
  Description of Artificial Sequence: Synthetic oligonucleotide
ugguccuuuaugucgagaa

SEQ ID NO: 2529570 - RNA, 19 nt, Artificial Sequence
  Description of Artificial Sequence: Synthetic oligonucleotide
agagaguguaaguagccaa

SEQ ID NO: 2529571 - RNA, 19 nt, Artificial Sequence
  Description of Artificial Sequence: Synthetic oligonucleotide
auaggaaaauccgaggaau

SEQ ID NO: 2529572 - RNA, 19 nt, Artificial Sequence
  Description of Artificial Sequence: Synthetic oligonucleotide
uuaugggacuaaagaacac

SEQ ID NO: 2529573 - RNA, 19 nt, Artificial Sequence
  Description of Artificial Sequence: Synthetic oligonucleotide
aaugauguugagagagugu

SEQ ID NO: 2529574 - RNA, 19 nt, Artificial Sequence
  Description of Artificial Sequence: Synthetic oligonucleotide
aagaagagcucuccuccgu

SEQ ID NO: 2529575 - RNA, 19 nt, Artificial Sequence
  Description of Artificial Sequence: Synthetic oligonucleotide
cuugugguacaggucaucc

SEQ ID NO: 2529576 - RNA, 19 nt, Artificial Sequence
  Description of Artificial Sequence: Synthetic oligonucleotide
cuugcaggagguucacagg

SEQ ID NO: 2529577 - RNA, 19 nt, Artificial Sequence
  Description of Artificial Sequence: Synthetic oligonucleotide
gaaggggugcugcacauuc

SEQ ID NO: 2529578 - RNA, 19 nt, Artificial Sequence
  Description of Artificial Sequence: Synthetic oligonucleotide
caaaguguuucaagucagc

SEQ ID NO: 2529579 - RNA, 19 nt, Artificial Sequence
  Description of Artificial Sequence: Synthetic oligonucleotide
ucuacacauuccuugcaaa

SEQ ID NO: 2529580 - RNA, 19 nt, Artificial Sequence
  Description of Artificial Sequence: Synthetic oligonucleotide
ugucgagaaagucugccuu

SEQ ID NO: 2529581 - RNA, 19 nt, Artificial Sequence
  Description of Artificial Sequence: Synthetic oligonucleotide
aaggcuccaucggacuugc

SEQ ID NO: 2529582 - RNA, 19 nt, Artificial Sequence
  Description of Artificial Sequence: Synthetic oligonucleotide
gaggaaugcacuugagguc

SEQ ID NO: 2529583 - RNA, 19 nt, Artificial Sequence
  Description of Artificial Sequence: Synthetic oligonucleotide
ucgagaaagucugccuugg

SEQ ID NO: 2529584 - RNA, 19 nt, Artificial Sequence
  Description of Artificial Sequence: Synthetic oligonucleotide
uuugcucuuuaugauggac

SEQ ID NO: 2529585 - RNA, 19 nt, Artificial Sequence
  Description of Artificial Sequence: Synthetic oligonucleotide
uguaguggcugaaggugga

SEQ ID NO: 2529586 - RNA, 19 nt, Artificial Sequence
  Description of Artificial Sequence: Synthetic oligonucleotide
cacauuccuugcaaaggcc

SEQ ID NO: 2529587 - RNA, 19 nt, Artificial Sequence
  Description of Artificial Sequence: Synthetic oligonucleotide
uuaugucgagaaagucugc

SEQ ID NO: 2529588 - RNA, 19 nt, Artificial Sequence
  Description of Artificial Sequence: Synthetic oligonucleotide
aaaauccgaggaaugcacu

SEQ ID NO: 2529589 - RNA, 19 nt, Artificial Sequence
  Description of Artificial Sequence: Synthetic oligonucleotide
cauuugggguugaagggug

SEQ ID NO: 2529590 - RNA, 19 nt, Artificial Sequence
  Description of Artificial Sequence: Synthetic oligonucleotide
uggauguggucuccucggg

SEQ ID NO: 2529591 - RNA, 19 nt, Artificial Sequence
  Description of Artificial Sequence: Synthetic oligonucleotide
guagcgcaggcccacgagg

SEQ ID NO: 2529592 - RNA, 19 nt, Artificial Sequence
  Description of Artificial Sequence: Synthetic oligonucleotide
guguaaguagccaauggca

SEQ ID NO: 2529593 - RNA, 19 nt, Artificial Sequence
  Description of Artificial Sequence: Synthetic oligonucleotide
gauaccgcuuccuggguga

SEQ ID NO: 2529594 - RNA, 19 nt, Artificial Sequence
  Description of Artificial Sequence: Synthetic oligonucleotide
gagguucacaggcagccac

SEQ ID NO: 2529595 - RNA, 19 nt, Artificial Sequence
  Description of Artificial Sequence: Synthetic oligonucleotide
aaugcacuugaggucccag

SEQ ID NO: 2529596 - RNA, 19 nt, Artificial Sequence
  Description of Artificial Sequence: Synthetic oligonucleotide
ugucaguaccacguguccc

SEQ ID NO: 2529597 - RNA, 19 nt, Artificial Sequence
  Description of Artificial Sequence: Synthetic oligonucleotide
aguuagccucuugugguac

SEQ ID NO: 2529598 - RNA, 19 nt, Artificial Sequence
  Description of Artificial Sequence: Synthetic oligonucleotide
guuucaagucagcgggucc

SEQ ID NO: 2529599 - RNA, 19 nt, Artificial Sequence
  Description of Artificial Sequence: Synthetic oligonucleotide
ugauguugagagaguguaa

SEQ ID NO: 2529600 - RNA, 19 nt, Artificial Sequence
  Description of Artificial Sequence: Synthetic oligonucleotide
aggacauugcguucugcca

SEQ ID NO: 2529601 - RNA, 19 nt, Artificial Sequence
  Description of Artificial Sequence: Synthetic oligonucleotide
cauagucaagcacaaagua

SEQ ID NO: 2529602 - RNA, 19 nt, Artificial Sequence
  Description of Artificial Sequence: Synthetic oligonucleotide
gacauugcguucugccaug

SEQ ID NO: 2529603 - RNA, 19 nt, Artificial Sequence
  Description of Artificial Sequence: Synthetic oligonucleotide
aagaacacaugguccuuua

SEQ ID NO: 2529604 - RNA, 19 nt, Artificial Sequence
  Description of Artificial Sequence: Synthetic oligonucleotide
auguugagagaguguaagu

SEQ ID NO: 2529605 - RNA, 19 nt, Artificial Sequence
  Description of Artificial Sequence: Synthetic oligonucleotide
aagucagcggguccuucca

SEQ ID NO: 2529606 - RNA, 19 nt, Artificial Sequence
  Description of Artificial Sequence: Synthetic oligonucleotide
cauagaaggcuccaucgga

SEQ ID NO: 2529607 - RNA, 19 nt, Artificial Sequence
  Description of Artificial Sequence: Synthetic oligonucleotide
guggaguuagccucuugug

SEQ ID NO: 2529608 - RNA, 19 nt, Artificial Sequence
  Description of Artificial Sequence: Synthetic oligonucleotide
gucgagaaagucugccuug

SEQ ID NO: 2529609 - RNA, 19 nt, Artificial Sequence
  Description of Artificial Sequence: Synthetic oligonucleotide
auggugucaggggugcagc

SEQ ID NO: 2529610 - RNA, 19 nt, Artificial Sequence
  Description of Artificial Sequence: Synthetic oligonucleotide
augucgagaaagucugccu

SEQ ID NO: 2529611 - RNA, 19 nt, Artificial Sequence
  Description of Artificial Sequence: Synthetic oligonucleotide
agaguguaaguagccaaug

SEQ ID NO: 2529612 - RNA, 19 nt, Artificial Sequence
  Description of Artificial Sequence: Synthetic oligonucleotide
aagucugccuuggacccag

SEQ ID NO: 2529613 - RNA, 19 nt, Artificial Sequence
  Description of Artificial Sequence: Synthetic oligonucleotide
uagaaggcuccaucggacu

SEQ ID NO: 2529614 - RNA, 19 nt, Artificial Sequence
  Description of Artificial Sequence: Synthetic oligonucleotide
uggaaggaguagcgcaggc

SEQ ID NO: 2529615 - RNA, 19 nt, Artificial Sequence
  Description of Artificial Sequence: Synthetic oligonucleotide
uuagccucuugugguacag

SEQ ID NO: 2529616 - RNA, 19 nt, Artificial Sequence
  Description of Artificial Sequence: Synthetic oligonucleotide
caguguagaaccgggcccg

SEQ ID NO: 2529617 - RNA, 19 nt, Artificial Sequence
  Description of Artificial Sequence: Synthetic oligonucleotide
caauggacuuggauaccgc

SEQ ID NO: 2529618 - RNA, 19 nt, Artificial Sequence
  Description of Artificial Sequence: Synthetic oligonucleotide
cacuguccggccuccaggg

SEQ ID NO: 2529619 - RNA, 19 nt, Artificial Sequence
  Description of Artificial Sequence: Synthetic oligonucleotide
aucugucaguaccacgugu

SEQ ID NO: 2529620 - RNA, 19 nt, Artificial Sequence
  Description of Artificial Sequence: Synthetic oligonucleotide
gcauagaaggcuccaucgg

SEQ ID NO: 2529621 - RNA, 19 nt, Artificial Sequence
  Description of Artificial Sequence: Synthetic oligonucleotide
gguugaaggguggaguuag

SEQ ID NO: 2529622 - RNA, 19 nt, Artificial Sequence
  Description of Artificial Sequence: Synthetic oligonucleotide
aguagcgcaggcccacgag

SEQ ID NO: 2529623 - RNA, 19 nt, Artificial Sequence
  Description of Artificial Sequence: Synthetic oligonucleotide
cucugggucaaaguguuuc

SEQ ID NO: 2529624 - RNA, 19 nt, Artificial Sequence
  Description of Artificial Sequence: Synthetic oligonucleotide
cugucaguaccacgugucc

SEQ ID NO: 2529625 - RNA, 19 nt, Artificial Sequence
  Description of Artificial Sequence: Synthetic oligonucleotide
uguuucaagucagcggguc

SEQ ID NO: 2529626 - RNA, 19 nt, Artificial Sequence
  Description of Artificial Sequence: Synthetic oligonucleotide
cauaggaaaauccgaggaa

SEQ ID NO: 2529627 - RNA, 19 nt, Artificial Sequence
  Description of Artificial Sequence: Synthetic oligonucleotide
gucaucccaguuuauggga

SEQ ID NO: 2529628 - RNA, 19 nt, Artificial Sequence
  Description of Artificial Sequence: Synthetic oligonucleotide
uagagcuucucuggggucu

SEQ ID NO: 2529629 - RNA, 19 nt, Artificial Sequence
  Description of Artificial Sequence: Synthetic oligonucleotide
aaguagccaauggcacugg

SEQ ID NO: 2529630 - RNA, 19 nt, Artificial Sequence
  Description of Artificial Sequence: Synthetic oligonucleotide
ucaguaggacauugcguuc

SEQ ID NO: 2529631 - RNA, 19 nt, Artificial Sequence
  Description of Artificial Sequence: Synthetic oligonucleotide
ccuugcaaaggccaaaauc

SEQ ID NO: 2529632 - RNA, 19 nt, Artificial Sequence
  Description of Artificial Sequence: Synthetic oligonucleotide
agucagcggguccuuccac

SEQ ID NO: 2529633 - RNA, 19 nt, Artificial Sequence
  Description of Artificial Sequence: Synthetic oligonucleotide
aguaggacauugcguucug

SEQ ID NO: 2529634 - RNA, 19 nt, Artificial Sequence
  Description of Artificial Sequence: Synthetic oligonucleotide
gaaggcuccaucggacuug

SEQ ID NO: 2529635 - RNA, 19 nt, Artificial Sequence
  Description of Artificial Sequence: Synthetic oligonucleotide
  modified_base (2)..(2): a, c, u, g, unknown or other
cngcucuuugcucuuuaug

SEQ ID NO: 2529636 - RNA, 19 nt, Artificial Sequence
  Description of Artificial Sequence: Synthetic oligonucleotide
cagccaauggacuuggaua

SEQ ID NO: 2529637 - RNA, 19 nt, Artificial Sequence
  Description of Artificial Sequence: Synthetic oligonucleotide
gagagaguguaaguagcca

SEQ ID NO: 2529638 - RNA, 19 nt, Artificial Sequence
  Description of Artificial Sequence: Synthetic oligonucleotide
ggcuccaucggacuugcgc

SEQ ID NO: 2529639 - RNA, 19 nt, Artificial Sequence
  Description of Artificial Sequence: Synthetic oligonucleotide
augggacuaaagaacacau

SEQ ID NO: 2529640 - RNA, 19 nt, Artificial Sequence
  Description of Artificial Sequence: Synthetic oligonucleotide
cucugcaguguagaaccgg

SEQ ID NO: 2529641 - RNA, 19 nt, Artificial Sequence
  Description of Artificial Sequence: Synthetic oligonucleotide
uaguggcugaagguggaug

SEQ ID NO: 2529642 - RNA, 19 nt, Artificial Sequence
  Description of Artificial Sequence: Synthetic oligonucleotide
gggcucuacacauuccuug

SEQ ID NO: 2529643 - RNA, 19 nt, Artificial Sequence
  Description of Artificial Sequence: Synthetic oligonucleotide
guagaaccgggcccggggc

SEQ ID NO: 2529644 - RNA, 19 nt, Artificial Sequence
  Description of Artificial Sequence: Synthetic oligonucleotide
gcaguguagaaccgggccc

SEQ ID NO: 2529645 - RNA, 19 nt, Artificial Sequence
  Description of Artificial Sequence: Synthetic oligonucleotide
  modified_base (4)..(4): a, c, u, g, unknown or other
uucngcucuuugcucuuua

SEQ ID NO: 2529646 - RNA, 19 nt, Artificial Sequence
  Description of Artificial Sequence: Synthetic oligonucleotide
acaugguccuuuaugucga

SEQ ID NO: 2529647 - RNA, 19 nt, Artificial Sequence
  Description of Artificial Sequence: Synthetic oligonucleotide
ggaaccuacguucccgcug

SEQ ID NO: 2529648 - RNA, 19 nt, Artificial Sequence
  Description of Artificial Sequence: Synthetic oligonucleotide
guaaguagccaauggcacu

SEQ ID NO: 2529649 - RNA, 19 nt, Artificial Sequence
  Description of Artificial Sequence: Synthetic oligonucleotide
cugcaguguagaaccgggc

SEQ ID NO: 2529650 - RNA, 19 nt, Artificial Sequence
  Description of Artificial Sequence: Synthetic oligonucleotide
ccaguuuaugggacuaaag

SEQ ID NO: 2529651 - RNA, 19 nt, Artificial Sequence
  Description of Artificial Sequence: Synthetic oligonucleotide
  modified_base (3)..(3): a, c, u, g, unknown or other
ucngcucuuugcucuuuau

SEQ ID NO: 2529652 - RNA, 19 nt, Artificial Sequence
  Description of Artificial Sequence: Synthetic oligonucleotide
ccaauggacuuggauaccg

SEQ ID NO: 2529653 - RNA, 19 nt, Artificial Sequence
  Description of Artificial Sequence: Synthetic oligonucleotide
ggaaaauccgaggaaugca

SEQ ID NO: 2529654 - RNA, 19 nt, Artificial Sequence
  Description of Artificial Sequence: Synthetic oligonucleotide
uggugucaggggugcagcc

SEQ ID NO: 2529655 - RNA, 19 nt, Artificial Sequence
  Description of Artificial Sequence: Synthetic oligonucleotide
ugcguucugccaugaugug

SEQ ID NO: 2529656 - RNA, 19 nt, Artificial Sequence
  Description of Artificial Sequence: Synthetic oligonucleotide
cuggaaggaguagcgcagg

SEQ ID NO: 2529657 - RNA, 19 nt, Artificial Sequence
  Description of Artificial Sequence: Synthetic oligonucleotide
uagaaccgggcccggggcu

SEQ ID NO: 2529658 - RNA, 19 nt, Artificial Sequence
  Description of Artificial Sequence: Synthetic oligonucleotide
gaagguggauguggucucc

SEQ ID NO: 2529659 - RNA, 19 nt, Artificial Sequence
  Description of Artificial Sequence: Synthetic oligonucleotide
aaagucugccuuggaccca

SEQ ID NO: 2529660 - RNA, 19 nt, Artificial Sequence
  Description of Artificial Sequence: Synthetic oligonucleotide
cucuacacauuccuugcaa

SEQ ID NO: 2529661 - RNA, 19 nt, Artificial Sequence
  Description of Artificial Sequence: Synthetic oligonucleotide
ucagcggguccuuccacau

SEQ ID NO: 2529662 - RNA, 19 nt, Artificial Sequence
  Description of Artificial Sequence: Synthetic oligonucleotide
cuucaguaggacauugcgu

SEQ ID NO: 2529663 - RNA, 19 nt, Artificial Sequence
  Description of Artificial Sequence: Synthetic oligonucleotide
uggauaccgcuuccugggu

SEQ ID NO: 2529664 - RNA, 19 nt, Artificial Sequence
  Description of Artificial Sequence: Synthetic oligonucleotide
uccuuguggagaaggccuu

SEQ ID NO: 2529665 - RNA, 19 nt, Artificial Sequence
  Description of Artificial Sequence: Synthetic oligonucleotide
aggcccacgaggaaggggu

SEQ ID NO: 2529666 - RNA, 19 nt, Artificial Sequence
  Description of Artificial Sequence: Synthetic oligonucleotide
uguccggccuccagggauc

SEQ ID NO: 2529667 - RNA, 19 nt, Artificial Sequence
  Description of Artificial Sequence: Synthetic oligonucleotide
  modified_base (8)..(8): a, c, u, g, unknown or other
gugguucngcucuuugcuc

SEQ ID NO: 2529668 - RNA, 19 nt, Artificial Sequence
  Description of Artificial Sequence: Synthetic oligonucleotide
cacgaggaaggggugcugc

SEQ ID NO: 2529669 - RNA, 19 nt, Artificial Sequence
  Description of Artificial Sequence: Synthetic oligonucleotide
cugggugaacucuggguca

SEQ ID NO: 2529670 - RNA, 19 nt, Artificial Sequence
  Description of Artificial Sequence: Synthetic oligonucleotide
gucaguaccacgugucccu

SEQ ID NO: 2529671 - RNA, 19 nt, Artificial Sequence
  Description of Artificial Sequence: Synthetic oligonucleotide
aagguggauguggucuccu

SEQ ID NO: 2529672 - RNA, 19 nt, Artificial Sequence
  Description of Artificial Sequence: Synthetic oligonucleotide
caugguccuuuaugucgag

SEQ ID NO: 2529673 - RNA, 19 nt, Artificial Sequence
  Description of Artificial Sequence: Synthetic oligonucleotide
cuccguugacauagucaag

SEQ ID NO: 2529674 - RNA, 19 nt, Artificial Sequence
  Description of Artificial Sequence: Synthetic oligonucleotide
caguccaagagaauguuuu

SEQ ID NO: 2529675 - RNA, 19 nt, Artificial Sequence
  Description of Artificial Sequence: Synthetic oligonucleotide
ccuccguugacauagucaa

SEQ ID NO: 2529676 - RNA, 19 nt, Artificial Sequence
  Description of Artificial Sequence: Synthetic oligonucleotide
gugcagccaauggacuugg

SEQ ID NO: 2529677 - RNA, 19 nt, Artificial Sequence
  Description of Artificial Sequence: Synthetic oligonucleotide
ggauguggucuccucgggc

SEQ ID NO: 2529678 - RNA, 19 nt, Artificial Sequence
  Description of Artificial Sequence: Synthetic oligonucleotide
cauuccuugcaaaggccaa

SEQ ID NO: 2529679 - RNA, 19 nt, Artificial Sequence
  Description of Artificial Sequence: Synthetic oligonucleotide
aggaaccuacguucccgcu

SEQ ID NO: 2529680 - RNA, 19 nt, Artificial Sequence
  Description of Artificial Sequence: Synthetic oligonucleotide
gaguuagccucuuguggua

SEQ ID NO: 2529681 - RNA, 19 nt, Artificial Sequence
  Description of Artificial Sequence: Synthetic oligonucleotide
acgaggaaggggugcugca

SEQ ID NO: 2529682 - RNA, 19 nt, Artificial Sequence
  Description of Artificial Sequence: Synthetic oligonucleotide
ggaucuguaguggcugaag

SEQ ID NO: 2529683 - RNA, 19 nt, Artificial Sequence
  Description of Artificial Sequence: Synthetic oligonucleotide
guuagccucuugugguaca

SEQ ID NO: 2529684 - RNA, 19 nt, Artificial Sequence
  Description of Artificial Sequence: Synthetic oligonucleotide
gcacuggccaccucugcag

SEQ ID NO: 2529685 - RNA, 19 nt, Artificial Sequence
  Description of Artificial Sequence: Synthetic oligonucleotide
ccuccagggaucuguagug

SEQ ID NO: 2529686 - RNA, 19 nt, Artificial Sequence
  Description of Artificial Sequence: Synthetic oligonucleotide
gguggaguuagccucuugu

SEQ ID NO: 2529687 - RNA, 19 nt, Artificial Sequence
  Description of Artificial Sequence: Synthetic oligonucleotide
agaaccgggcccggggcuc

SEQ ID NO: 2529688 - RNA, 19 nt, Artificial Sequence
  Description of Artificial Sequence: Synthetic oligonucleotide
caggggugcagccaaugga

SEQ ID NO: 2529689 - RNA, 19 nt, Artificial Sequence
  Description of Artificial Sequence: Synthetic oligonucleotide
gucagcggguccuuccaca

SEQ ID NO: 2529690 - RNA, 19 nt, Artificial Sequence
  Description of Artificial Sequence: Synthetic oligonucleotide
ggugcagccaauggacuug

SEQ ID NO: 2529691 - RNA, 19 nt, Artificial Sequence
  Description of Artificial Sequence: Synthetic oligonucleotide
ggucccagaacugcuggcc

SEQ ID NO: 2529692 - RNA, 19 nt, Artificial Sequence
  Description of Artificial Sequence: Synthetic oligonucleotide
ugacauagucaagcacaaa

SEQ ID NO: 2529693 - RNA, 19 nt, Artificial Sequence
  Description of Artificial Sequence: Synthetic oligonucleotide
accacgugucccuggcagu

SEQ ID NO: 2529694 - RNA, 19 nt, Artificial Sequence
  Description of Artificial Sequence: Synthetic oligonucleotide
ccaggaaccuacguucccg

SEQ ID NO: 2529695 - RNA, 19 nt, Artificial Sequence
  Description of Artificial Sequence: Synthetic oligonucleotide
guaggacauugcguucugc

SEQ ID NO: 2529696 - RNA, 19 nt, Artificial Sequence
  Description of Artificial Sequence: Synthetic oligonucleotide
uccaucggacuugcgccug

SEQ ID NO: 2529697 - RNA, 19 nt, Artificial Sequence
  Description of Artificial Sequence: Synthetic oligonucleotide
acgugucccuggcagucca

SEQ ID NO: 2529698 - RNA, 19 nt, Artificial Sequence
  Description of Artificial Sequence: Synthetic oligonucleotide
gcguucugccaugaugugg

SEQ ID NO: 2529699 - RNA, 19 nt, Artificial Sequence
  Description of Artificial Sequence: Synthetic oligonucleotide
aaggggugcugcacauucu

SEQ ID NO: 2529700 - RNA, 19 nt, Artificial Sequence
  Description of Artificial Sequence: Synthetic oligonucleotide
gagaguguaaguagccaau

SEQ ID NO: 2529701 - RNA, 19 nt, Artificial Sequence
  Description of Artificial Sequence: Synthetic oligonucleotide
ucugguccuuguggagaag

SEQ ID NO: 2529702 - RNA, 19 nt, Artificial Sequence
  Description of Artificial Sequence: Synthetic oligonucleotide
gaguagcgcaggcccacga

SEQ ID NO: 2529703 - RNA, 19 nt, Artificial Sequence
  Description of Artificial Sequence: Synthetic oligonucleotide
uucccgcugcagguggaag

SEQ ID NO: 2529704 - RNA, 19 nt, Artificial Sequence
  Description of Artificial Sequence: Synthetic oligonucleotide
guugaaggguggaguuagc

SEQ ID NO: 2529705 - RNA, 19 nt, Artificial Sequence
  Description of Artificial Sequence: Synthetic oligonucleotide
ggacuuggauaccgcuucc

SEQ ID NO: 2529706 - RNA, 19 nt, Artificial Sequence
  Description of Artificial Sequence: Synthetic oligonucleotide
aaccuacguucccgcugca

SEQ ID NO: 2529707 - RNA, 19 nt, Artificial Sequence
  Description of Artificial Sequence: Synthetic oligonucleotide
ggccaaaaucugucaguac

SEQ ID NO: 2529708 - RNA, 19 nt, Artificial Sequence
  Description of Artificial Sequence: Synthetic oligonucleotide
cguugacauagucaagcac

SEQ ID NO: 2529709 - RNA, 19 nt, Artificial Sequence
  Description of Artificial Sequence: Synthetic oligonucleotide
guguagaaccgggcccggg

SEQ ID NO: 2529710 - RNA, 19 nt, Artificial Sequence
  Description of Artificial Sequence: Synthetic oligonucleotide
ugcagccaauggacuugga

SEQ ID NO: 2529711 - RNA, 19 nt, Artificial Sequence
  Description of Artificial Sequence: Synthetic oligonucleotide
ucccaguuuaugggacuaa

SEQ ID NO: 2529712 - RNA, 19 nt, Artificial Sequence
  Description of Artificial Sequence: Synthetic oligonucleotide
aucccaguuuaugggacua

SEQ ID NO: 2529713 - RNA, 19 nt, Artificial Sequence
  Description of Artificial Sequence: Synthetic oligonucleotide
cuccuccguugacauaguc

SEQ ID NO: 2529714 - RNA, 19 nt, Artificial Sequence
  Description of Artificial Sequence: Synthetic oligonucleotide
gguccuuuaugucgagaaa

SEQ ID NO: 2529715 - RNA, 19 nt, Artificial Sequence
  Description of Artificial Sequence: Synthetic oligonucleotide
agguucacaggcagccacu

SEQ ID NO: 2529716 - RNA, 19 nt, Artificial Sequence
  Description of Artificial Sequence: Synthetic oligonucleotide
acauugcguucugccauga

SEQ ID NO: 2529717 - RNA, 19 nt, Artificial Sequence
  Description of Artificial Sequence: Synthetic oligonucleotide
ugucaggggugcagccaau

SEQ ID NO: 2529718 - RNA, 19 nt, Artificial Sequence
  Description of Artificial Sequence: Synthetic oligonucleotide
acuguccggccuccaggga

SEQ ID NO: 2529719 - RNA, 19 nt, Artificial Sequence
  Description of Artificial Sequence: Synthetic oligonucleotide
ggacauugcguucugccau

SEQ ID NO: 2529720 - RNA, 19 nt, Artificial Sequence
  Description of Artificial Sequence: Synthetic oligonucleotide
uccucgggcucuacacauu

SEQ ID NO: 2529721 - RNA, 19 nt, Artificial Sequence
  Description of Artificial Sequence: Synthetic oligonucleotide
ggacuaaagaacacauggu

SEQ ID NO: 2529722 - RNA, 19 nt, Artificial Sequence
  Description of Artificial Sequence: Synthetic oligonucleotide
ccucugcaguguagaaccg

SEQ ID NO: 2529723 - RNA, 19 nt, Artificial Sequence
  Description of Artificial Sequence: Synthetic oligonucleotide
gcucuacacauuccuugca

SEQ ID NO: 2529724 - RNA, 19 nt, Artificial Sequence
  Description of Artificial Sequence: Synthetic oligonucleotide
gcugaagguggaugugguc

SEQ ID NO: 2529725 - RNA, 19 nt, Artificial Sequence
  Description of Artificial Sequence: Synthetic oligonucleotide
ccucgggcucuacacauuc

SEQ ID NO: 2529726 - RNA, 19 nt, Artificial Sequence
  Description of Artificial Sequence: Synthetic oligonucleotide
gccauggugucaggggugc

SEQ ID NO: 2529727 - RNA, 19 nt, Artificial Sequence
  Description of Artificial Sequence: Synthetic oligonucleotide
cugggucaaaguguuucaa

SEQ ID NO: 2529728 - RNA, 19 nt, Artificial Sequence
  Description of Artificial Sequence: Synthetic oligonucleotide
gacuuggauaccgcuuccu

SEQ ID NO: 2529729 - RNA, 19 nt, Artificial Sequence
  Description of Artificial Sequence: Synthetic oligonucleotide
uuccacauuugggguugaa

SEQ ID NO: 2529730 - RNA, 19 nt, Artificial Sequence
  Description of Artificial Sequence: Synthetic oligonucleotide
cgcaggcccacgaggaagg

SEQ ID NO: 2529731 - RNA, 19 nt, Artificial Sequence
  Description of Artificial Sequence: Synthetic oligonucleotide
guaccacgugucccuggca

SEQ ID NO: 2529732 - RNA, 19 nt, Artificial Sequence
  Description of Artificial Sequence: Synthetic oligonucleotide
  modified_base (18)..(18): a, c, u, g, unknown or other
cugccaugaugugguucng

SEQ ID NO: 2529733 - RNA, 19 nt, Artificial Sequence
  Description of Artificial Sequence: Synthetic oligonucleotide
ggaguagcgcaggcccacg

SEQ ID NO: 2529734 - RNA, 19 nt, Artificial Sequence
  Description of Artificial Sequence: Synthetic oligonucleotide
ccguugacauagucaagca

SEQ ID NO: 2529735 - RNA, 19 nt, Artificial Sequence
  Description of Artificial Sequence: Synthetic oligonucleotide
agucugccuuggacccagc

SEQ ID NO: 2529736 - RNA, 19 nt, Artificial Sequence
  Description of Artificial Sequence: Synthetic oligonucleotide
gccaccucugcaguguaga

SEQ ID NO: 2529737 - RNA, 19 nt, Artificial Sequence
  Description of Artificial Sequence: Synthetic oligonucleotide
ggggcuccaggaaccuacg

SEQ ID NO: 2529738 - RNA, 19 nt, Artificial Sequence
  Description of Artificial Sequence: Synthetic oligonucleotide
gccaauggacuuggauacc

SEQ ID NO: 2529739 - RNA, 19 nt, Artificial Sequence
  Description of Artificial Sequence: Synthetic oligonucleotide
uaccgcuuccugggugaac

SEQ ID NO: 2529740 - RNA, 19 nt, Artificial Sequence
  Description of Artificial Sequence: Synthetic oligonucleotide
ggcccggggcuccaggaac

SEQ ID NO: 2529741 - RNA, 19 nt, Artificial Sequence
  Description of Artificial Sequence: Synthetic oligonucleotide
gcacaaaguagagcuucuc

SEQ ID NO: 2529742 - RNA, 19 nt, Artificial Sequence
  Description of Artificial Sequence: Synthetic oligonucleotide
gcgcaggcccacgaggaag

SEQ ID NO: 2529743 - RNA, 19 nt, Artificial Sequence
  Description of Artificial Sequence: Synthetic oligonucleotide
gcagccaauggacuuggau

SEQ ID NO: 2529744 - RNA, 19 nt, Artificial Sequence
  Description of Artificial Sequence: Synthetic oligonucleotide
cuccaucggacuugcgccu

SEQ ID NO: 2529745 - RNA, 19 nt, Artificial Sequence
  Description of Artificial Sequence: Synthetic oligonucleotide
ccaucggacuugcgccugg

SEQ ID NO: 2529746 - RNA, 19 nt, Artificial Sequence
  Description of Artificial Sequence: Synthetic oligonucleotide
acaggucaucccaguuuau

SEQ ID NO: 2529747 - RNA, 19 nt, Artificial Sequence
  Description of Artificial Sequence: Synthetic oligonucleotide
ggguggaguuagccucuug

SEQ ID NO: 2529748 - RNA, 19 nt, Artificial Sequence
  Description of Artificial Sequence: Synthetic oligonucleotide
cuguccggccuccagggau

SEQ ID NO: 2529749 - RNA, 19 nt, Artificial Sequence
  Description of Artificial Sequence: Synthetic oligonucleotide
cagccacuguccggccucc

SEQ ID NO: 2529750 - RNA, 19 nt, Artificial Sequence
  Description of Artificial Sequence: Synthetic oligonucleotide
auaccgcuuccugggugaa

SEQ ID NO: 2529751 - RNA, 19 nt, Artificial Sequence
  Description of Artificial Sequence: Synthetic oligonucleotide
guguuucaagucagcgggu

SEQ ID NO: 2529752 - RNA, 19 nt, Artificial Sequence
  Description of Artificial Sequence: Synthetic oligonucleotide
cucuugugguacaggucau

SEQ ID NO: 2529753 - RNA, 19 nt, Artificial Sequence
  Description of Artificial Sequence: Synthetic oligonucleotide
cccagaacugcuggccaug

SEQ ID NO: 2529754 - RNA, 19 nt, Artificial Sequence
  Description of Artificial Sequence: Synthetic oligonucleotide
ccacgugucccuggcaguc

SEQ ID NO: 2529755 - RNA, 19 nt, Artificial Sequence
  Description of Artificial Sequence: Synthetic oligonucleotide
gcccggggcuccaggaacc

SEQ ID NO: 2529756 - RNA, 19 nt, Artificial Sequence
  Description of Artificial Sequence: Synthetic oligonucleotide
guaguggcugaagguggau

SEQ ID NO: 2529757 - RNA, 19 nt, Artificial Sequence
  Description of Artificial Sequence: Synthetic oligonucleotide
cagaacugcuggccauggu

SEQ ID NO: 2529758 - RNA, 19 nt, Artificial Sequence
  Description of Artificial Sequence: Synthetic oligonucleotide
  modified_base (6)..(6): a, c, u, g, unknown or other
gguucngcucuuugcucuu

SEQ ID NO: 2529759 - RNA, 19 nt, Artificial Sequence
  Description of Artificial Sequence: Synthetic oligonucleotide
ggcaguccaagagaauguu

SEQ ID NO: 2529760 - RNA, 19 nt, Artificial Sequence
  Description of Artificial Sequence: Synthetic oligonucleotide
cauugcguucugccaugau

SEQ ID NO: 2529761 - RNA, 19 nt, Artificial Sequence
  Description of Artificial Sequence: Synthetic oligonucleotide
gcggguccuuccacauuug

SEQ ID NO: 2529762 - RNA, 19 nt, Artificial Sequence
  Description of Artificial Sequence: Synthetic oligonucleotide
  modified_base (5)..(5): a, c, u, g, unknown or other
guucngcucuuugcucuuu

SEQ ID NO: 2529763 - RNA, 19 nt, Artificial Sequence
  Description of Artificial Sequence: Synthetic oligonucleotide
guucugccaugaugugguu

SEQ ID NO: 2529764 - RNA, 19 nt, Artificial Sequence
  Description of Artificial Sequence: Synthetic oligonucleotide
ggggugcagccaauggacu

SEQ ID NO: 2529765 - RNA, 19 nt, Artificial Sequence
  Description of Artificial Sequence: Synthetic oligonucleotide
ccacgaggaaggggugcug

SEQ ID NO: 2529766 - RNA, 19 nt, Artificial Sequence
  Description of Artificial Sequence: Synthetic oligonucleotide
gggcuccaggaaccuacgu

SEQ ID NO: 2529767 - RNA, 19 nt, Artificial Sequence
  Description of Artificial Sequence: Synthetic oligonucleotide
gggcccggggcuccaggaa

SEQ ID NO: 2529768 - RNA, 19 nt, Artificial Sequence
  Description of Artificial Sequence: Synthetic oligonucleotide
guccggccuccagggaucu

SEQ ID NO: 2529769 - RNA, 19 nt, Artificial Sequence
  Description of Artificial Sequence: Synthetic oligonucleotide
ccuggcaguccaagagaau

SEQ ID NO: 2529770 - RNA, 19 nt, Artificial Sequence
  Description of Artificial Sequence: Synthetic oligonucleotide
cccacgaggaaggggugcu

SEQ ID NO: 2529771 - RNA, 19 nt, Artificial Sequence
  Description of Artificial Sequence: Synthetic oligonucleotide
ggaaggggugcugcacauu

SEQ ID NO: 2529772 - RNA, 19 nt, Artificial Sequence
  Description of Artificial Sequence: Synthetic oligonucleotide
cagcggguccuuccacauu

SEQ ID NO: 2529773 - RNA, 19 nt, Artificial Sequence
  Description of Artificial Sequence: Synthetic oligonucleotide
ccggggcuccaggaaccua

SEQ ID NO: 2529774 - RNA, 19 nt, Artificial Sequence
  Description of Artificial Sequence: Synthetic oligonucleotide
cccggggcuccaggaaccu

SEQ ID NO: 2529775 - RNA, 19 nt, Artificial Sequence
  Description of Artificial Sequence: Synthetic oligonucleotide
aaauagagcauagaggacc

SEQ ID NO: 2529776 - RNA, 19 nt, Artificial Sequence
  Description of Artificial Sequence: Synthetic oligonucleotide
aauccuaccuuccacagac

SEQ ID NO: 2529777 - RNA, 19 nt, Artificial Sequence
  Description of Artificial Sequence: Synthetic oligonucleotide
gaaauaaacgguuacaaga

SEQ ID NO: 2529778 - RNA, 19 nt, Artificial Sequence
  Description of Artificial Sequence: Synthetic oligonucleotide
aaauaaacgguuacaagac

SEQ ID NO: 2529779 - RNA, 19 nt, Artificial Sequence
  Description of Artificial Sequence: Synthetic oligonucleotide
aucacuaucugugugaccc

SEQ ID NO: 2529780 - RNA, 19 nt, Artificial Sequence
  Description of Artificial Sequence: Synthetic oligonucleotide
cuaaauagagcauagagga

SEQ ID NO: 2529781 - RNA, 19 nt, Artificial Sequence
  Description of Artificial Sequence: Synthetic oligonucleotide
uuuaaugagagcgucaggc

SEQ ID NO: 2529782 - RNA, 19 nt, Artificial Sequence
  Description of Artificial Sequence: Synthetic oligonucleotide
ugcucuaucacuaucugug

SEQ ID NO: 2529783 - RNA, 19 nt, Artificial Sequence
  Description of Artificial Sequence: Synthetic oligonucleotide
agaaccuaugcuuaaacug

SEQ ID NO: 2529784 - RNA, 19 nt, Artificial Sequence
  Description of Artificial Sequence: Synthetic oligonucleotide
aacacagcacaccgaaacc

SEQ ID NO: 2529785 - RNA, 19 nt, Artificial Sequence
  Description of Artificial Sequence: Synthetic oligonucleotide
aaacgguuacaagacaggc

SEQ ID NO: 2529786 - RNA, 19 nt, Artificial Sequence
  Description of Artificial Sequence: Synthetic oligonucleotide
aaaugagaccccugcauuc

SEQ ID NO: 2529787 - RNA, 19 nt, Artificial Sequence
  Description of Artificial Sequence: Synthetic oligonucleotide
cuuucagccuucuucaugg

SEQ ID NO: 2529788 - RNA, 19 nt, Artificial Sequence
  Description of Artificial Sequence: Synthetic oligonucleotide
gaaccuaugcuuaaacugg

SEQ ID NO: 2529789 - RNA, 19 nt, Artificial Sequence
  Description of Artificial Sequence: Synthetic oligonucleotide
ugaacugaaaacugcaccu

SEQ ID NO: 2529790 - RNA, 19 nt, Artificial Sequence
  Description of Artificial Sequence: Synthetic oligonucleotide
augagaacacagcacaccg

SEQ ID NO: 2529791 - RNA, 19 nt, Artificial Sequence
  Description of Artificial Sequence: Synthetic oligonucleotide
uaaacgguuacaagacagg

SEQ ID NO: 2529792 - RNA, 19 nt, Artificial Sequence
  Description of Artificial Sequence: Synthetic oligonucleotide
ugugugacccuugagagag

SEQ ID NO: 2529793 - RNA, 19 nt, Artificial Sequence
  Description of Artificial Sequence: Synthetic oligonucleotide
uuaccaaaccagcuguagg

SEQ ID NO: 2529794 - RNA, 19 nt, Artificial Sequence
  Description of Artificial Sequence: Synthetic oligonucleotide
uguaggaugagaacacagc

SEQ ID NO: 2529795 - RNA, 19 nt, Artificial Sequence
  Description of Artificial Sequence: Synthetic oligonucleotide
uaaugaucuaauccuaccu

SEQ ID NO: 2529796 - RNA, 19 nt, Artificial Sequence
  Description of Artificial Sequence: Synthetic oligonucleotide
uaaugagagcgucaggcag

SEQ ID NO: 2529797 - RNA, 19 nt, Artificial Sequence
  Description of Artificial Sequence: Synthetic oligonucleotide
uucuacagcuggcagaacc

SEQ ID NO: 2529798 - RNA, 19 nt, Artificial Sequence
  Description of Artificial Sequence: Synthetic oligonucleotide
ugacuuggaaacaggaagc

SEQ ID NO: 2529799 - RNA, 19 nt, Artificial Sequence
  Description of Artificial Sequence: Synthetic oligonucleotide
acgguuacaagacaggcug

SEQ ID NO: 2529800 - RNA, 19 nt, Artificial Sequence
  Description of Artificial Sequence: Synthetic oligonucleotide
acaccgaaacccuaggagg

SEQ ID NO: 2529801 - RNA, 19 nt, Artificial Sequence
  Description of Artificial Sequence: Synthetic oligonucleotide
uugcagaucauuaccaaac

SEQ ID NO: 2529802 - RNA, 19 nt, Artificial Sequence
  Description of Artificial Sequence: Synthetic oligonucleotide
ucauuaccaaaccagcugu

SEQ ID NO: 2529803 - RNA, 19 nt, Artificial Sequence
  Description of Artificial Sequence: Synthetic oligonucleotide
aauaaacgguuacaagaca

SEQ ID NO: 2529804 - RNA, 19 nt, Artificial Sequence
  Description of Artificial Sequence: Synthetic oligonucleotide
ucuaucacuaucuguguga

SEQ ID NO: 2529805 - RNA, 19 nt, Artificial Sequence
  Description of Artificial Sequence: Synthetic oligonucleotide
agaucauuaccaaaccagc

SEQ ID NO: 2529806 - RNA, 19 nt, Artificial Sequence
  Description of Artificial Sequence: Synthetic oligonucleotide
ucugaagaccccauguucu

SEQ ID NO: 2529807 - RNA, 19 nt, Artificial Sequence
  Description of Artificial Sequence: Synthetic oligonucleotide
aucauuaccaaaccagcug

SEQ ID NO: 2529808 - RNA, 19 nt, Artificial Sequence
  Description of Artificial Sequence: Synthetic oligonucleotide
aaugaucuaauccuaccuu

SEQ ID NO: 2529809 - RNA, 19 nt, Artificial Sequence
  Description of Artificial Sequence: Synthetic oligonucleotide
ucuaauccuaccuuccaca

SEQ ID NO: 2529810 - RNA, 19 nt, Artificial Sequence
  Description of Artificial Sequence: Synthetic oligonucleotide
ucuugcucuaucacuaucu

SEQ ID NO: 2529811 - RNA, 19 nt, Artificial Sequence
  Description of Artificial Sequence: Synthetic oligonucleotide
aaugagaccccugcauucg

SEQ ID NO: 2529812 - RNA, 19 nt, Artificial Sequence
  Description of Artificial Sequence: Synthetic oligonucleotide
auaaacgguuacaagacag

SEQ ID NO: 2529813 - RNA, 19 nt, Artificial Sequence
  Description of Artificial Sequence: Synthetic oligonucleotide
aaggccggcugcuacaaag

SEQ ID NO: 2529814 - RNA, 19 nt, Artificial Sequence
  Description of Artificial Sequence: Synthetic oligonucleotide
aucuaauccuaccuuccac

SEQ ID NO: 2529815 - RNA, 19 nt, Artificial Sequence
  Description of Artificial Sequence: Synthetic oligonucleotide
aggggaaauaaacgguuac

SEQ ID NO: 2529816 - RNA, 19 nt, Artificial Sequence
  Description of Artificial Sequence: Synthetic oligonucleotide
aacacaggugacuuggaaa

SEQ ID NO: 2529817 - RNA, 19 nt, Artificial Sequence
  Description of Artificial Sequence: Synthetic oligonucleotide
agagagucacuucucaucu

SEQ ID NO: 2529818 - RNA, 19 nt, Artificial Sequence
  Description of Artificial Sequence: Synthetic oligonucleotide
aaguuucuacagcuggcag

SEQ ID NO: 2529819 - RNA, 19 nt, Artificial Sequence
  Description of Artificial Sequence: Synthetic oligonucleotide
uuacaagacaggcugcccu

SEQ ID NO: 2529820 - RNA, 19 nt, Artificial Sequence
  Description of Artificial Sequence: Synthetic oligonucleotide
uagaggaccucucagcuaa

SEQ ID NO: 2529821 - RNA, 19 nt, Artificial Sequence
  Description of Artificial Sequence: Synthetic oligonucleotide
uuauuuggucccaggaaac

SEQ ID NO: 2529822 - RNA, 19 nt, Artificial Sequence
  Description of Artificial Sequence: Synthetic oligonucleotide
ugcagaucauuaccaaacc

SEQ ID NO: 2529823 - RNA, 19 nt, Artificial Sequence
  Description of Artificial Sequence: Synthetic oligonucleotide
ugggguagaacagagccag

SEQ ID NO: 2529824 - RNA, 19 nt, Artificial Sequence
  Description of Artificial Sequence: Synthetic oligonucleotide
uggauuuuaaugagagcgu

SEQ ID NO: 2529825 - RNA, 19 nt, Artificial Sequence
  Description of Artificial Sequence: Synthetic oligonucleotide
agagucacuucucaucuug

SEQ ID NO: 2529826 - RNA, 19 nt, Artificial Sequence
  Description of Artificial Sequence: Synthetic oligonucleotide
uagaacagagccagggcug

SEQ ID NO: 2529827 - RNA, 19 nt, Artificial Sequence
  Description of Artificial Sequence: Synthetic oligonucleotide
uaaauagagcauagaggac

SEQ ID NO: 2529828 - RNA, 19 nt, Artificial Sequence
  Description of Artificial Sequence: Synthetic oligonucleotide
uuuggucccaggaaacaca

SEQ ID NO: 2529829 - RNA, 19 nt, Artificial Sequence
  Description of Artificial Sequence: Synthetic oligonucleotide
uggcuggagauagaaaggg

SEQ ID NO: 2529830 - RNA, 19 nt, Artificial Sequence
  Description of Artificial Sequence: Synthetic oligonucleotide
uaggaugagaacacagcac

SEQ ID NO: 2529831 - RNA, 19 nt, Artificial Sequence
  Description of Artificial Sequence: Synthetic oligonucleotide
gaugagaacacagcacacc

SEQ ID NO: 2529832 - RNA, 19 nt, Artificial Sequence
  Description of Artificial Sequence: Synthetic oligonucleotide
guaggaugagaacacagca

SEQ ID NO: 2529833 - RNA, 19 nt, Artificial Sequence
  Description of Artificial Sequence: Synthetic oligonucleotide
  modified_base (13)..(13): a, c, u, g, unknown or other
cucucagcuaacngggucc

SEQ ID NO: 2529834 - RNA, 19 nt, Artificial Sequence
  Description of Artificial Sequence: Synthetic oligonucleotide
uugagagagucacuucuca

SEQ ID NO: 2529835 - RNA, 19 nt, Artificial Sequence
  Description of Artificial Sequence: Synthetic oligonucleotide
ggaaauaaacgguuacaag

SEQ ID NO: 2529836 - RNA, 19 nt, Artificial Sequence
  Description of Artificial Sequence: Synthetic oligonucleotide
ugcauggauuuuaaugaga

SEQ ID NO: 2529837 - RNA, 19 nt, Artificial Sequence
  Description of Artificial Sequence: Synthetic oligonucleotide
acagacagggccccucccc

SEQ ID NO: 2529838 - RNA, 19 nt, Artificial Sequence
  Description of Artificial Sequence: Synthetic oligonucleotide
cuaauccuaccuuccacag

SEQ ID NO: 2529839 - RNA, 19 nt, Artificial Sequence
  Description of Artificial Sequence: Synthetic oligonucleotide
uaggaggucacugagcuaa

SEQ ID NO: 2529840 - RNA, 19 nt, Artificial Sequence
  Description of Artificial Sequence: Synthetic oligonucleotide
agagcugugcuguugcucu

SEQ ID NO: 2529841 - RNA, 19 nt, Artificial Sequence
  Description of Artificial Sequence: Synthetic oligonucleotide
uuugcccagacuccagcag

SEQ ID NO: 2529842 - RNA, 19 nt, Artificial Sequence
  Description of Artificial Sequence: Synthetic oligonucleotide
aguuucuacagcuggcaga

SEQ ID NO: 2529843 - RNA, 19 nt, Artificial Sequence
  Description of Artificial Sequence: Synthetic oligonucleotide
ggaaacacaggugacuugg

SEQ ID NO: 2529844 - RNA, 19 nt, Artificial Sequence
  Description of Artificial Sequence: Synthetic oligonucleotide
gagcuaaugaucuaauccu

SEQ ID NO: 2529845 - RNA, 19 nt, Artificial Sequence
  Description of Artificial Sequence: Synthetic oligonucleotide
ucuacucugguuccccagc

SEQ ID NO: 2529846 - RNA, 19 nt, Artificial Sequence
  Description of Artificial Sequence: Synthetic oligonucleotide
cacaccgaaacccuaggag

SEQ ID NO: 2529847 - RNA, 19 nt, Artificial Sequence
  Description of Artificial Sequence: Synthetic oligonucleotide
gagagagucacuucucauc

SEQ ID NO: 2529848 - RNA, 19 nt, Artificial Sequence
  Description of Artificial Sequence: Synthetic oligonucleotide
aauagagcauagaggaccu

SEQ ID NO: 2529849 - RNA, 19 nt, Artificial Sequence
  Description of Artificial Sequence: Synthetic oligonucleotide
cucauuauuuggucccagg

SEQ ID NO: 2529850 - RNA, 19 nt, Artificial Sequence
  Description of Artificial Sequence: Synthetic oligonucleotide
aaccuaugcuuaaacuggg

SEQ ID NO: 2529851 - RNA, 19 nt, Artificial Sequence
  Description of Artificial Sequence: Synthetic oligonucleotide
ugcccuccaaaugagaccc

SEQ ID NO: 2529852 - RNA, 19 nt, Artificial Sequence
  Description of Artificial Sequence: Synthetic oligonucleotide
cuguaggaugagaacacag

SEQ ID NO: 2529853 - RNA, 19 nt, Artificial Sequence
  Description of Artificial Sequence: Synthetic oligonucleotide
ggcugcauggauuuuaaug

SEQ ID NO: 2529854 - RNA, 19 nt, Artificial Sequence
  Description of Artificial Sequence: Synthetic oligonucleotide
gcugcauggauuuuaauga

SEQ ID NO: 2529855 - RNA, 19 nt, Artificial Sequence
  Description of Artificial Sequence: Synthetic oligonucleotide
  modified_base (10)..(10): a, c, u, g, unknown or other
ucagcuaacngggucccca

SEQ ID NO: 2529856 - RNA, 19 nt, Artificial Sequence
  Description of Artificial Sequence: Synthetic oligonucleotide
uguucuccugccuuucagc

SEQ ID NO: 2529857 - RNA, 19 nt, Artificial Sequence
  Description of Artificial Sequence: Synthetic oligonucleotide
cuccaaaugagaccccugc

SEQ ID NO: 2529858 - RNA, 19 nt, Artificial Sequence
  Description of Artificial Sequence: Synthetic oligonucleotide
auuaccaaaccagcuguag

SEQ ID NO: 2529859 - RNA, 19 nt, Artificial Sequence
  Description of Artificial Sequence: Synthetic oligonucleotide
agauagaaaggggaaauaa

SEQ ID NO: 2529860 - RNA, 19 nt, Artificial Sequence
  Description of Artificial Sequence: Synthetic oligonucleotide
  modified_base (5)..(5): a, c, u, g, unknown or other
uaacnggguccccagcccc

SEQ ID NO: 2529861 - RNA, 19 nt, Artificial Sequence
  Description of Artificial Sequence: Synthetic oligonucleotide
aaacccuaggaggucacug

SEQ ID NO: 2529862 - RNA, 19 nt, Artificial Sequence
  Description of Artificial Sequence: Synthetic oligonucleotide
aacccuaggaggucacuga

SEQ ID NO: 2529863 - RNA, 19 nt, Artificial Sequence
  Description of Artificial Sequence: Synthetic oligonucleotide
gauagaaaggggaaauaaa

SEQ ID NO: 2529864 - RNA, 19 nt, Artificial Sequence
  Description of Artificial Sequence: Synthetic oligonucleotide
gagagcgucaggcagagcu

SEQ ID NO: 2529865 - RNA, 19 nt, Artificial Sequence
  Description of Artificial Sequence: Synthetic oligonucleotide
gugcucauuauuugguccc

SEQ ID NO: 2529866 - RNA, 19 nt, Artificial Sequence
  Description of Artificial Sequence: Synthetic oligonucleotide
aggugcucauuauuugguc

SEQ ID NO: 2529867 - RNA, 19 nt, Artificial Sequence
  Description of Artificial Sequence: Synthetic oligonucleotide
agggacugaaguuucuaca

SEQ ID NO: 2529868 - RNA, 19 nt, Artificial Sequence
  Description of Artificial Sequence: Synthetic oligonucleotide
ugcuacaaagcagugcaga

SEQ ID NO: 2529869 - RNA, 19 nt, Artificial Sequence
  Description of Artificial Sequence: Synthetic oligonucleotide
ugagaccccugcauucggg

SEQ ID NO: 2529870 - RNA, 19 nt, Artificial Sequence
  Description of Artificial Sequence: Synthetic oligonucleotide
gaggucacugagcuaauga

SEQ ID NO: 2529871 - RNA, 19 nt, Artificial Sequence
  Description of Artificial Sequence: Synthetic oligonucleotide
gggacugaaguuucuacag

SEQ ID NO: 2529872 - RNA, 19 nt, Artificial Sequence
  Description of Artificial Sequence: Synthetic oligonucleotide
cugcauggauuuuaaugag

SEQ ID NO: 2529873 - RNA, 19 nt, Artificial Sequence
  Description of Artificial Sequence: Synthetic oligonucleotide
aaugagagcgucaggcaga

SEQ ID NO: 2529874 - RNA, 19 nt, Artificial Sequence
  Description of Artificial Sequence: Synthetic oligonucleotide
caaagcagugcagagcuug

SEQ ID NO: 2529875 - RNA, 19 nt, Artificial Sequence
  Description of Artificial Sequence: Synthetic oligonucleotide
aagcagugcagagcuuggc

SEQ ID NO: 2529876 - RNA, 19 nt, Artificial Sequence
  Description of Artificial Sequence: Synthetic oligonucleotide
gcugcuacaaagcagugca

SEQ ID NO: 2529877 - RNA, 19 nt, Artificial Sequence
  Description of Artificial Sequence: Synthetic oligonucleotide
  modified_base (18)..(18): a, c, u, g, unknown or other
aggaccucucagcuaacng

SEQ ID NO: 2529878 - RNA, 19 nt, Artificial Sequence
  Description of Artificial Sequence: Synthetic oligonucleotide
acaggugacuuggaaacag

SEQ ID NO: 2529879 - RNA, 19 nt, Artificial Sequence
  Description of Artificial Sequence: Synthetic oligonucleotide
gauuuuaaugagagcguca

SEQ ID NO: 2529880 - RNA, 19 nt, Artificial Sequence
  Description of Artificial Sequence: Synthetic oligonucleotide
uaauccuaccuuccacaga

SEQ ID NO: 2529881 - RNA, 19 nt, Artificial Sequence
  Description of Artificial Sequence: Synthetic oligonucleotide
caugccacacgacuggcug

SEQ ID NO: 2529882 - RNA, 19 nt, Artificial Sequence
  Description of Artificial Sequence: Synthetic oligonucleotide
gagggacugaaguuucuac

SEQ ID NO: 2529883 - RNA, 19 nt, Artificial Sequence
  Description of Artificial Sequence: Synthetic oligonucleotide
aacgguuacaagacaggcu

SEQ ID NO: 2529884 - RNA, 19 nt, Artificial Sequence
  Description of Artificial Sequence: Synthetic oligonucleotide
ucaggcagagcugugcugu

SEQ ID NO: 2529885 - RNA, 19 nt, Artificial Sequence
  Description of Artificial Sequence: Synthetic oligonucleotide
cuccucucuacucugguuc

SEQ ID NO: 2529886 - RNA, 19 nt, Artificial Sequence
  Description of Artificial Sequence: Synthetic oligonucleotide
uaucugugugacccuugag

SEQ ID NO: 2529887 - RNA, 19 nt, Artificial Sequence
  Description of Artificial Sequence: Synthetic oligonucleotide
gaaguuucuacagcuggca

SEQ ID NO: 2529888 - RNA, 19 nt, Artificial Sequence
  Description of Artificial Sequence: Synthetic oligonucleotide
gaagccugggcucuugcuc

SEQ ID NO: 2529889 - RNA, 19 nt, Artificial Sequence
  Description of Artificial Sequence: Synthetic oligonucleotide
  modified_base (7)..(7): a, c, u, g, unknown or other
gcuaacnggguccccagcc

SEQ ID NO: 2529890 - RNA, 19 nt, Artificial Sequence
  Description of Artificial Sequence: Synthetic oligonucleotide
  modified_base (6)..(6): a, c, u, g, unknown or other
cuaacnggguccccagccc

SEQ ID NO: 2529891 - RNA, 19 nt, Artificial Sequence
  Description of Artificial Sequence: Synthetic oligonucleotide
ggacuugcagaucauuacc

SEQ ID NO: 2529892 - RNA, 19 nt, Artificial Sequence
  Description of Artificial Sequence: Synthetic oligonucleotide
  modified_base (8)..(8): a, c, u, g, unknown or other
agcuaacnggguccccagc

SEQ ID NO: 2529893 - RNA, 19 nt, Artificial Sequence
  Description of Artificial Sequence: Synthetic oligonucleotide
cuugagagagucacuucuc

SEQ ID NO: 2529894 - RNA, 19 nt, Artificial Sequence
  Description of Artificial Sequence: Synthetic oligonucleotide
gcuacaaagcagugcagag

SEQ ID NO: 2529895 - RNA, 19 nt, Artificial Sequence
  Description of Artificial Sequence: Synthetic oligonucleotide
cucuaucacuaucugugug

SEQ ID NO: 2529896 - RNA, 19 nt, Artificial Sequence
  Description of Artificial Sequence: Synthetic oligonucleotide
uccucucuacucugguucc

SEQ ID NO: 2529897 - RNA, 19 nt, Artificial Sequence
  Description of Artificial Sequence: Synthetic oligonucleotide
gucugaagaccccauguuc

SEQ ID NO: 2529898 - RNA, 19 nt, Artificial Sequence
  Description of Artificial Sequence: Synthetic oligonucleotide
agcagugcagagcuuggcu

SEQ ID NO: 2529899 - RNA, 19 nt, Artificial Sequence
  Description of Artificial Sequence: Synthetic oligonucleotide
acucugguuccccagcaca

SEQ ID NO: 2529900 - RNA, 19 nt, Artificial Sequence
  Description of Artificial Sequence: Synthetic oligonucleotide
ugcuguugcucuccgggac

SEQ ID NO: 2529901 - RNA, 19 nt, Artificial Sequence
  Description of Artificial Sequence: Synthetic oligonucleotide
guagaacagagccagggcu

SEQ ID NO: 2529902 - RNA, 19 nt, Artificial Sequence
  Description of Artificial Sequence: Synthetic oligonucleotide
ugagagagucacuucucau

SEQ ID NO: 2529903 - RNA, 19 nt, Artificial Sequence
  Description of Artificial Sequence: Synthetic oligonucleotide
gagucacuucucaucuugg

SEQ ID NO: 2529904 - RNA, 19 nt, Artificial Sequence
  Description of Artificial Sequence: Synthetic oligonucleotide
aacaggaagccugggcucu

SEQ ID NO: 2529905 - RNA, 19 nt, Artificial Sequence
  Description of Artificial Sequence: Synthetic oligonucleotide
cuaucacuaucugugugac

SEQ ID NO: 2529906 - RNA, 19 nt, Artificial Sequence
  Description of Artificial Sequence: Synthetic oligonucleotide
cauuauuuggucccaggaa

SEQ ID NO: 2529907 - RNA, 19 nt, Artificial Sequence
  Description of Artificial Sequence: Synthetic oligonucleotide
cucugguuccccagcacag

SEQ ID NO: 2529908 - RNA, 19 nt, Artificial Sequence
  Description of Artificial Sequence: Synthetic oligonucleotide
cugagcuaaugaucuaauc

SEQ ID NO: 2529909 - RNA, 19 nt, Artificial Sequence
  Description of Artificial Sequence: Synthetic oligonucleotide
aggaagccugggcucuugc

SEQ ID NO: 2529910 - RNA, 19 nt, Artificial Sequence
  Description of Artificial Sequence: Synthetic oligonucleotide
acuugcagaucauuaccaa

SEQ ID NO: 2529911 - RNA, 19 nt, Artificial Sequence
  Description of Artificial Sequence: Synthetic oligonucleotide
ugcagagcuuggcugcaug

SEQ ID NO: 2529912 - RNA, 19 nt, Artificial Sequence
  Description of Artificial Sequence: Synthetic oligonucleotide
ugggcucuugcucuaucac

SEQ ID NO: 2529913 - RNA, 19 nt, Artificial Sequence
  Description of Artificial Sequence: Synthetic oligonucleotide
gaaaggggaaauaaacggu

SEQ ID NO: 2529914 - RNA, 19 nt, Artificial Sequence
  Description of Artificial Sequence: Synthetic oligonucleotide
uacaagacaggcugcccuc

SEQ ID NO: 2529915 - RNA, 19 nt, Artificial Sequence
  Description of Artificial Sequence: Synthetic oligonucleotide
uaucacuaucugugugacc

SEQ ID NO: 2529916 - RNA, 19 nt, Artificial Sequence
  Description of Artificial Sequence: Synthetic oligonucleotide
uuggcugcauggauuuuaa

SEQ ID NO: 2529917 - RNA, 19 nt, Artificial Sequence
  Description of Artificial Sequence: Synthetic oligonucleotide
uggagauagaaaggggaaa

SEQ ID NO: 2529918 - RNA, 19 nt, Artificial Sequence
  Description of Artificial Sequence: Synthetic oligonucleotide
acccuaggaggucacugag

SEQ ID NO: 2529919 - RNA, 19 nt, Artificial Sequence
  Description of Artificial Sequence: Synthetic oligonucleotide
ggaggucugggguagaaca

SEQ ID NO: 2529920 - RNA, 19 nt, Artificial Sequence
  Description of Artificial Sequence: Synthetic oligonucleotide
gguagaacagagccagggc

SEQ ID NO: 2529921 - RNA, 19 nt, Artificial Sequence
  Description of Artificial Sequence: Synthetic oligonucleotide
cacgacuggcuggagauag

SEQ ID NO: 2529922 - RNA, 19 nt, Artificial Sequence
  Description of Artificial Sequence: Synthetic oligonucleotide
agggcugcuuugcccagac

SEQ ID NO: 2529923 - RNA, 19 nt, Artificial Sequence
  Description of Artificial Sequence: Synthetic oligonucleotide
guuucuacagcuggcagaa

SEQ ID NO: 2529924 - RNA, 19 nt, Artificial Sequence
  Description of Artificial Sequence: Synthetic oligonucleotide
cugcccuccaaaugagacc

SEQ ID NO: 2529925 - RNA, 19 nt, Artificial Sequence
  Description of Artificial Sequence: Synthetic oligonucleotide
ggguagaacagagccaggg

SEQ ID NO: 2529926 - RNA, 19 nt, Artificial Sequence
  Description of Artificial Sequence: Synthetic oligonucleotide
agagcuuggcugcauggau

SEQ ID NO: 2529927 - RNA, 19 nt, Artificial Sequence
  Description of Artificial Sequence: Synthetic oligonucleotide
gcauagaggaccucucagc

SEQ ID NO: 2529928 - RNA, 19 nt, Artificial Sequence
  Description of Artificial Sequence: Synthetic oligonucleotide
augccacacgacuggcugg

SEQ ID NO: 2529929 - RNA, 19 nt, Artificial Sequence
  Description of Artificial Sequence: Synthetic oligonucleotide
aggaaacacaggugacuug

SEQ ID NO: 2529930 - RNA, 19 nt, Artificial Sequence
  Description of Artificial Sequence: Synthetic oligonucleotide
caggcagguaccugcugcg

SEQ ID NO: 2529931 - RNA, 19 nt, Artificial Sequence
  Description of Artificial Sequence: Synthetic oligonucleotide
ggcugcuuugcccagacuc

SEQ ID NO: 2529932 - RNA, 19 nt, Artificial Sequence
  Description of Artificial Sequence: Synthetic oligonucleotide
cuugcagaucauuaccaaa

SEQ ID NO: 2529933 - RNA, 19 nt, Artificial Sequence
  Description of Artificial Sequence: Synthetic oligonucleotide
agucugaagaccccauguu

SEQ ID NO: 2529934 - RNA, 19 nt, Artificial Sequence
  Description of Artificial Sequence: Synthetic oligonucleotide
caggcugcccuccaaauga

SEQ ID NO: 2529935 - RNA, 19 nt, Artificial Sequence
  Description of Artificial Sequence: Synthetic oligonucleotide
agggccccuccccaucucc

SEQ ID NO: 2529936 - RNA, 19 nt, Artificial Sequence
  Description of Artificial Sequence: Synthetic oligonucleotide
gaggucugggguagaacag

SEQ ID NO: 2529937 - RNA, 19 nt, Artificial Sequence
  Description of Artificial Sequence: Synthetic oligonucleotide
cucccaugccacacgacug

SEQ ID NO: 2529938 - RNA, 19 nt, Artificial Sequence
  Description of Artificial Sequence: Synthetic oligonucleotide
uacagcuggcagaaccuau

SEQ ID NO: 2529939 - RNA, 19 nt, Artificial Sequence
  Description of Artificial Sequence: Synthetic oligonucleotide
ugugacccuugagagaguc

SEQ ID NO: 2529940 - RNA, 19 nt, Artificial Sequence
  Description of Artificial Sequence: Synthetic oligonucleotide
cagcacaccgaaacccuag

SEQ ID NO: 2529941 - RNA, 19 nt, Artificial Sequence
  Description of Artificial Sequence: Synthetic oligonucleotide
cuggagauagaaaggggaa

SEQ ID NO: 2529942 - RNA, 19 nt, Artificial Sequence
  Description of Artificial Sequence: Synthetic oligonucleotide
gggacuugcagaucauuac

SEQ ID NO: 2529943 - RNA, 19 nt, Artificial Sequence
  Description of Artificial Sequence: Synthetic oligonucleotide
gaucauuaccaaaccagcu

SEQ ID NO: 2529944 - RNA, 19 nt, Artificial Sequence
  Description of Artificial Sequence: Synthetic oligonucleotide
guuacaagacaggcugccc

SEQ ID NO: 2529945 - RNA, 19 nt, Artificial Sequence
  Description of Artificial Sequence: Synthetic oligonucleotide
uggucccaggaaacacagg

SEQ ID NO: 2529946 - RNA, 19 nt, Artificial Sequence
  Description of Artificial Sequence: Synthetic oligonucleotide
ggacugaaguuucuacagc

SEQ ID NO: 2529947 - RNA, 19 nt, Artificial Sequence
  Description of Artificial Sequence: Synthetic oligonucleotide
uucgggaggucugggguag

SEQ ID NO: 2529948 - RNA, 19 nt, Artificial Sequence
  Description of Artificial Sequence: Synthetic oligonucleotide
acuuggaaacaggaagccu

SEQ ID NO: 2529949 - RNA, 19 nt, Artificial Sequence
  Description of Artificial Sequence: Synthetic oligonucleotide
cagcuggcagaaccuaugc

SEQ ID NO: 2529950 - RNA, 19 nt, Artificial Sequence
  Description of Artificial Sequence: Synthetic oligonucleotide
accugcugcggcugccagc

SEQ ID NO: 2529951 - RNA, 19 nt, Artificial Sequence
  Description of Artificial Sequence: Synthetic oligonucleotide
cugaagaccccauguucuc

SEQ ID NO: 2529952 - RNA, 19 nt, Artificial Sequence
  Description of Artificial Sequence: Synthetic oligonucleotide
ugcccagacuccagcaggu

SEQ ID NO: 2529953 - RNA, 19 nt, Artificial Sequence
  Description of Artificial Sequence: Synthetic oligonucleotide
ugcauucgggaggucuggg

SEQ ID NO: 2529954 - RNA, 19 nt, Artificial Sequence
  Description of Artificial Sequence: Synthetic oligonucleotide
aaggggaaauaaacgguua

SEQ ID NO: 2529955 - RNA, 19 nt, Artificial Sequence
  Description of Artificial Sequence: Synthetic oligonucleotide
cagcuguaggaugagaaca

SEQ ID NO: 2529956 - RNA, 19 nt, Artificial Sequence
  Description of Artificial Sequence: Synthetic oligonucleotide
gguuacaagacaggcugcc

SEQ ID NO: 2529957 - RNA, 19 nt, Artificial Sequence
  Description of Artificial Sequence: Synthetic oligonucleotide
cauagaggaccucucagcu

SEQ ID NO: 2529958 - RNA, 19 nt, Artificial Sequence
  Description of Artificial Sequence: Synthetic oligonucleotide
gcagugaacugaaaacugc

SEQ ID NO: 2529959 - RNA, 19 nt, Artificial Sequence
  Description of Artificial Sequence: Synthetic oligonucleotide
agguaccugcugcggcugc

SEQ ID NO: 2529960 - RNA, 19 nt, Artificial Sequence
  Description of Artificial Sequence: Synthetic oligonucleotide
ccuuccacagacagggccc

SEQ ID NO: 2529961 - RNA, 19 nt, Artificial Sequence
  Description of Artificial Sequence: Synthetic oligonucleotide
ggauuuuaaugagagcguc

SEQ ID NO: 2529962 - RNA, 19 nt, Artificial Sequence
  Description of Artificial Sequence: Synthetic oligonucleotide
ucugguuccccagcacagc

SEQ ID NO: 2529963 - RNA, 19 nt, Artificial Sequence
  Description of Artificial Sequence: Synthetic oligonucleotide
accuaugcuuaaacugggg

SEQ ID NO: 2529964 - RNA, 19 nt, Artificial Sequence
  Description of Artificial Sequence: Synthetic oligonucleotide
augagagcgucaggcagag

SEQ ID NO: 2529965 - RNA, 19 nt, Artificial Sequence
  Description of Artificial Sequence: Synthetic oligonucleotide
gcagugcagagcuuggcug

SEQ ID NO: 2529966 - RNA, 19 nt, Artificial Sequence
  Description of Artificial Sequence: Synthetic oligonucleotide
gcagaaccuaugcuuaaac

SEQ ID NO: 2529967 - RNA, 19 nt, Artificial Sequence
  Description of Artificial Sequence: Synthetic oligonucleotide
aggccggcugcuacaaagc

SEQ ID NO: 2529968 - RNA, 19 nt, Artificial Sequence
  Description of Artificial Sequence: Synthetic oligonucleotide
ucacuaucugugugacccu

SEQ ID NO: 2529969 - RNA, 19 nt, Artificial Sequence
  Description of Artificial Sequence: Synthetic oligonucleotide
ugcucauuauuugguccca

SEQ ID NO: 2529970 - RNA, 19 nt, Artificial Sequence
  Description of Artificial Sequence: Synthetic oligonucleotide
auagaggaccucucagcua

SEQ ID NO: 2529971 - RNA, 19 nt, Artificial Sequence
  Description of Artificial Sequence: Synthetic oligonucleotide
cuaucugugugacccuuga

SEQ ID NO: 2529972 - RNA, 19 nt, Artificial Sequence
  Description of Artificial Sequence: Synthetic oligonucleotide
gagaccccugcauucggga

SEQ ID NO: 2529973 - RNA, 19 nt, Artificial Sequence
  Description of Artificial Sequence: Synthetic oligonucleotide
aggugacuuggaaacagga

SEQ ID NO: 2529974 - RNA, 19 nt, Artificial Sequence
  Description of Artificial Sequence: Synthetic oligonucleotide
gcuaaugaucuaauccuac

SEQ ID NO: 2529975 - RNA, 19 nt, Artificial Sequence
  Description of Artificial Sequence: Synthetic oligonucleotide
gcagaucauuaccaaacca

SEQ ID NO: 2529976 - RNA, 19 nt, Artificial Sequence
  Description of Artificial Sequence: Synthetic oligonucleotide
cucuugcucuaucacuauc

SEQ ID NO: 2529977 - RNA, 19 nt, Artificial Sequence
  Description of Artificial Sequence: Synthetic oligonucleotide
cugcuacaaagcagugcag

SEQ ID NO: 2529978 - RNA, 19 nt, Artificial Sequence
  Description of Artificial Sequence: Synthetic oligonucleotide
gcuggagauagaaagggga

SEQ ID NO: 2529979 - RNA, 19 nt, Artificial Sequence
  Description of Artificial Sequence: Synthetic oligonucleotide
cucucuacucugguucccc

SEQ ID NO: 2529980 - RNA, 19 nt, Artificial Sequence
  Description of Artificial Sequence: Synthetic oligonucleotide
  modified_base (9)..(9): a, c, u, g, unknown or other
cagcuaacnggguccccag

SEQ ID NO: 2529981 - RNA, 19 nt, Artificial Sequence
  Description of Artificial Sequence: Synthetic oligonucleotide
cuuugcccagacuccagca

SEQ ID NO: 2529982 - RNA, 19 nt, Artificial Sequence
  Description of Artificial Sequence: Synthetic oligonucleotide
gaagaccccauguucuccu

SEQ ID NO: 2529983 - RNA, 19 nt, Artificial Sequence
  Description of Artificial Sequence: Synthetic oligonucleotide
accgaaacccuaggagguc

SEQ ID NO: 2529984 - RNA, 19 nt, Artificial Sequence
  Description of Artificial Sequence: Synthetic oligonucleotide
ccuaccuuccacagacagg

SEQ ID NO: 2529985 - RNA, 19 nt, Artificial Sequence
  Description of Artificial Sequence: Synthetic oligonucleotide
guugcucuccgggacuugc

SEQ ID NO: 2529986 - RNA, 19 nt, Artificial Sequence
  Description of Artificial Sequence: Synthetic oligonucleotide
cuggcagaaccuaugcuua

SEQ ID NO: 2529987 - RNA, 19 nt, Artificial Sequence
  Description of Artificial Sequence: Synthetic oligonucleotide
ugagggacugaaguuucua

SEQ ID NO: 2529988 - RNA, 19 nt, Artificial Sequence
  Description of Artificial Sequence: Synthetic oligonucleotide
ugcggcugccagccugagg

SEQ ID NO: 2529989 - RNA, 19 nt, Artificial Sequence
  Description of Artificial Sequence: Synthetic oligonucleotide
cuccgggacuugcagauca

SEQ ID NO: 2529990 - RNA, 19 nt, Artificial Sequence
  Description of Artificial Sequence: Synthetic oligonucleotide
gagauagaaaggggaaaua

SEQ ID NO: 2529991 - RNA, 19 nt, Artificial Sequence
  Description of Artificial Sequence: Synthetic oligonucleotide
cuuccacagacagggcccc

SEQ ID NO: 2529992 - RNA, 19 nt, Artificial Sequence
  Description of Artificial Sequence: Synthetic oligonucleotide
uugcucuccgggacuugca

SEQ ID NO: 2529993 - RNA, 19 nt, Artificial Sequence
  Description of Artificial Sequence: Synthetic oligonucleotide
cagaaccuaugcuuaaacu

SEQ ID NO: 2529994 - RNA, 19 nt, Artificial Sequence
  Description of Artificial Sequence: Synthetic oligonucleotide
uggcagaaccuaugcuuaa

SEQ ID NO: 2529995 - RNA, 19 nt, Artificial Sequence
  Description of Artificial Sequence: Synthetic oligonucleotide
ugccacacgacuggcugga

SEQ ID NO: 2529996 - RNA, 19 nt, Artificial Sequence
  Description of Artificial Sequence: Synthetic oligonucleotide
gcauucgggaggucugggg

SEQ ID NO: 2529997 - RNA, 19 nt, Artificial Sequence
  Description of Artificial Sequence: Synthetic oligonucleotide
agcuaaugaucuaauccua

SEQ ID NO: 2529998 - RNA, 19 nt, Artificial Sequence
  Description of Artificial Sequence: Synthetic oligonucleotide
acugagcuaaugaucuaau

SEQ ID NO: 2529999 - RNA, 19 nt, Artificial Sequence
  Description of Artificial Sequence: Synthetic oligonucleotide
auagagcauagaggaccuc

SEQ ID NO: 2530000 - RNA, 19 nt, Artificial Sequence
  Description of Artificial Sequence: Synthetic oligonucleotide
auucgggaggucuggggua

SEQ ID NO: 2530001 - RNA, 19 nt, Artificial Sequence
  Description of Artificial Sequence: Synthetic oligonucleotide
gucaggcagagcugugcug

SEQ ID NO: 2530002 - RNA, 19 nt, Artificial Sequence
  Description of Artificial Sequence: Synthetic oligonucleotide
cugcaccugccaaggcugg

SEQ ID NO: 2530003 - RNA, 19 nt, Artificial Sequence
  Description of Artificial Sequence: Synthetic oligonucleotide
gagggagcugcagugaacu

SEQ ID NO: 2530004 - RNA, 19 nt, Artificial Sequence
  Description of Artificial Sequence: Synthetic oligonucleotide
ggcuggagauagaaagggg

SEQ ID NO: 2530005 - RNA, 19 nt, Artificial Sequence
  Description of Artificial Sequence: Synthetic oligonucleotide
acuaucugugugacccuug

SEQ ID NO: 2530006 - RNA, 19 nt, Artificial Sequence
  Description of Artificial Sequence: Synthetic oligonucleotide
aggucugggguagaacaga

SEQ ID NO: 2530007 - RNA, 19 nt, Artificial Sequence
  Description of Artificial Sequence: Synthetic oligonucleotide
aaccagcuguaggaugaga

SEQ ID NO: 2530008 - RNA, 19 nt, Artificial Sequence
  Description of Artificial Sequence: Synthetic oligonucleotide
uaccuuccacagacagggc

SEQ ID NO: 2530009 - RNA, 19 nt, Artificial Sequence
  Description of Artificial Sequence: Synthetic oligonucleotide
aacagagccagggcugcuu

SEQ ID NO: 2530010 - RNA, 19 nt, Artificial Sequence
  Description of Artificial Sequence: Synthetic oligonucleotide
agccugagggacugaaguu

SEQ ID NO: 2530011 - RNA, 19 nt, Artificial Sequence
  Description of Artificial Sequence: Synthetic oligonucleotide
cugcauucgggaggucugg

SEQ ID NO: 2530012 - RNA, 19 nt, Artificial Sequence
  Description of Artificial Sequence: Synthetic oligonucleotide
accaaaccagcuguaggau

SEQ ID NO: 2530013 - RNA, 19 nt, Artificial Sequence
  Description of Artificial Sequence: Synthetic oligonucleotide
cugugcuguugcucuccgg

SEQ ID NO: 2530014 - RNA, 19 nt, Artificial Sequence
  Description of Artificial Sequence: Synthetic oligonucleotide
ccaaaccagcuguaggaug

SEQ ID NO: 2530015 - RNA, 19 nt, Artificial Sequence
  Description of Artificial Sequence: Synthetic oligonucleotide
gcugaggaggcuccacaag

SEQ ID NO: 2530016 - RNA, 19 nt, Artificial Sequence
  Description of Artificial Sequence: Synthetic oligonucleotide
cugcagugaacugaaaacu

SEQ ID NO: 2530017 - RNA, 19 nt, Artificial Sequence
  Description of Artificial Sequence: Synthetic oligonucleotide
ucacugagcuaaugaucua

SEQ ID NO: 2530018 - RNA, 19 nt, Artificial Sequence
  Description of Artificial Sequence: Synthetic oligonucleotide
cugggcucuugcucuauca

SEQ ID NO: 2530019 - RNA, 19 nt, Artificial Sequence
  Description of Artificial Sequence: Synthetic oligonucleotide
ggcuccacaaggccggcug

SEQ ID NO: 2530020 - RNA, 19 nt, Artificial Sequence
  Description of Artificial Sequence: Synthetic oligonucleotide
ggggaaauaaacgguuaca

SEQ ID NO: 2530021 - RNA, 19 nt, Artificial Sequence
  Description of Artificial Sequence: Synthetic oligonucleotide
  modified_base (14)..(14): a, c, u, g, unknown or other
ccucucagcuaacnggguc

SEQ ID NO: 2530022 - RNA, 19 nt, Artificial Sequence
  Description of Artificial Sequence: Synthetic oligonucleotide
cacugagcuaaugaucuaa

SEQ ID NO: 2530023 - RNA, 19 nt, Artificial Sequence
  Description of Artificial Sequence: Synthetic oligonucleotide
cagcacagcucccaugcca

SEQ ID NO: 2530024 - RNA, 19 nt, Artificial Sequence
  Description of Artificial Sequence: Synthetic oligonucleotide
gcuuugcccagacuccagc

SEQ ID NO: 2530025 - RNA, 19 nt, Artificial Sequence
  Description of Artificial Sequence: Synthetic oligonucleotide
cuacucugguuccccagca

SEQ ID NO: 2530026 - RNA, 19 nt, Artificial Sequence
  Description of Artificial Sequence: Synthetic oligonucleotide
agagcgucaggcagagcug

SEQ ID NO: 2530027 - RNA, 19 nt, Artificial Sequence
  Description of Artificial Sequence: Synthetic oligonucleotide
cugugugacccuugagaga

SEQ ID NO: 2530028 - RNA, 19 nt, Artificial Sequence
  Description of Artificial Sequence: Synthetic oligonucleotide
ggcagguaccugcugcggc

SEQ ID NO: 2530029 - RNA, 19 nt, Artificial Sequence
  Description of Artificial Sequence: Synthetic oligonucleotide
gcugcccuccaaaugagac

SEQ ID NO: 2530030 - RNA, 19 nt, Artificial Sequence
  Description of Artificial Sequence: Synthetic oligonucleotide
  modified_base (19)..(19): a, c, u, g, unknown or other
gaggaccucucagcuaacn

SEQ ID NO: 2530031 - RNA, 19 nt, Artificial Sequence
  Description of Artificial Sequence: Synthetic oligonucleotide
cacagacagggccccuccc

SEQ ID NO: 2530032 - RNA, 19 nt, Artificial Sequence
  Description of Artificial Sequence: Synthetic oligonucleotide
cagucugaagaccccaugu

SEQ ID NO: 2530033 - RNA, 19 nt, Artificial Sequence
  Description of Artificial Sequence: Synthetic oligonucleotide
cauucgggaggucuggggu

SEQ ID NO: 2530034 - RNA, 19 nt, Artificial Sequence
  Description of Artificial Sequence: Synthetic oligonucleotide
cauuaccaaaccagcugua

SEQ ID NO: 2530035 - RNA, 19 nt, Artificial Sequence
  Description of Artificial Sequence: Synthetic oligonucleotide
caaaugagaccccugcauu

SEQ ID NO: 2530036 - RNA, 19 nt, Artificial Sequence
  Description of Artificial Sequence: Synthetic oligonucleotide
ggcugcuacaaagcagugc

SEQ ID NO: 2530037 - RNA, 19 nt, Artificial Sequence
  Description of Artificial Sequence: Synthetic oligonucleotide
ccugcauucgggaggucug

SEQ ID NO: 2530038 - RNA, 19 nt, Artificial Sequence
  Description of Artificial Sequence: Synthetic oligonucleotide
cuuggcugcauggauuuua

SEQ ID NO: 2530039 - RNA, 19 nt, Artificial Sequence
  Description of Artificial Sequence: Synthetic oligonucleotide
caccgaaacccuaggaggu

SEQ ID NO: 2530040 - RNA, 19 nt, Artificial Sequence
  Description of Artificial Sequence: Synthetic oligonucleotide
cacacgacuggcuggagau

SEQ ID NO: 2530041 - RNA, 19 nt, Artificial Sequence
  Description of Artificial Sequence: Synthetic oligonucleotide
cauguucuccugccuuuca

SEQ ID NO: 2530042 - RNA, 19 nt, Artificial Sequence
  Description of Artificial Sequence: Synthetic oligonucleotide
caggugcucauuauuuggu

SEQ ID NO: 2530043 - RNA, 19 nt, Artificial Sequence
  Description of Artificial Sequence: Synthetic oligonucleotide
cacaaggccggcugcuaca

SEQ ID NO: 2530044 - RNA, 19 nt, Artificial Sequence
  Description of Artificial Sequence: Synthetic oligonucleotide
gacagggccccuccccauc

SEQ ID NO: 2530045 - RNA, 19 nt, Artificial Sequence
  Description of Artificial Sequence: Synthetic oligonucleotide
accccauguucuccugccu

SEQ ID NO: 2530046 - RNA, 19 nt, Artificial Sequence
  Description of Artificial Sequence: Synthetic oligonucleotide
ggagauagaaaggggaaau

SEQ ID NO: 2530047 - RNA, 19 nt, Artificial Sequence
  Description of Artificial Sequence: Synthetic oligonucleotide
accccugcauucgggaggu

SEQ ID NO: 2530048 - RNA, 19 nt, Artificial Sequence
  Description of Artificial Sequence: Synthetic oligonucleotide
uccgggacuugcagaucau

SEQ ID NO: 2530049 - RNA, 19 nt, Artificial Sequence
  Description of Artificial Sequence: Synthetic oligonucleotide
agaggaccucucagcuaac

SEQ ID NO: 2530050 - RNA, 19 nt, Artificial Sequence
  Description of Artificial Sequence: Synthetic oligonucleotide
ccuaggaggucacugagcu

SEQ ID NO: 2530051 - RNA, 19 nt, Artificial Sequence
  Description of Artificial Sequence: Synthetic oligonucleotide
cagacagggccccucccca

SEQ ID NO: 2530052 - RNA, 19 nt, Artificial Sequence
  Description of Artificial Sequence: Synthetic oligonucleotide
  modified_base (11)..(11): a, c, u, g, unknown or other
cucagcuaacngggucccc

SEQ ID NO: 2530053 - RNA, 19 nt, Artificial Sequence
  Description of Artificial Sequence: Synthetic oligonucleotide
cccuaggaggucacugagc

SEQ ID NO: 2530054 - RNA, 19 nt, Artificial Sequence
  Description of Artificial Sequence: Synthetic oligonucleotide
cccaggaaacacaggugac

SEQ ID NO: 2530055 - RNA, 19 nt, Artificial Sequence
  Description of Artificial Sequence: Synthetic oligonucleotide
agaacacagcacaccgaaa

SEQ ID NO: 2530056 - RNA, 19 nt, Artificial Sequence
  Description of Artificial Sequence: Synthetic oligonucleotide
ccuugagagagucacuucu

SEQ ID NO: 2530057 - RNA, 19 nt, Artificial Sequence
  Description of Artificial Sequence: Synthetic oligonucleotide
gcucauuauuuggucccag

SEQ ID NO: 2530058 - RNA, 19 nt, Artificial Sequence
  Description of Artificial Sequence: Synthetic oligonucleotide
uuucuacagcuggcagaac

SEQ ID NO: 2530059 - RNA, 19 nt, Artificial Sequence
  Description of Artificial Sequence: Synthetic oligonucleotide
ggagcugcagugaacugaa

SEQ ID NO: 2530060 - RNA, 19 nt, Artificial Sequence
  Description of Artificial Sequence: Synthetic oligonucleotide
gacaggcugcccuccaaau

SEQ ID NO: 2530061 - RNA, 19 nt, Artificial Sequence
  Description of Artificial Sequence: Synthetic oligonucleotide
cucuccgggacuugcagau

SEQ ID NO: 2530062 - RNA, 19 nt, Artificial Sequence
  Description of Artificial Sequence: Synthetic oligonucleotide
gacuggcuggagauagaaa

SEQ ID NO: 2530063 - RNA, 19 nt, Artificial Sequence
  Description of Artificial Sequence: Synthetic oligonucleotide
aggcugcccuccaaaugag

SEQ ID NO: 2530064 - RNA, 19 nt, Artificial Sequence
  Description of Artificial Sequence: Synthetic oligonucleotide
agacagggccccuccccau

SEQ ID NO: 2530065 - RNA, 19 nt, Artificial Sequence
  Description of Artificial Sequence: Synthetic oligonucleotide
gcucccaugccacacgacu

SEQ ID NO: 2530066 - RNA, 19 nt, Artificial Sequence
  Description of Artificial Sequence: Synthetic oligonucleotide
uccacaaggccggcugcua

SEQ ID NO: 2530067 - RNA, 19 nt, Artificial Sequence
  Description of Artificial Sequence: Synthetic oligonucleotide
cacaggugacuuggaaaca

SEQ ID NO: 2530068 - RNA, 19 nt, Artificial Sequence
  Description of Artificial Sequence: Synthetic oligonucleotide
gccggcugcuacaaagcag

SEQ ID NO: 2530069 - RNA, 19 nt, Artificial Sequence
  Description of Artificial Sequence: Synthetic oligonucleotide
ggaggucacugagcuaaug

SEQ ID NO: 2530070 - RNA, 19 nt, Artificial Sequence
  Description of Artificial Sequence: Synthetic oligonucleotide
ccuccaaaugagaccccug

SEQ ID NO: 2530071 - RNA, 19 nt, Artificial Sequence
  Description of Artificial Sequence: Synthetic oligonucleotide
gcacaccgaaacccuagga

SEQ ID NO: 2530072 - RNA, 19 nt, Artificial Sequence
  Description of Artificial Sequence: Synthetic oligonucleotide
gagcgucaggcagagcugu

SEQ ID NO: 2530073 - RNA, 19 nt, Artificial Sequence
  Description of Artificial Sequence: Synthetic oligonucleotide
cugccucaguccuccucuc

SEQ ID NO: 2530074 - RNA, 19 nt, Artificial Sequence
  Description of Artificial Sequence: Synthetic oligonucleotide
gcuguaggaugagaacaca

SEQ ID NO: 2530075 - RNA, 19 nt, Artificial Sequence
  Description of Artificial Sequence: Synthetic oligonucleotide
caggaaacacaggugacuu

SEQ ID NO: 2530076 - RNA, 19 nt, Artificial Sequence
  Description of Artificial Sequence: Synthetic oligonucleotide
ucuccgggacuugcagauc

SEQ ID NO: 2530077 - RNA, 19 nt, Artificial Sequence
  Description of Artificial Sequence: Synthetic oligonucleotide
acagcacaccgaaacccua

SEQ ID NO: 2530078 - RNA, 19 nt, Artificial Sequence
  Description of Artificial Sequence: Synthetic oligonucleotide
  modified_base (15)..(15): a, c, u, g, unknown or other
accucucagcuaacngggu

SEQ ID NO: 2530079 - RNA, 19 nt, Artificial Sequence
  Description of Artificial Sequence: Synthetic oligonucleotide
gaaacccuaggaggucacu

SEQ ID NO: 2530080 - RNA, 19 nt, Artificial Sequence
  Description of Artificial Sequence: Synthetic oligonucleotide
ggccggcugcuacaaagca

SEQ ID NO: 2530081 - RNA, 19 nt, Artificial Sequence
  Description of Artificial Sequence: Synthetic oligonucleotide
cuccagcaggugcucauua

SEQ ID NO: 2530082 - RNA, 19 nt, Artificial Sequence
  Description of Artificial Sequence: Synthetic oligonucleotide
ugagagcgucaggcagagc

SEQ ID NO: 2530083 - RNA, 19 nt, Artificial Sequence
  Description of Artificial Sequence: Synthetic oligonucleotide
ccggcugcuacaaagcagu

SEQ ID NO: 2530084 - RNA, 19 nt, Artificial Sequence
  Description of Artificial Sequence: Synthetic oligonucleotide
gguaccugcugcggcugcc

SEQ ID NO: 2530085 - RNA, 19 nt, Artificial Sequence
  Description of Artificial Sequence: Synthetic oligonucleotide
caggaagccugggcucuug

SEQ ID NO: 2530086 - RNA, 19 nt, Artificial Sequence
  Description of Artificial Sequence: Synthetic oligonucleotide
cgguuacaagacaggcugc

SEQ ID NO: 2530087 - RNA, 19 nt, Artificial Sequence
  Description of Artificial Sequence: Synthetic oligonucleotide
ccaaaugagaccccugcau

SEQ ID NO: 2530088 - RNA, 19 nt, Artificial Sequence
  Description of Artificial Sequence: Synthetic oligonucleotide
gugacccuugagagaguca

SEQ ID NO: 2530089 - RNA, 19 nt, Artificial Sequence
  Description of Artificial Sequence: Synthetic oligonucleotide
gcucuccgggacuugcaga

SEQ ID NO: 2530090 - RNA, 19 nt, Artificial Sequence
  Description of Artificial Sequence: Synthetic oligonucleotide
gagagucacuucucaucuu

SEQ ID NO: 2530091 - RNA, 19 nt, Artificial Sequence
  Description of Artificial Sequence: Synthetic oligonucleotide
cuacagcuggcagaaccua

SEQ ID NO: 2530092 - RNA, 19 nt, Artificial Sequence
  Description of Artificial Sequence: Synthetic oligonucleotide
ggagggagcugcagugaac

SEQ ID NO: 2530093 - RNA, 19 nt, Artificial Sequence
  Description of Artificial Sequence: Synthetic oligonucleotide
agcgucaggcagagcugug

SEQ ID NO: 2530094 - RNA, 19 nt, Artificial Sequence
  Description of Artificial Sequence: Synthetic oligonucleotide
gcagguaccugcugcggcu

SEQ ID NO: 2530095 - RNA, 19 nt, Artificial Sequence
  Description of Artificial Sequence: Synthetic oligonucleotide
auccuaccuuccacagaca

SEQ ID NO: 2530096 - RNA, 19 nt, Artificial Sequence
  Description of Artificial Sequence: Synthetic oligonucleotide
ggcagaaccuaugcuuaaa

SEQ ID NO: 2530097 - RNA, 19 nt, Artificial Sequence
  Description of Artificial Sequence: Synthetic oligonucleotide
acaaagcagugcagagcuu

SEQ ID NO: 2530098 - RNA, 19 nt, Artificial Sequence
  Description of Artificial Sequence: Synthetic oligonucleotide
cgaaacccuaggaggucac

SEQ ID NO: 2530099 - RNA, 19 nt, Artificial Sequence
  Description of Artificial Sequence: Synthetic oligonucleotide
ggaagccugggcucuugcu

SEQ ID NO: 2530100 - RNA, 19 nt, Artificial Sequence
  Description of Artificial Sequence: Synthetic oligonucleotide
acacgacuggcuggagaua

SEQ ID NO: 2530101 - RNA, 19 nt, Artificial Sequence
  Description of Artificial Sequence: Synthetic oligonucleotide
gcuguugcucuccgggacu

SEQ ID NO: 2530102 - RNA, 19 nt, Artificial Sequence
  Description of Artificial Sequence: Synthetic oligonucleotide
ucgggaggucugggguaga

SEQ ID NO: 2530103 - RNA, 19 nt, Artificial Sequence
  Description of Artificial Sequence: Synthetic oligonucleotide
ccucucuacucugguuccc

SEQ ID NO: 2530104 - RNA, 19 nt, Artificial Sequence
  Description of Artificial Sequence: Synthetic oligonucleotide
gacccuugagagagucacu

SEQ ID NO: 2530105 - RNA, 19 nt, Artificial Sequence
  Description of Artificial Sequence: Synthetic oligonucleotide
cuccugccuuucagccuuc

SEQ ID NO: 2530106 - RNA, 19 nt, Artificial Sequence
  Description of Artificial Sequence: Synthetic oligonucleotide
aggcuccacaaggccggcu

SEQ ID NO: 2530107 - RNA, 19 nt, Artificial Sequence
  Description of Artificial Sequence: Synthetic oligonucleotide
ccgaaacccuaggagguca

SEQ ID NO: 2530108 - RNA, 19 nt, Artificial Sequence
  Description of Artificial Sequence: Synthetic oligonucleotide
ccacacgacuggcuggaga

SEQ ID NO: 2530109 - RNA, 19 nt, Artificial Sequence
  Description of Artificial Sequence: Synthetic oligonucleotide
cgggacuugcagaucauua

SEQ ID NO: 2530110 - RNA, 19 nt, Artificial Sequence
  Description of Artificial Sequence: Synthetic oligonucleotide
gaacagagccagggcugcu

SEQ ID NO: 2530111 - RNA, 19 nt, Artificial Sequence
  Description of Artificial Sequence: Synthetic oligonucleotide
ccaggaaacacaggugacu

SEQ ID NO: 2530112 - RNA, 19 nt, Artificial Sequence
  Description of Artificial Sequence: Synthetic oligonucleotide
ccccaucuccuccccgccc

SEQ ID NO: 2530113 - RNA, 19 nt, Artificial Sequence
  Description of Artificial Sequence: Synthetic oligonucleotide
uggcugccucaguccuccu

SEQ ID NO: 2530114 - RNA, 19 nt, Artificial Sequence
  Description of Artificial Sequence: Synthetic oligonucleotide
ccugggcucuugcucuauc

SEQ ID NO: 2530115 - RNA, 19 nt, Artificial Sequence
  Description of Artificial Sequence: Synthetic oligonucleotide
cagggccccuccccaucuc

SEQ ID NO: 2530116 - RNA, 19 nt, Artificial Sequence
  Description of Artificial Sequence: Synthetic oligonucleotide
gccugagggacugaaguuu

SEQ ID NO: 2530117 - RNA, 19 nt, Artificial Sequence
  Description of Artificial Sequence: Synthetic oligonucleotide
gcacagcucccaugccaca

SEQ ID NO: 2530118 - RNA, 19 nt, Artificial Sequence
  Description of Artificial Sequence: Synthetic oligonucleotide
cacuaucugugugacccuu

SEQ ID NO: 2530119 - RNA, 19 nt, Artificial Sequence
  Description of Artificial Sequence: Synthetic oligonucleotide
ugccagccugagggacuga

SEQ ID NO: 2530120 - RNA, 19 nt, Artificial Sequence
  Description of Artificial Sequence: Synthetic oligonucleotide
caaggccggcugcuacaaa

SEQ ID NO: 2530121 - RNA, 19 nt, Artificial Sequence
  Description of Artificial Sequence: Synthetic oligonucleotide
gcucuugcucuaucacuau

SEQ ID NO: 2530122 - RNA, 19 nt, Artificial Sequence
  Description of Artificial Sequence: Synthetic oligonucleotide
ccagcaggugcucauuauu

SEQ ID NO: 2530123 - RNA, 19 nt, Artificial Sequence
  Description of Artificial Sequence: Synthetic oligonucleotide
cggcugcuacaaagcagug

SEQ ID NO: 2530124 - RNA, 19 nt, Artificial Sequence
  Description of Artificial Sequence: Synthetic oligonucleotide
gccacacgacuggcuggag

SEQ ID NO: 2530125 - RNA, 19 nt, Artificial Sequence
  Description of Artificial Sequence: Synthetic oligonucleotide
ccccagucugaagacccca

SEQ ID NO: 2530126 - RNA, 19 nt, Artificial Sequence
  Description of Artificial Sequence: Synthetic oligonucleotide
cccugcauucgggaggucu

SEQ ID NO: 2530127 - RNA, 19 nt, Artificial Sequence
  Description of Artificial Sequence: Synthetic oligonucleotide
ccaugccacacgacuggcu

SEQ ID NO: 2530128 - RNA, 19 nt, Artificial Sequence
  Description of Artificial Sequence: Synthetic oligonucleotide
cgucaggcagagcugugcu

SEQ ID NO: 2530129 - RNA, 19 nt, Artificial Sequence
  Description of Artificial Sequence: Synthetic oligonucleotide
caggcagagcugugcuguu

SEQ ID NO: 2530130 - RNA, 19 nt, Artificial Sequence
  Description of Artificial Sequence: Synthetic oligonucleotide
cccuccaaaugagaccccu

SEQ ID NO: 2530131 - RNA, 19 nt, Artificial Sequence
  Description of Artificial Sequence: Synthetic oligonucleotide
gugugacccuugagagagu

SEQ ID NO: 2530132 - RNA, 19 nt, Artificial Sequence
  Description of Artificial Sequence: Synthetic oligonucleotide
gggcugcuuugcccagacu

SEQ ID NO: 2530133 - RNA, 19 nt, Artificial Sequence
  Description of Artificial Sequence: Synthetic oligonucleotide
gggccccuccccaucuccu

SEQ ID NO: 2530134 - RNA, 19 nt, Artificial Sequence
  Description of Artificial Sequence: Synthetic oligonucleotide
cugcugcggcugccagccu

SEQ ID NO: 2530135 - RNA, 19 nt, Artificial Sequence
  Description of Artificial Sequence: Synthetic oligonucleotide
gcuuggcugcauggauuuu

SEQ ID NO: 2530136 - RNA, 19 nt, Artificial Sequence
  Description of Artificial Sequence: Synthetic oligonucleotide
ccgggacuugcagaucauu

SEQ ID NO: 2530137 - RNA, 19 nt, Artificial Sequence
  Description of Artificial Sequence: Synthetic oligonucleotide
gccugggcucuugcucuau

SEQ ID NO: 2530138 - RNA, 19 nt, Artificial Sequence
  Description of Artificial Sequence: Synthetic oligonucleotide
ccccugcauucgggagguc

SEQ ID NO: 2530139 - RNA, 19 nt, Artificial Sequence
  Description of Artificial Sequence: Synthetic oligonucleotide
ugaauaauugcauuaauga

SEQ ID NO: 2530140 - RNA, 19 nt, Artificial Sequence
  Description of Artificial Sequence: Synthetic oligonucleotide
cuuuauaagagacaaacag

SEQ ID NO: 2530141 - RNA, 19 nt, Artificial Sequence
  Description of Artificial Sequence: Synthetic oligonucleotide
uuauaagagacaaacagcu

SEQ ID NO: 2530142 - RNA, 19 nt, Artificial Sequence
  Description of Artificial Sequence: Synthetic oligonucleotide
ugugacauauauaacauga

SEQ ID NO: 2530143 - RNA, 19 nt, Artificial Sequence
  Description of Artificial Sequence: Synthetic oligonucleotide
uuuauaagagacaaacagc

SEQ ID NO: 2530144 - RNA, 19 nt, Artificial Sequence
  Description of Artificial Sequence: Synthetic oligonucleotide
uccacuguaauccaguugc

SEQ ID NO: 2530145 - RNA, 19 nt, Artificial Sequence
  Description of Artificial Sequence: Synthetic oligonucleotide
acauauauaacaugaucgg

SEQ ID NO: 2530146 - RNA, 19 nt, Artificial Sequence
  Description of Artificial Sequence: Synthetic oligonucleotide
uuuugaagaguuuucagca

SEQ ID NO: 2530147 - RNA, 19 nt, Artificial Sequence
  Description of Artificial Sequence: Synthetic oligonucleotide
aauugcagaaaggacuucc

SEQ ID NO: 2530148 - RNA, 19 nt, Artificial Sequence
  Description of Artificial Sequence: Synthetic oligonucleotide
aaucccauaaacauacugg

SEQ ID NO: 2530149 - RNA, 19 nt, Artificial Sequence
  Description of Artificial Sequence: Synthetic oligonucleotide
aauauaugcaugucguuca

SEQ ID NO: 2530150 - RNA, 19 nt, Artificial Sequence
  Description of Artificial Sequence: Synthetic oligonucleotide
auugugaugguugugauuc

SEQ ID NO: 2530151 - RNA, 19 nt, Artificial Sequence
  Description of Artificial Sequence: Synthetic oligonucleotide
uucacuaacuuucugaauc

SEQ ID NO: 2530152 - RNA, 19 nt, Artificial Sequence
  Description of Artificial Sequence: Synthetic oligonucleotide
uuuucagcaaaguaaauuc

SEQ ID NO: 2530153 - RNA, 19 nt, Artificial Sequence
  Description of Artificial Sequence: Synthetic oligonucleotide
caugcguucauugugaugg

SEQ ID NO: 2530154 - RNA, 19 nt, Artificial Sequence
  Description of Artificial Sequence: Synthetic oligonucleotide
caaaguaaauuccagcucc

SEQ ID NO: 2530155 - RNA, 19 nt, Artificial Sequence
  Description of Artificial Sequence: Synthetic oligonucleotide
ugugauucucuucagacac

SEQ ID NO: 2530156 - RNA, 19 nt, Artificial Sequence
  Description of Artificial Sequence: Synthetic oligonucleotide
uuuugucugugacagaacc

SEQ ID NO: 2530157 - RNA, 19 nt, Artificial Sequence
  Description of Artificial Sequence: Synthetic oligonucleotide
aacaugaucggucuuugug

SEQ ID NO: 2530158 - RNA, 19 nt, Artificial Sequence
  Description of Artificial Sequence: Synthetic oligonucleotide
aaugaaaggagaaccgugg

SEQ ID NO: 2530159 - RNA, 19 nt, Artificial Sequence
  Description of Artificial Sequence: Synthetic oligonucleotide
auccgaaugacauuguauc

SEQ ID NO: 2530160 - RNA, 19 nt, Artificial Sequence
  Description of Artificial Sequence: Synthetic oligonucleotide
agacaaacagcuuaguucu

SEQ ID NO: 2530161 - RNA, 19 nt, Artificial Sequence
  Description of Artificial Sequence: Synthetic oligonucleotide
acaucccuccaauauaugc

SEQ ID NO: 2530162 - RNA, 19 nt, Artificial Sequence
  Description of Artificial Sequence: Synthetic oligonucleotide
uuuaugaauaauugcauua

SEQ ID NO: 2530163 - RNA, 19 nt, Artificial Sequence
  Description of Artificial Sequence: Synthetic oligonucleotide
acuguaauccaguugcagg

SEQ ID NO: 2530164 - RNA, 19 nt, Artificial Sequence
  Description of Artificial Sequence: Synthetic oligonucleotide
aauaguacucugcaucucu

SEQ ID NO: 2530165 - RNA, 19 nt, Artificial Sequence
  Description of Artificial Sequence: Synthetic oligonucleotide
ugcuuuauaagagacaaac

SEQ ID NO: 2530166 - RNA, 19 nt, Artificial Sequence
  Description of Artificial Sequence: Synthetic oligonucleotide
uauauaacaugaucggucu

SEQ ID NO: 2530167 - RNA, 19 nt, Artificial Sequence
  Description of Artificial Sequence: Synthetic oligonucleotide
ucuacagaaaagcauuugu

SEQ ID NO: 2530168 - RNA, 19 nt, Artificial Sequence
  Description of Artificial Sequence: Synthetic oligonucleotide
auauauaacaugaucgguc

SEQ ID NO: 2530169 - RNA, 19 nt, Artificial Sequence
  Description of Artificial Sequence: Synthetic oligonucleotide
uaagagacaaacagcuuag

SEQ ID NO: 2530170 - RNA, 19 nt, Artificial Sequence
  Description of Artificial Sequence: Synthetic oligonucleotide
uccaauauaugcaugucgu

SEQ ID NO: 2530171 - RNA, 19 nt, Artificial Sequence
  Description of Artificial Sequence: Synthetic oligonucleotide
agcaaaguaaauuccagcu

SEQ ID NO: 2530172 - RNA, 19 nt, Artificial Sequence
  Description of Artificial Sequence: Synthetic oligonucleotide
gagacaaacagcuuaguuc

SEQ ID NO: 2530173 - RNA, 19 nt, Artificial Sequence
  Description of Artificial Sequence: Synthetic oligonucleotide
ucuagugaugcuuuauaag

SEQ ID NO: 2530174 - RNA, 19 nt, Artificial Sequence
  Description of Artificial Sequence: Synthetic oligonucleotide
uucuuguucacuaacuuuc

SEQ ID NO: 2530175 - RNA, 19 nt, Artificial Sequence
  Description of Artificial Sequence: Synthetic oligonucleotide
uuuguuggaagcaauccac

SEQ ID NO: 2530176 - RNA, 19 nt, Artificial Sequence
  Description of Artificial Sequence: Synthetic oligonucleotide
ugagauauucuggauaugc

SEQ ID NO: 2530177 - RNA, 19 nt, Artificial Sequence
  Description of Artificial Sequence: Synthetic oligonucleotide
aaacagcuuaguucuuggc

SEQ ID NO: 2530178 - RNA, 19 nt, Artificial Sequence
  Description of Artificial Sequence: Synthetic oligonucleotide
aacagcuuaguucuuggcu

SEQ ID NO: 2530179 - RNA, 19 nt, Artificial Sequence
  Description of Artificial Sequence: Synthetic oligonucleotide
acccuuuaugaauaauugc

SEQ ID NO: 2530180 - RNA, 19 nt, Artificial Sequence
  Description of Artificial Sequence: Synthetic oligonucleotide
uuuuguuggaagcaaucca

SEQ ID NO: 2530181 - RNA, 19 nt, Artificial Sequence
  Description of Artificial Sequence: Synthetic oligonucleotide
ucgaauaguacucugcauc

SEQ ID NO: 2530182 - RNA, 19 nt, Artificial Sequence
  Description of Artificial Sequence: Synthetic oligonucleotide
auuaaugaaaggagaaccg

SEQ ID NO: 2530183 - RNA, 19 nt, Artificial Sequence
  Description of Artificial Sequence: Synthetic oligonucleotide
auugcauuaaugaaaggag

SEQ ID NO: 2530184 - RNA, 19 nt, Artificial Sequence
  Description of Artificial Sequence: Synthetic oligonucleotide
ugacauauauaacaugauc

SEQ ID NO: 2530185 - RNA, 19 nt, Artificial Sequence
  Description of Artificial Sequence: Synthetic oligonucleotide
uuucagcaaaguaaauucc

SEQ ID NO: 2530186 - RNA, 19 nt, Artificial Sequence
  Description of Artificial Sequence: Synthetic oligonucleotide
uuugucugugacagaaccg

SEQ ID NO: 2530187 - RNA, 19 nt, Artificial Sequence
  Description of Artificial Sequence: Synthetic oligonucleotide
auaugcaugucguucauca

SEQ ID NO: 2530188 - RNA, 19 nt, Artificial Sequence
  Description of Artificial Sequence: Synthetic oligonucleotide
ucuaccaaugacugaauga

SEQ ID NO: 2530189 - RNA, 19 nt, Artificial Sequence
  Description of Artificial Sequence: Synthetic oligonucleotide
uagugaugcuuuauaagag

SEQ ID NO: 2530190 - RNA, 19 nt, Artificial Sequence
  Description of Artificial Sequence: Synthetic oligonucleotide
auaagagacaaacagcuua

SEQ ID NO: 2530191 - RNA, 19 nt, Artificial Sequence
  Description of Artificial Sequence: Synthetic oligonucleotide
uaugccagcccauugacac

SEQ ID NO: 2530192 - RNA, 19 nt, Artificial Sequence
  Description of Artificial Sequence: Synthetic oligonucleotide
uuggguucagagaauaugu

SEQ ID NO: 2530193 - RNA, 19 nt, Artificial Sequence
  Description of Artificial Sequence: Synthetic oligonucleotide
uucugaauccgaaugacau

SEQ ID NO: 2530194 - RNA, 19 nt, Artificial Sequence
  Description of Artificial Sequence: Synthetic oligonucleotide
ugcauuaaugaaaggagaa

SEQ ID NO: 2530195 - RNA, 19 nt, Artificial Sequence
  Description of Artificial Sequence: Synthetic oligonucleotide
uguguucucgaauaguacu

SEQ ID NO: 2530196 - RNA, 19 nt, Artificial Sequence
  Description of Artificial Sequence: Synthetic oligonucleotide
acuuccuuuugucugugac

SEQ ID NO: 2530197 - RNA, 19 nt, Artificial Sequence
  Description of Artificial Sequence: Synthetic oligonucleotide
ucugugacauauauaacau

SEQ ID NO: 2530198 - RNA, 19 nt, Artificial Sequence
  Description of Artificial Sequence: Synthetic oligonucleotide
aauuccagcuccaaacauc

SEQ ID NO: 2530199 - RNA, 19 nt, Artificial Sequence
  Description of Artificial Sequence: Synthetic oligonucleotide
uaucuguugaagaugccac

SEQ ID NO: 2530200 - RNA, 19 nt, Artificial Sequence
  Description of Artificial Sequence: Synthetic oligonucleotide
auuuucauggugcugaauu

SEQ ID NO: 2530201 - RNA, 19 nt, Artificial Sequence
  Description of Artificial Sequence: Synthetic oligonucleotide
uuccuuuugucugugacag

SEQ ID NO: 2530202 - RNA, 19 nt, Artificial Sequence
  Description of Artificial Sequence: Synthetic oligonucleotide
cuagugaugcuuuauaaga

SEQ ID NO: 2530203 - RNA, 19 nt, Artificial Sequence
  Description of Artificial Sequence: Synthetic oligonucleotide
uuguucacuaacuuucuga

SEQ ID NO: 2530204 - RNA, 19 nt, Artificial Sequence
  Description of Artificial Sequence: Synthetic oligonucleotide
uugcauuaaugaaaggaga

SEQ ID NO: 2530205 - RNA, 19 nt, Artificial Sequence
  Description of Artificial Sequence: Synthetic oligonucleotide
gaauaauugcauuaaugaa

SEQ ID NO: 2530206 - RNA, 19 nt, Artificial Sequence
  Description of Artificial Sequence: Synthetic oligonucleotide
agaaccguggaacagcaug

SEQ ID NO: 2530207 - RNA, 19 nt, Artificial Sequence
  Description of Artificial Sequence: Synthetic oligonucleotide
augacauuguaucuguuga

SEQ ID NO: 2530208 - RNA, 19 nt, Artificial Sequence
  Description of Artificial Sequence: Synthetic oligonucleotide
ucucgaauaguacucugca

SEQ ID NO: 2530209 - RNA, 19 nt, Artificial Sequence
  Description of Artificial Sequence: Synthetic oligonucleotide
ucuguagaugacauacuca

SEQ ID NO: 2530210 - RNA, 19 nt, Artificial Sequence
  Description of Artificial Sequence: Synthetic oligonucleotide
auacucagcauaugccagc

SEQ ID NO: 2530211 - RNA, 19 nt, Artificial Sequence
  Description of Artificial Sequence: Synthetic oligonucleotide
ugucacucuacagaaaagc

SEQ ID NO: 2530212 - RNA, 19 nt, Artificial Sequence
  Description of Artificial Sequence: Synthetic oligonucleotide
augguugugauucucuuca

SEQ ID NO: 2530213 - RNA, 19 nt, Artificial Sequence
  Description of Artificial Sequence: Synthetic oligonucleotide
acagcuuaguucuuggcug

SEQ ID NO: 2530214 - RNA, 19 nt, Artificial Sequence
  Description of Artificial Sequence: Synthetic oligonucleotide
caugucguucaucaaaccc

SEQ ID NO: 2530215 - RNA, 19 nt, Artificial Sequence
  Description of Artificial Sequence: Synthetic oligonucleotide
aagaguuuucagcaaagua

SEQ ID NO: 2530216 - RNA, 19 nt, Artificial Sequence
  Description of Artificial Sequence: Synthetic oligonucleotide
gaugcuuuauaagagacaa

SEQ ID NO: 2530217 - RNA, 19 nt, Artificial Sequence
  Description of Artificial Sequence: Synthetic oligonucleotide
aacccuuuaugaauaauug

SEQ ID NO: 2530218 - RNA, 19 nt, Artificial Sequence
  Description of Artificial Sequence: Synthetic oligonucleotide
cuccaauauaugcaugucg

SEQ ID NO: 2530219 - RNA, 19 nt, Artificial Sequence
  Description of Artificial Sequence: Synthetic oligonucleotide
gaaaggagaaccguggaac

SEQ ID NO: 2530220 - RNA, 19 nt, Artificial Sequence
  Description of Artificial Sequence: Synthetic oligonucleotide
gaagcaauccacuguaauc

SEQ ID NO: 2530221 - RNA, 19 nt, Artificial Sequence
  Description of Artificial Sequence: Synthetic oligonucleotide
aaaggagaaccguggaaca

SEQ ID NO: 2530222 - RNA, 19 nt, Artificial Sequence
  Description of Artificial Sequence: Synthetic oligonucleotide
acauacucagcauaugcca

SEQ ID NO: 2530223 - RNA, 19 nt, Artificial Sequence
  Description of Artificial Sequence: Synthetic oligonucleotide
uuuucauggugcugaauug

SEQ ID NO: 2530224 - RNA, 19 nt, Artificial Sequence
  Description of Artificial Sequence: Synthetic oligonucleotide
aucuguugaagaugccacc

SEQ ID NO: 2530225 - RNA, 19 nt, Artificial Sequence
  Description of Artificial Sequence: Synthetic oligonucleotide
agcccauugacacuugguc

SEQ ID NO: 2530226 - RNA, 19 nt, Artificial Sequence
  Description of Artificial Sequence: Synthetic oligonucleotide
ugaugagauauucuggaua

SEQ ID NO: 2530227 - RNA, 19 nt, Artificial Sequence
  Description of Artificial Sequence: Synthetic oligonucleotide
cuuaguucuuggcuguugg

SEQ ID NO: 2530228 - RNA, 19 nt, Artificial Sequence
  Description of Artificial Sequence: Synthetic oligonucleotide
cuuggucuaccaaugacug

SEQ ID NO: 2530229 - RNA, 19 nt, Artificial Sequence
  Description of Artificial Sequence: Synthetic oligonucleotide
uccucuguagaugacauac

SEQ ID NO: 2530230 - RNA, 19 nt, Artificial Sequence
  Description of Artificial Sequence: Synthetic oligonucleotide
ucacuaacuuucugaaucc

SEQ ID NO: 2530231 - RNA, 19 nt, Artificial Sequence
  Description of Artificial Sequence: Synthetic oligonucleotide
ucuguguucucgaauagua

SEQ ID NO: 2530232 - RNA, 19 nt, Artificial Sequence
  Description of Artificial Sequence: Synthetic oligonucleotide
aaugacugaaugauguccu

SEQ ID NO: 2530233 - RNA, 19 nt, Artificial Sequence
  Description of Artificial Sequence: Synthetic oligonucleotide
uucauugugaugguuguga

SEQ ID NO: 2530234 - RNA, 19 nt, Artificial Sequence
  Description of Artificial Sequence: Synthetic oligonucleotide
uucuggauaugccuguucu

SEQ ID NO: 2530235 - RNA, 19 nt, Artificial Sequence
  Description of Artificial Sequence: Synthetic oligonucleotide
uucucgaauaguacucugc

SEQ ID NO: 2530236 - RNA, 19 nt, Artificial Sequence
  Description of Artificial Sequence: Synthetic oligonucleotide
agaguuuucagcaaaguaa

SEQ ID NO: 2530237 - RNA, 19 nt, Artificial Sequence
  Description of Artificial Sequence: Synthetic oligonucleotide
augaauaauugcauuaaug

SEQ ID NO: 2530238 - RNA, 19 nt, Artificial Sequence
  Description of Artificial Sequence: Synthetic oligonucleotide
ugcugaauugcagaaagga

SEQ ID NO: 2530239 - RNA, 19 nt, Artificial Sequence
  Description of Artificial Sequence: Synthetic oligonucleotide
uuaugaauaauugcauuaa

SEQ ID NO: 2530240 - RNA, 19 nt, Artificial Sequence
  Description of Artificial Sequence: Synthetic oligonucleotide
agugucacucuacagaaaa

SEQ ID NO: 2530241 - RNA, 19 nt, Artificial Sequence
  Description of Artificial Sequence: Synthetic oligonucleotide
ugcaugucguucaucaaac

SEQ ID NO: 2530242 - RNA, 19 nt, Artificial Sequence
  Description of Artificial Sequence: Synthetic oligonucleotide
uccuccaaucccauaaaca

SEQ ID NO: 2530243 - RNA, 19 nt, Artificial Sequence
  Description of Artificial Sequence: Synthetic oligonucleotide
uuaaugaaaggagaaccgu

SEQ ID NO: 2530244 - RNA, 19 nt, Artificial Sequence
  Description of Artificial Sequence: Synthetic oligonucleotide
agugaugcuuuauaagaga

SEQ ID NO: 2530245 - RNA, 19 nt, Artificial Sequence
  Description of Artificial Sequence: Synthetic oligonucleotide
uaugaauaauugcauuaau

SEQ ID NO: 2530246 - RNA, 19 nt, Artificial Sequence
  Description of Artificial Sequence: Synthetic oligonucleotide
uugaagaguuuucagcaaa

SEQ ID NO: 2530247 - RNA, 19 nt, Artificial Sequence
  Description of Artificial Sequence: Synthetic oligonucleotide
uugucugugacagaaccgc

SEQ ID NO: 2530248 - RNA, 19 nt, Artificial Sequence
  Description of Artificial Sequence: Synthetic oligonucleotide
uuucugaauccgaaugaca

SEQ ID NO: 2530249 - RNA, 19 nt, Artificial Sequence
  Description of Artificial Sequence: Synthetic oligonucleotide
acaugaucggucuuugugu

SEQ ID NO: 2530250 - RNA, 19 nt, Artificial Sequence
  Description of Artificial Sequence: Synthetic oligonucleotide
aaaggacuucccaaguguc

SEQ ID NO: 2530251 - RNA, 19 nt, Artificial Sequence
  Description of Artificial Sequence: Synthetic oligonucleotide
caaugacugaaugaugucc

SEQ ID NO: 2530252 - RNA, 19 nt, Artificial Sequence
  Description of Artificial Sequence: Synthetic oligonucleotide
ugaugcuuuauaagagaca

SEQ ID NO: 2530253 - RNA, 19 nt, Artificial Sequence
  Description of Artificial Sequence: Synthetic oligonucleotide
cugaauccgaaugacauug

SEQ ID NO: 2530254 - RNA, 19 nt, Artificial Sequence
  Description of Artificial Sequence: Synthetic oligonucleotide
caaacagcuuaguucuugg

SEQ ID NO: 2530255 - RNA, 19 nt, Artificial Sequence
  Description of Artificial Sequence: Synthetic oligonucleotide
uguuggaagcaauccacug

SEQ ID NO: 2530256 - RNA, 19 nt, Artificial Sequence
  Description of Artificial Sequence: Synthetic oligonucleotide
auuugucugugacauauau

SEQ ID NO: 2530257 - RNA, 19 nt, Artificial Sequence
  Description of Artificial Sequence: Synthetic oligonucleotide
cauacucagcauaugccag

SEQ ID NO: 2530258 - RNA, 19 nt, Artificial Sequence
  Description of Artificial Sequence: Synthetic oligonucleotide
ucacucuacagaaaagcau

SEQ ID NO: 2530259 - RNA, 19 nt, Artificial Sequence
  Description of Artificial Sequence: Synthetic oligonucleotide
ggugcugaauugcagaaag

SEQ ID NO: 2530260 - RNA, 19 nt, Artificial Sequence
  Description of Artificial Sequence: Synthetic oligonucleotide
gacauacucagcauaugcc

SEQ ID NO: 2530261 - RNA, 19 nt, Artificial Sequence
  Description of Artificial Sequence: Synthetic oligonucleotide
uuggaagcaauccacugua

SEQ ID NO: 2530262 - RNA, 19 nt, Artificial Sequence
  Description of Artificial Sequence: Synthetic oligonucleotide
caauauaugcaugucguuc

SEQ ID NO: 2530263 - RNA, 19 nt, Artificial Sequence
  Description of Artificial Sequence: Synthetic oligonucleotide
uaauugcauuaaugaaagg

SEQ ID NO: 2530264 - RNA, 19 nt, Artificial Sequence
  Description of Artificial Sequence: Synthetic oligonucleotide
aaacccuuuaugaauaauu

SEQ ID NO: 2530265 - RNA, 19 nt, Artificial Sequence
  Description of Artificial Sequence: Synthetic oligonucleotide
ucugcaucucuucuucuac

SEQ ID NO: 2530266 - RNA, 19 nt, Artificial Sequence
  Description of Artificial Sequence: Synthetic oligonucleotide
aggagcgugggccauuuuc

SEQ ID NO: 2530267 - RNA, 19 nt, Artificial Sequence
  Description of Artificial Sequence: Synthetic oligonucleotide
gacagaaccgcucccucag

SEQ ID NO: 2530268 - RNA, 19 nt, Artificial Sequence
  Description of Artificial Sequence: Synthetic oligonucleotide
ugcagaaaggacuucccaa

SEQ ID NO: 2530269 - RNA, 19 nt, Artificial Sequence
  Description of Artificial Sequence: Synthetic oligonucleotide
ugaaaggagaaccguggaa

SEQ ID NO: 2530270 - RNA, 19 nt, Artificial Sequence
  Description of Artificial Sequence: Synthetic oligonucleotide
auugcagaaaggacuuccc

SEQ ID NO: 2530271 - RNA, 19 nt, Artificial Sequence
  Description of Artificial Sequence: Synthetic oligonucleotide
aguacucugcaucucuucu

SEQ ID NO: 2530272 - RNA, 19 nt, Artificial Sequence
  Description of Artificial Sequence: Synthetic oligonucleotide
aaacauacugguugcuuuu

SEQ ID NO: 2530273 - RNA, 19 nt, Artificial Sequence
  Description of Artificial Sequence: Synthetic oligonucleotide
aggagaaccguggaacagc

SEQ ID NO: 2530274 - RNA, 19 nt, Artificial Sequence
  Description of Artificial Sequence: Synthetic oligonucleotide
accaaugacugaaugaugu

SEQ ID NO: 2530275 - RNA, 19 nt, Artificial Sequence
  Description of Artificial Sequence: Synthetic oligonucleotide
cuggauaugccuguucucc

SEQ ID NO: 2530276 - RNA, 19 nt, Artificial Sequence
  Description of Artificial Sequence: Synthetic oligonucleotide
cuuugugugugggacagcc

SEQ ID NO: 2530277 - RNA, 19 nt, Artificial Sequence
  Description of Artificial Sequence: Synthetic oligonucleotide
aaacaucccuccaauauau

SEQ ID NO: 2530278 - RNA, 19 nt, Artificial Sequence
  Description of Artificial Sequence: Synthetic oligonucleotide
ucuguugaagaugccacca

SEQ ID NO: 2530279 - RNA, 19 nt, Artificial Sequence
  Description of Artificial Sequence: Synthetic oligonucleotide
uggcuucaugaucugguag

SEQ ID NO: 2530280 - RNA, 19 nt, Artificial Sequence
  Description of Artificial Sequence: Synthetic oligonucleotide
uuugaagaguuuucagcaa

SEQ ID NO: 2530281 - RNA, 19 nt, Artificial Sequence
  Description of Artificial Sequence: Synthetic oligonucleotide
uggucuaccaaugacugaa

SEQ ID NO: 2530282 - RNA, 19 nt, Artificial Sequence
  Description of Artificial Sequence: Synthetic oligonucleotide
cccauaaacauacugguug

SEQ ID NO: 2530283 - RNA, 19 nt, Artificial Sequence
  Description of Artificial Sequence: Synthetic oligonucleotide
ugacacuuggucuaccaau

SEQ ID NO: 2530284 - RNA, 19 nt, Artificial Sequence
  Description of Artificial Sequence: Synthetic oligonucleotide
cugaauugcagaaaggacu

SEQ ID NO: 2530285 - RNA, 19 nt, Artificial Sequence
  Description of Artificial Sequence: Synthetic oligonucleotide
ucuucagacacuuccuuuu

SEQ ID NO: 2530286 - RNA, 19 nt, Artificial Sequence
  Description of Artificial Sequence: Synthetic oligonucleotide
uauaacaugaucggucuuu

SEQ ID NO: 2530287 - RNA, 19 nt, Artificial Sequence
  Description of Artificial Sequence: Synthetic oligonucleotide
gagauauucuggauaugcc

SEQ ID NO: 2530288 - RNA, 19 nt, Artificial Sequence
  Description of Artificial Sequence: Synthetic oligonucleotide
gcagguuugacucacucug

SEQ ID NO: 2530289 - RNA, 19 nt, Artificial Sequence
  Description of Artificial Sequence: Synthetic oligonucleotide
ucucuguguucucgaauag

SEQ ID NO: 2530290 - RNA, 19 nt, Artificial Sequence
  Description of Artificial Sequence: Synthetic oligonucleotide
cucuguagaugacauacuc

SEQ ID NO: 2530291 - RNA, 19 nt, Artificial Sequence
  Description of Artificial Sequence: Synthetic oligonucleotide
uaauccaguugcagguuug

SEQ ID NO: 2530292 - RNA, 19 nt, Artificial Sequence
  Description of Artificial Sequence: Synthetic oligonucleotide
ucagacacuuccuuuuguc

SEQ ID NO: 2530293 - RNA, 19 nt, Artificial Sequence
  Description of Artificial Sequence: Synthetic oligonucleotide
uugcugucugugaaggggc

SEQ ID NO: 2530294 - RNA, 19 nt, Artificial Sequence
  Description of Artificial Sequence: Synthetic oligonucleotide
agucacuaggucuucugcu

SEQ ID NO: 2530295 - RNA, 19 nt, Artificial Sequence
  Description of Artificial Sequence: Synthetic oligonucleotide
aauccgaaugacauuguau

SEQ ID NO: 2530296 - RNA, 19 nt, Artificial Sequence
  Description of Artificial Sequence: Synthetic oligonucleotide
uuguuggaagcaauccacu

SEQ ID NO: 2530297 - RNA, 19 nt, Artificial Sequence
  Description of Artificial Sequence: Synthetic oligonucleotide
guuggguucagagaauaug

SEQ ID NO: 2530298 - RNA, 19 nt, Artificial Sequence
  Description of Artificial Sequence: Synthetic oligonucleotide
uugcagaaaggacuuccca

SEQ ID NO: 2530299 - RNA, 19 nt, Artificial Sequence
  Description of Artificial Sequence: Synthetic oligonucleotide
aggacuucccaagugucac

SEQ ID NO: 2530300 - RNA, 19 nt, Artificial Sequence
  Description of Artificial Sequence: Synthetic oligonucleotide
uaccaaugacugaaugaug

SEQ ID NO: 2530301 - RNA, 19 nt, Artificial Sequence
  Description of Artificial Sequence: Synthetic oligonucleotide
caugaucggucuuugugug

SEQ ID NO: 2530302 - RNA, 19 nt, Artificial Sequence
  Description of Artificial Sequence: Synthetic oligonucleotide
uacucugcaucucuucuuc

SEQ ID NO: 2530303 - RNA, 19 nt, Artificial Sequence
  Description of Artificial Sequence: Synthetic oligonucleotide
gcgugggccauuuucaugg

SEQ ID NO: 2530304 - RNA, 19 nt, Artificial Sequence
  Description of Artificial Sequence: Synthetic oligonucleotide
uauaagagacaaacagcuu

SEQ ID NO: 2530305 - RNA, 19 nt, Artificial Sequence
  Description of Artificial Sequence: Synthetic oligonucleotide
ucguucaucaaacccuuua

SEQ ID NO: 2530306 - RNA, 19 nt, Artificial Sequence
  Description of Artificial Sequence: Synthetic oligonucleotide
aguugcagguuugacucac

SEQ ID NO: 2530307 - RNA, 19 nt, Artificial Sequence
  Description of Artificial Sequence: Synthetic oligonucleotide
cugugaaggggcuucuggc

SEQ ID NO: 2530308 - RNA, 19 nt, Artificial Sequence
  Description of Artificial Sequence: Synthetic oligonucleotide
aaggagaaccguggaacag

SEQ ID NO: 2530309 - RNA, 19 nt, Artificial Sequence
  Description of Artificial Sequence: Synthetic oligonucleotide
agagacaaacagcuuaguu

SEQ ID NO: 2530310 - RNA, 19 nt, Artificial Sequence
  Description of Artificial Sequence: Synthetic oligonucleotide
ugaucggucuuugugugug

SEQ ID NO: 2530311 - RNA, 19 nt, Artificial Sequence
  Description of Artificial Sequence: Synthetic oligonucleotide
cuaacuuucugaauccgaa

SEQ ID NO: 2530312 - RNA, 19 nt, Artificial Sequence
  Description of Artificial Sequence: Synthetic oligonucleotide
aucucuguguucucgaaua

SEQ ID NO: 2530313 - RNA, 19 nt, Artificial Sequence
  Description of Artificial Sequence: Synthetic oligonucleotide
ggugaugagauauucugga

SEQ ID NO: 2530314 - RNA, 19 nt, Artificial Sequence
  Description of Artificial Sequence: Synthetic oligonucleotide
gaaccguggaacagcaugc

SEQ ID NO: 2530315 - RNA, 19 nt, Artificial Sequence
  Description of Artificial Sequence: Synthetic oligonucleotide
ucuccucuguagaugacau

SEQ ID NO: 2530316 - RNA, 19 nt, Artificial Sequence
  Description of Artificial Sequence: Synthetic oligonucleotide
agaaaagcauuugucugug

SEQ ID NO: 2530317 - RNA, 19 nt, Artificial Sequence
  Description of Artificial Sequence: Synthetic oligonucleotide
uguugcugucugugaaggg

SEQ ID NO: 2530318 - RNA, 19 nt, Artificial Sequence
  Description of Artificial Sequence: Synthetic oligonucleotide
ucuggccuucaccagggca

SEQ ID NO: 2530319 - RNA, 19 nt, Artificial Sequence
  Description of Artificial Sequence: Synthetic oligonucleotide
uguaucuguugaagaugcc

SEQ ID NO: 2530320 - RNA, 19 nt, Artificial Sequence
  Description of Artificial Sequence: Synthetic oligonucleotide
aaaguaaauuccagcucca

SEQ ID NO: 2530321 - RNA, 19 nt, Artificial Sequence
  Description of Artificial Sequence: Synthetic oligonucleotide
augucguucaucaaacccu

SEQ ID NO: 2530322 - RNA, 19 nt, Artificial Sequence
  Description of Artificial Sequence: Synthetic oligonucleotide
acuuggucuaccaaugacu

SEQ ID NO: 2530323 - RNA, 19 nt, Artificial Sequence
  Description of Artificial Sequence: Synthetic oligonucleotide
aauccacuguaauccaguu

SEQ ID NO: 2530324 - RNA, 19 nt, Artificial Sequence
  Description of Artificial Sequence: Synthetic oligonucleotide
acaaacagcuuaguucuug

SEQ ID NO: 2530325 - RNA, 19 nt, Artificial Sequence
  Description of Artificial Sequence: Synthetic oligonucleotide
caagugucacucuacagaa

SEQ ID NO: 2530326 - RNA, 19 nt, Artificial Sequence
  Description of Artificial Sequence: Synthetic oligonucleotide
cauaugccagcccauugac

SEQ ID NO: 2530327 - RNA, 19 nt, Artificial Sequence
  Description of Artificial Sequence: Synthetic oligonucleotide
ucccaagugucacucuaca

SEQ ID NO: 2530328 - RNA, 19 nt, Artificial Sequence
  Description of Artificial Sequence: Synthetic oligonucleotide
gugaugcuuuauaagagac

SEQ ID NO: 2530329 - RNA, 19 nt, Artificial Sequence
  Description of Artificial Sequence: Synthetic oligonucleotide
augaaaggagaaccgugga

SEQ ID NO: 2530330 - RNA, 19 nt, Artificial Sequence
  Description of Artificial Sequence: Synthetic oligonucleotide
cugugacauauauaacaug

SEQ ID NO: 2530331 - RNA, 19 nt, Artificial Sequence
  Description of Artificial Sequence: Synthetic oligonucleotide
ugacauuguaucuguugaa

SEQ ID NO: 2530332 - RNA, 19 nt, Artificial Sequence
  Description of Artificial Sequence: Synthetic oligonucleotide
aaccguggaacagcaugcg

SEQ ID NO: 2530333 - RNA, 19 nt, Artificial Sequence
  Description of Artificial Sequence: Synthetic oligonucleotide
caucccuccaauauaugca

SEQ ID NO: 2530334 - RNA, 19 nt, Artificial Sequence
  Description of Artificial Sequence: Synthetic oligonucleotide
cuguugcugucugugaagg

SEQ ID NO: 2530335 - RNA, 19 nt, Artificial Sequence
  Description of Artificial Sequence: Synthetic oligonucleotide
cccuuuaugaauaauugca

SEQ ID NO: 2530336 - RNA, 19 nt, Artificial Sequence
  Description of Artificial Sequence: Synthetic oligonucleotide
uguucucgaauaguacucu

SEQ ID NO: 2530337 - RNA, 19 nt, Artificial Sequence
  Description of Artificial Sequence: Synthetic oligonucleotide
agcauaugccagcccauug

SEQ ID NO: 2530338 - RNA, 19 nt, Artificial Sequence
  Description of Artificial Sequence: Synthetic oligonucleotide
auaacaugaucggucuuug

SEQ ID NO: 2530339 - RNA, 19 nt, Artificial Sequence
  Description of Artificial Sequence: Synthetic oligonucleotide
acuaggucuucugcucugc

SEQ ID NO: 2530340 - RNA, 19 nt, Artificial Sequence
  Description of Artificial Sequence: Synthetic oligonucleotide
uaacuuucugaauccgaau

SEQ ID NO: 2530341 - RNA, 19 nt, Artificial Sequence
  Description of Artificial Sequence: Synthetic oligonucleotide
guaucuguugaagaugcca

SEQ ID NO: 2530342 - RNA, 19 nt, Artificial Sequence
  Description of Artificial Sequence: Synthetic oligonucleotide
gucuaccaaugacugaaug

SEQ ID NO: 2530343 - RNA, 19 nt, Artificial Sequence
  Description of Artificial Sequence: Synthetic oligonucleotide
cucagcauaugccagccca

SEQ ID NO: 2530344 - RNA, 19 nt, Artificial Sequence
  Description of Artificial Sequence: Synthetic oligonucleotide
cacucuggccuucaccagg

SEQ ID NO: 2530345 - RNA, 19 nt, Artificial Sequence
  Description of Artificial Sequence: Synthetic oligonucleotide
cagguuugacucacucugg

SEQ ID NO: 2530346 - RNA, 19 nt, Artificial Sequence
  Description of Artificial Sequence: Synthetic oligonucleotide
aguucuuggcuguuggguu

SEQ ID NO: 2530347 - RNA, 19 nt, Artificial Sequence
  Description of Artificial Sequence: Synthetic oligonucleotide
uugacacuuggucuaccaa

SEQ ID NO: 2530348 - RNA, 19 nt, Artificial Sequence
  Description of Artificial Sequence: Synthetic oligonucleotide
ugggacagccuguuccucc

SEQ ID NO: 2530349 - RNA, 19 nt, Artificial Sequence
  Description of Artificial Sequence: Synthetic oligonucleotide
uacucagcauaugccagcc

SEQ ID NO: 2530350 - RNA, 19 nt, Artificial Sequence
  Description of Artificial Sequence: Synthetic oligonucleotide
ugugacagaaccgcucccu

SEQ ID NO: 2530351 - RNA, 19 nt, Artificial Sequence
  Description of Artificial Sequence: Synthetic oligonucleotide
auccacuguaauccaguug

SEQ ID NO: 2530352 - RNA, 19 nt, Artificial Sequence
  Description of Artificial Sequence: Synthetic oligonucleotide
ugacagaaccgcucccuca

SEQ ID NO: 2530353 - RNA, 19 nt, Artificial Sequence
  Description of Artificial Sequence: Synthetic oligonucleotide
ugaauccgaaugacauugu

SEQ ID NO: 2530354 - RNA, 19 nt, Artificial Sequence
  Description of Artificial Sequence: Synthetic oligonucleotide
acagaaccgcucccucagc

SEQ ID NO: 2530355 - RNA, 19 nt, Artificial Sequence
  Description of Artificial Sequence: Synthetic oligonucleotide
gaucggucuuugugugugg

SEQ ID NO: 2530356 - RNA, 19 nt, Artificial Sequence
  Description of Artificial Sequence: Synthetic oligonucleotide
ucauugugaugguugugau

SEQ ID NO: 2530357 - RNA, 19 nt, Artificial Sequence
  Description of Artificial Sequence: Synthetic oligonucleotide
ucugaauccgaaugacauu

SEQ ID NO: 2530358 - RNA, 19 nt, Artificial Sequence
  Description of Artificial Sequence: Synthetic oligonucleotide
cacuuggucuaccaaugac

SEQ ID NO: 2530359 - RNA, 19 nt, Artificial Sequence
  Description of Artificial Sequence: Synthetic oligonucleotide
gacagccuguuccuccucc

SEQ ID NO: 2530360 - RNA, 19 nt, Artificial Sequence
  Description of Artificial Sequence: Synthetic oligonucleotide
acucuagugaugcuuuaua

SEQ ID NO: 2530361 - RNA, 19 nt, Artificial Sequence
  Description of Artificial Sequence: Synthetic oligonucleotide
uucccaagugucacucuac

SEQ ID NO: 2530362 - RNA, 19 nt, Artificial Sequence
  Description of Artificial Sequence: Synthetic oligonucleotide
cuuuugucugugacagaac

SEQ ID NO: 2530363 - RNA, 19 nt, Artificial Sequence
  Description of Artificial Sequence: Synthetic oligonucleotide
augacugaaugauguccug

SEQ ID NO: 2530364 - RNA, 19 nt, Artificial Sequence
  Description of Artificial Sequence: Synthetic oligonucleotide
gucacuaggucuucugcuc

SEQ ID NO: 2530365 - RNA, 19 nt, Artificial Sequence
  Description of Artificial Sequence: Synthetic oligonucleotide
ugucugugacagaaccgcu

SEQ ID NO: 2530366 - RNA, 19 nt, Artificial Sequence
  Description of Artificial Sequence: Synthetic oligonucleotide
aauccaguugcagguuuga

SEQ ID NO: 2530367 - RNA, 19 nt, Artificial Sequence
  Description of Artificial Sequence: Synthetic oligonucleotide
cacuaacuuucugaauccg

SEQ ID NO: 2530368 - RNA, 19 nt, Artificial Sequence
  Description of Artificial Sequence: Synthetic oligonucleotide
auaaacauacugguugcuu

SEQ ID NO: 2530369 - RNA, 19 nt, Artificial Sequence
  Description of Artificial Sequence: Synthetic oligonucleotide
auggugcugaauugcagaa

SEQ ID NO: 2530370 - RNA, 19 nt, Artificial Sequence
  Description of Artificial Sequence: Synthetic oligonucleotide
gaaccgcucccucagcuuc

SEQ ID NO: 2530371 - RNA, 19 nt, Artificial Sequence
  Description of Artificial Sequence: Synthetic oligonucleotide
gauguccuggaggagcgug

SEQ ID NO: 2530372 - RNA, 19 nt, Artificial Sequence
  Description of Artificial Sequence: Synthetic oligonucleotide
cuguugaagaugccaccag

SEQ ID NO: 2530373 - RNA, 19 nt, Artificial Sequence
  Description of Artificial Sequence: Synthetic oligonucleotide
ugauucucuucagacacuu

SEQ ID NO: 2530374 - RNA, 19 nt, Artificial Sequence
  Description of Artificial Sequence: Synthetic oligonucleotide
cucuagugaugcuuuauaa

SEQ ID NO: 2530375 - RNA, 19 nt, Artificial Sequence
  Description of Artificial Sequence: Synthetic oligonucleotide
uuugugugugggacagccu

SEQ ID NO: 2530376 - RNA, 19 nt, Artificial Sequence
  Description of Artificial Sequence: Synthetic oligonucleotide
cuaggucuucugcucugcg

SEQ ID NO: 2530377 - RNA, 19 nt, Artificial Sequence
  Description of Artificial Sequence: Synthetic oligonucleotide
uguuggguucagagaauau

SEQ ID NO: 2530378 - RNA, 19 nt, Artificial Sequence
  Description of Artificial Sequence: Synthetic oligonucleotide
ucccauaaacauacugguu

SEQ ID NO: 2530379 - RNA, 19 nt, Artificial Sequence
  Description of Artificial Sequence: Synthetic oligonucleotide
ugguugugauucucuucag

SEQ ID NO: 2530380 - RNA, 19 nt, Artificial Sequence
  Description of Artificial Sequence: Synthetic oligonucleotide
uaguacucugcaucucuuc

SEQ ID NO: 2530381 - RNA, 19 nt, Artificial Sequence
  Description of Artificial Sequence: Synthetic oligonucleotide
uuugacucacucuggccuu

SEQ ID NO: 2530382 - RNA, 19 nt, Artificial Sequence
  Description of Artificial Sequence: Synthetic oligonucleotide
aagagacaaacagcuuagu

SEQ ID NO: 2530383 - RNA, 19 nt, Artificial Sequence
  Description of Artificial Sequence: Synthetic oligonucleotide
uuggucuaccaaugacuga

SEQ ID NO: 2530384 - RNA, 19 nt, Artificial Sequence
  Description of Artificial Sequence: Synthetic oligonucleotide
auauaugcaugucguucau

SEQ ID NO: 2530385 - RNA, 19 nt, Artificial Sequence
  Description of Artificial Sequence: Synthetic oligonucleotide
ucagcauaugccagcccau

SEQ ID NO: 2530386 - RNA, 19 nt, Artificial Sequence
  Description of Artificial Sequence: Synthetic oligonucleotide
cucuacagaaaagcauuug

SEQ ID NO: 2530387 - RNA, 19 nt, Artificial Sequence
  Description of Artificial Sequence: Synthetic oligonucleotide
gcaaaguaaauuccagcuc

SEQ ID NO: 2530388 - RNA, 19 nt, Artificial Sequence
  Description of Artificial Sequence: Synthetic oligonucleotide
cacuguaauccaguugcag

SEQ ID NO: 2530389 - RNA, 19 nt, Artificial Sequence
  Description of Artificial Sequence: Synthetic oligonucleotide
aaguaaauuccagcuccaa

SEQ ID NO: 2530390 - RNA, 19 nt, Artificial Sequence
  Description of Artificial Sequence: Synthetic oligonucleotide
ggcuguuggguucagagaa

SEQ ID NO: 2530391 - RNA, 19 nt, Artificial Sequence
  Description of Artificial Sequence: Synthetic oligonucleotide
ucccuccaauauaugcaug

SEQ ID NO: 2530392 - RNA, 19 nt, Artificial Sequence
  Description of Artificial Sequence: Synthetic oligonucleotide
ugugaugguugugauucuc

SEQ ID NO: 2530393 - RNA, 19 nt, Artificial Sequence
  Description of Artificial Sequence: Synthetic oligonucleotide
guuggaagcaauccacugu

SEQ ID NO: 2530394 - RNA, 19 nt, Artificial Sequence
  Description of Artificial Sequence: Synthetic oligonucleotide
acacuuggucuaccaauga

SEQ ID NO: 2530395 - RNA, 19 nt, Artificial Sequence
  Description of Artificial Sequence: Synthetic oligonucleotide
uggaacagcaugcguucau

SEQ ID NO: 2530396 - RNA, 19 nt, Artificial Sequence
  Description of Artificial Sequence: Synthetic oligonucleotide
cauuguaucuguugaagau

SEQ ID NO: 2530397 - RNA, 19 nt, Artificial Sequence
  Description of Artificial Sequence: Synthetic oligonucleotide
uaacaugaucggucuuugu

SEQ ID NO: 2530398 - RNA, 19 nt, Artificial Sequence
  Description of Artificial Sequence: Synthetic oligonucleotide
ucugguaggugaugagaua

SEQ ID NO: 2530399 - RNA, 19 nt, Artificial Sequence
  Description of Artificial Sequence: Synthetic oligonucleotide
gaauccgaaugacauugua

SEQ ID NO: 2530400 - RNA, 19 nt, Artificial Sequence
  Description of Artificial Sequence: Synthetic oligonucleotide
cagaaaagcauuugucugu

SEQ ID NO: 2530401 - RNA, 19 nt, Artificial Sequence
  Description of Artificial Sequence: Synthetic oligonucleotide
aucugguaggugaugagau

SEQ ID NO: 2530402 - RNA, 19 nt, Artificial Sequence
  Description of Artificial Sequence: Synthetic oligonucleotide
guguucucgaauaguacuc

SEQ ID NO: 2530403 - RNA, 19 nt, Artificial Sequence
  Description of Artificial Sequence: Synthetic oligonucleotide
cuccuccaaucccauaaac

SEQ ID NO: 2530404 - RNA, 19 nt, Artificial Sequence
  Description of Artificial Sequence: Synthetic oligonucleotide
gaaaagcauuugucuguga

SEQ ID NO: 2530405 - RNA, 19 nt, Artificial Sequence
  Description of Artificial Sequence: Synthetic oligonucleotide
gacuucccaagugucacuc

SEQ ID NO: 2530406 - RNA, 19 nt, Artificial Sequence
  Description of Artificial Sequence: Synthetic oligonucleotide
agcgugggccauuuucaug

SEQ ID NO: 2530407 - RNA, 19 nt, Artificial Sequence
  Description of Artificial Sequence: Synthetic oligonucleotide
ccaagugucacucuacaga

SEQ ID NO: 2530408 - RNA, 19 nt, Artificial Sequence
  Description of Artificial Sequence: Synthetic oligonucleotide
uccaaacaucccuccaaua

SEQ ID NO: 2530409 - RNA, 19 nt, Artificial Sequence
  Description of Artificial Sequence: Synthetic oligonucleotide
uauaugcaugucguucauc

SEQ ID NO: 2530410 - RNA, 19 nt, Artificial Sequence
  Description of Artificial Sequence: Synthetic oligonucleotide
uggaagcaauccacuguaa

SEQ ID NO: 2530411 - RNA, 19 nt, Artificial Sequence
  Description of Artificial Sequence: Synthetic oligonucleotide
aacaucccuccaauauaug

SEQ ID NO: 2530412 - RNA, 19 nt, Artificial Sequence
  Description of Artificial Sequence: Synthetic oligonucleotide
gauaugccuguucuccucu

SEQ ID NO: 2530413 - RNA, 19 nt, Artificial Sequence
  Description of Artificial Sequence: Synthetic oligonucleotide
auaugccuguucuccucug

SEQ ID NO: 2530414 - RNA, 19 nt, Artificial Sequence
  Description of Artificial Sequence: Synthetic oligonucleotide
gaauaguacucugcaucuc

SEQ ID NO: 2530415 - RNA, 19 nt, Artificial Sequence
  Description of Artificial Sequence: Synthetic oligonucleotide
ugcugucugugaaggggcu

SEQ ID NO: 2530416 - RNA, 19 nt, Artificial Sequence
  Description of Artificial Sequence: Synthetic oligonucleotide
gugcugaauugcagaaagg

SEQ ID NO: 2530417 - RNA, 19 nt, Artificial Sequence
  Description of Artificial Sequence: Synthetic oligonucleotide
auauaacaugaucggucuu

SEQ ID NO: 2530418 - RNA, 19 nt, Artificial Sequence
  Description of Artificial Sequence: Synthetic oligonucleotide
gccauuuucauggugcuga

SEQ ID NO: 2530419 - RNA, 19 nt, Artificial Sequence
  Description of Artificial Sequence: Synthetic oligonucleotide
agcuccaaacaucccucca

SEQ ID NO: 2530420 - RNA, 19 nt, Artificial Sequence
  Description of Artificial Sequence: Synthetic oligonucleotide
gcugaauugcagaaaggac

SEQ ID NO: 2530421 - RNA, 19 nt, Artificial Sequence
  Description of Artificial Sequence: Synthetic oligonucleotide
cuaccaaugacugaaugau

SEQ ID NO: 2530422 - RNA, 19 nt, Artificial Sequence
  Description of Artificial Sequence: Synthetic oligonucleotide
gguaggugaugagauauuc

SEQ ID NO: 2530423 - RNA, 19 nt, Artificial Sequence
  Description of Artificial Sequence: Synthetic oligonucleotide
augaucggucuuugugugu

SEQ ID NO: 2530424 - RNA, 19 nt, Artificial Sequence
  Description of Artificial Sequence: Synthetic oligonucleotide
cauauauaacaugaucggu

SEQ ID NO: 2530425 - RNA, 19 nt, Artificial Sequence
  Description of Artificial Sequence: Synthetic oligonucleotide
gugucacucuacagaaaag

SEQ ID NO: 2530426 - RNA, 19 nt, Artificial Sequence
  Description of Artificial Sequence: Synthetic oligonucleotide
uugugaugguugugauucu

SEQ ID NO: 2530427 - RNA, 19 nt, Artificial Sequence
  Description of Artificial Sequence: Synthetic oligonucleotide
ugguaggugaugagauauu

SEQ ID NO: 2530428 - RNA, 19 nt, Artificial Sequence
  Description of Artificial Sequence: Synthetic oligonucleotide
accguggaacagcaugcgu

SEQ ID NO: 2530429 - RNA, 19 nt, Artificial Sequence
  Description of Artificial Sequence: Synthetic oligonucleotide
gcguucauugugaugguug

SEQ ID NO: 2530430 - RNA, 19 nt, Artificial Sequence
  Description of Artificial Sequence: Synthetic oligonucleotide
gguugugauucucuucaga

SEQ ID NO: 2530431 - RNA, 19 nt, Artificial Sequence
  Description of Artificial Sequence: Synthetic oligonucleotide
gcauaugccagcccauuga

SEQ ID NO: 2530432 - RNA, 19 nt, Artificial Sequence
  Description of Artificial Sequence: Synthetic oligonucleotide
cugugacagaaccgcuccc

SEQ ID NO: 2530433 - RNA, 19 nt, Artificial Sequence
  Description of Artificial Sequence: Synthetic oligonucleotide
cugucugugaaggggcuuc

SEQ ID NO: 2530434 - RNA, 19 nt, Artificial Sequence
  Description of Artificial Sequence: Synthetic oligonucleotide
guucauugugaugguugug

SEQ ID NO: 2530435 - RNA, 19 nt, Artificial Sequence
  Description of Artificial Sequence: Synthetic oligonucleotide
augagauauucuggauaug

SEQ ID NO: 2530436 - RNA, 19 nt, Artificial Sequence
  Description of Artificial Sequence: Synthetic oligonucleotide
caauccacuguaauccagu

SEQ ID NO: 2530437 - RNA, 19 nt, Artificial Sequence
  Description of Artificial Sequence: Synthetic oligonucleotide
ccgaaugacauuguaucug

SEQ ID NO: 2530438 - RNA, 19 nt, Artificial Sequence
  Description of Artificial Sequence: Synthetic oligonucleotide
agcaugcguucauugugau

SEQ ID NO: 2530439 - RNA, 19 nt, Artificial Sequence
  Description of Artificial Sequence: Synthetic oligonucleotide
uccuuuugucugugacaga

SEQ ID NO: 2530440 - RNA, 19 nt, Artificial Sequence
  Description of Artificial Sequence: Synthetic oligonucleotide
gaauugcagaaaggacuuc

SEQ ID NO: 2530441 - RNA, 19 nt, Artificial Sequence
  Description of Artificial Sequence: Synthetic oligonucleotide
cauugacacuuggucuacc

SEQ ID NO: 2530442 - RNA, 19 nt, Artificial Sequence
  Description of Artificial Sequence: Synthetic oligonucleotide
ugccagcccauugacacuu

SEQ ID NO: 2530443 - RNA, 19 nt, Artificial Sequence
  Description of Artificial Sequence: Synthetic oligonucleotide
ucacucuagugaugcuuua

SEQ ID NO: 2530444 - RNA, 19 nt, Artificial Sequence
  Description of Artificial Sequence: Synthetic oligonucleotide
uggugcugaauugcagaaa

SEQ ID NO: 2530445 - RNA, 19 nt, Artificial Sequence
  Description of Artificial Sequence: Synthetic oligonucleotide
gugggccauuuucauggug

SEQ ID NO: 2530446 - RNA, 19 nt, Artificial Sequence
  Description of Artificial Sequence: Synthetic oligonucleotide
agaaccgcucccucagcuu

SEQ ID NO: 2530447 - RNA, 19 nt, Artificial Sequence
  Description of Artificial Sequence: Synthetic oligonucleotide
ggauaugccuguucuccuc

SEQ ID NO: 2530448 - RNA, 19 nt, Artificial Sequence
  Description of Artificial Sequence: Synthetic oligonucleotide
uucugcucugcggcuguug

SEQ ID NO: 2530449 - RNA, 19 nt, Artificial Sequence
  Description of Artificial Sequence: Synthetic oligonucleotide
acucuacagaaaagcauuu

SEQ ID NO: 2530450 - RNA, 19 nt, Artificial Sequence
  Description of Artificial Sequence: Synthetic oligonucleotide
aagugucacucuacagaaa

SEQ ID NO: 2530451 - RNA, 19 nt, Artificial Sequence
  Description of Artificial Sequence: Synthetic oligonucleotide
agggcagucacuaggucuu

SEQ ID NO: 2530452 - RNA, 19 nt, Artificial Sequence
  Description of Artificial Sequence: Synthetic oligonucleotide
gcaugucguucaucaaacc

SEQ ID NO: 2530453 - RNA, 19 nt, Artificial Sequence
  Description of Artificial Sequence: Synthetic oligonucleotide
augccagcccauugacacu

SEQ ID NO: 2530454 - RNA, 19 nt, Artificial Sequence
  Description of Artificial Sequence: Synthetic oligonucleotide
ccaaugacugaaugauguc

SEQ ID NO: 2530455 - RNA, 19 nt, Artificial Sequence
  Description of Artificial Sequence: Synthetic oligonucleotide
augcguucauugugauggu

SEQ ID NO: 2530456 - RNA, 19 nt, Artificial Sequence
  Description of Artificial Sequence: Synthetic oligonucleotide
cccaagugucacucuacag

SEQ ID NO: 2530457 - RNA, 19 nt, Artificial Sequence
  Description of Artificial Sequence: Synthetic oligonucleotide
cucugcaucucuucuucua

SEQ ID NO: 2530458 - RNA, 19 nt, Artificial Sequence
  Description of Artificial Sequence: Synthetic oligonucleotide
auaguacucugcaucucuu

SEQ ID NO: 2530459 - RNA, 19 nt, Artificial Sequence
  Description of Artificial Sequence: Synthetic oligonucleotide
guaggugaugagauauucu

SEQ ID NO: 2530460 - RNA, 19 nt, Artificial Sequence
  Description of Artificial Sequence: Synthetic oligonucleotide
cugguaggugaugagauau

SEQ ID NO: 2530461 - RNA, 19 nt, Artificial Sequence
  Description of Artificial Sequence: Synthetic oligonucleotide
ggucuuugugugugggaca

SEQ ID NO: 2530462 - RNA, 19 nt, Artificial Sequence
  Description of Artificial Sequence: Synthetic oligonucleotide
acacuuccuuuugucugug

SEQ ID NO: 2530463 - RNA, 19 nt, Artificial Sequence
  Description of Artificial Sequence: Synthetic oligonucleotide
gugaugagauauucuggau

SEQ ID NO: 2530464 - RNA, 19 nt, Artificial Sequence
  Description of Artificial Sequence: Synthetic oligonucleotide
uugacucacucuggccuuc

SEQ ID NO: 2530465 - RNA, 19 nt, Artificial Sequence
  Description of Artificial Sequence: Synthetic oligonucleotide
ggagcgugggccauuuuca

SEQ ID NO: 2530466 - RNA, 19 nt, Artificial Sequence
  Description of Artificial Sequence: Synthetic oligonucleotide
gacucacucuggccuucac

SEQ ID NO: 2530467 - RNA, 19 nt, Artificial Sequence
  Description of Artificial Sequence: Synthetic oligonucleotide
ugacucacucuggccuuca

SEQ ID NO: 2530468 - RNA, 19 nt, Artificial Sequence
  Description of Artificial Sequence: Synthetic oligonucleotide
gcuccaaacaucccuccaa

SEQ ID NO: 2530469 - RNA, 19 nt, Artificial Sequence
  Description of Artificial Sequence: Synthetic oligonucleotide
gcaucucuucuucuacuga

SEQ ID NO: 2530470 - RNA, 19 nt, Artificial Sequence
  Description of Artificial Sequence: Synthetic oligonucleotide
gcaugcguucauugugaug

SEQ ID NO: 2530471 - RNA, 19 nt, Artificial Sequence
  Description of Artificial Sequence: Synthetic oligonucleotide
cagcauucccaccaucucu

SEQ ID NO: 2530472 - RNA, 19 nt, Artificial Sequence
  Description of Artificial Sequence: Synthetic oligonucleotide
agcauuugucugugacaua

SEQ ID NO: 2530473 - RNA, 19 nt, Artificial Sequence
  Description of Artificial Sequence: Synthetic oligonucleotide
ggagaaccguggaacagca

SEQ ID NO: 2530474 - RNA, 19 nt, Artificial Sequence
  Description of Artificial Sequence: Synthetic oligonucleotide
ugcguucauugugaugguu

SEQ ID NO: 2530475 - RNA, 19 nt, Artificial Sequence
  Description of Artificial Sequence: Synthetic oligonucleotide
ggaagcaauccacuguaau

SEQ ID NO: 2530476 - RNA, 19 nt, Artificial Sequence
  Description of Artificial Sequence: Synthetic oligonucleotide
gccuguucuccucuguaga

SEQ ID NO: 2530477 - RNA, 19 nt, Artificial Sequence
  Description of Artificial Sequence: Synthetic oligonucleotide
cguggaacagcaugcguuc

SEQ ID NO: 2530478 - RNA, 19 nt, Artificial Sequence
  Description of Artificial Sequence: Synthetic oligonucleotide
cagaaaggacuucccaagu

SEQ ID NO: 2530479 - RNA, 19 nt, Artificial Sequence
  Description of Artificial Sequence: Synthetic oligonucleotide
aaccgcucccucagcuucu

SEQ ID NO: 2530480 - RNA, 19 nt, Artificial Sequence
  Description of Artificial Sequence: Synthetic oligonucleotide
cuggcuucaugaucuggua

SEQ ID NO: 2530481 - RNA, 19 nt, Artificial Sequence
  Description of Artificial Sequence: Synthetic oligonucleotide
gugacauauauaacaugau

SEQ ID NO: 2530482 - RNA, 19 nt, Artificial Sequence
  Description of Artificial Sequence: Synthetic oligonucleotide
gcuuaguucuuggcuguug

SEQ ID NO: 2530483 - RNA, 19 nt, Artificial Sequence
  Description of Artificial Sequence: Synthetic oligonucleotide
ggguucagagaauauguuu

SEQ ID NO: 2530484 - RNA, 19 nt, Artificial Sequence
  Description of Artificial Sequence: Synthetic oligonucleotide
cauuugucugugacauaua

SEQ ID NO: 2530485 - RNA, 19 nt, Artificial Sequence
  Description of Artificial Sequence: Synthetic oligonucleotide
cuguuggguucagagaaua

SEQ ID NO: 2530486 - RNA, 19 nt, Artificial Sequence
  Description of Artificial Sequence: Synthetic oligonucleotide
ccaaacaucccuccaauau

SEQ ID NO: 2530487 - RNA, 19 nt, Artificial Sequence
  Description of Artificial Sequence: Synthetic oligonucleotide
cauaaacauacugguugcu

SEQ ID NO: 2530488 - RNA, 19 nt, Artificial Sequence
  Description of Artificial Sequence: Synthetic oligonucleotide
cucgaauaguacucugcau

SEQ ID NO: 2530489 - RNA, 19 nt, Artificial Sequence
  Description of Artificial Sequence: Synthetic oligonucleotide
cccauugacacuuggucua

SEQ ID NO: 2530490 - RNA, 19 nt, Artificial Sequence
  Description of Artificial Sequence: Synthetic oligonucleotide
caguugcagguuugacuca

SEQ ID NO: 2530491 - RNA, 19 nt, Artificial Sequence
  Description of Artificial Sequence: Synthetic oligonucleotide
cagcuuaguucuuggcugu

SEQ ID NO: 2530492 - RNA, 19 nt, Artificial Sequence
  Description of Artificial Sequence: Synthetic oligonucleotide
cuccaaacaucccuccaau

SEQ ID NO: 2530493 - RNA, 19 nt, Artificial Sequence
  Description of Artificial Sequence: Synthetic oligonucleotide
cucugcggcuguugcuguc

SEQ ID NO: 2530494 - RNA, 19 nt, Artificial Sequence
  Description of Artificial Sequence: Synthetic oligonucleotide
cauugugaugguugugauu

SEQ ID NO: 2530495 - RNA, 19 nt, Artificial Sequence
  Description of Artificial Sequence: Synthetic oligonucleotide
cggucuuugugugugggac

SEQ ID NO: 2530496 - RNA, 19 nt, Artificial Sequence
  Description of Artificial Sequence: Synthetic oligonucleotide
cgaauaguacucugcaucu

SEQ ID NO: 2530497 - RNA, 19 nt, Artificial Sequence
  Description of Artificial Sequence: Synthetic oligonucleotide
cacuuccuuuugucuguga

SEQ ID NO: 2530498 - RNA, 19 nt, Artificial Sequence
  Description of Artificial Sequence: Synthetic oligonucleotide
caucucuguguucucgaau

SEQ ID NO: 2530499 - RNA, 19 nt, Artificial Sequence
  Description of Artificial Sequence: Synthetic oligonucleotide
ccuccaauauaugcauguc

SEQ ID NO: 2530500 - RNA, 19 nt, Artificial Sequence
  Description of Artificial Sequence: Synthetic oligonucleotide
cucuguguucucgaauagu

SEQ ID NO: 2530501 - RNA, 19 nt, Artificial Sequence
  Description of Artificial Sequence: Synthetic oligonucleotide
ggccauuuucauggugcug

SEQ ID NO: 2530502 - RNA, 19 nt, Artificial Sequence
  Description of Artificial Sequence: Synthetic oligonucleotide
gagcgugggccauuuucau

SEQ ID NO: 2530503 - RNA, 19 nt, Artificial Sequence
  Description of Artificial Sequence: Synthetic oligonucleotide
cagcccauugacacuuggu

SEQ ID NO: 2530504 - RNA, 19 nt, Artificial Sequence
  Description of Artificial Sequence: Synthetic oligonucleotide
cgaaugacauuguaucugu

SEQ ID NO: 2530505 - RNA, 19 nt, Artificial Sequence
  Description of Artificial Sequence: Synthetic oligonucleotide
ccauugacacuuggucuac

SEQ ID NO: 2530506 - RNA, 19 nt, Artificial Sequence
  Description of Artificial Sequence: Synthetic oligonucleotide
agcuuaguucuuggcuguu

SEQ ID NO: 2530507 - RNA, 19 nt, Artificial Sequence
  Description of Artificial Sequence: Synthetic oligonucleotide
gugauucucuucagacacu

SEQ ID NO: 2530508 - RNA, 19 nt, Artificial Sequence
  Description of Artificial Sequence: Synthetic oligonucleotide
cuccucuguagaugacaua

SEQ ID NO: 2530509 - RNA, 19 nt, Artificial Sequence
  Description of Artificial Sequence: Synthetic oligonucleotide
caaacccuuuaugaauaau

SEQ ID NO: 2530510 - RNA, 19 nt, Artificial Sequence
  Description of Artificial Sequence: Synthetic oligonucleotide
gugggacagccuguuccuc

SEQ ID NO: 2530511 - RNA, 19 nt, Artificial Sequence
  Description of Artificial Sequence: Synthetic oligonucleotide
uggaggagcgugggccauu

SEQ ID NO: 2530512 - RNA, 19 nt, Artificial Sequence
  Description of Artificial Sequence: Synthetic oligonucleotide
ccacuguaauccaguugca

SEQ ID NO: 2530513 - RNA, 19 nt, Artificial Sequence
  Description of Artificial Sequence: Synthetic oligonucleotide
gacaaacagcuuaguucuu

SEQ ID NO: 2530514 - RNA, 19 nt, Artificial Sequence
  Description of Artificial Sequence: Synthetic oligonucleotide
ggacuucccaagugucacu

SEQ ID NO: 2530515 - RNA, 19 nt, Artificial Sequence
  Description of Artificial Sequence: Synthetic oligonucleotide
guugcagguuugacucacu

SEQ ID NO: 2530516 - RNA, 19 nt, Artificial Sequence
  Description of Artificial Sequence: Synthetic oligonucleotide
ccaucucuguguucucgaa

SEQ ID NO: 2530517 - RNA, 19 nt, Artificial Sequence
  Description of Artificial Sequence: Synthetic oligonucleotide
ccguggaacagcaugcguu

SEQ ID NO: 2530518 - RNA, 19 nt, Artificial Sequence
  Description of Artificial Sequence: Synthetic oligonucleotide
cauuuucauggugcugaau

SEQ ID NO: 2530519 - RNA, 19 nt, Artificial Sequence
  Description of Artificial Sequence: Synthetic oligonucleotide
ccaauauaugcaugucguu

SEQ ID NO: 2530520 - RNA, 19 nt, Artificial Sequence
  Description of Artificial Sequence: Synthetic oligonucleotide
ccuguucuccucuguagau

SEQ ID NO: 2530521 - RNA, 19 nt, Artificial Sequence
  Description of Artificial Sequence: Synthetic oligonucleotide
ggaacagcaugcguucauu

SEQ ID NO: 2530522 - RNA, 19 nt, Artificial Sequence
  Description of Artificial Sequence: Synthetic oligonucleotide
ccucuguagaugacauacu

SEQ ID NO: 2530523 - RNA, 19 nt, Artificial Sequence
  Description of Artificial Sequence: Synthetic oligonucleotide
gagaaccguggaacagcau

SEQ ID NO: 2530524 - RNA, 19 nt, Artificial Sequence
  Description of Artificial Sequence: Synthetic oligonucleotide
gggcuucuggcuucaugau

SEQ ID NO: 2530525 - RNA, 19 nt, Artificial Sequence
  Description of Artificial Sequence: Synthetic oligonucleotide
gcauucccaccaucucugu

SEQ ID NO: 2530526 - RNA, 19 nt, Artificial Sequence
  Description of Artificial Sequence: Synthetic oligonucleotide
accgcucccucagcuucuu

SEQ ID NO: 2530527 - RNA, 19 nt, Artificial Sequence
  Description of Artificial Sequence: Synthetic oligonucleotide
cagcauaugccagcccauu

SEQ ID NO: 2530528 - RNA, 19 nt, Artificial Sequence
  Description of Artificial Sequence: Synthetic oligonucleotide
ggcagucacuaggucuucu

SEQ ID NO: 2530529 - RNA, 19 nt, Artificial Sequence
  Description of Artificial Sequence: Synthetic oligonucleotide
ggucuaccaaugacugaau

SEQ ID NO: 2530530 - RNA, 19 nt, Artificial Sequence
  Description of Artificial Sequence: Synthetic oligonucleotide
ccaaucccauaaacauacu

SEQ ID NO: 2530531 - RNA, 19 nt, Artificial Sequence
  Description of Artificial Sequence: Synthetic oligonucleotide
gggcagucacuaggucuuc

SEQ ID NO: 2530532 - RNA, 19 nt, Artificial Sequence
  Description of Artificial Sequence: Synthetic oligonucleotide
cgcucccucagcuucuugu

SEQ ID NO: 2530533 - RNA, 19 nt, Artificial Sequence
  Description of Artificial Sequence: Synthetic oligonucleotide
gcucugcggcuguugcugu

SEQ ID NO: 2530534 - RNA, 19 nt, Artificial Sequence
  Description of Artificial Sequence: Synthetic oligonucleotide
gaggagcgugggccauuuu

SEQ ID NO: 2530535 - RNA, 19 nt, Artificial Sequence
  Description of Artificial Sequence: Synthetic oligonucleotide
ggaggagcgugggccauuu

SEQ ID NO: 2530536 - RNA, 19 nt, Artificial Sequence
  Description of Artificial Sequence: Synthetic oligonucleotide
ccgcucccucagcuucuug

SEQ ID NO: 2530537 - RNA, 19 nt, Artificial Sequence
  Description of Artificial Sequence: Synthetic oligonucleotide
gcugucugugaaggggcuu

SEQ ID NO: 2530538 - RNA, 19 nt, Artificial Sequence
  Description of Artificial Sequence: Synthetic oligonucleotide
cgugggccauuuucauggu

SEQ ID NO: 2530539 - RNA, 19 nt, Artificial Sequence
  Description of Artificial Sequence: Synthetic oligonucleotide
uuaucaaaaucaacgagcg

SEQ ID NO: 2530540 - RNA, 19 nt, Artificial Sequence
  Description of Artificial Sequence: Synthetic oligonucleotide
aaaggcauaugccacuacc

SEQ ID NO: 2530541 - RNA, 19 nt, Artificial Sequence
  Description of Artificial Sequence: Synthetic oligonucleotide
uaggauuaaaggcauaugc

SEQ ID NO: 2530542 - RNA, 19 nt, Artificial Sequence
  Description of Artificial Sequence: Synthetic oligonucleotide
gugguuaucaaaaucaacg

SEQ ID NO: 2530543 - RNA, 19 nt, Artificial Sequence
  Description of Artificial Sequence: Synthetic oligonucleotide
ugcucauauacauggaucg

SEQ ID NO: 2530544 - RNA, 19 nt, Artificial Sequence
  Description of Artificial Sequence: Synthetic oligonucleotide
uuagcuugauaauagccgg

SEQ ID NO: 2530545 - RNA, 19 nt, Artificial Sequence
  Description of Artificial Sequence: Synthetic oligonucleotide
auacauggaucguaggugc

SEQ ID NO: 2530546 - RNA, 19 nt, Artificial Sequence
  Description of Artificial Sequence: Synthetic oligonucleotide
ugcaccaugagucaaucag

SEQ ID NO: 2530547 - RNA, 19 nt, Artificial Sequence
  Description of Artificial Sequence: Synthetic oligonucleotide
acuaccaccucuuauuuuc

SEQ ID NO: 2530548 - RNA, 19 nt, Artificial Sequence
  Description of Artificial Sequence: Synthetic oligonucleotide
gagucaaucagggugagcg

SEQ ID NO: 2530549 - RNA, 19 nt, Artificial Sequence
  Description of Artificial Sequence: Synthetic oligonucleotide
aggagugaugcugagaucc

SEQ ID NO: 2530550 - RNA, 19 nt, Artificial Sequence
  Description of Artificial Sequence: Synthetic oligonucleotide
ucucuuugcaccaugaguc

SEQ ID NO: 2530551 - RNA, 19 nt, Artificial Sequence
  Description of Artificial Sequence: Synthetic oligonucleotide
guuaucaaaaucaacgagc

SEQ ID NO: 2530552 - RNA, 19 nt, Artificial Sequence
  Description of Artificial Sequence: Synthetic oligonucleotide
ucauauacauggaucguag

SEQ ID NO: 2530553 - RNA, 19 nt, Artificial Sequence
  Description of Artificial Sequence: Synthetic oligonucleotide
auuagcuugauaauagccg

SEQ ID NO: 2530554 - RNA, 19 nt, Artificial Sequence
  Description of Artificial Sequence: Synthetic oligonucleotide
auagccggcgauuacauag

SEQ ID NO: 2530555 - RNA, 19 nt, Artificial Sequence
  Description of Artificial Sequence: Synthetic oligonucleotide
auagagaccagacugcucu

SEQ ID NO: 2530556 - RNA, 19 nt, Artificial Sequence
  Description of Artificial Sequence: Synthetic oligonucleotide
ugcuuuguugaucucgggg

SEQ ID NO: 2530557 - RNA, 19 nt, Artificial Sequence
  Description of Artificial Sequence: Synthetic oligonucleotide
ucucauggugcucauauac

SEQ ID NO: 2530558 - RNA, 19 nt, Artificial Sequence
  Description of Artificial Sequence: Synthetic oligonucleotide
uacauaguuguucucuuug

SEQ ID NO: 2530559 - RNA, 19 nt, Artificial Sequence
  Description of Artificial Sequence: Synthetic oligonucleotide
acgagcguuucauaggagc

SEQ ID NO: 2530560 - RNA, 19 nt, Artificial Sequence
  Description of Artificial Sequence: Synthetic oligonucleotide
agaacugcuuuguugaucu

SEQ ID NO: 2530561 - RNA, 19 nt, Artificial Sequence
  Description of Artificial Sequence: Synthetic oligonucleotide
uauacauggaucguaggug

SEQ ID NO: 2530562 - RNA, 19 nt, Artificial Sequence
  Description of Artificial Sequence: Synthetic oligonucleotide
ucaacgagcguuucauagg

SEQ ID NO: 2530563 - RNA, 19 nt, Artificial Sequence
  Description of Artificial Sequence: Synthetic oligonucleotide
uaguuguucucuuugcacc

SEQ ID NO: 2530564 - RNA, 19 nt, Artificial Sequence
  Description of Artificial Sequence: Synthetic oligonucleotide
aacugcuuuguugaucucg

SEQ ID NO: 2530565 - RNA, 19 nt, Artificial Sequence
  Description of Artificial Sequence: Synthetic oligonucleotide
acgaagagaguauggcugc

SEQ ID NO: 2530566 - RNA, 19 nt, Artificial Sequence
  Description of Artificial Sequence: Synthetic oligonucleotide
aaaaucaacgagcguuuca

SEQ ID NO: 2530567 - RNA, 19 nt, Artificial Sequence
  Description of Artificial Sequence: Synthetic oligonucleotide
auuaugagugcagugucac

SEQ ID NO: 2530568 - RNA, 19 nt, Artificial Sequence
  Description of Artificial Sequence: Synthetic oligonucleotide
ugguuaucaaaaucaacga

SEQ ID NO: 2530569 - RNA, 19 nt, Artificial Sequence
  Description of Artificial Sequence: Synthetic oligonucleotide
uggguggucagcuucacgc

SEQ ID NO: 2530570 - RNA, 19 nt, Artificial Sequence
  Description of Artificial Sequence: Synthetic oligonucleotide
aucaaaaucaacgagcguu

SEQ ID NO: 2530571 - RNA, 19 nt, Artificial Sequence
  Description of Artificial Sequence: Synthetic oligonucleotide
ccgaaugucauccaggugg

SEQ ID NO: 2530572 - RNA, 19 nt, Artificial Sequence
  Description of Artificial Sequence: Synthetic oligonucleotide
acgcucauuagcuugauaa

SEQ ID NO: 2530573 - RNA, 19 nt, Artificial Sequence
  Description of Artificial Sequence: Synthetic oligonucleotide
ucugcuaccugguuugggc

SEQ ID NO: 2530574 - RNA, 19 nt, Artificial Sequence
  Description of Artificial Sequence: Synthetic oligonucleotide
agugcggguacuuggcgcc

SEQ ID NO: 2530575 - RNA, 19 nt, Artificial Sequence
  Description of Artificial Sequence: Synthetic oligonucleotide
caguccaucgugaacuugg

SEQ ID NO: 2530576 - RNA, 19 nt, Artificial Sequence
  Description of Artificial Sequence: Synthetic oligonucleotide
cacgaagagaguauggcug

SEQ ID NO: 2530577 - RNA, 19 nt, Artificial Sequence
  Description of Artificial Sequence: Synthetic oligonucleotide
gguuuguccagucauuccg

SEQ ID NO: 2530578 - RNA, 19 nt, Artificial Sequence
  Description of Artificial Sequence: Synthetic oligonucleotide
aaaucaacgagcguuucau

SEQ ID NO: 2530579 - RNA, 19 nt, Artificial Sequence
  Description of Artificial Sequence: Synthetic oligonucleotide
caccaugagucaaucaggg

SEQ ID NO: 2530580 - RNA, 19 nt, Artificial Sequence
  Description of Artificial Sequence: Synthetic oligonucleotide
aggcauaugccacuaccac

SEQ ID NO: 2530581 - RNA, 19 nt, Artificial Sequence
  Description of Artificial Sequence: Synthetic oligonucleotide
acaguagucguaguguggg

SEQ ID NO: 2530582 - RNA, 19 nt, Artificial Sequence
  Description of Artificial Sequence: Synthetic oligonucleotide
uugaucucgggguuugucc

SEQ ID NO: 2530583 - RNA, 19 nt, Artificial Sequence
  Description of Artificial Sequence: Synthetic oligonucleotide
uccaccauuaugagugcag

SEQ ID NO: 2530584 - RNA, 19 nt, Artificial Sequence
  Description of Artificial Sequence: Synthetic oligonucleotide
caggugguuaucaaaauca

SEQ ID NO: 2530585 - RNA, 19 nt, Artificial Sequence
  Description of Artificial Sequence: Synthetic oligonucleotide
uugcaguaggccugggugg

SEQ ID NO: 2530586 - RNA, 19 nt, Artificial Sequence
  Description of Artificial Sequence: Synthetic oligonucleotide
gucauuccgaaugucaucc

SEQ ID NO: 2530587 - RNA, 19 nt, Artificial Sequence
  Description of Artificial Sequence: Synthetic oligonucleotide
gagaguauggcugcccgcg

SEQ ID NO: 2530588 - RNA, 19 nt, Artificial Sequence
  Description of Artificial Sequence: Synthetic oligonucleotide
ucacaguagucguagugug

SEQ ID NO: 2530589 - RNA, 19 nt, Artificial Sequence
  Description of Artificial Sequence: Synthetic oligonucleotide
aguauggcugcccgcgccc

SEQ ID NO: 2530590 - RNA, 19 nt, Artificial Sequence
  Description of Artificial Sequence: Synthetic oligonucleotide
uucacaguagucguagugu

SEQ ID NO: 2530591 - RNA, 19 nt, Artificial Sequence
  Description of Artificial Sequence: Synthetic oligonucleotide
ucacacgcucauuagcuug

SEQ ID NO: 2530592 - RNA, 19 nt, Artificial Sequence
  Description of Artificial Sequence: Synthetic oligonucleotide
ucauggugcucauauacau

SEQ ID NO: 2530593 - RNA, 19 nt, Artificial Sequence
  Description of Artificial Sequence: Synthetic oligonucleotide
agagaguauggcugcccgc

SEQ ID NO: 2530594 - RNA, 19 nt, Artificial Sequence
  Description of Artificial Sequence: Synthetic oligonucleotide
agcuugauaauagccggcg

SEQ ID NO: 2530595 - RNA, 19 nt, Artificial Sequence
  Description of Artificial Sequence: Synthetic oligonucleotide
cuuggcgccguguagcacc

SEQ ID NO: 2530596 - RNA, 19 nt, Artificial Sequence
  Description of Artificial Sequence: Synthetic oligonucleotide
agcguuucauaggagcggc

SEQ ID NO: 2530597 - RNA, 19 nt, Artificial Sequence
  Description of Artificial Sequence: Synthetic oligonucleotide
uccacgaagagaguauggc

SEQ ID NO: 2530598 - RNA, 19 nt, Artificial Sequence
  Description of Artificial Sequence: Synthetic oligonucleotide
accauuaugagugcagugu

SEQ ID NO: 2530599 - RNA, 19 nt, Artificial Sequence
  Description of Artificial Sequence: Synthetic oligonucleotide
ucgccaccuguucucaugg

SEQ ID NO: 2530600 - RNA, 19 nt, Artificial Sequence
  Description of Artificial Sequence: Synthetic oligonucleotide
aguagucguaguguggguc

SEQ ID NO: 2530601 - RNA, 19 nt, Artificial Sequence
  Description of Artificial Sequence: Synthetic oligonucleotide
ugaucucgggguuugucca

SEQ ID NO: 2530602 - RNA, 19 nt, Artificial Sequence
  Description of Artificial Sequence: Synthetic oligonucleotide
aguuguucucuuugcacca

SEQ ID NO: 2530603 - RNA, 19 nt, Artificial Sequence
  Description of Artificial Sequence: Synthetic oligonucleotide
gauaauagccggcgauuac

SEQ ID NO: 2530604 - RNA, 19 nt, Artificial Sequence
  Description of Artificial Sequence: Synthetic oligonucleotide
caugagucaaucaggguga

SEQ ID NO: 2530605 - RNA, 19 nt, Artificial Sequence
  Description of Artificial Sequence: Synthetic oligonucleotide
aaucagggugagcgccacc

SEQ ID NO: 2530606 - RNA, 19 nt, Artificial Sequence
  Description of Artificial Sequence: Synthetic oligonucleotide
auaauagccggcgauuaca

SEQ ID NO: 2530607 - RNA, 19 nt, Artificial Sequence
  Description of Artificial Sequence: Synthetic oligonucleotide
cuucacaguagucguagug

SEQ ID NO: 2530608 - RNA, 19 nt, Artificial Sequence
  Description of Artificial Sequence: Synthetic oligonucleotide
ccaugagucaaucagggug

SEQ ID NO: 2530609 - RNA, 19 nt, Artificial Sequence
  Description of Artificial Sequence: Synthetic oligonucleotide
gauuacauaguuguucucu

SEQ ID NO: 2530610 - RNA, 19 nt, Artificial Sequence
  Description of Artificial Sequence: Synthetic oligonucleotide
acugcuuuguugaucucgg

SEQ ID NO: 2530611 - RNA, 19 nt, Artificial Sequence
  Description of Artificial Sequence: Synthetic oligonucleotide
uaucaaaaucaacgagcgu

SEQ ID NO: 2530612 - RNA, 19 nt, Artificial Sequence
  Description of Artificial Sequence: Synthetic oligonucleotide
caugcugggaccccuaguc

SEQ ID NO: 2530613 - RNA, 19 nt, Artificial Sequence
  Description of Artificial Sequence: Synthetic oligonucleotide
auuacauaguuguucucuu

SEQ ID NO: 2530614 - RNA, 19 nt, Artificial Sequence
  Description of Artificial Sequence: Synthetic oligonucleotide
uagucuagcacaggugcag

SEQ ID NO: 2530615 - RNA, 19 nt, Artificial Sequence
  Description of Artificial Sequence: Synthetic oligonucleotide
aaggcauaugccacuacca

SEQ ID NO: 2530616 - RNA, 19 nt, Artificial Sequence
  Description of Artificial Sequence: Synthetic oligonucleotide
uagcuugauaauagccggc

SEQ ID NO: 2530617 - RNA, 19 nt, Artificial Sequence
  Description of Artificial Sequence: Synthetic oligonucleotide
cauuccgaaugucauccag

SEQ ID NO: 2530618 - RNA, 19 nt, Artificial Sequence
  Description of Artificial Sequence: Synthetic oligonucleotide
uaauagccggcgauuacau

SEQ ID NO: 2530619 - RNA, 19 nt, Artificial Sequence
  Description of Artificial Sequence: Synthetic oligonucleotide
agaguauggcugcccgcgc

SEQ ID NO: 2530620 - RNA, 19 nt, Artificial Sequence
  Description of Artificial Sequence: Synthetic oligonucleotide
cauuguccaccauuaugag

SEQ ID NO: 2530621 - RNA, 19 nt, Artificial Sequence
  Description of Artificial Sequence: Synthetic oligonucleotide
gaugcaguccacgaagaga

SEQ ID NO: 2530622 - RNA, 19 nt, Artificial Sequence
  Description of Artificial Sequence: Synthetic oligonucleotide
gaucguaggugcugcgcag

SEQ ID NO: 2530623 - RNA, 19 nt, Artificial Sequence
  Description of Artificial Sequence: Synthetic oligonucleotide
gugcagaacugcuuuguug

SEQ ID NO: 2530624 - RNA, 19 nt, Artificial Sequence
  Description of Artificial Sequence: Synthetic oligonucleotide
cauggugcucauauacaug

SEQ ID NO: 2530625 - RNA, 19 nt, Artificial Sequence
  Description of Artificial Sequence: Synthetic oligonucleotide
gagcguuucauaggagcgg

SEQ ID NO: 2530626 - RNA, 19 nt, Artificial Sequence
  Description of Artificial Sequence: Synthetic oligonucleotide
uucaugcugggaccccuag

SEQ ID NO: 2530627 - RNA, 19 nt, Artificial Sequence
  Description of Artificial Sequence: Synthetic oligonucleotide
ucugcaucgccaccuguuc

SEQ ID NO: 2530628 - RNA, 19 nt, Artificial Sequence
  Description of Artificial Sequence: Synthetic oligonucleotide
gucaaucagggugagcgcc

SEQ ID NO: 2530629 - RNA, 19 nt, Artificial Sequence
  Description of Artificial Sequence: Synthetic oligonucleotide
gagaccagacugcucugcc

SEQ ID NO: 2530630 - RNA, 19 nt, Artificial Sequence
  Description of Artificial Sequence: Synthetic oligonucleotide
cauaggagcggcuguccag

SEQ ID NO: 2530631 - RNA, 19 nt, Artificial Sequence
  Description of Artificial Sequence: Synthetic oligonucleotide
ggugcugcgcaguccaucg

SEQ ID NO: 2530632 - RNA, 19 nt, Artificial Sequence
  Description of Artificial Sequence: Synthetic oligonucleotide
ggcauuguccaccauuaug

SEQ ID NO: 2530633 - RNA, 19 nt, Artificial Sequence
  Description of Artificial Sequence: Synthetic oligonucleotide
uagugugggucucugcauc

SEQ ID NO: 2530634 - RNA, 19 nt, Artificial Sequence
  Description of Artificial Sequence: Synthetic oligonucleotide
ugauaauagccggcgauua

SEQ ID NO: 2530635 - RNA, 19 nt, Artificial Sequence
  Description of Artificial Sequence: Synthetic oligonucleotide
ucuagcacaggugcagaac

SEQ ID NO: 2530636 - RNA, 19 nt, Artificial Sequence
  Description of Artificial Sequence: Synthetic oligonucleotide
acugaagcccucagcaauc

SEQ ID NO: 2530637 - RNA, 19 nt, Artificial Sequence
  Description of Artificial Sequence: Synthetic oligonucleotide
cuaccaccucuuauuuucc

SEQ ID NO: 2530638 - RNA, 19 nt, Artificial Sequence
  Description of Artificial Sequence: Synthetic oligonucleotide
auaugccacuaccaccucu

SEQ ID NO: 2530639 - RNA, 19 nt, Artificial Sequence
  Description of Artificial Sequence: Synthetic oligonucleotide
cugguuugggcuggcaucc

SEQ ID NO: 2530640 - RNA, 19 nt, Artificial Sequence
  Description of Artificial Sequence: Synthetic oligonucleotide
cauggaucguaggugcugc

SEQ ID NO: 2530641 - RNA, 19 nt, Artificial Sequence
  Description of Artificial Sequence: Synthetic oligonucleotide
uuaugagugcagugucacu

SEQ ID NO: 2530642 - RNA, 19 nt, Artificial Sequence
  Description of Artificial Sequence: Synthetic oligonucleotide
ugcuaccugguuugggcug

SEQ ID NO: 2530643 - RNA, 19 nt, Artificial Sequence
  Description of Artificial Sequence: Synthetic oligonucleotide
uuuguccagucauuccgaa

SEQ ID NO: 2530644 - RNA, 19 nt, Artificial Sequence
  Description of Artificial Sequence: Synthetic oligonucleotide
uugauaauagccggcgauu

SEQ ID NO: 2530645 - RNA, 19 nt, Artificial Sequence
  Description of Artificial Sequence: Synthetic oligonucleotide
gaucucgggguuuguccag

SEQ ID NO: 2530646 - RNA, 19 nt, Artificial Sequence
  Description of Artificial Sequence: Synthetic oligonucleotide
uucauaggagcggcugucc

SEQ ID NO: 2530647 - RNA, 19 nt, Artificial Sequence
  Description of Artificial Sequence: Synthetic oligonucleotide
augagugcagugucacuga

SEQ ID NO: 2530648 - RNA, 19 nt, Artificial Sequence
  Description of Artificial Sequence: Synthetic oligonucleotide
uuucauaggagcggcuguc

SEQ ID NO: 2530649 - RNA, 19 nt, Artificial Sequence
  Description of Artificial Sequence: Synthetic oligonucleotide
caccauuaugagugcagug

SEQ ID NO: 2530650 - RNA, 19 nt, Artificial Sequence
  Description of Artificial Sequence: Synthetic oligonucleotide
caacgagcguuucauagga

SEQ ID NO: 2530651 - RNA, 19 nt, Artificial Sequence
  Description of Artificial Sequence: Synthetic oligonucleotide
gguggucagcuucacgccg

SEQ ID NO: 2530652 - RNA, 19 nt, Artificial Sequence
  Description of Artificial Sequence: Synthetic oligonucleotide
ucagcuucacgccgggcau

SEQ ID NO: 2530653 - RNA, 19 nt, Artificial Sequence
  Description of Artificial Sequence: Synthetic oligonucleotide
aguccaucgugaacuuggc

SEQ ID NO: 2530654 - RNA, 19 nt, Artificial Sequence
  Description of Artificial Sequence: Synthetic oligonucleotide
aagcccguugaccgcgcag

SEQ ID NO: 2530655 - RNA, 19 nt, Artificial Sequence
  Description of Artificial Sequence: Synthetic oligonucleotide
ugcaucgccaccuguucuc

SEQ ID NO: 2530656 - RNA, 19 nt, Artificial Sequence
  Description of Artificial Sequence: Synthetic oligonucleotide
agugaugcugagauccucu

SEQ ID NO: 2530657 - RNA, 19 nt, Artificial Sequence
  Description of Artificial Sequence: Synthetic oligonucleotide
cagugcggguacuuggcgc

SEQ ID NO: 2530658 - RNA, 19 nt, Artificial Sequence
  Description of Artificial Sequence: Synthetic oligonucleotide
ugagugcagugucacugaa

SEQ ID NO: 2530659 - RNA, 19 nt, Artificial Sequence
  Description of Artificial Sequence: Synthetic oligonucleotide
ugcgcaguccaucgugaac

SEQ ID NO: 2530660 - RNA, 19 nt, Artificial Sequence
  Description of Artificial Sequence: Synthetic oligonucleotide
guucucauggugcucauau

SEQ ID NO: 2530661 - RNA, 19 nt, Artificial Sequence
  Description of Artificial Sequence: Synthetic oligonucleotide
uguccaccauuaugagugc

SEQ ID NO: 2530662 - RNA, 19 nt, Artificial Sequence
  Description of Artificial Sequence: Synthetic oligonucleotide
aauagccggcgauuacaua

SEQ ID NO: 2530663 - RNA, 19 nt, Artificial Sequence
  Description of Artificial Sequence: Synthetic oligonucleotide
auggaucguaggugcugcg

SEQ ID NO: 2530664 - RNA, 19 nt, Artificial Sequence
  Description of Artificial Sequence: Synthetic oligonucleotide
uccaggugguuaucaaaau

SEQ ID NO: 2530665 - RNA, 19 nt, Artificial Sequence
  Description of Artificial Sequence: Synthetic oligonucleotide
gugcucauauacauggauc

SEQ ID NO: 2530666 - RNA, 19 nt, Artificial Sequence
  Description of Artificial Sequence: Synthetic oligonucleotide
cgugccguggaaaagcggg

SEQ ID NO: 2530667 - RNA, 19 nt, Artificial Sequence
  Description of Artificial Sequence: Synthetic oligonucleotide
uggugcucauauacaugga

SEQ ID NO: 2530668 - RNA, 19 nt, Artificial Sequence
  Description of Artificial Sequence: Synthetic oligonucleotide
ugccucucggccaccagaa

SEQ ID NO: 2530669 - RNA, 19 nt, Artificial Sequence
  Description of Artificial Sequence: Synthetic oligonucleotide
guugaccgcgcagugcggg

SEQ ID NO: 2530670 - RNA, 19 nt, Artificial Sequence
  Description of Artificial Sequence: Synthetic oligonucleotide
uggaucguaggugcugcgc

SEQ ID NO: 2530671 - RNA, 19 nt, Artificial Sequence
  Description of Artificial Sequence: Synthetic oligonucleotide
ggcgauuacauaguuguuc

SEQ ID NO: 2530672 - RNA, 19 nt, Artificial Sequence
  Description of Artificial Sequence: Synthetic oligonucleotide
ucauuccgaaugucaucca

SEQ ID NO: 2530673 - RNA, 19 nt, Artificial Sequence
  Description of Artificial Sequence: Synthetic oligonucleotide
ucuucacaguagucguagu

SEQ ID NO: 2530674 - RNA, 19 nt, Artificial Sequence
  Description of Artificial Sequence: Synthetic oligonucleotide
ugcugggaccccuagucua

SEQ ID NO: 2530675 - RNA, 19 nt, Artificial Sequence
  Description of Artificial Sequence: Synthetic oligonucleotide
uagccggcgauuacauagu

SEQ ID NO: 2530676 - RNA, 19 nt, Artificial Sequence
  Description of Artificial Sequence: Synthetic oligonucleotide
agcgggaugcaguccacga

SEQ ID NO: 2530677 - RNA, 19 nt, Artificial Sequence
  Description of Artificial Sequence: Synthetic oligonucleotide
gguacuuggcgccguguag

SEQ ID NO: 2530678 - RNA, 19 nt, Artificial Sequence
  Description of Artificial Sequence: Synthetic oligonucleotide
ugccacuaccaccucuuau

SEQ ID NO: 2530679 - RNA, 19 nt, Artificial Sequence
  Description of Artificial Sequence: Synthetic oligonucleotide
uaccaccucuuauuuuccu

SEQ ID NO: 2530680 - RNA, 19 nt, Artificial Sequence
  Description of Artificial Sequence: Synthetic oligonucleotide
guguagcaccaucuugcag

SEQ ID NO: 2530681 - RNA, 19 nt, Artificial Sequence
  Description of Artificial Sequence: Synthetic oligonucleotide
cagaagcccguugaccgcg

SEQ ID NO: 2530682 - RNA, 19 nt, Artificial Sequence
  Description of Artificial Sequence: Synthetic oligonucleotide
gaccccuagucuagcacag

SEQ ID NO: 2530683 - RNA, 19 nt, Artificial Sequence
  Description of Artificial Sequence: Synthetic oligonucleotide
aacgagcguuucauaggag

SEQ ID NO: 2530684 - RNA, 19 nt, Artificial Sequence
  Description of Artificial Sequence: Synthetic oligonucleotide
agaccagacugcucugccu

SEQ ID NO: 2530685 - RNA, 19 nt, Artificial Sequence
  Description of Artificial Sequence: Synthetic oligonucleotide
uugcaccaugagucaauca

SEQ ID NO: 2530686 - RNA, 19 nt, Artificial Sequence
  Description of Artificial Sequence: Synthetic oligonucleotide
cuagucuagcacaggugca

SEQ ID NO: 2530687 - RNA, 19 nt, Artificial Sequence
  Description of Artificial Sequence: Synthetic oligonucleotide
cagcgugccguggaaaagc

SEQ ID NO: 2530688 - RNA, 19 nt, Artificial Sequence
  Description of Artificial Sequence: Synthetic oligonucleotide
cucggccaccagaagcccg

SEQ ID NO: 2530689 - RNA, 19 nt, Artificial Sequence
  Description of Artificial Sequence: Synthetic oligonucleotide
cgagcguuucauaggagcg

SEQ ID NO: 2530690 - RNA, 19 nt, Artificial Sequence
  Description of Artificial Sequence: Synthetic oligonucleotide
ccuucacacgcucauuagc

SEQ ID NO: 2530691 - RNA, 19 nt, Artificial Sequence
  Description of Artificial Sequence: Synthetic oligonucleotide
ucguagugugggucucugc

SEQ ID NO: 2530692 - RNA, 19 nt, Artificial Sequence
  Description of Artificial Sequence: Synthetic oligonucleotide
ggugguuaucaaaaucaac

SEQ ID NO: 2530693 - RNA, 19 nt, Artificial Sequence
  Description of Artificial Sequence: Synthetic oligonucleotide
cugaagcccucagcaaucc

SEQ ID NO: 2530694 - RNA, 19 nt, Artificial Sequence
  Description of Artificial Sequence: Synthetic oligonucleotide
ccguugaccgcgcagugcg

SEQ ID NO: 2530695 - RNA, 19 nt, Artificial Sequence
  Description of Artificial Sequence: Synthetic oligonucleotide
cucauauacauggaucgua

SEQ ID NO: 2530696 - RNA, 19 nt, Artificial Sequence
  Description of Artificial Sequence: Synthetic oligonucleotide
ugcaguaggccuggguggu

SEQ ID NO: 2530697 - RNA, 19 nt, Artificial Sequence
  Description of Artificial Sequence: Synthetic oligonucleotide
ccaucuugcaguaggccug

SEQ ID NO: 2530698 - RNA, 19 nt, Artificial Sequence
  Description of Artificial Sequence: Synthetic oligonucleotide
uccuugcgcggccucugcc

SEQ ID NO: 2530699 - RNA, 19 nt, Artificial Sequence
  Description of Artificial Sequence: Synthetic oligonucleotide
caaaaucaacgagcguuuc

SEQ ID NO: 2530700 - RNA, 19 nt, Artificial Sequence
  Description of Artificial Sequence: Synthetic oligonucleotide
guagucguagugugggucu

SEQ ID NO: 2530701 - RNA, 19 nt, Artificial Sequence
  Description of Artificial Sequence: Synthetic oligonucleotide
accugguuugggcuggcau

SEQ ID NO: 2530702 - RNA, 19 nt, Artificial Sequence
  Description of Artificial Sequence: Synthetic oligonucleotide
gcuuuguugaucucggggu

SEQ ID NO: 2530703 - RNA, 19 nt, Artificial Sequence
  Description of Artificial Sequence: Synthetic oligonucleotide
agcaauccuggaggccacc

SEQ ID NO: 2530704 - RNA, 19 nt, Artificial Sequence
  Description of Artificial Sequence: Synthetic oligonucleotide
ugagucaaucagggugagc

SEQ ID NO: 2530705 - RNA, 19 nt, Artificial Sequence
  Description of Artificial Sequence: Synthetic oligonucleotide
cagaacugcuuuguugauc

SEQ ID NO: 2530706 - RNA, 19 nt, Artificial Sequence
  Description of Artificial Sequence: Synthetic oligonucleotide
agcgugccguggaaaagcg

SEQ ID NO: 2530707 - RNA, 19 nt, Artificial Sequence
  Description of Artificial Sequence: Synthetic oligonucleotide
uucucauggugcucauaua

SEQ ID NO: 2530708 - RNA, 19 nt, Artificial Sequence
  Description of Artificial Sequence: Synthetic oligonucleotide
ucuggccaaucuucacagu

SEQ ID NO: 2530709 - RNA, 19 nt, Artificial Sequence
  Description of Artificial Sequence: Synthetic oligonucleotide
uccaggagugaugcugaga

SEQ ID NO: 2530710 - RNA, 19 nt, Artificial Sequence
  Description of Artificial Sequence: Synthetic oligonucleotide
ucguaggugcugcgcaguc

SEQ ID NO: 2530711 - RNA, 19 nt, Artificial Sequence
  Description of Artificial Sequence: Synthetic oligonucleotide
ccauuaugagugcaguguc

SEQ ID NO: 2530712 - RNA, 19 nt, Artificial Sequence
  Description of Artificial Sequence: Synthetic oligonucleotide
cacacgcucauuagcuuga

SEQ ID NO: 2530713 - RNA, 19 nt, Artificial Sequence
  Description of Artificial Sequence: Synthetic oligonucleotide
ggguuuguccagucauucc

SEQ ID NO: 2530714 - RNA, 19 nt, Artificial Sequence
  Description of Artificial Sequence: Synthetic oligonucleotide
cauccaggugguuaucaaa

SEQ ID NO: 2530715 - RNA, 19 nt, Artificial Sequence
  Description of Artificial Sequence: Synthetic oligonucleotide
accucuuauuuuccuucau

SEQ ID NO: 2530716 - RNA, 19 nt, Artificial Sequence
  Description of Artificial Sequence: Synthetic oligonucleotide
uuggcgccguguagcacca

SEQ ID NO: 2530717 - RNA, 19 nt, Artificial Sequence
  Description of Artificial Sequence: Synthetic oligonucleotide
ugggaccccuagucuagca

SEQ ID NO: 2530718 - RNA, 19 nt, Artificial Sequence
  Description of Artificial Sequence: Synthetic oligonucleotide
gcgauuacauaguuguucu

SEQ ID NO: 2530719 - RNA, 19 nt, Artificial Sequence
  Description of Artificial Sequence: Synthetic oligonucleotide
ggaucguaggugcugcgca

SEQ ID NO: 2530720 - RNA, 19 nt, Artificial Sequence
  Description of Artificial Sequence: Synthetic oligonucleotide
augagucaaucagggugag

SEQ ID NO: 2530721 - RNA, 19 nt, Artificial Sequence
  Description of Artificial Sequence: Synthetic oligonucleotide
ggaccccuagucuagcaca

SEQ ID NO: 2530722 - RNA, 19 nt, Artificial Sequence
  Description of Artificial Sequence: Synthetic oligonucleotide
aggugcugcgcaguccauc

SEQ ID NO: 2530723 - RNA, 19 nt, Artificial Sequence
  Description of Artificial Sequence: Synthetic oligonucleotide
guugaucucgggguuuguc

SEQ ID NO: 2530724 - RNA, 19 nt, Artificial Sequence
  Description of Artificial Sequence: Synthetic oligonucleotide
ugcaguccacgaagagagu

SEQ ID NO: 2530725 - RNA, 19 nt, Artificial Sequence
  Description of Artificial Sequence: Synthetic oligonucleotide
aggugguuaucaaaaucaa

SEQ ID NO: 2530726 - RNA, 19 nt, Artificial Sequence
  Description of Artificial Sequence: Synthetic oligonucleotide
ccaccucuuauuuuccuuc

SEQ ID NO: 2530727 - RNA, 19 nt, Artificial Sequence
  Description of Artificial Sequence: Synthetic oligonucleotide
caccucuuauuuuccuuca

SEQ ID NO: 2530728 - RNA, 19 nt, Artificial Sequence
  Description of Artificial Sequence: Synthetic oligonucleotide
uccagucauuccgaauguc

SEQ ID NO: 2530729 - RNA, 19 nt, Artificial Sequence
  Description of Artificial Sequence: Synthetic oligonucleotide
agucuagcacaggugcaga

SEQ ID NO: 2530730 - RNA, 19 nt, Artificial Sequence
  Description of Artificial Sequence: Synthetic oligonucleotide
guuugggcuggcauccuuc

SEQ ID NO: 2530731 - RNA, 19 nt, Artificial Sequence
  Description of Artificial Sequence: Synthetic oligonucleotide
uggcauuguccaccauuau

SEQ ID NO: 2530732 - RNA, 19 nt, Artificial Sequence
  Description of Artificial Sequence: Synthetic oligonucleotide
ccguggaaaagcgggaugc

SEQ ID NO: 2530733 - RNA, 19 nt, Artificial Sequence
  Description of Artificial Sequence: Synthetic oligonucleotide
gcagugcggguacuuggcg

SEQ ID NO: 2530734 - RNA, 19 nt, Artificial Sequence
  Description of Artificial Sequence: Synthetic oligonucleotide
ccugguuugggcuggcauc

SEQ ID NO: 2530735 - RNA, 19 nt, Artificial Sequence
  Description of Artificial Sequence: Synthetic oligonucleotide
gccguguagcaccaucuug

SEQ ID NO: 2530736 - RNA, 19 nt, Artificial Sequence
  Description of Artificial Sequence: Synthetic oligonucleotide
uugaccgcgcagugcgggu

SEQ ID NO: 2530737 - RNA, 19 nt, Artificial Sequence
  Description of Artificial Sequence: Synthetic oligonucleotide
uccuucaugcugggacccc

SEQ ID NO: 2530738 - RNA, 19 nt, Artificial Sequence
  Description of Artificial Sequence: Synthetic oligonucleotide
gcgcagugcggguacuugg

SEQ ID NO: 2530739 - RNA, 19 nt, Artificial Sequence
  Description of Artificial Sequence: Synthetic oligonucleotide
gcuaccugguuugggcugg

SEQ ID NO: 2530740 - RNA, 19 nt, Artificial Sequence
  Description of Artificial Sequence: Synthetic oligonucleotide
agcccguugaccgcgcagu

SEQ ID NO: 2530741 - RNA, 19 nt, Artificial Sequence
  Description of Artificial Sequence: Synthetic oligonucleotide
cuugcgcggccucugccuc

SEQ ID NO: 2530742 - RNA, 19 nt, Artificial Sequence
  Description of Artificial Sequence: Synthetic oligonucleotide
ccggcgauuacauaguugu

SEQ ID NO: 2530743 - RNA, 19 nt, Artificial Sequence
  Description of Artificial Sequence: Synthetic oligonucleotide
guauggcugcccgcgcccg

SEQ ID NO: 2530744 - RNA, 19 nt, Artificial Sequence
  Description of Artificial Sequence: Synthetic oligonucleotide
ugccguggaaaagcgggau

SEQ ID NO: 2530745 - RNA, 19 nt, Artificial Sequence
  Description of Artificial Sequence: Synthetic oligonucleotide
caggagugaugcugagauc

SEQ ID NO: 2530746 - RNA, 19 nt, Artificial Sequence
  Description of Artificial Sequence: Synthetic oligonucleotide
aucguaggugcugcgcagu

SEQ ID NO: 2530747 - RNA, 19 nt, Artificial Sequence
  Description of Artificial Sequence: Synthetic oligonucleotide
gucguagugugggucucug

SEQ ID NO: 2530748 - RNA, 19 nt, Artificial Sequence
  Description of Artificial Sequence: Synthetic oligonucleotide
cagucauuccgaaugucau

SEQ ID NO: 2530749 - RNA, 19 nt, Artificial Sequence
  Description of Artificial Sequence: Synthetic oligonucleotide
cagcaauccuggaggccac

SEQ ID NO: 2530750 - RNA, 19 nt, Artificial Sequence
  Description of Artificial Sequence: Synthetic oligonucleotide
aucgugaacuuggcauugu

SEQ ID NO: 2530751 - RNA, 19 nt, Artificial Sequence
  Description of Artificial Sequence: Synthetic oligonucleotide
ugagcgccaccuccagcau

SEQ ID NO: 2530752 - RNA, 19 nt, Artificial Sequence
  Description of Artificial Sequence: Synthetic oligonucleotide
gagcggcuguccaggagug

SEQ ID NO: 2530753 - RNA, 19 nt, Artificial Sequence
  Description of Artificial Sequence: Synthetic oligonucleotide
cgggaugcaguccacgaag

SEQ ID NO: 2530754 - RNA, 19 nt, Artificial Sequence
  Description of Artificial Sequence: Synthetic oligonucleotide
gaccgcgcagugcggguac

SEQ ID NO: 2530755 - RNA, 19 nt, Artificial Sequence
  Description of Artificial Sequence: Synthetic oligonucleotide
ggugcucauauacauggau

SEQ ID NO: 2530756 - RNA, 19 nt, Artificial Sequence
  Description of Artificial Sequence: Synthetic oligonucleotide
gcggaugcuccuugcgcgg

SEQ ID NO: 2530757 - RNA, 19 nt, Artificial Sequence
  Description of Artificial Sequence: Synthetic oligonucleotide
uguugaucucgggguuugu

SEQ ID NO: 2530758 - RNA, 19 nt, Artificial Sequence
  Description of Artificial Sequence: Synthetic oligonucleotide
agcaugggcgccagggcca

SEQ ID NO: 2530759 - RNA, 19 nt, Artificial Sequence
  Description of Artificial Sequence: Synthetic oligonucleotide
accccuagucuagcacagg

SEQ ID NO: 2530760 - RNA, 19 nt, Artificial Sequence
  Description of Artificial Sequence: Synthetic oligonucleotide
uagucguagugugggucuc

SEQ ID NO: 2530761 - RNA, 19 nt, Artificial Sequence
  Description of Artificial Sequence: Synthetic oligonucleotide
gggguuuguccagucauuc

SEQ ID NO: 2530762 - RNA, 19 nt, Artificial Sequence
  Description of Artificial Sequence: Synthetic oligonucleotide
cccuagucuagcacaggug

SEQ ID NO: 2530763 - RNA, 19 nt, Artificial Sequence
  Description of Artificial Sequence: Synthetic oligonucleotide
agucguagugugggucucu

SEQ ID NO: 2530764 - RNA, 19 nt, Artificial Sequence
  Description of Artificial Sequence: Synthetic oligonucleotide
aucucgggguuuguccagu

SEQ ID NO: 2530765 - RNA, 19 nt, Artificial Sequence
  Description of Artificial Sequence: Synthetic oligonucleotide
cuccuugcgcggccucugc

SEQ ID NO: 2530766 - RNA, 19 nt, Artificial Sequence
  Description of Artificial Sequence: Synthetic oligonucleotide
gccguggaaaagcgggaug

SEQ ID NO: 2530767 - RNA, 19 nt, Artificial Sequence
  Description of Artificial Sequence: Synthetic oligonucleotide
guagugugggucucugcau

SEQ ID NO: 2530768 - RNA, 19 nt, Artificial Sequence
  Description of Artificial Sequence: Synthetic oligonucleotide
gcugggaccccuagucuag

SEQ ID NO: 2530769 - RNA, 19 nt, Artificial Sequence
  Description of Artificial Sequence: Synthetic oligonucleotide
ggagcggcuguccaggagu

SEQ ID NO: 2530770 - RNA, 19 nt, Artificial Sequence
  Description of Artificial Sequence: Synthetic oligonucleotide
agccggcgauuacauaguu

SEQ ID NO: 2530771 - RNA, 19 nt, Artificial Sequence
  Description of Artificial Sequence: Synthetic oligonucleotide
gaagcccguugaccgcgca

SEQ ID NO: 2530772 - RNA, 19 nt, Artificial Sequence
  Description of Artificial Sequence: Synthetic oligonucleotide
agcccucagcaauccugga

SEQ ID NO: 2530773 - RNA, 19 nt, Artificial Sequence
  Description of Artificial Sequence: Synthetic oligonucleotide
gcugagauccucugugccu

SEQ ID NO: 2530774 - RNA, 19 nt, Artificial Sequence
  Description of Artificial Sequence: Synthetic oligonucleotide
cguuucauaggagcggcug

SEQ ID NO: 2530775 - RNA, 19 nt, Artificial Sequence
  Description of Artificial Sequence: Synthetic oligonucleotide
ccucuggccaaucuucaca

SEQ ID NO: 2530776 - RNA, 19 nt, Artificial Sequence
  Description of Artificial Sequence: Synthetic oligonucleotide
ggccaaucuucacaguagu

SEQ ID NO: 2530777 - RNA, 19 nt, Artificial Sequence
  Description of Artificial Sequence: Synthetic oligonucleotide
caguaggccugggugguca

SEQ ID NO: 2530778 - RNA, 19 nt, Artificial Sequence
  Description of Artificial Sequence: Synthetic oligonucleotide
guccaccauuaugagugca

SEQ ID NO: 2530779 - RNA, 19 nt, Artificial Sequence
  Description of Artificial Sequence: Synthetic oligonucleotide
uaggugcugcgcaguccau

SEQ ID NO: 2530780 - RNA, 19 nt, Artificial Sequence
  Description of Artificial Sequence: Synthetic oligonucleotide
cugcuaccugguuugggcu

SEQ ID NO: 2530781 - RNA, 19 nt, Artificial Sequence
  Description of Artificial Sequence: Synthetic oligonucleotide
gugcggguacuuggcgccg

SEQ ID NO: 2530782 - RNA, 19 nt, Artificial Sequence
  Description of Artificial Sequence: Synthetic oligonucleotide
guaggccuggguggucagc

SEQ ID NO: 2530783 - RNA, 19 nt, Artificial Sequence
  Description of Artificial Sequence: Synthetic oligonucleotide
caguccacgaagagaguau

SEQ ID NO: 2530784 - RNA, 19 nt, Artificial Sequence
  Description of Artificial Sequence: Synthetic oligonucleotide
ggcuggcauccuucacacg

SEQ ID NO: 2530785 - RNA, 19 nt, Artificial Sequence
  Description of Artificial Sequence: Synthetic oligonucleotide
augccacuaccaccucuua

SEQ ID NO: 2530786 - RNA, 19 nt, Artificial Sequence
  Description of Artificial Sequence: Synthetic oligonucleotide
caccuguucucauggugcu

SEQ ID NO: 2530787 - RNA, 19 nt, Artificial Sequence
  Description of Artificial Sequence: Synthetic oligonucleotide
uaccugguuugggcuggca

SEQ ID NO: 2530788 - RNA, 19 nt, Artificial Sequence
  Description of Artificial Sequence: Synthetic oligonucleotide
cuggcauccuucacacgcu

SEQ ID NO: 2530789 - RNA, 19 nt, Artificial Sequence
  Description of Artificial Sequence: Synthetic oligonucleotide
ugcggguacuuggcgccgu

SEQ ID NO: 2530790 - RNA, 19 nt, Artificial Sequence
  Description of Artificial Sequence: Synthetic oligonucleotide
ugaccgcgcagugcgggua

SEQ ID NO: 2530791 - RNA, 19 nt, Artificial Sequence
  Description of Artificial Sequence: Synthetic oligonucleotide
gcgcaguccaucgugaacu

SEQ ID NO: 2530792 - RNA, 19 nt, Artificial Sequence
  Description of Artificial Sequence: Synthetic oligonucleotide
gggucucugcaucgccacc

SEQ ID NO: 2530793 - RNA, 19 nt, Artificial Sequence
  Description of Artificial Sequence: Synthetic oligonucleotide
gccaaucuucacaguaguc

SEQ ID NO: 2530794 - RNA, 19 nt, Artificial Sequence
  Description of Artificial Sequence: Synthetic oligonucleotide
cagugucacugaagcccuc

SEQ ID NO: 2530795 - RNA, 19 nt, Artificial Sequence
  Description of Artificial Sequence: Synthetic oligonucleotide
cuucaugcugggaccccua

SEQ ID NO: 2530796 - RNA, 19 nt, Artificial Sequence
  Description of Artificial Sequence: Synthetic oligonucleotide
ggcgccagggccagcgugc

SEQ ID NO: 2530797 - RNA, 19 nt, Artificial Sequence
  Description of Artificial Sequence: Synthetic oligonucleotide
ggcgccguguagcaccauc

SEQ ID NO: 2530798 - RNA, 19 nt, Artificial Sequence
  Description of Artificial Sequence: Synthetic oligonucleotide
cucugcaucgccaccuguu

SEQ ID NO: 2530799 - RNA, 19 nt, Artificial Sequence
  Description of Artificial Sequence: Synthetic oligonucleotide
gggugagcgccaccuccag

SEQ ID NO: 2530800 - RNA, 19 nt, Artificial Sequence
  Description of Artificial Sequence: Synthetic oligonucleotide
cuaccugguuugggcuggc

SEQ ID NO: 2530801 - RNA, 19 nt, Artificial Sequence
  Description of Artificial Sequence: Synthetic oligonucleotide
gccggcgauuacauaguug

SEQ ID NO: 2530802 - RNA, 19 nt, Artificial Sequence
  Description of Artificial Sequence: Synthetic oligonucleotide
gugccguggaaaagcggga

SEQ ID NO: 2530803 - RNA, 19 nt, Artificial Sequence
  Description of Artificial Sequence: Synthetic oligonucleotide
gccucuggccaaucuucac

SEQ ID NO: 2530804 - RNA, 19 nt, Artificial Sequence
  Description of Artificial Sequence: Synthetic oligonucleotide
ccacgaagagaguauggcu

SEQ ID NO: 2530805 - RNA, 19 nt, Artificial Sequence
  Description of Artificial Sequence: Synthetic oligonucleotide
cgauuacauaguuguucuc

SEQ ID NO: 2530806 - RNA, 19 nt, Artificial Sequence
  Description of Artificial Sequence: Synthetic oligonucleotide
ggguacuuggcgccgugua

SEQ ID NO: 2530807 - RNA, 19 nt, Artificial Sequence
  Description of Artificial Sequence: Synthetic oligonucleotide
cugcgcaguccaucgugaa

SEQ ID NO: 2530808 - RNA, 19 nt, Artificial Sequence
  Description of Artificial Sequence: Synthetic oligonucleotide
cugcaucgccaccuguucu

SEQ ID NO: 2530809 - RNA, 19 nt, Artificial Sequence
  Description of Artificial Sequence: Synthetic oligonucleotide
acacgcucauuagcuugau

SEQ ID NO: 2530810 - RNA, 19 nt, Artificial Sequence
  Description of Artificial Sequence: Synthetic oligonucleotide
gggcgccagggccagcgug

SEQ ID NO: 2530811 - RNA, 19 nt, Artificial Sequence
  Description of Artificial Sequence: Synthetic oligonucleotide
gcugcgcaguccaucguga

SEQ ID NO: 2530812 - RNA, 19 nt, Artificial Sequence
  Description of Artificial Sequence: Synthetic oligonucleotide
ccagcgugccguggaaaag

SEQ ID NO: 2530813 - RNA, 19 nt, Artificial Sequence
  Description of Artificial Sequence: Synthetic oligonucleotide
gcgugccguggaaaagcgg

SEQ ID NO: 2530814 - RNA, 19 nt, Artificial Sequence
  Description of Artificial Sequence: Synthetic oligonucleotide
cggcggaugcuccuugcgc

SEQ ID NO: 2530815 - RNA, 19 nt, Artificial Sequence
  Description of Artificial Sequence: Synthetic oligonucleotide
caguagucguagugugggu

SEQ ID NO: 2530816 - RNA, 19 nt, Artificial Sequence
  Description of Artificial Sequence: Synthetic oligonucleotide
cacgcucauuagcuugaua

SEQ ID NO: 2530817 - RNA, 19 nt, Artificial Sequence
  Description of Artificial Sequence: Synthetic oligonucleotide
agcggcuguccaggaguga

SEQ ID NO: 2530818 - RNA, 19 nt, Artificial Sequence
  Description of Artificial Sequence: Synthetic oligonucleotide
gcgggaugcaguccacgaa

SEQ ID NO: 2530819 - RNA, 19 nt, Artificial Sequence
  Description of Artificial Sequence: Synthetic oligonucleotide
gcucauauacauggaucgu

SEQ ID NO: 2530820 - RNA, 19 nt, Artificial Sequence
  Description of Artificial Sequence: Synthetic oligonucleotide
cguguagcaccaucuugca

SEQ ID NO: 2530821 - RNA, 19 nt, Artificial Sequence
  Description of Artificial Sequence: Synthetic oligonucleotide
cacuaccaccucuuauuuu

SEQ ID NO: 2530822 - RNA, 19 nt, Artificial Sequence
  Description of Artificial Sequence: Synthetic oligonucleotide
caccuccagcaugggcgcc

SEQ ID NO: 2530823 - RNA, 19 nt, Artificial Sequence
  Description of Artificial Sequence: Synthetic oligonucleotide
gcccguugaccgcgcagug

SEQ ID NO: 2530824 - RNA, 19 nt, Artificial Sequence
  Description of Artificial Sequence: Synthetic oligonucleotide
cccguugaccgcgcagugc

SEQ ID NO: 2530825 - RNA, 19 nt, Artificial Sequence
  Description of Artificial Sequence: Synthetic oligonucleotide
cguugaccgcgcagugcgg

SEQ ID NO: 2530826 - RNA, 19 nt, Artificial Sequence
  Description of Artificial Sequence: Synthetic oligonucleotide
gcaucgccaccuguucuca

SEQ ID NO: 2530827 - RNA, 19 nt, Artificial Sequence
  Description of Artificial Sequence: Synthetic oligonucleotide
cccggcggaugcuccuugc

SEQ ID NO: 2530828 - RNA, 19 nt, Artificial Sequence
  Description of Artificial Sequence: Synthetic oligonucleotide
gcaugggcgccagggccag

SEQ ID NO: 2530829 - RNA, 19 nt, Artificial Sequence
  Description of Artificial Sequence: Synthetic oligonucleotide
ggagugaugcugagauccu

SEQ ID NO: 2530830 - RNA, 19 nt, Artificial Sequence
  Description of Artificial Sequence: Synthetic oligonucleotide
gcggguacuuggcgccgug

SEQ ID NO: 2530831 - RNA, 19 nt, Artificial Sequence
  Description of Artificial Sequence: Synthetic oligonucleotide
ccccuagucuagcacaggu

SEQ ID NO: 2530832 - RNA, 19 nt, Artificial Sequence
  Description of Artificial Sequence: Synthetic oligonucleotide
gcagaacugcuuuguugau

SEQ ID NO: 2530833 - RNA, 19 nt, Artificial Sequence
  Description of Artificial Sequence: Synthetic oligonucleotide
accgcgcagugcggguacu

SEQ ID NO: 2530834 - RNA, 19 nt, Artificial Sequence
  Description of Artificial Sequence: Synthetic oligonucleotide
gcccgcgcccggcggaugc

SEQ ID NO: 2530835 - RNA, 19 nt, Artificial Sequence
  Description of Artificial Sequence: Synthetic oligonucleotide
ccaccauuaugagugcagu

SEQ ID NO: 2530836 - RNA, 19 nt, Artificial Sequence
  Description of Artificial Sequence: Synthetic oligonucleotide
gcaauccuggaggccaccu

SEQ ID NO: 2530837 - RNA, 19 nt, Artificial Sequence
  Description of Artificial Sequence: Synthetic oligonucleotide
caugggcgccagggccagc

SEQ ID NO: 2530838 - RNA, 19 nt, Artificial Sequence
  Description of Artificial Sequence: Synthetic oligonucleotide
gugcugcgcaguccaucgu

SEQ ID NO: 2530839 - RNA, 19 nt, Artificial Sequence
  Description of Artificial Sequence: Synthetic oligonucleotide
gcugcccgcgcccggcgga

SEQ ID NO: 2530840 - RNA, 19 nt, Artificial Sequence
  Description of Artificial Sequence: Synthetic oligonucleotide
cauccuucacacgcucauu

SEQ ID NO: 2530841 - RNA, 19 nt, Artificial Sequence
  Description of Artificial Sequence: Synthetic oligonucleotide
ccuugcgcggccucugccu

SEQ ID NO: 2530842 - RNA, 19 nt, Artificial Sequence
  Description of Artificial Sequence: Synthetic oligonucleotide
ccacuaccaccucuuauuu

SEQ ID NO: 2530843 - RNA, 19 nt, Artificial Sequence
  Description of Artificial Sequence: Synthetic oligonucleotide
caucgccaccuguucucau

SEQ ID NO: 2530844 - RNA, 19 nt, Artificial Sequence
  Description of Artificial Sequence: Synthetic oligonucleotide
gcgccguguagcaccaucu

SEQ ID NO: 2530845 - RNA, 19 nt, Artificial Sequence
  Description of Artificial Sequence: Synthetic oligonucleotide
gcggcuguccaggagugau

SEQ ID NO: 2530846 - RNA, 19 nt, Artificial Sequence
  Description of Artificial Sequence: Synthetic oligonucleotide
cgcucauuagcuugauaau

SEQ ID NO: 2530847 - RNA, 19 nt, Artificial Sequence
  Description of Artificial Sequence: Synthetic oligonucleotide
gcaguaggccugggugguc

SEQ ID NO: 2530848 - RNA, 19 nt, Artificial Sequence
  Description of Artificial Sequence: Synthetic oligonucleotide
gcgccagggccagcgugcc

SEQ ID NO: 2530849 - RNA, 19 nt, Artificial Sequence
  Description of Artificial Sequence: Synthetic oligonucleotide
cgcgcagugcggguacuug

SEQ ID NO: 2530850 - RNA, 19 nt, Artificial Sequence
  Description of Artificial Sequence: Synthetic oligonucleotide
cgcgcccggcggaugcucc

SEQ ID NO: 2530851 - RNA, 19 nt, Artificial Sequence
  Description of Artificial Sequence: Synthetic oligonucleotide
gggccagcgugccguggaa

SEQ ID NO: 2530852 - RNA, 19 nt, Artificial Sequence
  Description of Artificial Sequence: Synthetic oligonucleotide
cucugugccucuggccaau

SEQ ID NO: 2530853 - RNA, 19 nt, Artificial Sequence
  Description of Artificial Sequence: Synthetic oligonucleotide
ggccagcgugccguggaaa

SEQ ID NO: 2530854 - RNA, 19 nt, Artificial Sequence
  Description of Artificial Sequence: Synthetic oligonucleotide
uggcgccguguagcaccau

SEQ ID NO: 2530855 - RNA, 19 nt, Artificial Sequence
  Description of Artificial Sequence: Synthetic oligonucleotide
gcguuucauaggagcggcu

SEQ ID NO: 2530856 - RNA, 19 nt, Artificial Sequence
  Description of Artificial Sequence: Synthetic oligonucleotide
cggcgauuacauaguuguu

SEQ ID NO: 2530857 - RNA, 19 nt, Artificial Sequence
  Description of Artificial Sequence: Synthetic oligonucleotide
cugcccgcgcccggcggau

SEQ ID NO: 2530858 - RNA, 19 nt, Artificial Sequence
  Description of Artificial Sequence: Synthetic oligonucleotide
cgccguguagcaccaucuu

SEQ ID NO: 2530859 - RNA, 19 nt, Artificial Sequence
  Description of Artificial Sequence: Synthetic oligonucleotide
cggguacuuggcgccgugu

SEQ ID NO: 2530860 - RNA, 19 nt, Artificial Sequence
  Description of Artificial Sequence: Synthetic oligonucleotide
ccgcgcagugcggguacuu

SEQ ID NO: 2530861 - RNA, 19 nt, Artificial Sequence
  Description of Artificial Sequence: Synthetic oligonucleotide
cccgcgcccggcggaugcu

SEQ ID NO: 2530862 - RNA, 19 nt, Artificial Sequence
  Description of Artificial Sequence: Synthetic oligonucleotide
ucuucugucaauauaauag

SEQ ID NO: 2530863 - RNA, 19 nt, Artificial Sequence
  Description of Artificial Sequence: Synthetic oligonucleotide
aguacgaacaaaauaaugc

SEQ ID NO: 2530864 - RNA, 19 nt, Artificial Sequence
  Description of Artificial Sequence: Synthetic oligonucleotide
aauuccagagggucgaagc

SEQ ID NO: 2530865 - RNA, 19 nt, Artificial Sequence
  Description of Artificial Sequence: Synthetic oligonucleotide
aaucuuguggaguacgaac

SEQ ID NO: 2530866 - RNA, 19 nt, Artificial Sequence
  Description of Artificial Sequence: Synthetic oligonucleotide
aaucgcauugucuauuggg

SEQ ID NO: 2530867 - RNA, 19 nt, Artificial Sequence
  Description of Artificial Sequence: Synthetic oligonucleotide
uggaguacgaacaaaauaa

SEQ ID NO: 2530868 - RNA, 19 nt, Artificial Sequence
  Description of Artificial Sequence: Synthetic oligonucleotide
aagaguuagauuuugggaa

SEQ ID NO: 2530869 - RNA, 19 nt, Artificial Sequence
  Description of Artificial Sequence: Synthetic oligonucleotide
auaauaggguuccucaggc

SEQ ID NO: 2530870 - RNA, 19 nt, Artificial Sequence
  Description of Artificial Sequence: Synthetic oligonucleotide
uauaauaggguuccucagg

SEQ ID NO: 2530871 - RNA, 19 nt, Artificial Sequence
  Description of Artificial Sequence: Synthetic oligonucleotide
aauaggguuccucaggcag

SEQ ID NO: 2530872 - RNA, 19 nt, Artificial Sequence
  Description of Artificial Sequence: Synthetic oligonucleotide
aacaauauuucuucuguca

SEQ ID NO: 2530873 - RNA, 19 nt, Artificial Sequence
  Description of Artificial Sequence: Synthetic oligonucleotide
uuguagacaacccaauucc

SEQ ID NO: 2530874 - RNA, 19 nt, Artificial Sequence
  Description of Artificial Sequence: Synthetic oligonucleotide
ugaagaggggcuuucaccg

SEQ ID NO: 2530875 - RNA, 19 nt, Artificial Sequence
  Description of Artificial Sequence: Synthetic oligonucleotide
agaagaguuagauuuuggg

SEQ ID NO: 2530876 - RNA, 19 nt, Artificial Sequence
  Description of Artificial Sequence: Synthetic oligonucleotide
aaacaauauuucuucuguc

SEQ ID NO: 2530877 - RNA, 19 nt, Artificial Sequence
  Description of Artificial Sequence: Synthetic oligonucleotide
uuaagaaucgcauugucua

SEQ ID NO: 2530878 - RNA, 19 nt, Artificial Sequence
  Description of Artificial Sequence: Synthetic oligonucleotide
agcacagagaaguaggcgg

SEQ ID NO: 2530879 - RNA, 19 nt, Artificial Sequence
  Description of Artificial Sequence: Synthetic oligonucleotide
  modified_base (16)..(16): a, c, u, g, unknown or other
auuguguagagacacnggu

SEQ ID NO: 2530880 - RNA, 19 nt, Artificial Sequence
  Description of Artificial Sequence: Synthetic oligonucleotide
auuuugggaagcuuuggcg

SEQ ID NO: 2530881 - RNA, 19 nt, Artificial Sequence
  Description of Artificial Sequence: Synthetic oligonucleotide
cagagaauuguguagagac

SEQ ID NO: 2530882 - RNA, 19 nt, Artificial Sequence
  Description of Artificial Sequence: Synthetic oligonucleotide
uuuguagacaacccaauuc

SEQ ID NO: 2530883 - RNA, 19 nt, Artificial Sequence
  Description of Artificial Sequence: Synthetic oligonucleotide
uacgaacaaaauaaugcag

SEQ ID NO: 2530884 - RNA, 19 nt, Artificial Sequence
  Description of Artificial Sequence: Synthetic oligonucleotide
ucugucaauauaauagggu

SEQ ID NO: 2530885 - RNA, 19 nt, Artificial Sequence
  Description of Artificial Sequence: Synthetic oligonucleotide
uuuugggaagcuuuggcgc

SEQ ID NO: 2530886 - RNA, 19 nt, Artificial Sequence
  Description of Artificial Sequence: Synthetic oligonucleotide
acaacccaauuccagaggg

SEQ ID NO: 2530887 - RNA, 19 nt, Artificial Sequence
  Description of Artificial Sequence: Synthetic oligonucleotide
auuauucccacucacucca

SEQ ID NO: 2530888 - RNA, 19 nt, Artificial Sequence
  Description of Artificial Sequence: Synthetic oligonucleotide
ugcagucuaaacaauauuu

SEQ ID NO: 2530889 - RNA, 19 nt, Artificial Sequence
  Description of Artificial Sequence: Synthetic oligonucleotide
ucuauugggucacugcuca

SEQ ID NO: 2530890 - RNA, 19 nt, Artificial Sequence
  Description of Artificial Sequence: Synthetic oligonucleotide
gaagaguuagauuuuggga

SEQ ID NO: 2530891 - RNA, 19 nt, Artificial Sequence
  Description of Artificial Sequence: Synthetic oligonucleotide
aaguaucuccucccggcgc

SEQ ID NO: 2530892 - RNA, 19 nt, Artificial Sequence
  Description of Artificial Sequence: Synthetic oligonucleotide
agaaguuguuuccacaucu

SEQ ID NO: 2530893 - RNA, 19 nt, Artificial Sequence
  Description of Artificial Sequence: Synthetic oligonucleotide
uggcgcauugaccacaggg

SEQ ID NO: 2530894 - RNA, 19 nt, Artificial Sequence
  Description of Artificial Sequence: Synthetic oligonucleotide
uuagauuuugggaagcuuu

SEQ ID NO: 2530895 - RNA, 19 nt, Artificial Sequence
  Description of Artificial Sequence: Synthetic oligonucleotide
  modified_base (18)..(18): a, c, u, g, unknown or other
gaauuguguagagacacng

SEQ ID NO: 2530896 - RNA, 19 nt, Artificial Sequence
  Description of Artificial Sequence: Synthetic oligonucleotide
uguagguucugacugggga

SEQ ID NO: 2530897 - RNA, 19 nt, Artificial Sequence
  Description of Artificial Sequence: Synthetic oligonucleotide
ugaaagugcuggaaguuug

SEQ ID NO: 2530898 - RNA, 19 nt, Artificial Sequence
  Description of Artificial Sequence: Synthetic oligonucleotide
gauuuugggaagcuuuggc

SEQ ID NO: 2530899 - RNA, 19 nt, Artificial Sequence
  Description of Artificial Sequence: Synthetic oligonucleotide
gugguuaagaaucgcauug

SEQ ID NO: 2530900 - RNA, 19 nt, Artificial Sequence
  Description of Artificial Sequence: Synthetic oligonucleotide
ucuugugagagcucgacuc

SEQ ID NO: 2530901 - RNA, 19 nt, Artificial Sequence
  Description of Artificial Sequence: Synthetic oligonucleotide
ugucaauauaauaggguuc

SEQ ID NO: 2530902 - RNA, 19 nt, Artificial Sequence
  Description of Artificial Sequence: Synthetic oligonucleotide
uggaaguuuguagacaacc

SEQ ID NO: 2530903 - RNA, 19 nt, Artificial Sequence
  Description of Artificial Sequence: Synthetic oligonucleotide
ugucuauugggucacugcu

SEQ ID NO: 2530904 - RNA, 19 nt, Artificial Sequence
  Description of Artificial Sequence: Synthetic oligonucleotide
auauaauaggguuccucag

SEQ ID NO: 2530905 - RNA, 19 nt, Artificial Sequence
  Description of Artificial Sequence: Synthetic oligonucleotide
aacccaauuccagaggguc

SEQ ID NO: 2530906 - RNA, 19 nt, Artificial Sequence
  Description of Artificial Sequence: Synthetic oligonucleotide
augcacagaaguuguuucc

SEQ ID NO: 2530907 - RNA, 19 nt, Artificial Sequence
  Description of Artificial Sequence: Synthetic oligonucleotide
auagcggugagaugcacag

SEQ ID NO: 2530908 - RNA, 19 nt, Artificial Sequence
  Description of Artificial Sequence: Synthetic oligonucleotide
gaagcuuuggcgcauugac

SEQ ID NO: 2530909 - RNA, 19 nt, Artificial Sequence
  Description of Artificial Sequence: Synthetic oligonucleotide
ugagaugcacagaaguugu

SEQ ID NO: 2530910 - RNA, 19 nt, Artificial Sequence
  Description of Artificial Sequence: Synthetic oligonucleotide
uccacaucugcauucgaag

SEQ ID NO: 2530911 - RNA, 19 nt, Artificial Sequence
  Description of Artificial Sequence: Synthetic oligonucleotide
uguaaucauaggugcagcc

SEQ ID NO: 2530912 - RNA, 19 nt, Artificial Sequence
  Description of Artificial Sequence: Synthetic oligonucleotide
aguaucuccucccggcgcc

SEQ ID NO: 2530913 - RNA, 19 nt, Artificial Sequence
  Description of Artificial Sequence: Synthetic oligonucleotide
gagaauuguguagagacac

SEQ ID NO: 2530914 - RNA, 19 nt, Artificial Sequence
  Description of Artificial Sequence: Synthetic oligonucleotide
uaaagcgcagagaagaguu

SEQ ID NO: 2530915 - RNA, 19 nt, Artificial Sequence
  Description of Artificial Sequence: Synthetic oligonucleotide
  modified_base (3)..(3): a, c, u, g, unknown or other
acnggugcagcacagagaa

SEQ ID NO: 2530916 - RNA, 19 nt, Artificial Sequence
  Description of Artificial Sequence: Synthetic oligonucleotide
ucuaaacaauauuucuucu

SEQ ID NO: 2530917 - RNA, 19 nt, Artificial Sequence
  Description of Artificial Sequence: Synthetic oligonucleotide
uccaauaccacgagcagau

SEQ ID NO: 2530918 - RNA, 19 nt, Artificial Sequence
  Description of Artificial Sequence: Synthetic oligonucleotide
agagcaguaaagcgcagag

SEQ ID NO: 2530919 - RNA, 19 nt, Artificial Sequence
  Description of Artificial Sequence: Synthetic oligonucleotide
ugagugggaacucuggcgu

SEQ ID NO: 2530920 - RNA, 19 nt, Artificial Sequence
  Description of Artificial Sequence: Synthetic oligonucleotide
uugaagaggggcuuucacc

SEQ ID NO: 2530921 - RNA, 19 nt, Artificial Sequence
  Description of Artificial Sequence: Synthetic oligonucleotide
agcuuuggcgcauugacca

SEQ ID NO: 2530922 - RNA, 19 nt, Artificial Sequence
  Description of Artificial Sequence: Synthetic oligonucleotide
guacgaacaaaauaaugca

SEQ ID NO: 2530923 - RNA, 19 nt, Artificial Sequence
  Description of Artificial Sequence: Synthetic oligonucleotide
cuauucuugugagagcucg

SEQ ID NO: 2530924 - RNA, 19 nt, Artificial Sequence
  Description of Artificial Sequence: Synthetic oligonucleotide
aguccuguuuucuuuccac

SEQ ID NO: 2530925 - RNA, 19 nt, Artificial Sequence
  Description of Artificial Sequence: Synthetic oligonucleotide
cuuuccacaaagaaaacaa

SEQ ID NO: 2530926 - RNA, 19 nt, Artificial Sequence
  Description of Artificial Sequence: Synthetic oligonucleotide
cugcauagcggugagaugc

SEQ ID NO: 2530927 - RNA, 19 nt, Artificial Sequence
  Description of Artificial Sequence: Synthetic oligonucleotide
gaaguuuguagacaaccca

SEQ ID NO: 2530928 - RNA, 19 nt, Artificial Sequence
  Description of Artificial Sequence: Synthetic oligonucleotide
cauuauucccacucacucc

SEQ ID NO: 2530929 - RNA, 19 nt, Artificial Sequence
  Description of Artificial Sequence: Synthetic oligonucleotide
uuguuauuuucuucuuugc

SEQ ID NO: 2530930 - RNA, 19 nt, Artificial Sequence
  Description of Artificial Sequence: Synthetic oligonucleotide
agacaacccaauuccagag

SEQ ID NO: 2530931 - RNA, 19 nt, Artificial Sequence
  Description of Artificial Sequence: Synthetic oligonucleotide
uagacaacccaauuccaga

SEQ ID NO: 2530932 - RNA, 19 nt, Artificial Sequence
  Description of Artificial Sequence: Synthetic oligonucleotide
gaugcacagaaguuguuuc

SEQ ID NO: 2530933 - RNA, 19 nt, Artificial Sequence
  Description of Artificial Sequence: Synthetic oligonucleotide
  modified_base (15)..(15): a, c, u, g, unknown or other
uuguguagagacacnggug

SEQ ID NO: 2530934 - RNA, 19 nt, Artificial Sequence
  Description of Artificial Sequence: Synthetic oligonucleotide
auaggugcagccauggguc

SEQ ID NO: 2530935 - RNA, 19 nt, Artificial Sequence
  Description of Artificial Sequence: Synthetic oligonucleotide
ugcaaguaucuccucccgg

SEQ ID NO: 2530936 - RNA, 19 nt, Artificial Sequence
  Description of Artificial Sequence: Synthetic oligonucleotide
uaaugcagucuaaacaaua

SEQ ID NO: 2530937 - RNA, 19 nt, Artificial Sequence
  Description of Artificial Sequence: Synthetic oligonucleotide
caggcagagcaguaaagcg

SEQ ID NO: 2530938 - RNA, 19 nt, Artificial Sequence
  Description of Artificial Sequence: Synthetic oligonucleotide
ucugcauucgaagcuacug

SEQ ID NO: 2530939 - RNA, 19 nt, Artificial Sequence
  Description of Artificial Sequence: Synthetic oligonucleotide
cucuaucaccuuuagugag

SEQ ID NO: 2530940 - RNA, 19 nt, Artificial Sequence
  Description of Artificial Sequence: Synthetic oligonucleotide
caacacucucgccacaugg

SEQ ID NO: 2530941 - RNA, 19 nt, Artificial Sequence
  Description of Artificial Sequence: Synthetic oligonucleotide
uucccuaugccuuccacac

SEQ ID NO: 2530942 - RNA, 19 nt, Artificial Sequence
  Description of Artificial Sequence: Synthetic oligonucleotide
aaugcagucuaaacaauau

SEQ ID NO: 2530943 - RNA, 19 nt, Artificial Sequence
  Description of Artificial Sequence: Synthetic oligonucleotide
aagcuuuggcgcauugacc

SEQ ID NO: 2530944 - RNA, 19 nt, Artificial Sequence
  Description of Artificial Sequence: Synthetic oligonucleotide
ugcauuauucccacucacu

SEQ ID NO: 2530945 - RNA, 19 nt, Artificial Sequence
  Description of Artificial Sequence: Synthetic oligonucleotide
ugcugcauuauucccacuc

SEQ ID NO: 2530946 - RNA, 19 nt, Artificial Sequence
  Description of Artificial Sequence: Synthetic oligonucleotide
  modified_base (12)..(12): a, c, u, g, unknown or other
uguagagacacnggugcag

SEQ ID NO: 2530947 - RNA, 19 nt, Artificial Sequence
  Description of Artificial Sequence: Synthetic oligonucleotide
aggcagagcaguaaagcgc

SEQ ID NO: 2530948 - RNA, 19 nt, Artificial Sequence
  Description of Artificial Sequence: Synthetic oligonucleotide
ucaggcagagcaguaaagc

SEQ ID NO: 2530949 - RNA, 19 nt, Artificial Sequence
  Description of Artificial Sequence: Synthetic oligonucleotide
uuucaccgguggaaggugg

SEQ ID NO: 2530950 - RNA, 19 nt, Artificial Sequence
  Description of Artificial Sequence: Synthetic oligonucleotide
uucccacucacuccaauac

SEQ ID NO: 2530951 - RNA, 19 nt, Artificial Sequence
  Description of Artificial Sequence: Synthetic oligonucleotide
uugucuauugggucacugc

SEQ ID NO: 2530952 - RNA, 19 nt, Artificial Sequence
  Description of Artificial Sequence: Synthetic oligonucleotide
ucuccuacucuuuucccug

SEQ ID NO: 2530953 - RNA, 19 nt, Artificial Sequence
  Description of Artificial Sequence: Synthetic oligonucleotide
  modified_base (5)..(5): a, c, u, g, unknown or other
acacnggugcagcacagag

SEQ ID NO: 2530954 - RNA, 19 nt, Artificial Sequence
  Description of Artificial Sequence: Synthetic oligonucleotide
agaaucgcauugucuauug

SEQ ID NO: 2530955 - RNA, 19 nt, Artificial Sequence
  Description of Artificial Sequence: Synthetic oligonucleotide
cugcauucgaagcuacugg

SEQ ID NO: 2530956 - RNA, 19 nt, Artificial Sequence
  Description of Artificial Sequence: Synthetic oligonucleotide
gaguacgaacaaaauaaug

SEQ ID NO: 2530957 - RNA, 19 nt, Artificial Sequence
  Description of Artificial Sequence: Synthetic oligonucleotide
cucgccacaugguucaggg

SEQ ID NO: 2530958 - RNA, 19 nt, Artificial Sequence
  Description of Artificial Sequence: Synthetic oligonucleotide
accuuuagugagugggaac

SEQ ID NO: 2530959 - RNA, 19 nt, Artificial Sequence
  Description of Artificial Sequence: Synthetic oligonucleotide
aagcgcagagaagaguuag

SEQ ID NO: 2530960 - RNA, 19 nt, Artificial Sequence
  Description of Artificial Sequence: Synthetic oligonucleotide
uuugggaagcuuuggcgca

SEQ ID NO: 2530961 - RNA, 19 nt, Artificial Sequence
  Description of Artificial Sequence: Synthetic oligonucleotide
aggaggucuauucuuguga

SEQ ID NO: 2530962 - RNA, 19 nt, Artificial Sequence
  Description of Artificial Sequence: Synthetic oligonucleotide
ucggugguuaagaaucgca

SEQ ID NO: 2530963 - RNA, 19 nt, Artificial Sequence
  Description of Artificial Sequence: Synthetic oligonucleotide
auucuugugagagcucgac

SEQ ID NO: 2530964 - RNA, 19 nt, Artificial Sequence
  Description of Artificial Sequence: Synthetic oligonucleotide
uucuuugcuugaagagggg

SEQ ID NO: 2530965 - RNA, 19 nt, Artificial Sequence
  Description of Artificial Sequence: Synthetic oligonucleotide
uguuuccacaucugcauuc

SEQ ID NO: 2530966 - RNA, 19 nt, Artificial Sequence
  Description of Artificial Sequence: Synthetic oligonucleotide
uuuggcgcauugaccacag

SEQ ID NO: 2530967 - RNA, 19 nt, Artificial Sequence
  Description of Artificial Sequence: Synthetic oligonucleotide
cacuccaauaccacgagca

SEQ ID NO: 2530968 - RNA, 19 nt, Artificial Sequence
  Description of Artificial Sequence: Synthetic oligonucleotide
aauaccacgagcagauaaa

SEQ ID NO: 2530969 - RNA, 19 nt, Artificial Sequence
  Description of Artificial Sequence: Synthetic oligonucleotide
guagacaacccaauuccag

SEQ ID NO: 2530970 - RNA, 19 nt, Artificial Sequence
  Description of Artificial Sequence: Synthetic oligonucleotide
auugaccacaggguucgcc

SEQ ID NO: 2530971 - RNA, 19 nt, Artificial Sequence
  Description of Artificial Sequence: Synthetic oligonucleotide
auugggucacugcucaaca

SEQ ID NO: 2530972 - RNA, 19 nt, Artificial Sequence
  Description of Artificial Sequence: Synthetic oligonucleotide
uuuagugagugggaacucu

SEQ ID NO: 2530973 - RNA, 19 nt, Artificial Sequence
  Description of Artificial Sequence: Synthetic oligonucleotide
aucauaggugcagccaugg

SEQ ID NO: 2530974 - RNA, 19 nt, Artificial Sequence
  Description of Artificial Sequence: Synthetic oligonucleotide
  modified_base (9)..(9): a, c, u, g, unknown or other
agagacacnggugcagcac

SEQ ID NO: 2530975 - RNA, 19 nt, Artificial Sequence
  Description of Artificial Sequence: Synthetic oligonucleotide
agagcucgacucucggugg

SEQ ID NO: 2530976 - RNA, 19 nt, Artificial Sequence
  Description of Artificial Sequence: Synthetic oligonucleotide
cacucacuccaauaccacg

SEQ ID NO: 2530977 - RNA, 19 nt, Artificial Sequence
  Description of Artificial Sequence: Synthetic oligonucleotide
cagagaaguaggcggacag

SEQ ID NO: 2530978 - RNA, 19 nt, Artificial Sequence
  Description of Artificial Sequence: Synthetic oligonucleotide
aagaggggcuuucaccggu

SEQ ID NO: 2530979 - RNA, 19 nt, Artificial Sequence
  Description of Artificial Sequence: Synthetic oligonucleotide
caguaaagcgcagagaaga

SEQ ID NO: 2530980 - RNA, 19 nt, Artificial Sequence
  Description of Artificial Sequence: Synthetic oligonucleotide
gaagaggggcuuucaccgg

SEQ ID NO: 2530981 - RNA, 19 nt, Artificial Sequence
  Description of Artificial Sequence: Synthetic oligonucleotide
caaguaucuccucccggcg

SEQ ID NO: 2530982 - RNA, 19 nt, Artificial Sequence
  Description of Artificial Sequence: Synthetic oligonucleotide
ucucagcccucuaucaccu

SEQ ID NO: 2530983 - RNA, 19 nt, Artificial Sequence
  Description of Artificial Sequence: Synthetic oligonucleotide
uccagagggucgaagccug

SEQ ID NO: 2530984 - RNA, 19 nt, Artificial Sequence
  Description of Artificial Sequence: Synthetic oligonucleotide
uaagaaucgcauugucuau

SEQ ID NO: 2530985 - RNA, 19 nt, Artificial Sequence
  Description of Artificial Sequence: Synthetic oligonucleotide
ucuggcguuaccuucccua

SEQ ID NO: 2530986 - RNA, 19 nt, Artificial Sequence
  Description of Artificial Sequence: Synthetic oligonucleotide
  modified_base (10)..(10): a, c, u, g, unknown or other
uagagacacnggugcagca

SEQ ID NO: 2530987 - RNA, 19 nt, Artificial Sequence
  Description of Artificial Sequence: Synthetic oligonucleotide
caauauaauaggguuccuc

SEQ ID NO: 2530988 - RNA, 19 nt, Artificial Sequence
  Description of Artificial Sequence: Synthetic oligonucleotide
accagagaauuguguagag

SEQ ID NO: 2530989 - RNA, 19 nt, Artificial Sequence
  Description of Artificial Sequence: Synthetic oligonucleotide
ucccacucacuccaauacc

SEQ ID NO: 2530990 - RNA, 19 nt, Artificial Sequence
  Description of Artificial Sequence: Synthetic oligonucleotide
cacugcucaacacucucgc

SEQ ID NO: 2530991 - RNA, 19 nt, Artificial Sequence
  Description of Artificial Sequence: Synthetic oligonucleotide
gacaggaggucuauucuug

SEQ ID NO: 2530992 - RNA, 19 nt, Artificial Sequence
  Description of Artificial Sequence: Synthetic oligonucleotide
gagaaguaggcggacagga

SEQ ID NO: 2530993 - RNA, 19 nt, Artificial Sequence
  Description of Artificial Sequence: Synthetic oligonucleotide
acucucgccacaugguuca

SEQ ID NO: 2530994 - RNA, 19 nt, Artificial Sequence
  Description of Artificial Sequence: Synthetic oligonucleotide
uauucuugugagagcucga

SEQ ID NO: 2530995 - RNA, 19 nt, Artificial Sequence
  Description of Artificial Sequence: Synthetic oligonucleotide
uauugggucacugcucaac

SEQ ID NO: 2530996 - RNA, 19 nt, Artificial Sequence
  Description of Artificial Sequence: Synthetic oligonucleotide
ugcucaacacucucgccac

SEQ ID NO: 2530997 - RNA, 19 nt, Artificial Sequence
  Description of Artificial Sequence: Synthetic oligonucleotide
aucuuguggaguacgaaca

SEQ ID NO: 2530998 - RNA, 19 nt, Artificial Sequence
  Description of Artificial Sequence: Synthetic oligonucleotide
aaguaggcggacaggaggu

SEQ ID NO: 2530999 - RNA, 19 nt, Artificial Sequence
  Description of Artificial Sequence: Synthetic oligonucleotide
cauucgaagcuacuggcca

SEQ ID NO: 2531000 - RNA, 19 nt, Artificial Sequence
  Description of Artificial Sequence: Synthetic oligonucleotide
aguaaagcgcagagaagag

SEQ ID NO: 2531001 - RNA, 19 nt, Artificial Sequence
  Description of Artificial Sequence: Synthetic oligonucleotide
uaucaccuuuagugagugg

SEQ ID NO: 2531002 - RNA, 19 nt, Artificial Sequence
  Description of Artificial Sequence: Synthetic oligonucleotide
gcaaguaucuccucccggc

SEQ ID NO: 2531003 - RNA, 19 nt, Artificial Sequence
  Description of Artificial Sequence: Synthetic oligonucleotide
uacucuuuucccugcugcu

SEQ ID NO: 2531004 - RNA, 19 nt, Artificial Sequence
  Description of Artificial Sequence: Synthetic oligonucleotide
agagaaguaggcggacagg

SEQ ID NO: 2531005 - RNA, 19 nt, Artificial Sequence
  Description of Artificial Sequence: Synthetic oligonucleotide
ugguuaagaaucgcauugu

SEQ ID NO: 2531006 - RNA, 19 nt, Artificial Sequence
  Description of Artificial Sequence: Synthetic oligonucleotide
aaucauaggugcagccaug

SEQ ID NO: 2531007 - RNA, 19 nt, Artificial Sequence
  Description of Artificial Sequence: Synthetic oligonucleotide
cccuuguaaucauaggugc

SEQ ID NO: 2531008 - RNA, 19 nt, Artificial Sequence
  Description of Artificial Sequence: Synthetic oligonucleotide
ggcguuaccuucccuaugc

SEQ ID NO: 2531009 - RNA, 19 nt, Artificial Sequence
  Description of Artificial Sequence: Synthetic oligonucleotide
guggaguacgaacaaaaua

SEQ ID NO: 2531010 - RNA, 19 nt, Artificial Sequence
  Description of Artificial Sequence: Synthetic oligonucleotide
  modified_base (8)..(8): a, c, u, g, unknown or other
gagacacnggugcagcaca

SEQ ID NO: 2531011 - RNA, 19 nt, Artificial Sequence
  Description of Artificial Sequence: Synthetic oligonucleotide
ucuauucuugugagagcuc

SEQ ID NO: 2531012 - RNA, 19 nt, Artificial Sequence
  Description of Artificial Sequence: Synthetic oligonucleotide
acucuggcguuaccuuccc

SEQ ID NO: 2531013 - RNA, 19 nt, Artificial Sequence
  Description of Artificial Sequence: Synthetic oligonucleotide
  modified_base (11)..(11): a, c, u, g, unknown or other
guagagacacnggugcagc

SEQ ID NO: 2531014 - RNA, 19 nt, Artificial Sequence
  Description of Artificial Sequence: Synthetic oligonucleotide
aagaaucgcauugucuauu

SEQ ID NO: 2531015 - RNA, 19 nt, Artificial Sequence
  Description of Artificial Sequence: Synthetic oligonucleotide
ggaaguuuguagacaaccc

SEQ ID NO: 2531016 - RNA, 19 nt, Artificial Sequence
  Description of Artificial Sequence: Synthetic oligonucleotide
ucugcauagcggugagaug

SEQ ID NO: 2531017 - RNA, 19 nt, Artificial Sequence
  Description of Artificial Sequence: Synthetic oligonucleotide
gucgaagccugccugcccc

SEQ ID NO: 2531018 - RNA, 19 nt, Artificial Sequence
  Description of Artificial Sequence: Synthetic oligonucleotide
cugcauuauucccacucac

SEQ ID NO: 2531019 - RNA, 19 nt, Artificial Sequence
  Description of Artificial Sequence: Synthetic oligonucleotide
gcaaaucuuguggaguacg

SEQ ID NO: 2531020 - RNA, 19 nt, Artificial Sequence
  Description of Artificial Sequence: Synthetic oligonucleotide
caauaccacgagcagauaa

SEQ ID NO: 2531021 - RNA, 19 nt, Artificial Sequence
  Description of Artificial Sequence: Synthetic oligonucleotide
auugucuauugggucacug

SEQ ID NO: 2531022 - RNA, 19 nt, Artificial Sequence
  Description of Artificial Sequence: Synthetic oligonucleotide
ucgcauugucuauuggguc

SEQ ID NO: 2531023 - RNA, 19 nt, Artificial Sequence
  Description of Artificial Sequence: Synthetic oligonucleotide
cuaucaccuuuagugagug

SEQ ID NO: 2531024 - RNA, 19 nt, Artificial Sequence
  Description of Artificial Sequence: Synthetic oligonucleotide
uagguucugacuggggaga

SEQ ID NO: 2531025 - RNA, 19 nt, Artificial Sequence
  Description of Artificial Sequence: Synthetic oligonucleotide
uucaccgguggaagguggc

SEQ ID NO: 2531026 - RNA, 19 nt, Artificial Sequence
  Description of Artificial Sequence: Synthetic oligonucleotide
cugcaaguaucuccucccg

SEQ ID NO: 2531027 - RNA, 19 nt, Artificial Sequence
  Description of Artificial Sequence: Synthetic oligonucleotide
aacacucucgccacauggu

SEQ ID NO: 2531028 - RNA, 19 nt, Artificial Sequence
  Description of Artificial Sequence: Synthetic oligonucleotide
accgguggaagguggcggg

SEQ ID NO: 2531029 - RNA, 19 nt, Artificial Sequence
  Description of Artificial Sequence: Synthetic oligonucleotide
uuugcuugaagaggggcuu

SEQ ID NO: 2531030 - RNA, 19 nt, Artificial Sequence
  Description of Artificial Sequence: Synthetic oligonucleotide
ugcauagcggugagaugca

SEQ ID NO: 2531031 - RNA, 19 nt, Artificial Sequence
  Description of Artificial Sequence: Synthetic oligonucleotide
caaaucuuguggaguacga

SEQ ID NO: 2531032 - RNA, 19 nt, Artificial Sequence
  Description of Artificial Sequence: Synthetic oligonucleotide
cagucuaaacaauauuucu

SEQ ID NO: 2531033 - RNA, 19 nt, Artificial Sequence
  Description of Artificial Sequence: Synthetic oligonucleotide
acaggaggucuauucuugu

SEQ ID NO: 2531034 - RNA, 19 nt, Artificial Sequence
  Description of Artificial Sequence: Synthetic oligonucleotide
gugagagcucgacucucgg

SEQ ID NO: 2531035 - RNA, 19 nt, Artificial Sequence
  Description of Artificial Sequence: Synthetic oligonucleotide
agagaauuguguagagaca

SEQ ID NO: 2531036 - RNA, 19 nt, Artificial Sequence
  Description of Artificial Sequence: Synthetic oligonucleotide
cugucaauauaauaggguu

SEQ ID NO: 2531037 - RNA, 19 nt, Artificial Sequence
  Description of Artificial Sequence: Synthetic oligonucleotide
augcagucuaaacaauauu

SEQ ID NO: 2531038 - RNA, 19 nt, Artificial Sequence
  Description of Artificial Sequence: Synthetic oligonucleotide
ugagagcucgacucucggu

SEQ ID NO: 2531039 - RNA, 19 nt, Artificial Sequence
  Description of Artificial Sequence: Synthetic oligonucleotide
ucagcccucuaucaccuuu

SEQ ID NO: 2531040 - RNA, 19 nt, Artificial Sequence
  Description of Artificial Sequence: Synthetic oligonucleotide
uuuccacaucugcauucga

SEQ ID NO: 2531041 - RNA, 19 nt, Artificial Sequence
  Description of Artificial Sequence: Synthetic oligonucleotide
gaggggcuuucaccggugg

SEQ ID NO: 2531042 - RNA, 19 nt, Artificial Sequence
  Description of Artificial Sequence: Synthetic oligonucleotide
gucuauucuugugagagcu

SEQ ID NO: 2531043 - RNA, 19 nt, Artificial Sequence
  Description of Artificial Sequence: Synthetic oligonucleotide
auucccacucacuccaaua

SEQ ID NO: 2531044 - RNA, 19 nt, Artificial Sequence
  Description of Artificial Sequence: Synthetic oligonucleotide
agagggucgaagccugccu

SEQ ID NO: 2531045 - RNA, 19 nt, Artificial Sequence
  Description of Artificial Sequence: Synthetic oligonucleotide
acucucggugguuaagaau

SEQ ID NO: 2531046 - RNA, 19 nt, Artificial Sequence
  Description of Artificial Sequence: Synthetic oligonucleotide
uuucccugcugcugcauua

SEQ ID NO: 2531047 - RNA, 19 nt, Artificial Sequence
  Description of Artificial Sequence: Synthetic oligonucleotide
ucaauauaauaggguuccu

SEQ ID NO: 2531048 - RNA, 19 nt, Artificial Sequence
  Description of Artificial Sequence: Synthetic oligonucleotide
ccugcaaguaucuccuccc

SEQ ID NO: 2531049 - RNA, 19 nt, Artificial Sequence
  Description of Artificial Sequence: Synthetic oligonucleotide
ucaccgguggaagguggcg

SEQ ID NO: 2531050 - RNA, 19 nt, Artificial Sequence
  Description of Artificial Sequence: Synthetic oligonucleotide
gguuaagaaucgcauuguc

SEQ ID NO: 2531051 - RNA, 19 nt, Artificial Sequence
  Description of Artificial Sequence: Synthetic oligonucleotide
caggaggucuauucuugug

SEQ ID NO: 2531052 - RNA, 19 nt, Artificial Sequence
  Description of Artificial Sequence: Synthetic oligonucleotide
agaugcacagaaguuguuu

SEQ ID NO: 2531053 - RNA, 19 nt, Artificial Sequence
  Description of Artificial Sequence: Synthetic oligonucleotide
aggguucgccuccugcaag

SEQ ID NO: 2531054 - RNA, 19 nt, Artificial Sequence
  Description of Artificial Sequence: Synthetic oligonucleotide
aaagugcuggaaguuugua

SEQ ID NO: 2531055 - RNA, 19 nt, Artificial Sequence
  Description of Artificial Sequence: Synthetic oligonucleotide
cauaggugcagccaugggu

SEQ ID NO: 2531056 - RNA, 19 nt, Artificial Sequence
  Description of Artificial Sequence: Synthetic oligonucleotide
agaaguaggcggacaggag

SEQ ID NO: 2531057 - RNA, 19 nt, Artificial Sequence
  Description of Artificial Sequence: Synthetic oligonucleotide
cacucucgccacaugguuc

SEQ ID NO: 2531058 - RNA, 19 nt, Artificial Sequence
  Description of Artificial Sequence: Synthetic oligonucleotide
cuggaaguuuguagacaac

SEQ ID NO: 2531059 - RNA, 19 nt, Artificial Sequence
  Description of Artificial Sequence: Synthetic oligonucleotide
cauagcggugagaugcaca

SEQ ID NO: 2531060 - RNA, 19 nt, Artificial Sequence
  Description of Artificial Sequence: Synthetic oligonucleotide
  modified_base (19)..(19): a, c, u, g, unknown or other
agaauuguguagagacacn

SEQ ID NO: 2531061 - RNA, 19 nt, Artificial Sequence
  Description of Artificial Sequence: Synthetic oligonucleotide
uggcguuaccuucccuaug

SEQ ID NO: 2531062 - RNA, 19 nt, Artificial Sequence
  Description of Artificial Sequence: Synthetic oligonucleotide
gcagucuaaacaauauuuc

SEQ ID NO: 2531063 - RNA, 19 nt, Artificial Sequence
  Description of Artificial Sequence: Synthetic oligonucleotide
ucugacuggggagaacuuu

SEQ ID NO: 2531064 - RNA, 19 nt, Artificial Sequence
  Description of Artificial Sequence: Synthetic oligonucleotide
aguuuguagacaacccaau

SEQ ID NO: 2531065 - RNA, 19 nt, Artificial Sequence
  Description of Artificial Sequence: Synthetic oligonucleotide
  modified_base (7)..(7): a, c, u, g, unknown or other
agacacnggugcagcacag

SEQ ID NO: 2531066 - RNA, 19 nt, Artificial Sequence
  Description of Artificial Sequence: Synthetic oligonucleotide
ucgccacaugguucagggg

SEQ ID NO: 2531067 - RNA, 19 nt, Artificial Sequence
  Description of Artificial Sequence: Synthetic oligonucleotide
uucgaagcuacuggccagu

SEQ ID NO: 2531068 - RNA, 19 nt, Artificial Sequence
  Description of Artificial Sequence: Synthetic oligonucleotide
ggguuccucaggcagagca

SEQ ID NO: 2531069 - RNA, 19 nt, Artificial Sequence
  Description of Artificial Sequence: Synthetic oligonucleotide
auaccacgagcagauaaaa

SEQ ID NO: 2531070 - RNA, 19 nt, Artificial Sequence
  Description of Artificial Sequence: Synthetic oligonucleotide
ggucuauucuugugagagc

SEQ ID NO: 2531071 - RNA, 19 nt, Artificial Sequence
  Description of Artificial Sequence: Synthetic oligonucleotide
gcccuuguaaucauaggug

SEQ ID NO: 2531072 - RNA, 19 nt, Artificial Sequence
  Description of Artificial Sequence: Synthetic oligonucleotide
cuuucaccgguggaaggug

SEQ ID NO: 2531073 - RNA, 19 nt, Artificial Sequence
  Description of Artificial Sequence: Synthetic oligonucleotide
ucgacucucggugguuaag

SEQ ID NO: 2531074 - RNA, 19 nt, Artificial Sequence
  Description of Artificial Sequence: Synthetic oligonucleotide
acacucucgccacaugguu

SEQ ID NO: 2531075 - RNA, 19 nt, Artificial Sequence
  Description of Artificial Sequence: Synthetic oligonucleotide
gaagguggcgggugcuuuc

SEQ ID NO: 2531076 - RNA, 19 nt, Artificial Sequence
  Description of Artificial Sequence: Synthetic oligonucleotide
  modified_base (4)..(4): a, c, u, g, unknown or other
cacnggugcagcacagaga

SEQ ID NO: 2531077 - RNA, 19 nt, Artificial Sequence
  Description of Artificial Sequence: Synthetic oligonucleotide
acaucugcauucgaagcua

SEQ ID NO: 2531078 - RNA, 19 nt, Artificial Sequence
  Description of Artificial Sequence: Synthetic oligonucleotide
uuauucccacucacuccaa

SEQ ID NO: 2531079 - RNA, 19 nt, Artificial Sequence
  Description of Artificial Sequence: Synthetic oligonucleotide
cuuuagugagugggaacuc

SEQ ID NO: 2531080 - RNA, 19 nt, Artificial Sequence
  Description of Artificial Sequence: Synthetic oligonucleotide
gacucucggugguuaagaa

SEQ ID NO: 2531081 - RNA, 19 nt, Artificial Sequence
  Description of Artificial Sequence: Synthetic oligonucleotide
aagguggcgggugcuuucu

SEQ ID NO: 2531082 - RNA, 19 nt, Artificial Sequence
  Description of Artificial Sequence: Synthetic oligonucleotide
uaggugcagccaugggucu

SEQ ID NO: 2531083 - RNA, 19 nt, Artificial Sequence
  Description of Artificial Sequence: Synthetic oligonucleotide
ggcuuucaccgguggaagg

SEQ ID NO: 2531084 - RNA, 19 nt, Artificial Sequence
  Description of Artificial Sequence: Synthetic oligonucleotide
aguaggcggacaggagguc

SEQ ID NO: 2531085 - RNA, 19 nt, Artificial Sequence
  Description of Artificial Sequence: Synthetic oligonucleotide
uugugagagcucgacucuc

SEQ ID NO: 2531086 - RNA, 19 nt, Artificial Sequence
  Description of Artificial Sequence: Synthetic oligonucleotide
uuggcgcauugaccacagg

SEQ ID NO: 2531087 - RNA, 19 nt, Artificial Sequence
  Description of Artificial Sequence: Synthetic oligonucleotide
guucugacuggggagaacu

SEQ ID NO: 2531088 - RNA, 19 nt, Artificial Sequence
  Description of Artificial Sequence: Synthetic oligonucleotide
auaggguuccucaggcaga

SEQ ID NO: 2531089 - RNA, 19 nt, Artificial Sequence
  Description of Artificial Sequence: Synthetic oligonucleotide
cucggugguuaagaaucgc

SEQ ID NO: 2531090 - RNA, 19 nt, Artificial Sequence
  Description of Artificial Sequence: Synthetic oligonucleotide
caccgguggaagguggcgg

SEQ ID NO: 2531091 - RNA, 19 nt, Artificial Sequence
  Description of Artificial Sequence: Synthetic oligonucleotide
uaggcggacaggaggucua

SEQ ID NO: 2531092 - RNA, 19 nt, Artificial Sequence
  Description of Artificial Sequence: Synthetic oligonucleotide
gguggcgggugcuuucucc

SEQ ID NO: 2531093 - RNA, 19 nt, Artificial Sequence
  Description of Artificial Sequence: Synthetic oligonucleotide
ugggaacucuggcguuacc

SEQ ID NO: 2531094 - RNA, 19 nt, Artificial Sequence
  Description of Artificial Sequence: Synthetic oligonucleotide
ggcgcccuuguaaucauag

SEQ ID NO: 2531095 - RNA, 19 nt, Artificial Sequence
  Description of Artificial Sequence: Synthetic oligonucleotide
cuccaauaccacgagcaga

SEQ ID NO: 2531096 - RNA, 19 nt, Artificial Sequence
  Description of Artificial Sequence: Synthetic oligonucleotide
guuuguagacaacccaauu

SEQ ID NO: 2531097 - RNA, 19 nt, Artificial Sequence
  Description of Artificial Sequence: Synthetic oligonucleotide
gcugcauuauucccacuca

SEQ ID NO: 2531098 - RNA, 19 nt, Artificial Sequence
  Description of Artificial Sequence: Synthetic oligonucleotide
cugcucugcggcucucagc

SEQ ID NO: 2531099 - RNA, 19 nt, Artificial Sequence
  Description of Artificial Sequence: Synthetic oligonucleotide
gagcaguaaagcgcagaga

SEQ ID NO: 2531100 - RNA, 19 nt, Artificial Sequence
  Description of Artificial Sequence: Synthetic oligonucleotide
cagagggucgaagccugcc

SEQ ID NO: 2531101 - RNA, 19 nt, Artificial Sequence
  Description of Artificial Sequence: Synthetic oligonucleotide
ccucuaucaccuuuaguga

SEQ ID NO: 2531102 - RNA, 19 nt, Artificial Sequence
  Description of Artificial Sequence: Synthetic oligonucleotide
gcauucgaagcuacuggcc

SEQ ID NO: 2531103 - RNA, 19 nt, Artificial Sequence
  Description of Artificial Sequence: Synthetic oligonucleotide
aagcuacuggccaguccug

SEQ ID NO: 2531104 - RNA, 19 nt, Artificial Sequence
  Description of Artificial Sequence: Synthetic oligonucleotide
cuuuggcgcauugaccaca

SEQ ID NO: 2531105 - RNA, 19 nt, Artificial Sequence
  Description of Artificial Sequence: Synthetic oligonucleotide
aggggcuuucaccggugga

SEQ ID NO: 2531106 - RNA, 19 nt, Artificial Sequence
  Description of Artificial Sequence: Synthetic oligonucleotide
guaaagcgcagagaagagu

SEQ ID NO: 2531107 - RNA, 19 nt, Artificial Sequence
  Description of Artificial Sequence: Synthetic oligonucleotide
cccacucacuccaauacca

SEQ ID NO: 2531108 - RNA, 19 nt, Artificial Sequence
  Description of Artificial Sequence: Synthetic oligonucleotide
  modified_base (13)..(13): a, c, u, g, unknown or other
guguagagacacnggugca

SEQ ID NO: 2531109 - RNA, 19 nt, Artificial Sequence
  Description of Artificial Sequence: Synthetic oligonucleotide
aggugcagccaugggucuc

SEQ ID NO: 2531110 - RNA, 19 nt, Artificial Sequence
  Description of Artificial Sequence: Synthetic oligonucleotide
agcuacuggccaguccugu

SEQ ID NO: 2531111 - RNA, 19 nt, Artificial Sequence
  Description of Artificial Sequence: Synthetic oligonucleotide
cacaugguucaggggcugc

SEQ ID NO: 2531112 - RNA, 19 nt, Artificial Sequence
  Description of Artificial Sequence: Synthetic oligonucleotide
cucugcauagcggugagau

SEQ ID NO: 2531113 - RNA, 19 nt, Artificial Sequence
  Description of Artificial Sequence: Synthetic oligonucleotide
caugguucaggggcugcuc

SEQ ID NO: 2531114 - RNA, 19 nt, Artificial Sequence
  Description of Artificial Sequence: Synthetic oligonucleotide
  modified_base (6)..(6): a, c, u, g, unknown or other
gacacnggugcagcacaga

SEQ ID NO: 2531115 - RNA, 19 nt, Artificial Sequence
  Description of Artificial Sequence: Synthetic oligonucleotide
gcucucagcccucuaucac

SEQ ID NO: 2531116 - RNA, 19 nt, Artificial Sequence
  Description of Artificial Sequence: Synthetic oligonucleotide
agguggcgggugcuuucuc

SEQ ID NO: 2531117 - RNA, 19 nt, Artificial Sequence
  Description of Artificial Sequence: Synthetic oligonucleotide
agugggaacucuggcguua

SEQ ID NO: 2531118 - RNA, 19 nt, Artificial Sequence
  Description of Artificial Sequence: Synthetic oligonucleotide
ggcucucagcccucuauca

SEQ ID NO: 2531119 - RNA, 19 nt, Artificial Sequence
  Description of Artificial Sequence: Synthetic oligonucleotide
  modified_base (2)..(2): a, c, u, g, unknown or other
cnggugcagcacagagaag

SEQ ID NO: 2531120 - RNA, 19 nt, Artificial Sequence
  Description of Artificial Sequence: Synthetic oligonucleotide
gguucaggggcugcucugc

SEQ ID NO: 2531121 - RNA, 19 nt, Artificial Sequence
  Description of Artificial Sequence: Synthetic oligonucleotide
cagagcaguaaagcgcaga

SEQ ID NO: 2531122 - RNA, 19 nt, Artificial Sequence
  Description of Artificial Sequence: Synthetic oligonucleotide
agcgcagagaagaguuaga

SEQ ID NO: 2531123 - RNA, 19 nt, Artificial Sequence
  Description of Artificial Sequence: Synthetic oligonucleotide
gcgcccuuguaaucauagg

SEQ ID NO: 2531124 - RNA, 19 nt, Artificial Sequence
  Description of Artificial Sequence: Synthetic oligonucleotide
gggcuuucaccgguggaag

SEQ ID NO: 2531125 - RNA, 19 nt, Artificial Sequence
  Description of Artificial Sequence: Synthetic oligonucleotide
gcauugucuauugggucac

SEQ ID NO: 2531126 - RNA, 19 nt, Artificial Sequence
  Description of Artificial Sequence: Synthetic oligonucleotide
cgcauugucuauuggguca

SEQ ID NO: 2531127 - RNA, 19 nt, Artificial Sequence
  Description of Artificial Sequence: Synthetic oligonucleotide
ucgaagcuacuggccaguc

SEQ ID NO: 2531128 - RNA, 19 nt, Artificial Sequence
  Description of Artificial Sequence: Synthetic oligonucleotide
aggguuccucaggcagagc

SEQ ID NO: 2531129 - RNA, 19 nt, Artificial Sequence
  Description of Artificial Sequence: Synthetic oligonucleotide
guuagauuuugggaagcuu

SEQ ID NO: 2531130 - RNA, 19 nt, Artificial Sequence
  Description of Artificial Sequence: Synthetic oligonucleotide
caccuuuagugagugggaa

SEQ ID NO: 2531131 - RNA, 19 nt, Artificial Sequence
  Description of Artificial Sequence: Synthetic oligonucleotide
ggugguuaagaaucgcauu

SEQ ID NO: 2531132 - RNA, 19 nt, Artificial Sequence
  Description of Artificial Sequence: Synthetic oligonucleotide
ggucgaagccugccugccc

SEQ ID NO: 2531133 - RNA, 19 nt, Artificial Sequence
  Description of Artificial Sequence: Synthetic oligonucleotide
agaggggcuuucaccggug

SEQ ID NO: 2531134 - RNA, 19 nt, Artificial Sequence
  Description of Artificial Sequence: Synthetic oligonucleotide
ggcaaaucuuguggaguac

SEQ ID NO: 2531135 - RNA, 19 nt, Artificial Sequence
  Description of Artificial Sequence: Synthetic oligonucleotide
ggcgggugcuuucuccuac

SEQ ID NO: 2531136 - RNA, 19 nt, Artificial Sequence
  Description of Artificial Sequence: Synthetic oligonucleotide
gugggaacucuggcguuac

SEQ ID NO: 2531137 - RNA, 19 nt, Artificial Sequence
  Description of Artificial Sequence: Synthetic oligonucleotide
uagcggugagaugcacaga

SEQ ID NO: 2531138 - RNA, 19 nt, Artificial Sequence
  Description of Artificial Sequence: Synthetic oligonucleotide
ggaagcuuuggcgcauuga

SEQ ID NO: 2531139 - RNA, 19 nt, Artificial Sequence
  Description of Artificial Sequence: Synthetic oligonucleotide
ccuuuagugagugggaacu

SEQ ID NO: 2531140 - RNA, 19 nt, Artificial Sequence
  Description of Artificial Sequence: Synthetic oligonucleotide
cgcauugaccacaggguuc

SEQ ID NO: 2531141 - RNA, 19 nt, Artificial Sequence
  Description of Artificial Sequence: Synthetic oligonucleotide
guaucuccucccggcgccc

SEQ ID NO: 2531142 - RNA, 19 nt, Artificial Sequence
  Description of Artificial Sequence: Synthetic oligonucleotide
gggaagcuuuggcgcauug

SEQ ID NO: 2531143 - RNA, 19 nt, Artificial Sequence
  Description of Artificial Sequence: Synthetic oligonucleotide
gcguuaccuucccuaugcc

SEQ ID NO: 2531144 - RNA, 19 nt, Artificial Sequence
  Description of Artificial Sequence: Synthetic oligonucleotide
gcuuuggcgcauugaccac

SEQ ID NO: 2531145 - RNA, 19 nt, Artificial Sequence
  Description of Artificial Sequence: Synthetic oligonucleotide
uggaagguggcgggugcuu

SEQ ID NO: 2531146 - RNA, 19 nt, Artificial Sequence
  Description of Artificial Sequence: Synthetic oligonucleotide
guggcgggugcuuucuccu

SEQ ID NO: 2531147 - RNA, 19 nt, Artificial Sequence
  Description of Artificial Sequence: Synthetic oligonucleotide
agguucugacuggggagaa

SEQ ID NO: 2531148 - RNA, 19 nt, Artificial Sequence
  Description of Artificial Sequence: Synthetic oligonucleotide
ggggcuuucaccgguggaa

SEQ ID NO: 2531149 - RNA, 19 nt, Artificial Sequence
  Description of Artificial Sequence: Synthetic oligonucleotide
uggcgggugcuuucuccua

SEQ ID NO: 2531150 - RNA, 19 nt, Artificial Sequence
  Description of Artificial Sequence: Synthetic oligonucleotide
ggcgcauugaccacagggu

SEQ ID NO: 2531151 - RNA, 19 nt, Artificial Sequence
  Description of Artificial Sequence: Synthetic oligonucleotide
guaggcggacaggaggucu

SEQ ID NO: 2531152 - RNA, 19 nt, Artificial Sequence
  Description of Artificial Sequence: Synthetic oligonucleotide
cuauugggucacugcucaa

SEQ ID NO: 2531153 - RNA, 19 nt, Artificial Sequence
  Description of Artificial Sequence: Synthetic oligonucleotide
caggguucgccuccugcaa

SEQ ID NO: 2531154 - RNA, 19 nt, Artificial Sequence
  Description of Artificial Sequence: Synthetic oligonucleotide
cucgacucucggugguuaa

SEQ ID NO: 2531155 - RNA, 19 nt, Artificial Sequence
  Description of Artificial Sequence: Synthetic oligonucleotide
cagcccucuaucaccuuua

SEQ ID NO: 2531156 - RNA, 19 nt, Artificial Sequence
  Description of Artificial Sequence: Synthetic oligonucleotide
cugaaagugcuggaaguuu

SEQ ID NO: 2531157 - RNA, 19 nt, Artificial Sequence
  Description of Artificial Sequence: Synthetic oligonucleotide
gggaacucuggcguuaccu

SEQ ID NO: 2531158 - RNA, 19 nt, Artificial Sequence
  Description of Artificial Sequence: Synthetic oligonucleotide
ggaguacgaacaaaauaau

SEQ ID NO: 2531159 - RNA, 19 nt, Artificial Sequence
  Description of Artificial Sequence: Synthetic oligonucleotide
gagcucgacucucgguggu

SEQ ID NO: 2531160 - RNA, 19 nt, Artificial Sequence
  Description of Artificial Sequence: Synthetic oligonucleotide
cuggcguuaccuucccuau

SEQ ID NO: 2531161 - RNA, 19 nt, Artificial Sequence
  Description of Artificial Sequence: Synthetic oligonucleotide
ucccggcgcccuuguaauc

SEQ ID NO: 2531162 - RNA, 19 nt, Artificial Sequence
  Description of Artificial Sequence: Synthetic oligonucleotide
ggugagaugcacagaaguu

SEQ ID NO: 2531163 - RNA, 19 nt, Artificial Sequence
  Description of Artificial Sequence: Synthetic oligonucleotide
ccagagaauuguguagaga

SEQ ID NO: 2531164 - RNA, 19 nt, Artificial Sequence
  Description of Artificial Sequence: Synthetic oligonucleotide
gcggugagaugcacagaag

SEQ ID NO: 2531165 - RNA, 19 nt, Artificial Sequence
  Description of Artificial Sequence: Synthetic oligonucleotide
gggucgaagccugccugcc

SEQ ID NO: 2531166 - RNA, 19 nt, Artificial Sequence
  Description of Artificial Sequence: Synthetic oligonucleotide
cuacuggccaguccuguuu

SEQ ID NO: 2531167 - RNA, 19 nt, Artificial Sequence
  Description of Artificial Sequence: Synthetic oligonucleotide
ccaugggucucugcauagc

SEQ ID NO: 2531168 - RNA, 19 nt, Artificial Sequence
  Description of Artificial Sequence: Synthetic oligonucleotide
gcuugaagaggggcuuuca

SEQ ID NO: 2531169 - RNA, 19 nt, Artificial Sequence
  Description of Artificial Sequence: Synthetic oligonucleotide
gcuuucaccgguggaaggu

SEQ ID NO: 2531170 - RNA, 19 nt, Artificial Sequence
  Description of Artificial Sequence: Synthetic oligonucleotide
ugggaagcuuuggcgcauu

SEQ ID NO: 2531171 - RNA, 19 nt, Artificial Sequence
  Description of Artificial Sequence: Synthetic oligonucleotide
ugcggcucucagcccucua

SEQ ID NO: 2531172 - RNA, 19 nt, Artificial Sequence
  Description of Artificial Sequence: Synthetic oligonucleotide
ccagagggucgaagccugc

SEQ ID NO: 2531173 - RNA, 19 nt, Artificial Sequence
  Description of Artificial Sequence: Synthetic oligonucleotide
cucucgccacaugguucag

SEQ ID NO: 2531174 - RNA, 19 nt, Artificial Sequence
  Description of Artificial Sequence: Synthetic oligonucleotide
gcauagcggugagaugcac

SEQ ID NO: 2531175 - RNA, 19 nt, Artificial Sequence
  Description of Artificial Sequence: Synthetic oligonucleotide
ggguucgccuccugcaagu

SEQ ID NO: 2531176 - RNA, 19 nt, Artificial Sequence
  Description of Artificial Sequence: Synthetic oligonucleotide
cucccggcgcccuuguaau

SEQ ID NO: 2531177 - RNA, 19 nt, Artificial Sequence
  Description of Artificial Sequence: Synthetic oligonucleotide
aggcggacaggaggucuau

SEQ ID NO: 2531178 - RNA, 19 nt, Artificial Sequence
  Description of Artificial Sequence: Synthetic oligonucleotide
gcgcagagaagaguuagau

SEQ ID NO: 2531179 - RNA, 19 nt, Artificial Sequence
  Description of Artificial Sequence: Synthetic oligonucleotide
uccucccggcgcccuugua

SEQ ID NO: 2531180 - RNA, 19 nt, Artificial Sequence
  Description of Artificial Sequence: Synthetic oligonucleotide
ccacaugguucaggggcug

SEQ ID NO: 2531181 - RNA, 19 nt, Artificial Sequence
  Description of Artificial Sequence: Synthetic oligonucleotide
ccucccggcgcccuuguaa

SEQ ID NO: 2531182 - RNA, 19 nt, Artificial Sequence
  Description of Artificial Sequence: Synthetic oligonucleotide
ggucacugcucaacacucu

SEQ ID NO: 2531183 - RNA, 19 nt, Artificial Sequence
  Description of Artificial Sequence: Synthetic oligonucleotide
cccggcgcccuuguaauca

SEQ ID NO: 2531184 - RNA, 19 nt, Artificial Sequence
  Description of Artificial Sequence: Synthetic oligonucleotide
cguuaccuucccuaugccu

SEQ ID NO: 2531185 - RNA, 19 nt, Artificial Sequence
  Description of Artificial Sequence: Synthetic oligonucleotide
cauugucuauugggucacu

SEQ ID NO: 2531186 - RNA, 19 nt, Artificial Sequence
  Description of Artificial Sequence: Synthetic oligonucleotide
cgacucucggugguuaaga

SEQ ID NO: 2531187 - RNA, 19 nt, Artificial Sequence
  Description of Artificial Sequence: Synthetic oligonucleotide
gcucgacucucggugguua

SEQ ID NO: 2531188 - RNA, 19 nt, Artificial Sequence
  Description of Artificial Sequence: Synthetic oligonucleotide
gcccucuaucaccuuuagu

SEQ ID NO: 2531189 - RNA, 19 nt, Artificial Sequence
  Description of Artificial Sequence: Synthetic oligonucleotide
gcggcucucagcccucuau

SEQ ID NO: 2531190 - RNA, 19 nt, Artificial Sequence
  Description of Artificial Sequence: Synthetic oligonucleotide
cuuuucccugcugcugcau

SEQ ID NO: 2531191 - RNA, 19 nt, Artificial Sequence
  Description of Artificial Sequence: Synthetic oligonucleotide
ccugaaagugcuggaaguu

SEQ ID NO: 2531192 - RNA, 19 nt, Artificial Sequence
  Description of Artificial Sequence: Synthetic oligonucleotide
gcuacuggccaguccuguu

SEQ ID NO: 2531193 - RNA, 19 nt, Artificial Sequence
  Description of Artificial Sequence: Synthetic oligonucleotide
gguucgccuccugcaagua

SEQ ID NO: 2531194 - RNA, 19 nt, Artificial Sequence
  Description of Artificial Sequence: Synthetic oligonucleotide
cucuggcguuaccuucccu

SEQ ID NO: 2531195 - RNA, 19 nt, Artificial Sequence
  Description of Artificial Sequence: Synthetic oligonucleotide
gcgggugcuuucuccuacu

SEQ ID NO: 2531196 - RNA, 19 nt, Artificial Sequence
  Description of Artificial Sequence: Synthetic oligonucleotide
cgguggaagguggcgggug

SEQ ID NO: 2531197 - RNA, 19 nt, Artificial Sequence
  Description of Artificial Sequence: Synthetic oligonucleotide
ggaagguggcgggugcuuu

SEQ ID NO: 2531198 - RNA, 19 nt, Artificial Sequence
  Description of Artificial Sequence: Synthetic oligonucleotide
cgcagagaagaguuagauu

SEQ ID NO: 2531199 - RNA, 19 nt, Artificial Sequence
  Description of Artificial Sequence: Synthetic oligonucleotide
cucagcccucuaucaccuu

SEQ ID NO: 2531200 - RNA, 19 nt, Artificial Sequence
  Description of Artificial Sequence: Synthetic oligonucleotide
ccaauaccacgagcagaua

SEQ ID NO: 2531201 - RNA, 19 nt, Artificial Sequence
  Description of Artificial Sequence: Synthetic oligonucleotide
cuccucccggcgcccuugu

SEQ ID NO: 2531202 - RNA, 19 nt, Artificial Sequence
  Description of Artificial Sequence: Synthetic oligonucleotide
ggcggacaggaggucuauu

SEQ ID NO: 2531203 - RNA, 19 nt, Artificial Sequence
  Description of Artificial Sequence: Synthetic oligonucleotide
ccggcgcccuuguaaucau

SEQ ID NO: 2531204 - RNA, 19 nt, Artificial Sequence
  Description of Artificial Sequence: Synthetic oligonucleotide
ccgguggaagguggcgggu

SEQ ID NO: 2531205 - RNA, 19 nt, Artificial Sequence
  Description of Artificial Sequence: Synthetic oligonucleotide
cggcgcccuuguaaucaua

SEQ ID NO: 2531206 - RNA, 19 nt, Artificial Sequence
  Description of Artificial Sequence: Synthetic oligonucleotide
uguuaugaauguuagaucg

SEQ ID NO: 2531207 - RNA, 19 nt, Artificial Sequence
  Description of Artificial Sequence: Synthetic oligonucleotide
aagaauuuuaggcaaauag

SEQ ID NO: 2531208 - RNA, 19 nt, Artificial Sequence
  Description of Artificial Sequence: Synthetic oligonucleotide
acgaugaagaauuuuaggc

SEQ ID NO: 2531209 - RNA, 19 nt, Artificial Sequence
  Description of Artificial Sequence: Synthetic oligonucleotide
uauucagugaaaauuagca

SEQ ID NO: 2531210 - RNA, 19 nt, Artificial Sequence
  Description of Artificial Sequence: Synthetic oligonucleotide
uuugcuauuauucagugaa

SEQ ID NO: 2531211 - RNA, 19 nt, Artificial Sequence
  Description of Artificial Sequence: Synthetic oligonucleotide
uugacuuucacagucaugg

SEQ ID NO: 2531212 - RNA, 19 nt, Artificial Sequence
  Description of Artificial Sequence: Synthetic oligonucleotide
aaaacagaugaagaaaacg

SEQ ID NO: 2531213 - RNA, 19 nt, Artificial Sequence
  Description of Artificial Sequence: Synthetic oligonucleotide
caaagugacgcuuagagag

SEQ ID NO: 2531214 - RNA, 19 nt, Artificial Sequence
  Description of Artificial Sequence: Synthetic oligonucleotide
gaaaacgacaaacacgagg

SEQ ID NO: 2531215 - RNA, 19 nt, Artificial Sequence
  Description of Artificial Sequence: Synthetic oligonucleotide
uugaauuuggcuuuuagcu

SEQ ID NO: 2531216 - RNA, 19 nt, Artificial Sequence
  Description of Artificial Sequence: Synthetic oligonucleotide
aaaauuagcagcagaaguc

SEQ ID NO: 2531217 - RNA, 19 nt, Artificial Sequence
  Description of Artificial Sequence: Synthetic oligonucleotide
uucagugaaaauuagcagc

SEQ ID NO: 2531218 - RNA, 19 nt, Artificial Sequence
  Description of Artificial Sequence: Synthetic oligonucleotide
ucaaucccaacgaagacgg

SEQ ID NO: 2531219 - RNA, 19 nt, Artificial Sequence
  Description of Artificial Sequence: Synthetic oligonucleotide
aauguauuugaauuuggcu

SEQ ID NO: 2531220 - RNA, 19 nt, Artificial Sequence
  Description of Artificial Sequence: Synthetic oligonucleotide
guugguuauauguagacag

SEQ ID NO: 2531221 - RNA, 19 nt, Artificial Sequence
  Description of Artificial Sequence: Synthetic oligonucleotide
aagaaaacgacaaacacga

SEQ ID NO: 2531222 - RNA, 19 nt, Artificial Sequence
  Description of Artificial Sequence: Synthetic oligonucleotide
aagacggucaguccaaaac

SEQ ID NO: 2531223 - RNA, 19 nt, Artificial Sequence
  Description of Artificial Sequence: Synthetic oligonucleotide
aaauagaaaguuuaagcau

SEQ ID NO: 2531224 - RNA, 19 nt, Artificial Sequence
  Description of Artificial Sequence: Synthetic oligonucleotide
guuauauguagacaguggg

SEQ ID NO: 2531225 - RNA, 19 nt, Artificial Sequence
  Description of Artificial Sequence: Synthetic oligonucleotide
gacaaagugacgcuuagag

SEQ ID NO: 2531226 - RNA, 19 nt, Artificial Sequence
  Description of Artificial Sequence: Synthetic oligonucleotide
aagcauuuucuuuucuccc

SEQ ID NO: 2531227 - RNA, 19 nt, Artificial Sequence
  Description of Artificial Sequence: Synthetic oligonucleotide
agugguuccaucucggagc

SEQ ID NO: 2531228 - RNA, 19 nt, Artificial Sequence
  Description of Artificial Sequence: Synthetic oligonucleotide
gaagaaaacgacaaacacg

SEQ ID NO: 2531229 - RNA, 19 nt, Artificial Sequence
  Description of Artificial Sequence: Synthetic oligonucleotide
uuagagaguguguagagcc

SEQ ID NO: 2531230 - RNA, 19 nt, Artificial Sequence
  Description of Artificial Sequence: Synthetic oligonucleotide
aacacgaggacaaagugac

SEQ ID NO: 2531231 - RNA, 19 nt, Artificial Sequence
  Description of Artificial Sequence: Synthetic oligonucleotide
agaaaguuuaagcauuuuc

SEQ ID NO: 2531232 - RNA, 19 nt, Artificial Sequence
  Description of Artificial Sequence: Synthetic oligonucleotide
uuuugaauguauuugaauu

SEQ ID NO: 2531233 - RNA, 19 nt, Artificial Sequence
  Description of Artificial Sequence: Synthetic oligonucleotide
uauuauucagugaaaauua

SEQ ID NO: 2531234 - RNA, 19 nt, Artificial Sequence
  Description of Artificial Sequence: Synthetic oligonucleotide
aauguuagaucgugguuuc

SEQ ID NO: 2531235 - RNA, 19 nt, Artificial Sequence
  Description of Artificial Sequence: Synthetic oligonucleotide
aaaacgacaaacacgagga

SEQ ID NO: 2531236 - RNA, 19 nt, Artificial Sequence
  Description of Artificial Sequence: Synthetic oligonucleotide
caccauuugacuuucacag

SEQ ID NO: 2531237 - RNA, 19 nt, Artificial Sequence
  Description of Artificial Sequence: Synthetic oligonucleotide
aaacagaugaagaaaacga

SEQ ID NO: 2531238 - RNA, 19 nt, Artificial Sequence
  Description of Artificial Sequence: Synthetic oligonucleotide
ucagugaaaauuagcagca

SEQ ID NO: 2531239 - RNA, 19 nt, Artificial Sequence
  Description of Artificial Sequence: Synthetic oligonucleotide
gaaugugcaaacuuccaag

SEQ ID NO: 2531240 - RNA, 19 nt, Artificial Sequence
  Description of Artificial Sequence: Synthetic oligonucleotide
aacagaugaagaaaacgac

SEQ ID NO: 2531241 - RNA, 19 nt, Artificial Sequence
  Description of Artificial Sequence: Synthetic oligonucleotide
ugaauguauuugaauuugg

SEQ ID NO: 2531242 - RNA, 19 nt, Artificial Sequence
  Description of Artificial Sequence: Synthetic oligonucleotide
uaagcauuuucuuuucucc

SEQ ID NO: 2531243 - RNA, 19 nt, Artificial Sequence
  Description of Artificial Sequence: Synthetic oligonucleotide
uaauagauguuucuucuga

SEQ ID NO: 2531244 - RNA, 19 nt, Artificial Sequence
  Description of Artificial Sequence: Synthetic oligonucleotide
cuguucaccaggaagagag

SEQ ID NO: 2531245 - RNA, 19 nt, Artificial Sequence
  Description of Artificial Sequence: Synthetic oligonucleotide
uuauucagugaaaauuagc

SEQ ID NO: 2531246 - RNA, 19 nt, Artificial Sequence
  Description of Artificial Sequence: Synthetic oligonucleotide
gcaaauagaaaguuuaagc

SEQ ID NO: 2531247 - RNA, 19 nt, Artificial Sequence
  Description of Artificial Sequence: Synthetic oligonucleotide
uguucaugaaccuuguuau

SEQ ID NO: 2531248 - RNA, 19 nt, Artificial Sequence
  Description of Artificial Sequence: Synthetic oligonucleotide
auguauuugaauuuggcuu

SEQ ID NO: 2531249 - RNA, 19 nt, Artificial Sequence
  Description of Artificial Sequence: Synthetic oligonucleotide
auagauguuucuucugagg

SEQ ID NO: 2531250 - RNA, 19 nt, Artificial Sequence
  Description of Artificial Sequence: Synthetic oligonucleotide
auccccaugauacacgcac

SEQ ID NO: 2531251 - RNA, 19 nt, Artificial Sequence
  Description of Artificial Sequence: Synthetic oligonucleotide
agauguuucuucugagggc

SEQ ID NO: 2531252 - RNA, 19 nt, Artificial Sequence
  Description of Artificial Sequence: Synthetic oligonucleotide
uuccaagugaaguucaucu

SEQ ID NO: 2531253 - RNA, 19 nt, Artificial Sequence
  Description of Artificial Sequence: Synthetic oligonucleotide
auucagugaaaauuagcag

SEQ ID NO: 2531254 - RNA, 19 nt, Artificial Sequence
  Description of Artificial Sequence: Synthetic oligonucleotide
  modified_base (12)..(12): a, c, u, g, unknown or other
ucucucaugganacuugcg

SEQ ID NO: 2531255 - RNA, 19 nt, Artificial Sequence
  Description of Artificial Sequence: Synthetic oligonucleotide
aaauuagcagcagaagucu

SEQ ID NO: 2531256 - RNA, 19 nt, Artificial Sequence
  Description of Artificial Sequence: Synthetic oligonucleotide
aaucccaacgaagacgguc

SEQ ID NO: 2531257 - RNA, 19 nt, Artificial Sequence
  Description of Artificial Sequence: Synthetic oligonucleotide
aauagaaaguuuaagcauu

SEQ ID NO: 2531258 - RNA, 19 nt, Artificial Sequence
  Description of Artificial Sequence: Synthetic oligonucleotide
uuauauguagacagugggu

SEQ ID NO: 2531259 - RNA, 19 nt, Artificial Sequence
  Description of Artificial Sequence: Synthetic oligonucleotide
gaugaagaauuuuaggcaa

SEQ ID NO: 2531260 - RNA, 19 nt, Artificial Sequence
  Description of Artificial Sequence: Synthetic oligonucleotide
agacaguggguuuugaaug

SEQ ID NO: 2531261 - RNA, 19 nt, Artificial Sequence
  Description of Artificial Sequence: Synthetic oligonucleotide
gaauuuuaggcaaauagaa

SEQ ID NO: 2531262 - RNA, 19 nt, Artificial Sequence
  Description of Artificial Sequence: Synthetic oligonucleotide
aagucuggaucacuuuggg

SEQ ID NO: 2531263 - RNA, 19 nt, Artificial Sequence
  Description of Artificial Sequence: Synthetic oligonucleotide
gaaaauuagcagcagaagu

SEQ ID NO: 2531264 - RNA, 19 nt, Artificial Sequence
  Description of Artificial Sequence: Synthetic oligonucleotide
ugaaaauuagcagcagaag

SEQ ID NO: 2531265 - RNA, 19 nt, Artificial Sequence
  Description of Artificial Sequence: Synthetic oligonucleotide
gacuuucacagucauggag

SEQ ID NO: 2531266 - RNA, 19 nt, Artificial Sequence
  Description of Artificial Sequence: Synthetic oligonucleotide
  modified_base (10)..(10): a, c, u, g, unknown or other
  modified_base (18)..(18): a, c, u, g, unknown or other
ucucaugganacuugcgna

SEQ ID NO: 2531267 - RNA, 19 nt, Artificial Sequence
  Description of Artificial Sequence: Synthetic oligonucleotide
  modified_base (8)..(8): a, c, u, g, unknown or other
  modified_base (16)..(16): a, c, u, g, unknown or other
ucaugganacuugcgnagg

SEQ ID NO: 2531268 - RNA, 19 nt, Artificial Sequence
  Description of Artificial Sequence: Synthetic oligonucleotide
auuugaauuuggcuuuuag

SEQ ID NO: 2531269 - RNA, 19 nt, Artificial Sequence
  Description of Artificial Sequence: Synthetic oligonucleotide
aaguuuaagcauuuucuuu

SEQ ID NO: 2531270 - RNA, 19 nt, Artificial Sequence
  Description of Artificial Sequence: Synthetic oligonucleotide
uguauuugaauuuggcuuu

SEQ ID NO: 2531271 - RNA, 19 nt, Artificial Sequence
  Description of Artificial Sequence: Synthetic oligonucleotide
ugguuuccaucuuugagcc

SEQ ID NO: 2531272 - RNA, 19 nt, Artificial Sequence
  Description of Artificial Sequence: Synthetic oligonucleotide
uuaauagauguuucuucug

SEQ ID NO: 2531273 - RNA, 19 nt, Artificial Sequence
  Description of Artificial Sequence: Synthetic oligonucleotide
agaagucuggaucacuuug

SEQ ID NO: 2531274 - RNA, 19 nt, Artificial Sequence
  Description of Artificial Sequence: Synthetic oligonucleotide
uuaugaauguuagaucgug

SEQ ID NO: 2531275 - RNA, 19 nt, Artificial Sequence
  Description of Artificial Sequence: Synthetic oligonucleotide
acuuugggucccucaaucc

SEQ ID NO: 2531276 - RNA, 19 nt, Artificial Sequence
  Description of Artificial Sequence: Synthetic oligonucleotide
uucaugaaccuuguuauga

SEQ ID NO: 2531277 - RNA, 19 nt, Artificial Sequence
  Description of Artificial Sequence: Synthetic oligonucleotide
aaacgacaaacacgaggac

SEQ ID NO: 2531278 - RNA, 19 nt, Artificial Sequence
  Description of Artificial Sequence: Synthetic oligonucleotide
  modified_base (3)..(3): a, c, u, g, unknown or other
  modified_base (11)..(11): a, c, u, g, unknown or other
ganacuugcgnagggaaug

SEQ ID NO: 2531279 - RNA, 19 nt, Artificial Sequence
  Description of Artificial Sequence: Synthetic oligonucleotide
augaauguuagaucguggu

SEQ ID NO: 2531280 - RNA, 19 nt, Artificial Sequence
  Description of Artificial Sequence: Synthetic oligonucleotide
acccguauccccaugauac

SEQ ID NO: 2531281 - RNA, 19 nt, Artificial Sequence
  Description of Artificial Sequence: Synthetic oligonucleotide
uagaucgugguuuccaucu

SEQ ID NO: 2531282 - RNA, 19 nt, Artificial Sequence
  Description of Artificial Sequence: Synthetic oligonucleotide
uccagcucaaccacacacg

SEQ ID NO: 2531283 - RNA, 19 nt, Artificial Sequence
  Description of Artificial Sequence: Synthetic oligonucleotide
gucaguccaaaacagauga

SEQ ID NO: 2531284 - RNA, 19 nt, Artificial Sequence
  Description of Artificial Sequence: Synthetic oligonucleotide
ucaaccacacacgucagcc

SEQ ID NO: 2531285 - RNA, 19 nt, Artificial Sequence
  Description of Artificial Sequence: Synthetic oligonucleotide
agaauuuuaggcaaauaga

SEQ ID NO: 2531286 - RNA, 19 nt, Artificial Sequence
  Description of Artificial Sequence: Synthetic oligonucleotide
agugaaaauuagcagcaga

SEQ ID NO: 2531287 - RNA, 19 nt, Artificial Sequence
  Description of Artificial Sequence: Synthetic oligonucleotide
gaaaguuuaagcauuuucu

SEQ ID NO: 2531288 - RNA, 19 nt, Artificial Sequence
  Description of Artificial Sequence: Synthetic oligonucleotide
uauauguagacaguggguu

SEQ ID NO: 2531289 - RNA, 19 nt, Artificial Sequence
  Description of Artificial Sequence: Synthetic oligonucleotide
aacgacaaacacgaggaca

SEQ ID NO: 2531290 - RNA, 19 nt, Artificial Sequence
  Description of Artificial Sequence: Synthetic oligonucleotide
agugaaguucaucuccuug

SEQ ID NO: 2531291 - RNA, 19 nt, Artificial Sequence
  Description of Artificial Sequence: Synthetic oligonucleotide
uagagaguguguagagccg

SEQ ID NO: 2531292 - RNA, 19 nt, Artificial Sequence
  Description of Artificial Sequence: Synthetic oligonucleotide
uguguagagccgcaugggc

SEQ ID NO: 2531293 - RNA, 19 nt, Artificial Sequence
  Description of Artificial Sequence: Synthetic oligonucleotide
cucaaucccaacgaagacg

SEQ ID NO: 2531294 - RNA, 19 nt, Artificial Sequence
  Description of Artificial Sequence: Synthetic oligonucleotide
uguagagccgcaugggcgc

SEQ ID NO: 2531295 - RNA, 19 nt, Artificial Sequence
  Description of Artificial Sequence: Synthetic oligonucleotide
aauuuuaggcaaauagaaa

SEQ ID NO: 2531296 - RNA, 19 nt, Artificial Sequence
  Description of Artificial Sequence: Synthetic oligonucleotide
  modified_base (7)..(7): a, c, u, g, unknown or other
  modified_base (15)..(15): a, c, u, g, unknown or other
caugganacuugcgnaggg

SEQ ID NO: 2531297 - RNA, 19 nt, Artificial Sequence
  Description of Artificial Sequence: Synthetic oligonucleotide
  modified_base (9)..(9): a, c, u, g, unknown or other
  modified_base (17)..(17): a, c, u, g, unknown or other
cucaugganacuugcgnag

SEQ ID NO: 2531298 - RNA, 19 nt, Artificial Sequence
  Description of Artificial Sequence: Synthetic oligonucleotide
ugguuauauguagacagug

SEQ ID NO: 2531299 - RNA, 19 nt, Artificial Sequence
  Description of Artificial Sequence: Synthetic oligonucleotide
guucagguguucaugaacc

SEQ ID NO: 2531300 - RNA, 19 nt, Artificial Sequence
  Description of Artificial Sequence: Synthetic oligonucleotide
agggaaugugcaaacuucc

SEQ ID NO: 2531301 - RNA, 19 nt, Artificial Sequence
  Description of Artificial Sequence: Synthetic oligonucleotide
uuugggucccucaauccca

SEQ ID NO: 2531302 - RNA, 19 nt, Artificial Sequence
  Description of Artificial Sequence: Synthetic oligonucleotide
uuguuaugaauguuagauc

SEQ ID NO: 2531303 - RNA, 19 nt, Artificial Sequence
  Description of Artificial Sequence: Synthetic oligonucleotide
agagaguguguagagccgc

SEQ ID NO: 2531304 - RNA, 19 nt, Artificial Sequence
  Description of Artificial Sequence: Synthetic oligonucleotide
  modified_base (5)..(5): a, c, u, g, unknown or other
  modified_base (13)..(13): a, c, u, g, unknown or other
ugganacuugcgnagggaa

SEQ ID NO: 2531305 - RNA, 19 nt, Artificial Sequence
  Description of Artificial Sequence: Synthetic oligonucleotide
ugagccacaccauuugacu

SEQ ID NO: 2531306 - RNA, 19 nt, Artificial Sequence
  Description of Artificial Sequence: Synthetic oligonucleotide
aaacacgaggacaaaguga

SEQ ID NO: 2531307 - RNA, 19 nt, Artificial Sequence
  Description of Artificial Sequence: Synthetic oligonucleotide
agacggucaguccaaaaca

SEQ ID NO: 2531308 - RNA, 19 nt, Artificial Sequence
  Description of Artificial Sequence: Synthetic oligonucleotide
uuuugcuauuauucaguga

SEQ ID NO: 2531309 - RNA, 19 nt, Artificial Sequence
  Description of Artificial Sequence: Synthetic oligonucleotide
  modified_base (2)..(2): a, c, u, g, unknown or other
  modified_base (10)..(10): a, c, u, g, unknown or other
anacuugcgnagggaaugu

SEQ ID NO: 2531310 - RNA, 19 nt, Artificial Sequence
  Description of Artificial Sequence: Synthetic oligonucleotide
cacgaggacaaagugacgc

SEQ ID NO: 2531311 - RNA, 19 nt, Artificial Sequence
  Description of Artificial Sequence: Synthetic oligonucleotide
auuauucagugaaaauuag

SEQ ID NO: 2531312 - RNA, 19 nt, Artificial Sequence
  Description of Artificial Sequence: Synthetic oligonucleotide
acacacgucagccauaguu

SEQ ID NO: 2531313 - RNA, 19 nt, Artificial Sequence
  Description of Artificial Sequence: Synthetic oligonucleotide
auuagcagcagaagucugg

SEQ ID NO: 2531314 - RNA, 19 nt, Artificial Sequence
  Description of Artificial Sequence: Synthetic oligonucleotide
cagguguucaugaaccuug

SEQ ID NO: 2531315 - RNA, 19 nt, Artificial Sequence
  Description of Artificial Sequence: Synthetic oligonucleotide
caaacacgaggacaaagug

SEQ ID NO: 2531316 - RNA, 19 nt, Artificial Sequence
  Description of Artificial Sequence: Synthetic oligonucleotide
gacaaacacgaggacaaag

SEQ ID NO: 2531317 - RNA, 19 nt, Artificial Sequence
  Description of Artificial Sequence: Synthetic oligonucleotide
uugguuauauguagacagu

SEQ ID NO: 2531318 - RNA, 19 nt, Artificial Sequence
  Description of Artificial Sequence: Synthetic oligonucleotide
cacacgucagccauaguug

SEQ ID NO: 2531319 - RNA, 19 nt, Artificial Sequence
  Description of Artificial Sequence: Synthetic oligonucleotide
uuugagccacaccauuuga

SEQ ID NO: 2531320 - RNA, 19 nt, Artificial Sequence
  Description of Artificial Sequence: Synthetic oligonucleotide
ugcuauuauucagugaaaa

SEQ ID NO: 2531321 - RNA, 19 nt, Artificial Sequence
  Description of Artificial Sequence: Synthetic oligonucleotide
caguccaaaacagaugaag

SEQ ID NO: 2531322 - RNA, 19 nt, Artificial Sequence
  Description of Artificial Sequence: Synthetic oligonucleotide
uguuagaucgugguuucca

SEQ ID NO: 2531323 - RNA, 19 nt, Artificial Sequence
  Description of Artificial Sequence: Synthetic oligonucleotide
ucccucaaucccaacgaag

SEQ ID NO: 2531324 - RNA, 19 nt, Artificial Sequence
  Description of Artificial Sequence: Synthetic oligonucleotide
acaccauuugacuuucaca

SEQ ID NO: 2531325 - RNA, 19 nt, Artificial Sequence
  Description of Artificial Sequence: Synthetic oligonucleotide
uccuugaugggcugguuca

SEQ ID NO: 2531326 - RNA, 19 nt, Artificial Sequence
  Description of Artificial Sequence: Synthetic oligonucleotide
aguccaacgaugaagaauu

SEQ ID NO: 2531327 - RNA, 19 nt, Artificial Sequence
  Description of Artificial Sequence: Synthetic oligonucleotide
aaccacacacgucagccau

SEQ ID NO: 2531328 - RNA, 19 nt, Artificial Sequence
  Description of Artificial Sequence: Synthetic oligonucleotide
acaaagugacgcuuagaga

SEQ ID NO: 2531329 - RNA, 19 nt, Artificial Sequence
  Description of Artificial Sequence: Synthetic oligonucleotide
augaaccuuguuaugaaug

SEQ ID NO: 2531330 - RNA, 19 nt, Artificial Sequence
  Description of Artificial Sequence: Synthetic oligonucleotide
uaguuguugguuauaugua

SEQ ID NO: 2531331 - RNA, 19 nt, Artificial Sequence
  Description of Artificial Sequence: Synthetic oligonucleotide
cuuguuaugaauguuagau

SEQ ID NO: 2531332 - RNA, 19 nt, Artificial Sequence
  Description of Artificial Sequence: Synthetic oligonucleotide
ugaauguuagaucgugguu

SEQ ID NO: 2531333 - RNA, 19 nt, Artificial Sequence
  Description of Artificial Sequence: Synthetic oligonucleotide
uugagccacaccauuugac

SEQ ID NO: 2531334 - RNA, 19 nt, Artificial Sequence
  Description of Artificial Sequence: Synthetic oligonucleotide
caacaguccaacgaugaag

SEQ ID NO: 2531335 - RNA, 19 nt, Artificial Sequence
  Description of Artificial Sequence: Synthetic oligonucleotide
gguuauauguagacagugg

SEQ ID NO: 2531336 - RNA, 19 nt, Artificial Sequence
  Description of Artificial Sequence: Synthetic oligonucleotide
cuuugagccacaccauuug

SEQ ID NO: 2531337 - RNA, 19 nt, Artificial Sequence
  Description of Artificial Sequence: Synthetic oligonucleotide
ucaugaaccuuguuaugaa

SEQ ID NO: 2531338 - RNA, 19 nt, Artificial Sequence
  Description of Artificial Sequence: Synthetic oligonucleotide
guauccccaugauacacgc

SEQ ID NO: 2531339 - RNA, 19 nt, Artificial Sequence
  Description of Artificial Sequence: Synthetic oligonucleotide
cuuagagaguguguagagc

SEQ ID NO: 2531340 - RNA, 19 nt, Artificial Sequence
  Description of Artificial Sequence: Synthetic oligonucleotide
aguccaaaacagaugaaga

SEQ ID NO: 2531341 - RNA, 19 nt, Artificial Sequence
  Description of Artificial Sequence: Synthetic oligonucleotide
agccacaacaguccaacga

SEQ ID NO: 2531342 - RNA, 19 nt, Artificial Sequence
  Description of Artificial Sequence: Synthetic oligonucleotide
ucuuugagccacaccauuu

SEQ ID NO: 2531343 - RNA, 19 nt, Artificial Sequence
  Description of Artificial Sequence: Synthetic oligonucleotide
gacggucaguccaaaacag

SEQ ID NO: 2531344 - RNA, 19 nt, Artificial Sequence
  Description of Artificial Sequence: Synthetic oligonucleotide
acaaacacgaggacaaagu

SEQ ID NO: 2531345 - RNA, 19 nt, Artificial Sequence
  Description of Artificial Sequence: Synthetic oligonucleotide
aagugacgcuuagagagug

SEQ ID NO: 2531346 - RNA, 19 nt, Artificial Sequence
  Description of Artificial Sequence: Synthetic oligonucleotide
ccaagugaaguucaucucc

SEQ ID NO: 2531347 - RNA, 19 nt, Artificial Sequence
  Description of Artificial Sequence: Synthetic oligonucleotide
guguucaugaaccuuguua

SEQ ID NO: 2531348 - RNA, 19 nt, Artificial Sequence
  Description of Artificial Sequence: Synthetic oligonucleotide
aaccuuguuaugaauguua

SEQ ID NO: 2531349 - RNA, 19 nt, Artificial Sequence
  Description of Artificial Sequence: Synthetic oligonucleotide
aauuagcagcagaagucug

SEQ ID NO: 2531350 - RNA, 19 nt, Artificial Sequence
  Description of Artificial Sequence: Synthetic oligonucleotide
cauaguuguugguuauaug

SEQ ID NO: 2531351 - RNA, 19 nt, Artificial Sequence
  Description of Artificial Sequence: Synthetic oligonucleotide
guuuaagcauuuucuuuuc

SEQ ID NO: 2531352 - RNA, 19 nt, Artificial Sequence
  Description of Artificial Sequence: Synthetic oligonucleotide
uuagcagcagaagucugga

SEQ ID NO: 2531353 - RNA, 19 nt, Artificial Sequence
  Description of Artificial Sequence: Synthetic oligonucleotide
gugaaaauuagcagcagaa

SEQ ID NO: 2531354 - RNA, 19 nt, Artificial Sequence
  Description of Artificial Sequence: Synthetic oligonucleotide
ugagggcuccagcucaacc

SEQ ID NO: 2531355 - RNA, 19 nt, Artificial Sequence
  Description of Artificial Sequence: Synthetic oligonucleotide
guguagagccgcaugggcg

SEQ ID NO: 2531356 - RNA, 19 nt, Artificial Sequence
  Description of Artificial Sequence: Synthetic oligonucleotide
ugcaaacuuccaagugaag

SEQ ID NO: 2531357 - RNA, 19 nt, Artificial Sequence
  Description of Artificial Sequence: Synthetic oligonucleotide
accuuguuaugaauguuag

SEQ ID NO: 2531358 - RNA, 19 nt, Artificial Sequence
  Description of Artificial Sequence: Synthetic oligonucleotide
uuagaucgugguuuccauc

SEQ ID NO: 2531359 - RNA, 19 nt, Artificial Sequence
  Description of Artificial Sequence: Synthetic oligonucleotide
cacaacaguccaacgauga

SEQ ID NO: 2531360 - RNA, 19 nt, Artificial Sequence
  Description of Artificial Sequence: Synthetic oligonucleotide
guucaugaaccuuguuaug

SEQ ID NO: 2531361 - RNA, 19 nt, Artificial Sequence
  Description of Artificial Sequence: Synthetic oligonucleotide
aaagugacgcuuagagagu

SEQ ID NO: 2531362 - RNA, 19 nt, Artificial Sequence
  Description of Artificial Sequence: Synthetic oligonucleotide
aucacuuugggucccucaa

SEQ ID NO: 2531363 - RNA, 19 nt, Artificial Sequence
  Description of Artificial Sequence: Synthetic oligonucleotide
  modified_base (11)..(11): a, c, u, g, unknown or other
  modified_base (19)..(19): a, c, u, g, unknown or other
cucucaugganacuugcgn

SEQ ID NO: 2531364 - RNA, 19 nt, Artificial Sequence
  Description of Artificial Sequence: Synthetic oligonucleotide
cuauuauucagugaaaauu

SEQ ID NO: 2531365 - RNA, 19 nt, Artificial Sequence
  Description of Artificial Sequence: Synthetic oligonucleotide
uauguagacaguggguuuu

SEQ ID NO: 2531366 - RNA, 19 nt, Artificial Sequence
  Description of Artificial Sequence: Synthetic oligonucleotide
gaauguuagaucgugguuu

SEQ ID NO: 2531367 - RNA, 19 nt, Artificial Sequence
  Description of Artificial Sequence: Synthetic oligonucleotide
acacgucagccauaguugu

SEQ ID NO: 2531368 - RNA, 19 nt, Artificial Sequence
  Description of Artificial Sequence: Synthetic oligonucleotide
acgacaaacacgaggacaa

SEQ ID NO: 2531369 - RNA, 19 nt, Artificial Sequence
  Description of Artificial Sequence: Synthetic oligonucleotide
auauguagacaguggguuu

SEQ ID NO: 2531370 - RNA, 19 nt, Artificial Sequence
  Description of Artificial Sequence: Synthetic oligonucleotide
  modified_base (6)..(6): a, c, u, g, unknown or other
  modified_base (14)..(14): a, c, u, g, unknown or other
augganacuugcgnaggga

SEQ ID NO: 2531371 - RNA, 19 nt, Artificial Sequence
  Description of Artificial Sequence: Synthetic oligonucleotide
uugcuauuauucagugaaa

SEQ ID NO: 2531372 - RNA, 19 nt, Artificial Sequence
  Description of Artificial Sequence: Synthetic oligonucleotide
acgucagccauaguuguug

SEQ ID NO: 2531373 - RNA, 19 nt, Artificial Sequence
  Description of Artificial Sequence: Synthetic oligonucleotide
gaugggcugguucaggugu

SEQ ID NO: 2531374 - RNA, 19 nt, Artificial Sequence
  Description of Artificial Sequence: Synthetic oligonucleotide
cacuuugggucccucaauc

SEQ ID NO: 2531375 - RNA, 19 nt, Artificial Sequence
  Description of Artificial Sequence: Synthetic oligonucleotide
cagugguuccaucucggag

SEQ ID NO: 2531376 - RNA, 19 nt, Artificial Sequence
  Description of Artificial Sequence: Synthetic oligonucleotide
ucuuuucucccuggacccg

SEQ ID NO: 2531377 - RNA, 19 nt, Artificial Sequence
  Description of Artificial Sequence: Synthetic oligonucleotide
guucaucuccuugaugggc

SEQ ID NO: 2531378 - RNA, 19 nt, Artificial Sequence
  Description of Artificial Sequence: Synthetic oligonucleotide
accauuugacuuucacagu

SEQ ID NO: 2531379 - RNA, 19 nt, Artificial Sequence
  Description of Artificial Sequence: Synthetic oligonucleotide
acgcuuagagaguguguag

SEQ ID NO: 2531380 - RNA, 19 nt, Artificial Sequence
  Description of Artificial Sequence: Synthetic oligonucleotide
uggacccguauccccauga

SEQ ID NO: 2531381 - RNA, 19 nt, Artificial Sequence
  Description of Artificial Sequence: Synthetic oligonucleotide
gcuuagagaguguguagag

SEQ ID NO: 2531382 - RNA, 19 nt, Artificial Sequence
  Description of Artificial Sequence: Synthetic oligonucleotide
ccauuugacuuucacaguc

SEQ ID NO: 2531383 - RNA, 19 nt, Artificial Sequence
  Description of Artificial Sequence: Synthetic oligonucleotide
ugacgcuuagagagugugu

SEQ ID NO: 2531384 - RNA, 19 nt, Artificial Sequence
  Description of Artificial Sequence: Synthetic oligonucleotide
cauuugacuuucacaguca

SEQ ID NO: 2531385 - RNA, 19 nt, Artificial Sequence
  Description of Artificial Sequence: Synthetic oligonucleotide
agucuggaucacuuugggu

SEQ ID NO: 2531386 - RNA, 19 nt, Artificial Sequence
  Description of Artificial Sequence: Synthetic oligonucleotide
guuuugaauguauuugaau

SEQ ID NO: 2531387 - RNA, 19 nt, Artificial Sequence
  Description of Artificial Sequence: Synthetic oligonucleotide
gugguuccaucucggagcc

SEQ ID NO: 2531388 - RNA, 19 nt, Artificial Sequence
  Description of Artificial Sequence: Synthetic oligonucleotide
guuguugguuauauguaga

SEQ ID NO: 2531389 - RNA, 19 nt, Artificial Sequence
  Description of Artificial Sequence: Synthetic oligonucleotide
caacgaagacggucagucc

SEQ ID NO: 2531390 - RNA, 19 nt, Artificial Sequence
  Description of Artificial Sequence: Synthetic oligonucleotide
gggucccucaaucccaacg

SEQ ID NO: 2531391 - RNA, 19 nt, Artificial Sequence
  Description of Artificial Sequence: Synthetic oligonucleotide
acgaggacaaagugacgcu

SEQ ID NO: 2531392 - RNA, 19 nt, Artificial Sequence
  Description of Artificial Sequence: Synthetic oligonucleotide
auguuagaucgugguuucc

SEQ ID NO: 2531393 - RNA, 19 nt, Artificial Sequence
  Description of Artificial Sequence: Synthetic oligonucleotide
cuugaugggcugguucagg

SEQ ID NO: 2531394 - RNA, 19 nt, Artificial Sequence
  Description of Artificial Sequence: Synthetic oligonucleotide
aucuuugagccacaccauu

SEQ ID NO: 2531395 - RNA, 19 nt, Artificial Sequence
  Description of Artificial Sequence: Synthetic oligonucleotide
  modified_base (2)..(2): a, c, u, g, unknown or other
gnagggaaugugcaaacuu

SEQ ID NO: 2531396 - RNA, 19 nt, Artificial Sequence
  Description of Artificial Sequence: Synthetic oligonucleotide
gacgcuuagagagugugua

SEQ ID NO: 2531397 - RNA, 19 nt, Artificial Sequence
  Description of Artificial Sequence: Synthetic oligonucleotide
aagugaaguucaucuccuu

SEQ ID NO: 2531398 - RNA, 19 nt, Artificial Sequence
  Description of Artificial Sequence: Synthetic oligonucleotide
aucccaacgaagacgguca

SEQ ID NO: 2531399 - RNA, 19 nt, Artificial Sequence
  Description of Artificial Sequence: Synthetic oligonucleotide
cucaaccacacacgucagc

SEQ ID NO: 2531400 - RNA, 19 nt, Artificial Sequence
  Description of Artificial Sequence: Synthetic oligonucleotide
acaacaguccaacgaugaa

SEQ ID NO: 2531401 - RNA, 19 nt, Artificial Sequence
  Description of Artificial Sequence: Synthetic oligonucleotide
gugacgcuuagagagugug

SEQ ID NO: 2531402 - RNA, 19 nt, Artificial Sequence
  Description of Artificial Sequence: Synthetic oligonucleotide
gguuccaucucggagcccc

SEQ ID NO: 2531403 - RNA, 19 nt, Artificial Sequence
  Description of Artificial Sequence: Synthetic oligonucleotide
gacaguggguuuugaaugu

SEQ ID NO: 2531404 - RNA, 19 nt, Artificial Sequence
  Description of Artificial Sequence: Synthetic oligonucleotide
  modified_base (13)..(13): a, c, u, g, unknown or other
gucucucaugganacuugc

SEQ ID NO: 2531405 - RNA, 19 nt, Artificial Sequence
  Description of Artificial Sequence: Synthetic oligonucleotide
auagaaaguuuaagcauuu

SEQ ID NO: 2531406 - RNA, 19 nt, Artificial Sequence
  Description of Artificial Sequence: Synthetic oligonucleotide
ucacuuugggucccucaau

SEQ ID NO: 2531407 - RNA, 19 nt, Artificial Sequence
  Description of Artificial Sequence: Synthetic oligonucleotide
ucgugguuuccaucuuuga

SEQ ID NO: 2531408 - RNA, 19 nt, Artificial Sequence
  Description of Artificial Sequence: Synthetic oligonucleotide
guguguagagccgcauggg

SEQ ID NO: 2531409 - RNA, 19 nt, Artificial Sequence
  Description of Artificial Sequence: Synthetic oligonucleotide
agccacaccauuugacuuu

SEQ ID NO: 2531410 - RNA, 19 nt, Artificial Sequence
  Description of Artificial Sequence: Synthetic oligonucleotide
ggaaugugcaaacuuccaa

SEQ ID NO: 2531411 - RNA, 19 nt, Artificial Sequence
  Description of Artificial Sequence: Synthetic oligonucleotide
uauccccaugauacacgca

SEQ ID NO: 2531412 - RNA, 19 nt, Artificial Sequence
  Description of Artificial Sequence: Synthetic oligonucleotide
guagacaguggguuuugaa

SEQ ID NO: 2531413 - RNA, 19 nt, Artificial Sequence
  Description of Artificial Sequence: Synthetic oligonucleotide
uccaacgaugaagaauuuu

SEQ ID NO: 2531414 - RNA, 19 nt, Artificial Sequence
  Description of Artificial Sequence: Synthetic oligonucleotide
aucgugguuuccaucuuug

SEQ ID NO: 2531415 - RNA, 19 nt, Artificial Sequence
  Description of Artificial Sequence: Synthetic oligonucleotide
ccaacgaugaagaauuuua

SEQ ID NO: 2531416 - RNA, 19 nt, Artificial Sequence
  Description of Artificial Sequence: Synthetic oligonucleotide
  modified_base (14)..(14): a, c, u, g, unknown or other
agucucucaugganacuug

SEQ ID NO: 2531417 - RNA, 19 nt, Artificial Sequence
  Description of Artificial Sequence: Synthetic oligonucleotide
agccauaguuguugguuau

SEQ ID NO: 2531418 - RNA, 19 nt, Artificial Sequence
  Description of Artificial Sequence: Synthetic oligonucleotide
uguagacaguggguuuuga

SEQ ID NO: 2531419 - RNA, 19 nt, Artificial Sequence
  Description of Artificial Sequence: Synthetic oligonucleotide
cgaugaagaauuuuaggca

SEQ ID NO: 2531420 - RNA, 19 nt, Artificial Sequence
  Description of Artificial Sequence: Synthetic oligonucleotide
ccaacgaagacggucaguc

SEQ ID NO: 2531421 - RNA, 19 nt, Artificial Sequence
  Description of Artificial Sequence: Synthetic oligonucleotide
uugggucccucaaucccaa

SEQ ID NO: 2531422 - RNA, 19 nt, Artificial Sequence
  Description of Artificial Sequence: Synthetic oligonucleotide
cagugaaaauuagcagcag

SEQ ID NO: 2531423 - RNA, 19 nt, Artificial Sequence
  Description of Artificial Sequence: Synthetic oligonucleotide
ugguucagguguucaugaa

SEQ ID NO: 2531424 - RNA, 19 nt, Artificial Sequence
  Description of Artificial Sequence: Synthetic oligonucleotide
caagugaaguucaucuccu

SEQ ID NO: 2531425 - RNA, 19 nt, Artificial Sequence
  Description of Artificial Sequence: Synthetic oligonucleotide
gugcaaacuuccaagugaa

SEQ ID NO: 2531426 - RNA, 19 nt, Artificial Sequence
  Description of Artificial Sequence: Synthetic oligonucleotide
agaaaacgacaaacacgag

SEQ ID NO: 2531427 - RNA, 19 nt, Artificial Sequence
  Description of Artificial Sequence: Synthetic oligonucleotide
gaagacggucaguccaaaa

SEQ ID NO: 2531428 - RNA, 19 nt, Artificial Sequence
  Description of Artificial Sequence: Synthetic oligonucleotide
uuccaucucggagccccgg

SEQ ID NO: 2531429 - RNA, 19 nt, Artificial Sequence
  Description of Artificial Sequence: Synthetic oligonucleotide
augaagaauuuuaggcaaa

SEQ ID NO: 2531430 - RNA, 19 nt, Artificial Sequence
  Description of Artificial Sequence: Synthetic oligonucleotide
accggcgcgucccgagccc

SEQ ID NO: 2531431 - RNA, 19 nt, Artificial Sequence
  Description of Artificial Sequence: Synthetic oligonucleotide
caggaagagagcgggaaga

SEQ ID NO: 2531432 - RNA, 19 nt, Artificial Sequence
  Description of Artificial Sequence: Synthetic oligonucleotide
uagaaaguuuaagcauuuu

SEQ ID NO: 2531433 - RNA, 19 nt, Artificial Sequence
  Description of Artificial Sequence: Synthetic oligonucleotide
cgugguuuccaucuuugag

SEQ ID NO: 2531434 - RNA, 19 nt, Artificial Sequence
  Description of Artificial Sequence: Synthetic oligonucleotide
uauuugaauuuggcuuuua

SEQ ID NO: 2531435 - RNA, 19 nt, Artificial Sequence
  Description of Artificial Sequence: Synthetic oligonucleotide
auguagacaguggguuuug

SEQ ID NO: 2531436 - RNA, 19 nt, Artificial Sequence
  Description of Artificial Sequence: Synthetic oligonucleotide
cguauccccaugauacacg

SEQ ID NO: 2531437 - RNA, 19 nt, Artificial Sequence
  Description of Artificial Sequence: Synthetic oligonucleotide
aguggguuuugaauguauu

SEQ ID NO: 2531438 - RNA, 19 nt, Artificial Sequence
  Description of Artificial Sequence: Synthetic oligonucleotide
gcaaacuuccaagugaagu

SEQ ID NO: 2531439 - RNA, 19 nt, Artificial Sequence
  Description of Artificial Sequence: Synthetic oligonucleotide
acaguccaacgaugaagaa

SEQ ID NO: 2531440 - RNA, 19 nt, Artificial Sequence
  Description of Artificial Sequence: Synthetic oligonucleotide
guuaugaauguuagaucgu

SEQ ID NO: 2531441 - RNA, 19 nt, Artificial Sequence
  Description of Artificial Sequence: Synthetic oligonucleotide
guggguuuugaauguauuu

SEQ ID NO: 2531442 - RNA, 19 nt, Artificial Sequence
  Description of Artificial Sequence: Synthetic oligonucleotide
guuagaucgugguuuccau

SEQ ID NO: 2531443 - RNA, 19 nt, Artificial Sequence
  Description of Artificial Sequence: Synthetic oligonucleotide
gguuuugaauguauuugaa

SEQ ID NO: 2531444 - RNA, 19 nt, Artificial Sequence
  Description of Artificial Sequence: Synthetic oligonucleotide
agccgcaugggcgccagug

SEQ ID NO: 2531445 - RNA, 19 nt, Artificial Sequence
  Description of Artificial Sequence: Synthetic oligonucleotide
gcuauuauucagugaaaau

SEQ ID NO: 2531446 - RNA, 19 nt, Artificial Sequence
  Description of Artificial Sequence: Synthetic oligonucleotide
acacgaggacaaagugacg

SEQ ID NO: 2531447 - RNA, 19 nt, Artificial Sequence
  Description of Artificial Sequence: Synthetic oligonucleotide
cuggaucacuuuggguccc

SEQ ID NO: 2531448 - RNA, 19 nt, Artificial Sequence
  Description of Artificial Sequence: Synthetic oligonucleotide
caaccacacacgucagcca

SEQ ID NO: 2531449 - RNA, 19 nt, Artificial Sequence
  Description of Artificial Sequence: Synthetic oligonucleotide
gacccguauccccaugaua

SEQ ID NO: 2531450 - RNA, 19 nt, Artificial Sequence
  Description of Artificial Sequence: Synthetic oligonucleotide
agaucgugguuuccaucuu

SEQ ID NO: 2531451 - RNA, 19 nt, Artificial Sequence
  Description of Artificial Sequence: Synthetic oligonucleotide
acggucaguccaaaacaga

SEQ ID NO: 2531452 - RNA, 19 nt, Artificial Sequence
  Description of Artificial Sequence: Synthetic oligonucleotide
cagcucaaccacacacguc

SEQ ID NO: 2531453 - RNA, 19 nt, Artificial Sequence
  Description of Artificial Sequence: Synthetic oligonucleotide
caugggcgccagugguucc

SEQ ID NO: 2531454 - RNA, 19 nt, Artificial Sequence
  Description of Artificial Sequence: Synthetic oligonucleotide
gagaguguguagagccgca

SEQ ID NO: 2531455 - RNA, 19 nt, Artificial Sequence
  Description of Artificial Sequence: Synthetic oligonucleotide
gagccacaccauuugacuu

SEQ ID NO: 2531456 - RNA, 19 nt, Artificial Sequence
  Description of Artificial Sequence: Synthetic oligonucleotide
ccacaacaguccaacgaug

SEQ ID NO: 2531457 - RNA, 19 nt, Artificial Sequence
  Description of Artificial Sequence: Synthetic oligonucleotide
ccucaaucccaacgaagac

SEQ ID NO: 2531458 - RNA, 19 nt, Artificial Sequence
  Description of Artificial Sequence: Synthetic oligonucleotide
agguguucaugaaccuugu

SEQ ID NO: 2531459 - RNA, 19 nt, Artificial Sequence
  Description of Artificial Sequence: Synthetic oligonucleotide
ggaagagagcgggaagaac

SEQ ID NO: 2531460 - RNA, 19 nt, Artificial Sequence
  Description of Artificial Sequence: Synthetic oligonucleotide
gaucgugguuuccaucuuu

SEQ ID NO: 2531461 - RNA, 19 nt, Artificial Sequence
  Description of Artificial Sequence: Synthetic oligonucleotide
gccagugguuccaucucgg

SEQ ID NO: 2531462 - RNA, 19 nt, Artificial Sequence
  Description of Artificial Sequence: Synthetic oligonucleotide
agaguguguagagccgcau

SEQ ID NO: 2531463 - RNA, 19 nt, Artificial Sequence
  Description of Artificial Sequence: Synthetic oligonucleotide
guuccaucucggagccccg

SEQ ID NO: 2531464 - RNA, 19 nt, Artificial Sequence
  Description of Artificial Sequence: Synthetic oligonucleotide
acuuccaagugaaguucau

SEQ ID NO: 2531465 - RNA, 19 nt, Artificial Sequence
  Description of Artificial Sequence: Synthetic oligonucleotide
gucccgagcccgcccggcg

SEQ ID NO: 2531466 - RNA, 19 nt, Artificial Sequence
  Description of Artificial Sequence: Synthetic oligonucleotide
acgaagacggucaguccaa

SEQ ID NO: 2531467 - RNA, 19 nt, Artificial Sequence
  Description of Artificial Sequence: Synthetic oligonucleotide
gccgcaugggcgccagugg

SEQ ID NO: 2531468 - RNA, 19 nt, Artificial Sequence
  Description of Artificial Sequence: Synthetic oligonucleotide
caccggcgcgucccgagcc

SEQ ID NO: 2531469 - RNA, 19 nt, Artificial Sequence
  Description of Artificial Sequence: Synthetic oligonucleotide
agugacgcuuagagagugu

SEQ ID NO: 2531470 - RNA, 19 nt, Artificial Sequence
  Description of Artificial Sequence: Synthetic oligonucleotide
gccacaacaguccaacgau

SEQ ID NO: 2531471 - RNA, 19 nt, Artificial Sequence
  Description of Artificial Sequence: Synthetic oligonucleotide
gucccucaaucccaacgaa

SEQ ID NO: 2531472 - RNA, 19 nt, Artificial Sequence
  Description of Artificial Sequence: Synthetic oligonucleotide
acaguggguuuugaaugua

SEQ ID NO: 2531473 - RNA, 19 nt, Artificial Sequence
  Description of Artificial Sequence: Synthetic oligonucleotide
gggaaugugcaaacuucca

SEQ ID NO: 2531474 - RNA, 19 nt, Artificial Sequence
  Description of Artificial Sequence: Synthetic oligonucleotide
uggaucacuuugggucccu

SEQ ID NO: 2531475 - RNA, 19 nt, Artificial Sequence
  Description of Artificial Sequence: Synthetic oligonucleotide
agagccgcaugggcgccag

SEQ ID NO: 2531476 - RNA, 19 nt, Artificial Sequence
  Description of Artificial Sequence: Synthetic oligonucleotide
ccuuguuaugaauguuaga

SEQ ID NO: 2531477 - RNA, 19 nt, Artificial Sequence
  Description of Artificial Sequence: Synthetic oligonucleotide
guagagccgcaugggcgcc

SEQ ID NO: 2531478 - RNA, 19 nt, Artificial Sequence
  Description of Artificial Sequence: Synthetic oligonucleotide
gaaccuuguuaugaauguu

SEQ ID NO: 2531479 - RNA, 19 nt, Artificial Sequence
  Description of Artificial Sequence: Synthetic oligonucleotide
cgucagccauaguuguugg

SEQ ID NO: 2531480 - RNA, 19 nt, Artificial Sequence
  Description of Artificial Sequence: Synthetic oligonucleotide
caguccaacgaugaagaau

SEQ ID NO: 2531481 - RNA, 19 nt, Artificial Sequence
  Description of Artificial Sequence: Synthetic oligonucleotide
cagcagaagucuggaucac

SEQ ID NO: 2531482 - RNA, 19 nt, Artificial Sequence
  Description of Artificial Sequence: Synthetic oligonucleotide
augggcgccagugguucca

SEQ ID NO: 2531483 - RNA, 19 nt, Artificial Sequence
  Description of Artificial Sequence: Synthetic oligonucleotide
ccguauccccaugauacac

SEQ ID NO: 2531484 - RNA, 19 nt, Artificial Sequence
  Description of Artificial Sequence: Synthetic oligonucleotide
  modified_base (15)..(15): a, c, u, g, unknown or other
cagucucucaugganacuu

SEQ ID NO: 2531485 - RNA, 19 nt, Artificial Sequence
  Description of Artificial Sequence: Synthetic oligonucleotide
ggcgccagugguuccaucu

SEQ ID NO: 2531486 - RNA, 19 nt, Artificial Sequence
  Description of Artificial Sequence: Synthetic oligonucleotide
cuggacccguauccccaug

SEQ ID NO: 2531487 - RNA, 19 nt, Artificial Sequence
  Description of Artificial Sequence: Synthetic oligonucleotide
agcccgcccggcgucccgc

SEQ ID NO: 2531488 - RNA, 19 nt, Artificial Sequence
  Description of Artificial Sequence: Synthetic oligonucleotide
uagagccgcaugggcgcca

SEQ ID NO: 2531489 - RNA, 19 nt, Artificial Sequence
  Description of Artificial Sequence: Synthetic oligonucleotide
  modified_base (4)..(4): a, c, u, g, unknown or other
  modified_base (12)..(12): a, c, u, g, unknown or other
gganacuugcgnagggaau

SEQ ID NO: 2531490 - RNA, 19 nt, Artificial Sequence
  Description of Artificial Sequence: Synthetic oligonucleotide
cgccagugguuccaucucg

SEQ ID NO: 2531491 - RNA, 19 nt, Artificial Sequence
  Description of Artificial Sequence: Synthetic oligonucleotide
gagcccgcccggcgucccg

SEQ ID NO: 2531492 - RNA, 19 nt, Artificial Sequence
  Description of Artificial Sequence: Synthetic oligonucleotide
caguggguuuugaauguau

SEQ ID NO: 2531493 - RNA, 19 nt, Artificial Sequence
  Description of Artificial Sequence: Synthetic oligonucleotide
ggacaaagugacgcuuaga

SEQ ID NO: 2531494 - RNA, 19 nt, Artificial Sequence
  Description of Artificial Sequence: Synthetic oligonucleotide
gcucaaccacacacgucag

SEQ ID NO: 2531495 - RNA, 19 nt, Artificial Sequence
  Description of Artificial Sequence: Synthetic oligonucleotide
ugguuccaucucggagccc

SEQ ID NO: 2531496 - RNA, 19 nt, Artificial Sequence
  Description of Artificial Sequence: Synthetic oligonucleotide
gcaugggcgccagugguuc

SEQ ID NO: 2531497 - RNA, 19 nt, Artificial Sequence
  Description of Artificial Sequence: Synthetic oligonucleotide
ccuugaugggcugguucag

SEQ ID NO: 2531498 - RNA, 19 nt, Artificial Sequence
  Description of Artificial Sequence: Synthetic oligonucleotide
gccacaccauuugacuuuc

SEQ ID NO: 2531499 - RNA, 19 nt, Artificial Sequence
  Description of Artificial Sequence: Synthetic oligonucleotide
ucggagccccgggcccucg

SEQ ID NO: 2531500 - RNA, 19 nt, Artificial Sequence
  Description of Artificial Sequence: Synthetic oligonucleotide
cgcuuagagaguguguaga

SEQ ID NO: 2531501 - RNA, 19 nt, Artificial Sequence
  Description of Artificial Sequence: Synthetic oligonucleotide
ccagcucaaccacacacgu

SEQ ID NO: 2531502 - RNA, 19 nt, Artificial Sequence
  Description of Artificial Sequence: Synthetic oligonucleotide
gcgccagugguuccaucuc

SEQ ID NO: 2531503 - RNA, 19 nt, Artificial Sequence
  Description of Artificial Sequence: Synthetic oligonucleotide
accacacacgucagccaua

SEQ ID NO: 2531504 - RNA, 19 nt, Artificial Sequence
  Description of Artificial Sequence: Synthetic oligonucleotide
cccguauccccaugauaca

SEQ ID NO: 2531505 - RNA, 19 nt, Artificial Sequence
  Description of Artificial Sequence: Synthetic oligonucleotide
ccauaguuguugguuauau

SEQ ID NO: 2531506 - RNA, 19 nt, Artificial Sequence
  Description of Artificial Sequence: Synthetic oligonucleotide
cccaccggcgcgucccgag

SEQ ID NO: 2531507 - RNA, 19 nt, Artificial Sequence
  Description of Artificial Sequence: Synthetic oligonucleotide
cggucaguccaaaacagau

SEQ ID NO: 2531508 - RNA, 19 nt, Artificial Sequence
  Description of Artificial Sequence: Synthetic oligonucleotide
ccggcgucccgcagccucc

SEQ ID NO: 2531509 - RNA, 19 nt, Artificial Sequence
  Description of Artificial Sequence: Synthetic oligonucleotide
cccggcgucccgcagccuc

SEQ ID NO: 2531510 - RNA, 19 nt, Artificial Sequence
  Description of Artificial Sequence: Synthetic oligonucleotide
ggaucacuuugggucccuc

SEQ ID NO: 2531511 - RNA, 19 nt, Artificial Sequence
  Description of Artificial Sequence: Synthetic oligonucleotide
gggcugguucagguguuca

SEQ ID NO: 2531512 - RNA, 19 nt, Artificial Sequence
  Description of Artificial Sequence: Synthetic oligonucleotide
cacgucagccauaguuguu

SEQ ID NO: 2531513 - RNA, 19 nt, Artificial Sequence
  Description of Artificial Sequence: Synthetic oligonucleotide
caaucccaacgaagacggu

SEQ ID NO: 2531514 - RNA, 19 nt, Artificial Sequence
  Description of Artificial Sequence: Synthetic oligonucleotide
gccauaguuguugguuaua

SEQ ID NO: 2531515 - RNA, 19 nt, Artificial Sequence
  Description of Artificial Sequence: Synthetic oligonucleotide
ccaccggcgcgucccgagc

SEQ ID NO: 2531516 - RNA, 19 nt, Artificial Sequence
  Description of Artificial Sequence: Synthetic oligonucleotide
gguguucaugaaccuuguu

SEQ ID NO: 2531517 - RNA, 19 nt, Artificial Sequence
  Description of Artificial Sequence: Synthetic oligonucleotide
cgcgucccgagcccgcccg

SEQ ID NO: 2531518 - RNA, 19 nt, Artificial Sequence
  Description of Artificial Sequence: Synthetic oligonucleotide
gcgucccgagcccgcccgg

SEQ ID NO: 2531519 - RNA, 19 nt, Artificial Sequence
  Description of Artificial Sequence: Synthetic oligonucleotide
ggacccguauccccaugau

SEQ ID NO: 2531520 - RNA, 19 nt, Artificial Sequence
  Description of Artificial Sequence: Synthetic oligonucleotide
ccgcccggcgucccgcagc

SEQ ID NO: 2531521 - RNA, 19 nt, Artificial Sequence
  Description of Artificial Sequence: Synthetic oligonucleotide
guccaacgaugaagaauuu

SEQ ID NO: 2531522 - RNA, 19 nt, Artificial Sequence
  Description of Artificial Sequence: Synthetic oligonucleotide
ccggcgcgucccgagcccg

SEQ ID NO: 2531523 - RNA, 19 nt, Artificial Sequence
  Description of Artificial Sequence: Synthetic oligonucleotide
gcgcgucccgagcccgccc

SEQ ID NO: 2531524 - RNA, 19 nt, Artificial Sequence
  Description of Artificial Sequence: Synthetic oligonucleotide
cgcccggcgucccgcagcc

SEQ ID NO: 2531525 - RNA, 19 nt, Artificial Sequence
  Description of Artificial Sequence: Synthetic oligonucleotide
ccacaccauuugacuuuca

SEQ ID NO: 2531526 - RNA, 19 nt, Artificial Sequence
  Description of Artificial Sequence: Synthetic oligonucleotide
gggcgccagugguuccauc

SEQ ID NO: 2531527 - RNA, 19 nt, Artificial Sequence
  Description of Artificial Sequence: Synthetic oligonucleotide
cacacacgucagccauagu

SEQ ID NO: 2531528 - RNA, 19 nt, Artificial Sequence
  Description of Artificial Sequence: Synthetic oligonucleotide
cccgagcccgcccggcguc

SEQ ID NO: 2531529 - RNA, 19 nt, Artificial Sequence
  Description of Artificial Sequence: Synthetic oligonucleotide
  modified_base (3)..(3): a, c, u, g, unknown or other
cgnagggaaugugcaaacu

SEQ ID NO: 2531530 - RNA, 19 nt, Artificial Sequence
  Description of Artificial Sequence: Synthetic oligonucleotide
ccgcaugggcgccaguggu

SEQ ID NO: 2531531 - RNA, 19 nt, Artificial Sequence
  Description of Artificial Sequence: Synthetic oligonucleotide
gagccgcaugggcgccagu

SEQ ID NO: 2531532 - RNA, 19 nt, Artificial Sequence
  Description of Artificial Sequence: Synthetic oligonucleotide
ccgagcccgcccggcgucc

SEQ ID NO: 2531533 - RNA, 19 nt, Artificial Sequence
  Description of Artificial Sequence: Synthetic oligonucleotide
cgacaaacacgaggacaaa

SEQ ID NO: 2531534 - RNA, 19 nt, Artificial Sequence
  Description of Artificial Sequence: Synthetic oligonucleotide
cccgcccggcgucccgcag

SEQ ID NO: 2531535 - RNA, 19 nt, Artificial Sequence
  Description of Artificial Sequence: Synthetic oligonucleotide
cgaggacaaagugacgcuu

SEQ ID NO: 2531536 - RNA, 19 nt, Artificial Sequence
  Description of Artificial Sequence: Synthetic oligonucleotide
cgaagacggucaguccaaa

SEQ ID NO: 2531537 - RNA, 19 nt, Artificial Sequence
  Description of Artificial Sequence: Synthetic oligonucleotide
cggcgcgucccgagcccgc

SEQ ID NO: 2531538 - RNA, 19 nt, Artificial Sequence
  Description of Artificial Sequence: Synthetic oligonucleotide
cggcgucccgcagccuccg

SEQ ID NO: 2531539 - RNA, 19 nt, Artificial Sequence
  Description of Artificial Sequence: Synthetic oligonucleotide
gcccgcccggcgucccgca

SEQ ID NO: 2531540 - RNA, 19 nt, Artificial Sequence
  Description of Artificial Sequence: Synthetic oligonucleotide
cgcaugggcgccagugguu

SEQ ID NO: 2531541 - RNA, 19 nt, Artificial Sequence
  Description of Artificial Sequence: Synthetic oligonucleotide
ccccaccggcgcgucccga

SEQ ID NO: 2531542 - RNA, 19 nt, Artificial Sequence
  Description of Artificial Sequence: Synthetic oligonucleotide
gcccggcgucccgcagccu

SEQ ID NO: 2531543 - RNA, 19 nt, Artificial Sequence
  Description of Artificial Sequence: Synthetic oligonucleotide
aagauaaucagucauagag

SEQ ID NO: 2531544 - RNA, 19 nt, Artificial Sequence
  Description of Artificial Sequence: Synthetic oligonucleotide
aaaccuuguaaccaaaggg

SEQ ID NO: 2531545 - RNA, 19 nt, Artificial Sequence
  Description of Artificial Sequence: Synthetic oligonucleotide
uuggcaucaauuaagugcg

SEQ ID NO: 2531546 - RNA, 19 nt, Artificial Sequence
  Description of Artificial Sequence: Synthetic oligonucleotide
cuuggcaucaauuaagugc

SEQ ID NO: 2531547 - RNA, 19 nt, Artificial Sequence
  Description of Artificial Sequence: Synthetic oligonucleotide
uaaucagucauagagacag

SEQ ID NO: 2531548 - RNA, 19 nt, Artificial Sequence
  Description of Artificial Sequence: Synthetic oligonucleotide
ucucauaagggucaucugg

SEQ ID NO: 2531549 - RNA, 19 nt, Artificial Sequence
  Description of Artificial Sequence: Synthetic oligonucleotide
uggagaaugacucuaaggu

SEQ ID NO: 2531550 - RNA, 19 nt, Artificial Sequence
  Description of Artificial Sequence: Synthetic oligonucleotide
agugcgaugauacuguggg

SEQ ID NO: 2531551 - RNA, 19 nt, Artificial Sequence
  Description of Artificial Sequence: Synthetic oligonucleotide
gauaaucagucauagagac

SEQ ID NO: 2531552 - RNA, 19 nt, Artificial Sequence
  Description of Artificial Sequence: Synthetic oligonucleotide
agucguugaaaccaaggcc

SEQ ID NO: 2531553 - RNA, 19 nt, Artificial Sequence
  Description of Artificial Sequence: Synthetic oligonucleotide
ucuaaggucaucuucugcc

SEQ ID NO: 2531554 - RNA, 19 nt, Artificial Sequence
  Description of Artificial Sequence: Synthetic oligonucleotide
uguagguagagauuuacga

SEQ ID NO: 2531555 - RNA, 19 nt, Artificial Sequence
  Description of Artificial Sequence: Synthetic oligonucleotide
cucaauucuuccuuuaggg

SEQ ID NO: 2531556 - RNA, 19 nt, Artificial Sequence
  Description of Artificial Sequence: Synthetic oligonucleotide
auagucacaggccucaggg

SEQ ID NO: 2531557 - RNA, 19 nt, Artificial Sequence
  Description of Artificial Sequence: Synthetic oligonucleotide
aaccuuguaaccaaagggg

SEQ ID NO: 2531558 - RNA, 19 nt, Artificial Sequence
  Description of Artificial Sequence: Synthetic oligonucleotide
uucuugaggaaccacucgg

SEQ ID NO: 2531559 - RNA, 19 nt, Artificial Sequence
  Description of Artificial Sequence: Synthetic oligonucleotide
ugagcgaaggggcagaacc

SEQ ID NO: 2531560 - RNA, 19 nt, Artificial Sequence
  Description of Artificial Sequence: Synthetic oligonucleotide
caaaugaugacagauucgg

SEQ ID NO: 2531561 - RNA, 19 nt, Artificial Sequence
  Description of Artificial Sequence: Synthetic oligonucleotide
gaucaagcgacccuuacug

SEQ ID NO: 2531562 - RNA, 19 nt, Artificial Sequence
  Description of Artificial Sequence: Synthetic oligonucleotide
caauuaagugcgaugauac

SEQ ID NO: 2531563 - RNA, 19 nt, Artificial Sequence
  Description of Artificial Sequence: Synthetic oligonucleotide
agagcccauagucacaggc

SEQ ID NO: 2531564 - RNA, 19 nt, Artificial Sequence
  Description of Artificial Sequence: Synthetic oligonucleotide
uacucacaaaugaugacag

SEQ ID NO: 2531565 - RNA, 19 nt, Artificial Sequence
  Description of Artificial Sequence: Synthetic oligonucleotide
cacucauugaguuccaggg

SEQ ID NO: 2531566 - RNA, 19 nt, Artificial Sequence
  Description of Artificial Sequence: Synthetic oligonucleotide
auuuacgaaaccacgauag

SEQ ID NO: 2531567 - RNA, 19 nt, Artificial Sequence
  Description of Artificial Sequence: Synthetic oligonucleotide
uuaagugcgaugauacugu

SEQ ID NO: 2531568 - RNA, 19 nt, Artificial Sequence
  Description of Artificial Sequence: Synthetic oligonucleotide
auaagauaaucagucauag

SEQ ID NO: 2531569 - RNA, 19 nt, Artificial Sequence
  Description of Artificial Sequence: Synthetic oligonucleotide
uuuacgaaaccacgauagg

SEQ ID NO: 2531570 - RNA, 19 nt, Artificial Sequence
  Description of Artificial Sequence: Synthetic oligonucleotide
acugguaccagcccagugg

SEQ ID NO: 2531571 - RNA, 19 nt, Artificial Sequence
  Description of Artificial Sequence: Synthetic oligonucleotide
acagauucggagaucaagc

SEQ ID NO: 2531572 - RNA, 19 nt, Artificial Sequence
  Description of Artificial Sequence: Synthetic oligonucleotide
uagagauuuacgaaaccac

SEQ ID NO: 2531573 - RNA, 19 nt, Artificial Sequence
  Description of Artificial Sequence: Synthetic oligonucleotide
auuaagugcgaugauacug

SEQ ID NO: 2531574 - RNA, 19 nt, Artificial Sequence
  Description of Artificial Sequence: Synthetic oligonucleotide
auucccuuggccuuucagg

SEQ ID NO: 2531575 - RNA, 19 nt, Artificial Sequence
  Description of Artificial Sequence: Synthetic oligonucleotide
uccagguacucacaaauga

SEQ ID NO: 2531576 - RNA, 19 nt, Artificial Sequence
  Description of Artificial Sequence: Synthetic oligonucleotide
ugacaaucagucaaagccu

SEQ ID NO: 2531577 - RNA, 19 nt, Artificial Sequence
  Description of Artificial Sequence: Synthetic oligonucleotide
acgauuucaugucggauuc

SEQ ID NO: 2531578 - RNA, 19 nt, Artificial Sequence
  Description of Artificial Sequence: Synthetic oligonucleotide
ucugggaacagcuucuugu

SEQ ID NO: 2531579 - RNA, 19 nt, Artificial Sequence
  Description of Artificial Sequence: Synthetic oligonucleotide
agaaccucaugcuguagac

SEQ ID NO: 2531580 - RNA, 19 nt, Artificial Sequence
  Description of Artificial Sequence: Synthetic oligonucleotide
ucuugaggaaccacucggg

SEQ ID NO: 2531581 - RNA, 19 nt, Artificial Sequence
  Description of Artificial Sequence: Synthetic oligonucleotide
uggagugugggccacacac

SEQ ID NO: 2531582 - RNA, 19 nt, Artificial Sequence
  Description of Artificial Sequence: Synthetic oligonucleotide
uacgaaaccacgauagguc

SEQ ID NO: 2531583 - RNA, 19 nt, Artificial Sequence
  Description of Artificial Sequence: Synthetic oligonucleotide
uagguagagauuuacgaaa

SEQ ID NO: 2531584 - RNA, 19 nt, Artificial Sequence
  Description of Artificial Sequence: Synthetic oligonucleotide
agagauuuacgaaaccacg

SEQ ID NO: 2531585 - RNA, 19 nt, Artificial Sequence
  Description of Artificial Sequence: Synthetic oligonucleotide
aauucgcucugacaaucag

SEQ ID NO: 2531586 - RNA, 19 nt, Artificial Sequence
  Description of Artificial Sequence: Synthetic oligonucleotide
gagaaugacucuaagguca

SEQ ID NO: 2531587 - RNA, 19 nt, Artificial Sequence
  Description of Artificial Sequence: Synthetic oligonucleotide
aauucuuccuuuagggcag

SEQ ID NO: 2531588 - RNA, 19 nt, Artificial Sequence
  Description of Artificial Sequence: Synthetic oligonucleotide
acggaauucgcucugacaa

SEQ ID NO: 2531589 - RNA, 19 nt, Artificial Sequence
  Description of Artificial Sequence: Synthetic oligonucleotide
aggguuguccuguagguag

SEQ ID NO: 2531590 - RNA, 19 nt, Artificial Sequence
  Description of Artificial Sequence: Synthetic oligonucleotide
aauuaagugcgaugauacu

SEQ ID NO: 2531591 - RNA, 19 nt, Artificial Sequence
  Description of Artificial Sequence: Synthetic oligonucleotide
ggaaucuugcccuucagag

SEQ ID NO: 2531592 - RNA, 19 nt, Artificial Sequence
  Description of Artificial Sequence: Synthetic oligonucleotide
gauucggagaucaagcgac

SEQ ID NO: 2531593 - RNA, 19 nt, Artificial Sequence
  Description of Artificial Sequence: Synthetic oligonucleotide
gacaugguugagcuggugc

SEQ ID NO: 2531594 - RNA, 19 nt, Artificial Sequence
  Description of Artificial Sequence: Synthetic oligonucleotide
guagacgcggaucaggccc

SEQ ID NO: 2531595 - RNA, 19 nt, Artificial Sequence
  Description of Artificial Sequence: Synthetic oligonucleotide
ccuaauaaaccuuguaacc

SEQ ID NO: 2531596 - RNA, 19 nt, Artificial Sequence
  Description of Artificial Sequence: Synthetic oligonucleotide
cacacacucauugaguucc

SEQ ID NO: 2531597 - RNA, 19 nt, Artificial Sequence
  Description of Artificial Sequence: Synthetic oligonucleotide
caauucuuccuuuagggca

SEQ ID NO: 2531598 - RNA, 19 nt, Artificial Sequence
  Description of Artificial Sequence: Synthetic oligonucleotide
aaccacgauaggucuuggc

SEQ ID NO: 2531599 - RNA, 19 nt, Artificial Sequence
  Description of Artificial Sequence: Synthetic oligonucleotide
agagcggucuuccuuguuc

SEQ ID NO: 2531600 - RNA, 19 nt, Artificial Sequence
  Description of Artificial Sequence: Synthetic oligonucleotide
cuaaggucaucuucugccg

SEQ ID NO: 2531601 - RNA, 19 nt, Artificial Sequence
  Description of Artificial Sequence: Synthetic oligonucleotide
uguggggucuuucugcaug

SEQ ID NO: 2531602 - RNA, 19 nt, Artificial Sequence
  Description of Artificial Sequence: Synthetic oligonucleotide
gaaucuugcccuucagagc

SEQ ID NO: 2531603 - RNA, 19 nt, Artificial Sequence
  Description of Artificial Sequence: Synthetic oligonucleotide
uuacgaaaccacgauaggu

SEQ ID NO: 2531604 - RNA, 19 nt, Artificial Sequence
  Description of Artificial Sequence: Synthetic oligonucleotide
ucauagagacagcaucccc

SEQ ID NO: 2531605 - RNA, 19 nt, Artificial Sequence
  Description of Artificial Sequence: Synthetic oligonucleotide
gucaggguaggccucaucc

SEQ ID NO: 2531606 - RNA, 19 nt, Artificial Sequence
  Description of Artificial Sequence: Synthetic oligonucleotide
ucaugucggauucccuugg

SEQ ID NO: 2531607 - RNA, 19 nt, Artificial Sequence
  Description of Artificial Sequence: Synthetic oligonucleotide
cagauucggagaucaagcg

SEQ ID NO: 2531608 - RNA, 19 nt, Artificial Sequence
  Description of Artificial Sequence: Synthetic oligonucleotide
gacagauucggagaucaag

SEQ ID NO: 2531609 - RNA, 19 nt, Artificial Sequence
  Description of Artificial Sequence: Synthetic oligonucleotide
uuguccuguagguagagau

SEQ ID NO: 2531610 - RNA, 19 nt, Artificial Sequence
  Description of Artificial Sequence: Synthetic oligonucleotide
gauuucaugucggauuccc

SEQ ID NO: 2531611 - RNA, 19 nt, Artificial Sequence
  Description of Artificial Sequence: Synthetic oligonucleotide
ucuggaaccggacccggag

SEQ ID NO: 2531612 - RNA, 19 nt, Artificial Sequence
  Description of Artificial Sequence: Synthetic oligonucleotide
cuaauaaaccuuguaacca

SEQ ID NO: 2531613 - RNA, 19 nt, Artificial Sequence
  Description of Artificial Sequence: Synthetic oligonucleotide
cuguagguagagauuuacg

SEQ ID NO: 2531614 - RNA, 19 nt, Artificial Sequence
  Description of Artificial Sequence: Synthetic oligonucleotide
augucggauucccuuggcc

SEQ ID NO: 2531615 - RNA, 19 nt, Artificial Sequence
  Description of Artificial Sequence: Synthetic oligonucleotide
cagucguugaaaccaaggc

SEQ ID NO: 2531616 - RNA, 19 nt, Artificial Sequence
  Description of Artificial Sequence: Synthetic oligonucleotide
cagguacucacaaaugaug

SEQ ID NO: 2531617 - RNA, 19 nt, Artificial Sequence
  Description of Artificial Sequence: Synthetic oligonucleotide
agauuuacgaaaccacgau

SEQ ID NO: 2531618 - RNA, 19 nt, Artificial Sequence
  Description of Artificial Sequence: Synthetic oligonucleotide
ucaauuaagugcgaugaua

SEQ ID NO: 2531619 - RNA, 19 nt, Artificial Sequence
  Description of Artificial Sequence: Synthetic oligonucleotide
ugucggauucccuuggccu

SEQ ID NO: 2531620 - RNA, 19 nt, Artificial Sequence
  Description of Artificial Sequence: Synthetic oligonucleotide
uaagauaaucagucauaga

SEQ ID NO: 2531621 - RNA, 19 nt, Artificial Sequence
  Description of Artificial Sequence: Synthetic oligonucleotide
uucaugucggauucccuug

SEQ ID NO: 2531622 - RNA, 19 nt, Artificial Sequence
  Description of Artificial Sequence: Synthetic oligonucleotide
acaaaugaugacagauucg

SEQ ID NO: 2531623 - RNA, 19 nt, Artificial Sequence
  Description of Artificial Sequence: Synthetic oligonucleotide
ugaugacagauucggagau

SEQ ID NO: 2531624 - RNA, 19 nt, Artificial Sequence
  Description of Artificial Sequence: Synthetic oligonucleotide
uccuggaggaugcuccggg

SEQ ID NO: 2531625 - RNA, 19 nt, Artificial Sequence
  Description of Artificial Sequence: Synthetic oligonucleotide
ugacucuaaggucaucuuc

SEQ ID NO: 2531626 - RNA, 19 nt, Artificial Sequence
  Description of Artificial Sequence: Synthetic oligonucleotide
cagcccuucaguuuuggag

SEQ ID NO: 2531627 - RNA, 19 nt, Artificial Sequence
  Description of Artificial Sequence: Synthetic oligonucleotide
caucaauuaagugcgauga

SEQ ID NO: 2531628 - RNA, 19 nt, Artificial Sequence
  Description of Artificial Sequence: Synthetic oligonucleotide
uguccuccagaacugguac

SEQ ID NO: 2531629 - RNA, 19 nt, Artificial Sequence
  Description of Artificial Sequence: Synthetic oligonucleotide
ccacauaagauaaucaguc

SEQ ID NO: 2531630 - RNA, 19 nt, Artificial Sequence
  Description of Artificial Sequence: Synthetic oligonucleotide
caguuuuggagugugggcc

SEQ ID NO: 2531631 - RNA, 19 nt, Artificial Sequence
  Description of Artificial Sequence: Synthetic oligonucleotide
ucacaaaugaugacagauu

SEQ ID NO: 2531632 - RNA, 19 nt, Artificial Sequence
  Description of Artificial Sequence: Synthetic oligonucleotide
guagagauuuacgaaacca

SEQ ID NO: 2531633 - RNA, 19 nt, Artificial Sequence
  Description of Artificial Sequence: Synthetic oligonucleotide
cagucauagagacagcauc

SEQ ID NO: 2531634 - RNA, 19 nt, Artificial Sequence
  Description of Artificial Sequence: Synthetic oligonucleotide
ggccacauaagauaaucag

SEQ ID NO: 2531635 - RNA, 19 nt, Artificial Sequence
  Description of Artificial Sequence: Synthetic oligonucleotide
cuuguagaauucuuuccuc

SEQ ID NO: 2531636 - RNA, 19 nt, Artificial Sequence
  Description of Artificial Sequence: Synthetic oligonucleotide
cauagagacagcaucccca

SEQ ID NO: 2531637 - RNA, 19 nt, Artificial Sequence
  Description of Artificial Sequence: Synthetic oligonucleotide
gaaaccacgauaggucuug

SEQ ID NO: 2531638 - RNA, 19 nt, Artificial Sequence
  Description of Artificial Sequence: Synthetic oligonucleotide
acaugguugagcuggugca

SEQ ID NO: 2531639 - RNA, 19 nt, Artificial Sequence
  Description of Artificial Sequence: Synthetic oligonucleotide
agauucggagaucaagcga

SEQ ID NO: 2531640 - RNA, 19 nt, Artificial Sequence
  Description of Artificial Sequence: Synthetic oligonucleotide
cuucuugucaggguaggcc

SEQ ID NO: 2531641 - RNA, 19 nt, Artificial Sequence
  Description of Artificial Sequence: Synthetic oligonucleotide
agauaaucagucauagaga

SEQ ID NO: 2531642 - RNA, 19 nt, Artificial Sequence
  Description of Artificial Sequence: Synthetic oligonucleotide
uaggucuuggcaucaauua

SEQ ID NO: 2531643 - RNA, 19 nt, Artificial Sequence
  Description of Artificial Sequence: Synthetic oligonucleotide
uugaggaaccacucgggcu

SEQ ID NO: 2531644 - RNA, 19 nt, Artificial Sequence
  Description of Artificial Sequence: Synthetic oligonucleotide
ugcccuucagagcccauag

SEQ ID NO: 2531645 - RNA, 19 nt, Artificial Sequence
  Description of Artificial Sequence: Synthetic oligonucleotide
cuguagacgcggaucaggc

SEQ ID NO: 2531646 - RNA, 19 nt, Artificial Sequence
  Description of Artificial Sequence: Synthetic oligonucleotide
gagauuuacgaaaccacga

SEQ ID NO: 2531647 - RNA, 19 nt, Artificial Sequence
  Description of Artificial Sequence: Synthetic oligonucleotide
ucaagcgacccuuacuguc

SEQ ID NO: 2531648 - RNA, 19 nt, Artificial Sequence
  Description of Artificial Sequence: Synthetic oligonucleotide
ccuuucaggaccaucagug

SEQ ID NO: 2531649 - RNA, 19 nt, Artificial Sequence
  Description of Artificial Sequence: Synthetic oligonucleotide
cuugaggaaccacucgggc

SEQ ID NO: 2531650 - RNA, 19 nt, Artificial Sequence
  Description of Artificial Sequence: Synthetic oligonucleotide
acgaaaccacgauaggucu

SEQ ID NO: 2531651 - RNA, 19 nt, Artificial Sequence
  Description of Artificial Sequence: Synthetic oligonucleotide
aaccacucgggcuuguuuu

SEQ ID NO: 2531652 - RNA, 19 nt, Artificial Sequence
  Description of Artificial Sequence: Synthetic oligonucleotide
uccgggacaugguugagcu

SEQ ID NO: 2531653 - RNA, 19 nt, Artificial Sequence
  Description of Artificial Sequence: Synthetic oligonucleotide
auacggaauucgcucugac

SEQ ID NO: 2531654 - RNA, 19 nt, Artificial Sequence
  Description of Artificial Sequence: Synthetic oligonucleotide
uggaaccggacccggaggc

SEQ ID NO: 2531655 - RNA, 19 nt, Artificial Sequence
  Description of Artificial Sequence: Synthetic oligonucleotide
auccccaauacggaauucg

SEQ ID NO: 2531656 - RNA, 19 nt, Artificial Sequence
  Description of Artificial Sequence: Synthetic oligonucleotide
guagguagagauuuacgaa

SEQ ID NO: 2531657 - RNA, 19 nt, Artificial Sequence
  Description of Artificial Sequence: Synthetic oligonucleotide
uccuuuagggcagagcggu

SEQ ID NO: 2531658 - RNA, 19 nt, Artificial Sequence
  Description of Artificial Sequence: Synthetic oligonucleotide
aaucagucauagagacagc

SEQ ID NO: 2531659 - RNA, 19 nt, Artificial Sequence
  Description of Artificial Sequence: Synthetic oligonucleotide
cauaagauaaucagucaua

SEQ ID NO: 2531660 - RNA, 19 nt, Artificial Sequence
  Description of Artificial Sequence: Synthetic oligonucleotide
auaaaccuuguaaccaaag

SEQ ID NO: 2531661 - RNA, 19 nt, Artificial Sequence
  Description of Artificial Sequence: Synthetic oligonucleotide
cccuaauaaaccuuguaac

SEQ ID NO: 2531662 - RNA, 19 nt, Artificial Sequence
  Description of Artificial Sequence: Synthetic oligonucleotide
ucagucauagagacagcau

SEQ ID NO: 2531663 - RNA, 19 nt, Artificial Sequence
  Description of Artificial Sequence: Synthetic oligonucleotide
cugguaccagcccaguggg

SEQ ID NO: 2531664 - RNA, 19 nt, Artificial Sequence
  Description of Artificial Sequence: Synthetic oligonucleotide
guacucacaaaugaugaca

SEQ ID NO: 2531665 - RNA, 19 nt, Artificial Sequence
  Description of Artificial Sequence: Synthetic oligonucleotide
gauuuacgaaaccacgaua

SEQ ID NO: 2531666 - RNA, 19 nt, Artificial Sequence
  Description of Artificial Sequence: Synthetic oligonucleotide
agaucaagcgacccuuacu

SEQ ID NO: 2531667 - RNA, 19 nt, Artificial Sequence
  Description of Artificial Sequence: Synthetic oligonucleotide
ucauaagggucaucuggga

SEQ ID NO: 2531668 - RNA, 19 nt, Artificial Sequence
  Description of Artificial Sequence: Synthetic oligonucleotide
aucagucauagagacagca

SEQ ID NO: 2531669 - RNA, 19 nt, Artificial Sequence
  Description of Artificial Sequence: Synthetic oligonucleotide
aacugguaccagcccagug

SEQ ID NO: 2531670 - RNA, 19 nt, Artificial Sequence
  Description of Artificial Sequence: Synthetic oligonucleotide
uugacgauuucaugucgga

SEQ ID NO: 2531671 - RNA, 19 nt, Artificial Sequence
  Description of Artificial Sequence: Synthetic oligonucleotide
gaaccucaugcuguagacg

SEQ ID NO: 2531672 - RNA, 19 nt, Artificial Sequence
  Description of Artificial Sequence: Synthetic oligonucleotide
aagugcgaugauacugugg

SEQ ID NO: 2531673 - RNA, 19 nt, Artificial Sequence
  Description of Artificial Sequence: Synthetic oligonucleotide
uacggaauucgcucugaca

SEQ ID NO: 2531674 - RNA, 19 nt, Artificial Sequence
  Description of Artificial Sequence: Synthetic oligonucleotide
aauaaaccuuguaaccaaa

SEQ ID NO: 2531675 - RNA, 19 nt, Artificial Sequence
  Description of Artificial Sequence: Synthetic oligonucleotide
uaagggucaucugggaaca

SEQ ID NO: 2531676 - RNA, 19 nt, Artificial Sequence
  Description of Artificial Sequence: Synthetic oligonucleotide
aguuuuggagugugggcca

SEQ ID NO: 2531677 - RNA, 19 nt, Artificial Sequence
  Description of Artificial Sequence: Synthetic oligonucleotide
acaaucagucaaagccucc

SEQ ID NO: 2531678 - RNA, 19 nt, Artificial Sequence
  Description of Artificial Sequence: Synthetic oligonucleotide
gagcggucuuccuuguucc

SEQ ID NO: 2531679 - RNA, 19 nt, Artificial Sequence
  Description of Artificial Sequence: Synthetic oligonucleotide
aauacggaauucgcucuga

SEQ ID NO: 2531680 - RNA, 19 nt, Artificial Sequence
  Description of Artificial Sequence: Synthetic oligonucleotide
cauagucacaggccucagg

SEQ ID NO: 2531681 - RNA, 19 nt, Artificial Sequence
  Description of Artificial Sequence: Synthetic oligonucleotide
uguagacgcggaucaggcc

SEQ ID NO: 2531682 - RNA, 19 nt, Artificial Sequence
  Description of Artificial Sequence: Synthetic oligonucleotide
auacuguggggucuuucug

SEQ ID NO: 2531683 - RNA, 19 nt, Artificial Sequence
  Description of Artificial Sequence: Synthetic oligonucleotide
uaagugcgaugauacugug

SEQ ID NO: 2531684 - RNA, 19 nt, Artificial Sequence
  Description of Artificial Sequence: Synthetic oligonucleotide
ucggagaucaagcgacccu

SEQ ID NO: 2531685 - RNA, 19 nt, Artificial Sequence
  Description of Artificial Sequence: Synthetic oligonucleotide
gacaaucagucaaagccuc

SEQ ID NO: 2531686 - RNA, 19 nt, Artificial Sequence
  Description of Artificial Sequence: Synthetic oligonucleotide
cucuaaggucaucuucugc

SEQ ID NO: 2531687 - RNA, 19 nt, Artificial Sequence
  Description of Artificial Sequence: Synthetic oligonucleotide
aaaugaugacagauucgga

SEQ ID NO: 2531688 - RNA, 19 nt, Artificial Sequence
  Description of Artificial Sequence: Synthetic oligonucleotide
gaggcgagcuuccuuuccc

SEQ ID NO: 2531689 - RNA, 19 nt, Artificial Sequence
  Description of Artificial Sequence: Synthetic oligonucleotide
ucaggguaggccucaucca

SEQ ID NO: 2531690 - RNA, 19 nt, Artificial Sequence
  Description of Artificial Sequence: Synthetic oligonucleotide
agacagcauccccaauacg

SEQ ID NO: 2531691 - RNA, 19 nt, Artificial Sequence
  Description of Artificial Sequence: Synthetic oligonucleotide
uucagagcccauagucaca

SEQ ID NO: 2531692 - RNA, 19 nt, Artificial Sequence
  Description of Artificial Sequence: Synthetic oligonucleotide
uccagucguugaaaccaag

SEQ ID NO: 2531693 - RNA, 19 nt, Artificial Sequence
  Description of Artificial Sequence: Synthetic oligonucleotide
caggguaggccucauccag

SEQ ID NO: 2531694 - RNA, 19 nt, Artificial Sequence
  Description of Artificial Sequence: Synthetic oligonucleotide
ucuuccuuuagggcagagc

SEQ ID NO: 2531695 - RNA, 19 nt, Artificial Sequence
  Description of Artificial Sequence: Synthetic oligonucleotide
guggggucuuucugcaugg

SEQ ID NO: 2531696 - RNA, 19 nt, Artificial Sequence
  Description of Artificial Sequence: Synthetic oligonucleotide
agcccagugggauucuucu

SEQ ID NO: 2531697 - RNA, 19 nt, Artificial Sequence
  Description of Artificial Sequence: Synthetic oligonucleotide
ucguugaaaccaaggccac

SEQ ID NO: 2531698 - RNA, 19 nt, Artificial Sequence
  Description of Artificial Sequence: Synthetic oligonucleotide
gcaucaauuaagugcgaug

SEQ ID NO: 2531699 - RNA, 19 nt, Artificial Sequence
  Description of Artificial Sequence: Synthetic oligonucleotide
gagaucaagcgacccuuac

SEQ ID NO: 2531700 - RNA, 19 nt, Artificial Sequence
  Description of Artificial Sequence: Synthetic oligonucleotide
aucaauuaagugcgaugau

SEQ ID NO: 2531701 - RNA, 19 nt, Artificial Sequence
  Description of Artificial Sequence: Synthetic oligonucleotide
agcggucuuccuuguuccc

SEQ ID NO: 2531702 - RNA, 19 nt, Artificial Sequence
  Description of Artificial Sequence: Synthetic oligonucleotide
cugggaacagcuucuuguc

SEQ ID NO: 2531703 - RNA, 19 nt, Artificial Sequence
  Description of Artificial Sequence: Synthetic oligonucleotide
cacgauaggucuuggcauc

SEQ ID NO: 2531704 - RNA, 19 nt, Artificial Sequence
  Description of Artificial Sequence: Synthetic oligonucleotide
auucggagaucaagcgacc

SEQ ID NO: 2531705 - RNA, 19 nt, Artificial Sequence
  Description of Artificial Sequence: Synthetic oligonucleotide
gucauagagacagcauccc

SEQ ID NO: 2531706 - RNA, 19 nt, Artificial Sequence
  Description of Artificial Sequence: Synthetic oligonucleotide
gacgauuucaugucggauu

SEQ ID NO: 2531707 - RNA, 19 nt, Artificial Sequence
  Description of Artificial Sequence: Synthetic oligonucleotide
aaccaaggccacauaagau

SEQ ID NO: 2531708 - RNA, 19 nt, Artificial Sequence
  Description of Artificial Sequence: Synthetic oligonucleotide
aaaccacgauaggucuugg

SEQ ID NO: 2531709 - RNA, 19 nt, Artificial Sequence
  Description of Artificial Sequence: Synthetic oligonucleotide
uucggagaucaagcgaccc

SEQ ID NO: 2531710 - RNA, 19 nt, Artificial Sequence
  Description of Artificial Sequence: Synthetic oligonucleotide
caugcuguagacgcggauc

SEQ ID NO: 2531711 - RNA, 19 nt, Artificial Sequence
  Description of Artificial Sequence: Synthetic oligonucleotide
agaacugguaccagcccag

SEQ ID NO: 2531712 - RNA, 19 nt, Artificial Sequence
  Description of Artificial Sequence: Synthetic oligonucleotide
ccgagcuuucucauaaggg

SEQ ID NO: 2531713 - RNA, 19 nt, Artificial Sequence
  Description of Artificial Sequence: Synthetic oligonucleotide
caauacggaauucgcucug

SEQ ID NO: 2531714 - RNA, 19 nt, Artificial Sequence
  Description of Artificial Sequence: Synthetic oligonucleotide
agugcccucugagcgaagg

SEQ ID NO: 2531715 - RNA, 19 nt, Artificial Sequence
  Description of Artificial Sequence: Synthetic oligonucleotide
cccaauacggaauucgcuc

SEQ ID NO: 2531716 - RNA, 19 nt, Artificial Sequence
  Description of Artificial Sequence: Synthetic oligonucleotide
gggucuuucugcauggcag

SEQ ID NO: 2531717 - RNA, 19 nt, Artificial Sequence
  Description of Artificial Sequence: Synthetic oligonucleotide
gguacucacaaaugaugac

SEQ ID NO: 2531718 - RNA, 19 nt, Artificial Sequence
  Description of Artificial Sequence: Synthetic oligonucleotide
ccagucguugaaaccaagg

SEQ ID NO: 2531719 - RNA, 19 nt, Artificial Sequence
  Description of Artificial Sequence: Synthetic oligonucleotide
aagcgacccuuacuguccu

SEQ ID NO: 2531720 - RNA, 19 nt, Artificial Sequence
  Description of Artificial Sequence: Synthetic oligonucleotide
aucaagcgacccuuacugu

SEQ ID NO: 2531721 - RNA, 19 nt, Artificial Sequence
  Description of Artificial Sequence: Synthetic oligonucleotide
agcgaaggggcagaaccuc

SEQ ID NO: 2531722 - RNA, 19 nt, Artificial Sequence
  Description of Artificial Sequence: Synthetic oligonucleotide
gccgagcuuucucauaagg

SEQ ID NO: 2531723 - RNA, 19 nt, Artificial Sequence
  Description of Artificial Sequence: Synthetic oligonucleotide
ucagguugauauugacgau

SEQ ID NO: 2531724 - RNA, 19 nt, Artificial Sequence
  Description of Artificial Sequence: Synthetic oligonucleotide
cagucaaagccuccuccag

SEQ ID NO: 2531725 - RNA, 19 nt, Artificial Sequence
  Description of Artificial Sequence: Synthetic oligonucleotide
cacggcuccuggaggaugc

SEQ ID NO: 2531726 - RNA, 19 nt, Artificial Sequence
  Description of Artificial Sequence: Synthetic oligonucleotide
auaaucagucauagagaca

SEQ ID NO: 2531727 - RNA, 19 nt, Artificial Sequence
  Description of Artificial Sequence: Synthetic oligonucleotide
ggcagagcggucuuccuug

SEQ ID NO: 2531728 - RNA, 19 nt, Artificial Sequence
  Description of Artificial Sequence: Synthetic oligonucleotide
cucugacaaucagucaaag

SEQ ID NO: 2531729 - RNA, 19 nt, Artificial Sequence
  Description of Artificial Sequence: Synthetic oligonucleotide
caugguugagcuggugcag

SEQ ID NO: 2531730 - RNA, 19 nt, Artificial Sequence
  Description of Artificial Sequence: Synthetic oligonucleotide
ggaucaggcccucuggaac

SEQ ID NO: 2531731 - RNA, 19 nt, Artificial Sequence
  Description of Artificial Sequence: Synthetic oligonucleotide
uuuagggcagagcggucuu

SEQ ID NO: 2531732 - RNA, 19 nt, Artificial Sequence
  Description of Artificial Sequence: Synthetic oligonucleotide
cauaagggucaucugggaa

SEQ ID NO: 2531733 - RNA, 19 nt, Artificial Sequence
  Description of Artificial Sequence: Synthetic oligonucleotide
uagacgcggaucaggcccu

SEQ ID NO: 2531734 - RNA, 19 nt, Artificial Sequence
  Description of Artificial Sequence: Synthetic oligonucleotide
cuggaggaugcuccgggac

SEQ ID NO: 2531735 - RNA, 19 nt, Artificial Sequence
  Description of Artificial Sequence: Synthetic oligonucleotide
gugcgaugauacugugggg

SEQ ID NO: 2531736 - RNA, 19 nt, Artificial Sequence
  Description of Artificial Sequence: Synthetic oligonucleotide
cuucugccgagcuuucuca

SEQ ID NO: 2531737 - RNA, 19 nt, Artificial Sequence
  Description of Artificial Sequence: Synthetic oligonucleotide
ugacgauuucaugucggau

SEQ ID NO: 2531738 - RNA, 19 nt, Artificial Sequence
  Description of Artificial Sequence: Synthetic oligonucleotide
auaggucuuggcaucaauu

SEQ ID NO: 2531739 - RNA, 19 nt, Artificial Sequence
  Description of Artificial Sequence: Synthetic oligonucleotide
caugucggauucccuuggc

SEQ ID NO: 2531740 - RNA, 19 nt, Artificial Sequence
  Description of Artificial Sequence: Synthetic oligonucleotide
gaugacagauucggagauc

SEQ ID NO: 2531741 - RNA, 19 nt, Artificial Sequence
  Description of Artificial Sequence: Synthetic oligonucleotide
gcuuccagucguugaaacc

SEQ ID NO: 2531742 - RNA, 19 nt, Artificial Sequence
  Description of Artificial Sequence: Synthetic oligonucleotide
agguugauauugacgauuu

SEQ ID NO: 2531743 - RNA, 19 nt, Artificial Sequence
  Description of Artificial Sequence: Synthetic oligonucleotide
auccagguacucacaaaug

SEQ ID NO: 2531744 - RNA, 19 nt, Artificial Sequence
  Description of Artificial Sequence: Synthetic oligonucleotide
cccuucagagcccauaguc

SEQ ID NO: 2531745 - RNA, 19 nt, Artificial Sequence
  Description of Artificial Sequence: Synthetic oligonucleotide
aggguaggccucauccagg

SEQ ID NO: 2531746 - RNA, 19 nt, Artificial Sequence
  Description of Artificial Sequence: Synthetic oligonucleotide
ggaauucgcucugacaauc

SEQ ID NO: 2531747 - RNA, 19 nt, Artificial Sequence
  Description of Artificial Sequence: Synthetic oligonucleotide
ugccgagcuuucucauaag

SEQ ID NO: 2531748 - RNA, 19 nt, Artificial Sequence
  Description of Artificial Sequence: Synthetic oligonucleotide
ugauacuguggggucuuuc

SEQ ID NO: 2531749 - RNA, 19 nt, Artificial Sequence
  Description of Artificial Sequence: Synthetic oligonucleotide
aggccacauaagauaauca

SEQ ID NO: 2531750 - RNA, 19 nt, Artificial Sequence
  Description of Artificial Sequence: Synthetic oligonucleotide
ucugccgagcuuucucaua

SEQ ID NO: 2531751 - RNA, 19 nt, Artificial Sequence
  Description of Artificial Sequence: Synthetic oligonucleotide
cagugggauucuucuugag

SEQ ID NO: 2531752 - RNA, 19 nt, Artificial Sequence
  Description of Artificial Sequence: Synthetic oligonucleotide
cccagugggauucuucuug

SEQ ID NO: 2531753 - RNA, 19 nt, Artificial Sequence
  Description of Artificial Sequence: Synthetic oligonucleotide
aucaggcccucuggaaccg

SEQ ID NO: 2531754 - RNA, 19 nt, Artificial Sequence
  Description of Artificial Sequence: Synthetic oligonucleotide
auuucaugucggauucccu

SEQ ID NO: 2531755 - RNA, 19 nt, Artificial Sequence
  Description of Artificial Sequence: Synthetic oligonucleotide
uuggagugugggccacaca

SEQ ID NO: 2531756 - RNA, 19 nt, Artificial Sequence
  Description of Artificial Sequence: Synthetic oligonucleotide
uccuguagguagagauuua

SEQ ID NO: 2531757 - RNA, 19 nt, Artificial Sequence
  Description of Artificial Sequence: Synthetic oligonucleotide
uucugccgagcuuucucau

SEQ ID NO: 2531758 - RNA, 19 nt, Artificial Sequence
  Description of Artificial Sequence: Synthetic oligonucleotide
agaaugacucuaaggucau

SEQ ID NO: 2531759 - RNA, 19 nt, Artificial Sequence
  Description of Artificial Sequence: Synthetic oligonucleotide
cugccgagcuuucucauaa

SEQ ID NO: 2531760 - RNA, 19 nt, Artificial Sequence
  Description of Artificial Sequence: Synthetic oligonucleotide
accuuggagaaugacucua

SEQ ID NO: 2531761 - RNA, 19 nt, Artificial Sequence
  Description of Artificial Sequence: Synthetic oligonucleotide
ggcuuccagucguugaaac

SEQ ID NO: 2531762 - RNA, 19 nt, Artificial Sequence
  Description of Artificial Sequence: Synthetic oligonucleotide
acgcggaucaggcccucug

SEQ ID NO: 2531763 - RNA, 19 nt, Artificial Sequence
  Description of Artificial Sequence: Synthetic oligonucleotide
uuuuggagugugggccaca

SEQ ID NO: 2531764 - RNA, 19 nt, Artificial Sequence
  Description of Artificial Sequence: Synthetic oligonucleotide
gggauucuucuugaggaac

SEQ ID NO: 2531765 - RNA, 19 nt, Artificial Sequence
  Description of Artificial Sequence: Synthetic oligonucleotide
ugucaggguaggccucauc

SEQ ID NO: 2531766 - RNA, 19 nt, Artificial Sequence
  Description of Artificial Sequence: Synthetic oligonucleotide
aagggucaucugggaacag

SEQ ID NO: 2531767 - RNA, 19 nt, Artificial Sequence
  Description of Artificial Sequence: Synthetic oligonucleotide
cuccgggacaugguugagc

SEQ ID NO: 2531768 - RNA, 19 nt, Artificial Sequence
  Description of Artificial Sequence: Synthetic oligonucleotide
acgauaggucuuggcauca

SEQ ID NO: 2531769 - RNA, 19 nt, Artificial Sequence
  Description of Artificial Sequence: Synthetic oligonucleotide
gaugcuccgggacaugguu

SEQ ID NO: 2531770 - RNA, 19 nt, Artificial Sequence
  Description of Artificial Sequence: Synthetic oligonucleotide
ccucaugcuguagacgcgg

SEQ ID NO: 2531771 - RNA, 19 nt, Artificial Sequence
  Description of Artificial Sequence: Synthetic oligonucleotide
gaaccggacccggaggcga

SEQ ID NO: 2531772 - RNA, 19 nt, Artificial Sequence
  Description of Artificial Sequence: Synthetic oligonucleotide
gcccucuggaaccggaccc

SEQ ID NO: 2531773 - RNA, 19 nt, Artificial Sequence
  Description of Artificial Sequence: Synthetic oligonucleotide
gcuccuggaggaugcuccg

SEQ ID NO: 2531774 - RNA, 19 nt, Artificial Sequence
  Description of Artificial Sequence: Synthetic oligonucleotide
guuuuggagugugggccac

SEQ ID NO: 2531775 - RNA, 19 nt, Artificial Sequence
  Description of Artificial Sequence: Synthetic oligonucleotide
agcgacccuuacuguccuc

SEQ ID NO: 2531776 - RNA, 19 nt, Artificial Sequence
  Description of Artificial Sequence: Synthetic oligonucleotide
augcuccgggacaugguug

SEQ ID NO: 2531777 - RNA, 19 nt, Artificial Sequence
  Description of Artificial Sequence: Synthetic oligonucleotide
ucugagcgaaggggcagaa

SEQ ID NO: 2531778 - RNA, 19 nt, Artificial Sequence
  Description of Artificial Sequence: Synthetic oligonucleotide
cagcccagugggauucuuc

SEQ ID NO: 2531779 - RNA, 19 nt, Artificial Sequence
  Description of Artificial Sequence: Synthetic oligonucleotide
aaccggacccggaggcgag

SEQ ID NO: 2531780 - RNA, 19 nt, Artificial Sequence
  Description of Artificial Sequence: Synthetic oligonucleotide
ccagaacugguaccagccc

SEQ ID NO: 2531781 - RNA, 19 nt, Artificial Sequence
  Description of Artificial Sequence: Synthetic oligonucleotide
gcgaugauacugugggguc

SEQ ID NO: 2531782 - RNA, 19 nt, Artificial Sequence
  Description of Artificial Sequence: Synthetic oligonucleotide
uuagggcagagcggucuuc

SEQ ID NO: 2531783 - RNA, 19 nt, Artificial Sequence
  Description of Artificial Sequence: Synthetic oligonucleotide
gguugauauugacgauuuc

SEQ ID NO: 2531784 - RNA, 19 nt, Artificial Sequence
  Description of Artificial Sequence: Synthetic oligonucleotide
cuuuagggcagagcggucu

SEQ ID NO: 2531785 - RNA, 19 nt, Artificial Sequence
  Description of Artificial Sequence: Synthetic oligonucleotide
uggggucuuucugcauggc

SEQ ID NO: 2531786 - RNA, 19 nt, Artificial Sequence
  Description of Artificial Sequence: Synthetic oligonucleotide
caaucagucaaagccuccu

SEQ ID NO: 2531787 - RNA, 19 nt, Artificial Sequence
  Description of Artificial Sequence: Synthetic oligonucleotide
gcccuucaguuuuggagug

SEQ ID NO: 2531788 - RNA, 19 nt, Artificial Sequence
  Description of Artificial Sequence: Synthetic oligonucleotide
gaccaucagugcccucuga

SEQ ID NO: 2531789 - RNA, 19 nt, Artificial Sequence
  Description of Artificial Sequence: Synthetic oligonucleotide
gccacauaagauaaucagu

SEQ ID NO: 2531790 - RNA, 19 nt, Artificial Sequence
  Description of Artificial Sequence: Synthetic oligonucleotide
cagcauccccaauacggaa

SEQ ID NO: 2531791 - RNA, 19 nt, Artificial Sequence
  Description of Artificial Sequence: Synthetic oligonucleotide
aggcccucuggaaccggac

SEQ ID NO: 2531792 - RNA, 19 nt, Artificial Sequence
  Description of Artificial Sequence: Synthetic oligonucleotide
cauccagcccuucaguuuu

SEQ ID NO: 2531793 - RNA, 19 nt, Artificial Sequence
  Description of Artificial Sequence: Synthetic oligonucleotide
ucggauucccuuggccuuu

SEQ ID NO: 2531794 - RNA, 19 nt, Artificial Sequence
  Description of Artificial Sequence: Synthetic oligonucleotide
gaaccacucgggcuuguuu

SEQ ID NO: 2531795 - RNA, 19 nt, Artificial Sequence
  Description of Artificial Sequence: Synthetic oligonucleotide
ggaaccggacccggaggcg

SEQ ID NO: 2531796 - RNA, 19 nt, Artificial Sequence
  Description of Artificial Sequence: Synthetic oligonucleotide
gacccggaggcgagcuucc

SEQ ID NO: 2531797 - RNA, 19 nt, Artificial Sequence
  Description of Artificial Sequence: Synthetic oligonucleotide
ugugggccacacacucauu

SEQ ID NO: 2531798 - RNA, 19 nt, Artificial Sequence
  Description of Artificial Sequence: Synthetic oligonucleotide
accggacccggaggcgagc

SEQ ID NO: 2531799 - RNA, 19 nt, Artificial Sequence
  Description of Artificial Sequence: Synthetic oligonucleotide
gagcgaaggggcagaaccu

SEQ ID NO: 2531800 - RNA, 19 nt, Artificial Sequence
  Description of Artificial Sequence: Synthetic oligonucleotide
cagguugauauugacgauu

SEQ ID NO: 2531801 - RNA, 19 nt, Artificial Sequence
  Description of Artificial Sequence: Synthetic oligonucleotide
ccaauacggaauucgcucu

SEQ ID NO: 2531802 - RNA, 19 nt, Artificial Sequence
  Description of Artificial Sequence: Synthetic oligonucleotide
gucggauucccuuggccuu

SEQ ID NO: 2531803 - RNA, 19 nt, Artificial Sequence
  Description of Artificial Sequence: Synthetic oligonucleotide
cucugagcgaaggggcaga

SEQ ID NO: 2531804 - RNA, 19 nt, Artificial Sequence
  Description of Artificial Sequence: Synthetic oligonucleotide
gcggaucaggcccucugga

SEQ ID NO: 2531805 - RNA, 19 nt, Artificial Sequence
  Description of Artificial Sequence: Synthetic oligonucleotide
ggacccggaggcgagcuuc

SEQ ID NO: 2531806 - RNA, 19 nt, Artificial Sequence
  Description of Artificial Sequence: Synthetic oligonucleotide
caccuuggagaaugacucu

SEQ ID NO: 2531807 - RNA, 19 nt, Artificial Sequence
  Description of Artificial Sequence: Synthetic oligonucleotide
agacgcggaucaggcccuc

SEQ ID NO: 2531808 - RNA, 19 nt, Artificial Sequence
  Description of Artificial Sequence: Synthetic oligonucleotide
ccucugagcgaaggggcag

SEQ ID NO: 2531809 - RNA, 19 nt, Artificial Sequence
  Description of Artificial Sequence: Synthetic oligonucleotide
cgcggaucaggcccucugg

SEQ ID NO: 2531810 - RNA, 19 nt, Artificial Sequence
  Description of Artificial Sequence: Synthetic oligonucleotide
gaacugguaccagcccagu

SEQ ID NO: 2531811 - RNA, 19 nt, Artificial Sequence
  Description of Artificial Sequence: Synthetic oligonucleotide
gccuuucaggaccaucagu

SEQ ID NO: 2531812 - RNA, 19 nt, Artificial Sequence
  Description of Artificial Sequence: Synthetic oligonucleotide
ggcaucaauuaagugcgau

SEQ ID NO: 2531813 - RNA, 19 nt, Artificial Sequence
  Description of Artificial Sequence: Synthetic oligonucleotide
caaggccacauaagauaau

SEQ ID NO: 2531814 - RNA, 19 nt, Artificial Sequence
  Description of Artificial Sequence: Synthetic oligonucleotide
caggguuguccuguaggua

SEQ ID NO: 2531815 - RNA, 19 nt, Artificial Sequence
  Description of Artificial Sequence: Synthetic oligonucleotide
cagugcccucugagcgaag

SEQ ID NO: 2531816 - RNA, 19 nt, Artificial Sequence
  Description of Artificial Sequence: Synthetic oligonucleotide
ccuuuagggcagagcgguc

SEQ ID NO: 2531817 - RNA, 19 nt, Artificial Sequence
  Description of Artificial Sequence: Synthetic oligonucleotide
ggguuguccuguagguaga

SEQ ID NO: 2531818 - RNA, 19 nt, Artificial Sequence
  Description of Artificial Sequence: Synthetic oligonucleotide
aggaaccacucgggcuugu

SEQ ID NO: 2531819 - RNA, 19 nt, Artificial Sequence
  Description of Artificial Sequence: Synthetic oligonucleotide
cccuuacuguccuccagaa

SEQ ID NO: 2531820 - RNA, 19 nt, Artificial Sequence
  Description of Artificial Sequence: Synthetic oligonucleotide
cuccagcuuguagaauucu

SEQ ID NO: 2531821 - RNA, 19 nt, Artificial Sequence
  Description of Artificial Sequence: Synthetic oligonucleotide
gagcuggugcaggccgaga

SEQ ID NO: 2531822 - RNA, 19 nt, Artificial Sequence
  Description of Artificial Sequence: Synthetic oligonucleotide
cgauuucaugucggauucc

SEQ ID NO: 2531823 - RNA, 19 nt, Artificial Sequence
  Description of Artificial Sequence: Synthetic oligonucleotide
ccuuggccuuucaggacca

SEQ ID NO: 2531824 - RNA, 19 nt, Artificial Sequence
  Description of Artificial Sequence: Synthetic oligonucleotide
ggagaucaagcgacccuua

SEQ ID NO: 2531825 - RNA, 19 nt, Artificial Sequence
  Description of Artificial Sequence: Synthetic oligonucleotide
ccuggaggaugcuccggga

SEQ ID NO: 2531826 - RNA, 19 nt, Artificial Sequence
  Description of Artificial Sequence: Synthetic oligonucleotide
ccccaauacggaauucgcu

SEQ ID NO: 2531827 - RNA, 19 nt, Artificial Sequence
  Description of Artificial Sequence: Synthetic oligonucleotide
caggaccaucagugcccuc

SEQ ID NO: 2531828 - RNA, 19 nt, Artificial Sequence
  Description of Artificial Sequence: Synthetic oligonucleotide
ggaggaugcuccgggacau

SEQ ID NO: 2531829 - RNA, 19 nt, Artificial Sequence
  Description of Artificial Sequence: Synthetic oligonucleotide
ggagugugggccacacacu

SEQ ID NO: 2531830 - RNA, 19 nt, Artificial Sequence
  Description of Artificial Sequence: Synthetic oligonucleotide
ccccacggcuccuggagga

SEQ ID NO: 2531831 - RNA, 19 nt, Artificial Sequence
  Description of Artificial Sequence: Synthetic oligonucleotide
ccgggacaugguugagcug

SEQ ID NO: 2531832 - RNA, 19 nt, Artificial Sequence
  Description of Artificial Sequence: Synthetic oligonucleotide
acccggaggcgagcuuccu

SEQ ID NO: 2531833 - RNA, 19 nt, Artificial Sequence
  Description of Artificial Sequence: Synthetic oligonucleotide
ccacggcuccuggaggaug

SEQ ID NO: 2531834 - RNA, 19 nt, Artificial Sequence
  Description of Artificial Sequence: Synthetic oligonucleotide
gggcagagcggucuuccuu

SEQ ID NO: 2531835 - RNA, 19 nt, Artificial Sequence
  Description of Artificial Sequence: Synthetic oligonucleotide
ccauccagcccuucaguuu

SEQ ID NO: 2531836 - RNA, 19 nt, Artificial Sequence
  Description of Artificial Sequence: Synthetic oligonucleotide
cggaucaggcccucuggaa

SEQ ID NO: 2531837 - RNA, 19 nt, Artificial Sequence
  Description of Artificial Sequence: Synthetic oligonucleotide
gacgcggaucaggcccucu

SEQ ID NO: 2531838 - RNA, 19 nt, Artificial Sequence
  Description of Artificial Sequence: Synthetic oligonucleotide
ggaugcuccgggacauggu

SEQ ID NO: 2531839 - RNA, 19 nt, Artificial Sequence
  Description of Artificial Sequence: Synthetic oligonucleotide
ccggaggcgagcuuccuuu

SEQ ID NO: 2531840 - RNA, 19 nt, Artificial Sequence
  Description of Artificial Sequence: Synthetic oligonucleotide
cggaggcgagcuuccuuuc

SEQ ID NO: 2531841 - RNA, 19 nt, Artificial Sequence
  Description of Artificial Sequence: Synthetic oligonucleotide
gcccuucagagcccauagu

SEQ ID NO: 2531842 - RNA, 19 nt, Artificial Sequence
  Description of Artificial Sequence: Synthetic oligonucleotide
cgacccuuacuguccucca

SEQ ID NO: 2531843 - RNA, 19 nt, Artificial Sequence
  Description of Artificial Sequence: Synthetic oligonucleotide
cgaugauacuguggggucu

SEQ ID NO: 2531844 - RNA, 19 nt, Artificial Sequence
  Description of Artificial Sequence: Synthetic oligonucleotide
cagagcggucuuccuuguu

SEQ ID NO: 2531845 - RNA, 19 nt, Artificial Sequence
  Description of Artificial Sequence: Synthetic oligonucleotide
cggaauucgcucugacaau

SEQ ID NO: 2531846 - RNA, 19 nt, Artificial Sequence
  Description of Artificial Sequence: Synthetic oligonucleotide
cgaaaccacgauaggucuu

SEQ ID NO: 2531847 - RNA, 19 nt, Artificial Sequence
  Description of Artificial Sequence: Synthetic oligonucleotide
cgaaggggcagaaccucau

SEQ ID NO: 2531848 - RNA, 19 nt, Artificial Sequence
  Description of Artificial Sequence: Synthetic oligonucleotide
cccggaggcgagcuuccuu

SEQ ID NO: 2531849 - RNA, 19 nt, Artificial Sequence
  Description of Artificial Sequence: Synthetic oligonucleotide
cccacggcuccuggaggau

SEQ ID NO: 2531850 - RNA, 19 nt, Artificial Sequence
  Description of Artificial Sequence: Synthetic oligonucleotide
agugguaucggaaagagac

SEQ ID NO: 2531851 - RNA, 19 nt, Artificial Sequence
  Description of Artificial Sequence: Synthetic oligonucleotide
ugucacagcacaauguccg

SEQ ID NO: 2531852 - RNA, 19 nt, Artificial Sequence
  Description of Artificial Sequence: Synthetic oligonucleotide
ugguauuggaggaagacag

SEQ ID NO: 2531853 - RNA, 19 nt, Artificial Sequence
  Description of Artificial Sequence: Synthetic oligonucleotide
aaaagggcgauggugaggg

SEQ ID NO: 2531854 - RNA, 19 nt, Artificial Sequence
  Description of Artificial Sequence: Synthetic oligonucleotide
uucaacugcaaacucagug

SEQ ID NO: 2531855 - RNA, 19 nt, Artificial Sequence
  Description of Artificial Sequence: Synthetic oligonucleotide
acuugguguguccaaagcc

SEQ ID NO: 2531856 - RNA, 19 nt, Artificial Sequence
  Description of Artificial Sequence: Synthetic oligonucleotide
auugggguggcccaaggcc

SEQ ID NO: 2531857 - RNA, 19 nt, Artificial Sequence
  Description of Artificial Sequence: Synthetic oligonucleotide
agcucuugugcacagcucc

SEQ ID NO: 2531858 - RNA, 19 nt, Artificial Sequence
  Description of Artificial Sequence: Synthetic oligonucleotide
cucaguguggcacagcucg

SEQ ID NO: 2531859 - RNA, 19 nt, Artificial Sequence
  Description of Artificial Sequence: Synthetic oligonucleotide
uuuuaagaguccagcagcc

SEQ ID NO: 2531860 - RNA, 19 nt, Artificial Sequence
  Description of Artificial Sequence: Synthetic oligonucleotide
ugccgguacagccacaugg

SEQ ID NO: 2531861 - RNA, 19 nt, Artificial Sequence
  Description of Artificial Sequence: Synthetic oligonucleotide
aagacagccacuucuccag

SEQ ID NO: 2531862 - RNA, 19 nt, Artificial Sequence
  Description of Artificial Sequence: Synthetic oligonucleotide
uccacaaccuuggagaagg

SEQ ID NO: 2531863 - RNA, 19 nt, Artificial Sequence
  Description of Artificial Sequence: Synthetic oligonucleotide
accugugccacauauuggg

SEQ ID NO: 2531864 - RNA, 19 nt, Artificial Sequence
  Description of Artificial Sequence: Synthetic oligonucleotide
uggugugaugaacacaaag

SEQ ID NO: 2531865 - RNA, 19 nt, Artificial Sequence
  Description of Artificial Sequence: Synthetic oligonucleotide
uucugauuggucuuccucc

SEQ ID NO: 2531866 - RNA, 19 nt, Artificial Sequence
  Description of Artificial Sequence: Synthetic oligonucleotide
auggugagggcaaugagcc

SEQ ID NO: 2531867 - RNA, 19 nt, Artificial Sequence
  Description of Artificial Sequence: Synthetic oligonucleotide
cuugguguguccaaagccc

SEQ ID NO: 2531868 - RNA, 19 nt, Artificial Sequence
  Description of Artificial Sequence: Synthetic oligonucleotide
acugcaaacucaguguggc

SEQ ID NO: 2531869 - RNA, 19 nt, Artificial Sequence
  Description of Artificial Sequence: Synthetic oligonucleotide
gacaguugagagcagccgg

SEQ ID NO: 2531870 - RNA, 19 nt, Artificial Sequence
  Description of Artificial Sequence: Synthetic oligonucleotide
uggcagauucggcagaagg

SEQ ID NO: 2531871 - RNA, 19 nt, Artificial Sequence
  Description of Artificial Sequence: Synthetic oligonucleotide
ucaccugucgucauggcca

SEQ ID NO: 2531872 - RNA, 19 nt, Artificial Sequence
  Description of Artificial Sequence: Synthetic oligonucleotide
aauguccgcuucucagugc

SEQ ID NO: 2531873 - RNA, 19 nt, Artificial Sequence
  Description of Artificial Sequence: Synthetic oligonucleotide
aacucaguguggcacagcu

SEQ ID NO: 2531874 - RNA, 19 nt, Artificial Sequence
  Description of Artificial Sequence: Synthetic oligonucleotide
uucccgaaucuucaggcgg

SEQ ID NO: 2531875 - RNA, 19 nt, Artificial Sequence
  Description of Artificial Sequence: Synthetic oligonucleotide
gaguccagcagccagcaag

SEQ ID NO: 2531876 - RNA, 19 nt, Artificial Sequence
  Description of Artificial Sequence: Synthetic oligonucleotide
aaagagaccaguguccaga

SEQ ID NO: 2531877 - RNA, 19 nt, Artificial Sequence
  Description of Artificial Sequence: Synthetic oligonucleotide
agugcgaggcccugggucc

SEQ ID NO: 2531878 - RNA, 19 nt, Artificial Sequence
  Description of Artificial Sequence: Synthetic oligonucleotide
ugagauggcggccaguggu

SEQ ID NO: 2531879 - RNA, 19 nt, Artificial Sequence
  Description of Artificial Sequence: Synthetic oligonucleotide
ucggaaagagaccaguguc

SEQ ID NO: 2531880 - RNA, 19 nt, Artificial Sequence
  Description of Artificial Sequence: Synthetic oligonucleotide
acaaagcacaccaugucac

SEQ ID NO: 2531881 - RNA, 19 nt, Artificial Sequence
  Description of Artificial Sequence: Synthetic oligonucleotide
ucgucauggccacagggag

SEQ ID NO: 2531882 - RNA, 19 nt, Artificial Sequence
  Description of Artificial Sequence: Synthetic oligonucleotide
acaaccuuggagaaggcag

SEQ ID NO: 2531883 - RNA, 19 nt, Artificial Sequence
  Description of Artificial Sequence: Synthetic oligonucleotide
uaucggaaagagaccagug

SEQ ID NO: 2531884 - RNA, 19 nt, Artificial Sequence
  Description of Artificial Sequence: Synthetic oligonucleotide
uucaaccacucugugagag

SEQ ID NO: 2531885 - RNA, 19 nt, Artificial Sequence
  Description of Artificial Sequence: Synthetic oligonucleotide
ugugccacauauuggggug

SEQ ID NO: 2531886 - RNA, 19 nt, Artificial Sequence
  Description of Artificial Sequence: Synthetic oligonucleotide
uccauucugaguacagcug

SEQ ID NO: 2531887 - RNA, 19 nt, Artificial Sequence
  Description of Artificial Sequence: Synthetic oligonucleotide
aagagaccaguguccagag

SEQ ID NO: 2531888 - RNA, 19 nt, Artificial Sequence
  Description of Artificial Sequence: Synthetic oligonucleotide
uauuggaggaagacagcca

SEQ ID NO: 2531889 - RNA, 19 nt, Artificial Sequence
  Description of Artificial Sequence: Synthetic oligonucleotide
cacaauguccgcuucucag

SEQ ID NO: 2531890 - RNA, 19 nt, Artificial Sequence
  Description of Artificial Sequence: Synthetic oligonucleotide
auguccgcuucucagugcg

SEQ ID NO: 2531891 - RNA, 19 nt, Artificial Sequence
  Description of Artificial Sequence: Synthetic oligonucleotide
ugguaucggaaagagacca

SEQ ID NO: 2531892 - RNA, 19 nt, Artificial Sequence
  Description of Artificial Sequence: Synthetic oligonucleotide
cuuuucaacugcaaacuca

SEQ ID NO: 2531893 - RNA, 19 nt, Artificial Sequence
  Description of Artificial Sequence: Synthetic oligonucleotide
ugcuucccgaaucuucagg

SEQ ID NO: 2531894 - RNA, 19 nt, Artificial Sequence
  Description of Artificial Sequence: Synthetic oligonucleotide
guauuggaggaagacagcc

SEQ ID NO: 2531895 - RNA, 19 nt, Artificial Sequence
  Description of Artificial Sequence: Synthetic oligonucleotide
ccuucaaccacucugugag

SEQ ID NO: 2531896 - RNA, 19 nt, Artificial Sequence
  Description of Artificial Sequence: Synthetic oligonucleotide
uguccagagcacauagaug

SEQ ID NO: 2531897 - RNA, 19 nt, Artificial Sequence
  Description of Artificial Sequence: Synthetic oligonucleotide
ggugugaugaacacaaagc

SEQ ID NO: 2531898 - RNA, 19 nt, Artificial Sequence
  Description of Artificial Sequence: Synthetic oligonucleotide
ugcaaacucaguguggcac

SEQ ID NO: 2531899 - RNA, 19 nt, Artificial Sequence
  Description of Artificial Sequence: Synthetic oligonucleotide
aucccuugaagucaccugu

SEQ ID NO: 2531900 - RNA, 19 nt, Artificial Sequence
  Description of Artificial Sequence: Synthetic oligonucleotide
cacagcucgcaguagcugg

SEQ ID NO: 2531901 - RNA, 19 nt, Artificial Sequence
  Description of Artificial Sequence: Synthetic oligonucleotide
caaccuuggagaaggcagg

SEQ ID NO: 2531902 - RNA, 19 nt, Artificial Sequence
  Description of Artificial Sequence: Synthetic oligonucleotide
ucaaccacucugugagagg

SEQ ID NO: 2531903 - RNA, 19 nt, Artificial Sequence
  Description of Artificial Sequence: Synthetic oligonucleotide
accaugucacagcacaaug

SEQ ID NO: 2531904 - RNA, 19 nt, Artificial Sequence
  Description of Artificial Sequence: Synthetic oligonucleotide
ggcaaugagccccacagcc

SEQ ID NO: 2531905 - RNA, 19 nt, Artificial Sequence
  Description of Artificial Sequence: Synthetic oligonucleotide
gaugacaguugagagcagc

SEQ ID NO: 2531906 - RNA, 19 nt, Artificial Sequence
  Description of Artificial Sequence: Synthetic oligonucleotide
aucggaaagagaccagugu

SEQ ID NO: 2531907 - RNA, 19 nt, Artificial Sequence
  Description of Artificial Sequence: Synthetic oligonucleotide
ucccucauggcagauucgg

SEQ ID NO: 2531908 - RNA, 19 nt, Artificial Sequence
  Description of Artificial Sequence: Synthetic oligonucleotide
gaagacagccacuucucca

SEQ ID NO: 2531909 - RNA, 19 nt, Artificial Sequence
  Description of Artificial Sequence: Synthetic oligonucleotide
accacucugugagaggucg

SEQ ID NO: 2531910 - RNA, 19 nt, Artificial Sequence
  Description of Artificial Sequence: Synthetic oligonucleotide
agcaaguucucuccauuug

SEQ ID NO: 2531911 - RNA, 19 nt, Artificial Sequence
  Description of Artificial Sequence: Synthetic oligonucleotide
gauuggucuuccuccauuc

SEQ ID NO: 2531912 - RNA, 19 nt, Artificial Sequence
  Description of Artificial Sequence: Synthetic oligonucleotide
augucacagcacaaugucc

SEQ ID NO: 2531913 - RNA, 19 nt, Artificial Sequence
  Description of Artificial Sequence: Synthetic oligonucleotide
acaguugagagcagccggc

SEQ ID NO: 2531914 - RNA, 19 nt, Artificial Sequence
  Description of Artificial Sequence: Synthetic oligonucleotide
gauucggcagaagggacag

SEQ ID NO: 2531915 - RNA, 19 nt, Artificial Sequence
  Description of Artificial Sequence: Synthetic oligonucleotide
acaauguccgcuucucagu

SEQ ID NO: 2531916 - RNA, 19 nt, Artificial Sequence
  Description of Artificial Sequence: Synthetic oligonucleotide
uccuccauucugaguacag

SEQ ID NO: 2531917 - RNA, 19 nt, Artificial Sequence
  Description of Artificial Sequence: Synthetic oligonucleotide
cucugugagaggucggggc

SEQ ID NO: 2531918 - RNA, 19 nt, Artificial Sequence
  Description of Artificial Sequence: Synthetic oligonucleotide
aaccuuggagaaggcaggg

SEQ ID NO: 2531919 - RNA, 19 nt, Artificial Sequence
  Description of Artificial Sequence: Synthetic oligonucleotide
uguggcacagcucgcagua

SEQ ID NO: 2531920 - RNA, 19 nt, Artificial Sequence
  Description of Artificial Sequence: Synthetic oligonucleotide
caggcggacuuucugauug

SEQ ID NO: 2531921 - RNA, 19 nt, Artificial Sequence
  Description of Artificial Sequence: Synthetic oligonucleotide
auuugcucccucauggcag

SEQ ID NO: 2531922 - RNA, 19 nt, Artificial Sequence
  Description of Artificial Sequence: Synthetic oligonucleotide
cuucccgaaucuucaggcg

SEQ ID NO: 2531923 - RNA, 19 nt, Artificial Sequence
  Description of Artificial Sequence: Synthetic oligonucleotide
aagggacagucacuuggug

SEQ ID NO: 2531924 - RNA, 19 nt, Artificial Sequence
  Description of Artificial Sequence: Synthetic oligonucleotide
uccuucaaccacucuguga

SEQ ID NO: 2531925 - RNA, 19 nt, Artificial Sequence
  Description of Artificial Sequence: Synthetic oligonucleotide
aaacucaguguggcacagc

SEQ ID NO: 2531926 - RNA, 19 nt, Artificial Sequence
  Description of Artificial Sequence: Synthetic oligonucleotide
cauucugaguacagcuggc

SEQ ID NO: 2531927 - RNA, 19 nt, Artificial Sequence
  Description of Artificial Sequence: Synthetic oligonucleotide
uggcagugguaucggaaag

SEQ ID NO: 2531928 - RNA, 19 nt, Artificial Sequence
  Description of Artificial Sequence: Synthetic oligonucleotide
auauugggguggcccaagg

SEQ ID NO: 2531929 - RNA, 19 nt, Artificial Sequence
  Description of Artificial Sequence: Synthetic oligonucleotide
uugggguggcccaaggccu

SEQ ID NO: 2531930 - RNA, 19 nt, Artificial Sequence
  Description of Artificial Sequence: Synthetic oligonucleotide
acauggggacagcaaguuc

SEQ ID NO: 2531931 - RNA, 19 nt, Artificial Sequence
  Description of Artificial Sequence: Synthetic oligonucleotide
uugaagucaccugugccac

SEQ ID NO: 2531932 - RNA, 19 nt, Artificial Sequence
  Description of Artificial Sequence: Synthetic oligonucleotide
gucauggccacagggagcc

SEQ ID NO: 2531933 - RNA, 19 nt, Artificial Sequence
  Description of Artificial Sequence: Synthetic oligonucleotide
aaagggcgauggugagggc

SEQ ID NO: 2531934 - RNA, 19 nt, Artificial Sequence
  Description of Artificial Sequence: Synthetic oligonucleotide
aagcccggaugacaguuga

SEQ ID NO: 2531935 - RNA, 19 nt, Artificial Sequence
  Description of Artificial Sequence: Synthetic oligonucleotide
cugaguacagcuggcagug

SEQ ID NO: 2531936 - RNA, 19 nt, Artificial Sequence
  Description of Artificial Sequence: Synthetic oligonucleotide
cacaaagcacaccauguca

SEQ ID NO: 2531937 - RNA, 19 nt, Artificial Sequence
  Description of Artificial Sequence: Synthetic oligonucleotide
agcgugccgguacagccac

SEQ ID NO: 2531938 - RNA, 19 nt, Artificial Sequence
  Description of Artificial Sequence: Synthetic oligonucleotide
caauguccgcuucucagug

SEQ ID NO: 2531939 - RNA, 19 nt, Artificial Sequence
  Description of Artificial Sequence: Synthetic oligonucleotide
ccauucugaguacagcugg

SEQ ID NO: 2531940 - RNA, 19 nt, Artificial Sequence
  Description of Artificial Sequence: Synthetic oligonucleotide
uucggcagaagggacaguc

SEQ ID NO: 2531941 - RNA, 19 nt, Artificial Sequence
  Description of Artificial Sequence: Synthetic oligonucleotide
acagcacaauguccgcuuc

SEQ ID NO: 2531942 - RNA, 19 nt, Artificial Sequence
  Description of Artificial Sequence: Synthetic oligonucleotide
gcaaguucucuccauuugc

SEQ ID NO: 2531943 - RNA, 19 nt, Artificial Sequence
  Description of Artificial Sequence: Synthetic oligonucleotide
uuugcucccucauggcaga

SEQ ID NO: 2531944 - RNA, 19 nt, Artificial Sequence
  Description of Artificial Sequence: Synthetic oligonucleotide
agcacaauguccgcuucuc

SEQ ID NO: 2531945 - RNA, 19 nt, Artificial Sequence
  Description of Artificial Sequence: Synthetic oligonucleotide
aagggcgauggugagggca

SEQ ID NO: 2531946 - RNA, 19 nt, Artificial Sequence
  Description of Artificial Sequence: Synthetic oligonucleotide
ugauuggucuuccuccauu

SEQ ID NO: 2531947 - RNA, 19 nt, Artificial Sequence
  Description of Artificial Sequence: Synthetic oligonucleotide
ucccgaaucuucaggcgga

SEQ ID NO: 2531948 - RNA, 19 nt, Artificial Sequence
  Description of Artificial Sequence: Synthetic oligonucleotide
caaugagccccacagccuc

SEQ ID NO: 2531949 - RNA, 19 nt, Artificial Sequence
  Description of Artificial Sequence: Synthetic oligonucleotide
gucaccugucgucauggcc

SEQ ID NO: 2531950 - RNA, 19 nt, Artificial Sequence
  Description of Artificial Sequence: Synthetic oligonucleotide
ggguccuucaaccacucug

SEQ ID NO: 2531951 - RNA, 19 nt, Artificial Sequence
  Description of Artificial Sequence: Synthetic oligonucleotide
agucaccugucgucauggc

SEQ ID NO: 2531952 - RNA, 19 nt, Artificial Sequence
  Description of Artificial Sequence: Synthetic oligonucleotide
cauggggacagcaaguucu

SEQ ID NO: 2531953 - RNA, 19 nt, Artificial Sequence
  Description of Artificial Sequence: Synthetic oligonucleotide
ucccuugaagucaccugug

SEQ ID NO: 2531954 - RNA, 19 nt, Artificial Sequence
  Description of Artificial Sequence: Synthetic oligonucleotide
ggcagauucggcagaaggg

SEQ ID NO: 2531955 - RNA, 19 nt, Artificial Sequence
  Description of Artificial Sequence: Synthetic oligonucleotide
caucccuugaagucaccug

SEQ ID NO: 2531956 - RNA, 19 nt, Artificial Sequence
  Description of Artificial Sequence: Synthetic oligonucleotide
gggacagcaaguucucucc

SEQ ID NO: 2531957 - RNA, 19 nt, Artificial Sequence
  Description of Artificial Sequence: Synthetic oligonucleotide
cucgcaguagcugguauug

SEQ ID NO: 2531958 - RNA, 19 nt, Artificial Sequence
  Description of Artificial Sequence: Synthetic oligonucleotide
gucgcauagggagccaggg

SEQ ID NO: 2531959 - RNA, 19 nt, Artificial Sequence
  Description of Artificial Sequence: Synthetic oligonucleotide
agggcugccagagcagucg

SEQ ID NO: 2531960 - RNA, 19 nt, Artificial Sequence
  Description of Artificial Sequence: Synthetic oligonucleotide
cucagugcgaggcccuggg

SEQ ID NO: 2531961 - RNA, 19 nt, Artificial Sequence
  Description of Artificial Sequence: Synthetic oligonucleotide
gugcacagcucccagcgug

SEQ ID NO: 2531962 - RNA, 19 nt, Artificial Sequence
  Description of Artificial Sequence: Synthetic oligonucleotide
cagccggcugugcagacgg

SEQ ID NO: 2531963 - RNA, 19 nt, Artificial Sequence
  Description of Artificial Sequence: Synthetic oligonucleotide
cagauucggcagaagggac

SEQ ID NO: 2531964 - RNA, 19 nt, Artificial Sequence
  Description of Artificial Sequence: Synthetic oligonucleotide
gccuccacaaccuuggaga

SEQ ID NO: 2531965 - RNA, 19 nt, Artificial Sequence
  Description of Artificial Sequence: Synthetic oligonucleotide
cucgcaggcauagccagcc

SEQ ID NO: 2531966 - RNA, 19 nt, Artificial Sequence
  Description of Artificial Sequence: Synthetic oligonucleotide
uuggaggaagacagccacu

SEQ ID NO: 2531967 - RNA, 19 nt, Artificial Sequence
  Description of Artificial Sequence: Synthetic oligonucleotide
ucggcagaagggacaguca

SEQ ID NO: 2531968 - RNA, 19 nt, Artificial Sequence
  Description of Artificial Sequence: Synthetic oligonucleotide
aggcccuggguccuucaac

SEQ ID NO: 2531969 - RNA, 19 nt, Artificial Sequence
  Description of Artificial Sequence: Synthetic oligonucleotide
cagucaccugucgucaugg

SEQ ID NO: 2531970 - RNA, 19 nt, Artificial Sequence
  Description of Artificial Sequence: Synthetic oligonucleotide
gccacauggggacagcaag

SEQ ID NO: 2531971 - RNA, 19 nt, Artificial Sequence
  Description of Artificial Sequence: Synthetic oligonucleotide
uggcccaaggccuguggcc

SEQ ID NO: 2531972 - RNA, 19 nt, Artificial Sequence
  Description of Artificial Sequence: Synthetic oligonucleotide
acagcaaguucucuccauu

SEQ ID NO: 2531973 - RNA, 19 nt, Artificial Sequence
  Description of Artificial Sequence: Synthetic oligonucleotide
ucaguguggcacagcucgc

SEQ ID NO: 2531974 - RNA, 19 nt, Artificial Sequence
  Description of Artificial Sequence: Synthetic oligonucleotide
uccagagcacauagauggu

SEQ ID NO: 2531975 - RNA, 19 nt, Artificial Sequence
  Description of Artificial Sequence: Synthetic oligonucleotide
uggaggaagacagccacuu

SEQ ID NO: 2531976 - RNA, 19 nt, Artificial Sequence
  Description of Artificial Sequence: Synthetic oligonucleotide
cauuugcucccucauggca

SEQ ID NO: 2531977 - RNA, 19 nt, Artificial Sequence
  Description of Artificial Sequence: Synthetic oligonucleotide
ucgcauagggagccaggga

SEQ ID NO: 2531978 - RNA, 19 nt, Artificial Sequence
  Description of Artificial Sequence: Synthetic oligonucleotide
aguugagagcagccggcca

SEQ ID NO: 2531979 - RNA, 19 nt, Artificial Sequence
  Description of Artificial Sequence: Synthetic oligonucleotide
agagcacauagaugguaaa

SEQ ID NO: 2531980 - RNA, 19 nt, Artificial Sequence
  Description of Artificial Sequence: Synthetic oligonucleotide
cagagcacauagaugguaa

SEQ ID NO: 2531981 - RNA, 19 nt, Artificial Sequence
  Description of Artificial Sequence: Synthetic oligonucleotide
auagccagccugagauggc

SEQ ID NO: 2531982 - RNA, 19 nt, Artificial Sequence
  Description of Artificial Sequence: Synthetic oligonucleotide
auucugaguacagcuggca

SEQ ID NO: 2531983 - RNA, 19 nt, Artificial Sequence
  Description of Artificial Sequence: Synthetic oligonucleotide
agaccaguguccagagcac

SEQ ID NO: 2531984 - RNA, 19 nt, Artificial Sequence
  Description of Artificial Sequence: Synthetic oligonucleotide
aaagcccggaugacaguug

SEQ ID NO: 2531985 - RNA, 19 nt, Artificial Sequence
  Description of Artificial Sequence: Synthetic oligonucleotide
gucacagcacaauguccgc

SEQ ID NO: 2531986 - RNA, 19 nt, Artificial Sequence
  Description of Artificial Sequence: Synthetic oligonucleotide
ccgcuuuucaacugcaaac

SEQ ID NO: 2531987 - RNA, 19 nt, Artificial Sequence
  Description of Artificial Sequence: Synthetic oligonucleotide
cacauauugggguggccca

SEQ ID NO: 2531988 - RNA, 19 nt, Artificial Sequence
  Description of Artificial Sequence: Synthetic oligonucleotide
gugcagacggagguggucc

SEQ ID NO: 2531989 - RNA, 19 nt, Artificial Sequence
  Description of Artificial Sequence: Synthetic oligonucleotide
caaacucaguguggcacag

SEQ ID NO: 2531990 - RNA, 19 nt, Artificial Sequence
  Description of Artificial Sequence: Synthetic oligonucleotide
aggcggacuuucugauugg

SEQ ID NO: 2531991 - RNA, 19 nt, Artificial Sequence
  Description of Artificial Sequence: Synthetic oligonucleotide
caaagcacaccaugucaca

SEQ ID NO: 2531992 - RNA, 19 nt, Artificial Sequence
  Description of Artificial Sequence: Synthetic oligonucleotide
gcugugcagacggaggugg

SEQ ID NO: 2531993 - RNA, 19 nt, Artificial Sequence
  Description of Artificial Sequence: Synthetic oligonucleotide
cuuccuccauucugaguac

SEQ ID NO: 2531994 - RNA, 19 nt, Artificial Sequence
  Description of Artificial Sequence: Synthetic oligonucleotide
gucggggccgcuuuucaac

SEQ ID NO: 2531995 - RNA, 19 nt, Artificial Sequence
  Description of Artificial Sequence: Synthetic oligonucleotide
gugguaucggaaagagacc

SEQ ID NO: 2531996 - RNA, 19 nt, Artificial Sequence
  Description of Artificial Sequence: Synthetic oligonucleotide
gcagugguaucggaaagag

SEQ ID NO: 2531997 - RNA, 19 nt, Artificial Sequence
  Description of Artificial Sequence: Synthetic oligonucleotide
guguccagagcacauagau

SEQ ID NO: 2531998 - RNA, 19 nt, Artificial Sequence
  Description of Artificial Sequence: Synthetic oligonucleotide
agauucggcagaagggaca

SEQ ID NO: 2531999 - RNA, 19 nt, Artificial Sequence
  Description of Artificial Sequence: Synthetic oligonucleotide
ucgcaguagcugguauugg

SEQ ID NO: 2532000 - RNA, 19 nt, Artificial Sequence
  Description of Artificial Sequence: Synthetic oligonucleotide
ugaguacagcuggcagugg

SEQ ID NO: 2532001 - RNA, 19 nt, Artificial Sequence
  Description of Artificial Sequence: Synthetic oligonucleotide
gacuuucugauuggucuuc

SEQ ID NO: 2532002 - RNA, 19 nt, Artificial Sequence
  Description of Artificial Sequence: Synthetic oligonucleotide
cugguauuggaggaagaca

SEQ ID NO: 2532003 - RNA, 19 nt, Artificial Sequence
  Description of Artificial Sequence: Synthetic oligonucleotide
ucggggccgcuuuucaacu

SEQ ID NO: 2532004 - RNA, 19 nt, Artificial Sequence
  Description of Artificial Sequence: Synthetic oligonucleotide
gguccucggagccaucugc

SEQ ID NO: 2532005 - RNA, 19 nt, Artificial Sequence
  Description of Artificial Sequence: Synthetic oligonucleotide
ucucagugcgaggcccugg

SEQ ID NO: 2532006 - RNA, 19 nt, Artificial Sequence
  Description of Artificial Sequence: Synthetic oligonucleotide
ugaagucaccugugccaca

SEQ ID NO: 2532007 - RNA, 19 nt, Artificial Sequence
  Description of Artificial Sequence: Synthetic oligonucleotide
ugugcacagcucccagcgu

SEQ ID NO: 2532008 - RNA, 19 nt, Artificial Sequence
  Description of Artificial Sequence: Synthetic oligonucleotide
agccagcaaggaguggugg

SEQ ID NO: 2532009 - RNA, 19 nt, Artificial Sequence
  Description of Artificial Sequence: Synthetic oligonucleotide
cagugcgaggcccuggguc

SEQ ID NO: 2532010 - RNA, 19 nt, Artificial Sequence
  Description of Artificial Sequence: Synthetic oligonucleotide
gacggaggugguccugggc

SEQ ID NO: 2532011 - RNA, 19 nt, Artificial Sequence
  Description of Artificial Sequence: Synthetic oligonucleotide
gagauggcggccaguggug

SEQ ID NO: 2532012 - RNA, 19 nt, Artificial Sequence
  Description of Artificial Sequence: Synthetic oligonucleotide
ggagccaucugcuucccga

SEQ ID NO: 2532013 - RNA, 19 nt, Artificial Sequence
  Description of Artificial Sequence: Synthetic oligonucleotide
cuggcagugguaucggaaa

SEQ ID NO: 2532014 - RNA, 19 nt, Artificial Sequence
  Description of Artificial Sequence: Synthetic oligonucleotide
agacggaggugguccuggg

SEQ ID NO: 2532015 - RNA, 19 nt, Artificial Sequence
  Description of Artificial Sequence: Synthetic oligonucleotide
cggaaagagaccagugucc

SEQ ID NO: 2532016 - RNA, 19 nt, Artificial Sequence
  Description of Artificial Sequence: Synthetic oligonucleotide
gauggcggccaguggugug

SEQ ID NO: 2532017 - RNA, 19 nt, Artificial Sequence
  Description of Artificial Sequence: Synthetic oligonucleotide
cauauugggguggcccaag

SEQ ID NO: 2532018 - RNA, 19 nt, Artificial Sequence
  Description of Artificial Sequence: Synthetic oligonucleotide
ccggaugacaguugagagc

SEQ ID NO: 2532019 - RNA, 19 nt, Artificial Sequence
  Description of Artificial Sequence: Synthetic oligonucleotide
cgcauagggagccagggag

SEQ ID NO: 2532020 - RNA, 19 nt, Artificial Sequence
  Description of Artificial Sequence: Synthetic oligonucleotide
gccagcaaggagugguggg

SEQ ID NO: 2532021 - RNA, 19 nt, Artificial Sequence
  Description of Artificial Sequence: Synthetic oligonucleotide
agucacuugguguguccaa

SEQ ID NO: 2532022 - RNA, 19 nt, Artificial Sequence
  Description of Artificial Sequence: Synthetic oligonucleotide
cccggaugacaguugagag

SEQ ID NO: 2532023 - RNA, 19 nt, Artificial Sequence
  Description of Artificial Sequence: Synthetic oligonucleotide
ccacauauugggguggccc

SEQ ID NO: 2532024 - RNA, 19 nt, Artificial Sequence
  Description of Artificial Sequence: Synthetic oligonucleotide
agucgcauagggagccagg

SEQ ID NO: 2532025 - RNA, 19 nt, Artificial Sequence
  Description of Artificial Sequence: Synthetic oligonucleotide
cucccucauggcagauucg

SEQ ID NO: 2532026 - RNA, 19 nt, Artificial Sequence
  Description of Artificial Sequence: Synthetic oligonucleotide
uguccaaagcccggaugac

SEQ ID NO: 2532027 - RNA, 19 nt, Artificial Sequence
  Description of Artificial Sequence: Synthetic oligonucleotide
guccgcuucucagugcgag

SEQ ID NO: 2532028 - RNA, 19 nt, Artificial Sequence
  Description of Artificial Sequence: Synthetic oligonucleotide
gugccacauauuggggugg

SEQ ID NO: 2532029 - RNA, 19 nt, Artificial Sequence
  Description of Artificial Sequence: Synthetic oligonucleotide
guggcccaaggccuguggc

SEQ ID NO: 2532030 - RNA, 19 nt, Artificial Sequence
  Description of Artificial Sequence: Synthetic oligonucleotide
ccagcgugccgguacagcc

SEQ ID NO: 2532031 - RNA, 19 nt, Artificial Sequence
  Description of Artificial Sequence: Synthetic oligonucleotide
gcucccucauggcagauuc

SEQ ID NO: 2532032 - RNA, 19 nt, Artificial Sequence
  Description of Artificial Sequence: Synthetic oligonucleotide
caguugagagcagccggcc

SEQ ID NO: 2532033 - RNA, 19 nt, Artificial Sequence
  Description of Artificial Sequence: Synthetic oligonucleotide
gcagauucggcagaaggga

SEQ ID NO: 2532034 - RNA, 19 nt, Artificial Sequence
  Description of Artificial Sequence: Synthetic oligonucleotide
uuccuccauucugaguaca

SEQ ID NO: 2532035 - RNA, 19 nt, Artificial Sequence
  Description of Artificial Sequence: Synthetic oligonucleotide
ugcagacggaggugguccu

SEQ ID NO: 2532036 - RNA, 19 nt, Artificial Sequence
  Description of Artificial Sequence: Synthetic oligonucleotide
ccagagcagucgcauaggg

SEQ ID NO: 2532037 - RNA, 19 nt, Artificial Sequence
  Description of Artificial Sequence: Synthetic oligonucleotide
gguauuggaggaagacagc

SEQ ID NO: 2532038 - RNA, 19 nt, Artificial Sequence
  Description of Artificial Sequence: Synthetic oligonucleotide
ggagccuccuguccucagg

SEQ ID NO: 2532039 - RNA, 19 nt, Artificial Sequence
  Description of Artificial Sequence: Synthetic oligonucleotide
gguggcagcagucaccugu

SEQ ID NO: 2532040 - RNA, 19 nt, Artificial Sequence
  Description of Artificial Sequence: Synthetic oligonucleotide
ugugcagacggaggugguc

SEQ ID NO: 2532041 - RNA, 19 nt, Artificial Sequence
  Description of Artificial Sequence: Synthetic oligonucleotide
guccuucaaccacucugug

SEQ ID NO: 2532042 - RNA, 19 nt, Artificial Sequence
  Description of Artificial Sequence: Synthetic oligonucleotide
cagagcagucgcauaggga

SEQ ID NO: 2532043 - RNA, 19 nt, Artificial Sequence
  Description of Artificial Sequence: Synthetic oligonucleotide
ccugugccacauauugggg

SEQ ID NO: 2532044 - RNA, 19 nt, Artificial Sequence
  Description of Artificial Sequence: Synthetic oligonucleotide
uacagcuggcagugguauc

SEQ ID NO: 2532045 - RNA, 19 nt, Artificial Sequence
  Description of Artificial Sequence: Synthetic oligonucleotide
ucagugcgaggcccugggu

SEQ ID NO: 2532046 - RNA, 19 nt, Artificial Sequence
  Description of Artificial Sequence: Synthetic oligonucleotide
cacagcucccagcgugccg

SEQ ID NO: 2532047 - RNA, 19 nt, Artificial Sequence
  Description of Artificial Sequence: Synthetic oligonucleotide
gcauagggagccagggagg

SEQ ID NO: 2532048 - RNA, 19 nt, Artificial Sequence
  Description of Artificial Sequence: Synthetic oligonucleotide
gccuccuguccucagggcc

SEQ ID NO: 2532049 - RNA, 19 nt, Artificial Sequence
  Description of Artificial Sequence: Synthetic oligonucleotide
guaucggaaagagaccagu

SEQ ID NO: 2532050 - RNA, 19 nt, Artificial Sequence
  Description of Artificial Sequence: Synthetic oligonucleotide
gguaucggaaagagaccag

SEQ ID NO: 2532051 - RNA, 19 nt, Artificial Sequence
  Description of Artificial Sequence: Synthetic oligonucleotide
gcaaacucaguguggcaca

SEQ ID NO: 2532052 - RNA, 19 nt, Artificial Sequence
  Description of Artificial Sequence: Synthetic oligonucleotide
gccgguacagccacauggg

SEQ ID NO: 2532053 - RNA, 19 nt, Artificial Sequence
  Description of Artificial Sequence: Synthetic oligonucleotide
cugucgucauggccacagg

SEQ ID NO: 2532054 - RNA, 19 nt, Artificial Sequence
  Description of Artificial Sequence: Synthetic oligonucleotide
ggccuccacaaccuuggag

SEQ ID NO: 2532055 - RNA, 19 nt, Artificial Sequence
  Description of Artificial Sequence: Synthetic oligonucleotide
agggagguggcagcaguca

SEQ ID NO: 2532056 - RNA, 19 nt, Artificial Sequence
  Description of Artificial Sequence: Synthetic oligonucleotide
uguccgcuucucagugcga

SEQ ID NO: 2532057 - RNA, 19 nt, Artificial Sequence
  Description of Artificial Sequence: Synthetic oligonucleotide
gcuucucagugcgaggccc

SEQ ID NO: 2532058 - RNA, 19 nt, Artificial Sequence
  Description of Artificial Sequence: Synthetic oligonucleotide
caccugucgucauggccac

SEQ ID NO: 2532059 - RNA, 19 nt, Artificial Sequence
  Description of Artificial Sequence: Synthetic oligonucleotide
cugugccacauauuggggu

SEQ ID NO: 2532060 - RNA, 19 nt, Artificial Sequence
  Description of Artificial Sequence: Synthetic oligonucleotide
cuggguccuucaaccacuc

SEQ ID NO: 2532061 - RNA, 19 nt, Artificial Sequence
  Description of Artificial Sequence: Synthetic oligonucleotide
uucucagugcgaggcccug

SEQ ID NO: 2532062 - RNA, 19 nt, Artificial Sequence
  Description of Artificial Sequence: Synthetic oligonucleotide
agcucgcaguagcugguau

SEQ ID NO: 2532063 - RNA, 19 nt, Artificial Sequence
  Description of Artificial Sequence: Synthetic oligonucleotide
ggggccgcuuuucaacugc

SEQ ID NO: 2532064 - RNA, 19 nt, Artificial Sequence
  Description of Artificial Sequence: Synthetic oligonucleotide
ccaguggugugaugaacac

SEQ ID NO: 2532065 - RNA, 19 nt, Artificial Sequence
  Description of Artificial Sequence: Synthetic oligonucleotide
agccggccaucccuugaag

SEQ ID NO: 2532066 - RNA, 19 nt, Artificial Sequence
  Description of Artificial Sequence: Synthetic oligonucleotide
ggccugaggcccauggucc

SEQ ID NO: 2532067 - RNA, 19 nt, Artificial Sequence
  Description of Artificial Sequence: Synthetic oligonucleotide
gagggcaaugagccccaca

SEQ ID NO: 2532068 - RNA, 19 nt, Artificial Sequence
  Description of Artificial Sequence: Synthetic oligonucleotide
cagcucuugugcacagcuc

SEQ ID NO: 2532069 - RNA, 19 nt, Artificial Sequence
  Description of Artificial Sequence: Synthetic oligonucleotide
aggucggggccgcuuuuca

SEQ ID NO: 2532070 - RNA, 19 nt, Artificial Sequence
  Description of Artificial Sequence: Synthetic oligonucleotide
cagucgcauagggagccag

SEQ ID NO: 2532071 - RNA, 19 nt, Artificial Sequence
  Description of Artificial Sequence: Synthetic oligonucleotide
gaagucaccugugccacau

SEQ ID NO: 2532072 - RNA, 19 nt, Artificial Sequence
  Description of Artificial Sequence: Synthetic oligonucleotide
uggagaaggcagggcugcc

SEQ ID NO: 2532073 - RNA, 19 nt, Artificial Sequence
  Description of Artificial Sequence: Synthetic oligonucleotide
cggaugacaguugagagca

SEQ ID NO: 2532074 - RNA, 19 nt, Artificial Sequence
  Description of Artificial Sequence: Synthetic oligonucleotide
gccaucugcuucccgaauc

SEQ ID NO: 2532075 - RNA, 19 nt, Artificial Sequence
  Description of Artificial Sequence: Synthetic oligonucleotide
ccugucgucauggccacag

SEQ ID NO: 2532076 - RNA, 19 nt, Artificial Sequence
  Description of Artificial Sequence: Synthetic oligonucleotide
cagugguaucggaaagaga

SEQ ID NO: 2532077 - RNA, 19 nt, Artificial Sequence
  Description of Artificial Sequence: Synthetic oligonucleotide
auggcggccagugguguga

SEQ ID NO: 2532078 - RNA, 19 nt, Artificial Sequence
  Description of Artificial Sequence: Synthetic oligonucleotide
gccccucgcaggcauagcc

SEQ ID NO: 2532079 - RNA, 19 nt, Artificial Sequence
  Description of Artificial Sequence: Synthetic oligonucleotide
agcagucaccugucgucau

SEQ ID NO: 2532080 - RNA, 19 nt, Artificial Sequence
  Description of Artificial Sequence: Synthetic oligonucleotide
gggccugaggcccaugguc

SEQ ID NO: 2532081 - RNA, 19 nt, Artificial Sequence
  Description of Artificial Sequence: Synthetic oligonucleotide
cccuugaagucaccugugc

SEQ ID NO: 2532082 - RNA, 19 nt, Artificial Sequence
  Description of Artificial Sequence: Synthetic oligonucleotide
cuucaaccacucugugaga

SEQ ID NO: 2532083 - RNA, 19 nt, Artificial Sequence
  Description of Artificial Sequence: Synthetic oligonucleotide
gccaguggugugaugaaca

SEQ ID NO: 2532084 - RNA, 19 nt, Artificial Sequence
  Description of Artificial Sequence: Synthetic oligonucleotide
aguacagcuggcaguggua

SEQ ID NO: 2532085 - RNA, 19 nt, Artificial Sequence
  Description of Artificial Sequence: Synthetic oligonucleotide
ccugagauggcggccagug

SEQ ID NO: 2532086 - RNA, 19 nt, Artificial Sequence
  Description of Artificial Sequence: Synthetic oligonucleotide
auggcagauucggcagaag

SEQ ID NO: 2532087 - RNA, 19 nt, Artificial Sequence
  Description of Artificial Sequence: Synthetic oligonucleotide
agcuggcagugguaucgga

SEQ ID NO: 2532088 - RNA, 19 nt, Artificial Sequence
  Description of Artificial Sequence: Synthetic oligonucleotide
ccggccaucccuugaaguc

SEQ ID NO: 2532089 - RNA, 19 nt, Artificial Sequence
  Description of Artificial Sequence: Synthetic oligonucleotide
cugcaaacucaguguggca

SEQ ID NO: 2532090 - RNA, 19 nt, Artificial Sequence
  Description of Artificial Sequence: Synthetic oligonucleotide
gcagucaccugucgucaug

SEQ ID NO: 2532091 - RNA, 19 nt, Artificial Sequence
  Description of Artificial Sequence: Synthetic oligonucleotide
uccucggagccaucugcuu

SEQ ID NO: 2532092 - RNA, 19 nt, Artificial Sequence
  Description of Artificial Sequence: Synthetic oligonucleotide
cagcuggcagugguaucgg

SEQ ID NO: 2532093 - RNA, 19 nt, Artificial Sequence
  Description of Artificial Sequence: Synthetic oligonucleotide
acagcucgcaguagcuggu

SEQ ID NO: 2532094 - RNA, 19 nt, Artificial Sequence
  Description of Artificial Sequence: Synthetic oligonucleotide
cccucgcaggcauagccag

SEQ ID NO: 2532095 - RNA, 19 nt, Artificial Sequence
  Description of Artificial Sequence: Synthetic oligonucleotide
uggccuccacaaccuugga

SEQ ID NO: 2532096 - RNA, 19 nt, Artificial Sequence
  Description of Artificial Sequence: Synthetic oligonucleotide
ccuccauucugaguacagc

SEQ ID NO: 2532097 - RNA, 19 nt, Artificial Sequence
  Description of Artificial Sequence: Synthetic oligonucleotide
gccgcuuuucaacugcaaa

SEQ ID NO: 2532098 - RNA, 19 nt, Artificial Sequence
  Description of Artificial Sequence: Synthetic oligonucleotide
gccagccugagauggcggc

SEQ ID NO: 2532099 - RNA, 19 nt, Artificial Sequence
  Description of Artificial Sequence: Synthetic oligonucleotide
gggcaaugagccccacagc

SEQ ID NO: 2532100 - RNA, 19 nt, Artificial Sequence
  Description of Artificial Sequence: Synthetic oligonucleotide
gggagguggcagcagucac

SEQ ID NO: 2532101 - RNA, 19 nt, Artificial Sequence
  Description of Artificial Sequence: Synthetic oligonucleotide
ccgguacagccacaugggg

SEQ ID NO: 2532102 - RNA, 19 nt, Artificial Sequence
  Description of Artificial Sequence: Synthetic oligonucleotide
agcagccggccaucccuug

SEQ ID NO: 2532103 - RNA, 19 nt, Artificial Sequence
  Description of Artificial Sequence: Synthetic oligonucleotide
ggacagcaaguucucucca

SEQ ID NO: 2532104 - RNA, 19 nt, Artificial Sequence
  Description of Artificial Sequence: Synthetic oligonucleotide
ggcagugguaucggaaaga

SEQ ID NO: 2532105 - RNA, 19 nt, Artificial Sequence
  Description of Artificial Sequence: Synthetic oligonucleotide
uccagccggcugugcagac

SEQ ID NO: 2532106 - RNA, 19 nt, Artificial Sequence
  Description of Artificial Sequence: Synthetic oligonucleotide
ggugguccugggccccucg

SEQ ID NO: 2532107 - RNA, 19 nt, Artificial Sequence
  Description of Artificial Sequence: Synthetic oligonucleotide
gccagagcagucgcauagg

SEQ ID NO: 2532108 - RNA, 19 nt, Artificial Sequence
  Description of Artificial Sequence: Synthetic oligonucleotide
ggaggaagacagccacuuc

SEQ ID NO: 2532109 - RNA, 19 nt, Artificial Sequence
  Description of Artificial Sequence: Synthetic oligonucleotide
guggcagcagucaccuguc

SEQ ID NO: 2532110 - RNA, 19 nt, Artificial Sequence
  Description of Artificial Sequence: Synthetic oligonucleotide
cagcgugccgguacagcca

SEQ ID NO: 2532111 - RNA, 19 nt, Artificial Sequence
  Description of Artificial Sequence: Synthetic oligonucleotide
ugagaggucggggccgcuu

SEQ ID NO: 2532112 - RNA, 19 nt, Artificial Sequence
  Description of Artificial Sequence: Synthetic oligonucleotide
gcucccagcgugccgguac

SEQ ID NO: 2532113 - RNA, 19 nt, Artificial Sequence
  Description of Artificial Sequence: Synthetic oligonucleotide
gguccuucaaccacucugu

SEQ ID NO: 2532114 - RNA, 19 nt, Artificial Sequence
  Description of Artificial Sequence: Synthetic oligonucleotide
gaaucuucaggcggacuuu

SEQ ID NO: 2532115 - RNA, 19 nt, Artificial Sequence
  Description of Artificial Sequence: Synthetic oligonucleotide
cggacuuucugauuggucu

SEQ ID NO: 2532116 - RNA, 19 nt, Artificial Sequence
  Description of Artificial Sequence: Synthetic oligonucleotide
gcccggaugacaguugaga

SEQ ID NO: 2532117 - RNA, 19 nt, Artificial Sequence
  Description of Artificial Sequence: Synthetic oligonucleotide
gcucuugugcacagcuccc

SEQ ID NO: 2532118 - RNA, 19 nt, Artificial Sequence
  Description of Artificial Sequence: Synthetic oligonucleotide
gaggucggggccgcuuuuc

SEQ ID NO: 2532119 - RNA, 19 nt, Artificial Sequence
  Description of Artificial Sequence: Synthetic oligonucleotide
cgucauggccacagggagc

SEQ ID NO: 2532120 - RNA, 19 nt, Artificial Sequence
  Description of Artificial Sequence: Synthetic oligonucleotide
caguguggcacagcucgca

SEQ ID NO: 2532121 - RNA, 19 nt, Artificial Sequence
  Description of Artificial Sequence: Synthetic oligonucleotide
guacagcuggcagugguau

SEQ ID NO: 2532122 - RNA, 19 nt, Artificial Sequence
  Description of Artificial Sequence: Synthetic oligonucleotide
cacagcacaauguccgcuu

SEQ ID NO: 2532123 - RNA, 19 nt, Artificial Sequence
  Description of Artificial Sequence: Synthetic oligonucleotide
cauagggagccagggaggu

SEQ ID NO: 2532124 - RNA, 19 nt, Artificial Sequence
  Description of Artificial Sequence: Synthetic oligonucleotide
cccuggguccuucaaccac

SEQ ID NO: 2532125 - RNA, 19 nt, Artificial Sequence
  Description of Artificial Sequence: Synthetic oligonucleotide
gugccgguacagccacaug

SEQ ID NO: 2532126 - RNA, 19 nt, Artificial Sequence
  Description of Artificial Sequence: Synthetic oligonucleotide
cuucucagugcgaggcccu

SEQ ID NO: 2532127 - RNA, 19 nt, Artificial Sequence
  Description of Artificial Sequence: Synthetic oligonucleotide
gggcugccagagcagucgc

SEQ ID NO: 2532128 - RNA, 19 nt, Artificial Sequence
  Description of Artificial Sequence: Synthetic oligonucleotide
cagcaaguucucuccauuu

SEQ ID NO: 2532129 - RNA, 19 nt, Artificial Sequence
  Description of Artificial Sequence: Synthetic oligonucleotide
gcacagcucgcaguagcug

SEQ ID NO: 2532130 - RNA, 19 nt, Artificial Sequence
  Description of Artificial Sequence: Synthetic oligonucleotide
guguggcacagcucgcagu

SEQ ID NO: 2532131 - RNA, 19 nt, Artificial Sequence
  Description of Artificial Sequence: Synthetic oligonucleotide
ugcucccucauggcagauu

SEQ ID NO: 2532132 - RNA, 19 nt, Artificial Sequence
  Description of Artificial Sequence: Synthetic oligonucleotide
caaagcccggaugacaguu

SEQ ID NO: 2532133 - RNA, 19 nt, Artificial Sequence
  Description of Artificial Sequence: Synthetic oligonucleotide
caaggccuguggccuccac

SEQ ID NO: 2532134 - RNA, 19 nt, Artificial Sequence
  Description of Artificial Sequence: Synthetic oligonucleotide
gccggcugugcagacggag

SEQ ID NO: 2532135 - RNA, 19 nt, Artificial Sequence
  Description of Artificial Sequence: Synthetic oligonucleotide
gcagaagggacagucacuu

SEQ ID NO: 2532136 - RNA, 19 nt, Artificial Sequence
  Description of Artificial Sequence: Synthetic oligonucleotide
ggcgauggugagggcaaug

SEQ ID NO: 2532137 - RNA, 19 nt, Artificial Sequence
  Description of Artificial Sequence: Synthetic oligonucleotide
ggguccucggagccaucug

SEQ ID NO: 2532138 - RNA, 19 nt, Artificial Sequence
  Description of Artificial Sequence: Synthetic oligonucleotide
ggccaucccuugaagucac

SEQ ID NO: 2532139 - RNA, 19 nt, Artificial Sequence
  Description of Artificial Sequence: Synthetic oligonucleotide
cucccagcgugccgguaca

SEQ ID NO: 2532140 - RNA, 19 nt, Artificial Sequence
  Description of Artificial Sequence: Synthetic oligonucleotide
cgcaguagcugguauugga

SEQ ID NO: 2532141 - RNA, 19 nt, Artificial Sequence
  Description of Artificial Sequence: Synthetic oligonucleotide
ccucgcaggcauagccagc

SEQ ID NO: 2532142 - RNA, 19 nt, Artificial Sequence
  Description of Artificial Sequence: Synthetic oligonucleotide
auucggcagaagggacagu

SEQ ID NO: 2532143 - RNA, 19 nt, Artificial Sequence
  Description of Artificial Sequence: Synthetic oligonucleotide
gagaggucggggccgcuuu

SEQ ID NO: 2532144 - RNA, 19 nt, Artificial Sequence
  Description of Artificial Sequence: Synthetic oligonucleotide
ggacuuucugauuggucuu

SEQ ID NO: 2532145 - RNA, 19 nt, Artificial Sequence
  Description of Artificial Sequence: Synthetic oligonucleotide
gcggacuuucugauugguc

SEQ ID NO: 2532146 - RNA, 19 nt, Artificial Sequence
  Description of Artificial Sequence: Synthetic oligonucleotide
cagccggccaucccuugaa

SEQ ID NO: 2532147 - RNA, 19 nt, Artificial Sequence
  Description of Artificial Sequence: Synthetic oligonucleotide
cagcacaauguccgcuucu

SEQ ID NO: 2532148 - RNA, 19 nt, Artificial Sequence
  Description of Artificial Sequence: Synthetic oligonucleotide
gccccacagccuccagccg

SEQ ID NO: 2532149 - RNA, 19 nt, Artificial Sequence
  Description of Artificial Sequence: Synthetic oligonucleotide
ccacagggagccuccuguc

SEQ ID NO: 2532150 - RNA, 19 nt, Artificial Sequence
  Description of Artificial Sequence: Synthetic oligonucleotide
caccaugucacagcacaau

SEQ ID NO: 2532151 - RNA, 19 nt, Artificial Sequence
  Description of Artificial Sequence: Synthetic oligonucleotide
guggugugaugaacacaaa

SEQ ID NO: 2532152 - RNA, 19 nt, Artificial Sequence
  Description of Artificial Sequence: Synthetic oligonucleotide
gggccccucgcaggcauag

SEQ ID NO: 2532153 - RNA, 19 nt, Artificial Sequence
  Description of Artificial Sequence: Synthetic oligonucleotide
guccucggagccaucugcu

SEQ ID NO: 2532154 - RNA, 19 nt, Artificial Sequence
  Description of Artificial Sequence: Synthetic oligonucleotide
uugcucccucauggcagau

SEQ ID NO: 2532155 - RNA, 19 nt, Artificial Sequence
  Description of Artificial Sequence: Synthetic oligonucleotide
ugggccccucgcaggcaua

SEQ ID NO: 2532156 - RNA, 19 nt, Artificial Sequence
  Description of Artificial Sequence: Synthetic oligonucleotide
ggucggggccgcuuuucaa

SEQ ID NO: 2532157 - RNA, 19 nt, Artificial Sequence
  Description of Artificial Sequence: Synthetic oligonucleotide
ccaucugcuucccgaaucu

SEQ ID NO: 2532158 - RNA, 19 nt, Artificial Sequence
  Description of Artificial Sequence: Synthetic oligonucleotide
gcagccggccaucccuuga

SEQ ID NO: 2532159 - RNA, 19 nt, Artificial Sequence
  Description of Artificial Sequence: Synthetic oligonucleotide
cugauuggucuuccuccau

SEQ ID NO: 2532160 - RNA, 19 nt, Artificial Sequence
  Description of Artificial Sequence: Synthetic oligonucleotide
gcccuggguccuucaacca

SEQ ID NO: 2532161 - RNA, 19 nt, Artificial Sequence
  Description of Artificial Sequence: Synthetic oligonucleotide
ccagagcacauagauggua

SEQ ID NO: 2532162 - RNA, 19 nt, Artificial Sequence
  Description of Artificial Sequence: Synthetic oligonucleotide
uccuguccucagggccuga

SEQ ID NO: 2532163 - RNA, 19 nt, Artificial Sequence
  Description of Artificial Sequence: Synthetic oligonucleotide
ccacauggggacagcaagu

SEQ ID NO: 2532164 - RNA, 19 nt, Artificial Sequence
  Description of Artificial Sequence: Synthetic oligonucleotide
cccagcgugccgguacagc

SEQ ID NO: 2532165 - RNA, 19 nt, Artificial Sequence
  Description of Artificial Sequence: Synthetic oligonucleotide
cgcuucucagugcgaggcc

SEQ ID NO: 2532166 - RNA, 19 nt, Artificial Sequence
  Description of Artificial Sequence: Synthetic oligonucleotide
cgcuuuucaacugcaaacu

SEQ ID NO: 2532167 - RNA, 19 nt, Artificial Sequence
  Description of Artificial Sequence: Synthetic oligonucleotide
gccggccaucccuugaagu

SEQ ID NO: 2532168 - RNA, 19 nt, Artificial Sequence
  Description of Artificial Sequence: Synthetic oligonucleotide
cugugcagacggagguggu

SEQ ID NO: 2532169 - RNA, 19 nt, Artificial Sequence
  Description of Artificial Sequence: Synthetic oligonucleotide
ccccucgcaggcauagcca

SEQ ID NO: 2532170 - RNA, 19 nt, Artificial Sequence
  Description of Artificial Sequence: Synthetic oligonucleotide
cgaaucuucaggcggacuu

SEQ ID NO: 2532171 - RNA, 19 nt, Artificial Sequence
  Description of Artificial Sequence: Synthetic oligonucleotide
cccaaggccuguggccucc

SEQ ID NO: 2532172 - RNA, 19 nt, Artificial Sequence
  Description of Artificial Sequence: Synthetic oligonucleotide
ggcccaaggccuguggccu

SEQ ID NO: 2532173 - RNA, 19 nt, Artificial Sequence
  Description of Artificial Sequence: Synthetic oligonucleotide
ggcacagcucgcaguagcu

SEQ ID NO: 2532174 - RNA, 19 nt, Artificial Sequence
  Description of Artificial Sequence: Synthetic oligonucleotide
ccuccuguccucagggccu

SEQ ID NO: 2532175 - RNA, 19 nt, Artificial Sequence
  Description of Artificial Sequence: Synthetic oligonucleotide
gucaccugugccacauauu

SEQ ID NO: 2532176 - RNA, 19 nt, Artificial Sequence
  Description of Artificial Sequence: Synthetic oligonucleotide
cccgaaucuucaggcggac

SEQ ID NO: 2532177 - RNA, 19 nt, Artificial Sequence
  Description of Artificial Sequence: Synthetic oligonucleotide
accugucgucauggccaca

SEQ ID NO: 2532178 - RNA, 19 nt, Artificial Sequence
  Description of Artificial Sequence: Synthetic oligonucleotide
gcucgcaguagcugguauu

SEQ ID NO: 2532179 - RNA, 19 nt, Artificial Sequence
  Description of Artificial Sequence: Synthetic oligonucleotide
gggccgcuuuucaacugca

SEQ ID NO: 2532180 - RNA, 19 nt, Artificial Sequence
  Description of Artificial Sequence: Synthetic oligonucleotide
ggacagucacuuggugugu

SEQ ID NO: 2532181 - RNA, 19 nt, Artificial Sequence
  Description of Artificial Sequence: Synthetic oligonucleotide
ggcggacuuucugauuggu

SEQ ID NO: 2532182 - RNA, 19 nt, Artificial Sequence
  Description of Artificial Sequence: Synthetic oligonucleotide
ugcgaggcccuggguccuu

SEQ ID NO: 2532183 - RNA, 19 nt, Artificial Sequence
  Description of Artificial Sequence: Synthetic oligonucleotide
ggcugccagagcagucgca

SEQ ID NO: 2532184 - RNA, 19 nt, Artificial Sequence
  Description of Artificial Sequence: Synthetic oligonucleotide
ccaucccuugaagucaccu

SEQ ID NO: 2532185 - RNA, 19 nt, Artificial Sequence
  Description of Artificial Sequence: Synthetic oligonucleotide
gccaucccuugaagucacc

SEQ ID NO: 2532186 - RNA, 19 nt, Artificial Sequence
  Description of Artificial Sequence: Synthetic oligonucleotide
ggccgcuuuucaacugcaa

SEQ ID NO: 2532187 - RNA, 19 nt, Artificial Sequence
  Description of Artificial Sequence: Synthetic oligonucleotide
cugggccccucgcaggcau

SEQ ID NO: 2532188 - RNA, 19 nt, Artificial Sequence
  Description of Artificial Sequence: Synthetic oligonucleotide
cggagccaucugcuucccg

SEQ ID NO: 2532189 - RNA, 19 nt, Artificial Sequence
  Description of Artificial Sequence: Synthetic oligonucleotide
gagcagccggccaucccuu

SEQ ID NO: 2532190 - RNA, 19 nt, Artificial Sequence
  Description of Artificial Sequence: Synthetic oligonucleotide
cagcucgcaguagcuggua

SEQ ID NO: 2532191 - RNA, 19 nt, Artificial Sequence
  Description of Artificial Sequence: Synthetic oligonucleotide
gggguccucggagccaucu

SEQ ID NO: 2532192 - RNA, 19 nt, Artificial Sequence
  Description of Artificial Sequence: Synthetic oligonucleotide
gcagucgcauagggagcca

SEQ ID NO: 2532193 - RNA, 19 nt, Artificial Sequence
  Description of Artificial Sequence: Synthetic oligonucleotide
cggggccgcuuuucaacug

SEQ ID NO: 2532194 - RNA, 19 nt, Artificial Sequence
  Description of Artificial Sequence: Synthetic oligonucleotide
ggguggcccaaggccugug

SEQ ID NO: 2532195 - RNA, 19 nt, Artificial Sequence
  Description of Artificial Sequence: Synthetic oligonucleotide
agcucccagcgugccggua

SEQ ID NO: 2532196 - RNA, 19 nt, Artificial Sequence
  Description of Artificial Sequence: Synthetic oligonucleotide
ggccccucgcaggcauagc

SEQ ID NO: 2532197 - RNA, 19 nt, Artificial Sequence
  Description of Artificial Sequence: Synthetic oligonucleotide
gugcgaggcccuggguccu

SEQ ID NO: 2532198 - RNA, 19 nt, Artificial Sequence
  Description of Artificial Sequence: Synthetic oligonucleotide
cagcucccagcgugccggu

SEQ ID NO: 2532199 - RNA, 19 nt, Artificial Sequence
  Description of Artificial Sequence: Synthetic oligonucleotide
gugagaggucggggccgcu

SEQ ID NO: 2532200 - RNA, 19 nt, Artificial Sequence
  Description of Artificial Sequence: Synthetic oligonucleotide
ccgaaucuucaggcggacu

SEQ ID NO: 2532201 - RNA, 19 nt, Artificial Sequence
  Description of Artificial Sequence: Synthetic oligonucleotide
cgugccgguacagccacau

SEQ ID NO: 2532202 - RNA, 19 nt, Artificial Sequence
  Description of Artificial Sequence: Synthetic oligonucleotide
gggguggcccaaggccugu

SEQ ID NO: 2532203 - RNA, 19 nt, Artificial Sequence
  Description of Artificial Sequence: Synthetic oligonucleotide
gcgugccgguacagccaca

SEQ ID NO: 2532204 - RNA, 19 nt, Artificial Sequence
  Description of Artificial Sequence: Synthetic oligonucleotide
gggcgauggugagggcaau

SEQ ID NO: 2532205 - RNA, 19 nt, Artificial Sequence
  Description of Artificial Sequence: Synthetic oligonucleotide
aaaucaagcccagagaucc

SEQ ID NO: 2532206 - RNA, 19 nt, Artificial Sequence
  Description of Artificial Sequence: Synthetic oligonucleotide
uccaaguaaagauugaugg

SEQ ID NO: 2532207 - RNA, 19 nt, Artificial Sequence
  Description of Artificial Sequence: Synthetic oligonucleotide
auuuaaguguaauucaaac

SEQ ID NO: 2532208 - RNA, 19 nt, Artificial Sequence
  Description of Artificial Sequence: Synthetic oligonucleotide
aacaacaacugccacaguc

SEQ ID NO: 2532209 - RNA, 19 nt, Artificial Sequence
  Description of Artificial Sequence: Synthetic oligonucleotide
uaugaaagcuugcagaacc

SEQ ID NO: 2532210 - RNA, 19 nt, Artificial Sequence
  Description of Artificial Sequence: Synthetic oligonucleotide
uuaaguguaauucaaacuu

SEQ ID NO: 2532211 - RNA, 19 nt, Artificial Sequence
  Description of Artificial Sequence: Synthetic oligonucleotide
gaaaguaacaacaacugcc

SEQ ID NO: 2532212 - RNA, 19 nt, Artificial Sequence
  Description of Artificial Sequence: Synthetic oligonucleotide
aauacauacucuucaggag

SEQ ID NO: 2532213 - RNA, 19 nt, Artificial Sequence
  Description of Artificial Sequence: Synthetic oligonucleotide
cuuucauggacaaaugucc

SEQ ID NO: 2532214 - RNA, 19 nt, Artificial Sequence
  Description of Artificial Sequence: Synthetic oligonucleotide
agaaaguaacaacaacugc

SEQ ID NO: 2532215 - RNA, 19 nt, Artificial Sequence
  Description of Artificial Sequence: Synthetic oligonucleotide
gaauccacagaagagaagg

SEQ ID NO: 2532216 - RNA, 19 nt, Artificial Sequence
  Description of Artificial Sequence: Synthetic oligonucleotide
uagaaaguaacaacaacug

SEQ ID NO: 2532217 - RNA, 19 nt, Artificial Sequence
  Description of Artificial Sequence: Synthetic oligonucleotide
aaauccacaagacagcaaa

SEQ ID NO: 2532218 - RNA, 19 nt, Artificial Sequence
  Description of Artificial Sequence: Synthetic oligonucleotide
cacaagacagcaaacagcc

SEQ ID NO: 2532219 - RNA, 19 nt, Artificial Sequence
  Description of Artificial Sequence: Synthetic oligonucleotide
cacagacucaaaaugaagg

SEQ ID NO: 2532220 - RNA, 19 nt, Artificial Sequence
  Description of Artificial Sequence: Synthetic oligonucleotide
agguacacaucauagaaag

SEQ ID NO: 2532221 - RNA, 19 nt, Artificial Sequence
  Description of Artificial Sequence: Synthetic oligonucleotide
uuuaaguguaauucaaacu

SEQ ID NO: 2532222 - RNA, 19 nt, Artificial Sequence
  Description of Artificial Sequence: Synthetic oligonucleotide
uguaguuaggagaacuugc

SEQ ID NO: 2532223 - RNA, 19 nt, Artificial Sequence
  Description of Artificial Sequence: Synthetic oligonucleotide
ugagaaaaggccaugcgga

SEQ ID NO: 2532224 - RNA, 19 nt, Artificial Sequence
  Description of Artificial Sequence: Synthetic oligonucleotide
ugcaggaacagauugauaa

SEQ ID NO: 2532225 - RNA, 19 nt, Artificial Sequence
  Description of Artificial Sequence: Synthetic oligonucleotide
uccacagaagagaagggcg

SEQ ID NO: 2532226 - RNA, 19 nt, Artificial Sequence
  Description of Artificial Sequence: Synthetic oligonucleotide
auaaauggucuuuguauac

SEQ ID NO: 2532227 - RNA, 19 nt, Artificial Sequence
  Description of Artificial Sequence: Synthetic oligonucleotide
auaauguccaaguaaagau

SEQ ID NO: 2532228 - RNA, 19 nt, Artificial Sequence
  Description of Artificial Sequence: Synthetic oligonucleotide
ucgacuguagaguauaggc

SEQ ID NO: 2532229 - RNA, 19 nt, Artificial Sequence
  Description of Artificial Sequence: Synthetic oligonucleotide
auugauaauguccaaguaa

SEQ ID NO: 2532230 - RNA, 19 nt, Artificial Sequence
  Description of Artificial Sequence: Synthetic oligonucleotide
aaauggucuuuguauacug

SEQ ID NO: 2532231 - RNA, 19 nt, Artificial Sequence
  Description of Artificial Sequence: Synthetic oligonucleotide
aauguccaaguaaagauug

SEQ ID NO: 2532232 - RNA, 19 nt, Artificial Sequence
  Description of Artificial Sequence: Synthetic oligonucleotide
gauggcagcuaauacauac

SEQ ID NO: 2532233 - RNA, 19 nt, Artificial Sequence
  Description of Artificial Sequence: Synthetic oligonucleotide
aaaugaaggaacacggcag

SEQ ID NO: 2532234 - RNA, 19 nt, Artificial Sequence
  Description of Artificial Sequence: Synthetic oligonucleotide
ucaguaugaaagcuugcag

SEQ ID NO: 2532235 - RNA, 19 nt, Artificial Sequence
  Description of Artificial Sequence: Synthetic oligonucleotide
uuguauacuguucaauacu

SEQ ID NO: 2532236 - RNA, 19 nt, Artificial Sequence
  Description of Artificial Sequence: Synthetic oligonucleotide
aguaaagauugauggcagc

SEQ ID NO: 2532237 - RNA, 19 nt, Artificial Sequence
  Description of Artificial Sequence: Synthetic oligonucleotide
aguauaggcagucaagcca

SEQ ID NO: 2532238 - RNA, 19 nt, Artificial Sequence
  Description of Artificial Sequence: Synthetic oligonucleotide
accaaaauuaaagcagggc

SEQ ID NO: 2532239 - RNA, 19 nt, Artificial Sequence
  Description of Artificial Sequence: Synthetic oligonucleotide
agauugauaauguccaagu

SEQ ID NO: 2532240 - RNA, 19 nt, Artificial Sequence
  Description of Artificial Sequence: Synthetic oligonucleotide
gucuguguaaaguuaacgc

SEQ ID NO: 2532241 - RNA, 19 nt, Artificial Sequence
  Description of Artificial Sequence: Synthetic oligonucleotide
caaauguccgcacagacuc

SEQ ID NO: 2532242 - RNA, 19 nt, Artificial Sequence
  Description of Artificial Sequence: Synthetic oligonucleotide
acaacugccacagucagag

SEQ ID NO: 2532243 - RNA, 19 nt, Artificial Sequence
  Description of Artificial Sequence: Synthetic oligonucleotide
uauaaauggucuuuguaua

SEQ ID NO: 2532244 - RNA, 19 nt, Artificial Sequence
  Description of Artificial Sequence: Synthetic oligonucleotide
aaugaaggaacacggcaga

SEQ ID NO: 2532245 - RNA, 19 nt, Artificial Sequence
  Description of Artificial Sequence: Synthetic oligonucleotide
agaugaugaauccacagaa

SEQ ID NO: 2532246 - RNA, 19 nt, Artificial Sequence
  Description of Artificial Sequence: Synthetic oligonucleotide
aaguaacaacaacugccac

SEQ ID NO: 2532247 - RNA, 19 nt, Artificial Sequence
  Description of Artificial Sequence: Synthetic oligonucleotide
cuaauacauacucuucagg

SEQ ID NO: 2532248 - RNA, 19 nt, Artificial Sequence
  Description of Artificial Sequence: Synthetic oligonucleotide
aaaguaacaacaacugcca

SEQ ID NO: 2532249 - RNA, 19 nt, Artificial Sequence
  Description of Artificial Sequence: Synthetic oligonucleotide
aaagauugauggcagcuaa

SEQ ID NO: 2532250 - RNA, 19 nt, Artificial Sequence
  Description of Artificial Sequence: Synthetic oligonucleotide
cugagaaaaggccaugcgg

SEQ ID NO: 2532251 - RNA, 19 nt, Artificial Sequence
  Description of Artificial Sequence: Synthetic oligonucleotide
ugaagucucucuucgacug

SEQ ID NO: 2532252 - RNA, 19 nt, Artificial Sequence
  Description of Artificial Sequence: Synthetic oligonucleotide
auacauacucuucaggaga

SEQ ID NO: 2532253 - RNA, 19 nt, Artificial Sequence
  Description of Artificial Sequence: Synthetic oligonucleotide
acaaaauccacaagacagc

SEQ ID NO: 2532254 - RNA, 19 nt, Artificial Sequence
  Description of Artificial Sequence: Synthetic oligonucleotide
gaugcuguagaccuuccug

SEQ ID NO: 2532255 - RNA, 19 nt, Artificial Sequence
  Description of Artificial Sequence: Synthetic oligonucleotide
uagaguauaggcagucaag

SEQ ID NO: 2532256 - RNA, 19 nt, Artificial Sequence
  Description of Artificial Sequence: Synthetic oligonucleotide
ucauagaaaguaacaacaa

SEQ ID NO: 2532257 - RNA, 19 nt, Artificial Sequence
  Description of Artificial Sequence: Synthetic oligonucleotide
gauaauguccaaguaaaga

SEQ ID NO: 2532258 - RNA, 19 nt, Artificial Sequence
  Description of Artificial Sequence: Synthetic oligonucleotide
ugucuguguaaaguuaacg

SEQ ID NO: 2532259 - RNA, 19 nt, Artificial Sequence
  Description of Artificial Sequence: Synthetic oligonucleotide
aguaugaaagcuugcagaa

SEQ ID NO: 2532260 - RNA, 19 nt, Artificial Sequence
  Description of Artificial Sequence: Synthetic oligonucleotide
uguauacuguucaauacuu

SEQ ID NO: 2532261 - RNA, 19 nt, Artificial Sequence
  Description of Artificial Sequence: Synthetic oligonucleotide
cucgauggaaggaagcggg

SEQ ID NO: 2532262 - RNA, 19 nt, Artificial Sequence
  Description of Artificial Sequence: Synthetic oligonucleotide
agcuaauacauacucuuca

SEQ ID NO: 2532263 - RNA, 19 nt, Artificial Sequence
  Description of Artificial Sequence: Synthetic oligonucleotide
ucucucuucgacuguagag

SEQ ID NO: 2532264 - RNA, 19 nt, Artificial Sequence
  Description of Artificial Sequence: Synthetic oligonucleotide
aaauuugcugaagucucuc

SEQ ID NO: 2532265 - RNA, 19 nt, Artificial Sequence
  Description of Artificial Sequence: Synthetic oligonucleotide
aaccucaacagaugcagga

SEQ ID NO: 2532266 - RNA, 19 nt, Artificial Sequence
  Description of Artificial Sequence: Synthetic oligonucleotide
gaugaauccacagaagaga

SEQ ID NO: 2532267 - RNA, 19 nt, Artificial Sequence
  Description of Artificial Sequence: Synthetic oligonucleotide
guaguugaagucauccucg

SEQ ID NO: 2532268 - RNA, 19 nt, Artificial Sequence
  Description of Artificial Sequence: Synthetic oligonucleotide
agauccgagagcaaacacc

SEQ ID NO: 2532269 - RNA, 19 nt, Artificial Sequence
  Description of Artificial Sequence: Synthetic oligonucleotide
aaaaucaagcccagagauc

SEQ ID NO: 2532270 - RNA, 19 nt, Artificial Sequence
  Description of Artificial Sequence: Synthetic oligonucleotide
aaagcuugcagaaccaggu

SEQ ID NO: 2532271 - RNA, 19 nt, Artificial Sequence
  Description of Artificial Sequence: Synthetic oligonucleotide
uuuacauauaaauggucuu

SEQ ID NO: 2532272 - RNA, 19 nt, Artificial Sequence
  Description of Artificial Sequence: Synthetic oligonucleotide
acagacucaaaaugaagga

SEQ ID NO: 2532273 - RNA, 19 nt, Artificial Sequence
  Description of Artificial Sequence: Synthetic oligonucleotide
uacauauaaauggucuuug

SEQ ID NO: 2532274 - RNA, 19 nt, Artificial Sequence
  Description of Artificial Sequence: Synthetic oligonucleotide
caaaaugaaggaacacggc

SEQ ID NO: 2532275 - RNA, 19 nt, Artificial Sequence
  Description of Artificial Sequence: Synthetic oligonucleotide
uacacaucauagaaaguaa

SEQ ID NO: 2532276 - RNA, 19 nt, Artificial Sequence
  Description of Artificial Sequence: Synthetic oligonucleotide
uaguuaggagaacuugcag

SEQ ID NO: 2532277 - RNA, 19 nt, Artificial Sequence
  Description of Artificial Sequence: Synthetic oligonucleotide
gaaagcuugcagaaccagg

SEQ ID NO: 2532278 - RNA, 19 nt, Artificial Sequence
  Description of Artificial Sequence: Synthetic oligonucleotide
aauuaaagcagggcuuuca

SEQ ID NO: 2532279 - RNA, 19 nt, Artificial Sequence
  Description of Artificial Sequence: Synthetic oligonucleotide
gauugauggcagcuaauac

SEQ ID NO: 2532280 - RNA, 19 nt, Artificial Sequence
  Description of Artificial Sequence: Synthetic oligonucleotide
cagaaaccucaacagaugc

SEQ ID NO: 2532281 - RNA, 19 nt, Artificial Sequence
  Description of Artificial Sequence: Synthetic oligonucleotide
ugaaggaacacggcagagg

SEQ ID NO: 2532282 - RNA, 19 nt, Artificial Sequence
  Description of Artificial Sequence: Synthetic oligonucleotide
uguguaaaguuaacgcaaa

SEQ ID NO: 2532283 - RNA, 19 nt, Artificial Sequence
  Description of Artificial Sequence: Synthetic oligonucleotide
uuaaagcagggcuuucaug

SEQ ID NO: 2532284 - RNA, 19 nt, Artificial Sequence
  Description of Artificial Sequence: Synthetic oligonucleotide
uacauacucuucaggagac

SEQ ID NO: 2532285 - RNA, 19 nt, Artificial Sequence
  Description of Artificial Sequence: Synthetic oligonucleotide
agaccuuccugagaaaagg

SEQ ID NO: 2532286 - RNA, 19 nt, Artificial Sequence
  Description of Artificial Sequence: Synthetic oligonucleotide
cagcguuucacuaugaaaa

SEQ ID NO: 2532287 - RNA, 19 nt, Artificial Sequence
  Description of Artificial Sequence: Synthetic oligonucleotide
uaaguguaauucaaacuuu

SEQ ID NO: 2532288 - RNA, 19 nt, Artificial Sequence
  Description of Artificial Sequence: Synthetic oligonucleotide
aaaggccaugcggaugugc

SEQ ID NO: 2532289 - RNA, 19 nt, Artificial Sequence
  Description of Artificial Sequence: Synthetic oligonucleotide
aauccacaagacagcaaac

SEQ ID NO: 2532290 - RNA, 19 nt, Artificial Sequence
  Description of Artificial Sequence: Synthetic oligonucleotide
aaauuaaagcagggcuuuc

SEQ ID NO: 2532291 - RNA, 19 nt, Artificial Sequence
  Description of Artificial Sequence: Synthetic oligonucleotide
aagucauccucgauggaag

SEQ ID NO: 2532292 - RNA, 19 nt, Artificial Sequence
  Description of Artificial Sequence: Synthetic oligonucleotide
gucaagccaagaaagacug

SEQ ID NO: 2532293 - RNA, 19 nt, Artificial Sequence
  Description of Artificial Sequence: Synthetic oligonucleotide
uucauggacaaauguccgc

SEQ ID NO: 2532294 - RNA, 19 nt, Artificial Sequence
  Description of Artificial Sequence: Synthetic oligonucleotide
cagaugcaggaacagauug

SEQ ID NO: 2532295 - RNA, 19 nt, Artificial Sequence
  Description of Artificial Sequence: Synthetic oligonucleotide
uccucgauggaaggaagcg

SEQ ID NO: 2532296 - RNA, 19 nt, Artificial Sequence
  Description of Artificial Sequence: Synthetic oligonucleotide
caagaauccugccaagcac

SEQ ID NO: 2532297 - RNA, 19 nt, Artificial Sequence
  Description of Artificial Sequence: Synthetic oligonucleotide
aagaauccugccaagcaca

SEQ ID NO: 2532298 - RNA, 19 nt, Artificial Sequence
  Description of Artificial Sequence: Synthetic oligonucleotide
ccugccaagcacaaaaucc

SEQ ID NO: 2532299 - RNA, 19 nt, Artificial Sequence
  Description of Artificial Sequence: Synthetic oligonucleotide
caccaaaauuaaagcaggg

SEQ ID NO: 2532300 - RNA, 19 nt, Artificial Sequence
  Description of Artificial Sequence: Synthetic oligonucleotide
uaggcagucaagccaagaa

SEQ ID NO: 2532301 - RNA, 19 nt, Artificial Sequence
  Description of Artificial Sequence: Synthetic oligonucleotide
gauccgagagcaaacacca

SEQ ID NO: 2532302 - RNA, 19 nt, Artificial Sequence
  Description of Artificial Sequence: Synthetic oligonucleotide
gcuuccagaaguguaaacg

SEQ ID NO: 2532303 - RNA, 19 nt, Artificial Sequence
  Description of Artificial Sequence: Synthetic oligonucleotide
cuuuguauacuguucaaua

SEQ ID NO: 2532304 - RNA, 19 nt, Artificial Sequence
  Description of Artificial Sequence: Synthetic oligonucleotide
uucaagaauccugccaagc

SEQ ID NO: 2532305 - RNA, 19 nt, Artificial Sequence
  Description of Artificial Sequence: Synthetic oligonucleotide
uuacauauaaauggucuuu

SEQ ID NO: 2532306 - RNA, 19 nt, Artificial Sequence
  Description of Artificial Sequence: Synthetic oligonucleotide
uucgacuguagaguauagg

SEQ ID NO: 2532307 - RNA, 19 nt, Artificial Sequence
  Description of Artificial Sequence: Synthetic oligonucleotide
uggcagcuaauacauacuc

SEQ ID NO: 2532308 - RNA, 19 nt, Artificial Sequence
  Description of Artificial Sequence: Synthetic oligonucleotide
aggaagcggggauagcgcg

SEQ ID NO: 2532309 - RNA, 19 nt, Artificial Sequence
  Description of Artificial Sequence: Synthetic oligonucleotide
auuccagcguuucacuaug

SEQ ID NO: 2532310 - RNA, 19 nt, Artificial Sequence
  Description of Artificial Sequence: Synthetic oligonucleotide
gaagggcgccuacagaagc

SEQ ID NO: 2532311 - RNA, 19 nt, Artificial Sequence
  Description of Artificial Sequence: Synthetic oligonucleotide
gcuaauacauacucuucag

SEQ ID NO: 2532312 - RNA, 19 nt, Artificial Sequence
  Description of Artificial Sequence: Synthetic oligonucleotide
aaagcagggcuuucaugga

SEQ ID NO: 2532313 - RNA, 19 nt, Artificial Sequence
  Description of Artificial Sequence: Synthetic oligonucleotide
uggucuuuguauacuguuc

SEQ ID NO: 2532314 - RNA, 19 nt, Artificial Sequence
  Description of Artificial Sequence: Synthetic oligonucleotide
cagaggucacuguaguuag

SEQ ID NO: 2532315 - RNA, 19 nt, Artificial Sequence
  Description of Artificial Sequence: Synthetic oligonucleotide
augcuguagaccuuccuga

SEQ ID NO: 2532316 - RNA, 19 nt, Artificial Sequence
  Description of Artificial Sequence: Synthetic oligonucleotide
agaaagacugcaguacuca

SEQ ID NO: 2532317 - RNA, 19 nt, Artificial Sequence
  Description of Artificial Sequence: Synthetic oligonucleotide
gaaaaggccaugcggaugu

SEQ ID NO: 2532318 - RNA, 19 nt, Artificial Sequence
  Description of Artificial Sequence: Synthetic oligonucleotide
agucauccucgauggaagg

SEQ ID NO: 2532319 - RNA, 19 nt, Artificial Sequence
  Description of Artificial Sequence: Synthetic oligonucleotide
cagauugauaauguccaag

SEQ ID NO: 2532320 - RNA, 19 nt, Artificial Sequence
  Description of Artificial Sequence: Synthetic oligonucleotide
aacacggcagaggucacug

SEQ ID NO: 2532321 - RNA, 19 nt, Artificial Sequence
  Description of Artificial Sequence: Synthetic oligonucleotide
aaagacugcaguacucagu

SEQ ID NO: 2532322 - RNA, 19 nt, Artificial Sequence
  Description of Artificial Sequence: Synthetic oligonucleotide
aaaccucaacagaugcagg

SEQ ID NO: 2532323 - RNA, 19 nt, Artificial Sequence
  Description of Artificial Sequence: Synthetic oligonucleotide
ugcggaugugcacacuggc

SEQ ID NO: 2532324 - RNA, 19 nt, Artificial Sequence
  Description of Artificial Sequence: Synthetic oligonucleotide
cuguguaaaguuaacgcaa

SEQ ID NO: 2532325 - RNA, 19 nt, Artificial Sequence
  Description of Artificial Sequence: Synthetic oligonucleotide
uucagaggaugcuuguguc

SEQ ID NO: 2532326 - RNA, 19 nt, Artificial Sequence
  Description of Artificial Sequence: Synthetic oligonucleotide
agggcuuucauggacaaau

SEQ ID NO: 2532327 - RNA, 19 nt, Artificial Sequence
  Description of Artificial Sequence: Synthetic oligonucleotide
ucuuuguauacuguucaau

SEQ ID NO: 2532328 - RNA, 19 nt, Artificial Sequence
  Description of Artificial Sequence: Synthetic oligonucleotide
uguccgcacagacucaaaa

SEQ ID NO: 2532329 - RNA, 19 nt, Artificial Sequence
  Description of Artificial Sequence: Synthetic oligonucleotide
aaguguaauucaaacuuuu

SEQ ID NO: 2532330 - RNA, 19 nt, Artificial Sequence
  Description of Artificial Sequence: Synthetic oligonucleotide
caacaacugccacagucag

SEQ ID NO: 2532331 - RNA, 19 nt, Artificial Sequence
  Description of Artificial Sequence: Synthetic oligonucleotide
aacuugcagggaaaggaug

SEQ ID NO: 2532332 - RNA, 19 nt, Artificial Sequence
  Description of Artificial Sequence: Synthetic oligonucleotide
auacucuucaggagacagc

SEQ ID NO: 2532333 - RNA, 19 nt, Artificial Sequence
  Description of Artificial Sequence: Synthetic oligonucleotide
aauggucuuuguauacugu

SEQ ID NO: 2532334 - RNA, 19 nt, Artificial Sequence
  Description of Artificial Sequence: Synthetic oligonucleotide
caugcggaugugcacacug

SEQ ID NO: 2532335 - RNA, 19 nt, Artificial Sequence
  Description of Artificial Sequence: Synthetic oligonucleotide
ucaagcccagagauccgag

SEQ ID NO: 2532336 - RNA, 19 nt, Artificial Sequence
  Description of Artificial Sequence: Synthetic oligonucleotide
ugugcacacuggccgaggc

SEQ ID NO: 2532337 - RNA, 19 nt, Artificial Sequence
  Description of Artificial Sequence: Synthetic oligonucleotide
acaacaacugccacaguca

SEQ ID NO: 2532338 - RNA, 19 nt, Artificial Sequence
  Description of Artificial Sequence: Synthetic oligonucleotide
guagaguauaggcagucaa

SEQ ID NO: 2532339 - RNA, 19 nt, Artificial Sequence
  Description of Artificial Sequence: Synthetic oligonucleotide
aaagcagguagagguucag

SEQ ID NO: 2532340 - RNA, 19 nt, Artificial Sequence
  Description of Artificial Sequence: Synthetic oligonucleotide
ccaaguaaagauugauggc

SEQ ID NO: 2532341 - RNA, 19 nt, Artificial Sequence
  Description of Artificial Sequence: Synthetic oligonucleotide
cuccaaauuugcugaaguc

SEQ ID NO: 2532342 - RNA, 19 nt, Artificial Sequence
  Description of Artificial Sequence: Synthetic oligonucleotide
aagccaagaccaauuccag

SEQ ID NO: 2532343 - RNA, 19 nt, Artificial Sequence
  Description of Artificial Sequence: Synthetic oligonucleotide
ucuucgacuguagaguaua

SEQ ID NO: 2532344 - RNA, 19 nt, Artificial Sequence
  Description of Artificial Sequence: Synthetic oligonucleotide
guccaaguaaagauugaug

SEQ ID NO: 2532345 - RNA, 19 nt, Artificial Sequence
  Description of Artificial Sequence: Synthetic oligonucleotide
uaaagauugauggcagcua

SEQ ID NO: 2532346 - RNA, 19 nt, Artificial Sequence
  Description of Artificial Sequence: Synthetic oligonucleotide
ucaagccaagaaagacugc

SEQ ID NO: 2532347 - RNA, 19 nt, Artificial Sequence
  Description of Artificial Sequence: Synthetic oligonucleotide
cucaacagaugcaggaaca

SEQ ID NO: 2532348 - RNA, 19 nt, Artificial Sequence
  Description of Artificial Sequence: Synthetic oligonucleotide
ccaaauuugcugaagucuc

SEQ ID NO: 2532349 - RNA, 19 nt, Artificial Sequence
  Description of Artificial Sequence: Synthetic oligonucleotide
uccugccaagcacaaaauc

SEQ ID NO: 2532350 - RNA, 19 nt, Artificial Sequence
  Description of Artificial Sequence: Synthetic oligonucleotide
cuucaagaauccugccaag

SEQ ID NO: 2532351 - RNA, 19 nt, Artificial Sequence
  Description of Artificial Sequence: Synthetic oligonucleotide
agacagccugugcaucagc

SEQ ID NO: 2532352 - RNA, 19 nt, Artificial Sequence
  Description of Artificial Sequence: Synthetic oligonucleotide
uguagaguauaggcaguca

SEQ ID NO: 2532353 - RNA, 19 nt, Artificial Sequence
  Description of Artificial Sequence: Synthetic oligonucleotide
cuguaguuaggagaacuug

SEQ ID NO: 2532354 - RNA, 19 nt, Artificial Sequence
  Description of Artificial Sequence: Synthetic oligonucleotide
ucucuucgacuguagagua

SEQ ID NO: 2532355 - RNA, 19 nt, Artificial Sequence
  Description of Artificial Sequence: Synthetic oligonucleotide
gaagcggggauagcgcggg

SEQ ID NO: 2532356 - RNA, 19 nt, Artificial Sequence
  Description of Artificial Sequence: Synthetic oligonucleotide
auggucuuuguauacuguu

SEQ ID NO: 2532357 - RNA, 19 nt, Artificial Sequence
  Description of Artificial Sequence: Synthetic oligonucleotide
gagguucagaggaugcuug

SEQ ID NO: 2532358 - RNA, 19 nt, Artificial Sequence
  Description of Artificial Sequence: Synthetic oligonucleotide
aggaacagauugauaaugu

SEQ ID NO: 2532359 - RNA, 19 nt, Artificial Sequence
  Description of Artificial Sequence: Synthetic oligonucleotide
ggucacuguaguuaggaga

SEQ ID NO: 2532360 - RNA, 19 nt, Artificial Sequence
  Description of Artificial Sequence: Synthetic oligonucleotide
gcagguagagguucagagg

SEQ ID NO: 2532361 - RNA, 19 nt, Artificial Sequence
  Description of Artificial Sequence: Synthetic oligonucleotide
auccacaagacagcaaaca

SEQ ID NO: 2532362 - RNA, 19 nt, Artificial Sequence
  Description of Artificial Sequence: Synthetic oligonucleotide
ccacaagacagcaaacagc

SEQ ID NO: 2532363 - RNA, 19 nt, Artificial Sequence
  Description of Artificial Sequence: Synthetic oligonucleotide
cagagauccgagagcaaac

SEQ ID NO: 2532364 - RNA, 19 nt, Artificial Sequence
  Description of Artificial Sequence: Synthetic oligonucleotide
acucaguaugaaagcuugc

SEQ ID NO: 2532365 - RNA, 19 nt, Artificial Sequence
  Description of Artificial Sequence: Synthetic oligonucleotide
aaucaagcccagagauccg

SEQ ID NO: 2532366 - RNA, 19 nt, Artificial Sequence
  Description of Artificial Sequence: Synthetic oligonucleotide
guaguuaggagaacuugca

SEQ ID NO: 2532367 - RNA, 19 nt, Artificial Sequence
  Description of Artificial Sequence: Synthetic oligonucleotide
aaggccaugcggaugugca

SEQ ID NO: 2532368 - RNA, 19 nt, Artificial Sequence
  Description of Artificial Sequence: Synthetic oligonucleotide
agcccugcuccaaauuugc

SEQ ID NO: 2532369 - RNA, 19 nt, Artificial Sequence
  Description of Artificial Sequence: Synthetic oligonucleotide
guagagguucagaggaugc

SEQ ID NO: 2532370 - RNA, 19 nt, Artificial Sequence
  Description of Artificial Sequence: Synthetic oligonucleotide
aggcagucaagccaagaaa

SEQ ID NO: 2532371 - RNA, 19 nt, Artificial Sequence
  Description of Artificial Sequence: Synthetic oligonucleotide
caaaauccacaagacagca

SEQ ID NO: 2532372 - RNA, 19 nt, Artificial Sequence
  Description of Artificial Sequence: Synthetic oligonucleotide
ugcaucagcgagugugugu

SEQ ID NO: 2532373 - RNA, 19 nt, Artificial Sequence
  Description of Artificial Sequence: Synthetic oligonucleotide
auccucgauggaaggaagc

SEQ ID NO: 2532374 - RNA, 19 nt, Artificial Sequence
  Description of Artificial Sequence: Synthetic oligonucleotide
aauguccgcacagacucaa

SEQ ID NO: 2532375 - RNA, 19 nt, Artificial Sequence
  Description of Artificial Sequence: Synthetic oligonucleotide
uauugacugcuuccagaaa

SEQ ID NO: 2532376 - RNA, 19 nt, Artificial Sequence
  Description of Artificial Sequence: Synthetic oligonucleotide
uccagcguuucacuaugaa

SEQ ID NO: 2532377 - RNA, 19 nt, Artificial Sequence
  Description of Artificial Sequence: Synthetic oligonucleotide
cuucgacuguagaguauag

SEQ ID NO: 2532378 - RNA, 19 nt, Artificial Sequence
  Description of Artificial Sequence: Synthetic oligonucleotide
aaacagcccugcuccaaau

SEQ ID NO: 2532379 - RNA, 19 nt, Artificial Sequence
  Description of Artificial Sequence: Synthetic oligonucleotide
agacagcaaacagcccugc

SEQ ID NO: 2532380 - RNA, 19 nt, Artificial Sequence
  Description of Artificial Sequence: Synthetic oligonucleotide
acagcccugcuccaaauuu

SEQ ID NO: 2532381 - RNA, 19 nt, Artificial Sequence
  Description of Artificial Sequence: Synthetic oligonucleotide
ggaacagauugauaauguc

SEQ ID NO: 2532382 - RNA, 19 nt, Artificial Sequence
  Description of Artificial Sequence: Synthetic oligonucleotide
agagaagggcgccuacaga

SEQ ID NO: 2532383 - RNA, 19 nt, Artificial Sequence
  Description of Artificial Sequence: Synthetic oligonucleotide
cauggacaaauguccgcac

SEQ ID NO: 2532384 - RNA, 19 nt, Artificial Sequence
  Description of Artificial Sequence: Synthetic oligonucleotide
ugcuugugucuguguaaag

SEQ ID NO: 2532385 - RNA, 19 nt, Artificial Sequence
  Description of Artificial Sequence: Synthetic oligonucleotide
guauaggcagucaagccaa

SEQ ID NO: 2532386 - RNA, 19 nt, Artificial Sequence
  Description of Artificial Sequence: Synthetic oligonucleotide
guaaagauugauggcagcu

SEQ ID NO: 2532387 - RNA, 19 nt, Artificial Sequence
  Description of Artificial Sequence: Synthetic oligonucleotide
aaggaacacggcagagguc

SEQ ID NO: 2532388 - RNA, 19 nt, Artificial Sequence
  Description of Artificial Sequence: Synthetic oligonucleotide
gcugaagucucucuucgac

SEQ ID NO: 2532389 - RNA, 19 nt, Artificial Sequence
  Description of Artificial Sequence: Synthetic oligonucleotide
uacagaagccaagaccaau

SEQ ID NO: 2532390 - RNA, 19 nt, Artificial Sequence
  Description of Artificial Sequence: Synthetic oligonucleotide
augaaggaacacggcagag

SEQ ID NO: 2532391 - RNA, 19 nt, Artificial Sequence
  Description of Artificial Sequence: Synthetic oligonucleotide
acagauugauaauguccaa

SEQ ID NO: 2532392 - RNA, 19 nt, Artificial Sequence
  Description of Artificial Sequence: Synthetic oligonucleotide
cagggaaaggaugcuguag

SEQ ID NO: 2532393 - RNA, 19 nt, Artificial Sequence
  Description of Artificial Sequence: Synthetic oligonucleotide
cacagaagagaagggcgcc

SEQ ID NO: 2532394 - RNA, 19 nt, Artificial Sequence
  Description of Artificial Sequence: Synthetic oligonucleotide
gcuuucauggacaaauguc

SEQ ID NO: 2532395 - RNA, 19 nt, Artificial Sequence
  Description of Artificial Sequence: Synthetic oligonucleotide
agagcuuccagaaguguaa

SEQ ID NO: 2532396 - RNA, 19 nt, Artificial Sequence
  Description of Artificial Sequence: Synthetic oligonucleotide
agaaaccucaacagaugca

SEQ ID NO: 2532397 - RNA, 19 nt, Artificial Sequence
  Description of Artificial Sequence: Synthetic oligonucleotide
aacagcccugcuccaaauu

SEQ ID NO: 2532398 - RNA, 19 nt, Artificial Sequence
  Description of Artificial Sequence: Synthetic oligonucleotide
cuugcagaaccagguacac

SEQ ID NO: 2532399 - RNA, 19 nt, Artificial Sequence
  Description of Artificial Sequence: Synthetic oligonucleotide
gaugugcacacuggccgag

SEQ ID NO: 2532400 - RNA, 19 nt, Artificial Sequence
  Description of Artificial Sequence: Synthetic oligonucleotide
guucagaggaugcuugugu

SEQ ID NO: 2532401 - RNA, 19 nt, Artificial Sequence
  Description of Artificial Sequence: Synthetic oligonucleotide
guaugaaagcuugcagaac

SEQ ID NO: 2532402 - RNA, 19 nt, Artificial Sequence
  Description of Artificial Sequence: Synthetic oligonucleotide
guagaccuuccugagaaaa

SEQ ID NO: 2532403 - RNA, 19 nt, Artificial Sequence
  Description of Artificial Sequence: Synthetic oligonucleotide
ugcugaagucucucuucga

SEQ ID NO: 2532404 - RNA, 19 nt, Artificial Sequence
  Description of Artificial Sequence: Synthetic oligonucleotide
agguucagaggaugcuugu

SEQ ID NO: 2532405 - RNA, 19 nt, Artificial Sequence
  Description of Artificial Sequence: Synthetic oligonucleotide
gaggaugcuugugucugug

SEQ ID NO: 2532406 - RNA, 19 nt, Artificial Sequence
  Description of Artificial Sequence: Synthetic oligonucleotide
aagcagguagagguucaga

SEQ ID NO: 2532407 - RNA, 19 nt, Artificial Sequence
  Description of Artificial Sequence: Synthetic oligonucleotide
caagaaagacugcaguacu

SEQ ID NO: 2532408 - RNA, 19 nt, Artificial Sequence
  Description of Artificial Sequence: Synthetic oligonucleotide
gguagagguucagaggaug

SEQ ID NO: 2532409 - RNA, 19 nt, Artificial Sequence
  Description of Artificial Sequence: Synthetic oligonucleotide
gaugcaggaacagauugau

SEQ ID NO: 2532410 - RNA, 19 nt, Artificial Sequence
  Description of Artificial Sequence: Synthetic oligonucleotide
gccguaguugaagucaucc

SEQ ID NO: 2532411 - RNA, 19 nt, Artificial Sequence
  Description of Artificial Sequence: Synthetic oligonucleotide
gauggaaggaagcggggau

SEQ ID NO: 2532412 - RNA, 19 nt, Artificial Sequence
  Description of Artificial Sequence: Synthetic oligonucleotide
cuguagaguauaggcaguc

SEQ ID NO: 2532413 - RNA, 19 nt, Artificial Sequence
  Description of Artificial Sequence: Synthetic oligonucleotide
aucaagcccagagauccga

SEQ ID NO: 2532414 - RNA, 19 nt, Artificial Sequence
  Description of Artificial Sequence: Synthetic oligonucleotide
aacaacugccacagucaga

SEQ ID NO: 2532415 - RNA, 19 nt, Artificial Sequence
  Description of Artificial Sequence: Synthetic oligonucleotide
aagucucucuucgacugua

SEQ ID NO: 2532416 - RNA, 19 nt, Artificial Sequence
  Description of Artificial Sequence: Synthetic oligonucleotide
augaaagcuugcagaacca

SEQ ID NO: 2532417 - RNA, 19 nt, Artificial Sequence
  Description of Artificial Sequence: Synthetic oligonucleotide
aagaccaauuccagcguuu

SEQ ID NO: 2532418 - RNA, 19 nt, Artificial Sequence
  Description of Artificial Sequence: Synthetic oligonucleotide
ccagaaaccucaacagaug

SEQ ID NO: 2532419 - RNA, 19 nt, Artificial Sequence
  Description of Artificial Sequence: Synthetic oligonucleotide
uuccagcguuucacuauga

SEQ ID NO: 2532420 - RNA, 19 nt, Artificial Sequence
  Description of Artificial Sequence: Synthetic oligonucleotide
aaauguccgcacagacuca

SEQ ID NO: 2532421 - RNA, 19 nt, Artificial Sequence
  Description of Artificial Sequence: Synthetic oligonucleotide
cagacucaaaaugaaggaa

SEQ ID NO: 2532422 - RNA, 19 nt, Artificial Sequence
  Description of Artificial Sequence: Synthetic oligonucleotide
acuguagaguauaggcagu

SEQ ID NO: 2532423 - RNA, 19 nt, Artificial Sequence
  Description of Artificial Sequence: Synthetic oligonucleotide
gaccaauuccagcguuuca

SEQ ID NO: 2532424 - RNA, 19 nt, Artificial Sequence
  Description of Artificial Sequence: Synthetic oligonucleotide
acuguaguuaggagaacuu

SEQ ID NO: 2532425 - RNA, 19 nt, Artificial Sequence
  Description of Artificial Sequence: Synthetic oligonucleotide
cagaaguguaaacgcaaaa

SEQ ID NO: 2532426 - RNA, 19 nt, Artificial Sequence
  Description of Artificial Sequence: Synthetic oligonucleotide
auggcagcuaauacauacu

SEQ ID NO: 2532427 - RNA, 19 nt, Artificial Sequence
  Description of Artificial Sequence: Synthetic oligonucleotide
gacugcuuccagaaaccuc

SEQ ID NO: 2532428 - RNA, 19 nt, Artificial Sequence
  Description of Artificial Sequence: Synthetic oligonucleotide
auaggcagucaagccaaga

SEQ ID NO: 2532429 - RNA, 19 nt, Artificial Sequence
  Description of Artificial Sequence: Synthetic oligonucleotide
ccuucaagaauccugccaa

SEQ ID NO: 2532430 - RNA, 19 nt, Artificial Sequence
  Description of Artificial Sequence: Synthetic oligonucleotide
cagagcuuccagaagugua

SEQ ID NO: 2532431 - RNA, 19 nt, Artificial Sequence
  Description of Artificial Sequence: Synthetic oligonucleotide
uaacaacaacugccacagu

SEQ ID NO: 2532432 - RNA, 19 nt, Artificial Sequence
  Description of Artificial Sequence: Synthetic oligonucleotide
gcggggauagcgcgggucg

SEQ ID NO: 2532433 - RNA, 19 nt, Artificial Sequence
  Description of Artificial Sequence: Synthetic oligonucleotide
gucucucuucgacuguaga

SEQ ID NO: 2532434 - RNA, 19 nt, Artificial Sequence
  Description of Artificial Sequence: Synthetic oligonucleotide
agcggggauagcgcggguc

SEQ ID NO: 2532435 - RNA, 19 nt, Artificial Sequence
  Description of Artificial Sequence: Synthetic oligonucleotide
aaaaggccaugcggaugug

SEQ ID NO: 2532436 - RNA, 19 nt, Artificial Sequence
  Description of Artificial Sequence: Synthetic oligonucleotide
gcugccguaguugaaguca

SEQ ID NO: 2532437 - RNA, 19 nt, Artificial Sequence
  Description of Artificial Sequence: Synthetic oligonucleotide
caaauuugcugaagucucu

SEQ ID NO: 2532438 - RNA, 19 nt, Artificial Sequence
  Description of Artificial Sequence: Synthetic oligonucleotide
caauuccagcguuucacua

SEQ ID NO: 2532439 - RNA, 19 nt, Artificial Sequence
  Description of Artificial Sequence: Synthetic oligonucleotide
gcaucagcgaguguguguc

SEQ ID NO: 2532440 - RNA, 19 nt, Artificial Sequence
  Description of Artificial Sequence: Synthetic oligonucleotide
cugaagucucucuucgacu

SEQ ID NO: 2532441 - RNA, 19 nt, Artificial Sequence
  Description of Artificial Sequence: Synthetic oligonucleotide
agucucucuucgacuguag

SEQ ID NO: 2532442 - RNA, 19 nt, Artificial Sequence
  Description of Artificial Sequence: Synthetic oligonucleotide
gugucuguguaaaguuaac

SEQ ID NO: 2532443 - RNA, 19 nt, Artificial Sequence
  Description of Artificial Sequence: Synthetic oligonucleotide
agcgagugugugucauaga

SEQ ID NO: 2532444 - RNA, 19 nt, Artificial Sequence
  Description of Artificial Sequence: Synthetic oligonucleotide
aucagcgagugugugucau

SEQ ID NO: 2532445 - RNA, 19 nt, Artificial Sequence
  Description of Artificial Sequence: Synthetic oligonucleotide
caagcccagagauccgaga

SEQ ID NO: 2532446 - RNA, 19 nt, Artificial Sequence
  Description of Artificial Sequence: Synthetic oligonucleotide
acauacucuucaggagaca

SEQ ID NO: 2532447 - RNA, 19 nt, Artificial Sequence
  Description of Artificial Sequence: Synthetic oligonucleotide
acagaugcaggaacagauu

SEQ ID NO: 2532448 - RNA, 19 nt, Artificial Sequence
  Description of Artificial Sequence: Synthetic oligonucleotide
ggaugcuugugucugugua

SEQ ID NO: 2532449 - RNA, 19 nt, Artificial Sequence
  Description of Artificial Sequence: Synthetic oligonucleotide
caaacagcccugcuccaaa

SEQ ID NO: 2532450 - RNA, 19 nt, Artificial Sequence
  Description of Artificial Sequence: Synthetic oligonucleotide
ccucgauggaaggaagcgg

SEQ ID NO: 2532451 - RNA, 19 nt, Artificial Sequence
  Description of Artificial Sequence: Synthetic oligonucleotide
gguucagaggaugcuugug

SEQ ID NO: 2532452 - RNA, 19 nt, Artificial Sequence
  Description of Artificial Sequence: Synthetic oligonucleotide
gucauccucgauggaagga

SEQ ID NO: 2532453 - RNA, 19 nt, Artificial Sequence
  Description of Artificial Sequence: Synthetic oligonucleotide
agacugcaguacucaguau

SEQ ID NO: 2532454 - RNA, 19 nt, Artificial Sequence
  Description of Artificial Sequence: Synthetic oligonucleotide
ggaagcggggauagcgcgg

SEQ ID NO: 2532455 - RNA, 19 nt, Artificial Sequence
  Description of Artificial Sequence: Synthetic oligonucleotide
gaagucucucuucgacugu

SEQ ID NO: 2532456 - RNA, 19 nt, Artificial Sequence
  Description of Artificial Sequence: Synthetic oligonucleotide
ugccguaguugaagucauc

SEQ ID NO: 2532457 - RNA, 19 nt, Artificial Sequence
  Description of Artificial Sequence: Synthetic oligonucleotide
auggaaggaagcggggaua

SEQ ID NO: 2532458 - RNA, 19 nt, Artificial Sequence
  Description of Artificial Sequence: Synthetic oligonucleotide
gcuugcagaaccagguaca

SEQ ID NO: 2532459 - RNA, 19 nt, Artificial Sequence
  Description of Artificial Sequence: Synthetic oligonucleotide
ggcuuucauggacaaaugu

SEQ ID NO: 2532460 - RNA, 19 nt, Artificial Sequence
  Description of Artificial Sequence: Synthetic oligonucleotide
caacugccacagucagagc

SEQ ID NO: 2532461 - RNA, 19 nt, Artificial Sequence
  Description of Artificial Sequence: Synthetic oligonucleotide
ggaugugcacacuggccga

SEQ ID NO: 2532462 - RNA, 19 nt, Artificial Sequence
  Description of Artificial Sequence: Synthetic oligonucleotide
ccgcacagacucaaaauga

SEQ ID NO: 2532463 - RNA, 19 nt, Artificial Sequence
  Description of Artificial Sequence: Synthetic oligonucleotide
gcgagugugugucauagau

SEQ ID NO: 2532464 - RNA, 19 nt, Artificial Sequence
  Description of Artificial Sequence: Synthetic oligonucleotide
cgagugugugucauagaug

SEQ ID NO: 2532465 - RNA, 19 nt, Artificial Sequence
  Description of Artificial Sequence: Synthetic oligonucleotide
cacggcagaggucacugua

SEQ ID NO: 2532466 - RNA, 19 nt, Artificial Sequence
  Description of Artificial Sequence: Synthetic oligonucleotide
cgacuguagaguauaggca

SEQ ID NO: 2532467 - RNA, 19 nt, Artificial Sequence
  Description of Artificial Sequence: Synthetic oligonucleotide
ccagcguuucacuaugaaa

SEQ ID NO: 2532468 - RNA, 19 nt, Artificial Sequence
  Description of Artificial Sequence: Synthetic oligonucleotide
gugcaucagcgagugugug

SEQ ID NO: 2532469 - RNA, 19 nt, Artificial Sequence
  Description of Artificial Sequence: Synthetic oligonucleotide
gcggaugugcacacuggcc

SEQ ID NO: 2532470 - RNA, 19 nt, Artificial Sequence
  Description of Artificial Sequence: Synthetic oligonucleotide
aagcggggauagcgcgggu

SEQ ID NO: 2532471 - RNA, 19 nt, Artificial Sequence
  Description of Artificial Sequence: Synthetic oligonucleotide
ccagaaguguaaacgcaaa

SEQ ID NO: 2532472 - RNA, 19 nt, Artificial Sequence
  Description of Artificial Sequence: Synthetic oligonucleotide
gggcuuucauggacaaaug

SEQ ID NO: 2532473 - RNA, 19 nt, Artificial Sequence
  Description of Artificial Sequence: Synthetic oligonucleotide
caucagcgaguguguguca

SEQ ID NO: 2532474 - RNA, 19 nt, Artificial Sequence
  Description of Artificial Sequence: Synthetic oligonucleotide
gccaugcggaugugcacac

SEQ ID NO: 2532475 - RNA, 19 nt, Artificial Sequence
  Description of Artificial Sequence: Synthetic oligonucleotide
caagaccaauuccagcguu

SEQ ID NO: 2532476 - RNA, 19 nt, Artificial Sequence
  Description of Artificial Sequence: Synthetic oligonucleotide
ggcagcuaauacauacucu

SEQ ID NO: 2532477 - RNA, 19 nt, Artificial Sequence
  Description of Artificial Sequence: Synthetic oligonucleotide
cugcaguacucaguaugaa

SEQ ID NO: 2532478 - RNA, 19 nt, Artificial Sequence
  Description of Artificial Sequence: Synthetic oligonucleotide
gggauagcgcgggucggug

SEQ ID NO: 2532479 - RNA, 19 nt, Artificial Sequence
  Description of Artificial Sequence: Synthetic oligonucleotide
gcgccuacagaagccaaga

SEQ ID NO: 2532480 - RNA, 19 nt, Artificial Sequence
  Description of Artificial Sequence: Synthetic oligonucleotide
cgcacagacucaaaaugaa

SEQ ID NO: 2532481 - RNA, 19 nt, Artificial Sequence
  Description of Artificial Sequence: Synthetic oligonucleotide
cucuucgacuguagaguau

SEQ ID NO: 2532482 - RNA, 19 nt, Artificial Sequence
  Description of Artificial Sequence: Synthetic oligonucleotide
cagcugccguaguugaagu

SEQ ID NO: 2532483 - RNA, 19 nt, Artificial Sequence
  Description of Artificial Sequence: Synthetic oligonucleotide
ccaauuccagcguuucacu

SEQ ID NO: 2532484 - RNA, 19 nt, Artificial Sequence
  Description of Artificial Sequence: Synthetic oligonucleotide
auccgagagcaaacaccaa

SEQ ID NO: 2532485 - RNA, 19 nt, Artificial Sequence
  Description of Artificial Sequence: Synthetic oligonucleotide
aggccacgcagcugccgua

SEQ ID NO: 2532486 - RNA, 19 nt, Artificial Sequence
  Description of Artificial Sequence: Synthetic oligonucleotide
gcaaacagcccugcuccaa

SEQ ID NO: 2532487 - RNA, 19 nt, Artificial Sequence
  Description of Artificial Sequence: Synthetic oligonucleotide
auguccgcacagacucaaa

SEQ ID NO: 2532488 - RNA, 19 nt, Artificial Sequence
  Description of Artificial Sequence: Synthetic oligonucleotide
ccguaguugaagucauccu

SEQ ID NO: 2532489 - RNA, 19 nt, Artificial Sequence
  Description of Artificial Sequence: Synthetic oligonucleotide
cgccuacagaagccaagac

SEQ ID NO: 2532490 - RNA, 19 nt, Artificial Sequence
  Description of Artificial Sequence: Synthetic oligonucleotide
ccaagaccaauuccagcgu

SEQ ID NO: 2532491 - RNA, 19 nt, Artificial Sequence
  Description of Artificial Sequence: Synthetic oligonucleotide
cacuggccgaggccacgca

SEQ ID NO: 2532492 - RNA, 19 nt, Artificial Sequence
  Description of Artificial Sequence: Synthetic oligonucleotide
cagggcuuucauggacaaa

SEQ ID NO: 2532493 - RNA, 19 nt, Artificial Sequence
  Description of Artificial Sequence: Synthetic oligonucleotide
ccgaggccacgcagcugcc

SEQ ID NO: 2532494 - RNA, 19 nt, Artificial Sequence
  Description of Artificial Sequence: Synthetic oligonucleotide
cggggauagcgcgggucgg

SEQ ID NO: 2532495 - RNA, 19 nt, Artificial Sequence
  Description of Artificial Sequence: Synthetic oligonucleotide
ggggauagcgcgggucggu

SEQ ID NO: 2532496 - RNA, 19 nt, Artificial Sequence
  Description of Artificial Sequence: Synthetic oligonucleotide
cccagagauccgagagcaa

SEQ ID NO: 2532497 - RNA, 19 nt, Artificial Sequence
  Description of Artificial Sequence: Synthetic oligonucleotide
gggcgccuacagaagccaa

SEQ ID NO: 2532498 - RNA, 19 nt, Artificial Sequence
  Description of Artificial Sequence: Synthetic oligonucleotide
gccacgcagcugccguagu

SEQ ID NO: 2532499 - RNA, 19 nt, Artificial Sequence
  Description of Artificial Sequence: Synthetic oligonucleotide
ccaugcggaugugcacacu

SEQ ID NO: 2532500 - RNA, 19 nt, Artificial Sequence
  Description of Artificial Sequence: Synthetic oligonucleotide
aaauccacgauucagaacg

SEQ ID NO: 2532501 - RNA, 19 nt, Artificial Sequence
  Description of Artificial Sequence: Synthetic oligonucleotide
uacuaauuaaucuugggag

SEQ ID NO: 2532502 - RNA, 19 nt, Artificial Sequence
  Description of Artificial Sequence: Synthetic oligonucleotide
aaaacuaauggucuccguc

SEQ ID NO: 2532503 - RNA, 19 nt, Artificial Sequence
  Description of Artificial Sequence: Synthetic oligonucleotide
aaaagcaccacccgaggcc

SEQ ID NO: 2532504 - RNA, 19 nt, Artificial Sequence
  Description of Artificial Sequence: Synthetic oligonucleotide
uauuguaaccugaaaaucc

SEQ ID NO: 2532505 - RNA, 19 nt, Artificial Sequence
  Description of Artificial Sequence: Synthetic oligonucleotide
auuugcacuguacucaucc

SEQ ID NO: 2532506 - RNA, 19 nt, Artificial Sequence
  Description of Artificial Sequence: Synthetic oligonucleotide
auaaucuuggcccaucugg

SEQ ID NO: 2532507 - RNA, 19 nt, Artificial Sequence
  Description of Artificial Sequence: Synthetic oligonucleotide
aagcuaggaaaacuaaugg

SEQ ID NO: 2532508 - RNA, 19 nt, Artificial Sequence
  Description of Artificial Sequence: Synthetic oligonucleotide
uuaauuugcagccuuucag

SEQ ID NO: 2532509 - RNA, 19 nt, Artificial Sequence
  Description of Artificial Sequence: Synthetic oligonucleotide
aggucaaggacauuagucc

SEQ ID NO: 2532510 - RNA, 19 nt, Artificial Sequence
  Description of Artificial Sequence: Synthetic oligonucleotide
aaaacugcgugauggaguc

SEQ ID NO: 2532511 - RNA, 19 nt, Artificial Sequence
  Description of Artificial Sequence: Synthetic oligonucleotide
uuacuaauuaaucuuggga

SEQ ID NO: 2532512 - RNA, 19 nt, Artificial Sequence
  Description of Artificial Sequence: Synthetic oligonucleotide
uaagcuaggaaaacuaaug

SEQ ID NO: 2532513 - RNA, 19 nt, Artificial Sequence
  Description of Artificial Sequence: Synthetic oligonucleotide
acuaauuaaucuugggagg

SEQ ID NO: 2532514 - RNA, 19 nt, Artificial Sequence
  Description of Artificial Sequence: Synthetic oligonucleotide
uguaaccugaaaauccacg

SEQ ID NO: 2532515 - RNA, 19 nt, Artificial Sequence
  Description of Artificial Sequence: Synthetic oligonucleotide
uuuacuaauuaaucuuggg

SEQ ID NO: 2532516 - RNA, 19 nt, Artificial Sequence
  Description of Artificial Sequence: Synthetic oligonucleotide
aaggacauuagucccacag

SEQ ID NO: 2532517 - RNA, 19 nt, Artificial Sequence
  Description of Artificial Sequence: Synthetic oligonucleotide
aggcgauuuaauuugcagc

SEQ ID NO: 2532518 - RNA, 19 nt, Artificial Sequence
  Description of Artificial Sequence: Synthetic oligonucleotide
ugaaaauccacgauucaga

SEQ ID NO: 2532519 - RNA, 19 nt, Artificial Sequence
  Description of Artificial Sequence: Synthetic oligonucleotide
aaacuaauggucuccgucu

SEQ ID NO: 2532520 - RNA, 19 nt, Artificial Sequence
  Description of Artificial Sequence: Synthetic oligonucleotide
aaaauccacgauucagaac

SEQ ID NO: 2532521 - RNA, 19 nt, Artificial Sequence
  Description of Artificial Sequence: Synthetic oligonucleotide
caucguuccaguaaggaag

SEQ ID NO: 2532522 - RNA, 19 nt, Artificial Sequence
  Description of Artificial Sequence: Synthetic oligonucleotide
aaugcaggccaucugauaa

SEQ ID NO: 2532523 - RNA, 19 nt, Artificial Sequence
  Description of Artificial Sequence: Synthetic oligonucleotide
uuuucugacaagucgguca

SEQ ID NO: 2532524 - RNA, 19 nt, Artificial Sequence
  Description of Artificial Sequence: Synthetic oligonucleotide
aaugacucgcuccuccagg

SEQ ID NO: 2532525 - RNA, 19 nt, Artificial Sequence
  Description of Artificial Sequence: Synthetic oligonucleotide
uuuggugauaaaugcaggc

SEQ ID NO: 2532526 - RNA, 19 nt, Artificial Sequence
  Description of Artificial Sequence: Synthetic oligonucleotide
ugguauuguaaccugaaaa

SEQ ID NO: 2532527 - RNA, 19 nt, Artificial Sequence
  Description of Artificial Sequence: Synthetic oligonucleotide
uuuuaagcuaggaaaacua

SEQ ID NO: 2532528 - RNA, 19 nt, Artificial Sequence
  Description of Artificial Sequence: Synthetic oligonucleotide
agaggagaccuucuugucc

SEQ ID NO: 2532529 - RNA, 19 nt, Artificial Sequence
  Description of Artificial Sequence: Synthetic oligonucleotide
cuugggaggauaaucuugg

SEQ ID NO: 2532530 - RNA, 19 nt, Artificial Sequence
  Description of Artificial Sequence: Synthetic oligonucleotide
aacugcgugauggaguccc

SEQ ID NO: 2532531 - RNA, 19 nt, Artificial Sequence
  Description of Artificial Sequence: Synthetic oligonucleotide
auaaaugcaggccaucuga

SEQ ID NO: 2532532 - RNA, 19 nt, Artificial Sequence
  Description of Artificial Sequence: Synthetic oligonucleotide
acauuagucccacagucuc

SEQ ID NO: 2532533 - RNA, 19 nt, Artificial Sequence
  Description of Artificial Sequence: Synthetic oligonucleotide
uccacaucguuccaguaag

SEQ ID NO: 2532534 - RNA, 19 nt, Artificial Sequence
  Description of Artificial Sequence: Synthetic oligonucleotide
aauuugcagccuuucagga

SEQ ID NO: 2532535 - RNA, 19 nt, Artificial Sequence
  Description of Artificial Sequence: Synthetic oligonucleotide
uggugauaaaugcaggcca

SEQ ID NO: 2532536 - RNA, 19 nt, Artificial Sequence
  Description of Artificial Sequence: Synthetic oligonucleotide
uuagcauauucaccgacga

SEQ ID NO: 2532537 - RNA, 19 nt, Artificial Sequence
  Description of Artificial Sequence: Synthetic oligonucleotide
aaacuguaacugcuacugg

SEQ ID NO: 2532538 - RNA, 19 nt, Artificial Sequence
  Description of Artificial Sequence: Synthetic oligonucleotide
aacagaaacucguuucccu

SEQ ID NO: 2532539 - RNA, 19 nt, Artificial Sequence
  Description of Artificial Sequence: Synthetic oligonucleotide
uuuaagcuaggaaaacuaa

SEQ ID NO: 2532540 - RNA, 19 nt, Artificial Sequence
  Description of Artificial Sequence: Synthetic oligonucleotide
aacuaauggucuccgucuc

SEQ ID NO: 2532541 - RNA, 19 nt, Artificial Sequence
  Description of Artificial Sequence: Synthetic oligonucleotide
aguguggcgucauuggcac

SEQ ID NO: 2532542 - RNA, 19 nt, Artificial Sequence
  Description of Artificial Sequence: Synthetic oligonucleotide
ugauaaguaggaugagaag

SEQ ID NO: 2532543 - RNA, 19 nt, Artificial Sequence
  Description of Artificial Sequence: Synthetic oligonucleotide
caggauacauucuuucucc

SEQ ID NO: 2532544 - RNA, 19 nt, Artificial Sequence
  Description of Artificial Sequence: Synthetic oligonucleotide
auaaguaggaugagaaguc

SEQ ID NO: 2532545 - RNA, 19 nt, Artificial Sequence
  Description of Artificial Sequence: Synthetic oligonucleotide
aacucguuucccuuuggug

SEQ ID NO: 2532546 - RNA, 19 nt, Artificial Sequence
  Description of Artificial Sequence: Synthetic oligonucleotide
uuaagcuaggaaaacuaau

SEQ ID NO: 2532547 - RNA, 19 nt, Artificial Sequence
  Description of Artificial Sequence: Synthetic oligonucleotide
guucaggcgauuuaauuug

SEQ ID NO: 2532548 - RNA, 19 nt, Artificial Sequence
  Description of Artificial Sequence: Synthetic oligonucleotide
uucagaacgucacauuuuc

SEQ ID NO: 2532549 - RNA, 19 nt, Artificial Sequence
  Description of Artificial Sequence: Synthetic oligonucleotide
acucguuucccuuugguga

SEQ ID NO: 2532550 - RNA, 19 nt, Artificial Sequence
  Description of Artificial Sequence: Synthetic oligonucleotide
gagaacagaaacucguuuc

SEQ ID NO: 2532551 - RNA, 19 nt, Artificial Sequence
  Description of Artificial Sequence: Synthetic oligonucleotide
aagucggucagccagcaau

SEQ ID NO: 2532552 - RNA, 19 nt, Artificial Sequence
  Description of Artificial Sequence: Synthetic oligonucleotide
ucuggcuacuugcagacac

SEQ ID NO: 2532553 - RNA, 19 nt, Artificial Sequence
  Description of Artificial Sequence: Synthetic oligonucleotide
ucccuuuacuaauuaaucu

SEQ ID NO: 2532554 - RNA, 19 nt, Artificial Sequence
  Description of Artificial Sequence: Synthetic oligonucleotide
ucccuuuggugauaaaugc

SEQ ID NO: 2532555 - RNA, 19 nt, Artificial Sequence
  Description of Artificial Sequence: Synthetic oligonucleotide
uauucaccgacgauggagu

SEQ ID NO: 2532556 - RNA, 19 nt, Artificial Sequence
  Description of Artificial Sequence: Synthetic oligonucleotide
cuggaaagaaaacugcgug

SEQ ID NO: 2532557 - RNA, 19 nt, Artificial Sequence
  Description of Artificial Sequence: Synthetic oligonucleotide
uggaaagaaaacugcguga

SEQ ID NO: 2532558 - RNA, 19 nt, Artificial Sequence
  Description of Artificial Sequence: Synthetic oligonucleotide
gauaaguaggaugagaagu

SEQ ID NO: 2532559 - RNA, 19 nt, Artificial Sequence
  Description of Artificial Sequence: Synthetic oligonucleotide
uacuggguuuuccaugccg

SEQ ID NO: 2532560 - RNA, 19 nt, Artificial Sequence
  Description of Artificial Sequence: Synthetic oligonucleotide
agcaaugcgccccauccac

SEQ ID NO: 2532561 - RNA, 19 nt, Artificial Sequence
  Description of Artificial Sequence: Synthetic oligonucleotide
aguaaggaagcagccaugg

SEQ ID NO: 2532562 - RNA, 19 nt, Artificial Sequence
  Description of Artificial Sequence: Synthetic oligonucleotide
ggcgauuuaauuugcagcc

SEQ ID NO: 2532563 - RNA, 19 nt, Artificial Sequence
  Description of Artificial Sequence: Synthetic oligonucleotide
cagaacgucacauuuucug

SEQ ID NO: 2532564 - RNA, 19 nt, Artificial Sequence
  Description of Artificial Sequence: Synthetic oligonucleotide
auauucaccgacgauggag

SEQ ID NO: 2532565 - RNA, 19 nt, Artificial Sequence
  Description of Artificial Sequence: Synthetic oligonucleotide
ugggaggauaaucuuggcc

SEQ ID NO: 2532566 - RNA, 19 nt, Artificial Sequence
  Description of Artificial Sequence: Synthetic oligonucleotide
agaccucagguacugcacc

SEQ ID NO: 2532567 - RNA, 19 nt, Artificial Sequence
  Description of Artificial Sequence: Synthetic oligonucleotide
ucauuggcaccgaagaaaa

SEQ ID NO: 2532568 - RNA, 19 nt, Artificial Sequence
  Description of Artificial Sequence: Synthetic oligonucleotide
acuaauggucuccgucucc

SEQ ID NO: 2532569 - RNA, 19 nt, Artificial Sequence
  Description of Artificial Sequence: Synthetic oligonucleotide
uccacgauucagaacguca

SEQ ID NO: 2532570 - RNA, 19 nt, Artificial Sequence
  Description of Artificial Sequence: Synthetic oligonucleotide
auuagcauauucaccgacg

SEQ ID NO: 2532571 - RNA, 19 nt, Artificial Sequence
  Description of Artificial Sequence: Synthetic oligonucleotide
aguucaggcgauuuaauuu

SEQ ID NO: 2532572 - RNA, 19 nt, Artificial Sequence
  Description of Artificial Sequence: Synthetic oligonucleotide
uguggcgucauuggcaccg

SEQ ID NO: 2532573 - RNA, 19 nt, Artificial Sequence
  Description of Artificial Sequence: Synthetic oligonucleotide
cacgcauuagcauauucac

SEQ ID NO: 2532574 - RNA, 19 nt, Artificial Sequence
  Description of Artificial Sequence: Synthetic oligonucleotide
uuucaggauacauucuuuc

SEQ ID NO: 2532575 - RNA, 19 nt, Artificial Sequence
  Description of Artificial Sequence: Synthetic oligonucleotide
agcuaggaaaacuaauggu

SEQ ID NO: 2532576 - RNA, 19 nt, Artificial Sequence
  Description of Artificial Sequence: Synthetic oligonucleotide
uacauucuuucucccaggc

SEQ ID NO: 2532577 - RNA, 19 nt, Artificial Sequence
  Description of Artificial Sequence: Synthetic oligonucleotide
caggccaucugauaaguag

SEQ ID NO: 2532578 - RNA, 19 nt, Artificial Sequence
  Description of Artificial Sequence: Synthetic oligonucleotide
aacgucacauuuucugaca

SEQ ID NO: 2532579 - RNA, 19 nt, Artificial Sequence
  Description of Artificial Sequence: Synthetic oligonucleotide
augagaaugacucgcuccu

SEQ ID NO: 2532580 - RNA, 19 nt, Artificial Sequence
  Description of Artificial Sequence: Synthetic oligonucleotide
ucugauaaguaggaugaga

SEQ ID NO: 2532581 - RNA, 19 nt, Artificial Sequence
  Description of Artificial Sequence: Synthetic oligonucleotide
uuugaguguggcgucauug

SEQ ID NO: 2532582 - RNA, 19 nt, Artificial Sequence
  Description of Artificial Sequence: Synthetic oligonucleotide
accgaagaaaacuguaacu

SEQ ID NO: 2532583 - RNA, 19 nt, Artificial Sequence
  Description of Artificial Sequence: Synthetic oligonucleotide
agaacgucacauuuucuga

SEQ ID NO: 2532584 - RNA, 19 nt, Artificial Sequence
  Description of Artificial Sequence: Synthetic oligonucleotide
uuggugauaaaugcaggcc

SEQ ID NO: 2532585 - RNA, 19 nt, Artificial Sequence
  Description of Artificial Sequence: Synthetic oligonucleotide
cgcauuagcauauucaccg

SEQ ID NO: 2532586 - RNA, 19 nt, Artificial Sequence
  Description of Artificial Sequence: Synthetic oligonucleotide
cugaaaauccacgauucag

SEQ ID NO: 2532587 - RNA, 19 nt, Artificial Sequence
  Description of Artificial Sequence: Synthetic oligonucleotide
ucugacaagucggucagcc

SEQ ID NO: 2532588 - RNA, 19 nt, Artificial Sequence
  Description of Artificial Sequence: Synthetic oligonucleotide
auggcccucagauuugcac

SEQ ID NO: 2532589 - RNA, 19 nt, Artificial Sequence
  Description of Artificial Sequence: Synthetic oligonucleotide
uucaggauacauucuuucu

SEQ ID NO: 2532590 - RNA, 19 nt, Artificial Sequence
  Description of Artificial Sequence: Synthetic oligonucleotide
guaaccugaaaauccacga

SEQ ID NO: 2532591 - RNA, 19 nt, Artificial Sequence
  Description of Artificial Sequence: Synthetic oligonucleotide
cugauaaguaggaugagaa

SEQ ID NO: 2532592 - RNA, 19 nt, Artificial Sequence
  Description of Artificial Sequence: Synthetic oligonucleotide
ucugguauuguaaccugaa

SEQ ID NO: 2532593 - RNA, 19 nt, Artificial Sequence
  Description of Artificial Sequence: Synthetic oligonucleotide
caggucaaggacauuaguc

SEQ ID NO: 2532594 - RNA, 19 nt, Artificial Sequence
  Description of Artificial Sequence: Synthetic oligonucleotide
aaggggacaugcugcuugg

SEQ ID NO: 2532595 - RNA, 19 nt, Artificial Sequence
  Description of Artificial Sequence: Synthetic oligonucleotide
gacgauggaguucaggcga

SEQ ID NO: 2532596 - RNA, 19 nt, Artificial Sequence
  Description of Artificial Sequence: Synthetic oligonucleotide
accugaaaauccacgauuc

SEQ ID NO: 2532597 - RNA, 19 nt, Artificial Sequence
  Description of Artificial Sequence: Synthetic oligonucleotide
uaaguaggaugagaagucc

SEQ ID NO: 2532598 - RNA, 19 nt, Artificial Sequence
  Description of Artificial Sequence: Synthetic oligonucleotide
gaacgucacauuuucugac

SEQ ID NO: 2532599 - RNA, 19 nt, Artificial Sequence
  Description of Artificial Sequence: Synthetic oligonucleotide
ugauaaaugcaggccaucu

SEQ ID NO: 2532600 - RNA, 19 nt, Artificial Sequence
  Description of Artificial Sequence: Synthetic oligonucleotide
aaacucguuucccuuuggu

SEQ ID NO: 2532601 - RNA, 19 nt, Artificial Sequence
  Description of Artificial Sequence: Synthetic oligonucleotide
acuggguuuuccaugccgc

SEQ ID NO: 2532602 - RNA, 19 nt, Artificial Sequence
  Description of Artificial Sequence: Synthetic oligonucleotide
cucccuuuacuaauuaauc

SEQ ID NO: 2532603 - RNA, 19 nt, Artificial Sequence
  Description of Artificial Sequence: Synthetic oligonucleotide
uuccaguaaggaagcagcc

SEQ ID NO: 2532604 - RNA, 19 nt, Artificial Sequence
  Description of Artificial Sequence: Synthetic oligonucleotide
gauaaucuuggcccaucug

SEQ ID NO: 2532605 - RNA, 19 nt, Artificial Sequence
  Description of Artificial Sequence: Synthetic oligonucleotide
uucucaucuuugagugugg

SEQ ID NO: 2532606 - RNA, 19 nt, Artificial Sequence
  Description of Artificial Sequence: Synthetic oligonucleotide
ucaccgacgauggaguuca

SEQ ID NO: 2532607 - RNA, 19 nt, Artificial Sequence
  Description of Artificial Sequence: Synthetic oligonucleotide
auuguaaccugaaaaucca

SEQ ID NO: 2532608 - RNA, 19 nt, Artificial Sequence
  Description of Artificial Sequence: Synthetic oligonucleotide
ucggucagccagcaaugcg

SEQ ID NO: 2532609 - RNA, 19 nt, Artificial Sequence
  Description of Artificial Sequence: Synthetic oligonucleotide
gaggagaccuucuugucca

SEQ ID NO: 2532610 - RNA, 19 nt, Artificial Sequence
  Description of Artificial Sequence: Synthetic oligonucleotide
agaaacucguuucccuuug

SEQ ID NO: 2532611 - RNA, 19 nt, Artificial Sequence
  Description of Artificial Sequence: Synthetic oligonucleotide
cucaucuuugaguguggcg

SEQ ID NO: 2532612 - RNA, 19 nt, Artificial Sequence
  Description of Artificial Sequence: Synthetic oligonucleotide
uuccacaucguuccaguaa

SEQ ID NO: 2532613 - RNA, 19 nt, Artificial Sequence
  Description of Artificial Sequence: Synthetic oligonucleotide
uaaccugaaaauccacgau

SEQ ID NO: 2532614 - RNA, 19 nt, Artificial Sequence
  Description of Artificial Sequence: Synthetic oligonucleotide
uucaggcgauuuaauuugc

SEQ ID NO: 2532615 - RNA, 19 nt, Artificial Sequence
  Description of Artificial Sequence: Synthetic oligonucleotide
caggcgauuuaauuugcag

SEQ ID NO: 2532616 - RNA, 19 nt, Artificial Sequence
  Description of Artificial Sequence: Synthetic oligonucleotide
aauuaaucuugggaggaua

SEQ ID NO: 2532617 - RNA, 19 nt, Artificial Sequence
  Description of Artificial Sequence: Synthetic oligonucleotide
gaaacucguuucccuuugg

SEQ ID NO: 2532618 - RNA, 19 nt, Artificial Sequence
  Description of Artificial Sequence: Synthetic oligonucleotide
caccgaagaaaacuguaac

SEQ ID NO: 2532619 - RNA, 19 nt, Artificial Sequence
  Description of Artificial Sequence: Synthetic oligonucleotide
ggaugagaaguccugguug

SEQ ID NO: 2532620 - RNA, 19 nt, Artificial Sequence
  Description of Artificial Sequence: Synthetic oligonucleotide
guaggaugagaaguccugg

SEQ ID NO: 2532621 - RNA, 19 nt, Artificial Sequence
  Description of Artificial Sequence: Synthetic oligonucleotide
uaaaugcaggccaucugau

SEQ ID NO: 2532622 - RNA, 19 nt, Artificial Sequence
  Description of Artificial Sequence: Synthetic oligonucleotide
acagaccucagguacugca

SEQ ID NO: 2532623 - RNA, 19 nt, Artificial Sequence
  Description of Artificial Sequence: Synthetic oligonucleotide
uuguaaccugaaaauccac

SEQ ID NO: 2532624 - RNA, 19 nt, Artificial Sequence
  Description of Artificial Sequence: Synthetic oligonucleotide
acgcauuagcauauucacc

SEQ ID NO: 2532625 - RNA, 19 nt, Artificial Sequence
  Description of Artificial Sequence: Synthetic oligonucleotide
ggugaugagaaugacucgc

SEQ ID NO: 2532626 - RNA, 19 nt, Artificial Sequence
  Description of Artificial Sequence: Synthetic oligonucleotide
cuaauuaaucuugggagga

SEQ ID NO: 2532627 - RNA, 19 nt, Artificial Sequence
  Description of Artificial Sequence: Synthetic oligonucleotide
gaaugacucgcuccuccag

SEQ ID NO: 2532628 - RNA, 19 nt, Artificial Sequence
  Description of Artificial Sequence: Synthetic oligonucleotide
cauccaaggggacaugcug

SEQ ID NO: 2532629 - RNA, 19 nt, Artificial Sequence
  Description of Artificial Sequence: Synthetic oligonucleotide
agagagcucccgcuggcgg

SEQ ID NO: 2532630 - RNA, 19 nt, Artificial Sequence
  Description of Artificial Sequence: Synthetic oligonucleotide
aaagcaccacccgaggcca

SEQ ID NO: 2532631 - RNA, 19 nt, Artificial Sequence
  Description of Artificial Sequence: Synthetic oligonucleotide
caaggggacaugcugcuug

SEQ ID NO: 2532632 - RNA, 19 nt, Artificial Sequence
  Description of Artificial Sequence: Synthetic oligonucleotide
uguaacugcuacuggguuu

SEQ ID NO: 2532633 - RNA, 19 nt, Artificial Sequence
  Description of Artificial Sequence: Synthetic oligonucleotide
uccgucucccagcagacuc

SEQ ID NO: 2532634 - RNA, 19 nt, Artificial Sequence
  Description of Artificial Sequence: Synthetic oligonucleotide
gcuaggaaaacuaaugguc

SEQ ID NO: 2532635 - RNA, 19 nt, Artificial Sequence
  Description of Artificial Sequence: Synthetic oligonucleotide
cuaggaaaacuaauggucu

SEQ ID NO: 2532636 - RNA, 19 nt, Artificial Sequence
  Description of Artificial Sequence: Synthetic oligonucleotide
uguacucauccaaggggac

SEQ ID NO: 2532637 - RNA, 19 nt, Artificial Sequence
  Description of Artificial Sequence: Synthetic oligonucleotide
ucaggcgauuuaauuugca

SEQ ID NO: 2532638 - RNA, 19 nt, Artificial Sequence
  Description of Artificial Sequence: Synthetic oligonucleotide
ccaucugauaaguaggaug

SEQ ID NO: 2532639 - RNA, 19 nt, Artificial Sequence
  Description of Artificial Sequence: Synthetic oligonucleotide
ggucaaggacauuaguccc

SEQ ID NO: 2532640 - RNA, 19 nt, Artificial Sequence
  Description of Artificial Sequence: Synthetic oligonucleotide
uuugcacuguacucaucca

SEQ ID NO: 2532641 - RNA, 19 nt, Artificial Sequence
  Description of Artificial Sequence: Synthetic oligonucleotide
aggauguccacagaccuca

SEQ ID NO: 2532642 - RNA, 19 nt, Artificial Sequence
  Description of Artificial Sequence: Synthetic oligonucleotide
gcauauucaccgacgaugg

SEQ ID NO: 2532643 - RNA, 19 nt, Artificial Sequence
  Description of Artificial Sequence: Synthetic oligonucleotide
gauucagaacgucacauuu

SEQ ID NO: 2532644 - RNA, 19 nt, Artificial Sequence
  Description of Artificial Sequence: Synthetic oligonucleotide
aaguaggaugagaaguccu

SEQ ID NO: 2532645 - RNA, 19 nt, Artificial Sequence
  Description of Artificial Sequence: Synthetic oligonucleotide
cuguacucauccaagggga

SEQ ID NO: 2532646 - RNA, 19 nt, Artificial Sequence
  Description of Artificial Sequence: Synthetic oligonucleotide
ggacauuagucccacaguc

SEQ ID NO: 2532647 - RNA, 19 nt, Artificial Sequence
  Description of Artificial Sequence: Synthetic oligonucleotide
aaaugcaggccaucugaua

SEQ ID NO: 2532648 - RNA, 19 nt, Artificial Sequence
  Description of Artificial Sequence: Synthetic oligonucleotide
uuuuccaugccgcucccuu

SEQ ID NO: 2532649 - RNA, 19 nt, Artificial Sequence
  Description of Artificial Sequence: Synthetic oligonucleotide
ggcugcuucgcccagcggg

SEQ ID NO: 2532650 - RNA, 19 nt, Artificial Sequence
  Description of Artificial Sequence: Synthetic oligonucleotide
gacucgcuccuccaggaug

SEQ ID NO: 2532651 - RNA, 19 nt, Artificial Sequence
  Description of Artificial Sequence: Synthetic oligonucleotide
ucagaacgucacauuuucu

SEQ ID NO: 2532652 - RNA, 19 nt, Artificial Sequence
  Description of Artificial Sequence: Synthetic oligonucleotide
uggcccucagauuugcacu

SEQ ID NO: 2532653 - RNA, 19 nt, Artificial Sequence
  Description of Artificial Sequence: Synthetic oligonucleotide
gguauuguaaccugaaaau

SEQ ID NO: 2532654 - RNA, 19 nt, Artificial Sequence
  Description of Artificial Sequence: Synthetic oligonucleotide
caucugguauuguaaccug

SEQ ID NO: 2532655 - RNA, 19 nt, Artificial Sequence
  Description of Artificial Sequence: Synthetic oligonucleotide
acacgcauuagcauauuca

SEQ ID NO: 2532656 - RNA, 19 nt, Artificial Sequence
  Description of Artificial Sequence: Synthetic oligonucleotide
auuaaucuugggaggauaa

SEQ ID NO: 2532657 - RNA, 19 nt, Artificial Sequence
  Description of Artificial Sequence: Synthetic oligonucleotide
acagaaacucguuucccuu

SEQ ID NO: 2532658 - RNA, 19 nt, Artificial Sequence
  Description of Artificial Sequence: Synthetic oligonucleotide
ucaaggacauuagucccac

SEQ ID NO: 2532659 - RNA, 19 nt, Artificial Sequence
  Description of Artificial Sequence: Synthetic oligonucleotide
acaggucaaggacauuagu

SEQ ID NO: 2532660 - RNA, 19 nt, Artificial Sequence
  Description of Artificial Sequence: Synthetic oligonucleotide
gaaaacuguaacugcuacu

SEQ ID NO: 2532661 - RNA, 19 nt, Artificial Sequence
  Description of Artificial Sequence: Synthetic oligonucleotide
ccgaagaaaacuguaacug

SEQ ID NO: 2532662 - RNA, 19 nt, Artificial Sequence
  Description of Artificial Sequence: Synthetic oligonucleotide
gacacgcauuagcauauuc

SEQ ID NO: 2532663 - RNA, 19 nt, Artificial Sequence
  Description of Artificial Sequence: Synthetic oligonucleotide
acauucuuucucccaggcu

SEQ ID NO: 2532664 - RNA, 19 nt, Artificial Sequence
  Description of Artificial Sequence: Synthetic oligonucleotide
ucucaucuuugaguguggc

SEQ ID NO: 2532665 - RNA, 19 nt, Artificial Sequence
  Description of Artificial Sequence: Synthetic oligonucleotide
uacucauccaaggggacau

SEQ ID NO: 2532666 - RNA, 19 nt, Artificial Sequence
  Description of Artificial Sequence: Synthetic oligonucleotide
cucauccaaggggacaugc

SEQ ID NO: 2532667 - RNA, 19 nt, Artificial Sequence
  Description of Artificial Sequence: Synthetic oligonucleotide
cgaagaaaacuguaacugc

SEQ ID NO: 2532668 - RNA, 19 nt, Artificial Sequence
  Description of Artificial Sequence: Synthetic oligonucleotide
gaaaacugcgugauggagu

SEQ ID NO: 2532669 - RNA, 19 nt, Artificial Sequence
  Description of Artificial Sequence: Synthetic oligonucleotide
uaauuaaucuugggaggau

SEQ ID NO: 2532670 - RNA, 19 nt, Artificial Sequence
  Description of Artificial Sequence: Synthetic oligonucleotide
acgauucagaacgucacau

SEQ ID NO: 2532671 - RNA, 19 nt, Artificial Sequence
  Description of Artificial Sequence: Synthetic oligonucleotide
agccauggcagagaggaga

SEQ ID NO: 2532672 - RNA, 19 nt, Artificial Sequence
  Description of Artificial Sequence: Synthetic oligonucleotide
aggauaaucuuggcccauc

SEQ ID NO: 2532673 - RNA, 19 nt, Artificial Sequence
  Description of Artificial Sequence: Synthetic oligonucleotide
uuaaucuugggaggauaau

SEQ ID NO: 2532674 - RNA, 19 nt, Artificial Sequence
  Description of Artificial Sequence: Synthetic oligonucleotide
cagaccucagguacugcac

SEQ ID NO: 2532675 - RNA, 19 nt, Artificial Sequence
  Description of Artificial Sequence: Synthetic oligonucleotide
uggcaccgaagaaaacugu

SEQ ID NO: 2532676 - RNA, 19 nt, Artificial Sequence
  Description of Artificial Sequence: Synthetic oligonucleotide
aaugcgccccauccaccug

SEQ ID NO: 2532677 - RNA, 19 nt, Artificial Sequence
  Description of Artificial Sequence: Synthetic oligonucleotide
accacccgaggccacagca

SEQ ID NO: 2532678 - RNA, 19 nt, Artificial Sequence
  Description of Artificial Sequence: Synthetic oligonucleotide
gacaagucggucagccagc

SEQ ID NO: 2532679 - RNA, 19 nt, Artificial Sequence
  Description of Artificial Sequence: Synthetic oligonucleotide
gagaggagaccuucuuguc

SEQ ID NO: 2532680 - RNA, 19 nt, Artificial Sequence
  Description of Artificial Sequence: Synthetic oligonucleotide
guccugguuguccuucugc

SEQ ID NO: 2532681 - RNA, 19 nt, Artificial Sequence
  Description of Artificial Sequence: Synthetic oligonucleotide
uuccaugccgcucccuuua

SEQ ID NO: 2532682 - RNA, 19 nt, Artificial Sequence
  Description of Artificial Sequence: Synthetic oligonucleotide
caguaaggaagcagccaug

SEQ ID NO: 2532683 - RNA, 19 nt, Artificial Sequence
  Description of Artificial Sequence: Synthetic oligonucleotide
cagcagacuccgcucaggc

SEQ ID NO: 2532684 - RNA, 19 nt, Artificial Sequence
  Description of Artificial Sequence: Synthetic oligonucleotide
caucuuugaguguggcguc

SEQ ID NO: 2532685 - RNA, 19 nt, Artificial Sequence
  Description of Artificial Sequence: Synthetic oligonucleotide
ugcaggccaucugauaagu

SEQ ID NO: 2532686 - RNA, 19 nt, Artificial Sequence
  Description of Artificial Sequence: Synthetic oligonucleotide
aucugauaaguaggaugag

SEQ ID NO: 2532687 - RNA, 19 nt, Artificial Sequence
  Description of Artificial Sequence: Synthetic oligonucleotide
uugcagccuuucaggauac

SEQ ID NO: 2532688 - RNA, 19 nt, Artificial Sequence
  Description of Artificial Sequence: Synthetic oligonucleotide
gaccucagguacugcacca

SEQ ID NO: 2532689 - RNA, 19 nt, Artificial Sequence
  Description of Artificial Sequence: Synthetic oligonucleotide
caucaggguccacagguca

SEQ ID NO: 2532690 - RNA, 19 nt, Artificial Sequence
  Description of Artificial Sequence: Synthetic oligonucleotide
uggcccaucugguauugua

SEQ ID NO: 2532691 - RNA, 19 nt, Artificial Sequence
  Description of Artificial Sequence: Synthetic oligonucleotide
gaaaacuaauggucuccgu

SEQ ID NO: 2532692 - RNA, 19 nt, Artificial Sequence
  Description of Artificial Sequence: Synthetic oligonucleotide
auccacgauucagaacguc

SEQ ID NO: 2532693 - RNA, 19 nt, Artificial Sequence
  Description of Artificial Sequence: Synthetic oligonucleotide
aauccacgauucagaacgu

SEQ ID NO: 2532694 - RNA, 19 nt, Artificial Sequence
  Description of Artificial Sequence: Synthetic oligonucleotide
auggaguucaggcgauuua

SEQ ID NO: 2532695 - RNA, 19 nt, Artificial Sequence
  Description of Artificial Sequence: Synthetic oligonucleotide
accgacgauggaguucagg

SEQ ID NO: 2532696 - RNA, 19 nt, Artificial Sequence
  Description of Artificial Sequence: Synthetic oligonucleotide
uucaccgacgauggaguuc

SEQ ID NO: 2532697 - RNA, 19 nt, Artificial Sequence
  Description of Artificial Sequence: Synthetic oligonucleotide
cauuggcaccgaagaaaac

SEQ ID NO: 2532698 - RNA, 19 nt, Artificial Sequence
  Description of Artificial Sequence: Synthetic oligonucleotide
gucaaggacauuaguccca

SEQ ID NO: 2532699 - RNA, 19 nt, Artificial Sequence
  Description of Artificial Sequence: Synthetic oligonucleotide
ucuuggcccaucugguauu

SEQ ID NO: 2532700 - RNA, 19 nt, Artificial Sequence
  Description of Artificial Sequence: Synthetic oligonucleotide
agagguuggagaacagaaa

SEQ ID NO: 2532701 - RNA, 19 nt, Artificial Sequence
  Description of Artificial Sequence: Synthetic oligonucleotide
agucggucagccagcaaug

SEQ ID NO: 2532702 - RNA, 19 nt, Artificial Sequence
  Description of Artificial Sequence: Synthetic oligonucleotide
auucagaacgucacauuuu

SEQ ID NO: 2532703 - RNA, 19 nt, Artificial Sequence
  Description of Artificial Sequence: Synthetic oligonucleotide
caggauguccacagaccuc

SEQ ID NO: 2532704 - RNA, 19 nt, Artificial Sequence
  Description of Artificial Sequence: Synthetic oligonucleotide
ugccgcucccuuuacuaau

SEQ ID NO: 2532705 - RNA, 19 nt, Artificial Sequence
  Description of Artificial Sequence: Synthetic oligonucleotide
uugcuucuuccacaucguu

SEQ ID NO: 2532706 - RNA, 19 nt, Artificial Sequence
  Description of Artificial Sequence: Synthetic oligonucleotide
gcagacacgcauuagcaua

SEQ ID NO: 2532707 - RNA, 19 nt, Artificial Sequence
  Description of Artificial Sequence: Synthetic oligonucleotide
ggaggauaaucuuggccca

SEQ ID NO: 2532708 - RNA, 19 nt, Artificial Sequence
  Description of Artificial Sequence: Synthetic oligonucleotide
ucccacagucucuggcuac

SEQ ID NO: 2532709 - RNA, 19 nt, Artificial Sequence
  Description of Artificial Sequence: Synthetic oligonucleotide
gaguucaggcgauuuaauu

SEQ ID NO: 2532710 - RNA, 19 nt, Artificial Sequence
  Description of Artificial Sequence: Synthetic oligonucleotide
gacauuagucccacagucu

SEQ ID NO: 2532711 - RNA, 19 nt, Artificial Sequence
  Description of Artificial Sequence: Synthetic oligonucleotide
cacaucguuccaguaagga

SEQ ID NO: 2532712 - RNA, 19 nt, Artificial Sequence
  Description of Artificial Sequence: Synthetic oligonucleotide
caugccgcucccuuuacua

SEQ ID NO: 2532713 - RNA, 19 nt, Artificial Sequence
  Description of Artificial Sequence: Synthetic oligonucleotide
uggguuuuccaugccgcuc

SEQ ID NO: 2532714 - RNA, 19 nt, Artificial Sequence
  Description of Artificial Sequence: Synthetic oligonucleotide
aggagaccuucuuguccag

SEQ ID NO: 2532715 - RNA, 19 nt, Artificial Sequence
  Description of Artificial Sequence: Synthetic oligonucleotide
gcuacuugcagacacgcau

SEQ ID NO: 2532716 - RNA, 19 nt, Artificial Sequence
  Description of Artificial Sequence: Synthetic oligonucleotide
cauggcagagaggagaccu

SEQ ID NO: 2532717 - RNA, 19 nt, Artificial Sequence
  Description of Artificial Sequence: Synthetic oligonucleotide
cacgauucagaacgucaca

SEQ ID NO: 2532718 - RNA, 19 nt, Artificial Sequence
  Description of Artificial Sequence: Synthetic oligonucleotide
ugagaaugacucgcuccuc

SEQ ID NO: 2532719 - RNA, 19 nt, Artificial Sequence
  Description of Artificial Sequence: Synthetic oligonucleotide
guacucauccaaggggaca

SEQ ID NO: 2532720 - RNA, 19 nt, Artificial Sequence
  Description of Artificial Sequence: Synthetic oligonucleotide
ggcccucagauuugcacug

SEQ ID NO: 2532721 - RNA, 19 nt, Artificial Sequence
  Description of Artificial Sequence: Synthetic oligonucleotide
acugcgugauggagucccc

SEQ ID NO: 2532722 - RNA, 19 nt, Artificial Sequence
  Description of Artificial Sequence: Synthetic oligonucleotide
gcccaucugguauuguaac

SEQ ID NO: 2532723 - RNA, 19 nt, Artificial Sequence
  Description of Artificial Sequence: Synthetic oligonucleotide
acaagucggucagccagca

SEQ ID NO: 2532724 - RNA, 19 nt, Artificial Sequence
  Description of Artificial Sequence: Synthetic oligonucleotide
cugguauuguaaccugaaa

SEQ ID NO: 2532725 - RNA, 19 nt, Artificial Sequence
  Description of Artificial Sequence: Synthetic oligonucleotide
augccgcucccuuuacuaa

SEQ ID NO: 2532726 - RNA, 19 nt, Artificial Sequence
  Description of Artificial Sequence: Synthetic oligonucleotide
auucaccgacgauggaguu

SEQ ID NO: 2532727 - RNA, 19 nt, Artificial Sequence
  Description of Artificial Sequence: Synthetic oligonucleotide
ugacucgcuccuccaggau

SEQ ID NO: 2532728 - RNA, 19 nt, Artificial Sequence
  Description of Artificial Sequence: Synthetic oligonucleotide
gguggggugaugagaauga

SEQ ID NO: 2532729 - RNA, 19 nt, Artificial Sequence
  Description of Artificial Sequence: Synthetic oligonucleotide
cagagagcucccgcuggcg

SEQ ID NO: 2532730 - RNA, 19 nt, Artificial Sequence
  Description of Artificial Sequence: Synthetic oligonucleotide
cgacgauggaguucaggcg

SEQ ID NO: 2532731 - RNA, 19 nt, Artificial Sequence
  Description of Artificial Sequence: Synthetic oligonucleotide
gggguucucaucuuugagu

SEQ ID NO: 2532732 - RNA, 19 nt, Artificial Sequence
  Description of Artificial Sequence: Synthetic oligonucleotide
uucugacaagucggucagc

SEQ ID NO: 2532733 - RNA, 19 nt, Artificial Sequence
  Description of Artificial Sequence: Synthetic oligonucleotide
gacaugcugcuugggguuc

SEQ ID NO: 2532734 - RNA, 19 nt, Artificial Sequence
  Description of Artificial Sequence: Synthetic oligonucleotide
gauuugcacuguacucauc

SEQ ID NO: 2532735 - RNA, 19 nt, Artificial Sequence
  Description of Artificial Sequence: Synthetic oligonucleotide
ggcgucauuggcaccgaag

SEQ ID NO: 2532736 - RNA, 19 nt, Artificial Sequence
  Description of Artificial Sequence: Synthetic oligonucleotide
gguccacaggucaaggaca

SEQ ID NO: 2532737 - RNA, 19 nt, Artificial Sequence
  Description of Artificial Sequence: Synthetic oligonucleotide
gucggucagccagcaaugc

SEQ ID NO: 2532738 - RNA, 19 nt, Artificial Sequence
  Description of Artificial Sequence: Synthetic oligonucleotide
ggucagccagcaaugcgcc

SEQ ID NO: 2532739 - RNA, 19 nt, Artificial Sequence
  Description of Artificial Sequence: Synthetic oligonucleotide
guaacugcuacuggguuuu

SEQ ID NO: 2532740 - RNA, 19 nt, Artificial Sequence
  Description of Artificial Sequence: Synthetic oligonucleotide
cauauucaccgacgaugga

SEQ ID NO: 2532741 - RNA, 19 nt, Artificial Sequence
  Description of Artificial Sequence: Synthetic oligonucleotide
caccauggcccucagauuu

SEQ ID NO: 2532742 - RNA, 19 nt, Artificial Sequence
  Description of Artificial Sequence: Synthetic oligonucleotide
cauuagucccacagucucu

SEQ ID NO: 2532743 - RNA, 19 nt, Artificial Sequence
  Description of Artificial Sequence: Synthetic oligonucleotide
aagcaccacccgaggccac

SEQ ID NO: 2532744 - RNA, 19 nt, Artificial Sequence
  Description of Artificial Sequence: Synthetic oligonucleotide
cacccgaggccacagcaga

SEQ ID NO: 2532745 - RNA, 19 nt, Artificial Sequence
  Description of Artificial Sequence: Synthetic oligonucleotide
ccacaucguuccaguaagg

SEQ ID NO: 2532746 - RNA, 19 nt, Artificial Sequence
  Description of Artificial Sequence: Synthetic oligonucleotide
cagacacgcauuagcauau

SEQ ID NO: 2532747 - RNA, 19 nt, Artificial Sequence
  Description of Artificial Sequence: Synthetic oligonucleotide
accauggcccucagauuug

SEQ ID NO: 2532748 - RNA, 19 nt, Artificial Sequence
  Description of Artificial Sequence: Synthetic oligonucleotide
ggauaaucuuggcccaucu

SEQ ID NO: 2532749 - RNA, 19 nt, Artificial Sequence
  Description of Artificial Sequence: Synthetic oligonucleotide
caaugcgccccauccaccu

SEQ ID NO: 2532750 - RNA, 19 nt, Artificial Sequence
  Description of Artificial Sequence: Synthetic oligonucleotide
cacagaccucagguacugc

SEQ ID NO: 2532751 - RNA, 19 nt, Artificial Sequence
  Description of Artificial Sequence: Synthetic oligonucleotide
aggcugcuucgcccagcgg

SEQ ID NO: 2532752 - RNA, 19 nt, Artificial Sequence
  Description of Artificial Sequence: Synthetic oligonucleotide
gcagacuccgcucaggcuu

SEQ ID NO: 2532753 - RNA, 19 nt, Artificial Sequence
  Description of Artificial Sequence: Synthetic oligonucleotide
gcuggaaagaaaacugcgu

SEQ ID NO: 2532754 - RNA, 19 nt, Artificial Sequence
  Description of Artificial Sequence: Synthetic oligonucleotide
cucguuucccuuuggugau

SEQ ID NO: 2532755 - RNA, 19 nt, Artificial Sequence
  Description of Artificial Sequence: Synthetic oligonucleotide
cuacuugcagacacgcauu

SEQ ID NO: 2532756 - RNA, 19 nt, Artificial Sequence
  Description of Artificial Sequence: Synthetic oligonucleotide
cuuccacaucguuccagua

SEQ ID NO: 2532757 - RNA, 19 nt, Artificial Sequence
  Description of Artificial Sequence: Synthetic oligonucleotide
gcaccgaagaaaacuguaa

SEQ ID NO: 2532758 - RNA, 19 nt, Artificial Sequence
  Description of Artificial Sequence: Synthetic oligonucleotide
cagccuuucaggauacauu

SEQ ID NO: 2532759 - RNA, 19 nt, Artificial Sequence
  Description of Artificial Sequence: Synthetic oligonucleotide
uggcgucauuggcaccgaa

SEQ ID NO: 2532760 - RNA, 19 nt, Artificial Sequence
  Description of Artificial Sequence: Synthetic oligonucleotide
gucccacagucucuggcua

SEQ ID NO: 2532761 - RNA, 19 nt, Artificial Sequence
  Description of Artificial Sequence: Synthetic oligonucleotide
ccgucucccagcagacucc

SEQ ID NO: 2532762 - RNA, 19 nt, Artificial Sequence
  Description of Artificial Sequence: Synthetic oligonucleotide
guguggcgucauuggcacc

SEQ ID NO: 2532763 - RNA, 19 nt, Artificial Sequence
  Description of Artificial Sequence: Synthetic oligonucleotide
gacuccgcucaggcuuugc

SEQ ID NO: 2532764 - RNA, 19 nt, Artificial Sequence
  Description of Artificial Sequence: Synthetic oligonucleotide
ugcagccuuucaggauaca

SEQ ID NO: 2532765 - RNA, 19 nt, Artificial Sequence
  Description of Artificial Sequence: Synthetic oligonucleotide
agcaccacccgaggccaca

SEQ ID NO: 2532766 - RNA, 19 nt, Artificial Sequence
  Description of Artificial Sequence: Synthetic oligonucleotide
gcucccuuuacuaauuaau

SEQ ID NO: 2532767 - RNA, 19 nt, Artificial Sequence
  Description of Artificial Sequence: Synthetic oligonucleotide
ggcaccgaagaaaacugua

SEQ ID NO: 2532768 - RNA, 19 nt, Artificial Sequence
  Description of Artificial Sequence: Synthetic oligonucleotide
acgauggaguucaggcgau

SEQ ID NO: 2532769 - RNA, 19 nt, Artificial Sequence
  Description of Artificial Sequence: Synthetic oligonucleotide
ccaguaaggaagcagccau

SEQ ID NO: 2532770 - RNA, 19 nt, Artificial Sequence
  Description of Artificial Sequence: Synthetic oligonucleotide
ccacaggucaaggacauua

SEQ ID NO: 2532771 - RNA, 19 nt, Artificial Sequence
  Description of Artificial Sequence: Synthetic oligonucleotide
gcaaugcgccccauccacc

SEQ ID NO: 2532772 - RNA, 19 nt, Artificial Sequence
  Description of Artificial Sequence: Synthetic oligonucleotide
caccacccgaggccacagc

SEQ ID NO: 2532773 - RNA, 19 nt, Artificial Sequence
  Description of Artificial Sequence: Synthetic oligonucleotide
ccaucugguauuguaaccu

SEQ ID NO: 2532774 - RNA, 19 nt, Artificial Sequence
  Description of Artificial Sequence: Synthetic oligonucleotide
cuguaacugcuacuggguu

SEQ ID NO: 2532775 - RNA, 19 nt, Artificial Sequence
  Description of Artificial Sequence: Synthetic oligonucleotide
ggcccaucugguauuguaa

SEQ ID NO: 2532776 - RNA, 19 nt, Artificial Sequence
  Description of Artificial Sequence: Synthetic oligonucleotide
ucguuucccuuuggugaua

SEQ ID NO: 2532777 - RNA, 19 nt, Artificial Sequence
  Description of Artificial Sequence: Synthetic oligonucleotide
gaggauaaucuuggcccau

SEQ ID NO: 2532778 - RNA, 19 nt, Artificial Sequence
  Description of Artificial Sequence: Synthetic oligonucleotide
cugcgugauggagucccca

SEQ ID NO: 2532779 - RNA, 19 nt, Artificial Sequence
  Description of Artificial Sequence: Synthetic oligonucleotide
cgugauggaguccccaaaa

SEQ ID NO: 2532780 - RNA, 19 nt, Artificial Sequence
  Description of Artificial Sequence: Synthetic oligonucleotide
uccacaggucaaggacauu

SEQ ID NO: 2532781 - RNA, 19 nt, Artificial Sequence
  Description of Artificial Sequence: Synthetic oligonucleotide
agacuccgcucaggcuuug

SEQ ID NO: 2532782 - RNA, 19 nt, Artificial Sequence
  Description of Artificial Sequence: Synthetic oligonucleotide
gcgauuuaauuugcagccu

SEQ ID NO: 2532783 - RNA, 19 nt, Artificial Sequence
  Description of Artificial Sequence: Synthetic oligonucleotide
caccgacgauggaguucag

SEQ ID NO: 2532784 - RNA, 19 nt, Artificial Sequence
  Description of Artificial Sequence: Synthetic oligonucleotide
ggucuccgucucccagcag

SEQ ID NO: 2532785 - RNA, 19 nt, Artificial Sequence
  Description of Artificial Sequence: Synthetic oligonucleotide
caagucggucagccagcaa

SEQ ID NO: 2532786 - RNA, 19 nt, Artificial Sequence
  Description of Artificial Sequence: Synthetic oligonucleotide
gcagccuuucaggauacau

SEQ ID NO: 2532787 - RNA, 19 nt, Artificial Sequence
  Description of Artificial Sequence: Synthetic oligonucleotide
gcaccacccgaggccacag

SEQ ID NO: 2532788 - RNA, 19 nt, Artificial Sequence
  Description of Artificial Sequence: Synthetic oligonucleotide
ggaguucaggcgauuuaau

SEQ ID NO: 2532789 - RNA, 19 nt, Artificial Sequence
  Description of Artificial Sequence: Synthetic oligonucleotide
cuuugaguguggcgucauu

SEQ ID NO: 2532790 - RNA, 19 nt, Artificial Sequence
  Description of Artificial Sequence: Synthetic oligonucleotide
guggcgucauuggcaccga

SEQ ID NO: 2532791 - RNA, 19 nt, Artificial Sequence
  Description of Artificial Sequence: Synthetic oligonucleotide
cagacuccgcucaggcuuu

SEQ ID NO: 2532792 - RNA, 19 nt, Artificial Sequence
  Description of Artificial Sequence: Synthetic oligonucleotide
cgauuuaauuugcagccuu

SEQ ID NO: 2532793 - RNA, 19 nt, Artificial Sequence
  Description of Artificial Sequence: Synthetic oligonucleotide
cgcucccuuuacuaauuaa

SEQ ID NO: 2532794 - RNA, 19 nt, Artificial Sequence
  Description of Artificial Sequence: Synthetic oligonucleotide
cguuucccuuuggugauaa

SEQ ID NO: 2532795 - RNA, 19 nt, Artificial Sequence
  Description of Artificial Sequence: Synthetic oligonucleotide
cgauucagaacgucacauu

SEQ ID NO: 2532796 - RNA, 19 nt, Artificial Sequence
  Description of Artificial Sequence: Synthetic oligonucleotide
agccagcaaugcgccccau

SEQ ID NO: 2532797 - RNA, 19 nt, Artificial Sequence
  Description of Artificial Sequence: Synthetic oligonucleotide
cuccgucucccagcagacu

SEQ ID NO: 2532798 - RNA, 19 nt, Artificial Sequence
  Description of Artificial Sequence: Synthetic oligonucleotide
ccgcucccuuuacuaauua

SEQ ID NO: 2532799 - RNA, 19 nt, Artificial Sequence
  Description of Artificial Sequence: Synthetic oligonucleotide
gccgcucccuuuacuaauu

SEQ ID NO: 2532800 - RNA, 19 nt, Artificial Sequence
  Description of Artificial Sequence: Synthetic oligonucleotide
cucccgcuggcggcccgcu

SEQ ID NO: 2532801 - RNA, 19 nt, Artificial Sequence
  Description of Artificial Sequence: Synthetic oligonucleotide
ccccauccaccuggcugga

SEQ ID NO: 2532802 - RNA, 19 nt, Artificial Sequence
  Description of Artificial Sequence: Synthetic oligonucleotide
gcgccccauccaccuggcu

SEQ ID NO: 2532803 - RNA, 19 nt, Artificial Sequence
  Description of Artificial Sequence: Synthetic oligonucleotide
ccaaggggacaugcugcuu

SEQ ID NO: 2532804 - RNA, 19 nt, Artificial Sequence
  Description of Artificial Sequence: Synthetic oligonucleotide
aacaccucaagagaaaucc

SEQ ID NO: 2532805 - RNA, 19 nt, Artificial Sequence
  Description of Artificial Sequence: Synthetic oligonucleotide
uauguuaaaaccagcaaag

SEQ ID NO: 2532806 - RNA, 19 nt, Artificial Sequence
  Description of Artificial Sequence: Synthetic oligonucleotide
uaugauuccaaacagauuu

SEQ ID NO: 2532807 - RNA, 19 nt, Artificial Sequence
  Description of Artificial Sequence: Synthetic oligonucleotide
uuucuuuuauguuaaaacc

SEQ ID NO: 2532808 - RNA, 19 nt, Artificial Sequence
  Description of Artificial Sequence: Synthetic oligonucleotide
uguaauggaauccccacgg

SEQ ID NO: 2532809 - RNA, 19 nt, Artificial Sequence
  Description of Artificial Sequence: Synthetic oligonucleotide
uuuuauguuaaaaccagca

SEQ ID NO: 2532810 - RNA, 19 nt, Artificial Sequence
  Description of Artificial Sequence: Synthetic oligonucleotide
uaucaguacagcaaugccg

SEQ ID NO: 2532811 - RNA, 19 nt, Artificial Sequence
  Description of Artificial Sequence: Synthetic oligonucleotide
agaagaacaaccaugguac

SEQ ID NO: 2532812 - RNA, 19 nt, Artificial Sequence
  Description of Artificial Sequence: Synthetic oligonucleotide
uuuguuaccacuuucccca

SEQ ID NO: 2532813 - RNA, 19 nt, Artificial Sequence
  Description of Artificial Sequence: Synthetic oligonucleotide
uucuuuuauguuaaaacca

SEQ ID NO: 2532814 - RNA, 19 nt, Artificial Sequence
  Description of Artificial Sequence: Synthetic oligonucleotide
uuauguuaaaaccagcaaa

SEQ ID NO: 2532815 - RNA, 19 nt, Artificial Sequence
  Description of Artificial Sequence: Synthetic oligonucleotide
accgucaacacauccaucc

SEQ ID NO: 2532816 - RNA, 19 nt, Artificial Sequence
  Description of Artificial Sequence: Synthetic oligonucleotide
uguuaaaaccagcaaagca

SEQ ID NO: 2532817 - RNA, 19 nt, Artificial Sequence
  Description of Artificial Sequence: Synthetic oligonucleotide
aguacagcaaugccgaggg

SEQ ID NO: 2532818 - RNA, 19 nt, Artificial Sequence
  Description of Artificial Sequence: Synthetic oligonucleotide
aauagaacaggauuaugau

SEQ ID NO: 2532819 - RNA, 19 nt, Artificial Sequence
  Description of Artificial Sequence: Synthetic oligonucleotide
acagauuuccuccaggaag

SEQ ID NO: 2532820 - RNA, 19 nt, Artificial Sequence
  Description of Artificial Sequence: Synthetic oligonucleotide
aggauuaugauuccaaaca

SEQ ID NO: 2532821 - RNA, 19 nt, Artificial Sequence
  Description of Artificial Sequence: Synthetic oligonucleotide
uucauguucaaauuucuga

SEQ ID NO: 2532822 - RNA, 19 nt, Artificial Sequence
  Description of Artificial Sequence: Synthetic oligonucleotide
cacagaagaacaaccaugg

SEQ ID NO: 2532823 - RNA, 19 nt, Artificial Sequence
  Description of Artificial Sequence: Synthetic oligonucleotide
agauucaugacuuucuccu

SEQ ID NO: 2532824 - RNA, 19 nt, Artificial Sequence
  Description of Artificial Sequence: Synthetic oligonucleotide
aggaaaguagucaaaauuc

SEQ ID NO: 2532825 - RNA, 19 nt, Artificial Sequence
  Description of Artificial Sequence: Synthetic oligonucleotide
aauucguaucaguacagca

SEQ ID NO: 2532826 - RNA, 19 nt, Artificial Sequence
  Description of Artificial Sequence: Synthetic oligonucleotide
aaaaguuugccuccggcga

SEQ ID NO: 2532827 - RNA, 19 nt, Artificial Sequence
  Description of Artificial Sequence: Synthetic oligonucleotide
aaauaaagaucuuuucuuu

SEQ ID NO: 2532828 - RNA, 19 nt, Artificial Sequence
  Description of Artificial Sequence: Synthetic oligonucleotide
agagccacagacccgaugg

SEQ ID NO: 2532829 - RNA, 19 nt, Artificial Sequence
  Description of Artificial Sequence: Synthetic oligonucleotide
ucaaaauucguaucaguac

SEQ ID NO: 2532830 - RNA, 19 nt, Artificial Sequence
  Description of Artificial Sequence: Synthetic oligonucleotide
aaauucguaucaguacagc

SEQ ID NO: 2532831 - RNA, 19 nt, Artificial Sequence
  Description of Artificial Sequence: Synthetic oligonucleotide
aaauccagcgagcagcaug

SEQ ID NO: 2532832 - RNA, 19 nt, Artificial Sequence
  Description of Artificial Sequence: Synthetic oligonucleotide
aauccagcgagcagcaugc

SEQ ID NO: 2532833 - RNA, 19 nt, Artificial Sequence
  Description of Artificial Sequence: Synthetic oligonucleotide
uucugaagaagucugggac

SEQ ID NO: 2532834 - RNA, 19 nt, Artificial Sequence
  Description of Artificial Sequence: Synthetic oligonucleotide
uuuauguuaaaaccagcaa

SEQ ID NO: 2532835 - RNA, 19 nt, Artificial Sequence
  Description of Artificial Sequence: Synthetic oligonucleotide
aaguagucaaaauucguau

SEQ ID NO: 2532836 - RNA, 19 nt, Artificial Sequence
  Description of Artificial Sequence: Synthetic oligonucleotide
aguagucaaaauucguauc

SEQ ID NO: 2532837 - RNA, 19 nt, Artificial Sequence
  Description of Artificial Sequence: Synthetic oligonucleotide
aucuacaccuuugagauuc

SEQ ID NO: 2532838 - RNA, 19 nt, Artificial Sequence
  Description of Artificial Sequence: Synthetic oligonucleotide
agaagucucuccuugaacu

SEQ ID NO: 2532839 - RNA, 19 nt, Artificial Sequence
  Description of Artificial Sequence: Synthetic oligonucleotide
aaauuucugaagaagucug

SEQ ID NO: 2532840 - RNA, 19 nt, Artificial Sequence
  Description of Artificial Sequence: Synthetic oligonucleotide
aaaguuugccuccggcgac

SEQ ID NO: 2532841 - RNA, 19 nt, Artificial Sequence
  Description of Artificial Sequence: Synthetic oligonucleotide
uuccaaacagauuuccucc

SEQ ID NO: 2532842 - RNA, 19 nt, Artificial Sequence
  Description of Artificial Sequence: Synthetic oligonucleotide
ucauguucaaauuucugaa

SEQ ID NO: 2532843 - RNA, 19 nt, Artificial Sequence
  Description of Artificial Sequence: Synthetic oligonucleotide
caugguaccauuuguuacc

SEQ ID NO: 2532844 - RNA, 19 nt, Artificial Sequence
  Description of Artificial Sequence: Synthetic oligonucleotide
auguucaaauuucugaaga

SEQ ID NO: 2532845 - RNA, 19 nt, Artificial Sequence
  Description of Artificial Sequence: Synthetic oligonucleotide
caauagaacaggauuauga

SEQ ID NO: 2532846 - RNA, 19 nt, Artificial Sequence
  Description of Artificial Sequence: Synthetic oligonucleotide
gacagcacaauagaacagg

SEQ ID NO: 2532847 - RNA, 19 nt, Artificial Sequence
  Description of Artificial Sequence: Synthetic oligonucleotide
agaacaggauuaugauucc

SEQ ID NO: 2532848 - RNA, 19 nt, Artificial Sequence
  Description of Artificial Sequence: Synthetic oligonucleotide
uguaacugaccaaaccaca

SEQ ID NO: 2532849 - RNA, 19 nt, Artificial Sequence
  Description of Artificial Sequence: Synthetic oligonucleotide
cauuucauguucaaauuuc

SEQ ID NO: 2532850 - RNA, 19 nt, Artificial Sequence
  Description of Artificial Sequence: Synthetic oligonucleotide
uugaacucccuucauuuca

SEQ ID NO: 2532851 - RNA, 19 nt, Artificial Sequence
  Description of Artificial Sequence: Synthetic oligonucleotide
agcacaauagaacaggauu

SEQ ID NO: 2532852 - RNA, 19 nt, Artificial Sequence
  Description of Artificial Sequence: Synthetic oligonucleotide
aaugccaccgucaacacau

SEQ ID NO: 2532853 - RNA, 19 nt, Artificial Sequence
  Description of Artificial Sequence: Synthetic oligonucleotide
aagucugggacccagcaaa

SEQ ID NO: 2532854 - RNA, 19 nt, Artificial Sequence
  Description of Artificial Sequence: Synthetic oligonucleotide
uuucauguucaaauuucug

SEQ ID NO: 2532855 - RNA, 19 nt, Artificial Sequence
  Description of Artificial Sequence: Synthetic oligonucleotide
guuaccacuuuccccagcg

SEQ ID NO: 2532856 - RNA, 19 nt, Artificial Sequence
  Description of Artificial Sequence: Synthetic oligonucleotide
aauuucugaagaagucugg

SEQ ID NO: 2532857 - RNA, 19 nt, Artificial Sequence
  Description of Artificial Sequence: Synthetic oligonucleotide
ucuguugccaauuccugug

SEQ ID NO: 2532858 - RNA, 19 nt, Artificial Sequence
  Description of Artificial Sequence: Synthetic oligonucleotide
aaaauucguaucaguacag

SEQ ID NO: 2532859 - RNA, 19 nt, Artificial Sequence
  Description of Artificial Sequence: Synthetic oligonucleotide
guagucaaaauucguauca

SEQ ID NO: 2532860 - RNA, 19 nt, Artificial Sequence
  Description of Artificial Sequence: Synthetic oligonucleotide
aauuggugcugugaugagg

SEQ ID NO: 2532861 - RNA, 19 nt, Artificial Sequence
  Description of Artificial Sequence: Synthetic oligonucleotide
accuuugagauucaugacu

SEQ ID NO: 2532862 - RNA, 19 nt, Artificial Sequence
  Description of Artificial Sequence: Synthetic oligonucleotide
cuuuuauguuaaaaccagc

SEQ ID NO: 2532863 - RNA, 19 nt, Artificial Sequence
  Description of Artificial Sequence: Synthetic oligonucleotide
uugagauucaugacuuucu

SEQ ID NO: 2532864 - RNA, 19 nt, Artificial Sequence
  Description of Artificial Sequence: Synthetic oligonucleotide
agcaaagcacaccaucagg

SEQ ID NO: 2532865 - RNA, 19 nt, Artificial Sequence
  Description of Artificial Sequence: Synthetic oligonucleotide
ucugcaagugacuggauuc

SEQ ID NO: 2532866 - RNA, 19 nt, Artificial Sequence
  Description of Artificial Sequence: Synthetic oligonucleotide
auguuaaaaccagcaaagc

SEQ ID NO: 2532867 - RNA, 19 nt, Artificial Sequence
  Description of Artificial Sequence: Synthetic oligonucleotide
caaaauucguaucaguaca

SEQ ID NO: 2532868 - RNA, 19 nt, Artificial Sequence
  Description of Artificial Sequence: Synthetic oligonucleotide
auuaugauuccaaacagau

SEQ ID NO: 2532869 - RNA, 19 nt, Artificial Sequence
  Description of Artificial Sequence: Synthetic oligonucleotide
aaucaguaggcuuccaauu

SEQ ID NO: 2532870 - RNA, 19 nt, Artificial Sequence
  Description of Artificial Sequence: Synthetic oligonucleotide
gguugcaacaccucaagag

SEQ ID NO: 2532871 - RNA, 19 nt, Artificial Sequence
  Description of Artificial Sequence: Synthetic oligonucleotide
ucuucuguuggcucauucc

SEQ ID NO: 2532872 - RNA, 19 nt, Artificial Sequence
  Description of Artificial Sequence: Synthetic oligonucleotide
accauuuguuaccacuuuc

SEQ ID NO: 2532873 - RNA, 19 nt, Artificial Sequence
  Description of Artificial Sequence: Synthetic oligonucleotide
aaagcacaccaucaggaaa

SEQ ID NO: 2532874 - RNA, 19 nt, Artificial Sequence
  Description of Artificial Sequence: Synthetic oligonucleotide
uaauggaauccccacggcu

SEQ ID NO: 2532875 - RNA, 19 nt, Artificial Sequence
  Description of Artificial Sequence: Synthetic oligonucleotide
uucguaucaguacagcaau

SEQ ID NO: 2532876 - RNA, 19 nt, Artificial Sequence
  Description of Artificial Sequence: Synthetic oligonucleotide
uucuguaauggaaucccca

SEQ ID NO: 2532877 - RNA, 19 nt, Artificial Sequence
  Description of Artificial Sequence: Synthetic oligonucleotide
aaaguagucaaaauucgua

SEQ ID NO: 2532878 - RNA, 19 nt, Artificial Sequence
  Description of Artificial Sequence: Synthetic oligonucleotide
aucaguaggcuuccaauug

SEQ ID NO: 2532879 - RNA, 19 nt, Artificial Sequence
  Description of Artificial Sequence: Synthetic oligonucleotide
cauguucaaauuucugaag

SEQ ID NO: 2532880 - RNA, 19 nt, Artificial Sequence
  Description of Artificial Sequence: Synthetic oligonucleotide
gagauucaugacuuucucc

SEQ ID NO: 2532881 - RNA, 19 nt, Artificial Sequence
  Description of Artificial Sequence: Synthetic oligonucleotide
gaaauaaagaucuuuucuu

SEQ ID NO: 2532882 - RNA, 19 nt, Artificial Sequence
  Description of Artificial Sequence: Synthetic oligonucleotide
uguuggcucauucccaucu

SEQ ID NO: 2532883 - RNA, 19 nt, Artificial Sequence
  Description of Artificial Sequence: Synthetic oligonucleotide
uaacugaccaaaccacagc

SEQ ID NO: 2532884 - RNA, 19 nt, Artificial Sequence
  Description of Artificial Sequence: Synthetic oligonucleotide
aacucccuucauuucaugu

SEQ ID NO: 2532885 - RNA, 19 nt, Artificial Sequence
  Description of Artificial Sequence: Synthetic oligonucleotide
augcuggcaacuuaaugag

SEQ ID NO: 2532886 - RNA, 19 nt, Artificial Sequence
  Description of Artificial Sequence: Synthetic oligonucleotide
ucaugcuucuguaauggaa

SEQ ID NO: 2532887 - RNA, 19 nt, Artificial Sequence
  Description of Artificial Sequence: Synthetic oligonucleotide
acaaccaugguaccauuug

SEQ ID NO: 2532888 - RNA, 19 nt, Artificial Sequence
  Description of Artificial Sequence: Synthetic oligonucleotide
uguucaaauuucugaagaa

SEQ ID NO: 2532889 - RNA, 19 nt, Artificial Sequence
  Description of Artificial Sequence: Synthetic oligonucleotide
ucuccuugaacucccuuca

SEQ ID NO: 2532890 - RNA, 19 nt, Artificial Sequence
  Description of Artificial Sequence: Synthetic oligonucleotide
auaaagaucuuuucuuuua

SEQ ID NO: 2532891 - RNA, 19 nt, Artificial Sequence
  Description of Artificial Sequence: Synthetic oligonucleotide
ggauuaugauuccaaacag

SEQ ID NO: 2532892 - RNA, 19 nt, Artificial Sequence
  Description of Artificial Sequence: Synthetic oligonucleotide
cagaauucgccucacacuc

SEQ ID NO: 2532893 - RNA, 19 nt, Artificial Sequence
  Description of Artificial Sequence: Synthetic oligonucleotide
cauuuguuaccacuuuccc

SEQ ID NO: 2532894 - RNA, 19 nt, Artificial Sequence
  Description of Artificial Sequence: Synthetic oligonucleotide
uaggcuuccaauuggugcu

SEQ ID NO: 2532895 - RNA, 19 nt, Artificial Sequence
  Description of Artificial Sequence: Synthetic oligonucleotide
ucuccaugggaucgggccg

SEQ ID NO: 2532896 - RNA, 19 nt, Artificial Sequence
  Description of Artificial Sequence: Synthetic oligonucleotide
uggagggcaagccagaauu

SEQ ID NO: 2532897 - RNA, 19 nt, Artificial Sequence
  Description of Artificial Sequence: Synthetic oligonucleotide
gacccagcaaaccaaucag

SEQ ID NO: 2532898 - RNA, 19 nt, Artificial Sequence
  Description of Artificial Sequence: Synthetic oligonucleotide
uccggcgacagcacaauag

SEQ ID NO: 2532899 - RNA, 19 nt, Artificial Sequence
  Description of Artificial Sequence: Synthetic oligonucleotide
ucugaacgugugcagaagu

SEQ ID NO: 2532900 - RNA, 19 nt, Artificial Sequence
  Description of Artificial Sequence: Synthetic oligonucleotide
uuugccuccggcgacagca

SEQ ID NO: 2532901 - RNA, 19 nt, Artificial Sequence
  Description of Artificial Sequence: Synthetic oligonucleotide
uacaccuuugagauucaug

SEQ ID NO: 2532902 - RNA, 19 nt, Artificial Sequence
  Description of Artificial Sequence: Synthetic oligonucleotide
cauguggagggcaagccag

SEQ ID NO: 2532903 - RNA, 19 nt, Artificial Sequence
  Description of Artificial Sequence: Synthetic oligonucleotide
uuugagauucaugacuuuc

SEQ ID NO: 2532904 - RNA, 19 nt, Artificial Sequence
  Description of Artificial Sequence: Synthetic oligonucleotide
cuguaacugaccaaaccac

SEQ ID NO: 2532905 - RNA, 19 nt, Artificial Sequence
  Description of Artificial Sequence: Synthetic oligonucleotide
caggauuaugauuccaaac

SEQ ID NO: 2532906 - RNA, 19 nt, Artificial Sequence
  Description of Artificial Sequence: Synthetic oligonucleotide
caaacagauuuccuccagg

SEQ ID NO: 2532907 - RNA, 19 nt, Artificial Sequence
  Description of Artificial Sequence: Synthetic oligonucleotide
uccuccaggaagacacucg

SEQ ID NO: 2532908 - RNA, 19 nt, Artificial Sequence
  Description of Artificial Sequence: Synthetic oligonucleotide
uuucuagcugcuucucucc

SEQ ID NO: 2532909 - RNA, 19 nt, Artificial Sequence
  Description of Artificial Sequence: Synthetic oligonucleotide
ugauuccaaacagauuucc

SEQ ID NO: 2532910 - RNA, 19 nt, Artificial Sequence
  Description of Artificial Sequence: Synthetic oligonucleotide
accacuguucagcagguug

SEQ ID NO: 2532911 - RNA, 19 nt, Artificial Sequence
  Description of Artificial Sequence: Synthetic oligonucleotide
ggugcugugaugaggaugg

SEQ ID NO: 2532912 - RNA, 19 nt, Artificial Sequence
  Description of Artificial Sequence: Synthetic oligonucleotide
aacacauccaucccauauu

SEQ ID NO: 2532913 - RNA, 19 nt, Artificial Sequence
  Description of Artificial Sequence: Synthetic oligonucleotide
ugagauucaugacuuucuc

SEQ ID NO: 2532914 - RNA, 19 nt, Artificial Sequence
  Description of Artificial Sequence: Synthetic oligonucleotide
caaaccacagcccacagaa

SEQ ID NO: 2532915 - RNA, 19 nt, Artificial Sequence
  Description of Artificial Sequence: Synthetic oligonucleotide
cucuccaugggaucgggcc

SEQ ID NO: 2532916 - RNA, 19 nt, Artificial Sequence
  Description of Artificial Sequence: Synthetic oligonucleotide
guaucaguacagcaaugcc

SEQ ID NO: 2532917 - RNA, 19 nt, Artificial Sequence
  Description of Artificial Sequence: Synthetic oligonucleotide
agucaaaauucguaucagu

SEQ ID NO: 2532918 - RNA, 19 nt, Artificial Sequence
  Description of Artificial Sequence: Synthetic oligonucleotide
cuguaauggaauccccacg

SEQ ID NO: 2532919 - RNA, 19 nt, Artificial Sequence
  Description of Artificial Sequence: Synthetic oligonucleotide
accucaagagaaauccagc

SEQ ID NO: 2532920 - RNA, 19 nt, Artificial Sequence
  Description of Artificial Sequence: Synthetic oligonucleotide
uugcaacaccucaagagaa

SEQ ID NO: 2532921 - RNA, 19 nt, Artificial Sequence
  Description of Artificial Sequence: Synthetic oligonucleotide
gaauucgccucacacucug

SEQ ID NO: 2532922 - RNA, 19 nt, Artificial Sequence
  Description of Artificial Sequence: Synthetic oligonucleotide
guaacugaccaaaccacag

SEQ ID NO: 2532923 - RNA, 19 nt, Artificial Sequence
  Description of Artificial Sequence: Synthetic oligonucleotide
aacagauuuccuccaggaa

SEQ ID NO: 2532924 - RNA, 19 nt, Artificial Sequence
  Description of Artificial Sequence: Synthetic oligonucleotide
gacuguggccuuuggaagc

SEQ ID NO: 2532925 - RNA, 19 nt, Artificial Sequence
  Description of Artificial Sequence: Synthetic oligonucleotide
auagaacaggauuaugauu

SEQ ID NO: 2532926 - RNA, 19 nt, Artificial Sequence
  Description of Artificial Sequence: Synthetic oligonucleotide
augggaucgggccgugucc

SEQ ID NO: 2532927 - RNA, 19 nt, Artificial Sequence
  Description of Artificial Sequence: Synthetic oligonucleotide
cagcaugccaagaagagga

SEQ ID NO: 2532928 - RNA, 19 nt, Artificial Sequence
  Description of Artificial Sequence: Synthetic oligonucleotide
caggaagacacucggggcc

SEQ ID NO: 2532929 - RNA, 19 nt, Artificial Sequence
  Description of Artificial Sequence: Synthetic oligonucleotide
aucaguacagcaaugccga

SEQ ID NO: 2532930 - RNA, 19 nt, Artificial Sequence
  Description of Artificial Sequence: Synthetic oligonucleotide
gaagaacaaccaugguacc

SEQ ID NO: 2532931 - RNA, 19 nt, Artificial Sequence
  Description of Artificial Sequence: Synthetic oligonucleotide
augcuucuguaauggaauc

SEQ ID NO: 2532932 - RNA, 19 nt, Artificial Sequence
  Description of Artificial Sequence: Synthetic oligonucleotide
uuccaauuggugcugugau

SEQ ID NO: 2532933 - RNA, 19 nt, Artificial Sequence
  Description of Artificial Sequence: Synthetic oligonucleotide
ugaacgugugcagaagucu

SEQ ID NO: 2532934 - RNA, 19 nt, Artificial Sequence
  Description of Artificial Sequence: Synthetic oligonucleotide
uccaaacagauuuccucca

SEQ ID NO: 2532935 - RNA, 19 nt, Artificial Sequence
  Description of Artificial Sequence: Synthetic oligonucleotide
aacaggauuaugauuccaa

SEQ ID NO: 2532936 - RNA, 19 nt, Artificial Sequence
  Description of Artificial Sequence: Synthetic oligonucleotide
gagggcaagccagaauucg

SEQ ID NO: 2532937 - RNA, 19 nt, Artificial Sequence
  Description of Artificial Sequence: Synthetic oligonucleotide
uguugccaauuccuguggc

SEQ ID NO: 2532938 - RNA, 19 nt, Artificial Sequence
  Description of Artificial Sequence: Synthetic oligonucleotide
ucaggaaaguagucaaaau

SEQ ID NO: 2532939 - RNA, 19 nt, Artificial Sequence
  Description of Artificial Sequence: Synthetic oligonucleotide
ccucaagagaaauccagcg

SEQ ID NO: 2532940 - RNA, 19 nt, Artificial Sequence
  Description of Artificial Sequence: Synthetic oligonucleotide
uuaugauuccaaacagauu

SEQ ID NO: 2532941 - RNA, 19 nt, Artificial Sequence
  Description of Artificial Sequence: Synthetic oligonucleotide
cuucuguaauggaaucccc

SEQ ID NO: 2532942 - RNA, 19 nt, Artificial Sequence
  Description of Artificial Sequence: Synthetic oligonucleotide
auggaauccccacggcuuc

SEQ ID NO: 2532943 - RNA, 19 nt, Artificial Sequence
  Description of Artificial Sequence: Synthetic oligonucleotide
aauccccacggcuuccucu

SEQ ID NO: 2532944 - RNA, 19 nt, Artificial Sequence
  Description of Artificial Sequence: Synthetic oligonucleotide
aauggaauccccacggcuu

SEQ ID NO: 2532945 - RNA, 19 nt, Artificial Sequence
  Description of Artificial Sequence: Synthetic oligonucleotide
aggguugcaacaccucaag

SEQ ID NO: 2532946 - RNA, 19 nt, Artificial Sequence
  Description of Artificial Sequence: Synthetic oligonucleotide
uucccaucuacaccuuuga

SEQ ID NO: 2532947 - RNA, 19 nt, Artificial Sequence
  Description of Artificial Sequence: Synthetic oligonucleotide
gaagaagucugggacccag

SEQ ID NO: 2532948 - RNA, 19 nt, Artificial Sequence
  Description of Artificial Sequence: Synthetic oligonucleotide
accacuuuccccagcgagc

SEQ ID NO: 2532949 - RNA, 19 nt, Artificial Sequence
  Description of Artificial Sequence: Synthetic oligonucleotide
acuguggccuuuggaagcc

SEQ ID NO: 2532950 - RNA, 19 nt, Artificial Sequence
  Description of Artificial Sequence: Synthetic oligonucleotide
cuggcaacuuaaugagucc

SEQ ID NO: 2532951 - RNA, 19 nt, Artificial Sequence
  Description of Artificial Sequence: Synthetic oligonucleotide
cagaagaacaaccauggua

SEQ ID NO: 2532952 - RNA, 19 nt, Artificial Sequence
  Description of Artificial Sequence: Synthetic oligonucleotide
uccaauuggugcugugaug

SEQ ID NO: 2532953 - RNA, 19 nt, Artificial Sequence
  Description of Artificial Sequence: Synthetic oligonucleotide
gaagucucuccuugaacuc

SEQ ID NO: 2532954 - RNA, 19 nt, Artificial Sequence
  Description of Artificial Sequence: Synthetic oligonucleotide
acacucugcaagugacugg

SEQ ID NO: 2532955 - RNA, 19 nt, Artificial Sequence
  Description of Artificial Sequence: Synthetic oligonucleotide
cagauuuccuccaggaaga

SEQ ID NO: 2532956 - RNA, 19 nt, Artificial Sequence
  Description of Artificial Sequence: Synthetic oligonucleotide
cucauucccaucuacaccu

SEQ ID NO: 2532957 - RNA, 19 nt, Artificial Sequence
  Description of Artificial Sequence: Synthetic oligonucleotide
cagcgagccauguggaggg

SEQ ID NO: 2532958 - RNA, 19 nt, Artificial Sequence
  Description of Artificial Sequence: Synthetic oligonucleotide
ucccaucuacaccuuugag

SEQ ID NO: 2532959 - RNA, 19 nt, Artificial Sequence
  Description of Artificial Sequence: Synthetic oligonucleotide
aucaggaaaguagucaaaa

SEQ ID NO: 2532960 - RNA, 19 nt, Artificial Sequence
  Description of Artificial Sequence: Synthetic oligonucleotide
agaacaaccaugguaccau

SEQ ID NO: 2532961 - RNA, 19 nt, Artificial Sequence
  Description of Artificial Sequence: Synthetic oligonucleotide
uguggccuuuggaagccag

SEQ ID NO: 2532962 - RNA, 19 nt, Artificial Sequence
  Description of Artificial Sequence: Synthetic oligonucleotide
agucucuccuugaacuccc

SEQ ID NO: 2532963 - RNA, 19 nt, Artificial Sequence
  Description of Artificial Sequence: Synthetic oligonucleotide
gauucaugacuuucuccuc

SEQ ID NO: 2532964 - RNA, 19 nt, Artificial Sequence
  Description of Artificial Sequence: Synthetic oligonucleotide
ugccaagaagaggaggcag

SEQ ID NO: 2532965 - RNA, 19 nt, Artificial Sequence
  Description of Artificial Sequence: Synthetic oligonucleotide
gucaaaauucguaucagua

SEQ ID NO: 2532966 - RNA, 19 nt, Artificial Sequence
  Description of Artificial Sequence: Synthetic oligonucleotide
ucguaucaguacagcaaug

SEQ ID NO: 2532967 - RNA, 19 nt, Artificial Sequence
  Description of Artificial Sequence: Synthetic oligonucleotide
auucguaucaguacagcaa

SEQ ID NO: 2532968 - RNA, 19 nt, Artificial Sequence
  Description of Artificial Sequence: Synthetic oligonucleotide
ucuguuggcucauucccau

SEQ ID NO: 2532969 - RNA, 19 nt, Artificial Sequence
  Description of Artificial Sequence: Synthetic oligonucleotide
aauucgccucacacucugc

SEQ ID NO: 2532970 - RNA, 19 nt, Artificial Sequence
  Description of Artificial Sequence: Synthetic oligonucleotide
uggcaacuuaaugagucca

SEQ ID NO: 2532971 - RNA, 19 nt, Artificial Sequence
  Description of Artificial Sequence: Synthetic oligonucleotide
gaucgggccguguccagag

SEQ ID NO: 2532972 - RNA, 19 nt, Artificial Sequence
  Description of Artificial Sequence: Synthetic oligonucleotide
acacauccaucccauauuu

SEQ ID NO: 2532973 - RNA, 19 nt, Artificial Sequence
  Description of Artificial Sequence: Synthetic oligonucleotide
cuugaacucccuucauuuc

SEQ ID NO: 2532974 - RNA, 19 nt, Artificial Sequence
  Description of Artificial Sequence: Synthetic oligonucleotide
auucgccucacacucugca

SEQ ID NO: 2532975 - RNA, 19 nt, Artificial Sequence
  Description of Artificial Sequence: Synthetic oligonucleotide
gguugcugucuucuguugg

SEQ ID NO: 2532976 - RNA, 19 nt, Artificial Sequence
  Description of Artificial Sequence: Synthetic oligonucleotide
cuagcugcuucucuccaug

SEQ ID NO: 2532977 - RNA, 19 nt, Artificial Sequence
  Description of Artificial Sequence: Synthetic oligonucleotide
agggcaagccagaauucgc

SEQ ID NO: 2532978 - RNA, 19 nt, Artificial Sequence
  Description of Artificial Sequence: Synthetic oligonucleotide
acaauagaacaggauuaug

SEQ ID NO: 2532979 - RNA, 19 nt, Artificial Sequence
  Description of Artificial Sequence: Synthetic oligonucleotide
guaauggaauccccacggc

SEQ ID NO: 2532980 - RNA, 19 nt, Artificial Sequence
  Description of Artificial Sequence: Synthetic oligonucleotide
accaugguaccauuuguua

SEQ ID NO: 2532981 - RNA, 19 nt, Artificial Sequence
  Description of Artificial Sequence: Synthetic oligonucleotide
caguacagcaaugccgagg

SEQ ID NO: 2532982 - RNA, 19 nt, Artificial Sequence
  Description of Artificial Sequence: Synthetic oligonucleotide
cuguugccaauuccugugg

SEQ ID NO: 2532983 - RNA, 19 nt, Artificial Sequence
  Description of Artificial Sequence: Synthetic oligonucleotide
cucaagagaaauccagcga

SEQ ID NO: 2532984 - RNA, 19 nt, Artificial Sequence
  Description of Artificial Sequence: Synthetic oligonucleotide
ugcagaagucucuccuuga

SEQ ID NO: 2532985 - RNA, 19 nt, Artificial Sequence
  Description of Artificial Sequence: Synthetic oligonucleotide
gacacucggggccuguaac

SEQ ID NO: 2532986 - RNA, 19 nt, Artificial Sequence
  Description of Artificial Sequence: Synthetic oligonucleotide
cacacucugcaagugacug

SEQ ID NO: 2532987 - RNA, 19 nt, Artificial Sequence
  Description of Artificial Sequence: Synthetic oligonucleotide
agccauguggagggcaagc

SEQ ID NO: 2532988 - RNA, 19 nt, Artificial Sequence
  Description of Artificial Sequence: Synthetic oligonucleotide
gcgacagcacaauagaaca

SEQ ID NO: 2532989 - RNA, 19 nt, Artificial Sequence
  Description of Artificial Sequence: Synthetic oligonucleotide
uguucagcagguugcuguc

SEQ ID NO: 2532990 - RNA, 19 nt, Artificial Sequence
  Description of Artificial Sequence: Synthetic oligonucleotide
gugcagaagucucuccuug

SEQ ID NO: 2532991 - RNA, 19 nt, Artificial Sequence
  Description of Artificial Sequence: Synthetic oligonucleotide
acaccaucaggaaaguagu

SEQ ID NO: 2532992 - RNA, 19 nt, Artificial Sequence
  Description of Artificial Sequence: Synthetic oligonucleotide
caagaagaggaggcagugg

SEQ ID NO: 2532993 - RNA, 19 nt, Artificial Sequence
  Description of Artificial Sequence: Synthetic oligonucleotide
uguuaccacuuuccccagc

SEQ ID NO: 2532994 - RNA, 19 nt, Artificial Sequence
  Description of Artificial Sequence: Synthetic oligonucleotide
gcuucuguaauggaauccc

SEQ ID NO: 2532995 - RNA, 19 nt, Artificial Sequence
  Description of Artificial Sequence: Synthetic oligonucleotide
ugaccaaaccacagcccac

SEQ ID NO: 2532996 - RNA, 19 nt, Artificial Sequence
  Description of Artificial Sequence: Synthetic oligonucleotide
gaaaguagucaaaauucgu

SEQ ID NO: 2532997 - RNA, 19 nt, Artificial Sequence
  Description of Artificial Sequence: Synthetic oligonucleotide
ugccaccgucaacacaucc

SEQ ID NO: 2532998 - RNA, 19 nt, Artificial Sequence
  Description of Artificial Sequence: Synthetic oligonucleotide
cagaagucucuccuugaac

SEQ ID NO: 2532999 - RNA, 19 nt, Artificial Sequence
  Description of Artificial Sequence: Synthetic oligonucleotide
gaacgugugcagaagucuc

SEQ ID NO: 2533000 - RNA, 19 nt, Artificial Sequence
  Description of Artificial Sequence: Synthetic oligonucleotide
ucaugacuuucuccuccug

SEQ ID NO: 2533001 - RNA, 19 nt, Artificial Sequence
  Description of Artificial Sequence: Synthetic oligonucleotide
ggacuguggccuuuggaag

SEQ ID NO: 2533002 - RNA, 19 nt, Artificial Sequence
  Description of Artificial Sequence: Synthetic oligonucleotide
caacuuaaugaguccaaaa

SEQ ID NO: 2533003 - RNA, 19 nt, Artificial Sequence
  Description of Artificial Sequence: Synthetic oligonucleotide
ucaccacuguucagcaggu

SEQ ID NO: 2533004 - RNA, 19 nt, Artificial Sequence
  Description of Artificial Sequence: Synthetic oligonucleotide
auucccaucuacaccuuug

SEQ ID NO: 2533005 - RNA, 19 nt, Artificial Sequence
  Description of Artificial Sequence: Synthetic oligonucleotide
ugugcagaagucucuccuu

SEQ ID NO: 2533006 - RNA, 19 nt, Artificial Sequence
  Description of Artificial Sequence: Synthetic oligonucleotide
caacaccucaagagaaauc

SEQ ID NO: 2533007 - RNA, 19 nt, Artificial Sequence
  Description of Artificial Sequence: Synthetic oligonucleotide
ugcuggcaacuuaaugagu

SEQ ID NO: 2533008 - RNA, 19 nt, Artificial Sequence
  Description of Artificial Sequence: Synthetic oligonucleotide
gugacuggauucuguugcc

SEQ ID NO: 2533009 - RNA, 19 nt, Artificial Sequence
  Description of Artificial Sequence: Synthetic oligonucleotide
uuguuaccacuuuccccag

SEQ ID NO: 2533010 - RNA, 19 nt, Artificial Sequence
  Description of Artificial Sequence: Synthetic oligonucleotide
aacgugugcagaagucucu

SEQ ID NO: 2533011 - RNA, 19 nt, Artificial Sequence
  Description of Artificial Sequence: Synthetic oligonucleotide
ggauucuguugccaauucc

SEQ ID NO: 2533012 - RNA, 19 nt, Artificial Sequence
  Description of Artificial Sequence: Synthetic oligonucleotide
uccucugaacgugugcaga

SEQ ID NO: 2533013 - RNA, 19 nt, Artificial Sequence
  Description of Artificial Sequence: Synthetic oligonucleotide
caccuuugagauucaugac

SEQ ID NO: 2533014 - RNA, 19 nt, Artificial Sequence
  Description of Artificial Sequence: Synthetic oligonucleotide
aaccaugguaccauuuguu

SEQ ID NO: 2533015 - RNA, 19 nt, Artificial Sequence
  Description of Artificial Sequence: Synthetic oligonucleotide
aagccagaauucgccucac

SEQ ID NO: 2533016 - RNA, 19 nt, Artificial Sequence
  Description of Artificial Sequence: Synthetic oligonucleotide
ucuacaccuuugagauuca

SEQ ID NO: 2533017 - RNA, 19 nt, Artificial Sequence
  Description of Artificial Sequence: Synthetic oligonucleotide
uuaccacuuuccccagcga

SEQ ID NO: 2533018 - RNA, 19 nt, Artificial Sequence
  Description of Artificial Sequence: Synthetic oligonucleotide
gccagaauucgccucacac

SEQ ID NO: 2533019 - RNA, 19 nt, Artificial Sequence
  Description of Artificial Sequence: Synthetic oligonucleotide
gcucauucccaucuacacc

SEQ ID NO: 2533020 - RNA, 19 nt, Artificial Sequence
  Description of Artificial Sequence: Synthetic oligonucleotide
caauuggugcugugaugag

SEQ ID NO: 2533021 - RNA, 19 nt, Artificial Sequence
  Description of Artificial Sequence: Synthetic oligonucleotide
gaacucccuucauuucaug

SEQ ID NO: 2533022 - RNA, 19 nt, Artificial Sequence
  Description of Artificial Sequence: Synthetic oligonucleotide
acacucggggccuguaacu

SEQ ID NO: 2533023 - RNA, 19 nt, Artificial Sequence
  Description of Artificial Sequence: Synthetic oligonucleotide
caagccagaauucgccuca

SEQ ID NO: 2533024 - RNA, 19 nt, Artificial Sequence
  Description of Artificial Sequence: Synthetic oligonucleotide
ggacccagcaaaccaauca

SEQ ID NO: 2533025 - RNA, 19 nt, Artificial Sequence
  Description of Artificial Sequence: Synthetic oligonucleotide
auccccacggcuuccucug

SEQ ID NO: 2533026 - RNA, 19 nt, Artificial Sequence
  Description of Artificial Sequence: Synthetic oligonucleotide
ccaugguaccauuuguuac

SEQ ID NO: 2533027 - RNA, 19 nt, Artificial Sequence
  Description of Artificial Sequence: Synthetic oligonucleotide
gagcagcaugccaagaaga

SEQ ID NO: 2533028 - RNA, 19 nt, Artificial Sequence
  Description of Artificial Sequence: Synthetic oligonucleotide
ugcaagugacuggauucug

SEQ ID NO: 2533029 - RNA, 19 nt, Artificial Sequence
  Description of Artificial Sequence: Synthetic oligonucleotide
gcuggcaacuuaaugaguc

SEQ ID NO: 2533030 - RNA, 19 nt, Artificial Sequence
  Description of Artificial Sequence: Synthetic oligonucleotide
caugggaucgggccguguc

SEQ ID NO: 2533031 - RNA, 19 nt, Artificial Sequence
  Description of Artificial Sequence: Synthetic oligonucleotide
ucucuccaugggaucgggc

SEQ ID NO: 2533032 - RNA, 19 nt, Artificial Sequence
  Description of Artificial Sequence: Synthetic oligonucleotide
agguugcugucuucuguug

SEQ ID NO: 2533033 - RNA, 19 nt, Artificial Sequence
  Description of Artificial Sequence: Synthetic oligonucleotide
ccacuguucagcagguugc

SEQ ID NO: 2533034 - RNA, 19 nt, Artificial Sequence
  Description of Artificial Sequence: Synthetic oligonucleotide
acagcacaauagaacagga

SEQ ID NO: 2533035 - RNA, 19 nt, Artificial Sequence
  Description of Artificial Sequence: Synthetic oligonucleotide
ugugaugaggauggccaaa

SEQ ID NO: 2533036 - RNA, 19 nt, Artificial Sequence
  Description of Artificial Sequence: Synthetic oligonucleotide
acggcuuccucugaacgug

SEQ ID NO: 2533037 - RNA, 19 nt, Artificial Sequence
  Description of Artificial Sequence: Synthetic oligonucleotide
acgugugcagaagucucuc

SEQ ID NO: 2533038 - RNA, 19 nt, Artificial Sequence
  Description of Artificial Sequence: Synthetic oligonucleotide
caggaaaguagucaaaauu

SEQ ID NO: 2533039 - RNA, 19 nt, Artificial Sequence
  Description of Artificial Sequence: Synthetic oligonucleotide
gccuguaacugaccaaacc

SEQ ID NO: 2533040 - RNA, 19 nt, Artificial Sequence
  Description of Artificial Sequence: Synthetic oligonucleotide
cucggggccuguaacugac

SEQ ID NO: 2533041 - RNA, 19 nt, Artificial Sequence
  Description of Artificial Sequence: Synthetic oligonucleotide
gaccaaaccacagcccaca

SEQ ID NO: 2533042 - RNA, 19 nt, Artificial Sequence
  Description of Artificial Sequence: Synthetic oligonucleotide
aaguuugccuccggcgaca

SEQ ID NO: 2533043 - RNA, 19 nt, Artificial Sequence
  Description of Artificial Sequence: Synthetic oligonucleotide
gcaaagcacaccaucagga

SEQ ID NO: 2533044 - RNA, 19 nt, Artificial Sequence
  Description of Artificial Sequence: Synthetic oligonucleotide
ugacuggauucuguugcca

SEQ ID NO: 2533045 - RNA, 19 nt, Artificial Sequence
  Description of Artificial Sequence: Synthetic oligonucleotide
ggcgacagcacaauagaac

SEQ ID NO: 2533046 - RNA, 19 nt, Artificial Sequence
  Description of Artificial Sequence: Synthetic oligonucleotide
augguaccauuuguuacca

SEQ ID NO: 2533047 - RNA, 19 nt, Artificial Sequence
  Description of Artificial Sequence: Synthetic oligonucleotide
caaagcacaccaucaggaa

SEQ ID NO: 2533048 - RNA, 19 nt, Artificial Sequence
  Description of Artificial Sequence: Synthetic oligonucleotide
gaacaggauuaugauucca

SEQ ID NO: 2533049 - RNA, 19 nt, Artificial Sequence
  Description of Artificial Sequence: Synthetic oligonucleotide
agcagguugcugucuucug

SEQ ID NO: 2533050 - RNA, 19 nt, Artificial Sequence
  Description of Artificial Sequence: Synthetic oligonucleotide
uucgccucacacucugcaa

SEQ ID NO: 2533051 - RNA, 19 nt, Artificial Sequence
  Description of Artificial Sequence: Synthetic oligonucleotide
agucugggacccagcaaac

SEQ ID NO: 2533052 - RNA, 19 nt, Artificial Sequence
  Description of Artificial Sequence: Synthetic oligonucleotide
ugccgaggguugcaacacc

SEQ ID NO: 2533053 - RNA, 19 nt, Artificial Sequence
  Description of Artificial Sequence: Synthetic oligonucleotide
gaagucugggacccagcaa

SEQ ID NO: 2533054 - RNA, 19 nt, Artificial Sequence
  Description of Artificial Sequence: Synthetic oligonucleotide
cguaucaguacagcaaugc

SEQ ID NO: 2533055 - RNA, 19 nt, Artificial Sequence
  Description of Artificial Sequence: Synthetic oligonucleotide
cacucugcaagugacugga

SEQ ID NO: 2533056 - RNA, 19 nt, Artificial Sequence
  Description of Artificial Sequence: Synthetic oligonucleotide
ugcuucucuccaugggauc

SEQ ID NO: 2533057 - RNA, 19 nt, Artificial Sequence
  Description of Artificial Sequence: Synthetic oligonucleotide
cuuccaauuggugcuguga

SEQ ID NO: 2533058 - RNA, 19 nt, Artificial Sequence
  Description of Artificial Sequence: Synthetic oligonucleotide
caccaucaggaaaguaguc

SEQ ID NO: 2533059 - RNA, 19 nt, Artificial Sequence
  Description of Artificial Sequence: Synthetic oligonucleotide
cucugaacgugugcagaag

SEQ ID NO: 2533060 - RNA, 19 nt, Artificial Sequence
  Description of Artificial Sequence: Synthetic oligonucleotide
caaugccgaggguugcaac

SEQ ID NO: 2533061 - RNA, 19 nt, Artificial Sequence
  Description of Artificial Sequence: Synthetic oligonucleotide
ccaauuggugcugugauga

SEQ ID NO: 2533062 - RNA, 19 nt, Artificial Sequence
  Description of Artificial Sequence: Synthetic oligonucleotide
gagccacagacccgauggc

SEQ ID NO: 2533063 - RNA, 19 nt, Artificial Sequence
  Description of Artificial Sequence: Synthetic oligonucleotide
caaucaguaggcuuccaau

SEQ ID NO: 2533064 - RNA, 19 nt, Artificial Sequence
  Description of Artificial Sequence: Synthetic oligonucleotide
ugggaucgggccgugucca

SEQ ID NO: 2533065 - RNA, 19 nt, Artificial Sequence
  Description of Artificial Sequence: Synthetic oligonucleotide
uugcugucuucuguuggcu

SEQ ID NO: 2533066 - RNA, 19 nt, Artificial Sequence
  Description of Artificial Sequence: Synthetic oligonucleotide
uuccuccaggaagacacuc

SEQ ID NO: 2533067 - RNA, 19 nt, Artificial Sequence
  Description of Artificial Sequence: Synthetic oligonucleotide
cacagacccgauggcagcc

SEQ ID NO: 2533068 - RNA, 19 nt, Artificial Sequence
  Description of Artificial Sequence: Synthetic oligonucleotide
aggaagacacucggggccu

SEQ ID NO: 2533069 - RNA, 19 nt, Artificial Sequence
  Description of Artificial Sequence: Synthetic oligonucleotide
cagcccacagaagaacaac

SEQ ID NO: 2533070 - RNA, 19 nt, Artificial Sequence
  Description of Artificial Sequence: Synthetic oligonucleotide
gcacaauagaacaggauua

SEQ ID NO: 2533071 - RNA, 19 nt, Artificial Sequence
  Description of Artificial Sequence: Synthetic oligonucleotide
gcugucuucuguuggcuca

SEQ ID NO: 2533072 - RNA, 19 nt, Artificial Sequence
  Description of Artificial Sequence: Synthetic oligonucleotide
ccaaacagauuuccuccag

SEQ ID NO: 2533073 - RNA, 19 nt, Artificial Sequence
  Description of Artificial Sequence: Synthetic oligonucleotide
agccacagacccgauggca

SEQ ID NO: 2533074 - RNA, 19 nt, Artificial Sequence
  Description of Artificial Sequence: Synthetic oligonucleotide
agcaugccaagaagaggag

SEQ ID NO: 2533075 - RNA, 19 nt, Artificial Sequence
  Description of Artificial Sequence: Synthetic oligonucleotide
caacacauccaucccauau

SEQ ID NO: 2533076 - RNA, 19 nt, Artificial Sequence
  Description of Artificial Sequence: Synthetic oligonucleotide
gaggguugcaacaccucaa

SEQ ID NO: 2533077 - RNA, 19 nt, Artificial Sequence
  Description of Artificial Sequence: Synthetic oligonucleotide
gugaugaggauggccaaaa

SEQ ID NO: 2533078 - RNA, 19 nt, Artificial Sequence
  Description of Artificial Sequence: Synthetic oligonucleotide
uggaauccccacggcuucc

SEQ ID NO: 2533079 - RNA, 19 nt, Artificial Sequence
  Description of Artificial Sequence: Synthetic oligonucleotide
agacacucggggccuguaa

SEQ ID NO: 2533080 - RNA, 19 nt, Artificial Sequence
  Description of Artificial Sequence: Synthetic oligonucleotide
ugguaccauuuguuaccac

SEQ ID NO: 2533081 - RNA, 19 nt, Artificial Sequence
  Description of Artificial Sequence: Synthetic oligonucleotide
ccagcgagccauguggagg

SEQ ID NO: 2533082 - RNA, 19 nt, Artificial Sequence
  Description of Artificial Sequence: Synthetic oligonucleotide
gaggaggcaguggaggcaa

SEQ ID NO: 2533083 - RNA, 19 nt, Artificial Sequence
  Description of Artificial Sequence: Synthetic oligonucleotide
cacucggggccuguaacug

SEQ ID NO: 2533084 - RNA, 19 nt, Artificial Sequence
  Description of Artificial Sequence: Synthetic oligonucleotide
agaauucgccucacacucu

SEQ ID NO: 2533085 - RNA, 19 nt, Artificial Sequence
  Description of Artificial Sequence: Synthetic oligonucleotide
cagcgagcagcaugccaag

SEQ ID NO: 2533086 - RNA, 19 nt, Artificial Sequence
  Description of Artificial Sequence: Synthetic oligonucleotide
acccgauggcagccuggac

SEQ ID NO: 2533087 - RNA, 19 nt, Artificial Sequence
  Description of Artificial Sequence: Synthetic oligonucleotide
ucggggccuguaacugacc

SEQ ID NO: 2533088 - RNA, 19 nt, Artificial Sequence
  Description of Artificial Sequence: Synthetic oligonucleotide
ucauucccaucuacaccuu

SEQ ID NO: 2533089 - RNA, 19 nt, Artificial Sequence
  Description of Artificial Sequence: Synthetic oligonucleotide
gucugggacccagcaaacc

SEQ ID NO: 2533090 - RNA, 19 nt, Artificial Sequence
  Description of Artificial Sequence: Synthetic oligonucleotide
aguuugccuccggcgacag

SEQ ID NO: 2533091 - RNA, 19 nt, Artificial Sequence
  Description of Artificial Sequence: Synthetic oligonucleotide
cugggacccagcaaaccaa

SEQ ID NO: 2533092 - RNA, 19 nt, Artificial Sequence
  Description of Artificial Sequence: Synthetic oligonucleotide
ugccuccggcgacagcaca

SEQ ID NO: 2533093 - RNA, 19 nt, Artificial Sequence
  Description of Artificial Sequence: Synthetic oligonucleotide
ccacuuuccccagcgagcc

SEQ ID NO: 2533094 - RNA, 19 nt, Artificial Sequence
  Description of Artificial Sequence: Synthetic oligonucleotide
agcaaugccgaggguugca

SEQ ID NO: 2533095 - RNA, 19 nt, Artificial Sequence
  Description of Artificial Sequence: Synthetic oligonucleotide
caaccaugguaccauuugu

SEQ ID NO: 2533096 - RNA, 19 nt, Artificial Sequence
  Description of Artificial Sequence: Synthetic oligonucleotide
guccagagccacagacccg

SEQ ID NO: 2533097 - RNA, 19 nt, Artificial Sequence
  Description of Artificial Sequence: Synthetic oligonucleotide
agacccgauggcagccugg

SEQ ID NO: 2533098 - RNA, 19 nt, Artificial Sequence
  Description of Artificial Sequence: Synthetic oligonucleotide
cuggacuguggccuuugga

SEQ ID NO: 2533099 - RNA, 19 nt, Artificial Sequence
  Description of Artificial Sequence: Synthetic oligonucleotide
auccagcgagcagcaugcc

SEQ ID NO: 2533100 - RNA, 19 nt, Artificial Sequence
  Description of Artificial Sequence: Synthetic oligonucleotide
uugccuccggcgacagcac

SEQ ID NO: 2533101 - RNA, 19 nt, Artificial Sequence
  Description of Artificial Sequence: Synthetic oligonucleotide
agccagaauucgccucaca

SEQ ID NO: 2533102 - RNA, 19 nt, Artificial Sequence
  Description of Artificial Sequence: Synthetic oligonucleotide
cuguuggcucauucccauc

SEQ ID NO: 2533103 - RNA, 19 nt, Artificial Sequence
  Description of Artificial Sequence: Synthetic oligonucleotide
uuuccccagcgagccaugu

SEQ ID NO: 2533104 - RNA, 19 nt, Artificial Sequence
  Description of Artificial Sequence: Synthetic oligonucleotide
agcacaccaucaggaaagu

SEQ ID NO: 2533105 - RNA, 19 nt, Artificial Sequence
  Description of Artificial Sequence: Synthetic oligonucleotide
caaaagaaauaaagaucuu

SEQ ID NO: 2533106 - RNA, 19 nt, Artificial Sequence
  Description of Artificial Sequence: Synthetic oligonucleotide
gaauccccacggcuuccuc

SEQ ID NO: 2533107 - RNA, 19 nt, Artificial Sequence
  Description of Artificial Sequence: Synthetic oligonucleotide
cgagcagcaugccaagaag

SEQ ID NO: 2533108 - RNA, 19 nt, Artificial Sequence
  Description of Artificial Sequence: Synthetic oligonucleotide
ccaagaagaggaggcagug

SEQ ID NO: 2533109 - RNA, 19 nt, Artificial Sequence
  Description of Artificial Sequence: Synthetic oligonucleotide
uuggugcugugaugaggau

SEQ ID NO: 2533110 - RNA, 19 nt, Artificial Sequence
  Description of Artificial Sequence: Synthetic oligonucleotide
caccgucaacacauccauc

SEQ ID NO: 2533111 - RNA, 19 nt, Artificial Sequence
  Description of Artificial Sequence: Synthetic oligonucleotide
agcgagccauguggagggc

SEQ ID NO: 2533112 - RNA, 19 nt, Artificial Sequence
  Description of Artificial Sequence: Synthetic oligonucleotide
cacaauagaacaggauuau

SEQ ID NO: 2533113 - RNA, 19 nt, Artificial Sequence
  Description of Artificial Sequence: Synthetic oligonucleotide
caagugacuggauucuguu

SEQ ID NO: 2533114 - RNA, 19 nt, Artificial Sequence
  Description of Artificial Sequence: Synthetic oligonucleotide
aaccagcaaagcacaccau

SEQ ID NO: 2533115 - RNA, 19 nt, Artificial Sequence
  Description of Artificial Sequence: Synthetic oligonucleotide
gucaacacauccaucccau

SEQ ID NO: 2533116 - RNA, 19 nt, Artificial Sequence
  Description of Artificial Sequence: Synthetic oligonucleotide
gacccgauggcagccugga

SEQ ID NO: 2533117 - RNA, 19 nt, Artificial Sequence
  Description of Artificial Sequence: Synthetic oligonucleotide
cgacagcacaauagaacag

SEQ ID NO: 2533118 - RNA, 19 nt, Artificial Sequence
  Description of Artificial Sequence: Synthetic oligonucleotide
cagacccgauggcagccug

SEQ ID NO: 2533119 - RNA, 19 nt, Artificial Sequence
  Description of Artificial Sequence: Synthetic oligonucleotide
gcagaagucucuccuugaa

SEQ ID NO: 2533120 - RNA, 19 nt, Artificial Sequence
  Description of Artificial Sequence: Synthetic oligonucleotide
ccgucaacacauccauccc

SEQ ID NO: 2533121 - RNA, 19 nt, Artificial Sequence
  Description of Artificial Sequence: Synthetic oligonucleotide
gggccuguaacugaccaaa

SEQ ID NO: 2533122 - RNA, 19 nt, Artificial Sequence
  Description of Artificial Sequence: Synthetic oligonucleotide
guuggcucauucccaucua

SEQ ID NO: 2533123 - RNA, 19 nt, Artificial Sequence
  Description of Artificial Sequence: Synthetic oligonucleotide
gcaacuuaaugaguccaaa

SEQ ID NO: 2533124 - RNA, 19 nt, Artificial Sequence
  Description of Artificial Sequence: Synthetic oligonucleotide
gcuuccaauuggugcugug

SEQ ID NO: 2533125 - RNA, 19 nt, Artificial Sequence
  Description of Artificial Sequence: Synthetic oligonucleotide
aagacacucggggccugua

SEQ ID NO: 2533126 - RNA, 19 nt, Artificial Sequence
  Description of Artificial Sequence: Synthetic oligonucleotide
ggguugcaacaccucaaga

SEQ ID NO: 2533127 - RNA, 19 nt, Artificial Sequence
  Description of Artificial Sequence: Synthetic oligonucleotide
gcgagcagcaugccaagaa

SEQ ID NO: 2533128 - RNA, 19 nt, Artificial Sequence
  Description of Artificial Sequence: Synthetic oligonucleotide
acagacccgauggcagccu

SEQ ID NO: 2533129 - RNA, 19 nt, Artificial Sequence
  Description of Artificial Sequence: Synthetic oligonucleotide
uccccacggcuuccucuga

SEQ ID NO: 2533130 - RNA, 19 nt, Artificial Sequence
  Description of Artificial Sequence: Synthetic oligonucleotide
auguggagggcaagccaga

SEQ ID NO: 2533131 - RNA, 19 nt, Artificial Sequence
  Description of Artificial Sequence: Synthetic oligonucleotide
ccuuugagauucaugacuu

SEQ ID NO: 2533132 - RNA, 19 nt, Artificial Sequence
  Description of Artificial Sequence: Synthetic oligonucleotide
guuugccuccggcgacagc

SEQ ID NO: 2533133 - RNA, 19 nt, Artificial Sequence
  Description of Artificial Sequence: Synthetic oligonucleotide
cugcuucucuccaugggau

SEQ ID NO: 2533134 - RNA, 19 nt, Artificial Sequence
  Description of Artificial Sequence: Synthetic oligonucleotide
cacggcuuccucugaacgu

SEQ ID NO: 2533135 - RNA, 19 nt, Artificial Sequence
  Description of Artificial Sequence: Synthetic oligonucleotide
ggcaacuuaaugaguccaa

SEQ ID NO: 2533136 - RNA, 19 nt, Artificial Sequence
  Description of Artificial Sequence: Synthetic oligonucleotide
ggccuuuggaagccaggca

SEQ ID NO: 2533137 - RNA, 19 nt, Artificial Sequence
  Description of Artificial Sequence: Synthetic oligonucleotide
gaacaaccaugguaccauu

SEQ ID NO: 2533138 - RNA, 19 nt, Artificial Sequence
  Description of Artificial Sequence: Synthetic oligonucleotide
gccaccgucaacacaucca

SEQ ID NO: 2533139 - RNA, 19 nt, Artificial Sequence
  Description of Artificial Sequence: Synthetic oligonucleotide
agcgagcagcaugccaaga

SEQ ID NO: 2533140 - RNA, 19 nt, Artificial Sequence
  Description of Artificial Sequence: Synthetic oligonucleotide
ccagaauucgccucacacu

SEQ ID NO: 2533141 - RNA, 19 nt, Artificial Sequence
  Description of Artificial Sequence: Synthetic oligonucleotide
cagcacaauagaacaggau

SEQ ID NO: 2533142 - RNA, 19 nt, Artificial Sequence
  Description of Artificial Sequence: Synthetic oligonucleotide
accaaucaguaggcuucca

SEQ ID NO: 2533143 - RNA, 19 nt, Artificial Sequence
  Description of Artificial Sequence: Synthetic oligonucleotide
ccaaucaguaggcuuccaa

SEQ ID NO: 2533144 - RNA, 19 nt, Artificial Sequence
  Description of Artificial Sequence: Synthetic oligonucleotide
cugcaagugacuggauucu

SEQ ID NO: 2533145 - RNA, 19 nt, Artificial Sequence
  Description of Artificial Sequence: Synthetic oligonucleotide
ggagggcaagccagaauuc

SEQ ID NO: 2533146 - RNA, 19 nt, Artificial Sequence
  Description of Artificial Sequence: Synthetic oligonucleotide
ggcaagccagaauucgccu

SEQ ID NO: 2533147 - RNA, 19 nt, Artificial Sequence
  Description of Artificial Sequence: Synthetic oligonucleotide
augccaccgucaacacauc

SEQ ID NO: 2533148 - RNA, 19 nt, Artificial Sequence
  Description of Artificial Sequence: Synthetic oligonucleotide
uccaugggaucgggccgug

SEQ ID NO: 2533149 - RNA, 19 nt, Artificial Sequence
  Description of Artificial Sequence: Synthetic oligonucleotide
ccggcgacagcacaauaga

SEQ ID NO: 2533150 - RNA, 19 nt, Artificial Sequence
  Description of Artificial Sequence: Synthetic oligonucleotide
ccucacacucugcaaguga

SEQ ID NO: 2533151 - RNA, 19 nt, Artificial Sequence
  Description of Artificial Sequence: Synthetic oligonucleotide
cuuugagauucaugacuuu

SEQ ID NO: 2533152 - RNA, 19 nt, Artificial Sequence
  Description of Artificial Sequence: Synthetic oligonucleotide
cgucaacacauccauccca

SEQ ID NO: 2533153 - RNA, 19 nt, Artificial Sequence
  Description of Artificial Sequence: Synthetic oligonucleotide
ccuggacuguggccuuugg

SEQ ID NO: 2533154 - RNA, 19 nt, Artificial Sequence
  Description of Artificial Sequence: Synthetic oligonucleotide
ccucugaacgugugcagaa

SEQ ID NO: 2533155 - RNA, 19 nt, Artificial Sequence
  Description of Artificial Sequence: Synthetic oligonucleotide
cccacggcuuccucugaac

SEQ ID NO: 2533156 - RNA, 19 nt, Artificial Sequence
  Description of Artificial Sequence: Synthetic oligonucleotide
cgaggguugcaacaccuca

SEQ ID NO: 2533157 - RNA, 19 nt, Artificial Sequence
  Description of Artificial Sequence: Synthetic oligonucleotide
cccgauggcagccuggacu

SEQ ID NO: 2533158 - RNA, 19 nt, Artificial Sequence
  Description of Artificial Sequence: Synthetic oligonucleotide
gggaucgggccguguccag

SEQ ID NO: 2533159 - RNA, 19 nt, Artificial Sequence
  Description of Artificial Sequence: Synthetic oligonucleotide
gccucacacucugcaagug

SEQ ID NO: 2533160 - RNA, 19 nt, Artificial Sequence
  Description of Artificial Sequence: Synthetic oligonucleotide
gcaacaccucaagagaaau

SEQ ID NO: 2533161 - RNA, 19 nt, Artificial Sequence
  Description of Artificial Sequence: Synthetic oligonucleotide
ggccuguaacugaccaaac

SEQ ID NO: 2533162 - RNA, 19 nt, Artificial Sequence
  Description of Artificial Sequence: Synthetic oligonucleotide
gaagacacucggggccugu

SEQ ID NO: 2533163 - RNA, 19 nt, Artificial Sequence
  Description of Artificial Sequence: Synthetic oligonucleotide
ccgaggguugcaacaccuc

SEQ ID NO: 2533164 - RNA, 19 nt, Artificial Sequence
  Description of Artificial Sequence: Synthetic oligonucleotide
ggggccuguaacugaccaa

SEQ ID NO: 2533165 - RNA, 19 nt, Artificial Sequence
  Description of Artificial Sequence: Synthetic oligonucleotide
ggaagacacucggggccug

SEQ ID NO: 2533166 - RNA, 19 nt, Artificial Sequence
  Description of Artificial Sequence: Synthetic oligonucleotide
gccaagaagaggaggcagu

SEQ ID NO: 2533167 - RNA, 19 nt, Artificial Sequence
  Description of Artificial Sequence: Synthetic oligonucleotide
cacauccaucccauauuuu

SEQ ID NO: 2533168 - RNA, 19 nt, Artificial Sequence
  Description of Artificial Sequence: Synthetic oligonucleotide
cauucccaucuacaccuuu

SEQ ID NO: 2533169 - RNA, 19 nt, Artificial Sequence
  Description of Artificial Sequence: Synthetic oligonucleotide
gggacccagcaaaccaauc

SEQ ID NO: 2533170 - RNA, 19 nt, Artificial Sequence
  Description of Artificial Sequence: Synthetic oligonucleotide
ggaucgggccguguccaga

SEQ ID NO: 2533171 - RNA, 19 nt, Artificial Sequence
  Description of Artificial Sequence: Synthetic oligonucleotide
gcaaugccgaggguugcaa

SEQ ID NO: 2533172 - RNA, 19 nt, Artificial Sequence
  Description of Artificial Sequence: Synthetic oligonucleotide
guacagcaaugccgagggu

SEQ ID NO: 2533173 - RNA, 19 nt, Artificial Sequence
  Description of Artificial Sequence: Synthetic oligonucleotide
cccacagaagaacaaccau

SEQ ID NO: 2533174 - RNA, 19 nt, Artificial Sequence
  Description of Artificial Sequence: Synthetic oligonucleotide
cuccaugggaucgggccgu

SEQ ID NO: 2533175 - RNA, 19 nt, Artificial Sequence
  Description of Artificial Sequence: Synthetic oligonucleotide
ccaccgucaacacauccau

SEQ ID NO: 2533176 - RNA, 19 nt, Artificial Sequence
  Description of Artificial Sequence: Synthetic oligonucleotide
caucuacaccuuugagauu

SEQ ID NO: 2533177 - RNA, 19 nt, Artificial Sequence
  Description of Artificial Sequence: Synthetic oligonucleotide
cuccuugaacucccuucau

SEQ ID NO: 2533178 - RNA, 19 nt, Artificial Sequence
  Description of Artificial Sequence: Synthetic oligonucleotide
gccuggacuguggccuuug

SEQ ID NO: 2533179 - RNA, 19 nt, Artificial Sequence
  Description of Artificial Sequence: Synthetic oligonucleotide
cuccggcgacagcacaaua

SEQ ID NO: 2533180 - RNA, 19 nt, Artificial Sequence
  Description of Artificial Sequence: Synthetic oligonucleotide
gcgagccauguggagggca

SEQ ID NO: 2533181 - RNA, 19 nt, Artificial Sequence
  Description of Artificial Sequence: Synthetic oligonucleotide
gccgaggguugcaacaccu

SEQ ID NO: 2533182 - RNA, 19 nt, Artificial Sequence
  Description of Artificial Sequence: Synthetic oligonucleotide
cggggccuguaacugacca

SEQ ID NO: 2533183 - RNA, 19 nt, Artificial Sequence
  Description of Artificial Sequence: Synthetic oligonucleotide
cuacaccuuugagauucau

SEQ ID NO: 2533184 - RNA, 19 nt, Artificial Sequence
  Description of Artificial Sequence: Synthetic oligonucleotide
cgagccauguggagggcaa

SEQ ID NO: 2533185 - RNA, 19 nt, Artificial Sequence
  Description of Artificial Sequence: Synthetic oligonucleotide
ggaauccccacggcuuccu

SEQ ID NO: 2533186 - RNA, 19 nt, Artificial Sequence
  Description of Artificial Sequence: Synthetic oligonucleotide
gcaaugcuggcaacuuaau

SEQ ID NO: 2533187 - RNA, 19 nt, Artificial Sequence
  Description of Artificial Sequence: Synthetic oligonucleotide
gccuccggcgacagcacaa

SEQ ID NO: 2533188 - RNA, 19 nt, Artificial Sequence
  Description of Artificial Sequence: Synthetic oligonucleotide
gcacaccaucaggaaagua

SEQ ID NO: 2533189 - RNA, 19 nt, Artificial Sequence
  Description of Artificial Sequence: Synthetic oligonucleotide
cggcgacagcacaauagaa

SEQ ID NO: 2533190 - RNA, 19 nt, Artificial Sequence
  Description of Artificial Sequence: Synthetic oligonucleotide
ggccguguccagagccaca

SEQ ID NO: 2533191 - RNA, 19 nt, Artificial Sequence
  Description of Artificial Sequence: Synthetic oligonucleotide
ggcuuccaauuggugcugu

SEQ ID NO: 2533192 - RNA, 19 nt, Artificial Sequence
  Description of Artificial Sequence: Synthetic oligonucleotide
cgggccguguccagagcca

SEQ ID NO: 2533193 - RNA, 19 nt, Artificial Sequence
  Description of Artificial Sequence: Synthetic oligonucleotide
caccacuguucagcagguu

SEQ ID NO: 2533194 - RNA, 19 nt, Artificial Sequence
  Description of Artificial Sequence: Synthetic oligonucleotide
cggcuuccucugaacgugu

SEQ ID NO: 2533195 - RNA, 19 nt, Artificial Sequence
  Description of Artificial Sequence: Synthetic oligonucleotide
ccuccggcgacagcacaau

SEQ ID NO: 2533196 - RNA, 19 nt, Artificial Sequence
  Description of Artificial Sequence: Synthetic oligonucleotide
ccaugggaucgggccgugu

SEQ ID NO: 2533197 - RNA, 19 nt, Artificial Sequence
  Description of Artificial Sequence: Synthetic oligonucleotide
aaaauuacuauuuacaaag

SEQ ID NO: 2533198 - RNA, 19 nt, Artificial Sequence
  Description of Artificial Sequence: Synthetic oligonucleotide
uaaaacaacucuuugaugg

SEQ ID NO: 2533199 - RNA, 19 nt, Artificial Sequence
  Description of Artificial Sequence: Synthetic oligonucleotide
aauguuauagucaugcugc

SEQ ID NO: 2533200 - RNA, 19 nt, Artificial Sequence
  Description of Artificial Sequence: Synthetic oligonucleotide
uuaaaauucuucuggaugg

SEQ ID NO: 2533201 - RNA, 19 nt, Artificial Sequence
  Description of Artificial Sequence: Synthetic oligonucleotide
cuauggaacauuuacaggc

SEQ ID NO: 2533202 - RNA, 19 nt, Artificial Sequence
  Description of Artificial Sequence: Synthetic oligonucleotide
aggguuaagauacagcagc

SEQ ID NO: 2533203 - RNA, 19 nt, Artificial Sequence
  Description of Artificial Sequence: Synthetic oligonucleotide
aguaagauucuaucuagcc

SEQ ID NO: 2533204 - RNA, 19 nt, Artificial Sequence
  Description of Artificial Sequence: Synthetic oligonucleotide
uuuguuugcucaaacaugc

SEQ ID NO: 2533205 - RNA, 19 nt, Artificial Sequence
  Description of Artificial Sequence: Synthetic oligonucleotide
aaauguuauagucaugcug

SEQ ID NO: 2533206 - RNA, 19 nt, Artificial Sequence
  Description of Artificial Sequence: Synthetic oligonucleotide
auuaaaauucuucuggaug

SEQ ID NO: 2533207 - RNA, 19 nt, Artificial Sequence
  Description of Artificial Sequence: Synthetic oligonucleotide
aauuacuauuuacaaagca

SEQ ID NO: 2533208 - RNA, 19 nt, Artificial Sequence
  Description of Artificial Sequence: Synthetic oligonucleotide
uuaagauacagcagcauca

SEQ ID NO: 2533209 - RNA, 19 nt, Artificial Sequence
  Description of Artificial Sequence: Synthetic oligonucleotide
gauucuauggaacauuuac

SEQ ID NO: 2533210 - RNA, 19 nt, Artificial Sequence
  Description of Artificial Sequence: Synthetic oligonucleotide
gaaagagagagagagagag

SEQ ID NO: 2533211 - RNA, 19 nt, Artificial Sequence
  Description of Artificial Sequence: Synthetic oligonucleotide
aaaagagacaugcagcagu

SEQ ID NO: 2533212 - RNA, 19 nt, Artificial Sequence
  Description of Artificial Sequence: Synthetic oligonucleotide
uuaacugugguacauauuu

SEQ ID NO: 2533213 - RNA, 19 nt, Artificial Sequence
  Description of Artificial Sequence: Synthetic oligonucleotide
gagagaaagagagagagag

SEQ ID NO: 2533214 - RNA, 19 nt, Artificial Sequence
  Description of Artificial Sequence: Synthetic oligonucleotide
aacauuuacaggcacauua

SEQ ID NO: 2533215 - RNA, 19 nt, Artificial Sequence
  Description of Artificial Sequence: Synthetic oligonucleotide
aagagagagagagagagag

SEQ ID NO: 2533216 - RNA, 19 nt, Artificial Sequence
  Description of Artificial Sequence: Synthetic oligonucleotide
gauaaaauuacuauuuaca

SEQ ID NO: 2533217 - RNA, 19 nt, Artificial Sequence
  Description of Artificial Sequence: Synthetic oligonucleotide
uagccaucuaucuacagcg

SEQ ID NO: 2533218 - RNA, 19 nt, Artificial Sequence
  Description of Artificial Sequence: Synthetic oligonucleotide
aaaacauccugaaaugagg

SEQ ID NO: 2533219 - RNA, 19 nt, Artificial Sequence
  Description of Artificial Sequence: Synthetic oligonucleotide
gaugguugugauucuaugg

SEQ ID NO: 2533220 - RNA, 19 nt, Artificial Sequence
  Description of Artificial Sequence: Synthetic oligonucleotide
gagaaagagagagagagag

SEQ ID NO: 2533221 - RNA, 19 nt, Artificial Sequence
  Description of Artificial Sequence: Synthetic oligonucleotide
ucuaagggaaccaaugaca

SEQ ID NO: 2533222 - RNA, 19 nt, Artificial Sequence
  Description of Artificial Sequence: Synthetic oligonucleotide
aaagcuugcaaacuauacu

SEQ ID NO: 2533223 - RNA, 19 nt, Artificial Sequence
  Description of Artificial Sequence: Synthetic oligonucleotide
uauggauaacuauuuaagc

SEQ ID NO: 2533224 - RNA, 19 nt, Artificial Sequence
  Description of Artificial Sequence: Synthetic oligonucleotide
ucacaugugaaugagaacu

SEQ ID NO: 2533225 - RNA, 19 nt, Artificial Sequence
  Description of Artificial Sequence: Synthetic oligonucleotide
caaacuauacuuaacugug

SEQ ID NO: 2533226 - RNA, 19 nt, Artificial Sequence
  Description of Artificial Sequence: Synthetic oligonucleotide
uggauaacuauuuaagcac

SEQ ID NO: 2533227 - RNA, 19 nt, Artificial Sequence
  Description of Artificial Sequence: Synthetic oligonucleotide
uuuuguuugcucaaacaug

SEQ ID NO: 2533228 - RNA, 19 nt, Artificial Sequence
  Description of Artificial Sequence: Synthetic oligonucleotide
uaagauucuaucuagccau

SEQ ID NO: 2533229 - RNA, 19 nt, Artificial Sequence
  Description of Artificial Sequence: Synthetic oligonucleotide
aaauuacuauuuacaaagc

SEQ ID NO: 2533230 - RNA, 19 nt, Artificial Sequence
  Description of Artificial Sequence: Synthetic oligonucleotide
uacaccgucauauacauau

SEQ ID NO: 2533231 - RNA, 19 nt, Artificial Sequence
  Description of Artificial Sequence: Synthetic oligonucleotide
uacauauaaugaauuaugu

SEQ ID NO: 2533232 - RNA, 19 nt, Artificial Sequence
  Description of Artificial Sequence: Synthetic oligonucleotide
ucaguaagauucuaucuag

SEQ ID NO: 2533233 - RNA, 19 nt, Artificial Sequence
  Description of Artificial Sequence: Synthetic oligonucleotide
auggauaacuauuuaagca

SEQ ID NO: 2533234 - RNA, 19 nt, Artificial Sequence
  Description of Artificial Sequence: Synthetic oligonucleotide
uuucacaugugaaugagaa

SEQ ID NO: 2533235 - RNA, 19 nt, Artificial Sequence
  Description of Artificial Sequence: Synthetic oligonucleotide
guuauagucaugcugccag

SEQ ID NO: 2533236 - RNA, 19 nt, Artificial Sequence
  Description of Artificial Sequence: Synthetic oligonucleotide
ugaaaugaggaguaaacuc

SEQ ID NO: 2533237 - RNA, 19 nt, Artificial Sequence
  Description of Artificial Sequence: Synthetic oligonucleotide
uauauacaccgucauauac

SEQ ID NO: 2533238 - RNA, 19 nt, Artificial Sequence
  Description of Artificial Sequence: Synthetic oligonucleotide
ugccaaaggacacuuauca

SEQ ID NO: 2533239 - RNA, 19 nt, Artificial Sequence
  Description of Artificial Sequence: Synthetic oligonucleotide
gacagcuucaaauucuaag

SEQ ID NO: 2533240 - RNA, 19 nt, Artificial Sequence
  Description of Artificial Sequence: Synthetic oligonucleotide
uugcaaacuauacuuaacu

SEQ ID NO: 2533241 - RNA, 19 nt, Artificial Sequence
  Description of Artificial Sequence: Synthetic oligonucleotide
ucaaacaugcaccacugga

SEQ ID NO: 2533242 - RNA, 19 nt, Artificial Sequence
  Description of Artificial Sequence: Synthetic oligonucleotide
uauauguauauacaccguc

SEQ ID NO: 2533243 - RNA, 19 nt, Artificial Sequence
  Description of Artificial Sequence: Synthetic oligonucleotide
aagggaaccaaugacacca

SEQ ID NO: 2533244 - RNA, 19 nt, Artificial Sequence
  Description of Artificial Sequence: Synthetic oligonucleotide
ucuauggaacauuuacagg

SEQ ID NO: 2533245 - RNA, 19 nt, Artificial Sequence
  Description of Artificial Sequence: Synthetic oligonucleotide
aacuauacuuaacuguggu

SEQ ID NO: 2533246 - RNA, 19 nt, Artificial Sequence
  Description of Artificial Sequence: Synthetic oligonucleotide
cuauacuuaacugugguac

SEQ ID NO: 2533247 - RNA, 19 nt, Artificial Sequence
  Description of Artificial Sequence: Synthetic oligonucleotide
gagagagagagagagagag

SEQ ID NO: 2533248 - RNA, 19 nt, Artificial Sequence
  Description of Artificial Sequence: Synthetic oligonucleotide
aacugugguacauauuuga

SEQ ID NO: 2533249 - RNA, 19 nt, Artificial Sequence
  Description of Artificial Sequence: Synthetic oligonucleotide
aauucuaagggaaccaaug

SEQ ID NO: 2533250 - RNA, 19 nt, Artificial Sequence
  Description of Artificial Sequence: Synthetic oligonucleotide
aaugacaccaugucaccug

SEQ ID NO: 2533251 - RNA, 19 nt, Artificial Sequence
  Description of Artificial Sequence: Synthetic oligonucleotide
uaucuagccaucuaucuac

SEQ ID NO: 2533252 - RNA, 19 nt, Artificial Sequence
  Description of Artificial Sequence: Synthetic oligonucleotide
aagcuugcaaacuauacuu

SEQ ID NO: 2533253 - RNA, 19 nt, Artificial Sequence
  Description of Artificial Sequence: Synthetic oligonucleotide
agcggaaggguuaagauac

SEQ ID NO: 2533254 - RNA, 19 nt, Artificial Sequence
  Description of Artificial Sequence: Synthetic oligonucleotide
acauauuugaugcaguaaa

SEQ ID NO: 2533255 - RNA, 19 nt, Artificial Sequence
  Description of Artificial Sequence: Synthetic oligonucleotide
auauggauaacuauuuaag

SEQ ID NO: 2533256 - RNA, 19 nt, Artificial Sequence
  Description of Artificial Sequence: Synthetic oligonucleotide
ugaggaguaaacucuuucc

SEQ ID NO: 2533257 - RNA, 19 nt, Artificial Sequence
  Description of Artificial Sequence: Synthetic oligonucleotide
ucuaucuacagcggaaggg

SEQ ID NO: 2533258 - RNA, 19 nt, Artificial Sequence
  Description of Artificial Sequence: Synthetic oligonucleotide
gaugcaguaaauacugugc

SEQ ID NO: 2533259 - RNA, 19 nt, Artificial Sequence
  Description of Artificial Sequence: Synthetic oligonucleotide
ugugugaugggauauuuuc

SEQ ID NO: 2533260 - RNA, 19 nt, Artificial Sequence
  Description of Artificial Sequence: Synthetic oligonucleotide
uaaacucuuuccuugugug

SEQ ID NO: 2533261 - RNA, 19 nt, Artificial Sequence
  Description of Artificial Sequence: Synthetic oligonucleotide
ugaugcaguaaauacugug

SEQ ID NO: 2533262 - RNA, 19 nt, Artificial Sequence
  Description of Artificial Sequence: Synthetic oligonucleotide
gagagagagagagagagug

SEQ ID NO: 2533263 - RNA, 19 nt, Artificial Sequence
  Description of Artificial Sequence: Synthetic oligonucleotide
ugugaugggauauuuucac

SEQ ID NO: 2533264 - RNA, 19 nt, Artificial Sequence
  Description of Artificial Sequence: Synthetic oligonucleotide
guacauauaaugaauuaug

SEQ ID NO: 2533265 - RNA, 19 nt, Artificial Sequence
  Description of Artificial Sequence: Synthetic oligonucleotide
aaaacaacucuuugauggu

SEQ ID NO: 2533266 - RNA, 19 nt, Artificial Sequence
  Description of Artificial Sequence: Synthetic oligonucleotide
aaaauauggauaacuauuu

SEQ ID NO: 2533267 - RNA, 19 nt, Artificial Sequence
  Description of Artificial Sequence: Synthetic oligonucleotide
cuaagggaaccaaugacac

SEQ ID NO: 2533268 - RNA, 19 nt, Artificial Sequence
  Description of Artificial Sequence: Synthetic oligonucleotide
aacauccugaaaugaggag

SEQ ID NO: 2533269 - RNA, 19 nt, Artificial Sequence
  Description of Artificial Sequence: Synthetic oligonucleotide
uucuaagggaaccaaugac

SEQ ID NO: 2533270 - RNA, 19 nt, Artificial Sequence
  Description of Artificial Sequence: Synthetic oligonucleotide
uguacauauaaugaauuau

SEQ ID NO: 2533271 - RNA, 19 nt, Artificial Sequence
  Description of Artificial Sequence: Synthetic oligonucleotide
uguuugcucaaacaugcac

SEQ ID NO: 2533272 - RNA, 19 nt, Artificial Sequence
  Description of Artificial Sequence: Synthetic oligonucleotide
augaggaguaaacucuuuc

SEQ ID NO: 2533273 - RNA, 19 nt, Artificial Sequence
  Description of Artificial Sequence: Synthetic oligonucleotide
uacuauuuacaaagcagac

SEQ ID NO: 2533274 - RNA, 19 nt, Artificial Sequence
  Description of Artificial Sequence: Synthetic oligonucleotide
auaaaacaacucuuugaug

SEQ ID NO: 2533275 - RNA, 19 nt, Artificial Sequence
  Description of Artificial Sequence: Synthetic oligonucleotide
agcagugacagcuucaaau

SEQ ID NO: 2533276 - RNA, 19 nt, Artificial Sequence
  Description of Artificial Sequence: Synthetic oligonucleotide
uauguauauacaccgucau

SEQ ID NO: 2533277 - RNA, 19 nt, Artificial Sequence
  Description of Artificial Sequence: Synthetic oligonucleotide
aaacuauacuuaacugugg

SEQ ID NO: 2533278 - RNA, 19 nt, Artificial Sequence
  Description of Artificial Sequence: Synthetic oligonucleotide
uauacaccgucauauacau

SEQ ID NO: 2533279 - RNA, 19 nt, Artificial Sequence
  Description of Artificial Sequence: Synthetic oligonucleotide
guuaagauacagcagcauc

SEQ ID NO: 2533280 - RNA, 19 nt, Artificial Sequence
  Description of Artificial Sequence: Synthetic oligonucleotide
augguugugauucuaugga

SEQ ID NO: 2533281 - RNA, 19 nt, Artificial Sequence
  Description of Artificial Sequence: Synthetic oligonucleotide
aaauauggauaacuauuua

SEQ ID NO: 2533282 - RNA, 19 nt, Artificial Sequence
  Description of Artificial Sequence: Synthetic oligonucleotide
uauacuuaacugugguaca

SEQ ID NO: 2533283 - RNA, 19 nt, Artificial Sequence
  Description of Artificial Sequence: Synthetic oligonucleotide
auguuauagucaugcugcc

SEQ ID NO: 2533284 - RNA, 19 nt, Artificial Sequence
  Description of Artificial Sequence: Synthetic oligonucleotide
cuagccaucuaucuacagc

SEQ ID NO: 2533285 - RNA, 19 nt, Artificial Sequence
  Description of Artificial Sequence: Synthetic oligonucleotide
uucauugaaaauagaucuc

SEQ ID NO: 2533286 - RNA, 19 nt, Artificial Sequence
  Description of Artificial Sequence: Synthetic oligonucleotide
aucaguaagauucuaucua

SEQ ID NO: 2533287 - RNA, 19 nt, Artificial Sequence
  Description of Artificial Sequence: Synthetic oligonucleotide
auucuaagggaaccaauga

SEQ ID NO: 2533288 - RNA, 19 nt, Artificial Sequence
  Description of Artificial Sequence: Synthetic oligonucleotide
guuugcucaaacaugcacc

SEQ ID NO: 2533289 - RNA, 19 nt, Artificial Sequence
  Description of Artificial Sequence: Synthetic oligonucleotide
ugguacauauuugaugcag

SEQ ID NO: 2533290 - RNA, 19 nt, Artificial Sequence
  Description of Artificial Sequence: Synthetic oligonucleotide
augggauauuuucacaugu

SEQ ID NO: 2533291 - RNA, 19 nt, Artificial Sequence
  Description of Artificial Sequence: Synthetic oligonucleotide
gaugggauauuuucacaug

SEQ ID NO: 2533292 - RNA, 19 nt, Artificial Sequence
  Description of Artificial Sequence: Synthetic oligonucleotide
cagcuucaaauucuaaggg

SEQ ID NO: 2533293 - RNA, 19 nt, Artificial Sequence
  Description of Artificial Sequence: Synthetic oligonucleotide
guaagauucuaucuagcca

SEQ ID NO: 2533294 - RNA, 19 nt, Artificial Sequence
  Description of Artificial Sequence: Synthetic oligonucleotide
acauauaaugaauuaugua

SEQ ID NO: 2533295 - RNA, 19 nt, Artificial Sequence
  Description of Artificial Sequence: Synthetic oligonucleotide
acaugugaaugagaacugc

SEQ ID NO: 2533296 - RNA, 19 nt, Artificial Sequence
  Description of Artificial Sequence: Synthetic oligonucleotide
aaacaugcaccacuggaua

SEQ ID NO: 2533297 - RNA, 19 nt, Artificial Sequence
  Description of Artificial Sequence: Synthetic oligonucleotide
auggaacauuuacaggcac

SEQ ID NO: 2533298 - RNA, 19 nt, Artificial Sequence
  Description of Artificial Sequence: Synthetic oligonucleotide
uuauagucaugcugccagg

SEQ ID NO: 2533299 - RNA, 19 nt, Artificial Sequence
  Description of Artificial Sequence: Synthetic oligonucleotide
auagucaugcugccaggac

SEQ ID NO: 2533300 - RNA, 19 nt, Artificial Sequence
  Description of Artificial Sequence: Synthetic oligonucleotide
auucuaucuagccaucuau

SEQ ID NO: 2533301 - RNA, 19 nt, Artificial Sequence
  Description of Artificial Sequence: Synthetic oligonucleotide
ugcauguguaugcaugugu

SEQ ID NO: 2533302 - RNA, 19 nt, Artificial Sequence
  Description of Artificial Sequence: Synthetic oligonucleotide
ggauaaaauuacuauuuac

SEQ ID NO: 2533303 - RNA, 19 nt, Artificial Sequence
  Description of Artificial Sequence: Synthetic oligonucleotide
agcuucaaauucuaaggga

SEQ ID NO: 2533304 - RNA, 19 nt, Artificial Sequence
  Description of Artificial Sequence: Synthetic oligonucleotide
gaaccaaugacaccauguc

SEQ ID NO: 2533305 - RNA, 19 nt, Artificial Sequence
  Description of Artificial Sequence: Synthetic oligonucleotide
aaacucuuuccuuguguga

SEQ ID NO: 2533306 - RNA, 19 nt, Artificial Sequence
  Description of Artificial Sequence: Synthetic oligonucleotide
ucagcaaaagagacaugca

SEQ ID NO: 2533307 - RNA, 19 nt, Artificial Sequence
  Description of Artificial Sequence: Synthetic oligonucleotide
cuugcaaacuauacuuaac

SEQ ID NO: 2533308 - RNA, 19 nt, Artificial Sequence
  Description of Artificial Sequence: Synthetic oligonucleotide
ugggauauuuucacaugug

SEQ ID NO: 2533309 - RNA, 19 nt, Artificial Sequence
  Description of Artificial Sequence: Synthetic oligonucleotide
gagagagagagagagugug

SEQ ID NO: 2533310 - RNA, 19 nt, Artificial Sequence
  Description of Artificial Sequence: Synthetic oligonucleotide
augcaguaaauacugugcu

SEQ ID NO: 2533311 - RNA, 19 nt, Artificial Sequence
  Description of Artificial Sequence: Synthetic oligonucleotide
cuucaaauucuaagggaac

SEQ ID NO: 2533312 - RNA, 19 nt, Artificial Sequence
  Description of Artificial Sequence: Synthetic oligonucleotide
ugcaccacuggauaaaauu

SEQ ID NO: 2533313 - RNA, 19 nt, Artificial Sequence
  Description of Artificial Sequence: Synthetic oligonucleotide
cuguugaaagcuugcaaac

SEQ ID NO: 2533314 - RNA, 19 nt, Artificial Sequence
  Description of Artificial Sequence: Synthetic oligonucleotide
acuauuuacaaagcagacu

SEQ ID NO: 2533315 - RNA, 19 nt, Artificial Sequence
  Description of Artificial Sequence: Synthetic oligonucleotide
uggaacauuuacaggcaca

SEQ ID NO: 2533316 - RNA, 19 nt, Artificial Sequence
  Description of Artificial Sequence: Synthetic oligonucleotide
gacaccaugucaccuguug

SEQ ID NO: 2533317 - RNA, 19 nt, Artificial Sequence
  Description of Artificial Sequence: Synthetic oligonucleotide
ggaguaaacucuuuccuug

SEQ ID NO: 2533318 - RNA, 19 nt, Artificial Sequence
  Description of Artificial Sequence: Synthetic oligonucleotide
aucuaucuacagcggaagg

SEQ ID NO: 2533319 - RNA, 19 nt, Artificial Sequence
  Description of Artificial Sequence: Synthetic oligonucleotide
acaugcagcagugacagcu

SEQ ID NO: 2533320 - RNA, 19 nt, Artificial Sequence
  Description of Artificial Sequence: Synthetic oligonucleotide
gaaaugaggaguaaacucu

SEQ ID NO: 2533321 - RNA, 19 nt, Artificial Sequence
  Description of Artificial Sequence: Synthetic oligonucleotide
uuacaggcacauuaaaauu

SEQ ID NO: 2533322 - RNA, 19 nt, Artificial Sequence
  Description of Artificial Sequence: Synthetic oligonucleotide
uucuaucuagccaucuauc

SEQ ID NO: 2533323 - RNA, 19 nt, Artificial Sequence
  Description of Artificial Sequence: Synthetic oligonucleotide
acuuaacugugguacauau

SEQ ID NO: 2533324 - RNA, 19 nt, Artificial Sequence
  Description of Artificial Sequence: Synthetic oligonucleotide
uugaaagcuugcaaacuau

SEQ ID NO: 2533325 - RNA, 19 nt, Artificial Sequence
  Description of Artificial Sequence: Synthetic oligonucleotide
aaggguuaagauacagcag

SEQ ID NO: 2533326 - RNA, 19 nt, Artificial Sequence
  Description of Artificial Sequence: Synthetic oligonucleotide
ugagagaaagagagagaga

SEQ ID NO: 2533327 - RNA, 19 nt, Artificial Sequence
  Description of Artificial Sequence: Synthetic oligonucleotide
uguggaucaguaagauucu

SEQ ID NO: 2533328 - RNA, 19 nt, Artificial Sequence
  Description of Artificial Sequence: Synthetic oligonucleotide
uggauggaacaccuuaaaa

SEQ ID NO: 2533329 - RNA, 19 nt, Artificial Sequence
  Description of Artificial Sequence: Synthetic oligonucleotide
acauccugaaaugaggagu

SEQ ID NO: 2533330 - RNA, 19 nt, Artificial Sequence
  Description of Artificial Sequence: Synthetic oligonucleotide
aacuauuuaagcaccucaa

SEQ ID NO: 2533331 - RNA, 19 nt, Artificial Sequence
  Description of Artificial Sequence: Synthetic oligonucleotide
ccgucauauacauauauac

SEQ ID NO: 2533332 - RNA, 19 nt, Artificial Sequence
  Description of Artificial Sequence: Synthetic oligonucleotide
acuauuuaagcaccucaaa

SEQ ID NO: 2533333 - RNA, 19 nt, Artificial Sequence
  Description of Artificial Sequence: Synthetic oligonucleotide
auauguauauacaccguca

SEQ ID NO: 2533334 - RNA, 19 nt, Artificial Sequence
  Description of Artificial Sequence: Synthetic oligonucleotide
gaucaguaagauucuaucu

SEQ ID NO: 2533335 - RNA, 19 nt, Artificial Sequence
  Description of Artificial Sequence: Synthetic oligonucleotide
aacaugcaccacuggauaa

SEQ ID NO: 2533336 - RNA, 19 nt, Artificial Sequence
  Description of Artificial Sequence: Synthetic oligonucleotide
uguugaaagcuugcaaacu

SEQ ID NO: 2533337 - RNA, 19 nt, Artificial Sequence
  Description of Artificial Sequence: Synthetic oligonucleotide
ugaaagcuugcaaacuaua

SEQ ID NO: 2533338 - RNA, 19 nt, Artificial Sequence
  Description of Artificial Sequence: Synthetic oligonucleotide
auauacaccgucauauaca

SEQ ID NO: 2533339 - RNA, 19 nt, Artificial Sequence
  Description of Artificial Sequence: Synthetic oligonucleotide
uggaucaguaagauucuau

SEQ ID NO: 2533340 - RNA, 19 nt, Artificial Sequence
  Description of Artificial Sequence: Synthetic oligonucleotide
auguacauauaaugaauua

SEQ ID NO: 2533341 - RNA, 19 nt, Artificial Sequence
  Description of Artificial Sequence: Synthetic oligonucleotide
caaaggacacuuaucaaaa

SEQ ID NO: 2533342 - RNA, 19 nt, Artificial Sequence
  Description of Artificial Sequence: Synthetic oligonucleotide
aguaaacucuuuccuugug

SEQ ID NO: 2533343 - RNA, 19 nt, Artificial Sequence
  Description of Artificial Sequence: Synthetic oligonucleotide
caguaagauucuaucuagc

SEQ ID NO: 2533344 - RNA, 19 nt, Artificial Sequence
  Description of Artificial Sequence: Synthetic oligonucleotide
ucugagcaugugauggucu

SEQ ID NO: 2533345 - RNA, 19 nt, Artificial Sequence
  Description of Artificial Sequence: Synthetic oligonucleotide
ucaccuguugaaagcuugc

SEQ ID NO: 2533346 - RNA, 19 nt, Artificial Sequence
  Description of Artificial Sequence: Synthetic oligonucleotide
augugaaugagaacugcag

SEQ ID NO: 2533347 - RNA, 19 nt, Artificial Sequence
  Description of Artificial Sequence: Synthetic oligonucleotide
uacugugcuuaaaucauuu

SEQ ID NO: 2533348 - RNA, 19 nt, Artificial Sequence
  Description of Artificial Sequence: Synthetic oligonucleotide
uguguaugcauguguguau

SEQ ID NO: 2533349 - RNA, 19 nt, Artificial Sequence
  Description of Artificial Sequence: Synthetic oligonucleotide
ugagaacugcagcaugccu

SEQ ID NO: 2533350 - RNA, 19 nt, Artificial Sequence
  Description of Artificial Sequence: Synthetic oligonucleotide
ccuucauugaaaauagauc

SEQ ID NO: 2533351 - RNA, 19 nt, Artificial Sequence
  Description of Artificial Sequence: Synthetic oligonucleotide
augccuucauugaaaauag

SEQ ID NO: 2533352 - RNA, 19 nt, Artificial Sequence
  Description of Artificial Sequence: Synthetic oligonucleotide
ucuagccaucuaucuacag

SEQ ID NO: 2533353 - RNA, 19 nt, Artificial Sequence
  Description of Artificial Sequence: Synthetic oligonucleotide
agucaugcugccaggacuc

SEQ ID NO: 2533354 - RNA, 19 nt, Artificial Sequence
  Description of Artificial Sequence: Synthetic oligonucleotide
ggaucaguaagauucuauc

SEQ ID NO: 2533355 - RNA, 19 nt, Artificial Sequence
  Description of Artificial Sequence: Synthetic oligonucleotide
cacaugugaaugagaacug

SEQ ID NO: 2533356 - RNA, 19 nt, Artificial Sequence
  Description of Artificial Sequence: Synthetic oligonucleotide
gcaaaagagacaugcagca

SEQ ID NO: 2533357 - RNA, 19 nt, Artificial Sequence
  Description of Artificial Sequence: Synthetic oligonucleotide
uucacaugugaaugagaac

SEQ ID NO: 2533358 - RNA, 19 nt, Artificial Sequence
  Description of Artificial Sequence: Synthetic oligonucleotide
ccugaaaugaggaguaaac

SEQ ID NO: 2533359 - RNA, 19 nt, Artificial Sequence
  Description of Artificial Sequence: Synthetic oligonucleotide
uacauauuugaugcaguaa

SEQ ID NO: 2533360 - RNA, 19 nt, Artificial Sequence
  Description of Artificial Sequence: Synthetic oligonucleotide
agugacagcuucaaauucu

SEQ ID NO: 2533361 - RNA, 19 nt, Artificial Sequence
  Description of Artificial Sequence: Synthetic oligonucleotide
acauguacauauaaugaau

SEQ ID NO: 2533362 - RNA, 19 nt, Artificial Sequence
  Description of Artificial Sequence: Synthetic oligonucleotide
caugccuucauugaaaaua

SEQ ID NO: 2533363 - RNA, 19 nt, Artificial Sequence
  Description of Artificial Sequence: Synthetic oligonucleotide
ugaaugagaacugcagcau

SEQ ID NO: 2533364 - RNA, 19 nt, Artificial Sequence
  Description of Artificial Sequence: Synthetic oligonucleotide
uucuucuggauggaacacc

SEQ ID NO: 2533365 - RNA, 19 nt, Artificial Sequence
  Description of Artificial Sequence: Synthetic oligonucleotide
auauuugaugcaguaaaua

SEQ ID NO: 2533366 - RNA, 19 nt, Artificial Sequence
  Description of Artificial Sequence: Synthetic oligonucleotide
caugugaaugagaacugca

SEQ ID NO: 2533367 - RNA, 19 nt, Artificial Sequence
  Description of Artificial Sequence: Synthetic oligonucleotide
caucuaucuacagcggaag

SEQ ID NO: 2533368 - RNA, 19 nt, Artificial Sequence
  Description of Artificial Sequence: Synthetic oligonucleotide
ugugauucuauggaacauu

SEQ ID NO: 2533369 - RNA, 19 nt, Artificial Sequence
  Description of Artificial Sequence: Synthetic oligonucleotide
ggauaacuauuuaagcacc

SEQ ID NO: 2533370 - RNA, 19 nt, Artificial Sequence
  Description of Artificial Sequence: Synthetic oligonucleotide
ugguugugauucuauggaa

SEQ ID NO: 2533371 - RNA, 19 nt, Artificial Sequence
  Description of Artificial Sequence: Synthetic oligonucleotide
uugaugcaguaaauacugu

SEQ ID NO: 2533372 - RNA, 19 nt, Artificial Sequence
  Description of Artificial Sequence: Synthetic oligonucleotide
acuauacuuaacuguggua

SEQ ID NO: 2533373 - RNA, 19 nt, Artificial Sequence
  Description of Artificial Sequence: Synthetic oligonucleotide
acagcggaaggguuaagau

SEQ ID NO: 2533374 - RNA, 19 nt, Artificial Sequence
  Description of Artificial Sequence: Synthetic oligonucleotide
gagagagagagagugugga

SEQ ID NO: 2533375 - RNA, 19 nt, Artificial Sequence
  Description of Artificial Sequence: Synthetic oligonucleotide
uacagcggaaggguuaaga

SEQ ID NO: 2533376 - RNA, 19 nt, Artificial Sequence
  Description of Artificial Sequence: Synthetic oligonucleotide
ucuuuccuugugugauggg

SEQ ID NO: 2533377 - RNA, 19 nt, Artificial Sequence
  Description of Artificial Sequence: Synthetic oligonucleotide
acaacucuuugaugguugu

SEQ ID NO: 2533378 - RNA, 19 nt, Artificial Sequence
  Description of Artificial Sequence: Synthetic oligonucleotide
aaagagagagagagagaga

SEQ ID NO: 2533379 - RNA, 19 nt, Artificial Sequence
  Description of Artificial Sequence: Synthetic oligonucleotide
uuguuugcucaaacaugca

SEQ ID NO: 2533380 - RNA, 19 nt, Artificial Sequence
  Description of Artificial Sequence: Synthetic oligonucleotide
gauggucugugugugcaug

SEQ ID NO: 2533381 - RNA, 19 nt, Artificial Sequence
  Description of Artificial Sequence: Synthetic oligonucleotide
agagagagagagagugugg

SEQ ID NO: 2533382 - RNA, 19 nt, Artificial Sequence
  Description of Artificial Sequence: Synthetic oligonucleotide
gggauauuuucacauguga

SEQ ID NO: 2533383 - RNA, 19 nt, Artificial Sequence
  Description of Artificial Sequence: Synthetic oligonucleotide
aaacaacucuuugaugguu

SEQ ID NO: 2533384 - RNA, 19 nt, Artificial Sequence
  Description of Artificial Sequence: Synthetic oligonucleotide
cugagcaugugauggucug

SEQ ID NO: 2533385 - RNA, 19 nt, Artificial Sequence
  Description of Artificial Sequence: Synthetic oligonucleotide
gagcaugugauggucugug

SEQ ID NO: 2533386 - RNA, 19 nt, Artificial Sequence
  Description of Artificial Sequence: Synthetic oligonucleotide
ugcaguaaauacugugcuu

SEQ ID NO: 2533387 - RNA, 19 nt, Artificial Sequence
  Description of Artificial Sequence: Synthetic oligonucleotide
caaaagagacaugcagcag

SEQ ID NO: 2533388 - RNA, 19 nt, Artificial Sequence
  Description of Artificial Sequence: Synthetic oligonucleotide
guacauauuugaugcagua

SEQ ID NO: 2533389 - RNA, 19 nt, Artificial Sequence
  Description of Artificial Sequence: Synthetic oligonucleotide
gauucuaucuagccaucua

SEQ ID NO: 2533390 - RNA, 19 nt, Artificial Sequence
  Description of Artificial Sequence: Synthetic oligonucleotide
aacugcagcaugccuucau

SEQ ID NO: 2533391 - RNA, 19 nt, Artificial Sequence
  Description of Artificial Sequence: Synthetic oligonucleotide
accuguugaaagcuugcaa

SEQ ID NO: 2533392 - RNA, 19 nt, Artificial Sequence
  Description of Artificial Sequence: Synthetic oligonucleotide
uccugaaaugaggaguaaa

SEQ ID NO: 2533393 - RNA, 19 nt, Artificial Sequence
  Description of Artificial Sequence: Synthetic oligonucleotide
agaguguggaucaguaaga

SEQ ID NO: 2533394 - RNA, 19 nt, Artificial Sequence
  Description of Artificial Sequence: Synthetic oligonucleotide
ucuacagcggaaggguuaa

SEQ ID NO: 2533395 - RNA, 19 nt, Artificial Sequence
  Description of Artificial Sequence: Synthetic oligonucleotide
auguauauacaccgucaua

SEQ ID NO: 2533396 - RNA, 19 nt, Artificial Sequence
  Description of Artificial Sequence: Synthetic oligonucleotide
uuugaugguugugauucua

SEQ ID NO: 2533397 - RNA, 19 nt, Artificial Sequence
  Description of Artificial Sequence: Synthetic oligonucleotide
guaaacucuuuccuugugu

SEQ ID NO: 2533398 - RNA, 19 nt, Artificial Sequence
  Description of Artificial Sequence: Synthetic oligonucleotide
ucugugugugcauguguau

SEQ ID NO: 2533399 - RNA, 19 nt, Artificial Sequence
  Description of Artificial Sequence: Synthetic oligonucleotide
gucaccuguugaaagcuug

SEQ ID NO: 2533400 - RNA, 19 nt, Artificial Sequence
  Description of Artificial Sequence: Synthetic oligonucleotide
cauccugaaaugaggagua

SEQ ID NO: 2533401 - RNA, 19 nt, Artificial Sequence
  Description of Artificial Sequence: Synthetic oligonucleotide
augucaccuguugaaagcu

SEQ ID NO: 2533402 - RNA, 19 nt, Artificial Sequence
  Description of Artificial Sequence: Synthetic oligonucleotide
uugugugaugggauauuuu

SEQ ID NO: 2533403 - RNA, 19 nt, Artificial Sequence
  Description of Artificial Sequence: Synthetic oligonucleotide
cauguacauauaaugaauu

SEQ ID NO: 2533404 - RNA, 19 nt, Artificial Sequence
  Description of Artificial Sequence: Synthetic oligonucleotide
auacuuaacugugguacau

SEQ ID NO: 2533405 - RNA, 19 nt, Artificial Sequence
  Description of Artificial Sequence: Synthetic oligonucleotide
acucugagcaugugauggu

SEQ ID NO: 2533406 - RNA, 19 nt, Artificial Sequence
  Description of Artificial Sequence: Synthetic oligonucleotide
uugugauucuauggaacau

SEQ ID NO: 2533407 - RNA, 19 nt, Artificial Sequence
  Description of Artificial Sequence: Synthetic oligonucleotide
cuuuccuugugugauggga

SEQ ID NO: 2533408 - RNA, 19 nt, Artificial Sequence
  Description of Artificial Sequence: Synthetic oligonucleotide
uaucuacagcggaaggguu

SEQ ID NO: 2533409 - RNA, 19 nt, Artificial Sequence
  Description of Artificial Sequence: Synthetic oligonucleotide
gauaacuauuuaagcaccu

SEQ ID NO: 2533410 - RNA, 19 nt, Artificial Sequence
  Description of Artificial Sequence: Synthetic oligonucleotide
gguugugauucuauggaac

SEQ ID NO: 2533411 - RNA, 19 nt, Artificial Sequence
  Description of Artificial Sequence: Synthetic oligonucleotide
augugauggucugugugug

SEQ ID NO: 2533412 - RNA, 19 nt, Artificial Sequence
  Description of Artificial Sequence: Synthetic oligonucleotide
ugugugcauguguaugcau

SEQ ID NO: 2533413 - RNA, 19 nt, Artificial Sequence
  Description of Artificial Sequence: Synthetic oligonucleotide
agauucuaucuagccaucu

SEQ ID NO: 2533414 - RNA, 19 nt, Artificial Sequence
  Description of Artificial Sequence: Synthetic oligonucleotide
agagagagagaguguggau

SEQ ID NO: 2533415 - RNA, 19 nt, Artificial Sequence
  Description of Artificial Sequence: Synthetic oligonucleotide
ugacagcuucaaauucuaa

SEQ ID NO: 2533416 - RNA, 19 nt, Artificial Sequence
  Description of Artificial Sequence: Synthetic oligonucleotide
ugccuucauugaaaauaga

SEQ ID NO: 2533417 - RNA, 19 nt, Artificial Sequence
  Description of Artificial Sequence: Synthetic oligonucleotide
ggaaggguuaagauacagc

SEQ ID NO: 2533418 - RNA, 19 nt, Artificial Sequence
  Description of Artificial Sequence: Synthetic oligonucleotide
cacuggauaaaauuacuau

SEQ ID NO: 2533419 - RNA, 19 nt, Artificial Sequence
  Description of Artificial Sequence: Synthetic oligonucleotide
accacuggauaaaauuacu

SEQ ID NO: 2533420 - RNA, 19 nt, Artificial Sequence
  Description of Artificial Sequence: Synthetic oligonucleotide
aguguggaucaguaagauu

SEQ ID NO: 2533421 - RNA, 19 nt, Artificial Sequence
  Description of Artificial Sequence: Synthetic oligonucleotide
ccaaaggacacuuaucaaa

SEQ ID NO: 2533422 - RNA, 19 nt, Artificial Sequence
  Description of Artificial Sequence: Synthetic oligonucleotide
caugcugccaggacucuga

SEQ ID NO: 2533423 - RNA, 19 nt, Artificial Sequence
  Description of Artificial Sequence: Synthetic oligonucleotide
acugugcuuaaaucauuuu

SEQ ID NO: 2533424 - RNA, 19 nt, Artificial Sequence
  Description of Artificial Sequence: Synthetic oligonucleotide
cuaucuagccaucuaucua

SEQ ID NO: 2533425 - RNA, 19 nt, Artificial Sequence
  Description of Artificial Sequence: Synthetic oligonucleotide
aaugaggaguaaacucuuu

SEQ ID NO: 2533426 - RNA, 19 nt, Artificial Sequence
  Description of Artificial Sequence: Synthetic oligonucleotide
caugugauggucugugugu

SEQ ID NO: 2533427 - RNA, 19 nt, Artificial Sequence
  Description of Artificial Sequence: Synthetic oligonucleotide
gaguaaacucuuuccuugu

SEQ ID NO: 2533428 - RNA, 19 nt, Artificial Sequence
  Description of Artificial Sequence: Synthetic oligonucleotide
agaaagagagagagagaga

SEQ ID NO: 2533429 - RNA, 19 nt, Artificial Sequence
  Description of Artificial Sequence: Synthetic oligonucleotide
agagagaguguggaucagu

SEQ ID NO: 2533430 - RNA, 19 nt, Artificial Sequence
  Description of Artificial Sequence: Synthetic oligonucleotide
agagaaagagagagagaga

SEQ ID NO: 2533431 - RNA, 19 nt, Artificial Sequence
  Description of Artificial Sequence: Synthetic oligonucleotide
gugugaugggauauuuuca

SEQ ID NO: 2533432 - RNA, 19 nt, Artificial Sequence
  Description of Artificial Sequence: Synthetic oligonucleotide
ccuguugaaagcuugcaaa

SEQ ID NO: 2533433 - RNA, 19 nt, Artificial Sequence
  Description of Artificial Sequence: Synthetic oligonucleotide
caaacaugcaccacuggau

SEQ ID NO: 2533434 - RNA, 19 nt, Artificial Sequence
  Description of Artificial Sequence: Synthetic oligonucleotide
caaauucuaagggaaccaa

SEQ ID NO: 2533435 - RNA, 19 nt, Artificial Sequence
  Description of Artificial Sequence: Synthetic oligonucleotide
ugucaccuguugaaagcuu

SEQ ID NO: 2533436 - RNA, 19 nt, Artificial Sequence
  Description of Artificial Sequence: Synthetic oligonucleotide
uacuuaacugugguacaua

SEQ ID NO: 2533437 - RNA, 19 nt, Artificial Sequence
  Description of Artificial Sequence: Synthetic oligonucleotide
gagagaguguggaucagua

SEQ ID NO: 2533438 - RNA, 19 nt, Artificial Sequence
  Description of Artificial Sequence: Synthetic oligonucleotide
gcaguaaauacugugcuua

SEQ ID NO: 2533439 - RNA, 19 nt, Artificial Sequence
  Description of Artificial Sequence: Synthetic oligonucleotide
gcuugcaaacuauacuuaa

SEQ ID NO: 2533440 - RNA, 19 nt, Artificial Sequence
  Description of Artificial Sequence: Synthetic oligonucleotide
gugauggucugugugugca

SEQ ID NO: 2533441 - RNA, 19 nt, Artificial Sequence
  Description of Artificial Sequence: Synthetic oligonucleotide
cuaucuacagcggaagggu

SEQ ID NO: 2533442 - RNA, 19 nt, Artificial Sequence
  Description of Artificial Sequence: Synthetic oligonucleotide
uggucugugugugcaugug

SEQ ID NO: 2533443 - RNA, 19 nt, Artificial Sequence
  Description of Artificial Sequence: Synthetic oligonucleotide
agccaucuaucuacagcgg

SEQ ID NO: 2533444 - RNA, 19 nt, Artificial Sequence
  Description of Artificial Sequence: Synthetic oligonucleotide
agagagagagagagagugu

SEQ ID NO: 2533445 - RNA, 19 nt, Artificial Sequence
  Description of Artificial Sequence: Synthetic oligonucleotide
ucaugcugccaggacucug

SEQ ID NO: 2533446 - RNA, 19 nt, Artificial Sequence
  Description of Artificial Sequence: Synthetic oligonucleotide
cugaaaugaggaguaaacu

SEQ ID NO: 2533447 - RNA, 19 nt, Artificial Sequence
  Description of Artificial Sequence: Synthetic oligonucleotide
acaugcaccacuggauaaa

SEQ ID NO: 2533448 - RNA, 19 nt, Artificial Sequence
  Description of Artificial Sequence: Synthetic oligonucleotide
gagagagaguguggaucag

SEQ ID NO: 2533449 - RNA, 19 nt, Artificial Sequence
  Description of Artificial Sequence: Synthetic oligonucleotide
cucugagcaugugaugguc

SEQ ID NO: 2533450 - RNA, 19 nt, Artificial Sequence
  Description of Artificial Sequence: Synthetic oligonucleotide
gugguacauauuugaugca

SEQ ID NO: 2533451 - RNA, 19 nt, Artificial Sequence
  Description of Artificial Sequence: Synthetic oligonucleotide
caguaaauacugugcuuaa

SEQ ID NO: 2533452 - RNA, 19 nt, Artificial Sequence
  Description of Artificial Sequence: Synthetic oligonucleotide
agagagagagagagagaga

SEQ ID NO: 2533453 - RNA, 19 nt, Artificial Sequence
  Description of Artificial Sequence: Synthetic oligonucleotide
accgucauauacauauaua

SEQ ID NO: 2533454 - RNA, 19 nt, Artificial Sequence
  Description of Artificial Sequence: Synthetic oligonucleotide
agagagagagagagagagu

SEQ ID NO: 2533455 - RNA, 19 nt, Artificial Sequence
  Description of Artificial Sequence: Synthetic oligonucleotide
gagaacugcagcaugccuu

SEQ ID NO: 2533456 - RNA, 19 nt, Artificial Sequence
  Description of Artificial Sequence: Synthetic oligonucleotide
cuggauggaacaccuuaaa

SEQ ID NO: 2533457 - RNA, 19 nt, Artificial Sequence
  Description of Artificial Sequence: Synthetic oligonucleotide
cagcaugccuucauugaaa

SEQ ID NO: 2533458 - RNA, 19 nt, Artificial Sequence
  Description of Artificial Sequence: Synthetic oligonucleotide
cagcggaaggguuaagaua

SEQ ID NO: 2533459 - RNA, 19 nt, Artificial Sequence
  Description of Artificial Sequence: Synthetic oligonucleotide
ggaaccaaugacaccaugu

SEQ ID NO: 2533460 - RNA, 19 nt, Artificial Sequence
  Description of Artificial Sequence: Synthetic oligonucleotide
agcuugcaaacuauacuua

SEQ ID NO: 2533461 - RNA, 19 nt, Artificial Sequence
  Description of Artificial Sequence: Synthetic oligonucleotide
aucuacagcggaaggguua

SEQ ID NO: 2533462 - RNA, 19 nt, Artificial Sequence
  Description of Artificial Sequence: Synthetic oligonucleotide
uugcucaaacaugcaccac

SEQ ID NO: 2533463 - RNA, 19 nt, Artificial Sequence
  Description of Artificial Sequence: Synthetic oligonucleotide
aucuagccaucuaucuaca

SEQ ID NO: 2533464 - RNA, 19 nt, Artificial Sequence
  Description of Artificial Sequence: Synthetic oligonucleotide
gugcauguguaugcaugug

SEQ ID NO: 2533465 - RNA, 19 nt, Artificial Sequence
  Description of Artificial Sequence: Synthetic oligonucleotide
auacugugcuuaaaucauu

SEQ ID NO: 2533466 - RNA, 19 nt, Artificial Sequence
  Description of Artificial Sequence: Synthetic oligonucleotide
gggaaccaaugacaccaug

SEQ ID NO: 2533467 - RNA, 19 nt, Artificial Sequence
  Description of Artificial Sequence: Synthetic oligonucleotide
gugacagcuucaaauucua

SEQ ID NO: 2533468 - RNA, 19 nt, Artificial Sequence
  Description of Artificial Sequence: Synthetic oligonucleotide
ggguuaagauacagcagca

SEQ ID NO: 2533469 - RNA, 19 nt, Artificial Sequence
  Description of Artificial Sequence: Synthetic oligonucleotide
caccgucauauacauauau

SEQ ID NO: 2533470 - RNA, 19 nt, Artificial Sequence
  Description of Artificial Sequence: Synthetic oligonucleotide
gaguguggaucaguaagau

SEQ ID NO: 2533471 - RNA, 19 nt, Artificial Sequence
  Description of Artificial Sequence: Synthetic oligonucleotide
gcaccacuggauaaaauua

SEQ ID NO: 2533472 - RNA, 19 nt, Artificial Sequence
  Description of Artificial Sequence: Synthetic oligonucleotide
gccuucauugaaaauagau

SEQ ID NO: 2533473 - RNA, 19 nt, Artificial Sequence
  Description of Artificial Sequence: Synthetic oligonucleotide
ugacaccaugucaccuguu

SEQ ID NO: 2533474 - RNA, 19 nt, Artificial Sequence
  Description of Artificial Sequence: Synthetic oligonucleotide
ccaucuaucuacagcggaa

SEQ ID NO: 2533475 - RNA, 19 nt, Artificial Sequence
  Description of Artificial Sequence: Synthetic oligonucleotide
caugcaccacuggauaaaa

SEQ ID NO: 2533476 - RNA, 19 nt, Artificial Sequence
  Description of Artificial Sequence: Synthetic oligonucleotide
gccaaaggacacuuaucaa

SEQ ID NO: 2533477 - RNA, 19 nt, Artificial Sequence
  Description of Artificial Sequence: Synthetic oligonucleotide
ccacuggauaaaauuacua

SEQ ID NO: 2533478 - RNA, 19 nt, Artificial Sequence
  Description of Artificial Sequence: Synthetic oligonucleotide
caccuguugaaagcuugca

SEQ ID NO: 2533479 - RNA, 19 nt, Artificial Sequence
  Description of Artificial Sequence: Synthetic oligonucleotide
cuacagcggaaggguuaag

SEQ ID NO: 2533480 - RNA, 19 nt, Artificial Sequence
  Description of Artificial Sequence: Synthetic oligonucleotide
augcaccacuggauaaaau

SEQ ID NO: 2533481 - RNA, 19 nt, Artificial Sequence
  Description of Artificial Sequence: Synthetic oligonucleotide
guggaucaguaagauucua

SEQ ID NO: 2533482 - RNA, 19 nt, Artificial Sequence
  Description of Artificial Sequence: Synthetic oligonucleotide
cggaaggguuaagauacag

SEQ ID NO: 2533483 - RNA, 19 nt, Artificial Sequence
  Description of Artificial Sequence: Synthetic oligonucleotide
cucuuugaugguugugauu

SEQ ID NO: 2533484 - RNA, 19 nt, Artificial Sequence
  Description of Artificial Sequence: Synthetic oligonucleotide
acaccgucauauacauaua

SEQ ID NO: 2533485 - RNA, 19 nt, Artificial Sequence
  Description of Artificial Sequence: Synthetic oligonucleotide
gguuaagauacagcagcau

SEQ ID NO: 2533486 - RNA, 19 nt, Artificial Sequence
  Description of Artificial Sequence: Synthetic oligonucleotide
agggaaccaaugacaccau

SEQ ID NO: 2533487 - RNA, 19 nt, Artificial Sequence
  Description of Artificial Sequence: Synthetic oligonucleotide
gaacauuuacaggcacauu

SEQ ID NO: 2533488 - RNA, 19 nt, Artificial Sequence
  Description of Artificial Sequence: Synthetic oligonucleotide
auacaccgucauauacaua

SEQ ID NO: 2533489 - RNA, 19 nt, Artificial Sequence
  Description of Artificial Sequence: Synthetic oligonucleotide
caggcacauuaaaauucuu

SEQ ID NO: 2533490 - RNA, 19 nt, Artificial Sequence
  Description of Artificial Sequence: Synthetic oligonucleotide
cuucuggauggaacaccuu

SEQ ID NO: 2533491 - RNA, 19 nt, Artificial Sequence
  Description of Artificial Sequence: Synthetic oligonucleotide
gcaugccuucauugaaaau

SEQ ID NO: 2533492 - RNA, 19 nt, Artificial Sequence
  Description of Artificial Sequence: Synthetic oligonucleotide
gucaugcugccaggacucu

SEQ ID NO: 2533493 - RNA, 19 nt, Artificial Sequence
  Description of Artificial Sequence: Synthetic oligonucleotide
gcggaaggguuaagauaca

SEQ ID NO: 2533494 - RNA, 19 nt, Artificial Sequence
  Description of Artificial Sequence: Synthetic oligonucleotide
gccaggacucugagcaugu

SEQ ID NO: 2533495 - RNA, 19 nt, Artificial Sequence
  Description of Artificial Sequence: Synthetic oligonucleotide
aaucaaugcaaucagcucc

SEQ ID NO: 2533496 - RNA, 19 nt, Artificial Sequence
  Description of Artificial Sequence: Synthetic oligonucleotide
uuuuauauaggugauaccc

SEQ ID NO: 2533497 - RNA, 19 nt, Artificial Sequence
  Description of Artificial Sequence: Synthetic oligonucleotide
aaugcguccaucuaccaag

SEQ ID NO: 2533498 - RNA, 19 nt, Artificial Sequence
  Description of Artificial Sequence: Synthetic oligonucleotide
uuuauauaggugauacccg

SEQ ID NO: 2533499 - RNA, 19 nt, Artificial Sequence
  Description of Artificial Sequence: Synthetic oligonucleotide
aaguucuauaaccagagga

SEQ ID NO: 2533500 - RNA, 19 nt, Artificial Sequence
  Description of Artificial Sequence: Synthetic oligonucleotide
aaugcaaucagcuccacau

SEQ ID NO: 2533501 - RNA, 19 nt, Artificial Sequence
  Description of Artificial Sequence: Synthetic oligonucleotide
aauaaugcguccaucuacc

SEQ ID NO: 2533502 - RNA, 19 nt, Artificial Sequence
  Description of Artificial Sequence: Synthetic oligonucleotide
uuugccaauaguuggcucg

SEQ ID NO: 2533503 - RNA, 19 nt, Artificial Sequence
  Description of Artificial Sequence: Synthetic oligonucleotide
uuuccauaggccaagugag

SEQ ID NO: 2533504 - RNA, 19 nt, Artificial Sequence
  Description of Artificial Sequence: Synthetic oligonucleotide
aggacuuucgguuucuggc

SEQ ID NO: 2533505 - RNA, 19 nt, Artificial Sequence
  Description of Artificial Sequence: Synthetic oligonucleotide
aaugacugcucuucgcuuc

SEQ ID NO: 2533506 - RNA, 19 nt, Artificial Sequence
  Description of Artificial Sequence: Synthetic oligonucleotide
uuggccaaguucuauaacc

SEQ ID NO: 2533507 - RNA, 19 nt, Artificial Sequence
  Description of Artificial Sequence: Synthetic oligonucleotide
agugagaaggaaugacugc

SEQ ID NO: 2533508 - RNA, 19 nt, Artificial Sequence
  Description of Artificial Sequence: Synthetic oligonucleotide
uuauauaggugauacccga

SEQ ID NO: 2533509 - RNA, 19 nt, Artificial Sequence
  Description of Artificial Sequence: Synthetic oligonucleotide
uauaggugauacccgauca

SEQ ID NO: 2533510 - RNA, 19 nt, Artificial Sequence
  Description of Artificial Sequence: Synthetic oligonucleotide
caaaaugcccuucagcagc

SEQ ID NO: 2533511 - RNA, 19 nt, Artificial Sequence
  Description of Artificial Sequence: Synthetic oligonucleotide
aguuggcucgaaucaaugc

SEQ ID NO: 2533512 - RNA, 19 nt, Artificial Sequence
  Description of Artificial Sequence: Synthetic oligonucleotide
uucuauaaccagaggaucu

SEQ ID NO: 2533513 - RNA, 19 nt, Artificial Sequence
  Description of Artificial Sequence: Synthetic oligonucleotide
auauaggugauacccgauc

SEQ ID NO: 2533514 - RNA, 19 nt, Artificial Sequence
  Description of Artificial Sequence: Synthetic oligonucleotide
auaaccagaggaucucugg

SEQ ID NO: 2533515 - RNA, 19 nt, Artificial Sequence
  Description of Artificial Sequence: Synthetic oligonucleotide
ugcaaucagcuccacauca

SEQ ID NO: 2533516 - RNA, 19 nt, Artificial Sequence
  Description of Artificial Sequence: Synthetic oligonucleotide
gacguguucccucagcucc

SEQ ID NO: 2533517 - RNA, 19 nt, Artificial Sequence
  Description of Artificial Sequence: Synthetic oligonucleotide
cauaggccaagugagaagg

SEQ ID NO: 2533518 - RNA, 19 nt, Artificial Sequence
  Description of Artificial Sequence: Synthetic oligonucleotide
aggcaaaaugcccuucagc

SEQ ID NO: 2533519 - RNA, 19 nt, Artificial Sequence
  Description of Artificial Sequence: Synthetic oligonucleotide
gugauacccgaucagaccc

SEQ ID NO: 2533520 - RNA, 19 nt, Artificial Sequence
  Description of Artificial Sequence: Synthetic oligonucleotide
gagaugugucaauaaugcg

SEQ ID NO: 2533521 - RNA, 19 nt, Artificial Sequence
  Description of Artificial Sequence: Synthetic oligonucleotide
uuuacuucuuguuucguuu

SEQ ID NO: 2533522 - RNA, 19 nt, Artificial Sequence
  Description of Artificial Sequence: Synthetic oligonucleotide
aaucaccugcuuuuggcca

SEQ ID NO: 2533523 - RNA, 19 nt, Artificial Sequence
  Description of Artificial Sequence: Synthetic oligonucleotide
cauccgcugggauagacgg

SEQ ID NO: 2533524 - RNA, 19 nt, Artificial Sequence
  Description of Artificial Sequence: Synthetic oligonucleotide
acacauguccagcaggcuc

SEQ ID NO: 2533525 - RNA, 19 nt, Artificial Sequence
  Description of Artificial Sequence: Synthetic oligonucleotide
uuucguuucucuucuuuca

SEQ ID NO: 2533526 - RNA, 19 nt, Artificial Sequence
  Description of Artificial Sequence: Synthetic oligonucleotide
aaggcggcggauuccguac

SEQ ID NO: 2533527 - RNA, 19 nt, Artificial Sequence
  Description of Artificial Sequence: Synthetic oligonucleotide
agaugugucaauaaugcgu

SEQ ID NO: 2533528 - RNA, 19 nt, Artificial Sequence
  Description of Artificial Sequence: Synthetic oligonucleotide
caauaaugcguccaucuac

SEQ ID NO: 2533529 - RNA, 19 nt, Artificial Sequence
  Description of Artificial Sequence: Synthetic oligonucleotide
ucagagaugugucaauaau

SEQ ID NO: 2533530 - RNA, 19 nt, Artificial Sequence
  Description of Artificial Sequence: Synthetic oligonucleotide
uuccguacacgauucgggg

SEQ ID NO: 2533531 - RNA, 19 nt, Artificial Sequence
  Description of Artificial Sequence: Synthetic oligonucleotide
uacuguaccacugcauccg

SEQ ID NO: 2533532 - RNA, 19 nt, Artificial Sequence
  Description of Artificial Sequence: Synthetic oligonucleotide
uauaaccagaggaucucug

SEQ ID NO: 2533533 - RNA, 19 nt, Artificial Sequence
  Description of Artificial Sequence: Synthetic oligonucleotide
aggaaugacugcucuucgc

SEQ ID NO: 2533534 - RNA, 19 nt, Artificial Sequence
  Description of Artificial Sequence: Synthetic oligonucleotide
uucguuucucuucuuucag

SEQ ID NO: 2533535 - RNA, 19 nt, Artificial Sequence
  Description of Artificial Sequence: Synthetic oligonucleotide
gaaucaccugcuuuuggcc

SEQ ID NO: 2533536 - RNA, 19 nt, Artificial Sequence
  Description of Artificial Sequence: Synthetic oligonucleotide
ucuuguuucguuucucuuc

SEQ ID NO: 2533537 - RNA, 19 nt, Artificial Sequence
  Description of Artificial Sequence: Synthetic oligonucleotide
uagacgguggguacccucg

SEQ ID NO: 2533538 - RNA, 19 nt, Artificial Sequence
  Description of Artificial Sequence: Synthetic oligonucleotide
gaugugucaauaaugcguc

SEQ ID NO: 2533539 - RNA, 19 nt, Artificial Sequence
  Description of Artificial Sequence: Synthetic oligonucleotide
cucgaaucaaugcaaucag

SEQ ID NO: 2533540 - RNA, 19 nt, Artificial Sequence
  Description of Artificial Sequence: Synthetic oligonucleotide
guguaguguauguggagcg

SEQ ID NO: 2533541 - RNA, 19 nt, Artificial Sequence
  Description of Artificial Sequence: Synthetic oligonucleotide
cuuuccauaggccaaguga

SEQ ID NO: 2533542 - RNA, 19 nt, Artificial Sequence
  Description of Artificial Sequence: Synthetic oligonucleotide
gaaucaaugcaaucagcuc

SEQ ID NO: 2533543 - RNA, 19 nt, Artificial Sequence
  Description of Artificial Sequence: Synthetic oligonucleotide
uacccgaucagacccagga

SEQ ID NO: 2533544 - RNA, 19 nt, Artificial Sequence
  Description of Artificial Sequence: Synthetic oligonucleotide
gauuccguacacgauucgg

SEQ ID NO: 2533545 - RNA, 19 nt, Artificial Sequence
  Description of Artificial Sequence: Synthetic oligonucleotide
cagaccuggaaucaccugc

SEQ ID NO: 2533546 - RNA, 19 nt, Artificial Sequence
  Description of Artificial Sequence: Synthetic oligonucleotide
ucgaaucaaugcaaucagc

SEQ ID NO: 2533547 - RNA, 19 nt, Artificial Sequence
  Description of Artificial Sequence: Synthetic oligonucleotide
ucuaccaagcuucccgugu

SEQ ID NO: 2533548 - RNA, 19 nt, Artificial Sequence
  Description of Artificial Sequence: Synthetic oligonucleotide
uggaaucaccugcuuuugg

SEQ ID NO: 2533549 - RNA, 19 nt, Artificial Sequence
  Description of Artificial Sequence: Synthetic oligonucleotide
ggcaaaaugcccuucagca

SEQ ID NO: 2533550 - RNA, 19 nt, Artificial Sequence
  Description of Artificial Sequence: Synthetic oligonucleotide
uccacaucauacuguacca

SEQ ID NO: 2533551 - RNA, 19 nt, Artificial Sequence
  Description of Artificial Sequence: Synthetic oligonucleotide
acuuggaggguccggacag

SEQ ID NO: 2533552 - RNA, 19 nt, Artificial Sequence
  Description of Artificial Sequence: Synthetic oligonucleotide
uggccaaguucuauaacca

SEQ ID NO: 2533553 - RNA, 19 nt, Artificial Sequence
  Description of Artificial Sequence: Synthetic oligonucleotide
acugcauccgcugggauag

SEQ ID NO: 2533554 - RNA, 19 nt, Artificial Sequence
  Description of Artificial Sequence: Synthetic oligonucleotide
uuuuggccaaguucuauaa

SEQ ID NO: 2533555 - RNA, 19 nt, Artificial Sequence
  Description of Artificial Sequence: Synthetic oligonucleotide
acccucgcuuuccauaggc

SEQ ID NO: 2533556 - RNA, 19 nt, Artificial Sequence
  Description of Artificial Sequence: Synthetic oligonucleotide
ugugucaauaaugcgucca

SEQ ID NO: 2533557 - RNA, 19 nt, Artificial Sequence
  Description of Artificial Sequence: Synthetic oligonucleotide
auaggugauacccgaucag

SEQ ID NO: 2533558 - RNA, 19 nt, Artificial Sequence
  Description of Artificial Sequence: Synthetic oligonucleotide
accacuauuuauuucuuuu

SEQ ID NO: 2533559 - RNA, 19 nt, Artificial Sequence
  Description of Artificial Sequence: Synthetic oligonucleotide
ggugcaggcgaccaggacg

SEQ ID NO: 2533560 - RNA, 19 nt, Artificial Sequence
  Description of Artificial Sequence: Synthetic oligonucleotide
gaaggaaugacugcucuuc

SEQ ID NO: 2533561 - RNA, 19 nt, Artificial Sequence
  Description of Artificial Sequence: Synthetic oligonucleotide
guuggcucgaaucaaugca

SEQ ID NO: 2533562 - RNA, 19 nt, Artificial Sequence
  Description of Artificial Sequence: Synthetic oligonucleotide
uaaccagaggaucucuggu

SEQ ID NO: 2533563 - RNA, 19 nt, Artificial Sequence
  Description of Artificial Sequence: Synthetic oligonucleotide
gagcgugucuccaaaggcg

SEQ ID NO: 2533564 - RNA, 19 nt, Artificial Sequence
  Description of Artificial Sequence: Synthetic oligonucleotide
ucaauaaugcguccaucua

SEQ ID NO: 2533565 - RNA, 19 nt, Artificial Sequence
  Description of Artificial Sequence: Synthetic oligonucleotide
aggcaggacaggcuguucg

SEQ ID NO: 2533566 - RNA, 19 nt, Artificial Sequence
  Description of Artificial Sequence: Synthetic oligonucleotide
augugucaauaaugcgucc

SEQ ID NO: 2533567 - RNA, 19 nt, Artificial Sequence
  Description of Artificial Sequence: Synthetic oligonucleotide
aguucuauaaccagaggau

SEQ ID NO: 2533568 - RNA, 19 nt, Artificial Sequence
  Description of Artificial Sequence: Synthetic oligonucleotide
acuguaccacugcauccgc

SEQ ID NO: 2533569 - RNA, 19 nt, Artificial Sequence
  Description of Artificial Sequence: Synthetic oligonucleotide
uuggcucgaaucaaugcaa

SEQ ID NO: 2533570 - RNA, 19 nt, Artificial Sequence
  Description of Artificial Sequence: Synthetic oligonucleotide
ucgguuucuggcccgaccu

SEQ ID NO: 2533571 - RNA, 19 nt, Artificial Sequence
  Description of Artificial Sequence: Synthetic oligonucleotide
auagccaugcccaccagag

SEQ ID NO: 2533572 - RNA, 19 nt, Artificial Sequence
  Description of Artificial Sequence: Synthetic oligonucleotide
guagacuuugguucugcug

SEQ ID NO: 2533573 - RNA, 19 nt, Artificial Sequence
  Description of Artificial Sequence: Synthetic oligonucleotide
uaguuggcucgaaucaaug

SEQ ID NO: 2533574 - RNA, 19 nt, Artificial Sequence
  Description of Artificial Sequence: Synthetic oligonucleotide
uguauguggagcgugucuc

SEQ ID NO: 2533575 - RNA, 19 nt, Artificial Sequence
  Description of Artificial Sequence: Synthetic oligonucleotide
accagaggaucucugguca

SEQ ID NO: 2533576 - RNA, 19 nt, Artificial Sequence
  Description of Artificial Sequence: Synthetic oligonucleotide
aucagcuccacaucauacu

SEQ ID NO: 2533577 - RNA, 19 nt, Artificial Sequence
  Description of Artificial Sequence: Synthetic oligonucleotide
uauauaggugauacccgau

SEQ ID NO: 2533578 - RNA, 19 nt, Artificial Sequence
  Description of Artificial Sequence: Synthetic oligonucleotide
cagcuuuugccaauaguug

SEQ ID NO: 2533579 - RNA, 19 nt, Artificial Sequence
  Description of Artificial Sequence: Synthetic oligonucleotide
auagacgguggguacccuc

SEQ ID NO: 2533580 - RNA, 19 nt, Artificial Sequence
  Description of Artificial Sequence: Synthetic oligonucleotide
ccaaguucuauaaccagag

SEQ ID NO: 2533581 - RNA, 19 nt, Artificial Sequence
  Description of Artificial Sequence: Synthetic oligonucleotide
aucauacuguaccacugca

SEQ ID NO: 2533582 - RNA, 19 nt, Artificial Sequence
  Description of Artificial Sequence: Synthetic oligonucleotide
ucuggucagagauguguca

SEQ ID NO: 2533583 - RNA, 19 nt, Artificial Sequence
  Description of Artificial Sequence: Synthetic oligonucleotide
caugacgggaccaggucag

SEQ ID NO: 2533584 - RNA, 19 nt, Artificial Sequence
  Description of Artificial Sequence: Synthetic oligonucleotide
cagggucuccacuuggagg

SEQ ID NO: 2533585 - RNA, 19 nt, Artificial Sequence
  Description of Artificial Sequence: Synthetic oligonucleotide
ucguuucucuucuuucagc

SEQ ID NO: 2533586 - RNA, 19 nt, Artificial Sequence
  Description of Artificial Sequence: Synthetic oligonucleotide
uucuggcccgaccucagcc

SEQ ID NO: 2533587 - RNA, 19 nt, Artificial Sequence
  Description of Artificial Sequence: Synthetic oligonucleotide
uuacuucuuguuucguuuc

SEQ ID NO: 2533588 - RNA, 19 nt, Artificial Sequence
  Description of Artificial Sequence: Synthetic oligonucleotide
ucauacuguaccacugcau

SEQ ID NO: 2533589 - RNA, 19 nt, Artificial Sequence
  Description of Artificial Sequence: Synthetic oligonucleotide
uaaugcguccaucuaccaa

SEQ ID NO: 2533590 - RNA, 19 nt, Artificial Sequence
  Description of Artificial Sequence: Synthetic oligonucleotide
guacccucgcuuuccauag

SEQ ID NO: 2533591 - RNA, 19 nt, Artificial Sequence
  Description of Artificial Sequence: Synthetic oligonucleotide
ucuauaaccagaggaucuc

SEQ ID NO: 2533592 - RNA, 19 nt, Artificial Sequence
  Description of Artificial Sequence: Synthetic oligonucleotide
gacuuucgguuucuggccc

SEQ ID NO: 2533593 - RNA, 19 nt, Artificial Sequence
  Description of Artificial Sequence: Synthetic oligonucleotide
ugagaaggaaugacugcuc

SEQ ID NO: 2533594 - RNA, 19 nt, Artificial Sequence
  Description of Artificial Sequence: Synthetic oligonucleotide
acaugacgggaccagguca

SEQ ID NO: 2533595 - RNA, 19 nt, Artificial Sequence
  Description of Artificial Sequence: Synthetic oligonucleotide
uguuucguuucucuucuuu

SEQ ID NO: 2533596 - RNA, 19 nt, Artificial Sequence
  Description of Artificial Sequence: Synthetic oligonucleotide
gaucagacccaggagugcc

SEQ ID NO: 2533597 - RNA, 19 nt, Artificial Sequence
  Description of Artificial Sequence: Synthetic oligonucleotide
caaguucuauaaccagagg

SEQ ID NO: 2533598 - RNA, 19 nt, Artificial Sequence
  Description of Artificial Sequence: Synthetic oligonucleotide
acugcucuucgcuucucuc

SEQ ID NO: 2533599 - RNA, 19 nt, Artificial Sequence
  Description of Artificial Sequence: Synthetic oligonucleotide
uaccagggucuccacuugg

SEQ ID NO: 2533600 - RNA, 19 nt, Artificial Sequence
  Description of Artificial Sequence: Synthetic oligonucleotide
cacaccaccccacugaaca

SEQ ID NO: 2533601 - RNA, 19 nt, Artificial Sequence
  Description of Artificial Sequence: Synthetic oligonucleotide
aggugauacccgaucagac

SEQ ID NO: 2533602 - RNA, 19 nt, Artificial Sequence
  Description of Artificial Sequence: Synthetic oligonucleotide
gaggcaaaaugcccuucag

SEQ ID NO: 2533603 - RNA, 19 nt, Artificial Sequence
  Description of Artificial Sequence: Synthetic oligonucleotide
acuuugguucugcuggacu

SEQ ID NO: 2533604 - RNA, 19 nt, Artificial Sequence
  Description of Artificial Sequence: Synthetic oligonucleotide
cugcucuucgcuucucucc

SEQ ID NO: 2533605 - RNA, 19 nt, Artificial Sequence
  Description of Artificial Sequence: Synthetic oligonucleotide
agccggagcggccagagca

SEQ ID NO: 2533606 - RNA, 19 nt, Artificial Sequence
  Description of Artificial Sequence: Synthetic oligonucleotide
caccagaggcaaaaugccc

SEQ ID NO: 2533607 - RNA, 19 nt, Artificial Sequence
  Description of Artificial Sequence: Synthetic oligonucleotide
caggacuuucgguuucugg

SEQ ID NO: 2533608 - RNA, 19 nt, Artificial Sequence
  Description of Artificial Sequence: Synthetic oligonucleotide
ggugauacccgaucagacc

SEQ ID NO: 2533609 - RNA, 19 nt, Artificial Sequence
  Description of Artificial Sequence: Synthetic oligonucleotide
uucgguuucuggcccgacc

SEQ ID NO: 2533610 - RNA, 19 nt, Artificial Sequence
  Description of Artificial Sequence: Synthetic oligonucleotide
uaguguauguggagcgugu

SEQ ID NO: 2533611 - RNA, 19 nt, Artificial Sequence
  Description of Artificial Sequence: Synthetic oligonucleotide
agcggccagagcaaggggc

SEQ ID NO: 2533612 - RNA, 19 nt, Artificial Sequence
  Description of Artificial Sequence: Synthetic oligonucleotide
aaccacuauuuauuucuuu

SEQ ID NO: 2533613 - RNA, 19 nt, Artificial Sequence
  Description of Artificial Sequence: Synthetic oligonucleotide
uuccauaggccaagugaga

SEQ ID NO: 2533614 - RNA, 19 nt, Artificial Sequence
  Description of Artificial Sequence: Synthetic oligonucleotide
guucuauaaccagaggauc

SEQ ID NO: 2533615 - RNA, 19 nt, Artificial Sequence
  Description of Artificial Sequence: Synthetic oligonucleotide
ugauacccgaucagaccca

SEQ ID NO: 2533616 - RNA, 19 nt, Artificial Sequence
  Description of Artificial Sequence: Synthetic oligonucleotide
uuuugccaauaguuggcuc

SEQ ID NO: 2533617 - RNA, 19 nt, Artificial Sequence
  Description of Artificial Sequence: Synthetic oligonucleotide
agcgugucuccaaaggcgg

SEQ ID NO: 2533618 - RNA, 19 nt, Artificial Sequence
  Description of Artificial Sequence: Synthetic oligonucleotide
uguggagcgugucuccaaa

SEQ ID NO: 2533619 - RNA, 19 nt, Artificial Sequence
  Description of Artificial Sequence: Synthetic oligonucleotide
uagccaugcccaccagagg

SEQ ID NO: 2533620 - RNA, 19 nt, Artificial Sequence
  Description of Artificial Sequence: Synthetic oligonucleotide
ccaauaguuggcucgaauc

SEQ ID NO: 2533621 - RNA, 19 nt, Artificial Sequence
  Description of Artificial Sequence: Synthetic oligonucleotide
aaaaugcccuucagcagcu

SEQ ID NO: 2533622 - RNA, 19 nt, Artificial Sequence
  Description of Artificial Sequence: Synthetic oligonucleotide
aaaggcggcggauuccgua

SEQ ID NO: 2533623 - RNA, 19 nt, Artificial Sequence
  Description of Artificial Sequence: Synthetic oligonucleotide
cugcuuuuggccaaguucu

SEQ ID NO: 2533624 - RNA, 19 nt, Artificial Sequence
  Description of Artificial Sequence: Synthetic oligonucleotide
ugggauagacgguggguac

SEQ ID NO: 2533625 - RNA, 19 nt, Artificial Sequence
  Description of Artificial Sequence: Synthetic oligonucleotide
ucuggcccgaccucagccc

SEQ ID NO: 2533626 - RNA, 19 nt, Artificial Sequence
  Description of Artificial Sequence: Synthetic oligonucleotide
gcaaaaugcccuucagcag

SEQ ID NO: 2533627 - RNA, 19 nt, Artificial Sequence
  Description of Artificial Sequence: Synthetic oligonucleotide
aagcuucccguguagugua

SEQ ID NO: 2533628 - RNA, 19 nt, Artificial Sequence
  Description of Artificial Sequence: Synthetic oligonucleotide
aucaaugcaaucagcucca

SEQ ID NO: 2533629 - RNA, 19 nt, Artificial Sequence
  Description of Artificial Sequence: Synthetic oligonucleotide
aggagugccggcaccauag

SEQ ID NO: 2533630 - RNA, 19 nt, Artificial Sequence
  Description of Artificial Sequence: Synthetic oligonucleotide
gagcaaggggcgcagggac

SEQ ID NO: 2533631 - RNA, 19 nt, Artificial Sequence
  Description of Artificial Sequence: Synthetic oligonucleotide
auaaugcguccaucuacca

SEQ ID NO: 2533632 - RNA, 19 nt, Artificial Sequence
  Description of Artificial Sequence: Synthetic oligonucleotide
accucagcccagcacacca

SEQ ID NO: 2533633 - RNA, 19 nt, Artificial Sequence
  Description of Artificial Sequence: Synthetic oligonucleotide
guauguggagcgugucucc

SEQ ID NO: 2533634 - RNA, 19 nt, Artificial Sequence
  Description of Artificial Sequence: Synthetic oligonucleotide
gacaugacgggaccagguc

SEQ ID NO: 2533635 - RNA, 19 nt, Artificial Sequence
  Description of Artificial Sequence: Synthetic oligonucleotide
uguaguguauguggagcgu

SEQ ID NO: 2533636 - RNA, 19 nt, Artificial Sequence
  Description of Artificial Sequence: Synthetic oligonucleotide
ggacuuucgguuucuggcc

SEQ ID NO: 2533637 - RNA, 19 nt, Artificial Sequence
  Description of Artificial Sequence: Synthetic oligonucleotide
guccggacaggacuuucgg

SEQ ID NO: 2533638 - RNA, 19 nt, Artificial Sequence
  Description of Artificial Sequence: Synthetic oligonucleotide
guaguguauguggagcgug

SEQ ID NO: 2533639 - RNA, 19 nt, Artificial Sequence
  Description of Artificial Sequence: Synthetic oligonucleotide
agacgguggguacccucgc

SEQ ID NO: 2533640 - RNA, 19 nt, Artificial Sequence
  Description of Artificial Sequence: Synthetic oligonucleotide
ggagcgugucuccaaaggc

SEQ ID NO: 2533641 - RNA, 19 nt, Artificial Sequence
  Description of Artificial Sequence: Synthetic oligonucleotide
gagugccggcaccauagcc

SEQ ID NO: 2533642 - RNA, 19 nt, Artificial Sequence
  Description of Artificial Sequence: Synthetic oligonucleotide
caagugagaaggaaugacu

SEQ ID NO: 2533643 - RNA, 19 nt, Artificial Sequence
  Description of Artificial Sequence: Synthetic oligonucleotide
ugacgggaccaggucaggg

SEQ ID NO: 2533644 - RNA, 19 nt, Artificial Sequence
  Description of Artificial Sequence: Synthetic oligonucleotide
uccacuuggaggguccgga

SEQ ID NO: 2533645 - RNA, 19 nt, Artificial Sequence
  Description of Artificial Sequence: Synthetic oligonucleotide
gauacccgaucagacccag

SEQ ID NO: 2533646 - RNA, 19 nt, Artificial Sequence
  Description of Artificial Sequence: Synthetic oligonucleotide
agugccggcaccauagcca

SEQ ID NO: 2533647 - RNA, 19 nt, Artificial Sequence
  Description of Artificial Sequence: Synthetic oligonucleotide
gaucucuggucagagaugu

SEQ ID NO: 2533648 - RNA, 19 nt, Artificial Sequence
  Description of Artificial Sequence: Synthetic oligonucleotide
uauguggagcgugucucca

SEQ ID NO: 2533649 - RNA, 19 nt, Artificial Sequence
  Description of Artificial Sequence: Synthetic oligonucleotide
gcucgaaucaaugcaauca

SEQ ID NO: 2533650 - RNA, 19 nt, Artificial Sequence
  Description of Artificial Sequence: Synthetic oligonucleotide
agaaggaaugacugcucuu

SEQ ID NO: 2533651 - RNA, 19 nt, Artificial Sequence
  Description of Artificial Sequence: Synthetic oligonucleotide
aucuaccaagcuucccgug

SEQ ID NO: 2533652 - RNA, 19 nt, Artificial Sequence
  Description of Artificial Sequence: Synthetic oligonucleotide
cuuuuggccaaguucuaua

SEQ ID NO: 2533653 - RNA, 19 nt, Artificial Sequence
  Description of Artificial Sequence: Synthetic oligonucleotide
uuucuggcccgaccucagc

SEQ ID NO: 2533654 - RNA, 19 nt, Artificial Sequence
  Description of Artificial Sequence: Synthetic oligonucleotide
ugguagacuuugguucugc

SEQ ID NO: 2533655 - RNA, 19 nt, Artificial Sequence
  Description of Artificial Sequence: Synthetic oligonucleotide
uaggccaagugagaaggaa

SEQ ID NO: 2533656 - RNA, 19 nt, Artificial Sequence
  Description of Artificial Sequence: Synthetic oligonucleotide
aaggggcgcagggacauga

SEQ ID NO: 2533657 - RNA, 19 nt, Artificial Sequence
  Description of Artificial Sequence: Synthetic oligonucleotide
augacugcucuucgcuucu

SEQ ID NO: 2533658 - RNA, 19 nt, Artificial Sequence
  Description of Artificial Sequence: Synthetic oligonucleotide
gucagagaugugucaauaa

SEQ ID NO: 2533659 - RNA, 19 nt, Artificial Sequence
  Description of Artificial Sequence: Synthetic oligonucleotide
acaccaccccacugaacag

SEQ ID NO: 2533660 - RNA, 19 nt, Artificial Sequence
  Description of Artificial Sequence: Synthetic oligonucleotide
uggcucgaaucaaugcaau

SEQ ID NO: 2533661 - RNA, 19 nt, Artificial Sequence
  Description of Artificial Sequence: Synthetic oligonucleotide
augcguccaucuaccaagc

SEQ ID NO: 2533662 - RNA, 19 nt, Artificial Sequence
  Description of Artificial Sequence: Synthetic oligonucleotide
uugccaauaguuggcucga

SEQ ID NO: 2533663 - RNA, 19 nt, Artificial Sequence
  Description of Artificial Sequence: Synthetic oligonucleotide
acgggaccaggucaggggu

SEQ ID NO: 2533664 - RNA, 19 nt, Artificial Sequence
  Description of Artificial Sequence: Synthetic oligonucleotide
acccgaucagacccaggag

SEQ ID NO: 2533665 - RNA, 19 nt, Artificial Sequence
  Description of Artificial Sequence: Synthetic oligonucleotide
ggccaaguucuauaaccag

SEQ ID NO: 2533666 - RNA, 19 nt, Artificial Sequence
  Description of Artificial Sequence: Synthetic oligonucleotide
ucgcuuuccauaggccaag

SEQ ID NO: 2533667 - RNA, 19 nt, Artificial Sequence
  Description of Artificial Sequence: Synthetic oligonucleotide
uacccucgcuuuccauagg

SEQ ID NO: 2533668 - RNA, 19 nt, Artificial Sequence
  Description of Artificial Sequence: Synthetic oligonucleotide
uccggacaggacuuucggu

SEQ ID NO: 2533669 - RNA, 19 nt, Artificial Sequence
  Description of Artificial Sequence: Synthetic oligonucleotide
uucccguguaguguaugug

SEQ ID NO: 2533670 - RNA, 19 nt, Artificial Sequence
  Description of Artificial Sequence: Synthetic oligonucleotide
agacuuugguucugcugga

SEQ ID NO: 2533671 - RNA, 19 nt, Artificial Sequence
  Description of Artificial Sequence: Synthetic oligonucleotide
acccaggagugccggcacc

SEQ ID NO: 2533672 - RNA, 19 nt, Artificial Sequence
  Description of Artificial Sequence: Synthetic oligonucleotide
ggcaccauagccaugccca

SEQ ID NO: 2533673 - RNA, 19 nt, Artificial Sequence
  Description of Artificial Sequence: Synthetic oligonucleotide
uucgggugcaggcgaccag

SEQ ID NO: 2533674 - RNA, 19 nt, Artificial Sequence
  Description of Artificial Sequence: Synthetic oligonucleotide
aaaccacuauuuauuucuu

SEQ ID NO: 2533675 - RNA, 19 nt, Artificial Sequence
  Description of Artificial Sequence: Synthetic oligonucleotide
uccaaaggcggcggauucc

SEQ ID NO: 2533676 - RNA, 19 nt, Artificial Sequence
  Description of Artificial Sequence: Synthetic oligonucleotide
gcuuuugccaauaguuggc

SEQ ID NO: 2533677 - RNA, 19 nt, Artificial Sequence
  Description of Artificial Sequence: Synthetic oligonucleotide
uccaucuaccaagcuuccc

SEQ ID NO: 2533678 - RNA, 19 nt, Artificial Sequence
  Description of Artificial Sequence: Synthetic oligonucleotide
ucuccacuuggaggguccg

SEQ ID NO: 2533679 - RNA, 19 nt, Artificial Sequence
  Description of Artificial Sequence: Synthetic oligonucleotide
agggacaugacgggaccag

SEQ ID NO: 2533680 - RNA, 19 nt, Artificial Sequence
  Description of Artificial Sequence: Synthetic oligonucleotide
accuggaaucaccugcuuu

SEQ ID NO: 2533681 - RNA, 19 nt, Artificial Sequence
  Description of Artificial Sequence: Synthetic oligonucleotide
ggagcggccagagcaaggg

SEQ ID NO: 2533682 - RNA, 19 nt, Artificial Sequence
  Description of Artificial Sequence: Synthetic oligonucleotide
ggcucuguuccagaccugg

SEQ ID NO: 2533683 - RNA, 19 nt, Artificial Sequence
  Description of Artificial Sequence: Synthetic oligonucleotide
gagcggccagagcaagggg

SEQ ID NO: 2533684 - RNA, 19 nt, Artificial Sequence
  Description of Artificial Sequence: Synthetic oligonucleotide
uggucagagaugugucaau

SEQ ID NO: 2533685 - RNA, 19 nt, Artificial Sequence
  Description of Artificial Sequence: Synthetic oligonucleotide
auaguuggcucgaaucaau

SEQ ID NO: 2533686 - RNA, 19 nt, Artificial Sequence
  Description of Artificial Sequence: Synthetic oligonucleotide
ucuucgcuucucucccaca

SEQ ID NO: 2533687 - RNA, 19 nt, Artificial Sequence
  Description of Artificial Sequence: Synthetic oligonucleotide
uuugguucugcuggacuuu

SEQ ID NO: 2533688 - RNA, 19 nt, Artificial Sequence
  Description of Artificial Sequence: Synthetic oligonucleotide
guggagcgugucuccaaag

SEQ ID NO: 2533689 - RNA, 19 nt, Artificial Sequence
  Description of Artificial Sequence: Synthetic oligonucleotide
uuggaggguccggacagga

SEQ ID NO: 2533690 - RNA, 19 nt, Artificial Sequence
  Description of Artificial Sequence: Synthetic oligonucleotide
gugucuccaaaggcggcgg

SEQ ID NO: 2533691 - RNA, 19 nt, Artificial Sequence
  Description of Artificial Sequence: Synthetic oligonucleotide
agcacaccaccccacugaa

SEQ ID NO: 2533692 - RNA, 19 nt, Artificial Sequence
  Description of Artificial Sequence: Synthetic oligonucleotide
cuccaaaggcggcggauuc

SEQ ID NO: 2533693 - RNA, 19 nt, Artificial Sequence
  Description of Artificial Sequence: Synthetic oligonucleotide
cucuucgcuucucucccac

SEQ ID NO: 2533694 - RNA, 19 nt, Artificial Sequence
  Description of Artificial Sequence: Synthetic oligonucleotide
guaccagggucuccacuug

SEQ ID NO: 2533695 - RNA, 19 nt, Artificial Sequence
  Description of Artificial Sequence: Synthetic oligonucleotide
uugguagacuuugguucug

SEQ ID NO: 2533696 - RNA, 19 nt, Artificial Sequence
  Description of Artificial Sequence: Synthetic oligonucleotide
ggcgcagggacaugacggg

SEQ ID NO: 2533697 - RNA, 19 nt, Artificial Sequence
  Description of Artificial Sequence: Synthetic oligonucleotide
ggauuccguacacgauucg

SEQ ID NO: 2533698 - RNA, 19 nt, Artificial Sequence
  Description of Artificial Sequence: Synthetic oligonucleotide
uggguacccucgcuuucca

SEQ ID NO: 2533699 - RNA, 19 nt, Artificial Sequence
  Description of Artificial Sequence: Synthetic oligonucleotide
gaccaggacguguucccuc

SEQ ID NO: 2533700 - RNA, 19 nt, Artificial Sequence
  Description of Artificial Sequence: Synthetic oligonucleotide
aucagacccaggagugccg

SEQ ID NO: 2533701 - RNA, 19 nt, Artificial Sequence
  Description of Artificial Sequence: Synthetic oligonucleotide
ggaaugacugcucuucgcu

SEQ ID NO: 2533702 - RNA, 19 nt, Artificial Sequence
  Description of Artificial Sequence: Synthetic oligonucleotide
ccaagugagaaggaaugac

SEQ ID NO: 2533703 - RNA, 19 nt, Artificial Sequence
  Description of Artificial Sequence: Synthetic oligonucleotide
ucagcagcuuuugccaaua

SEQ ID NO: 2533704 - RNA, 19 nt, Artificial Sequence
  Description of Artificial Sequence: Synthetic oligonucleotide
agaccuggaaucaccugcu

SEQ ID NO: 2533705 - RNA, 19 nt, Artificial Sequence
  Description of Artificial Sequence: Synthetic oligonucleotide
cucgcuuuccauaggccaa

SEQ ID NO: 2533706 - RNA, 19 nt, Artificial Sequence
  Description of Artificial Sequence: Synthetic oligonucleotide
ugcuuuuggccaaguucua

SEQ ID NO: 2533707 - RNA, 19 nt, Artificial Sequence
  Description of Artificial Sequence: Synthetic oligonucleotide
ugcguccaucuaccaagcu

SEQ ID NO: 2533708 - RNA, 19 nt, Artificial Sequence
  Description of Artificial Sequence: Synthetic oligonucleotide
uggaggguccggacaggac

SEQ ID NO: 2533709 - RNA, 19 nt, Artificial Sequence
  Description of Artificial Sequence: Synthetic oligonucleotide
cauagccaugcccaccaga

SEQ ID NO: 2533710 - RNA, 19 nt, Artificial Sequence
  Description of Artificial Sequence: Synthetic oligonucleotide
ggauagacgguggguaccc

SEQ ID NO: 2533711 - RNA, 19 nt, Artificial Sequence
  Description of Artificial Sequence: Synthetic oligonucleotide
gaggaucucuggucagaga

SEQ ID NO: 2533712 - RNA, 19 nt, Artificial Sequence
  Description of Artificial Sequence: Synthetic oligonucleotide
guggguacccucgcuuucc

SEQ ID NO: 2533713 - RNA, 19 nt, Artificial Sequence
  Description of Artificial Sequence: Synthetic oligonucleotide
caaugcaaucagcuccaca

SEQ ID NO: 2533714 - RNA, 19 nt, Artificial Sequence
  Description of Artificial Sequence: Synthetic oligonucleotide
uguucgggugcaggcgacc

SEQ ID NO: 2533715 - RNA, 19 nt, Artificial Sequence
  Description of Artificial Sequence: Synthetic oligonucleotide
cguguaguguauguggagc

SEQ ID NO: 2533716 - RNA, 19 nt, Artificial Sequence
  Description of Artificial Sequence: Synthetic oligonucleotide
ccaagcuucccguguagug

SEQ ID NO: 2533717 - RNA, 19 nt, Artificial Sequence
  Description of Artificial Sequence: Synthetic oligonucleotide
ccgaucagacccaggagug

SEQ ID NO: 2533718 - RNA, 19 nt, Artificial Sequence
  Description of Artificial Sequence: Synthetic oligonucleotide
gacuuugguucugcuggac

SEQ ID NO: 2533719 - RNA, 19 nt, Artificial Sequence
  Description of Artificial Sequence: Synthetic oligonucleotide
guuucuggcccgaccucag

SEQ ID NO: 2533720 - RNA, 19 nt, Artificial Sequence
  Description of Artificial Sequence: Synthetic oligonucleotide
ugcauccgcugggauagac

SEQ ID NO: 2533721 - RNA, 19 nt, Artificial Sequence
  Description of Artificial Sequence: Synthetic oligonucleotide
ggacaggcuguucgggugc

SEQ ID NO: 2533722 - RNA, 19 nt, Artificial Sequence
  Description of Artificial Sequence: Synthetic oligonucleotide
gucaggggugccaggcagg

SEQ ID NO: 2533723 - RNA, 19 nt, Artificial Sequence
  Description of Artificial Sequence: Synthetic oligonucleotide
gccaaguucuauaaccaga

SEQ ID NO: 2533724 - RNA, 19 nt, Artificial Sequence
  Description of Artificial Sequence: Synthetic oligonucleotide
cuuggaggguccggacagg

SEQ ID NO: 2533725 - RNA, 19 nt, Artificial Sequence
  Description of Artificial Sequence: Synthetic oligonucleotide
aggccaagugagaaggaau

SEQ ID NO: 2533726 - RNA, 19 nt, Artificial Sequence
  Description of Artificial Sequence: Synthetic oligonucleotide
gacccaggagugccggcac

SEQ ID NO: 2533727 - RNA, 19 nt, Artificial Sequence
  Description of Artificial Sequence: Synthetic oligonucleotide
guuccagaccuggaaucac

SEQ ID NO: 2533728 - RNA, 19 nt, Artificial Sequence
  Description of Artificial Sequence: Synthetic oligonucleotide
cuucagcagcuuuugccaa

SEQ ID NO: 2533729 - RNA, 19 nt, Artificial Sequence
  Description of Artificial Sequence: Synthetic oligonucleotide
gguccggacaggacuuucg

SEQ ID NO: 2533730 - RNA, 19 nt, Artificial Sequence
  Description of Artificial Sequence: Synthetic oligonucleotide
acgguggguacccucgcuu

SEQ ID NO: 2533731 - RNA, 19 nt, Artificial Sequence
  Description of Artificial Sequence: Synthetic oligonucleotide
cuuugguucugcuggacuu

SEQ ID NO: 2533732 - RNA, 19 nt, Artificial Sequence
  Description of Artificial Sequence: Synthetic oligonucleotide
gaaugacugcucuucgcuu

SEQ ID NO: 2533733 - RNA, 19 nt, Artificial Sequence
  Description of Artificial Sequence: Synthetic oligonucleotide
ccaaaggcggcggauuccg

SEQ ID NO: 2533734 - RNA, 19 nt, Artificial Sequence
  Description of Artificial Sequence: Synthetic oligonucleotide
gguacccucgcuuuccaua

SEQ ID NO: 2533735 - RNA, 19 nt, Artificial Sequence
  Description of Artificial Sequence: Synthetic oligonucleotide
accaagcuucccguguagu

SEQ ID NO: 2533736 - RNA, 19 nt, Artificial Sequence
  Description of Artificial Sequence: Synthetic oligonucleotide
gcagggacaugacgggacc

SEQ ID NO: 2533737 - RNA, 19 nt, Artificial Sequence
  Description of Artificial Sequence: Synthetic oligonucleotide
gccggcaccauagccaugc

SEQ ID NO: 2533738 - RNA, 19 nt, Artificial Sequence
  Description of Artificial Sequence: Synthetic oligonucleotide
gcagcuuuugccaauaguu

SEQ ID NO: 2533739 - RNA, 19 nt, Artificial Sequence
  Description of Artificial Sequence: Synthetic oligonucleotide
ggcuguucgggugcaggcg

SEQ ID NO: 2533740 - RNA, 19 nt, Artificial Sequence
  Description of Artificial Sequence: Synthetic oligonucleotide
guguauguggagcgugucu

SEQ ID NO: 2533741 - RNA, 19 nt, Artificial Sequence
  Description of Artificial Sequence: Synthetic oligonucleotide
ggcucgaaucaaugcaauc

SEQ ID NO: 2533742 - RNA, 19 nt, Artificial Sequence
  Description of Artificial Sequence: Synthetic oligonucleotide
cgaaucaaugcaaucagcu

SEQ ID NO: 2533743 - RNA, 19 nt, Artificial Sequence
  Description of Artificial Sequence: Synthetic oligonucleotide
gcgaccaggacguguuccc

SEQ ID NO: 2533744 - RNA, 19 nt, Artificial Sequence
  Description of Artificial Sequence: Synthetic oligonucleotide
gcauccgcugggauagacg

SEQ ID NO: 2533745 - RNA, 19 nt, Artificial Sequence
  Description of Artificial Sequence: Synthetic oligonucleotide
aggcgaccaggacguguuc

SEQ ID NO: 2533746 - RNA, 19 nt, Artificial Sequence
  Description of Artificial Sequence: Synthetic oligonucleotide
gggauagacgguggguacc

SEQ ID NO: 2533747 - RNA, 19 nt, Artificial Sequence
  Description of Artificial Sequence: Synthetic oligonucleotide
cuguucgggugcaggcgac

SEQ ID NO: 2533748 - RNA, 19 nt, Artificial Sequence
  Description of Artificial Sequence: Synthetic oligonucleotide
cugggauagacggugggua

SEQ ID NO: 2533749 - RNA, 19 nt, Artificial Sequence
  Description of Artificial Sequence: Synthetic oligonucleotide
caucuaccaagcuucccgu

SEQ ID NO: 2533750 - RNA, 19 nt, Artificial Sequence
  Description of Artificial Sequence: Synthetic oligonucleotide
guccaucuaccaagcuucc

SEQ ID NO: 2533751 - RNA, 19 nt, Artificial Sequence
  Description of Artificial Sequence: Synthetic oligonucleotide
augacgggaccaggucagg

SEQ ID NO: 2533752 - RNA, 19 nt, Artificial Sequence
  Description of Artificial Sequence: Synthetic oligonucleotide
ggaucucuggucagagaug

SEQ ID NO: 2533753 - RNA, 19 nt, Artificial Sequence
  Description of Artificial Sequence: Synthetic oligonucleotide
uggcccgaccucagcccag

SEQ ID NO: 2533754 - RNA, 19 nt, Artificial Sequence
  Description of Artificial Sequence: Synthetic oligonucleotide
gggacaugacgggaccagg

SEQ ID NO: 2533755 - RNA, 19 nt, Artificial Sequence
  Description of Artificial Sequence: Synthetic oligonucleotide
auaggccaagugagaagga

SEQ ID NO: 2533756 - RNA, 19 nt, Artificial Sequence
  Description of Artificial Sequence: Synthetic oligonucleotide
ccucgcuuuccauaggcca

SEQ ID NO: 2533757 - RNA, 19 nt, Artificial Sequence
  Description of Artificial Sequence: Synthetic oligonucleotide
cuaccaagcuucccgugua

SEQ ID NO: 2533758 - RNA, 19 nt, Artificial Sequence
  Description of Artificial Sequence: Synthetic oligonucleotide
ccguguaguguauguggag

SEQ ID NO: 2533759 - RNA, 19 nt, Artificial Sequence
  Description of Artificial Sequence: Synthetic oligonucleotide
gaccucagcccagcacacc

SEQ ID NO: 2533760 - RNA, 19 nt, Artificial Sequence
  Description of Artificial Sequence: Synthetic oligonucleotide
accugcuuuuggccaaguu

SEQ ID NO: 2533761 - RNA, 19 nt, Artificial Sequence
  Description of Artificial Sequence: Synthetic oligonucleotide
cuccacuuggaggguccgg

SEQ ID NO: 2533762 - RNA, 19 nt, Artificial Sequence
  Description of Artificial Sequence: Synthetic oligonucleotide
cuuuugccaauaguuggcu

SEQ ID NO: 2533763 - RNA, 19 nt, Artificial Sequence
  Description of Artificial Sequence: Synthetic oligonucleotide
cacugcauccgcugggaua

SEQ ID NO: 2533764 - RNA, 19 nt, Artificial Sequence
  Description of Artificial Sequence: Synthetic oligonucleotide
gcggccagagcaaggggcg

SEQ ID NO: 2533765 - RNA, 19 nt, Artificial Sequence
  Description of Artificial Sequence: Synthetic oligonucleotide
gcuguucgggugcaggcga

SEQ ID NO: 2533766 - RNA, 19 nt, Artificial Sequence
  Description of Artificial Sequence: Synthetic oligonucleotide
auacccgaucagacccagg

SEQ ID NO: 2533767 - RNA, 19 nt, Artificial Sequence
  Description of Artificial Sequence: Synthetic oligonucleotide
gguuucuggcccgaccuca

SEQ ID NO: 2533768 - RNA, 19 nt, Artificial Sequence
  Description of Artificial Sequence: Synthetic oligonucleotide
ggacaggacuuucgguuuc

SEQ ID NO: 2533769 - RNA, 19 nt, Artificial Sequence
  Description of Artificial Sequence: Synthetic oligonucleotide
ggcgaccaggacguguucc

SEQ ID NO: 2533770 - RNA, 19 nt, Artificial Sequence
  Description of Artificial Sequence: Synthetic oligonucleotide
uuucgguuucuggcccgac

SEQ ID NO: 2533771 - RNA, 19 nt, Artificial Sequence
  Description of Artificial Sequence: Synthetic oligonucleotide
ccgaccucagcccagcaca

SEQ ID NO: 2533772 - RNA, 19 nt, Artificial Sequence
  Description of Artificial Sequence: Synthetic oligonucleotide
ggacguguucccucagcuc

SEQ ID NO: 2533773 - RNA, 19 nt, Artificial Sequence
  Description of Artificial Sequence: Synthetic oligonucleotide
cuauaaccagaggaucucu

SEQ ID NO: 2533774 - RNA, 19 nt, Artificial Sequence
  Description of Artificial Sequence: Synthetic oligonucleotide
accaccccacugaacagaa

SEQ ID NO: 2533775 - RNA, 19 nt, Artificial Sequence
  Description of Artificial Sequence: Synthetic oligonucleotide
guucgggugcaggcgacca

SEQ ID NO: 2533776 - RNA, 19 nt, Artificial Sequence
  Description of Artificial Sequence: Synthetic oligonucleotide
aggcggcggauuccguaca

SEQ ID NO: 2533777 - RNA, 19 nt, Artificial Sequence
  Description of Artificial Sequence: Synthetic oligonucleotide
cagaggaucucuggucaga

SEQ ID NO: 2533778 - RNA, 19 nt, Artificial Sequence
  Description of Artificial Sequence: Synthetic oligonucleotide
agcaaggggcgcagggaca

SEQ ID NO: 2533779 - RNA, 19 nt, Artificial Sequence
  Description of Artificial Sequence: Synthetic oligonucleotide
ggucagagaugugucaaua

SEQ ID NO: 2533780 - RNA, 19 nt, Artificial Sequence
  Description of Artificial Sequence: Synthetic oligonucleotide
gguggguacccucgcuuuc

SEQ ID NO: 2533781 - RNA, 19 nt, Artificial Sequence
  Description of Artificial Sequence: Synthetic oligonucleotide
cccucgcuuuccauaggcc

SEQ ID NO: 2533782 - RNA, 19 nt, Artificial Sequence
  Description of Artificial Sequence: Synthetic oligonucleotide
cggauuccguacacgauuc

SEQ ID NO: 2533783 - RNA, 19 nt, Artificial Sequence
  Description of Artificial Sequence: Synthetic oligonucleotide
aggggcgcagggacaugac

SEQ ID NO: 2533784 - RNA, 19 nt, Artificial Sequence
  Description of Artificial Sequence: Synthetic oligonucleotide
cgugucuccaaaggcggcg

SEQ ID NO: 2533785 - RNA, 19 nt, Artificial Sequence
  Description of Artificial Sequence: Synthetic oligonucleotide
ggagugccggcaccauagc

SEQ ID NO: 2533786 - RNA, 19 nt, Artificial Sequence
  Description of Artificial Sequence: Synthetic oligonucleotide
ccacaucauacuguaccac

SEQ ID NO: 2533787 - RNA, 19 nt, Artificial Sequence
  Description of Artificial Sequence: Synthetic oligonucleotide
gugcaggcgaccaggacgu

SEQ ID NO: 2533788 - RNA, 19 nt, Artificial Sequence
  Description of Artificial Sequence: Synthetic oligonucleotide
gccaagugagaaggaauga

SEQ ID NO: 2533789 - RNA, 19 nt, Artificial Sequence
  Description of Artificial Sequence: Synthetic oligonucleotide
gacaggcuguucgggugca

SEQ ID NO: 2533790 - RNA, 19 nt, Artificial Sequence
  Description of Artificial Sequence: Synthetic oligonucleotide
ugccaauaguuggcucgaa

SEQ ID NO: 2533791 - RNA, 19 nt, Artificial Sequence
  Description of Artificial Sequence: Synthetic oligonucleotide
caccaccccacugaacaga

SEQ ID NO: 2533792 - RNA, 19 nt, Artificial Sequence
  Description of Artificial Sequence: Synthetic oligonucleotide
cuggcccgaccucagccca

SEQ ID NO: 2533793 - RNA, 19 nt, Artificial Sequence
  Description of Artificial Sequence: Synthetic oligonucleotide
ccagaccuggaaucaccug

SEQ ID NO: 2533794 - RNA, 19 nt, Artificial Sequence
  Description of Artificial Sequence: Synthetic oligonucleotide
ugccggcaccauagccaug

SEQ ID NO: 2533795 - RNA, 19 nt, Artificial Sequence
  Description of Artificial Sequence: Synthetic oligonucleotide
gacaggacuuucgguuucu

SEQ ID NO: 2533796 - RNA, 19 nt, Artificial Sequence
  Description of Artificial Sequence: Synthetic oligonucleotide
cuuucgguuucuggcccga

SEQ ID NO: 2533797 - RNA, 19 nt, Artificial Sequence
  Description of Artificial Sequence: Synthetic oligonucleotide
gguagacuuugguucugcu

SEQ ID NO: 2533798 - RNA, 19 nt, Artificial Sequence
  Description of Artificial Sequence: Synthetic oligonucleotide
aucucuggucagagaugug

SEQ ID NO: 2533799 - RNA, 19 nt, Artificial Sequence
  Description of Artificial Sequence: Synthetic oligonucleotide
cgcagggacaugacgggac

SEQ ID NO: 2533800 - RNA, 19 nt, Artificial Sequence
  Description of Artificial Sequence: Synthetic oligonucleotide
gacgguggguacccucgcu

SEQ ID NO: 2533801 - RNA, 19 nt, Artificial Sequence
  Description of Artificial Sequence: Synthetic oligonucleotide
ccuggaaucaccugcuuuu

SEQ ID NO: 2533802 - RNA, 19 nt, Artificial Sequence
  Description of Artificial Sequence: Synthetic oligonucleotide
ugacugcucuucgcuucuc

SEQ ID NO: 2533803 - RNA, 19 nt, Artificial Sequence
  Description of Artificial Sequence: Synthetic oligonucleotide
cccgaucagacccaggagu

SEQ ID NO: 2533804 - RNA, 19 nt, Artificial Sequence
  Description of Artificial Sequence: Synthetic oligonucleotide
gugccggcaccauagccau

SEQ ID NO: 2533805 - RNA, 19 nt, Artificial Sequence
  Description of Artificial Sequence: Synthetic oligonucleotide
gcggcggauuccguacacg

SEQ ID NO: 2533806 - RNA, 19 nt, Artificial Sequence
  Description of Artificial Sequence: Synthetic oligonucleotide
ccacuuggaggguccggac

SEQ ID NO: 2533807 - RNA, 19 nt, Artificial Sequence
  Description of Artificial Sequence: Synthetic oligonucleotide
cagggacaugacgggacca

SEQ ID NO: 2533808 - RNA, 19 nt, Artificial Sequence
  Description of Artificial Sequence: Synthetic oligonucleotide
gcuucccguguaguguaug

SEQ ID NO: 2533809 - RNA, 19 nt, Artificial Sequence
  Description of Artificial Sequence: Synthetic oligonucleotide
gcagccggagcggccagag

SEQ ID NO: 2533810 - RNA, 19 nt, Artificial Sequence
  Description of Artificial Sequence: Synthetic oligonucleotide
gcccuucagcagcuuuugc

SEQ ID NO: 2533811 - RNA, 19 nt, Artificial Sequence
  Description of Artificial Sequence: Synthetic oligonucleotide
gauagacgguggguacccu

SEQ ID NO: 2533812 - RNA, 19 nt, Artificial Sequence
  Description of Artificial Sequence: Synthetic oligonucleotide
auccgcugggauagacggu

SEQ ID NO: 2533813 - RNA, 19 nt, Artificial Sequence
  Description of Artificial Sequence: Synthetic oligonucleotide
cuguaccacugcauccgcu

SEQ ID NO: 2533814 - RNA, 19 nt, Artificial Sequence
  Description of Artificial Sequence: Synthetic oligonucleotide
ggcggcggauuccguacac

SEQ ID NO: 2533815 - RNA, 19 nt, Artificial Sequence
  Description of Artificial Sequence: Synthetic oligonucleotide
cuguaccagggucuccacu

SEQ ID NO: 2533816 - RNA, 19 nt, Artificial Sequence
  Description of Artificial Sequence: Synthetic oligonucleotide
ccgcugggauagacggugg

SEQ ID NO: 2533817 - RNA, 19 nt, Artificial Sequence
  Description of Artificial Sequence: Synthetic oligonucleotide
cagccggagcggccagagc

SEQ ID NO: 2533818 - RNA, 19 nt, Artificial Sequence
  Description of Artificial Sequence: Synthetic oligonucleotide
gcguccaucuaccaagcuu

SEQ ID NO: 2533819 - RNA, 19 nt, Artificial Sequence
  Description of Artificial Sequence: Synthetic oligonucleotide
ccucagcccagcacaccac

SEQ ID NO: 2533820 - RNA, 19 nt, Artificial Sequence
  Description of Artificial Sequence: Synthetic oligonucleotide
cgcugggauagacgguggg

SEQ ID NO: 2533821 - RNA, 19 nt, Artificial Sequence
  Description of Artificial Sequence: Synthetic oligonucleotide
caggcgaccaggacguguu

SEQ ID NO: 2533822 - RNA, 19 nt, Artificial Sequence
  Description of Artificial Sequence: Synthetic oligonucleotide
ggacaugacgggaccaggu

SEQ ID NO: 2533823 - RNA, 19 nt, Artificial Sequence
  Description of Artificial Sequence: Synthetic oligonucleotide
gggugcaggcgaccaggac

SEQ ID NO: 2533824 - RNA, 19 nt, Artificial Sequence
  Description of Artificial Sequence: Synthetic oligonucleotide
cccgaccucagcccagcac

SEQ ID NO: 2533825 - RNA, 19 nt, Artificial Sequence
  Description of Artificial Sequence: Synthetic oligonucleotide
gaggguccggacaggacuu

SEQ ID NO: 2533826 - RNA, 19 nt, Artificial Sequence
  Description of Artificial Sequence: Synthetic oligonucleotide
gccaauaguuggcucgaau

SEQ ID NO: 2533827 - RNA, 19 nt, Artificial Sequence
  Description of Artificial Sequence: Synthetic oligonucleotide
cgaucagacccaggagugc

SEQ ID NO: 2533828 - RNA, 19 nt, Artificial Sequence
  Description of Artificial Sequence: Synthetic oligonucleotide
caggagugccggcaccaua

SEQ ID NO: 2533829 - RNA, 19 nt, Artificial Sequence
  Description of Artificial Sequence: Synthetic oligonucleotide
ggggcuguaccagggucuc

SEQ ID NO: 2533830 - RNA, 19 nt, Artificial Sequence
  Description of Artificial Sequence: Synthetic oligonucleotide
ccggacaggacuuucgguu

SEQ ID NO: 2533831 - RNA, 19 nt, Artificial Sequence
  Description of Artificial Sequence: Synthetic oligonucleotide
aggcucuguuccagaccug

SEQ ID NO: 2533832 - RNA, 19 nt, Artificial Sequence
  Description of Artificial Sequence: Synthetic oligonucleotide
gcgugucuccaaaggcggc

SEQ ID NO: 2533833 - RNA, 19 nt, Artificial Sequence
  Description of Artificial Sequence: Synthetic oligonucleotide
gaccuggaaucaccugcuu

SEQ ID NO: 2533834 - RNA, 19 nt, Artificial Sequence
  Description of Artificial Sequence: Synthetic oligonucleotide
caaggggcgcagggacaug

SEQ ID NO: 2533835 - RNA, 19 nt, Artificial Sequence
  Description of Artificial Sequence: Synthetic oligonucleotide
ccauagccaugcccaccag

SEQ ID NO: 2533836 - RNA, 19 nt, Artificial Sequence
  Description of Artificial Sequence: Synthetic oligonucleotide
agcuucccguguaguguau

SEQ ID NO: 2533837 - RNA, 19 nt, Artificial Sequence
  Description of Artificial Sequence: Synthetic oligonucleotide
cggcggauuccguacacga

SEQ ID NO: 2533838 - RNA, 19 nt, Artificial Sequence
  Description of Artificial Sequence: Synthetic oligonucleotide
agcagccggagcggccaga

SEQ ID NO: 2533839 - RNA, 19 nt, Artificial Sequence
  Description of Artificial Sequence: Synthetic oligonucleotide
cggagcggccagagcaagg

SEQ ID NO: 2533840 - RNA, 19 nt, Artificial Sequence
  Description of Artificial Sequence: Synthetic oligonucleotide
gcugggauagacggugggu

SEQ ID NO: 2533841 - RNA, 19 nt, Artificial Sequence
  Description of Artificial Sequence: Synthetic oligonucleotide
cgaccucagcccagcacac

SEQ ID NO: 2533842 - RNA, 19 nt, Artificial Sequence
  Description of Artificial Sequence: Synthetic oligonucleotide
ggccagagcaaggggcgca

SEQ ID NO: 2533843 - RNA, 19 nt, Artificial Sequence
  Description of Artificial Sequence: Synthetic oligonucleotide
caggggugccaggcaggac

SEQ ID NO: 2533844 - RNA, 19 nt, Artificial Sequence
  Description of Artificial Sequence: Synthetic oligonucleotide
cacacauguccagcaggcu

SEQ ID NO: 2533845 - RNA, 19 nt, Artificial Sequence
  Description of Artificial Sequence: Synthetic oligonucleotide
gcuuuuggccaaguucuau

SEQ ID NO: 2533846 - RNA, 19 nt, Artificial Sequence
  Description of Artificial Sequence: Synthetic oligonucleotide
caaaggcggcggauuccgu

SEQ ID NO: 2533847 - RNA, 19 nt, Artificial Sequence
  Description of Artificial Sequence: Synthetic oligonucleotide
ggcccgaccucagcccagc

SEQ ID NO: 2533848 - RNA, 19 nt, Artificial Sequence
  Description of Artificial Sequence: Synthetic oligonucleotide
aggguccggacaggacuuu

SEQ ID NO: 2533849 - RNA, 19 nt, Artificial Sequence
  Description of Artificial Sequence: Synthetic oligonucleotide
gggugccaggcaggacagg

SEQ ID NO: 2533850 - RNA, 19 nt, Artificial Sequence
  Description of Artificial Sequence: Synthetic oligonucleotide
cgggaccaggucaggggug

SEQ ID NO: 2533851 - RNA, 19 nt, Artificial Sequence
  Description of Artificial Sequence: Synthetic oligonucleotide
ccggagcggccagagcaag

SEQ ID NO: 2533852 - RNA, 19 nt, Artificial Sequence
  Description of Artificial Sequence: Synthetic oligonucleotide
gcgcagggacaugacggga

SEQ ID NO: 2533853 - RNA, 19 nt, Artificial Sequence
  Description of Artificial Sequence: Synthetic oligonucleotide
gcaaggggcgcagggacau

SEQ ID NO: 2533854 - RNA, 19 nt, Artificial Sequence
  Description of Artificial Sequence: Synthetic oligonucleotide
ccggcaccauagccaugcc

SEQ ID NO: 2533855 - RNA, 19 nt, Artificial Sequence
  Description of Artificial Sequence: Synthetic oligonucleotide
gcaggcgaccaggacgugu

SEQ ID NO: 2533856 - RNA, 19 nt, Artificial Sequence
  Description of Artificial Sequence: Synthetic oligonucleotide
ggcggauuccguacacgau

SEQ ID NO: 2533857 - RNA, 19 nt, Artificial Sequence
  Description of Artificial Sequence: Synthetic oligonucleotide
gccggagcggccagagcaa

SEQ ID NO: 2533858 - RNA, 19 nt, Artificial Sequence
  Description of Artificial Sequence: Synthetic oligonucleotide
ggguacccucgcuuuccau

SEQ ID NO: 2533859 - RNA, 19 nt, Artificial Sequence
  Description of Artificial Sequence: Synthetic oligonucleotide
cugcauccgcugggauaga

SEQ ID NO: 2533860 - RNA, 19 nt, Artificial Sequence
  Description of Artificial Sequence: Synthetic oligonucleotide
gcccgaccucagcccagca

SEQ ID NO: 2533861 - RNA, 19 nt, Artificial Sequence
  Description of Artificial Sequence: Synthetic oligonucleotide
cggacaggacuuucgguuu

SEQ ID NO: 2533862 - RNA, 19 nt, Artificial Sequence
  Description of Artificial Sequence: Synthetic oligonucleotide
caccugcuuuuggccaagu

SEQ ID NO: 2533863 - RNA, 19 nt, Artificial Sequence
  Description of Artificial Sequence: Synthetic oligonucleotide
gggucuccacuuggagggu

SEQ ID NO: 2533864 - RNA, 19 nt, Artificial Sequence
  Description of Artificial Sequence: Synthetic oligonucleotide
cgguggguacccucgcuuu

SEQ ID NO: 2533865 - RNA, 19 nt, Artificial Sequence
  Description of Artificial Sequence: Synthetic oligonucleotide
ccacugcauccgcugggau

SEQ ID NO: 2533866 - RNA, 19 nt, Artificial Sequence
  Description of Artificial Sequence: Synthetic oligonucleotide
cgaccaggacguguucccu

SEQ ID NO: 2533867 - RNA, 19 nt, Artificial Sequence
  Description of Artificial Sequence: Synthetic oligonucleotide
ccaggagugccggcaccau

SEQ ID NO: 2533868 - RNA, 19 nt, Artificial Sequence
  Description of Artificial Sequence: Synthetic oligonucleotide
aaaguuguaacacuguagg

SEQ ID NO: 2533869 - RNA, 19 nt, Artificial Sequence
  Description of Artificial Sequence: Synthetic oligonucleotide
aggaaggugagccugaccc

SEQ ID NO: 2533870 - RNA, 19 nt, Artificial Sequence
  Description of Artificial Sequence: Synthetic oligonucleotide
accaaggccagacagagcc

SEQ ID NO: 2533871 - RNA, 19 nt, Artificial Sequence
  Description of Artificial Sequence: Synthetic oligonucleotide
aaaggaagaggcccagucc

SEQ ID NO: 2533872 - RNA, 19 nt, Artificial Sequence
  Description of Artificial Sequence: Synthetic oligonucleotide
aaggaagaggcccaguccg

SEQ ID NO: 2533873 - RNA, 19 nt, Artificial Sequence
  Description of Artificial Sequence: Synthetic oligonucleotide
aaguuguagaagccgauuc

SEQ ID NO: 2533874 - RNA, 19 nt, Artificial Sequence
  Description of Artificial Sequence: Synthetic oligonucleotide
aaaugagcaaugccugggc

SEQ ID NO: 2533875 - RNA, 19 nt, Artificial Sequence
  Description of Artificial Sequence: Synthetic oligonucleotide
uccgcauuagcuaugaaac

SEQ ID NO: 2533876 - RNA, 19 nt, Artificial Sequence
  Description of Artificial Sequence: Synthetic oligonucleotide
auaagcaagaaaaugagca

SEQ ID NO: 2533877 - RNA, 19 nt, Artificial Sequence
  Description of Artificial Sequence: Synthetic oligonucleotide
aaucccauaagccuuuaga

SEQ ID NO: 2533878 - RNA, 19 nt, Artificial Sequence
  Description of Artificial Sequence: Synthetic oligonucleotide
aucccauaagccuuuagac

SEQ ID NO: 2533879 - RNA, 19 nt, Artificial Sequence
  Description of Artificial Sequence: Synthetic oligonucleotide
gauggugaggaccagggcc

SEQ ID NO: 2533880 - RNA, 19 nt, Artificial Sequence
  Description of Artificial Sequence: Synthetic oligonucleotide
acgaaggaaaggaagaggc

SEQ ID NO: 2533881 - RNA, 19 nt, Artificial Sequence
  Description of Artificial Sequence: Synthetic oligonucleotide
guuguaacacuguagggag

SEQ ID NO: 2533882 - RNA, 19 nt, Artificial Sequence
  Description of Artificial Sequence: Synthetic oligonucleotide
aaguuguaacacuguaggg

SEQ ID NO: 2533883 - RNA, 19 nt, Artificial Sequence
  Description of Artificial Sequence: Synthetic oligonucleotide
agacagacauuucuucugc

SEQ ID NO: 2533884 - RNA, 19 nt, Artificial Sequence
  Description of Artificial Sequence: Synthetic oligonucleotide
uuuagaccggcuaacaguc

SEQ ID NO: 2533885 - RNA, 19 nt, Artificial Sequence
  Description of Artificial Sequence: Synthetic oligonucleotide
acuguagggagccaguguc

SEQ ID NO: 2533886 - RNA, 19 nt, Artificial Sequence
  Description of Artificial Sequence: Synthetic oligonucleotide
auacacaccaagccuggcc

SEQ ID NO: 2533887 - RNA, 19 nt, Artificial Sequence
  Description of Artificial Sequence: Synthetic oligonucleotide
uaggacaucagcgacagga

SEQ ID NO: 2533888 - RNA, 19 nt, Artificial Sequence
  Description of Artificial Sequence: Synthetic oligonucleotide
aaaccaaggccagacagag

SEQ ID NO: 2533889 - RNA, 19 nt, Artificial Sequence
  Description of Artificial Sequence: Synthetic oligonucleotide
uaugaaacgaggaggcaga

SEQ ID NO: 2533890 - RNA, 19 nt, Artificial Sequence
  Description of Artificial Sequence: Synthetic oligonucleotide
cauaagcaagaaaaugagc

SEQ ID NO: 2533891 - RNA, 19 nt, Artificial Sequence
  Description of Artificial Sequence: Synthetic oligonucleotide
caagaaaaugagcaaugcc

SEQ ID NO: 2533892 - RNA, 19 nt, Artificial Sequence
  Description of Artificial Sequence: Synthetic oligonucleotide
agcucaggaaaguuguaac

SEQ ID NO: 2533893 - RNA, 19 nt, Artificial Sequence
  Description of Artificial Sequence: Synthetic oligonucleotide
agcuaugaaacgaggaggc

SEQ ID NO: 2533894 - RNA, 19 nt, Artificial Sequence
  Description of Artificial Sequence: Synthetic oligonucleotide
uguaacacuguagggagcc

SEQ ID NO: 2533895 - RNA, 19 nt, Artificial Sequence
  Description of Artificial Sequence: Synthetic oligonucleotide
ucccauaagccuuuagacc

SEQ ID NO: 2533896 - RNA, 19 nt, Artificial Sequence
  Description of Artificial Sequence: Synthetic oligonucleotide
aguuguaacacuguaggga

SEQ ID NO: 2533897 - RNA, 19 nt, Artificial Sequence
  Description of Artificial Sequence: Synthetic oligonucleotide
aaccgaaccccuggaaucc

SEQ ID NO: 2533898 - RNA, 19 nt, Artificial Sequence
  Description of Artificial Sequence: Synthetic oligonucleotide
uaacaguccucccacuugc

SEQ ID NO: 2533899 - RNA, 19 nt, Artificial Sequence
  Description of Artificial Sequence: Synthetic oligonucleotide
uucgcuggcaccuccuugg

SEQ ID NO: 2533900 - RNA, 19 nt, Artificial Sequence
  Description of Artificial Sequence: Synthetic oligonucleotide
cccauaagccuuuagaccg

SEQ ID NO: 2533901 - RNA, 19 nt, Artificial Sequence
  Description of Artificial Sequence: Synthetic oligonucleotide
acagaaguuguagaagccg

SEQ ID NO: 2533902 - RNA, 19 nt, Artificial Sequence
  Description of Artificial Sequence: Synthetic oligonucleotide
aacgaggaggcagagagga

SEQ ID NO: 2533903 - RNA, 19 nt, Artificial Sequence
  Description of Artificial Sequence: Synthetic oligonucleotide
gagccagaaagccaggccc

SEQ ID NO: 2533904 - RNA, 19 nt, Artificial Sequence
  Description of Artificial Sequence: Synthetic oligonucleotide
uacacaccaagccuggcca

SEQ ID NO: 2533905 - RNA, 19 nt, Artificial Sequence
  Description of Artificial Sequence: Synthetic oligonucleotide
agagcguaggacaucagcg

SEQ ID NO: 2533906 - RNA, 19 nt, Artificial Sequence
  Description of Artificial Sequence: Synthetic oligonucleotide
cugggcacgaaaaccaagg

SEQ ID NO: 2533907 - RNA, 19 nt, Artificial Sequence
  Description of Artificial Sequence: Synthetic oligonucleotide
acgaaaaccaaggccagac

SEQ ID NO: 2533908 - RNA, 19 nt, Artificial Sequence
  Description of Artificial Sequence: Synthetic oligonucleotide
cauuagcuaugaaacgagg

SEQ ID NO: 2533909 - RNA, 19 nt, Artificial Sequence
  Description of Artificial Sequence: Synthetic oligonucleotide
auaaccguggucauaagca

SEQ ID NO: 2533910 - RNA, 19 nt, Artificial Sequence
  Description of Artificial Sequence: Synthetic oligonucleotide
cuucuuuccccguggaggg

SEQ ID NO: 2533911 - RNA, 19 nt, Artificial Sequence
  Description of Artificial Sequence: Synthetic oligonucleotide
cuaugaaacgaggaggcag

SEQ ID NO: 2533912 - RNA, 19 nt, Artificial Sequence
  Description of Artificial Sequence: Synthetic oligonucleotide
guggucauaagcaagaaaa

SEQ ID NO: 2533913 - RNA, 19 nt, Artificial Sequence
  Description of Artificial Sequence: Synthetic oligonucleotide
caggaaaguuguaacacug

SEQ ID NO: 2533914 - RNA, 19 nt, Artificial Sequence
  Description of Artificial Sequence: Synthetic oligonucleotide
agcguaggacaucagcgac

SEQ ID NO: 2533915 - RNA, 19 nt, Artificial Sequence
  Description of Artificial Sequence: Synthetic oligonucleotide
cauaaccguggucauaagc

SEQ ID NO: 2533916 - RNA, 19 nt, Artificial Sequence
  Description of Artificial Sequence: Synthetic oligonucleotide
gaaaggaagaggcccaguc

SEQ ID NO: 2533917 - RNA, 19 nt, Artificial Sequence
  Description of Artificial Sequence: Synthetic oligonucleotide
acagacagaaguuguagaa

SEQ ID NO: 2533918 - RNA, 19 nt, Artificial Sequence
  Description of Artificial Sequence: Synthetic oligonucleotide
uccgacacagccuggagac

SEQ ID NO: 2533919 - RNA, 19 nt, Artificial Sequence
  Description of Artificial Sequence: Synthetic oligonucleotide
aagcaagaaaaugagcaau

SEQ ID NO: 2533920 - RNA, 19 nt, Artificial Sequence
  Description of Artificial Sequence: Synthetic oligonucleotide
aguuguagaagccgauucu

SEQ ID NO: 2533921 - RNA, 19 nt, Artificial Sequence
  Description of Artificial Sequence: Synthetic oligonucleotide
uuguagaagccgauucuca

SEQ ID NO: 2533922 - RNA, 19 nt, Artificial Sequence
  Description of Artificial Sequence: Synthetic oligonucleotide
uuggagcacagcuggaacc

SEQ ID NO: 2533923 - RNA, 19 nt, Artificial Sequence
  Description of Artificial Sequence: Synthetic oligonucleotide
uuccacacgaaggaaagga

SEQ ID NO: 2533924 - RNA, 19 nt, Artificial Sequence
  Description of Artificial Sequence: Synthetic oligonucleotide
gagagcguaggacaucagc

SEQ ID NO: 2533925 - RNA, 19 nt, Artificial Sequence
  Description of Artificial Sequence: Synthetic oligonucleotide
aucacagguucgcuggcac

SEQ ID NO: 2533926 - RNA, 19 nt, Artificial Sequence
  Description of Artificial Sequence: Synthetic oligonucleotide
caaugccugggcuaggccc

SEQ ID NO: 2533927 - RNA, 19 nt, Artificial Sequence
  Description of Artificial Sequence: Synthetic oligonucleotide
uccuucaucaccguugcac

SEQ ID NO: 2533928 - RNA, 19 nt, Artificial Sequence
  Description of Artificial Sequence: Synthetic oligonucleotide
aggaccaugaugcccacca

SEQ ID NO: 2533929 - RNA, 19 nt, Artificial Sequence
  Description of Artificial Sequence: Synthetic oligonucleotide
ggcagaggggcaaagaugg

SEQ ID NO: 2533930 - RNA, 19 nt, Artificial Sequence
  Description of Artificial Sequence: Synthetic oligonucleotide
gaccaugaugcccaccaag

SEQ ID NO: 2533931 - RNA, 19 nt, Artificial Sequence
  Description of Artificial Sequence: Synthetic oligonucleotide
ugagauccgcauuagcuau

SEQ ID NO: 2533932 - RNA, 19 nt, Artificial Sequence
  Description of Artificial Sequence: Synthetic oligonucleotide
uugagauccgcauuagcua

SEQ ID NO: 2533933 - RNA, 19 nt, Artificial Sequence
  Description of Artificial Sequence: Synthetic oligonucleotide
uaagccuuuagaccggcua

SEQ ID NO: 2533934 - RNA, 19 nt, Artificial Sequence
  Description of Artificial Sequence: Synthetic oligonucleotide
auggugaggaccagggccc

SEQ ID NO: 2533935 - RNA, 19 nt, Artificial Sequence
  Description of Artificial Sequence: Synthetic oligonucleotide
aggcagagaggacccaccc

SEQ ID NO: 2533936 - RNA, 19 nt, Artificial Sequence
  Description of Artificial Sequence: Synthetic oligonucleotide
agccacaaggaccaugaug

SEQ ID NO: 2533937 - RNA, 19 nt, Artificial Sequence
  Description of Artificial Sequence: Synthetic oligonucleotide
uccgcuggccagcagcacg

SEQ ID NO: 2533938 - RNA, 19 nt, Artificial Sequence
  Description of Artificial Sequence: Synthetic oligonucleotide
auccgcauuagcuaugaaa

SEQ ID NO: 2533939 - RNA, 19 nt, Artificial Sequence
  Description of Artificial Sequence: Synthetic oligonucleotide
auuagcuaugaaacgagga

SEQ ID NO: 2533940 - RNA, 19 nt, Artificial Sequence
  Description of Artificial Sequence: Synthetic oligonucleotide
aaccccuggaaucccauaa

SEQ ID NO: 2533941 - RNA, 19 nt, Artificial Sequence
  Description of Artificial Sequence: Synthetic oligonucleotide
aggucagcgagguugccag

SEQ ID NO: 2533942 - RNA, 19 nt, Artificial Sequence
  Description of Artificial Sequence: Synthetic oligonucleotide
guugcacugggcgaggagg

SEQ ID NO: 2533943 - RNA, 19 nt, Artificial Sequence
  Description of Artificial Sequence: Synthetic oligonucleotide
aagccuuuagaccggcuaa

SEQ ID NO: 2533944 - RNA, 19 nt, Artificial Sequence
  Description of Artificial Sequence: Synthetic oligonucleotide
caaaagcugacacaggaaa

SEQ ID NO: 2533945 - RNA, 19 nt, Artificial Sequence
  Description of Artificial Sequence: Synthetic oligonucleotide
gaggaugccgccaggaagc

SEQ ID NO: 2533946 - RNA, 19 nt, Artificial Sequence
  Description of Artificial Sequence: Synthetic oligonucleotide
accaugaugcccaccaagg

SEQ ID NO: 2533947 - RNA, 19 nt, Artificial Sequence
  Description of Artificial Sequence: Synthetic oligonucleotide
gaaccgaaccccuggaauc

SEQ ID NO: 2533948 - RNA, 19 nt, Artificial Sequence
  Description of Artificial Sequence: Synthetic oligonucleotide
gugagccugacccacuucc

SEQ ID NO: 2533949 - RNA, 19 nt, Artificial Sequence
  Description of Artificial Sequence: Synthetic oligonucleotide
uggucauaagcaagaaaau

SEQ ID NO: 2533950 - RNA, 19 nt, Artificial Sequence
  Description of Artificial Sequence: Synthetic oligonucleotide
uagaccggcuaacaguccu

SEQ ID NO: 2533951 - RNA, 19 nt, Artificial Sequence
  Description of Artificial Sequence: Synthetic oligonucleotide
agcaagaaaaugagcaaug

SEQ ID NO: 2533952 - RNA, 19 nt, Artificial Sequence
  Description of Artificial Sequence: Synthetic oligonucleotide
gguuaggcaggucagcgag

SEQ ID NO: 2533953 - RNA, 19 nt, Artificial Sequence
  Description of Artificial Sequence: Synthetic oligonucleotide
uaacacuguagggagccag

SEQ ID NO: 2533954 - RNA, 19 nt, Artificial Sequence
  Description of Artificial Sequence: Synthetic oligonucleotide
uggagggagcauaaccgug

SEQ ID NO: 2533955 - RNA, 19 nt, Artificial Sequence
  Description of Artificial Sequence: Synthetic oligonucleotide
ggucauaagcaagaaaaug

SEQ ID NO: 2533956 - RNA, 19 nt, Artificial Sequence
  Description of Artificial Sequence: Synthetic oligonucleotide
aaaagcugacacaggaaau

SEQ ID NO: 2533957 - RNA, 19 nt, Artificial Sequence
  Description of Artificial Sequence: Synthetic oligonucleotide
cacgaaggaaaggaagagg

SEQ ID NO: 2533958 - RNA, 19 nt, Artificial Sequence
  Description of Artificial Sequence: Synthetic oligonucleotide
ugggcacgaaaaccaaggc

SEQ ID NO: 2533959 - RNA, 19 nt, Artificial Sequence
  Description of Artificial Sequence: Synthetic oligonucleotide
cucagguuaggcaggucag

SEQ ID NO: 2533960 - RNA, 19 nt, Artificial Sequence
  Description of Artificial Sequence: Synthetic oligonucleotide
aggaagcccaccgccagcc

SEQ ID NO: 2533961 - RNA, 19 nt, Artificial Sequence
  Description of Artificial Sequence: Synthetic oligonucleotide
uuguaacacuguagggagc

SEQ ID NO: 2533962 - RNA, 19 nt, Artificial Sequence
  Description of Artificial Sequence: Synthetic oligonucleotide
gacaucagcgacaggacca

SEQ ID NO: 2533963 - RNA, 19 nt, Artificial Sequence
  Description of Artificial Sequence: Synthetic oligonucleotide
agcauaaccguggucauaa

SEQ ID NO: 2533964 - RNA, 19 nt, Artificial Sequence
  Description of Artificial Sequence: Synthetic oligonucleotide
uucuucugcccuugcuggg

SEQ ID NO: 2533965 - RNA, 19 nt, Artificial Sequence
  Description of Artificial Sequence: Synthetic oligonucleotide
gagaggacccacccaauca

SEQ ID NO: 2533966 - RNA, 19 nt, Artificial Sequence
  Description of Artificial Sequence: Synthetic oligonucleotide
gaagccgauucucagguua

SEQ ID NO: 2533967 - RNA, 19 nt, Artificial Sequence
  Description of Artificial Sequence: Synthetic oligonucleotide
acuuccacacgaaggaaag

SEQ ID NO: 2533968 - RNA, 19 nt, Artificial Sequence
  Description of Artificial Sequence: Synthetic oligonucleotide
guguccuccuuccacagac

SEQ ID NO: 2533969 - RNA, 19 nt, Artificial Sequence
  Description of Artificial Sequence: Synthetic oligonucleotide
cagacagaaguuguagaag

SEQ ID NO: 2533970 - RNA, 19 nt, Artificial Sequence
  Description of Artificial Sequence: Synthetic oligonucleotide
ggcacgaaaaccaaggcca

SEQ ID NO: 2533971 - RNA, 19 nt, Artificial Sequence
  Description of Artificial Sequence: Synthetic oligonucleotide
aguccucccacuugcucuc

SEQ ID NO: 2533972 - RNA, 19 nt, Artificial Sequence
  Description of Artificial Sequence: Synthetic oligonucleotide
acacgaaggaaaggaagag

SEQ ID NO: 2533973 - RNA, 19 nt, Artificial Sequence
  Description of Artificial Sequence: Synthetic oligonucleotide
acaguccucccacuugcuc

SEQ ID NO: 2533974 - RNA, 19 nt, Artificial Sequence
  Description of Artificial Sequence: Synthetic oligonucleotide
uaaccguggucauaagcaa

SEQ ID NO: 2533975 - RNA, 19 nt, Artificial Sequence
  Description of Artificial Sequence: Synthetic oligonucleotide
aaccguggucauaagcaag

SEQ ID NO: 2533976 - RNA, 19 nt, Artificial Sequence
  Description of Artificial Sequence: Synthetic oligonucleotide
uccacacgaaggaaaggaa

SEQ ID NO: 2533977 - RNA, 19 nt, Artificial Sequence
  Description of Artificial Sequence: Synthetic oligonucleotide
agcagcacggaggaugccg

SEQ ID NO: 2533978 - RNA, 19 nt, Artificial Sequence
  Description of Artificial Sequence: Synthetic oligonucleotide
cuuggagcacagcuggaac

SEQ ID NO: 2533979 - RNA, 19 nt, Artificial Sequence
  Description of Artificial Sequence: Synthetic oligonucleotide
guggcuccgacacagccug

SEQ ID NO: 2533980 - RNA, 19 nt, Artificial Sequence
  Description of Artificial Sequence: Synthetic oligonucleotide
uuaggcaggucagcgaggu

SEQ ID NO: 2533981 - RNA, 19 nt, Artificial Sequence
  Description of Artificial Sequence: Synthetic oligonucleotide
agccuuccagaggagagcg

SEQ ID NO: 2533982 - RNA, 19 nt, Artificial Sequence
  Description of Artificial Sequence: Synthetic oligonucleotide
cagaaguuguagaagccga

SEQ ID NO: 2533983 - RNA, 19 nt, Artificial Sequence
  Description of Artificial Sequence: Synthetic oligonucleotide
uuagaccggcuaacagucc

SEQ ID NO: 2533984 - RNA, 19 nt, Artificial Sequence
  Description of Artificial Sequence: Synthetic oligonucleotide
aaacgaggaggcagagagg

SEQ ID NO: 2533985 - RNA, 19 nt, Artificial Sequence
  Description of Artificial Sequence: Synthetic oligonucleotide
ucuuuccccguggagggag

SEQ ID NO: 2533986 - RNA, 19 nt, Artificial Sequence
  Description of Artificial Sequence: Synthetic oligonucleotide
cuuuagaccggcuaacagu

SEQ ID NO: 2533987 - RNA, 19 nt, Artificial Sequence
  Description of Artificial Sequence: Synthetic oligonucleotide
acccacuuccacacgaagg

SEQ ID NO: 2533988 - RNA, 19 nt, Artificial Sequence
  Description of Artificial Sequence: Synthetic oligonucleotide
agccagaaagccaggcccc

SEQ ID NO: 2533989 - RNA, 19 nt, Artificial Sequence
  Description of Artificial Sequence: Synthetic oligonucleotide
guuguagaagccgauucuc

SEQ ID NO: 2533990 - RNA, 19 nt, Artificial Sequence
  Description of Artificial Sequence: Synthetic oligonucleotide
uccacagacagaaguugua

SEQ ID NO: 2533991 - RNA, 19 nt, Artificial Sequence
  Description of Artificial Sequence: Synthetic oligonucleotide
gagcguaggacaucagcga

SEQ ID NO: 2533992 - RNA, 19 nt, Artificial Sequence
  Description of Artificial Sequence: Synthetic oligonucleotide
uugcacugggcgaggagga

SEQ ID NO: 2533993 - RNA, 19 nt, Artificial Sequence
  Description of Artificial Sequence: Synthetic oligonucleotide
uccagaggagagcguagga

SEQ ID NO: 2533994 - RNA, 19 nt, Artificial Sequence
  Description of Artificial Sequence: Synthetic oligonucleotide
agaggggcaaagaugguga

SEQ ID NO: 2533995 - RNA, 19 nt, Artificial Sequence
  Description of Artificial Sequence: Synthetic oligonucleotide
gggagcauaaccgugguca

SEQ ID NO: 2533996 - RNA, 19 nt, Artificial Sequence
  Description of Artificial Sequence: Synthetic oligonucleotide
ggaggaugccgccaggaag

SEQ ID NO: 2533997 - RNA, 19 nt, Artificial Sequence
  Description of Artificial Sequence: Synthetic oligonucleotide
aagccgauucucagguuag

SEQ ID NO: 2533998 - RNA, 19 nt, Artificial Sequence
  Description of Artificial Sequence: Synthetic oligonucleotide
gaagcccaccgccagccgc

SEQ ID NO: 2533999 - RNA, 19 nt, Artificial Sequence
  Description of Artificial Sequence: Synthetic oligonucleotide
ggcaaagauggugaggacc

SEQ ID NO: 2534000 - RNA, 19 nt, Artificial Sequence
  Description of Artificial Sequence: Synthetic oligonucleotide
aaggaccaugaugcccacc

SEQ ID NO: 2534001 - RNA, 19 nt, Artificial Sequence
  Description of Artificial Sequence: Synthetic oligonucleotide
cguggagggagcauaaccg

SEQ ID NO: 2534002 - RNA, 19 nt, Artificial Sequence
  Description of Artificial Sequence: Synthetic oligonucleotide
uguagggagccaguguccu

SEQ ID NO: 2534003 - RNA, 19 nt, Artificial Sequence
  Description of Artificial Sequence: Synthetic oligonucleotide
ucaccguugcacugggcga

SEQ ID NO: 2534004 - RNA, 19 nt, Artificial Sequence
  Description of Artificial Sequence: Synthetic oligonucleotide
cuguagggagccagugucc

SEQ ID NO: 2534005 - RNA, 19 nt, Artificial Sequence
  Description of Artificial Sequence: Synthetic oligonucleotide
aggacaucagcgacaggac

SEQ ID NO: 2534006 - RNA, 19 nt, Artificial Sequence
  Description of Artificial Sequence: Synthetic oligonucleotide
cuuccagaggagagcguag

SEQ ID NO: 2534007 - RNA, 19 nt, Artificial Sequence
  Description of Artificial Sequence: Synthetic oligonucleotide
gacccacuuccacacgaag

SEQ ID NO: 2534008 - RNA, 19 nt, Artificial Sequence
  Description of Artificial Sequence: Synthetic oligonucleotide
cacugggcgaggaggagag

SEQ ID NO: 2534009 - RNA, 19 nt, Artificial Sequence
  Description of Artificial Sequence: Synthetic oligonucleotide
aaucacagguucgcuggca

SEQ ID NO: 2534010 - RNA, 19 nt, Artificial Sequence
  Description of Artificial Sequence: Synthetic oligonucleotide
ccuucuuuccccguggagg

SEQ ID NO: 2534011 - RNA, 19 nt, Artificial Sequence
  Description of Artificial Sequence: Synthetic oligonucleotide
cuucaucaccguugcacug

SEQ ID NO: 2534012 - RNA, 19 nt, Artificial Sequence
  Description of Artificial Sequence: Synthetic oligonucleotide
cagacagagcccaccgagc

SEQ ID NO: 2534013 - RNA, 19 nt, Artificial Sequence
  Description of Artificial Sequence: Synthetic oligonucleotide
agccuuuagaccggcuaac

SEQ ID NO: 2534014 - RNA, 19 nt, Artificial Sequence
  Description of Artificial Sequence: Synthetic oligonucleotide
accgagcacucaucaaaag

SEQ ID NO: 2534015 - RNA, 19 nt, Artificial Sequence
  Description of Artificial Sequence: Synthetic oligonucleotide
ucuucugcccuugcugggc

SEQ ID NO: 2534016 - RNA, 19 nt, Artificial Sequence
  Description of Artificial Sequence: Synthetic oligonucleotide
ggagggagcauaaccgugg

SEQ ID NO: 2534017 - RNA, 19 nt, Artificial Sequence
  Description of Artificial Sequence: Synthetic oligonucleotide
ucucgcccuucuuuccccg

SEQ ID NO: 2534018 - RNA, 19 nt, Artificial Sequence
  Description of Artificial Sequence: Synthetic oligonucleotide
ucagguuaggcaggucagc

SEQ ID NO: 2534019 - RNA, 19 nt, Artificial Sequence
  Description of Artificial Sequence: Synthetic oligonucleotide
aucagcgacaggaccacag

SEQ ID NO: 2534020 - RNA, 19 nt, Artificial Sequence
  Description of Artificial Sequence: Synthetic oligonucleotide
gcaagaaaaugagcaaugc

SEQ ID NO: 2534021 - RNA, 19 nt, Artificial Sequence
  Description of Artificial Sequence: Synthetic oligonucleotide
cugggcgaggaggagaggc

SEQ ID NO: 2534022 - RNA, 19 nt, Artificial Sequence
  Description of Artificial Sequence: Synthetic oligonucleotide
accaagccuggccagggcu

SEQ ID NO: 2534023 - RNA, 19 nt, Artificial Sequence
  Description of Artificial Sequence: Synthetic oligonucleotide
gacaggaccacagccacaa

SEQ ID NO: 2534024 - RNA, 19 nt, Artificial Sequence
  Description of Artificial Sequence: Synthetic oligonucleotide
ugggcuaggcccagagcca

SEQ ID NO: 2534025 - RNA, 19 nt, Artificial Sequence
  Description of Artificial Sequence: Synthetic oligonucleotide
accggcuaacaguccuccc

SEQ ID NO: 2534026 - RNA, 19 nt, Artificial Sequence
  Description of Artificial Sequence: Synthetic oligonucleotide
cacagacagaaguuguaga

SEQ ID NO: 2534027 - RNA, 19 nt, Artificial Sequence
  Description of Artificial Sequence: Synthetic oligonucleotide
augagcaaugccugggcua

SEQ ID NO: 2534028 - RNA, 19 nt, Artificial Sequence
  Description of Artificial Sequence: Synthetic oligonucleotide
aggagagcguaggacauca

SEQ ID NO: 2534029 - RNA, 19 nt, Artificial Sequence
  Description of Artificial Sequence: Synthetic oligonucleotide
uggaaucccauaagccuuu

SEQ ID NO: 2534030 - RNA, 19 nt, Artificial Sequence
  Description of Artificial Sequence: Synthetic oligonucleotide
accccuggaaucccauaag

SEQ ID NO: 2534031 - RNA, 19 nt, Artificial Sequence
  Description of Artificial Sequence: Synthetic oligonucleotide
aacacuguagggagccagu

SEQ ID NO: 2534032 - RNA, 19 nt, Artificial Sequence
  Description of Artificial Sequence: Synthetic oligonucleotide
ccacacgaaggaaaggaag

SEQ ID NO: 2534033 - RNA, 19 nt, Artificial Sequence
  Description of Artificial Sequence: Synthetic oligonucleotide
cccauacacaccaagccug

SEQ ID NO: 2534034 - RNA, 19 nt, Artificial Sequence
  Description of Artificial Sequence: Synthetic oligonucleotide
ucugcccuugcugggcacg

SEQ ID NO: 2534035 - RNA, 19 nt, Artificial Sequence
  Description of Artificial Sequence: Synthetic oligonucleotide
gcauuagcuaugaaacgag

SEQ ID NO: 2534036 - RNA, 19 nt, Artificial Sequence
  Description of Artificial Sequence: Synthetic oligonucleotide
aggccaacccgaggaaccc

SEQ ID NO: 2534037 - RNA, 19 nt, Artificial Sequence
  Description of Artificial Sequence: Synthetic oligonucleotide
cacccaaucacagguucgc

SEQ ID NO: 2534038 - RNA, 19 nt, Artificial Sequence
  Description of Artificial Sequence: Synthetic oligonucleotide
ugaaacgaggaggcagaga

SEQ ID NO: 2534039 - RNA, 19 nt, Artificial Sequence
  Description of Artificial Sequence: Synthetic oligonucleotide
agccugacccacuuccaca

SEQ ID NO: 2534040 - RNA, 19 nt, Artificial Sequence
  Description of Artificial Sequence: Synthetic oligonucleotide
ccgagcacucaucaaaagc

SEQ ID NO: 2534041 - RNA, 19 nt, Artificial Sequence
  Description of Artificial Sequence: Synthetic oligonucleotide
cuuccacacgaaggaaagg

SEQ ID NO: 2534042 - RNA, 19 nt, Artificial Sequence
  Description of Artificial Sequence: Synthetic oligonucleotide
agaggcccaguccgcuggc

SEQ ID NO: 2534043 - RNA, 19 nt, Artificial Sequence
  Description of Artificial Sequence: Synthetic oligonucleotide
aggaagaggcccaguccgc

SEQ ID NO: 2534044 - RNA, 19 nt, Artificial Sequence
  Description of Artificial Sequence: Synthetic oligonucleotide
ggggcaaagauggugagga

SEQ ID NO: 2534045 - RNA, 19 nt, Artificial Sequence
  Description of Artificial Sequence: Synthetic oligonucleotide
cucccacuugcucucgccc

SEQ ID NO: 2534046 - RNA, 19 nt, Artificial Sequence
  Description of Artificial Sequence: Synthetic oligonucleotide
uggaaccgaaccccuggaa

SEQ ID NO: 2534047 - RNA, 19 nt, Artificial Sequence
  Description of Artificial Sequence: Synthetic oligonucleotide
acacaccaagccuggccag

SEQ ID NO: 2534048 - RNA, 19 nt, Artificial Sequence
  Description of Artificial Sequence: Synthetic oligonucleotide
agggagcauaaccgugguc

SEQ ID NO: 2534049 - RNA, 19 nt, Artificial Sequence
  Description of Artificial Sequence: Synthetic oligonucleotide
ugcucucgcccuucuuucc

SEQ ID NO: 2534050 - RNA, 19 nt, Artificial Sequence
  Description of Artificial Sequence: Synthetic oligonucleotide
aggaaaguuguaacacugu

SEQ ID NO: 2534051 - RNA, 19 nt, Artificial Sequence
  Description of Artificial Sequence: Synthetic oligonucleotide
ggaaaguuguaacacugua

SEQ ID NO: 2534052 - RNA, 19 nt, Artificial Sequence
  Description of Artificial Sequence: Synthetic oligonucleotide
cccuggaaucccauaagcc

SEQ ID NO: 2534053 - RNA, 19 nt, Artificial Sequence
  Description of Artificial Sequence: Synthetic oligonucleotide
caaucacagguucgcuggc

SEQ ID NO: 2534054 - RNA, 19 nt, Artificial Sequence
  Description of Artificial Sequence: Synthetic oligonucleotide
uguccuccuuccacagaca

SEQ ID NO: 2534055 - RNA, 19 nt, Artificial Sequence
  Description of Artificial Sequence: Synthetic oligonucleotide
accguggucauaagcaaga

SEQ ID NO: 2534056 - RNA, 19 nt, Artificial Sequence
  Description of Artificial Sequence: Synthetic oligonucleotide
ucagcgagguugccagccu

SEQ ID NO: 2534057 - RNA, 19 nt, Artificial Sequence
  Description of Artificial Sequence: Synthetic oligonucleotide
agguuaggcaggucagcga

SEQ ID NO: 2534058 - RNA, 19 nt, Artificial Sequence
  Description of Artificial Sequence: Synthetic oligonucleotide
agccuggagacagacauuu

SEQ ID NO: 2534059 - RNA, 19 nt, Artificial Sequence
  Description of Artificial Sequence: Synthetic oligonucleotide
guuaggcaggucagcgagg

SEQ ID NO: 2534060 - RNA, 19 nt, Artificial Sequence
  Description of Artificial Sequence: Synthetic oligonucleotide
agauccgcauuagcuauga

SEQ ID NO: 2534061 - RNA, 19 nt, Artificial Sequence
  Description of Artificial Sequence: Synthetic oligonucleotide
ugacccacuuccacacgaa

SEQ ID NO: 2534062 - RNA, 19 nt, Artificial Sequence
  Description of Artificial Sequence: Synthetic oligonucleotide
gaccggcuaacaguccucc

SEQ ID NO: 2534063 - RNA, 19 nt, Artificial Sequence
  Description of Artificial Sequence: Synthetic oligonucleotide
augaaacgaggaggcagag

SEQ ID NO: 2534064 - RNA, 19 nt, Artificial Sequence
  Description of Artificial Sequence: Synthetic oligonucleotide
ggcaguggcuccgacacag

SEQ ID NO: 2534065 - RNA, 19 nt, Artificial Sequence
  Description of Artificial Sequence: Synthetic oligonucleotide
cacuuccacacgaaggaaa

SEQ ID NO: 2534066 - RNA, 19 nt, Artificial Sequence
  Description of Artificial Sequence: Synthetic oligonucleotide
cucucgcccuucuuucccc

SEQ ID NO: 2534067 - RNA, 19 nt, Artificial Sequence
  Description of Artificial Sequence: Synthetic oligonucleotide
ggcuaggccaacccgagga

SEQ ID NO: 2534068 - RNA, 19 nt, Artificial Sequence
  Description of Artificial Sequence: Synthetic oligonucleotide
ccuuuagaccggcuaacag

SEQ ID NO: 2534069 - RNA, 19 nt, Artificial Sequence
  Description of Artificial Sequence: Synthetic oligonucleotide
guucgcuggcaccuccuug

SEQ ID NO: 2534070 - RNA, 19 nt, Artificial Sequence
  Description of Artificial Sequence: Synthetic oligonucleotide
ccauacacaccaagccugg

SEQ ID NO: 2534071 - RNA, 19 nt, Artificial Sequence
  Description of Artificial Sequence: Synthetic oligonucleotide
ucgcccuucuuuccccgug

SEQ ID NO: 2534072 - RNA, 19 nt, Artificial Sequence
  Description of Artificial Sequence: Synthetic oligonucleotide
agcgacaggaccacagcca

SEQ ID NO: 2534073 - RNA, 19 nt, Artificial Sequence
  Description of Artificial Sequence: Synthetic oligonucleotide
aggcagaggggcaaagaug

SEQ ID NO: 2534074 - RNA, 19 nt, Artificial Sequence
  Description of Artificial Sequence: Synthetic oligonucleotide
accgaaccccuggaauccc

SEQ ID NO: 2534075 - RNA, 19 nt, Artificial Sequence
  Description of Artificial Sequence: Synthetic oligonucleotide
aggaugccgccaggaagcc

SEQ ID NO: 2534076 - RNA, 19 nt, Artificial Sequence
  Description of Artificial Sequence: Synthetic oligonucleotide
acacuguagggagccagug

SEQ ID NO: 2534077 - RNA, 19 nt, Artificial Sequence
  Description of Artificial Sequence: Synthetic oligonucleotide
cagagccagaaagccaggc

SEQ ID NO: 2534078 - RNA, 19 nt, Artificial Sequence
  Description of Artificial Sequence: Synthetic oligonucleotide
ccgcauuagcuaugaaacg

SEQ ID NO: 2534079 - RNA, 19 nt, Artificial Sequence
  Description of Artificial Sequence: Synthetic oligonucleotide
cugacccacuuccacacga

SEQ ID NO: 2534080 - RNA, 19 nt, Artificial Sequence
  Description of Artificial Sequence: Synthetic oligonucleotide
cuaggccaacccgaggaac

SEQ ID NO: 2534081 - RNA, 19 nt, Artificial Sequence
  Description of Artificial Sequence: Synthetic oligonucleotide
gaggcagaggggcaaagau

SEQ ID NO: 2534082 - RNA, 19 nt, Artificial Sequence
  Description of Artificial Sequence: Synthetic oligonucleotide
gccgccaggaagcccaccg

SEQ ID NO: 2534083 - RNA, 19 nt, Artificial Sequence
  Description of Artificial Sequence: Synthetic oligonucleotide
gcagagaggacccacccaa

SEQ ID NO: 2534084 - RNA, 19 nt, Artificial Sequence
  Description of Artificial Sequence: Synthetic oligonucleotide
gagauccgcauuagcuaug

SEQ ID NO: 2534085 - RNA, 19 nt, Artificial Sequence
  Description of Artificial Sequence: Synthetic oligonucleotide
uccuuggagcacagcugga

SEQ ID NO: 2534086 - RNA, 19 nt, Artificial Sequence
  Description of Artificial Sequence: Synthetic oligonucleotide
cacaccaagccuggccagg

SEQ ID NO: 2534087 - RNA, 19 nt, Artificial Sequence
  Description of Artificial Sequence: Synthetic oligonucleotide
aguguccuccuuccacaga

SEQ ID NO: 2534088 - RNA, 19 nt, Artificial Sequence
  Description of Artificial Sequence: Synthetic oligonucleotide
ccauaagccuuuagaccgg

SEQ ID NO: 2534089 - RNA, 19 nt, Artificial Sequence
  Description of Artificial Sequence: Synthetic oligonucleotide
gcacagcuggaaccgaacc

SEQ ID NO: 2534090 - RNA, 19 nt, Artificial Sequence
  Description of Artificial Sequence: Synthetic oligonucleotide
cagggcuaggccaacccga

SEQ ID NO: 2534091 - RNA, 19 nt, Artificial Sequence
  Description of Artificial Sequence: Synthetic oligonucleotide
agcgagguugccagccuuc

SEQ ID NO: 2534092 - RNA, 19 nt, Artificial Sequence
  Description of Artificial Sequence: Synthetic oligonucleotide
agaggagagcguaggacau

SEQ ID NO: 2534093 - RNA, 19 nt, Artificial Sequence
  Description of Artificial Sequence: Synthetic oligonucleotide
cacucaucaaaagcugaca

SEQ ID NO: 2534094 - RNA, 19 nt, Artificial Sequence
  Description of Artificial Sequence: Synthetic oligonucleotide
cauacacaccaagccuggc

SEQ ID NO: 2534095 - RNA, 19 nt, Artificial Sequence
  Description of Artificial Sequence: Synthetic oligonucleotide
gaaagccaggccccaggaa

SEQ ID NO: 2534096 - RNA, 19 nt, Artificial Sequence
  Description of Artificial Sequence: Synthetic oligonucleotide
cuuuccccguggagggagc

SEQ ID NO: 2534097 - RNA, 19 nt, Artificial Sequence
  Description of Artificial Sequence: Synthetic oligonucleotide
gagaggcagaggggcaaag

SEQ ID NO: 2534098 - RNA, 19 nt, Artificial Sequence
  Description of Artificial Sequence: Synthetic oligonucleotide
caccguugcacugggcgag

SEQ ID NO: 2534099 - RNA, 19 nt, Artificial Sequence
  Description of Artificial Sequence: Synthetic oligonucleotide
uccucccacuugcucucgc

SEQ ID NO: 2534100 - RNA, 19 nt, Artificial Sequence
  Description of Artificial Sequence: Synthetic oligonucleotide
agccgauucucagguuagg

SEQ ID NO: 2534101 - RNA, 19 nt, Artificial Sequence
  Description of Artificial Sequence: Synthetic oligonucleotide
cccaaucacagguucgcug

SEQ ID NO: 2534102 - RNA, 19 nt, Artificial Sequence
  Description of Artificial Sequence: Synthetic oligonucleotide
cagccuuccagaggagagc

SEQ ID NO: 2534103 - RNA, 19 nt, Artificial Sequence
  Description of Artificial Sequence: Synthetic oligonucleotide
cagguucgcuggcaccucc

SEQ ID NO: 2534104 - RNA, 19 nt, Artificial Sequence
  Description of Artificial Sequence: Synthetic oligonucleotide
ccacccaaucacagguucg

SEQ ID NO: 2534105 - RNA, 19 nt, Artificial Sequence
  Description of Artificial Sequence: Synthetic oligonucleotide
caaagauggugaggaccag

SEQ ID NO: 2534106 - RNA, 19 nt, Artificial Sequence
  Description of Artificial Sequence: Synthetic oligonucleotide
agaccggcuaacaguccuc

SEQ ID NO: 2534107 - RNA, 19 nt, Artificial Sequence
  Description of Artificial Sequence: Synthetic oligonucleotide
cuccgacacagccuggaga

SEQ ID NO: 2534108 - RNA, 19 nt, Artificial Sequence
  Description of Artificial Sequence: Synthetic oligonucleotide
ccccuggaaucccauaagc

SEQ ID NO: 2534109 - RNA, 19 nt, Artificial Sequence
  Description of Artificial Sequence: Synthetic oligonucleotide
caccgagcacucaucaaaa

SEQ ID NO: 2534110 - RNA, 19 nt, Artificial Sequence
  Description of Artificial Sequence: Synthetic oligonucleotide
cuggaaucccauaagccuu

SEQ ID NO: 2534111 - RNA, 19 nt, Artificial Sequence
  Description of Artificial Sequence: Synthetic oligonucleotide
cccacuuccacacgaagga

SEQ ID NO: 2534112 - RNA, 19 nt, Artificial Sequence
  Description of Artificial Sequence: Synthetic oligonucleotide
agggcuaggccaacccgag

SEQ ID NO: 2534113 - RNA, 19 nt, Artificial Sequence
  Description of Artificial Sequence: Synthetic oligonucleotide
ggcccagagccagaaagcc

SEQ ID NO: 2534114 - RNA, 19 nt, Artificial Sequence
  Description of Artificial Sequence: Synthetic oligonucleotide
gccugacccacuuccacac

SEQ ID NO: 2534115 - RNA, 19 nt, Artificial Sequence
  Description of Artificial Sequence: Synthetic oligonucleotide
ccuggaaucccauaagccu

SEQ ID NO: 2534116 - RNA, 19 nt, Artificial Sequence
  Description of Artificial Sequence: Synthetic oligonucleotide
gcgacaggaccacagccac

SEQ ID NO: 2534117 - RNA, 19 nt, Artificial Sequence
  Description of Artificial Sequence: Synthetic oligonucleotide
guaggacaucagcgacagg

SEQ ID NO: 2534118 - RNA, 19 nt, Artificial Sequence
  Description of Artificial Sequence: Synthetic oligonucleotide
uuuccccguggagggagca

SEQ ID NO: 2534119 - RNA, 19 nt, Artificial Sequence
  Description of Artificial Sequence: Synthetic oligonucleotide
guggagggagcauaaccgu

SEQ ID NO: 2534120 - RNA, 19 nt, Artificial Sequence
  Description of Artificial Sequence: Synthetic oligonucleotide
caguccucccacuugcucu

SEQ ID NO: 2534121 - RNA, 19 nt, Artificial Sequence
  Description of Artificial Sequence: Synthetic oligonucleotide
ccuccuuccacagacagaa

SEQ ID NO: 2534122 - RNA, 19 nt, Artificial Sequence
  Description of Artificial Sequence: Synthetic oligonucleotide
gaaguuguagaagccgauu

SEQ ID NO: 2534123 - RNA, 19 nt, Artificial Sequence
  Description of Artificial Sequence: Synthetic oligonucleotide
acgaggaggcagagaggac

SEQ ID NO: 2534124 - RNA, 19 nt, Artificial Sequence
  Description of Artificial Sequence: Synthetic oligonucleotide
caucaccguugcacugggc

SEQ ID NO: 2534125 - RNA, 19 nt, Artificial Sequence
  Description of Artificial Sequence: Synthetic oligonucleotide
gccgauucucagguuaggc

SEQ ID NO: 2534126 - RNA, 19 nt, Artificial Sequence
  Description of Artificial Sequence: Synthetic oligonucleotide
ccagggcuaggccaacccg

SEQ ID NO: 2534127 - RNA, 19 nt, Artificial Sequence
  Description of Artificial Sequence: Synthetic oligonucleotide
ccgauucucagguuaggca

SEQ ID NO: 2534128 - RNA, 19 nt, Artificial Sequence
  Description of Artificial Sequence: Synthetic oligonucleotide
ggaaggugagccugaccca

SEQ ID NO: 2534129 - RNA, 19 nt, Artificial Sequence
  Description of Artificial Sequence: Synthetic oligonucleotide
uggcuccgacacagccugg

SEQ ID NO: 2534130 - RNA, 19 nt, Artificial Sequence
  Description of Artificial Sequence: Synthetic oligonucleotide
gcucucgcccuucuuuccc

SEQ ID NO: 2534131 - RNA, 19 nt, Artificial Sequence
  Description of Artificial Sequence: Synthetic oligonucleotide
agaagccgauucucagguu

SEQ ID NO: 2534132 - RNA, 19 nt, Artificial Sequence
  Description of Artificial Sequence: Synthetic oligonucleotide
acggaggaugccgccagga

SEQ ID NO: 2534133 - RNA, 19 nt, Artificial Sequence
  Description of Artificial Sequence: Synthetic oligonucleotide
cgagcacucaucaaaagcu

SEQ ID NO: 2534134 - RNA, 19 nt, Artificial Sequence
  Description of Artificial Sequence: Synthetic oligonucleotide
aguccgcuggccagcagca

SEQ ID NO: 2534135 - RNA, 19 nt, Artificial Sequence
  Description of Artificial Sequence: Synthetic oligonucleotide
uucugcccuugcugggcac

SEQ ID NO: 2534136 - RNA, 19 nt, Artificial Sequence
  Description of Artificial Sequence: Synthetic oligonucleotide
cacggaggaugccgccagg

SEQ ID NO: 2534137 - RNA, 19 nt, Artificial Sequence
  Description of Artificial Sequence: Synthetic oligonucleotide
gaggagagcguaggacauc

SEQ ID NO: 2534138 - RNA, 19 nt, Artificial Sequence
  Description of Artificial Sequence: Synthetic oligonucleotide
gcacgaaaaccaaggccag

SEQ ID NO: 2534139 - RNA, 19 nt, Artificial Sequence
  Description of Artificial Sequence: Synthetic oligonucleotide
uucuuuccccguggaggga

SEQ ID NO: 2534140 - RNA, 19 nt, Artificial Sequence
  Description of Artificial Sequence: Synthetic oligonucleotide
gcgaggaggagaggcagag

SEQ ID NO: 2534141 - RNA, 19 nt, Artificial Sequence
  Description of Artificial Sequence: Synthetic oligonucleotide
cuugcucucgcccuucuuu

SEQ ID NO: 2534142 - RNA, 19 nt, Artificial Sequence
  Description of Artificial Sequence: Synthetic oligonucleotide
accguugcacugggcgagg

SEQ ID NO: 2534143 - RNA, 19 nt, Artificial Sequence
  Description of Artificial Sequence: Synthetic oligonucleotide
cuggaaccgaaccccugga

SEQ ID NO: 2534144 - RNA, 19 nt, Artificial Sequence
  Description of Artificial Sequence: Synthetic oligonucleotide
uggugaggaccagggcccc

SEQ ID NO: 2534145 - RNA, 19 nt, Artificial Sequence
  Description of Artificial Sequence: Synthetic oligonucleotide
gcacggaggaugccgccag

SEQ ID NO: 2534146 - RNA, 19 nt, Artificial Sequence
  Description of Artificial Sequence: Synthetic oligonucleotide
ccuugcugggcacgaaaac

SEQ ID NO: 2534147 - RNA, 19 nt, Artificial Sequence
  Description of Artificial Sequence: Synthetic oligonucleotide
gggccccauacacaccaag

SEQ ID NO: 2534148 - RNA, 19 nt, Artificial Sequence
  Description of Artificial Sequence: Synthetic oligonucleotide
gccagggcuaggccaaccc

SEQ ID NO: 2534149 - RNA, 19 nt, Artificial Sequence
  Description of Artificial Sequence: Synthetic oligonucleotide
gagggagcauaaccguggu

SEQ ID NO: 2534150 - RNA, 19 nt, Artificial Sequence
  Description of Artificial Sequence: Synthetic oligonucleotide
guagggagccaguguccuc

SEQ ID NO: 2534151 - RNA, 19 nt, Artificial Sequence
  Description of Artificial Sequence: Synthetic oligonucleotide
auaagccuuuagaccggcu

SEQ ID NO: 2534152 - RNA, 19 nt, Artificial Sequence
  Description of Artificial Sequence: Synthetic oligonucleotide
uccccguggagggagcaua

SEQ ID NO: 2534153 - RNA, 19 nt, Artificial Sequence
  Description of Artificial Sequence: Synthetic oligonucleotide
cuucugcccuugcugggca

SEQ ID NO: 2534154 - RNA, 19 nt, Artificial Sequence
  Description of Artificial Sequence: Synthetic oligonucleotide
acccaaucacagguucgcu

SEQ ID NO: 2534155 - RNA, 19 nt, Artificial Sequence
  Description of Artificial Sequence: Synthetic oligonucleotide
cgcauuagcuaugaaacga

SEQ ID NO: 2534156 - RNA, 19 nt, Artificial Sequence
  Description of Artificial Sequence: Synthetic oligonucleotide
gaaccccuggaaucccaua

SEQ ID NO: 2534157 - RNA, 19 nt, Artificial Sequence
  Description of Artificial Sequence: Synthetic oligonucleotide
cccacccaaucacagguuc

SEQ ID NO: 2534158 - RNA, 19 nt, Artificial Sequence
  Description of Artificial Sequence: Synthetic oligonucleotide
ccuggagacagacauuucu

SEQ ID NO: 2534159 - RNA, 19 nt, Artificial Sequence
  Description of Artificial Sequence: Synthetic oligonucleotide
ccgcuggccagcagcacgg

SEQ ID NO: 2534160 - RNA, 19 nt, Artificial Sequence
  Description of Artificial Sequence: Synthetic oligonucleotide
agcccaccgagcacucauc

SEQ ID NO: 2534161 - RNA, 19 nt, Artificial Sequence
  Description of Artificial Sequence: Synthetic oligonucleotide
gacacagccuggagacaga

SEQ ID NO: 2534162 - RNA, 19 nt, Artificial Sequence
  Description of Artificial Sequence: Synthetic oligonucleotide
gcauaaccguggucauaag

SEQ ID NO: 2534163 - RNA, 19 nt, Artificial Sequence
  Description of Artificial Sequence: Synthetic oligonucleotide
gauccgcauuagcuaugaa

SEQ ID NO: 2534164 - RNA, 19 nt, Artificial Sequence
  Description of Artificial Sequence: Synthetic oligonucleotide
ggaagcccaccgccagccg

SEQ ID NO: 2534165 - RNA, 19 nt, Artificial Sequence
  Description of Artificial Sequence: Synthetic oligonucleotide
guaacacuguagggagcca

SEQ ID NO: 2534166 - RNA, 19 nt, Artificial Sequence
  Description of Artificial Sequence: Synthetic oligonucleotide
ccaccgagcacucaucaaa

SEQ ID NO: 2534167 - RNA, 19 nt, Artificial Sequence
  Description of Artificial Sequence: Synthetic oligonucleotide
agggagccaguguccuccu

SEQ ID NO: 2534168 - RNA, 19 nt, Artificial Sequence
  Description of Artificial Sequence: Synthetic oligonucleotide
gggcgaggaggagaggcag

SEQ ID NO: 2534169 - RNA, 19 nt, Artificial Sequence
  Description of Artificial Sequence: Synthetic oligonucleotide
cgacacagccuggagacag

SEQ ID NO: 2534170 - RNA, 19 nt, Artificial Sequence
  Description of Artificial Sequence: Synthetic oligonucleotide
acugggcgaggaggagagg

SEQ ID NO: 2534171 - RNA, 19 nt, Artificial Sequence
  Description of Artificial Sequence: Synthetic oligonucleotide
ggcagagaggacccaccca

SEQ ID NO: 2534172 - RNA, 19 nt, Artificial Sequence
  Description of Artificial Sequence: Synthetic oligonucleotide
gcuccgacacagccuggag

SEQ ID NO: 2534173 - RNA, 19 nt, Artificial Sequence
  Description of Artificial Sequence: Synthetic oligonucleotide
gcagcacggaggaugccgc

SEQ ID NO: 2534174 - RNA, 19 nt, Artificial Sequence
  Description of Artificial Sequence: Synthetic oligonucleotide
gccugggcuaggcccagag

SEQ ID NO: 2534175 - RNA, 19 nt, Artificial Sequence
  Description of Artificial Sequence: Synthetic oligonucleotide
ccaaggccagacagagccc

SEQ ID NO: 2534176 - RNA, 19 nt, Artificial Sequence
  Description of Artificial Sequence: Synthetic oligonucleotide
cacgaaaaccaaggccaga

SEQ ID NO: 2534177 - RNA, 19 nt, Artificial Sequence
  Description of Artificial Sequence: Synthetic oligonucleotide
ccucccacuugcucucgcc

SEQ ID NO: 2534178 - RNA, 19 nt, Artificial Sequence
  Description of Artificial Sequence: Synthetic oligonucleotide
gggcuaggccaacccgagg

SEQ ID NO: 2534179 - RNA, 19 nt, Artificial Sequence
  Description of Artificial Sequence: Synthetic oligonucleotide
ccaggccccaggaagguga

SEQ ID NO: 2534180 - RNA, 19 nt, Artificial Sequence
  Description of Artificial Sequence: Synthetic oligonucleotide
gcuaugaaacgaggaggca

SEQ ID NO: 2534181 - RNA, 19 nt, Artificial Sequence
  Description of Artificial Sequence: Synthetic oligonucleotide
ccggcuaacaguccuccca

SEQ ID NO: 2534182 - RNA, 19 nt, Artificial Sequence
  Description of Artificial Sequence: Synthetic oligonucleotide
aggcaguggcuccgacaca

SEQ ID NO: 2534183 - RNA, 19 nt, Artificial Sequence
  Description of Artificial Sequence: Synthetic oligonucleotide
gggcuaggcccagagccag

SEQ ID NO: 2534184 - RNA, 19 nt, Artificial Sequence
  Description of Artificial Sequence: Synthetic oligonucleotide
cagagcccaccgagcacuc

SEQ ID NO: 2534185 - RNA, 19 nt, Artificial Sequence
  Description of Artificial Sequence: Synthetic oligonucleotide
gagcauaaccguggucaua

SEQ ID NO: 2534186 - RNA, 19 nt, Artificial Sequence
  Description of Artificial Sequence: Synthetic oligonucleotide
ccgccacucuccuucauca

SEQ ID NO: 2534187 - RNA, 19 nt, Artificial Sequence
  Description of Artificial Sequence: Synthetic oligonucleotide
ccugacccacuuccacacg

SEQ ID NO: 2534188 - RNA, 19 nt, Artificial Sequence
  Description of Artificial Sequence: Synthetic oligonucleotide
ccuucaucaccguugcacu

SEQ ID NO: 2534189 - RNA, 19 nt, Artificial Sequence
  Description of Artificial Sequence: Synthetic oligonucleotide
ggucagcgagguugccagc

SEQ ID NO: 2534190 - RNA, 19 nt, Artificial Sequence
  Description of Artificial Sequence: Synthetic oligonucleotide
gcccaccgagcacucauca

SEQ ID NO: 2534191 - RNA, 19 nt, Artificial Sequence
  Description of Artificial Sequence: Synthetic oligonucleotide
gccuuuagaccggcuaaca

SEQ ID NO: 2534192 - RNA, 19 nt, Artificial Sequence
  Description of Artificial Sequence: Synthetic oligonucleotide
gcuaacaguccucccacuu

SEQ ID NO: 2534193 - RNA, 19 nt, Artificial Sequence
  Description of Artificial Sequence: Synthetic oligonucleotide
cggcuaacaguccucccac

SEQ ID NO: 2534194 - RNA, 19 nt, Artificial Sequence
  Description of Artificial Sequence: Synthetic oligonucleotide
agguucgcuggcaccuccu

SEQ ID NO: 2534195 - RNA, 19 nt, Artificial Sequence
  Description of Artificial Sequence: Synthetic oligonucleotide
ccugggcuaggcccagagc

SEQ ID NO: 2534196 - RNA, 19 nt, Artificial Sequence
  Description of Artificial Sequence: Synthetic oligonucleotide
cgccaggaagcccaccgcc

SEQ ID NO: 2534197 - RNA, 19 nt, Artificial Sequence
  Description of Artificial Sequence: Synthetic oligonucleotide
gcgagguugccagccuucc

SEQ ID NO: 2534198 - RNA, 19 nt, Artificial Sequence
  Description of Artificial Sequence: Synthetic oligonucleotide
gcuaggccaacccgaggaa

SEQ ID NO: 2534199 - RNA, 19 nt, Artificial Sequence
  Description of Artificial Sequence: Synthetic oligonucleotide
aggaggcagagaggaccca

SEQ ID NO: 2534200 - RNA, 19 nt, Artificial Sequence
  Description of Artificial Sequence: Synthetic oligonucleotide
ggagagcguaggacaucag

SEQ ID NO: 2534201 - RNA, 19 nt, Artificial Sequence
  Description of Artificial Sequence: Synthetic oligonucleotide
uuccccguggagggagcau

SEQ ID NO: 2534202 - RNA, 19 nt, Artificial Sequence
  Description of Artificial Sequence: Synthetic oligonucleotide
ggagcauaaccguggucau

SEQ ID NO: 2534203 - RNA, 19 nt, Artificial Sequence
  Description of Artificial Sequence: Synthetic oligonucleotide
augccgccaggaagcccac

SEQ ID NO: 2534204 - RNA, 19 nt, Artificial Sequence
  Description of Artificial Sequence: Synthetic oligonucleotide
cuaggcccagagccagaaa

SEQ ID NO: 2534205 - RNA, 19 nt, Artificial Sequence
  Description of Artificial Sequence: Synthetic oligonucleotide
ugccgccaggaagcccacc

SEQ ID NO: 2534206 - RNA, 19 nt, Artificial Sequence
  Description of Artificial Sequence: Synthetic oligonucleotide
ccccauacacaccaagccu

SEQ ID NO: 2534207 - RNA, 19 nt, Artificial Sequence
  Description of Artificial Sequence: Synthetic oligonucleotide
gcacugggcgaggaggaga

SEQ ID NO: 2534208 - RNA, 19 nt, Artificial Sequence
  Description of Artificial Sequence: Synthetic oligonucleotide
cgcccuucuuuccccgugg

SEQ ID NO: 2534209 - RNA, 19 nt, Artificial Sequence
  Description of Artificial Sequence: Synthetic oligonucleotide
ggcuccgacacagccugga

SEQ ID NO: 2534210 - RNA, 19 nt, Artificial Sequence
  Description of Artificial Sequence: Synthetic oligonucleotide
ggaugccgccaggaagccc

SEQ ID NO: 2534211 - RNA, 19 nt, Artificial Sequence
  Description of Artificial Sequence: Synthetic oligonucleotide
gcuaggcccagagccagaa

SEQ ID NO: 2534212 - RNA, 19 nt, Artificial Sequence
  Description of Artificial Sequence: Synthetic oligonucleotide
ugcccuugcugggcacgaa

SEQ ID NO: 2534213 - RNA, 19 nt, Artificial Sequence
  Description of Artificial Sequence: Synthetic oligonucleotide
cgaaaaccaaggccagaca

SEQ ID NO: 2534214 - RNA, 19 nt, Artificial Sequence
  Description of Artificial Sequence: Synthetic oligonucleotide
cuccuucaucaccguugca

SEQ ID NO: 2534215 - RNA, 19 nt, Artificial Sequence
  Description of Artificial Sequence: Synthetic oligonucleotide
cccuugcugggcacgaaaa

SEQ ID NO: 2534216 - RNA, 19 nt, Artificial Sequence
  Description of Artificial Sequence: Synthetic oligonucleotide
cguggucauaagcaagaaa

SEQ ID NO: 2534217 - RNA, 19 nt, Artificial Sequence
  Description of Artificial Sequence: Synthetic oligonucleotide
cguugcacugggcgaggag

SEQ ID NO: 2534218 - RNA, 19 nt, Artificial Sequence
  Description of Artificial Sequence: Synthetic oligonucleotide
agccgccacucuccuucau

SEQ ID NO: 2534219 - RNA, 19 nt, Artificial Sequence
  Description of Artificial Sequence: Synthetic oligonucleotide
ccgccaggaagcccaccgc

SEQ ID NO: 2534220 - RNA, 19 nt, Artificial Sequence
  Description of Artificial Sequence: Synthetic oligonucleotide
ggaagaggcccaguccgcu

SEQ ID NO: 2534221 - RNA, 19 nt, Artificial Sequence
  Description of Artificial Sequence: Synthetic oligonucleotide
gcccuugcugggcacgaaa

SEQ ID NO: 2534222 - RNA, 19 nt, Artificial Sequence
  Description of Artificial Sequence: Synthetic oligonucleotide
caucagcgacaggaccaca

SEQ ID NO: 2534223 - RNA, 19 nt, Artificial Sequence
  Description of Artificial Sequence: Synthetic oligonucleotide
ggagcacagcuggaaccga

SEQ ID NO: 2534224 - RNA, 19 nt, Artificial Sequence
  Description of Artificial Sequence: Synthetic oligonucleotide
ccuuggagcacagcuggaa

SEQ ID NO: 2534225 - RNA, 19 nt, Artificial Sequence
  Description of Artificial Sequence: Synthetic oligonucleotide
ccaggaaggugagccugac

SEQ ID NO: 2534226 - RNA, 19 nt, Artificial Sequence
  Description of Artificial Sequence: Synthetic oligonucleotide
ggcaggcaguggcuccgac

SEQ ID NO: 2534227 - RNA, 19 nt, Artificial Sequence
  Description of Artificial Sequence: Synthetic oligonucleotide
cagagaggacccacccaau

SEQ ID NO: 2534228 - RNA, 19 nt, Artificial Sequence
  Description of Artificial Sequence: Synthetic oligonucleotide
cugcccuugcugggcacga

SEQ ID NO: 2534229 - RNA, 19 nt, Artificial Sequence
  Description of Artificial Sequence: Synthetic oligonucleotide
cagccgccacucuccuuca

SEQ ID NO: 2534230 - RNA, 19 nt, Artificial Sequence
  Description of Artificial Sequence: Synthetic oligonucleotide
gcccuucuuuccccgugga

SEQ ID NO: 2534231 - RNA, 19 nt, Artificial Sequence
  Description of Artificial Sequence: Synthetic oligonucleotide
ggcuaacaguccucccacu

SEQ ID NO: 2534232 - RNA, 19 nt, Artificial Sequence
  Description of Artificial Sequence: Synthetic oligonucleotide
ggcgaggaggagaggcaga

SEQ ID NO: 2534233 - RNA, 19 nt, Artificial Sequence
  Description of Artificial Sequence: Synthetic oligonucleotide
guccgcuggccagcagcac

SEQ ID NO: 2534234 - RNA, 19 nt, Artificial Sequence
  Description of Artificial Sequence: Synthetic oligonucleotide
ccgaaccccuggaauccca

SEQ ID NO: 2534235 - RNA, 19 nt, Artificial Sequence
  Description of Artificial Sequence: Synthetic oligonucleotide
cucgcccuucuuuccccgu

SEQ ID NO: 2534236 - RNA, 19 nt, Artificial Sequence
  Description of Artificial Sequence: Synthetic oligonucleotide
cacuugcucucgcccuucu

SEQ ID NO: 2534237 - RNA, 19 nt, Artificial Sequence
  Description of Artificial Sequence: Synthetic oligonucleotide
ggaaucccauaagccuuua

SEQ ID NO: 2534238 - RNA, 19 nt, Artificial Sequence
  Description of Artificial Sequence: Synthetic oligonucleotide
gccuggagacagacauuuc

SEQ ID NO: 2534239 - RNA, 19 nt, Artificial Sequence
  Description of Artificial Sequence: Synthetic oligonucleotide
agggccccauacacaccaa

SEQ ID NO: 2534240 - RNA, 19 nt, Artificial Sequence
  Description of Artificial Sequence: Synthetic oligonucleotide
cccaccgagcacucaucaa

SEQ ID NO: 2534241 - RNA, 19 nt, Artificial Sequence
  Description of Artificial Sequence: Synthetic oligonucleotide
ccacuuccacacgaaggaa

SEQ ID NO: 2534242 - RNA, 19 nt, Artificial Sequence
  Description of Artificial Sequence: Synthetic oligonucleotide
cccguggagggagcauaac

SEQ ID NO: 2534243 - RNA, 19 nt, Artificial Sequence
  Description of Artificial Sequence: Synthetic oligonucleotide
cagcgagguugccagccuu

SEQ ID NO: 2534244 - RNA, 19 nt, Artificial Sequence
  Description of Artificial Sequence: Synthetic oligonucleotide
gguucgcuggcaccuccuu

SEQ ID NO: 2534245 - RNA, 19 nt, Artificial Sequence
  Description of Artificial Sequence: Synthetic oligonucleotide
ccccguggagggagcauaa

SEQ ID NO: 2534246 - RNA, 19 nt, Artificial Sequence
  Description of Artificial Sequence: Synthetic oligonucleotide
ggcuaggcccagagccaga

SEQ ID NO: 2534247 - RNA, 19 nt, Artificial Sequence
  Description of Artificial Sequence: Synthetic oligonucleotide
ccguggucauaagcaagaa

SEQ ID NO: 2534248 - RNA, 19 nt, Artificial Sequence
  Description of Artificial Sequence: Synthetic oligonucleotide
ccaccgccagccgccacuc

SEQ ID NO: 2534249 - RNA, 19 nt, Artificial Sequence
  Description of Artificial Sequence: Synthetic oligonucleotide
cgagguugccagccuucca

SEQ ID NO: 2534250 - RNA, 19 nt, Artificial Sequence
  Description of Artificial Sequence: Synthetic oligonucleotide
cggaggaugccgccaggaa

SEQ ID NO: 2534251 - RNA, 19 nt, Artificial Sequence
  Description of Artificial Sequence: Synthetic oligonucleotide
gcagaggggcaaagauggu

SEQ ID NO: 2534252 - RNA, 19 nt, Artificial Sequence
  Description of Artificial Sequence: Synthetic oligonucleotide
ccgacacagccuggagaca

SEQ ID NO: 2534253 - RNA, 19 nt, Artificial Sequence
  Description of Artificial Sequence: Synthetic oligonucleotide
ccuccagcucaggaaaguu

SEQ ID NO: 2534254 - RNA, 19 nt, Artificial Sequence
  Description of Artificial Sequence: Synthetic oligonucleotide
ccguugcacugggcgagga

SEQ ID NO: 2534255 - RNA, 19 nt, Artificial Sequence
  Description of Artificial Sequence: Synthetic oligonucleotide
gcccaccgccagccgccac

SEQ ID NO: 2534256 - RNA, 19 nt, Artificial Sequence
  Description of Artificial Sequence: Synthetic oligonucleotide
cgaaccccuggaaucccau

SEQ ID NO: 2534257 - RNA, 19 nt, Artificial Sequence
  Description of Artificial Sequence: Synthetic oligonucleotide
caccgccagccgccacucu

SEQ ID NO: 2534258 - RNA, 19 nt, Artificial Sequence
  Description of Artificial Sequence: Synthetic oligonucleotide
gccagccgccacucuccuu

SEQ ID NO: 2534259 - RNA, 19 nt, Artificial Sequence
  Description of Artificial Sequence: Synthetic oligonucleotide
cgccagccgccacucuccu

SEQ ID NO: 2534260 - RNA, 19 nt, Artificial Sequence
  Description of Artificial Sequence: Synthetic oligonucleotide
aaaguuuaaauucuuggcc

SEQ ID NO: 2534261 - RNA, 19 nt, Artificial Sequence
  Description of Artificial Sequence: Synthetic oligonucleotide
uuuauuuacaagacuaccg

SEQ ID NO: 2534262 - RNA, 19 nt, Artificial Sequence
  Description of Artificial Sequence: Synthetic oligonucleotide
aaauauaagauauucauuu

SEQ ID NO: 2534263 - RNA, 19 nt, Artificial Sequence
  Description of Artificial Sequence: Synthetic oligonucleotide
agauuauacauccaagagc

SEQ ID NO: 2534264 - RNA, 19 nt, Artificial Sequence
  Description of Artificial Sequence: Synthetic oligonucleotide
uauaagauauucauuuccg

SEQ ID NO: 2534265 - RNA, 19 nt, Artificial Sequence
  Description of Artificial Sequence: Synthetic oligonucleotide
aacauaauauaaauguggc

SEQ ID NO: 2534266 - RNA, 19 nt, Artificial Sequence
  Description of Artificial Sequence: Synthetic oligonucleotide
gauuauacauccaagagcc

SEQ ID NO: 2534267 - RNA, 19 nt, Artificial Sequence
  Description of Artificial Sequence: Synthetic oligonucleotide
ucauauuccaguuuaauga

SEQ ID NO: 2534268 - RNA, 19 nt, Artificial Sequence
  Description of Artificial Sequence: Synthetic oligonucleotide
aauauaagauauucauuuc

SEQ ID NO: 2534269 - RNA, 19 nt, Artificial Sequence
  Description of Artificial Sequence: Synthetic oligonucleotide
caacauaauauaaaugugg

SEQ ID NO: 2534270 - RNA, 19 nt, Artificial Sequence
  Description of Artificial Sequence: Synthetic oligonucleotide
guaauuacaucaaagaaag

SEQ ID NO: 2534271 - RNA, 19 nt, Artificial Sequence
  Description of Artificial Sequence: Synthetic oligonucleotide
uggaauuucaccuuucaag

SEQ ID NO: 2534272 - RNA, 19 nt, Artificial Sequence
  Description of Artificial Sequence: Synthetic oligonucleotide
uccaauaacaaucuuuucu

SEQ ID NO: 2534273 - RNA, 19 nt, Artificial Sequence
  Description of Artificial Sequence: Synthetic oligonucleotide
gaaaguuuaaauucuuggc

SEQ ID NO: 2534274 - RNA, 19 nt, Artificial Sequence
  Description of Artificial Sequence: Synthetic oligonucleotide
ugaguuaguguccaaauca

SEQ ID NO: 2534275 - RNA, 19 nt, Artificial Sequence
  Description of Artificial Sequence: Synthetic oligonucleotide
ucauuuccggcucugaacg

SEQ ID NO: 2534276 - RNA, 19 nt, Artificial Sequence
  Description of Artificial Sequence: Synthetic oligonucleotide
acauaauauaaauguggcc

SEQ ID NO: 2534277 - RNA, 19 nt, Artificial Sequence
  Description of Artificial Sequence: Synthetic oligonucleotide
aagacuaccgagcauacga

SEQ ID NO: 2534278 - RNA, 19 nt, Artificial Sequence
  Description of Artificial Sequence: Synthetic oligonucleotide
uaaguacuaguucaaauga

SEQ ID NO: 2534279 - RNA, 19 nt, Artificial Sequence
  Description of Artificial Sequence: Synthetic oligonucleotide
uaauauuagguuauuuucu

SEQ ID NO: 2534280 - RNA, 19 nt, Artificial Sequence
  Description of Artificial Sequence: Synthetic oligonucleotide
uugcaaauaaacccuuucg

SEQ ID NO: 2534281 - RNA, 19 nt, Artificial Sequence
  Description of Artificial Sequence: Synthetic oligonucleotide
aaauucuuggccucugguc

SEQ ID NO: 2534282 - RNA, 19 nt, Artificial Sequence
  Description of Artificial Sequence: Synthetic oligonucleotide
aauuucaccuuucaagacu

SEQ ID NO: 2534283 - RNA, 19 nt, Artificial Sequence
  Description of Artificial Sequence: Synthetic oligonucleotide
ugaguaauaacugccgucg

SEQ ID NO: 2534284 - RNA, 19 nt, Artificial Sequence
  Description of Artificial Sequence: Synthetic oligonucleotide
ucgucuugcaaauaaaccc

SEQ ID NO: 2534285 - RNA, 19 nt, Artificial Sequence
  Description of Artificial Sequence: Synthetic oligonucleotide
uaagauauucauuuccggc

SEQ ID NO: 2534286 - RNA, 19 nt, Artificial Sequence
  Description of Artificial Sequence: Synthetic oligonucleotide
uuuacaagacuaccgagca

SEQ ID NO: 2534287 - RNA, 19 nt, Artificial Sequence
  Description of Artificial Sequence: Synthetic oligonucleotide
acuaguucaaaugaguuag

SEQ ID NO: 2534288 - RNA, 19 nt, Artificial Sequence
  Description of Artificial Sequence: Synthetic oligonucleotide
agccuaaacgcuuuguggc

SEQ ID NO: 2534289 - RNA, 19 nt, Artificial Sequence
  Description of Artificial Sequence: Synthetic oligonucleotide
ugcaaauaaacccuuucgc

SEQ ID NO: 2534290 - RNA, 19 nt, Artificial Sequence
  Description of Artificial Sequence: Synthetic oligonucleotide
guuccuacaaaugaguugg

SEQ ID NO: 2534291 - RNA, 19 nt, Artificial Sequence
  Description of Artificial Sequence: Synthetic oligonucleotide
aaaucauggauguacugcu

SEQ ID NO: 2534292 - RNA, 19 nt, Artificial Sequence
  Description of Artificial Sequence: Synthetic oligonucleotide
guucaaaugaguuaguguc

SEQ ID NO: 2534293 - RNA, 19 nt, Artificial Sequence
  Description of Artificial Sequence: Synthetic oligonucleotide
ucugugaguaauaacugcc

SEQ ID NO: 2534294 - RNA, 19 nt, Artificial Sequence
  Description of Artificial Sequence: Synthetic oligonucleotide
aggaaaauccaucauccgg

SEQ ID NO: 2534295 - RNA, 19 nt, Artificial Sequence
  Description of Artificial Sequence: Synthetic oligonucleotide
auaacaaucuuuucucauc

SEQ ID NO: 2534296 - RNA, 19 nt, Artificial Sequence
  Description of Artificial Sequence: Synthetic oligonucleotide
uagguuauuuucuacaaac

SEQ ID NO: 2534297 - RNA, 19 nt, Artificial Sequence
  Description of Artificial Sequence: Synthetic oligonucleotide
guaaguacuaguucaaaug

SEQ ID NO: 2534298 - RNA, 19 nt, Artificial Sequence
  Description of Artificial Sequence: Synthetic oligonucleotide
aagcugauagauuauacau

SEQ ID NO: 2534299 - RNA, 19 nt, Artificial Sequence
  Description of Artificial Sequence: Synthetic oligonucleotide
uucaagacuuuguugacag

SEQ ID NO: 2534300 - RNA, 19 nt, Artificial Sequence
  Description of Artificial Sequence: Synthetic oligonucleotide
auagauuauacauccaaga

SEQ ID NO: 2534301 - RNA, 19 nt, Artificial Sequence
  Description of Artificial Sequence: Synthetic oligonucleotide
guuaguguccaaaucaugg

SEQ ID NO: 2534302 - RNA, 19 nt, Artificial Sequence
  Description of Artificial Sequence: Synthetic oligonucleotide
uauuagguuauuuucuaca

SEQ ID NO: 2534303 - RNA, 19 nt, Artificial Sequence
  Description of Artificial Sequence: Synthetic oligonucleotide
auuuacaagacuaccgagc

SEQ ID NO: 2534304 - RNA, 19 nt, Artificial Sequence
  Description of Artificial Sequence: Synthetic oligonucleotide
uggagaaacauacugugcu

SEQ ID NO: 2534305 - RNA, 19 nt, Artificial Sequence
  Description of Artificial Sequence: Synthetic oligonucleotide
auaagauauucauuuccgg

SEQ ID NO: 2534306 - RNA, 19 nt, Artificial Sequence
  Description of Artificial Sequence: Synthetic oligonucleotide
acaaucuuuucucaucuuc

SEQ ID NO: 2534307 - RNA, 19 nt, Artificial Sequence
  Description of Artificial Sequence: Synthetic oligonucleotide
auaaauguggcccuucugu

SEQ ID NO: 2534308 - RNA, 19 nt, Artificial Sequence
  Description of Artificial Sequence: Synthetic oligonucleotide
acauccaagagcccaaagg

SEQ ID NO: 2534309 - RNA, 19 nt, Artificial Sequence
  Description of Artificial Sequence: Synthetic oligonucleotide
aauauuagguuauuuucua

SEQ ID NO: 2534310 - RNA, 19 nt, Artificial Sequence
  Description of Artificial Sequence: Synthetic oligonucleotide
uguggcaucuaaaaccaag

SEQ ID NO: 2534311 - RNA, 19 nt, Artificial Sequence
  Description of Artificial Sequence: Synthetic oligonucleotide
ucugaacucuuacacgccg

SEQ ID NO: 2534312 - RNA, 19 nt, Artificial Sequence
  Description of Artificial Sequence: Synthetic oligonucleotide
uccgguaauuacaucaaag

SEQ ID NO: 2534313 - RNA, 19 nt, Artificial Sequence
  Description of Artificial Sequence: Synthetic oligonucleotide
aaauccaucauccgguaau

SEQ ID NO: 2534314 - RNA, 19 nt, Artificial Sequence
  Description of Artificial Sequence: Synthetic oligonucleotide
aucaaagaaaguuuaaauu

SEQ ID NO: 2534315 - RNA, 19 nt, Artificial Sequence
  Description of Artificial Sequence: Synthetic oligonucleotide
gagcauacgaggaaaaucc

SEQ ID NO: 2534316 - RNA, 19 nt, Artificial Sequence
  Description of Artificial Sequence: Synthetic oligonucleotide
  modified_base (7)..(7): a, c, u, g, unknown or other
uuuuccncaagaucucuug

SEQ ID NO: 2534317 - RNA, 19 nt, Artificial Sequence
  Description of Artificial Sequence: Synthetic oligonucleotide
aaugaguuggcccuggcuu

SEQ ID NO: 2534318 - RNA, 19 nt, Artificial Sequence
  Description of Artificial Sequence: Synthetic oligonucleotide
ugaccauggaauuucaccu

SEQ ID NO: 2534319 - RNA, 19 nt, Artificial Sequence
  Description of Artificial Sequence: Synthetic oligonucleotide
aaugaguuaguguccaaau

SEQ ID NO: 2534320 - RNA, 19 nt, Artificial Sequence
  Description of Artificial Sequence: Synthetic oligonucleotide
gauagauuauacauccaag

SEQ ID NO: 2534321 - RNA, 19 nt, Artificial Sequence
  Description of Artificial Sequence: Synthetic oligonucleotide
acgaggaaaauccaucauc

SEQ ID NO: 2534322 - RNA, 19 nt, Artificial Sequence
  Description of Artificial Sequence: Synthetic oligonucleotide
gaaagaauuucucugggaa

SEQ ID NO: 2534323 - RNA, 19 nt, Artificial Sequence
  Description of Artificial Sequence: Synthetic oligonucleotide
gcugauagauuauacaucc

SEQ ID NO: 2534324 - RNA, 19 nt, Artificial Sequence
  Description of Artificial Sequence: Synthetic oligonucleotide
gaaaucauauuccaguuua

SEQ ID NO: 2534325 - RNA, 19 nt, Artificial Sequence
  Description of Artificial Sequence: Synthetic oligonucleotide
uuaaauucuuggccucugg

SEQ ID NO: 2534326 - RNA, 19 nt, Artificial Sequence
  Description of Artificial Sequence: Synthetic oligonucleotide
auaauauaaauguggcccu

SEQ ID NO: 2534327 - RNA, 19 nt, Artificial Sequence
  Description of Artificial Sequence: Synthetic oligonucleotide
uccaagagcccaaaggucu

SEQ ID NO: 2534328 - RNA, 19 nt, Artificial Sequence
  Description of Artificial Sequence: Synthetic oligonucleotide
aguuuaaauucuuggccuc

SEQ ID NO: 2534329 - RNA, 19 nt, Artificial Sequence
  Description of Artificial Sequence: Synthetic oligonucleotide
uuauacauccaagagccca

SEQ ID NO: 2534330 - RNA, 19 nt, Artificial Sequence
  Description of Artificial Sequence: Synthetic oligonucleotide
ugugcuguuccuacaaaug

SEQ ID NO: 2534331 - RNA, 19 nt, Artificial Sequence
  Description of Artificial Sequence: Synthetic oligonucleotide
uauguugcugccccgaccu

SEQ ID NO: 2534332 - RNA, 19 nt, Artificial Sequence
  Description of Artificial Sequence: Synthetic oligonucleotide
uuaaugaucuucugaaaua

SEQ ID NO: 2534333 - RNA, 19 nt, Artificial Sequence
  Description of Artificial Sequence: Synthetic oligonucleotide
aaagaauuucucugggaaa

SEQ ID NO: 2534334 - RNA, 19 nt, Artificial Sequence
  Description of Artificial Sequence: Synthetic oligonucleotide
uuacaucaaagaaaguuua

SEQ ID NO: 2534335 - RNA, 19 nt, Artificial Sequence
  Description of Artificial Sequence: Synthetic oligonucleotide
aguaauaacugccgucguc

SEQ ID NO: 2534336 - RNA, 19 nt, Artificial Sequence
  Description of Artificial Sequence: Synthetic oligonucleotide
uguuccuacaaaugaguug

SEQ ID NO: 2534337 - RNA, 19 nt, Artificial Sequence
  Description of Artificial Sequence: Synthetic oligonucleotide
uaaacccuuucgcuuaucc

SEQ ID NO: 2534338 - RNA, 19 nt, Artificial Sequence
  Description of Artificial Sequence: Synthetic oligonucleotide
aguucaaaugaguuagugu

SEQ ID NO: 2534339 - RNA, 19 nt, Artificial Sequence
  Description of Artificial Sequence: Synthetic oligonucleotide
caaaucauggauguacugc

SEQ ID NO: 2534340 - RNA, 19 nt, Artificial Sequence
  Description of Artificial Sequence: Synthetic oligonucleotide
uucgcuuauccacugggcc

SEQ ID NO: 2534341 - RNA, 19 nt, Artificial Sequence
  Description of Artificial Sequence: Synthetic oligonucleotide
aacucuuacacgccgacuu

SEQ ID NO: 2534342 - RNA, 19 nt, Artificial Sequence
  Description of Artificial Sequence: Synthetic oligonucleotide
uguaaguacuaguucaaau

SEQ ID NO: 2534343 - RNA, 19 nt, Artificial Sequence
  Description of Artificial Sequence: Synthetic oligonucleotide
gguuauuuucuacaaacug

SEQ ID NO: 2534344 - RNA, 19 nt, Artificial Sequence
  Description of Artificial Sequence: Synthetic oligonucleotide
augaguuaguguccaaauc

SEQ ID NO: 2534345 - RNA, 19 nt, Artificial Sequence
  Description of Artificial Sequence: Synthetic oligonucleotide
uucugaaaacuguaaguac

SEQ ID NO: 2534346 - RNA, 19 nt, Artificial Sequence
  Description of Artificial Sequence: Synthetic oligonucleotide
uccaccggcagacagcgag

SEQ ID NO: 2534347 - RNA, 19 nt, Artificial Sequence
  Description of Artificial Sequence: Synthetic oligonucleotide
cauacgaggaaaauccauc

SEQ ID NO: 2534348 - RNA, 19 nt, Artificial Sequence
  Description of Artificial Sequence: Synthetic oligonucleotide
  modified_base (4)..(4): a, c, u, g, unknown or other
uccncaagaucucuugccu

SEQ ID NO: 2534349 - RNA, 19 nt, Artificial Sequence
  Description of Artificial Sequence: Synthetic oligonucleotide
uuucucugggaaaucauau

SEQ ID NO: 2534350 - RNA, 19 nt, Artificial Sequence
  Description of Artificial Sequence: Synthetic oligonucleotide
cugugaguaauaacugccg

SEQ ID NO: 2534351 - RNA, 19 nt, Artificial Sequence
  Description of Artificial Sequence: Synthetic oligonucleotide
ugugaguaauaacugccgu

SEQ ID NO: 2534352 - RNA, 19 nt, Artificial Sequence
  Description of Artificial Sequence: Synthetic oligonucleotide
agacuuuguugacaggauc

SEQ ID NO: 2534353 - RNA, 19 nt, Artificial Sequence
  Description of Artificial Sequence: Synthetic oligonucleotide
uggcaucuaaaaccaagag

SEQ ID NO: 2534354 - RNA, 19 nt, Artificial Sequence
  Description of Artificial Sequence: Synthetic oligonucleotide
  modified_base (6)..(6): a, c, u, g, unknown or other
uuuccncaagaucucuugc

SEQ ID NO: 2534355 - RNA, 19 nt, Artificial Sequence
  Description of Artificial Sequence: Synthetic oligonucleotide
guugacaggaucaacauaa

SEQ ID NO: 2534356 - RNA, 19 nt, Artificial Sequence
  Description of Artificial Sequence: Synthetic oligonucleotide
uauaaauguggcccuucug

SEQ ID NO: 2534357 - RNA, 19 nt, Artificial Sequence
  Description of Artificial Sequence: Synthetic oligonucleotide
  modified_base (5)..(5): a, c, u, g, unknown or other
uuccncaagaucucuugcc

SEQ ID NO: 2534358 - RNA, 19 nt, Artificial Sequence
  Description of Artificial Sequence: Synthetic oligonucleotide
aauaacugccgucgucuug

SEQ ID NO: 2534359 - RNA, 19 nt, Artificial Sequence
  Description of Artificial Sequence: Synthetic oligonucleotide
uaaauguggcccuucugug

SEQ ID NO: 2534360 - RNA, 19 nt, Artificial Sequence
  Description of Artificial Sequence: Synthetic oligonucleotide
gaggaaaauccaucauccg

SEQ ID NO: 2534361 - RNA, 19 nt, Artificial Sequence
  Description of Artificial Sequence: Synthetic oligonucleotide
uaaauucuuggccucuggu

SEQ ID NO: 2534362 - RNA, 19 nt, Artificial Sequence
  Description of Artificial Sequence: Synthetic oligonucleotide
cuuucgcuuauccacuggg

SEQ ID NO: 2534363 - RNA, 19 nt, Artificial Sequence
  Description of Artificial Sequence: Synthetic oligonucleotide
gaguggaugagcuuugaga

SEQ ID NO: 2534364 - RNA, 19 nt, Artificial Sequence
  Description of Artificial Sequence: Synthetic oligonucleotide
auacgaggaaaauccauca

SEQ ID NO: 2534365 - RNA, 19 nt, Artificial Sequence
  Description of Artificial Sequence: Synthetic oligonucleotide
aaaugaguuggcccuggcu

SEQ ID NO: 2534366 - RNA, 19 nt, Artificial Sequence
  Description of Artificial Sequence: Synthetic oligonucleotide
ugggaguccugccacaagc

SEQ ID NO: 2534367 - RNA, 19 nt, Artificial Sequence
  Description of Artificial Sequence: Synthetic oligonucleotide
aaguacuaguucaaaugag

SEQ ID NO: 2534368 - RNA, 19 nt, Artificial Sequence
  Description of Artificial Sequence: Synthetic oligonucleotide
cauacugugcuguuccuac

SEQ ID NO: 2534369 - RNA, 19 nt, Artificial Sequence
  Description of Artificial Sequence: Synthetic oligonucleotide
uccaucauccgguaauuac

SEQ ID NO: 2534370 - RNA, 19 nt, Artificial Sequence
  Description of Artificial Sequence: Synthetic oligonucleotide
ucaucuucugaaaacugua

SEQ ID NO: 2534371 - RNA, 19 nt, Artificial Sequence
  Description of Artificial Sequence: Synthetic oligonucleotide
uccaaaucauggauguacu

SEQ ID NO: 2534372 - RNA, 19 nt, Artificial Sequence
  Description of Artificial Sequence: Synthetic oligonucleotide
aggucugaacucuuacacg

SEQ ID NO: 2534373 - RNA, 19 nt, Artificial Sequence
  Description of Artificial Sequence: Synthetic oligonucleotide
aucucuucacagccuaaac

SEQ ID NO: 2534374 - RNA, 19 nt, Artificial Sequence
  Description of Artificial Sequence: Synthetic oligonucleotide
ggaauuucaccuuucaaga

SEQ ID NO: 2534375 - RNA, 19 nt, Artificial Sequence
  Description of Artificial Sequence: Synthetic oligonucleotide
ggucugaacucuuacacgc

SEQ ID NO: 2534376 - RNA, 19 nt, Artificial Sequence
  Description of Artificial Sequence: Synthetic oligonucleotide
uaaugaucuucugaaauau

SEQ ID NO: 2534377 - RNA, 19 nt, Artificial Sequence
  Description of Artificial Sequence: Synthetic oligonucleotide
uauccaccggcagacagcg

SEQ ID NO: 2534378 - RNA, 19 nt, Artificial Sequence
  Description of Artificial Sequence: Synthetic oligonucleotide
cagccuaaacgcuuugugg

SEQ ID NO: 2534379 - RNA, 19 nt, Artificial Sequence
  Description of Artificial Sequence: Synthetic oligonucleotide
uucauuuccggcucugaac

SEQ ID NO: 2534380 - RNA, 19 nt, Artificial Sequence
  Description of Artificial Sequence: Synthetic oligonucleotide
gaauuucaccuuucaagac

SEQ ID NO: 2534381 - RNA, 19 nt, Artificial Sequence
  Description of Artificial Sequence: Synthetic oligonucleotide
acaagcugauagauuauac

SEQ ID NO: 2534382 - RNA, 19 nt, Artificial Sequence
  Description of Artificial Sequence: Synthetic oligonucleotide
aaacccuuucgcuuaucca

SEQ ID NO: 2534383 - RNA, 19 nt, Artificial Sequence
  Description of Artificial Sequence: Synthetic oligonucleotide
aacgcuuuguggcaucuaa

SEQ ID NO: 2534384 - RNA, 19 nt, Artificial Sequence
  Description of Artificial Sequence: Synthetic oligonucleotide
gacuaccgagcauacgagg

SEQ ID NO: 2534385 - RNA, 19 nt, Artificial Sequence
  Description of Artificial Sequence: Synthetic oligonucleotide
cuugcaaauaaacccuuuc

SEQ ID NO: 2534386 - RNA, 19 nt, Artificial Sequence
  Description of Artificial Sequence: Synthetic oligonucleotide
aaucauauuccaguuuaau

SEQ ID NO: 2534387 - RNA, 19 nt, Artificial Sequence
  Description of Artificial Sequence: Synthetic oligonucleotide
uuacucuacaugcuuuuau

SEQ ID NO: 2534388 - RNA, 19 nt, Artificial Sequence
  Description of Artificial Sequence: Synthetic oligonucleotide
acugcucuauguugcugcc

SEQ ID NO: 2534389 - RNA, 19 nt, Artificial Sequence
  Description of Artificial Sequence: Synthetic oligonucleotide
agcccaaaggucugaacuc

SEQ ID NO: 2534390 - RNA, 19 nt, Artificial Sequence
  Description of Artificial Sequence: Synthetic oligonucleotide
uacaagacuaccgagcaua

SEQ ID NO: 2534391 - RNA, 19 nt, Artificial Sequence
  Description of Artificial Sequence: Synthetic oligonucleotide
aaaugaguuaguguccaaa

SEQ ID NO: 2534392 - RNA, 19 nt, Artificial Sequence
  Description of Artificial Sequence: Synthetic oligonucleotide
auauaaauguggcccuucu

SEQ ID NO: 2534393 - RNA, 19 nt, Artificial Sequence
  Description of Artificial Sequence: Synthetic oligonucleotide
acagccuaaacgcuuugug

SEQ ID NO: 2534394 - RNA, 19 nt, Artificial Sequence
  Description of Artificial Sequence: Synthetic oligonucleotide
uuucgcuuauccacugggc

SEQ ID NO: 2534395 - RNA, 19 nt, Artificial Sequence
  Description of Artificial Sequence: Synthetic oligonucleotide
aguacuaguucaaaugagu

SEQ ID NO: 2534396 - RNA, 19 nt, Artificial Sequence
  Description of Artificial Sequence: Synthetic oligonucleotide
gacaggaucaacauaauau

SEQ ID NO: 2534397 - RNA, 19 nt, Artificial Sequence
  Description of Artificial Sequence: Synthetic oligonucleotide
aguucuugugaccauggaa

SEQ ID NO: 2534398 - RNA, 19 nt, Artificial Sequence
  Description of Artificial Sequence: Synthetic oligonucleotide
uacuaguucaaaugaguua

SEQ ID NO: 2534399 - RNA, 19 nt, Artificial Sequence
  Description of Artificial Sequence: Synthetic oligonucleotide
ccuacaaaugaguuggccc

SEQ ID NO: 2534400 - RNA, 19 nt, Artificial Sequence
  Description of Artificial Sequence: Synthetic oligonucleotide
agcugauagauuauacauc

SEQ ID NO: 2534401 - RNA, 19 nt, Artificial Sequence
  Description of Artificial Sequence: Synthetic oligonucleotide
uuacacgccgacuucucug

SEQ ID NO: 2534402 - RNA, 19 nt, Artificial Sequence
  Description of Artificial Sequence: Synthetic oligonucleotide
ucuacaaacuggugccggc

SEQ ID NO: 2534403 - RNA, 19 nt, Artificial Sequence
  Description of Artificial Sequence: Synthetic oligonucleotide
ucgcuuauccacugggccc

SEQ ID NO: 2534404 - RNA, 19 nt, Artificial Sequence
  Description of Artificial Sequence: Synthetic oligonucleotide
ugaacucuuacacgccgac

SEQ ID NO: 2534405 - RNA, 19 nt, Artificial Sequence
  Description of Artificial Sequence: Synthetic oligonucleotide
aauaaacccuuucgcuuau

SEQ ID NO: 2534406 - RNA, 19 nt, Artificial Sequence
  Description of Artificial Sequence: Synthetic oligonucleotide
caaagaaaguuuaaauucu

SEQ ID NO: 2534407 - RNA, 19 nt, Artificial Sequence
  Description of Artificial Sequence: Synthetic oligonucleotide
uuuuacucuacaugcuuuu

SEQ ID NO: 2534408 - RNA, 19 nt, Artificial Sequence
  Description of Artificial Sequence: Synthetic oligonucleotide
aaaauccaucauccgguaa

SEQ ID NO: 2534409 - RNA, 19 nt, Artificial Sequence
  Description of Artificial Sequence: Synthetic oligonucleotide
caagcugauagauuauaca

SEQ ID NO: 2534410 - RNA, 19 nt, Artificial Sequence
  Description of Artificial Sequence: Synthetic oligonucleotide
gucgucuugcaaauaaacc

SEQ ID NO: 2534411 - RNA, 19 nt, Artificial Sequence
  Description of Artificial Sequence: Synthetic oligonucleotide
ucaagacuuuguugacagg

SEQ ID NO: 2534412 - RNA, 19 nt, Artificial Sequence
  Description of Artificial Sequence: Synthetic oligonucleotide
acugccgucgucuugcaaa

SEQ ID NO: 2534413 - RNA, 19 nt, Artificial Sequence
  Description of Artificial Sequence: Synthetic oligonucleotide
uacaugcuuuuauuuacaa

SEQ ID NO: 2534414 - RNA, 19 nt, Artificial Sequence
  Description of Artificial Sequence: Synthetic oligonucleotide
gaauuucucugggaaauca

SEQ ID NO: 2534415 - RNA, 19 nt, Artificial Sequence
  Description of Artificial Sequence: Synthetic oligonucleotide
ugaacggugggaguccugc

SEQ ID NO: 2534416 - RNA, 19 nt, Artificial Sequence
  Description of Artificial Sequence: Synthetic oligonucleotide
caagacuuuguugacagga

SEQ ID NO: 2534417 - RNA, 19 nt, Artificial Sequence
  Description of Artificial Sequence: Synthetic oligonucleotide
acucuuacacgccgacuuc

SEQ ID NO: 2534418 - RNA, 19 nt, Artificial Sequence
  Description of Artificial Sequence: Synthetic oligonucleotide
uacucuacaugcuuuuauu

SEQ ID NO: 2534419 - RNA, 19 nt, Artificial Sequence
  Description of Artificial Sequence: Synthetic oligonucleotide
ugccuuaggaaagaauuuc

SEQ ID NO: 2534420 - RNA, 19 nt, Artificial Sequence
  Description of Artificial Sequence: Synthetic oligonucleotide
acuggugccggcuuguuuu

SEQ ID NO: 2534421 - RNA, 19 nt, Artificial Sequence
  Description of Artificial Sequence: Synthetic oligonucleotide
aacauacugugcuguuccu

SEQ ID NO: 2534422 - RNA, 19 nt, Artificial Sequence
  Description of Artificial Sequence: Synthetic oligonucleotide
agagcccaaaggucugaac

SEQ ID NO: 2534423 - RNA, 19 nt, Artificial Sequence
  Description of Artificial Sequence: Synthetic oligonucleotide
acucuacaugcuuuuauuu

SEQ ID NO: 2534424 - RNA, 19 nt, Artificial Sequence
  Description of Artificial Sequence: Synthetic oligonucleotide
uguugacaggaucaacaua

SEQ ID NO: 2534425 - RNA, 19 nt, Artificial Sequence
  Description of Artificial Sequence: Synthetic oligonucleotide
gugaguaauaacugccguc

SEQ ID NO: 2534426 - RNA, 19 nt, Artificial Sequence
  Description of Artificial Sequence: Synthetic oligonucleotide
caguuuaaugaucuucuga

SEQ ID NO: 2534427 - RNA, 19 nt, Artificial Sequence
  Description of Artificial Sequence: Synthetic oligonucleotide
ucuugccuuaggaaagaau

SEQ ID NO: 2534428 - RNA, 19 nt, Artificial Sequence
  Description of Artificial Sequence: Synthetic oligonucleotide
aucucuugccuuaggaaag

SEQ ID NO: 2534429 - RNA, 19 nt, Artificial Sequence
  Description of Artificial Sequence: Synthetic oligonucleotide
uuauccacugggcccauuu

SEQ ID NO: 2534430 - RNA, 19 nt, Artificial Sequence
  Description of Artificial Sequence: Synthetic oligonucleotide
acggugggaguccugccac

SEQ ID NO: 2534431 - RNA, 19 nt, Artificial Sequence
  Description of Artificial Sequence: Synthetic oligonucleotide
ucuggucggaguucuugug

SEQ ID NO: 2534432 - RNA, 19 nt, Artificial Sequence
  Description of Artificial Sequence: Synthetic oligonucleotide
ucuauguugcugccccgac

SEQ ID NO: 2534433 - RNA, 19 nt, Artificial Sequence
  Description of Artificial Sequence: Synthetic oligonucleotide
uacgaggaaaauccaucau

SEQ ID NO: 2534434 - RNA, 19 nt, Artificial Sequence
  Description of Artificial Sequence: Synthetic oligonucleotide
aauuucucugggaaaucau

SEQ ID NO: 2534435 - RNA, 19 nt, Artificial Sequence
  Description of Artificial Sequence: Synthetic oligonucleotide
uuuccggcucugaacggug

SEQ ID NO: 2534436 - RNA, 19 nt, Artificial Sequence
  Description of Artificial Sequence: Synthetic oligonucleotide
aacaaucuuuucucaucuu

SEQ ID NO: 2534437 - RNA, 19 nt, Artificial Sequence
  Description of Artificial Sequence: Synthetic oligonucleotide
auggaauuucaccuuucaa

SEQ ID NO: 2534438 - RNA, 19 nt, Artificial Sequence
  Description of Artificial Sequence: Synthetic oligonucleotide
uggucggaguucuugugac

SEQ ID NO: 2534439 - RNA, 19 nt, Artificial Sequence
  Description of Artificial Sequence: Synthetic oligonucleotide
cuacaaaugaguuggcccu

SEQ ID NO: 2534440 - RNA, 19 nt, Artificial Sequence
  Description of Artificial Sequence: Synthetic oligonucleotide
uucacagccuaaacgcuuu

SEQ ID NO: 2534441 - RNA, 19 nt, Artificial Sequence
  Description of Artificial Sequence: Synthetic oligonucleotide
uuugagaggcucguacccu

SEQ ID NO: 2534442 - RNA, 19 nt, Artificial Sequence
  Description of Artificial Sequence: Synthetic oligonucleotide
acaagacuaccgagcauac

SEQ ID NO: 2534443 - RNA, 19 nt, Artificial Sequence
  Description of Artificial Sequence: Synthetic oligonucleotide
cuauguugcugccccgacc

SEQ ID NO: 2534444 - RNA, 19 nt, Artificial Sequence
  Description of Artificial Sequence: Synthetic oligonucleotide
uccggcucugaacgguggg

SEQ ID NO: 2534445 - RNA, 19 nt, Artificial Sequence
  Description of Artificial Sequence: Synthetic oligonucleotide
uguugcugccccgaccucc

SEQ ID NO: 2534446 - RNA, 19 nt, Artificial Sequence
  Description of Artificial Sequence: Synthetic oligonucleotide
aaaucauauuccaguuuaa

SEQ ID NO: 2534447 - RNA, 19 nt, Artificial Sequence
  Description of Artificial Sequence: Synthetic oligonucleotide
uuccaauaacaaucuuuuc

SEQ ID NO: 2534448 - RNA, 19 nt, Artificial Sequence
  Description of Artificial Sequence: Synthetic oligonucleotide
gguauccaccggcagacag

SEQ ID NO: 2534449 - RNA, 19 nt, Artificial Sequence
  Description of Artificial Sequence: Synthetic oligonucleotide
uacacgccgacuucucugu

SEQ ID NO: 2534450 - RNA, 19 nt, Artificial Sequence
  Description of Artificial Sequence: Synthetic oligonucleotide
aggcucguacccuuccauc

SEQ ID NO: 2534451 - RNA, 19 nt, Artificial Sequence
  Description of Artificial Sequence: Synthetic oligonucleotide
gcaucuaaaaccaagaguu

SEQ ID NO: 2534452 - RNA, 19 nt, Artificial Sequence
  Description of Artificial Sequence: Synthetic oligonucleotide
acuaccgagcauacgagga

SEQ ID NO: 2534453 - RNA, 19 nt, Artificial Sequence
  Description of Artificial Sequence: Synthetic oligonucleotide
agguuauuuucuacaaacu

SEQ ID NO: 2534454 - RNA, 19 nt, Artificial Sequence
  Description of Artificial Sequence: Synthetic oligonucleotide
acgccgacuucucugugag

SEQ ID NO: 2534455 - RNA, 19 nt, Artificial Sequence
  Description of Artificial Sequence: Synthetic oligonucleotide
ggaucaacauaauauaaau

SEQ ID NO: 2534456 - RNA, 19 nt, Artificial Sequence
  Description of Artificial Sequence: Synthetic oligonucleotide
augagcuuugagaggcucg

SEQ ID NO: 2534457 - RNA, 19 nt, Artificial Sequence
  Description of Artificial Sequence: Synthetic oligonucleotide
cauccaagagcccaaaggu

SEQ ID NO: 2534458 - RNA, 19 nt, Artificial Sequence
  Description of Artificial Sequence: Synthetic oligonucleotide
ccuucugugaguaauaacu

SEQ ID NO: 2534459 - RNA, 19 nt, Artificial Sequence
  Description of Artificial Sequence: Synthetic oligonucleotide
aagacuuuguugacaggau

SEQ ID NO: 2534460 - RNA, 19 nt, Artificial Sequence
  Description of Artificial Sequence: Synthetic oligonucleotide
uucuugugaccauggaauu

SEQ ID NO: 2534461 - RNA, 19 nt, Artificial Sequence
  Description of Artificial Sequence: Synthetic oligonucleotide
guacccuuccaucucuuca

SEQ ID NO: 2534462 - RNA, 19 nt, Artificial Sequence
  Description of Artificial Sequence: Synthetic oligonucleotide
ucuuacacgccgacuucuc

SEQ ID NO: 2534463 - RNA, 19 nt, Artificial Sequence
  Description of Artificial Sequence: Synthetic oligonucleotide
agaaacauacugugcuguu

SEQ ID NO: 2534464 - RNA, 19 nt, Artificial Sequence
  Description of Artificial Sequence: Synthetic oligonucleotide
cauuuccggcucugaacgg

SEQ ID NO: 2534465 - RNA, 19 nt, Artificial Sequence
  Description of Artificial Sequence: Synthetic oligonucleotide
uucucugggaaaucauauu

SEQ ID NO: 2534466 - RNA, 19 nt, Artificial Sequence
  Description of Artificial Sequence: Synthetic oligonucleotide
uuacaagacuaccgagcau

SEQ ID NO: 2534467 - RNA, 19 nt, Artificial Sequence
  Description of Artificial Sequence: Synthetic oligonucleotide
cauggaauuucaccuuuca

SEQ ID NO: 2534468 - RNA, 19 nt, Artificial Sequence
  Description of Artificial Sequence: Synthetic oligonucleotide
aguuaguguccaaaucaug

SEQ ID NO: 2534469 - RNA, 19 nt, Artificial Sequence
  Description of Artificial Sequence: Synthetic oligonucleotide
guucuugugaccauggaau

SEQ ID NO: 2534470 - RNA, 19 nt, Artificial Sequence
  Description of Artificial Sequence: Synthetic oligonucleotide
aaugaucuucugaaauaua

SEQ ID NO: 2534471 - RNA, 19 nt, Artificial Sequence
  Description of Artificial Sequence: Synthetic oligonucleotide
aauccaucauccgguaauu

SEQ ID NO: 2534472 - RNA, 19 nt, Artificial Sequence
  Description of Artificial Sequence: Synthetic oligonucleotide
gaaaauccaucauccggua

SEQ ID NO: 2534473 - RNA, 19 nt, Artificial Sequence
  Description of Artificial Sequence: Synthetic oligonucleotide
uuccuacaaaugaguuggc

SEQ ID NO: 2534474 - RNA, 19 nt, Artificial Sequence
  Description of Artificial Sequence: Synthetic oligonucleotide
accauggaauuucaccuuu

SEQ ID NO: 2534475 - RNA, 19 nt, Artificial Sequence
  Description of Artificial Sequence: Synthetic oligonucleotide
uuccaucucuucacagccu

SEQ ID NO: 2534476 - RNA, 19 nt, Artificial Sequence
  Description of Artificial Sequence: Synthetic oligonucleotide
ucauggauguacugcucua

SEQ ID NO: 2534477 - RNA, 19 nt, Artificial Sequence
  Description of Artificial Sequence: Synthetic oligonucleotide
cuuuguugacaggaucaac

SEQ ID NO: 2534478 - RNA, 19 nt, Artificial Sequence
  Description of Artificial Sequence: Synthetic oligonucleotide
uaaacgcuuuguggcaucu

SEQ ID NO: 2534479 - RNA, 19 nt, Artificial Sequence
  Description of Artificial Sequence: Synthetic oligonucleotide
gaugagcuuugagaggcuc

SEQ ID NO: 2534480 - RNA, 19 nt, Artificial Sequence
  Description of Artificial Sequence: Synthetic oligonucleotide
caucuucugaaaacuguaa

SEQ ID NO: 2534481 - RNA, 19 nt, Artificial Sequence
  Description of Artificial Sequence: Synthetic oligonucleotide
auauucauuuccggcucug

SEQ ID NO: 2534482 - RNA, 19 nt, Artificial Sequence
  Description of Artificial Sequence: Synthetic oligonucleotide
guggcaucuaaaaccaaga

SEQ ID NO: 2534483 - RNA, 19 nt, Artificial Sequence
  Description of Artificial Sequence: Synthetic oligonucleotide
ggaguucuugugaccaugg

SEQ ID NO: 2534484 - RNA, 19 nt, Artificial Sequence
  Description of Artificial Sequence: Synthetic oligonucleotide
ucacagccuaaacgcuuug

SEQ ID NO: 2534485 - RNA, 19 nt, Artificial Sequence
  Description of Artificial Sequence: Synthetic oligonucleotide
cauauuccaguuuaaugau

SEQ ID NO: 2534486 - RNA, 19 nt, Artificial Sequence
  Description of Artificial Sequence: Synthetic oligonucleotide
agacuaccgagcauacgag

SEQ ID NO: 2534487 - RNA, 19 nt, Artificial Sequence
  Description of Artificial Sequence: Synthetic oligonucleotide
gaguccugccacaagcuga

SEQ ID NO: 2534488 - RNA, 19 nt, Artificial Sequence
  Description of Artificial Sequence: Synthetic oligonucleotide
agacagcgaguggaugagc

SEQ ID NO: 2534489 - RNA, 19 nt, Artificial Sequence
  Description of Artificial Sequence: Synthetic oligonucleotide
ucuugugaccauggaauuu

SEQ ID NO: 2534490 - RNA, 19 nt, Artificial Sequence
  Description of Artificial Sequence: Synthetic oligonucleotide
cuaaacgcuuuguggcauc

SEQ ID NO: 2534491 - RNA, 19 nt, Artificial Sequence
  Description of Artificial Sequence: Synthetic oligonucleotide
gucggaguucuugugacca

SEQ ID NO: 2534492 - RNA, 19 nt, Artificial Sequence
  Description of Artificial Sequence: Synthetic oligonucleotide
uaauaacugccgucgucuu

SEQ ID NO: 2534493 - RNA, 19 nt, Artificial Sequence
  Description of Artificial Sequence: Synthetic oligonucleotide
caagacuaccgagcauacg

SEQ ID NO: 2534494 - RNA, 19 nt, Artificial Sequence
  Description of Artificial Sequence: Synthetic oligonucleotide
auuuccggcucugaacggu

SEQ ID NO: 2534495 - RNA, 19 nt, Artificial Sequence
  Description of Artificial Sequence: Synthetic oligonucleotide
ccgguaauuacaucaaaga

SEQ ID NO: 2534496 - RNA, 19 nt, Artificial Sequence
  Description of Artificial Sequence: Synthetic oligonucleotide
ggcaucuaaaaccaagagu

SEQ ID NO: 2534497 - RNA, 19 nt, Artificial Sequence
  Description of Artificial Sequence: Synthetic oligonucleotide
auuucucugggaaaucaua

SEQ ID NO: 2534498 - RNA, 19 nt, Artificial Sequence
  Description of Artificial Sequence: Synthetic oligonucleotide
gauauucauuuccggcucu

SEQ ID NO: 2534499 - RNA, 19 nt, Artificial Sequence
  Description of Artificial Sequence: Synthetic oligonucleotide
guauccaccggcagacagc

SEQ ID NO: 2534500 - RNA, 19 nt, Artificial Sequence
  Description of Artificial Sequence: Synthetic oligonucleotide
  modified_base (2)..(2): a, c, u, g, unknown or other
cncaagaucucuugccuua

SEQ ID NO: 2534501 - RNA, 19 nt, Artificial Sequence
  Description of Artificial Sequence: Synthetic oligonucleotide
ggaaaauccaucauccggu

SEQ ID NO: 2534502 - RNA, 19 nt, Artificial Sequence
  Description of Artificial Sequence: Synthetic oligonucleotide
uuggcccuggcuuguuuac

SEQ ID NO: 2534503 - RNA, 19 nt, Artificial Sequence
  Description of Artificial Sequence: Synthetic oligonucleotide
gaacggugggaguccugcc

SEQ ID NO: 2534504 - RNA, 19 nt, Artificial Sequence
  Description of Artificial Sequence: Synthetic oligonucleotide
agcagcucuggagaaacau

SEQ ID NO: 2534505 - RNA, 19 nt, Artificial Sequence
  Description of Artificial Sequence: Synthetic oligonucleotide
ugagaggcucguacccuuc

SEQ ID NO: 2534506 - RNA, 19 nt, Artificial Sequence
  Description of Artificial Sequence: Synthetic oligonucleotide
gcagacagcgaguggauga

SEQ ID NO: 2534507 - RNA, 19 nt, Artificial Sequence
  Description of Artificial Sequence: Synthetic oligonucleotide
aacuggugccggcuuguuu

SEQ ID NO: 2534508 - RNA, 19 nt, Artificial Sequence
  Description of Artificial Sequence: Synthetic oligonucleotide
cauccgguaauuacaucaa

SEQ ID NO: 2534509 - RNA, 19 nt, Artificial Sequence
  Description of Artificial Sequence: Synthetic oligonucleotide
auccgguaauuacaucaaa

SEQ ID NO: 2534510 - RNA, 19 nt, Artificial Sequence
  Description of Artificial Sequence: Synthetic oligonucleotide
cagacagcgaguggaugag

SEQ ID NO: 2534511 - RNA, 19 nt, Artificial Sequence
  Description of Artificial Sequence: Synthetic oligonucleotide
acugugcuguuccuacaaa

SEQ ID NO: 2534512 - RNA, 19 nt, Artificial Sequence
  Description of Artificial Sequence: Synthetic oligonucleotide
agaggcucguacccuucca

SEQ ID NO: 2534513 - RNA, 19 nt, Artificial Sequence
  Description of Artificial Sequence: Synthetic oligonucleotide
gucugaacucuuacacgcc

SEQ ID NO: 2534514 - RNA, 19 nt, Artificial Sequence
  Description of Artificial Sequence: Synthetic oligonucleotide
uauccacugggcccauuuu

SEQ ID NO: 2534515 - RNA, 19 nt, Artificial Sequence
  Description of Artificial Sequence: Synthetic oligonucleotide
accggcagacagcgagugg

SEQ ID NO: 2534516 - RNA, 19 nt, Artificial Sequence
  Description of Artificial Sequence: Synthetic oligonucleotide
cugaacucuuacacgccga

SEQ ID NO: 2534517 - RNA, 19 nt, Artificial Sequence
  Description of Artificial Sequence: Synthetic oligonucleotide
cuggucggaguucuuguga

SEQ ID NO: 2534518 - RNA, 19 nt, Artificial Sequence
  Description of Artificial Sequence: Synthetic oligonucleotide
ucugaacggugggaguccu

SEQ ID NO: 2534519 - RNA, 19 nt, Artificial Sequence
  Description of Artificial Sequence: Synthetic oligonucleotide
agcauacgaggaaaaucca

SEQ ID NO: 2534520 - RNA, 19 nt, Artificial Sequence
  Description of Artificial Sequence: Synthetic oligonucleotide
uggcccuucugugaguaau

SEQ ID NO: 2534521 - RNA, 19 nt, Artificial Sequence
  Description of Artificial Sequence: Synthetic oligonucleotide
ggaguccugccacaagcug

SEQ ID NO: 2534522 - RNA, 19 nt, Artificial Sequence
  Description of Artificial Sequence: Synthetic oligonucleotide
gccgacuucucugugagca

SEQ ID NO: 2534523 - RNA, 19 nt, Artificial Sequence
  Description of Artificial Sequence: Synthetic oligonucleotide
cgucgucuugcaaauaaac

SEQ ID NO: 2534524 - RNA, 19 nt, Artificial Sequence
  Description of Artificial Sequence: Synthetic oligonucleotide
gaguuaguguccaaaucau

SEQ ID NO: 2534525 - RNA, 19 nt, Artificial Sequence
  Description of Artificial Sequence: Synthetic oligonucleotide
guuuaaauucuuggccucu

SEQ ID NO: 2534526 - RNA, 19 nt, Artificial Sequence
  Description of Artificial Sequence: Synthetic oligonucleotide
auguugcugccccgaccuc

SEQ ID NO: 2534527 - RNA, 19 nt, Artificial Sequence
  Description of Artificial Sequence: Synthetic oligonucleotide
caucauccgguaauuacau

SEQ ID NO: 2534528 - RNA, 19 nt, Artificial Sequence
  Description of Artificial Sequence: Synthetic oligonucleotide
gcugguauccaccggcaga

SEQ ID NO: 2534529 - RNA, 19 nt, Artificial Sequence
  Description of Artificial Sequence: Synthetic oligonucleotide
gaguaauaacugccgucgu

SEQ ID NO: 2534530 - RNA, 19 nt, Artificial Sequence
  Description of Artificial Sequence: Synthetic oligonucleotide
aacugccgucgucuugcaa

SEQ ID NO: 2534531 - RNA, 19 nt, Artificial Sequence
  Description of Artificial Sequence: Synthetic oligonucleotide
acccuuucgcuuauccacu

SEQ ID NO: 2534532 - RNA, 19 nt, Artificial Sequence
  Description of Artificial Sequence: Synthetic oligonucleotide
gcugccccgaccuccuggg

SEQ ID NO: 2534533 - RNA, 19 nt, Artificial Sequence
  Description of Artificial Sequence: Synthetic oligonucleotide
cuaccgagcauacgaggaa

SEQ ID NO: 2534534 - RNA, 19 nt, Artificial Sequence
  Description of Artificial Sequence: Synthetic oligonucleotide
ucggaguucuugugaccau

SEQ ID NO: 2534535 - RNA, 19 nt, Artificial Sequence
  Description of Artificial Sequence: Synthetic oligonucleotide
ggucggaguucuugugacc

SEQ ID NO: 2534536 - RNA, 19 nt, Artificial Sequence
  Description of Artificial Sequence: Synthetic oligonucleotide
uaacugccgucgucuugca

SEQ ID NO: 2534537 - RNA, 19 nt, Artificial Sequence
  Description of Artificial Sequence: Synthetic oligonucleotide
agcgaguggaugagcuuug

SEQ ID NO: 2534538 - RNA, 19 nt, Artificial Sequence
  Description of Artificial Sequence: Synthetic oligonucleotide
cacaagcugauagauuaua

SEQ ID NO: 2534539 - RNA, 19 nt, Artificial Sequence
  Description of Artificial Sequence: Synthetic oligonucleotide
gccuaaacgcuuuguggca

SEQ ID NO: 2534540 - RNA, 19 nt, Artificial Sequence
  Description of Artificial Sequence: Synthetic oligonucleotide
caucucuucacagccuaaa

SEQ ID NO: 2534541 - RNA, 19 nt, Artificial Sequence
  Description of Artificial Sequence: Synthetic oligonucleotide
cgguaauuacaucaaagaa

SEQ ID NO: 2534542 - RNA, 19 nt, Artificial Sequence
  Description of Artificial Sequence: Synthetic oligonucleotide
ccuuucgcuuauccacugg

SEQ ID NO: 2534543 - RNA, 19 nt, Artificial Sequence
  Description of Artificial Sequence: Synthetic oligonucleotide
cacgccgacuucucuguga

SEQ ID NO: 2534544 - RNA, 19 nt, Artificial Sequence
  Description of Artificial Sequence: Synthetic oligonucleotide
ugccggcuuguuuuccaau

SEQ ID NO: 2534545 - RNA, 19 nt, Artificial Sequence
  Description of Artificial Sequence: Synthetic oligonucleotide
auacauccaagagcccaaa

SEQ ID NO: 2534546 - RNA, 19 nt, Artificial Sequence
  Description of Artificial Sequence: Synthetic oligonucleotide
gcucuauguugcugccccg

SEQ ID NO: 2534547 - RNA, 19 nt, Artificial Sequence
  Description of Artificial Sequence: Synthetic oligonucleotide
gccgucgucuugcaaauaa

SEQ ID NO: 2534548 - RNA, 19 nt, Artificial Sequence
  Description of Artificial Sequence: Synthetic oligonucleotide
acacgccgacuucucugug

SEQ ID NO: 2534549 - RNA, 19 nt, Artificial Sequence
  Description of Artificial Sequence: Synthetic oligonucleotide
cucuauguugcugccccga

SEQ ID NO: 2534550 - RNA, 19 nt, Artificial Sequence
  Description of Artificial Sequence: Synthetic oligonucleotide
cuucacagccuaaacgcuu

SEQ ID NO: 2534551 - RNA, 19 nt, Artificial Sequence
  Description of Artificial Sequence: Synthetic oligonucleotide
cuggugccggcuuguuuuc

SEQ ID NO: 2534552 - RNA, 19 nt, Artificial Sequence
  Description of Artificial Sequence: Synthetic oligonucleotide
aaacgcuuuguggcaucua

SEQ ID NO: 2534553 - RNA, 19 nt, Artificial Sequence
  Description of Artificial Sequence: Synthetic oligonucleotide
ucguacccuuccaucucuu

SEQ ID NO: 2534554 - RNA, 19 nt, Artificial Sequence
  Description of Artificial Sequence: Synthetic oligonucleotide
ggcugguauccaccggcag

SEQ ID NO: 2534555 - RNA, 19 nt, Artificial Sequence
  Description of Artificial Sequence: Synthetic oligonucleotide
gggaaaucauauuccaguu

SEQ ID NO: 2534556 - RNA, 19 nt, Artificial Sequence
  Description of Artificial Sequence: Synthetic oligonucleotide
cgagcauacgaggaaaauc

SEQ ID NO: 2534557 - RNA, 19 nt, Artificial Sequence
  Description of Artificial Sequence: Synthetic oligonucleotide
cuguuccuacaaaugaguu

SEQ ID NO: 2534558 - RNA, 19 nt, Artificial Sequence
  Description of Artificial Sequence: Synthetic oligonucleotide
cugaacggugggaguccug

SEQ ID NO: 2534559 - RNA, 19 nt, Artificial Sequence
  Description of Artificial Sequence: Synthetic oligonucleotide
caucuaaaaccaagaguuu

SEQ ID NO: 2534560 - RNA, 19 nt, Artificial Sequence
  Description of Artificial Sequence: Synthetic oligonucleotide
caccggcagacagcgagug

SEQ ID NO: 2534561 - RNA, 19 nt, Artificial Sequence
  Description of Artificial Sequence: Synthetic oligonucleotide
uggugccggcuuguuuucc

SEQ ID NO: 2534562 - RNA, 19 nt, Artificial Sequence
  Description of Artificial Sequence: Synthetic oligonucleotide
gcucugaacggugggaguc

SEQ ID NO: 2534563 - RNA, 19 nt, Artificial Sequence
  Description of Artificial Sequence: Synthetic oligonucleotide
cuuacacgccgacuucucu

SEQ ID NO: 2534564 - RNA, 19 nt, Artificial Sequence
  Description of Artificial Sequence: Synthetic oligonucleotide
ccauggaauuucaccuuuc

SEQ ID NO: 2534565 - RNA, 19 nt, Artificial Sequence
  Description of Artificial Sequence: Synthetic oligonucleotide
gaacucuuacacgccgacu

SEQ ID NO: 2534566 - RNA, 19 nt, Artificial Sequence
  Description of Artificial Sequence: Synthetic oligonucleotide
aaacuggugccggcuuguu

SEQ ID NO: 2534567 - RNA, 19 nt, Artificial Sequence
  Description of Artificial Sequence: Synthetic oligonucleotide
ggcucguacccuuccaucu

SEQ ID NO: 2534568 - RNA, 19 nt, Artificial Sequence
  Description of Artificial Sequence: Synthetic oligonucleotide
cucuggucggaguucuugu

SEQ ID NO: 2534569 - RNA, 19 nt, Artificial Sequence
  Description of Artificial Sequence: Synthetic oligonucleotide
accgagcauacgaggaaaa

SEQ ID NO: 2534570 - RNA, 19 nt, Artificial Sequence
  Description of Artificial Sequence: Synthetic oligonucleotide
ggugccggcuuguuuucca

SEQ ID NO: 2534571 - RNA, 19 nt, Artificial Sequence
  Description of Artificial Sequence: Synthetic oligonucleotide
ugguauccaccggcagaca

SEQ ID NO: 2534572 - RNA, 19 nt, Artificial Sequence
  Description of Artificial Sequence: Synthetic oligonucleotide
gaggcucguacccuuccau

SEQ ID NO: 2534573 - RNA, 19 nt, Artificial Sequence
  Description of Artificial Sequence: Synthetic oligonucleotide
auccaucauccgguaauua

SEQ ID NO: 2534574 - RNA, 19 nt, Artificial Sequence
  Description of Artificial Sequence: Synthetic oligonucleotide
caccuuucaagacuuuguu

SEQ ID NO: 2534575 - RNA, 19 nt, Artificial Sequence
  Description of Artificial Sequence: Synthetic oligonucleotide
acgcuuuguggcaucuaaa

SEQ ID NO: 2534576 - RNA, 19 nt, Artificial Sequence
  Description of Artificial Sequence: Synthetic oligonucleotide
cucguacccuuccaucucu

SEQ ID NO: 2534577 - RNA, 19 nt, Artificial Sequence
  Description of Artificial Sequence: Synthetic oligonucleotide
cgucuugcaaauaaacccu

SEQ ID NO: 2534578 - RNA, 19 nt, Artificial Sequence
  Description of Artificial Sequence: Synthetic oligonucleotide
aggcugguauccaccggca

SEQ ID NO: 2534579 - RNA, 19 nt, Artificial Sequence
  Description of Artificial Sequence: Synthetic oligonucleotide
cuacaaacuggugccggcu

SEQ ID NO: 2534580 - RNA, 19 nt, Artificial Sequence
  Description of Artificial Sequence: Synthetic oligonucleotide
cucuuacacgccgacuucu

SEQ ID NO: 2534581 - RNA, 19 nt, Artificial Sequence
  Description of Artificial Sequence: Synthetic oligonucleotide
uugcugccccgaccuccug

SEQ ID NO: 2534582 - RNA, 19 nt, Artificial Sequence
  Description of Artificial Sequence: Synthetic oligonucleotide
ccgacuucucugugagcag

SEQ ID NO: 2534583 - RNA, 19 nt, Artificial Sequence
  Description of Artificial Sequence: Synthetic oligonucleotide
cgcuuuguggcaucuaaaa

SEQ ID NO: 2534584 - RNA, 19 nt, Artificial Sequence
  Description of Artificial Sequence: Synthetic oligonucleotide
gccuuaggaaagaauuucu

SEQ ID NO: 2534585 - RNA, 19 nt, Artificial Sequence
  Description of Artificial Sequence: Synthetic oligonucleotide
cccuuucgcuuauccacug

SEQ ID NO: 2534586 - RNA, 19 nt, Artificial Sequence
  Description of Artificial Sequence: Synthetic oligonucleotide
cgacuucucugugagcagc

SEQ ID NO: 2534587 - RNA, 19 nt, Artificial Sequence
  Description of Artificial Sequence: Synthetic oligonucleotide
cugccccgaccuccugggg

SEQ ID NO: 2534588 - RNA, 19 nt, Artificial Sequence
  Description of Artificial Sequence: Synthetic oligonucleotide
gugccggcuuguuuuccaa

SEQ ID NO: 2534589 - RNA, 19 nt, Artificial Sequence
  Description of Artificial Sequence: Synthetic oligonucleotide
ccuggggcaggcugguauc

SEQ ID NO: 2534590 - RNA, 19 nt, Artificial Sequence
  Description of Artificial Sequence: Synthetic oligonucleotide
ccggcagacagcgagugga

SEQ ID NO: 2534591 - RNA, 19 nt, Artificial Sequence
  Description of Artificial Sequence: Synthetic oligonucleotide
ccaaaggucugaacucuua

SEQ ID NO: 2534592 - RNA, 19 nt, Artificial Sequence
  Description of Artificial Sequence: Synthetic oligonucleotide
cucuugccuuaggaaagaa

SEQ ID NO: 2534593 - RNA, 19 nt, Artificial Sequence
  Description of Artificial Sequence: Synthetic oligonucleotide
cugccacaagcugauagau

SEQ ID NO: 2534594 - RNA, 19 nt, Artificial Sequence
  Description of Artificial Sequence: Synthetic oligonucleotide
caaacuggugccggcuugu

SEQ ID NO: 2534595 - RNA, 19 nt, Artificial Sequence
  Description of Artificial Sequence: Synthetic oligonucleotide
cagcgaguggaugagcuuu

SEQ ID NO: 2534596 - RNA, 19 nt, Artificial Sequence
  Description of Artificial Sequence: Synthetic oligonucleotide
cugccgucgucuugcaaau

SEQ ID NO: 2534597 - RNA, 19 nt, Artificial Sequence
  Description of Artificial Sequence: Synthetic oligonucleotide
gagcuuugagaggcucgua

SEQ ID NO: 2534598 - RNA, 19 nt, Artificial Sequence
  Description of Artificial Sequence: Synthetic oligonucleotide
cacagccuaaacgcuuugu

SEQ ID NO: 2534599 - RNA, 19 nt, Artificial Sequence
  Description of Artificial Sequence: Synthetic oligonucleotide
cggaguucuugugaccaug

SEQ ID NO: 2534600 - RNA, 19 nt, Artificial Sequence
  Description of Artificial Sequence: Synthetic oligonucleotide
ccggcuuguuuuccaauaa

SEQ ID NO: 2534601 - RNA, 19 nt, Artificial Sequence
  Description of Artificial Sequence: Synthetic oligonucleotide
ugccgucgucuugcaaaua

SEQ ID NO: 2534602 - RNA, 19 nt, Artificial Sequence
  Description of Artificial Sequence: Synthetic oligonucleotide
guggcccuucugugaguaa

SEQ ID NO: 2534603 - RNA, 19 nt, Artificial Sequence
  Description of Artificial Sequence: Synthetic oligonucleotide
ggcucugaacggugggagu

SEQ ID NO: 2534604 - RNA, 19 nt, Artificial Sequence
  Description of Artificial Sequence: Synthetic oligonucleotide
ccgucgucuugcaaauaaa

SEQ ID NO: 2534605 - RNA, 19 nt, Artificial Sequence
  Description of Artificial Sequence: Synthetic oligonucleotide
gggaguccugccacaagcu

SEQ ID NO: 2534606 - RNA, 19 nt, Artificial Sequence
  Description of Artificial Sequence: Synthetic oligonucleotide
ccgaccuccuggggcaggc

SEQ ID NO: 2534607 - RNA, 19 nt, Artificial Sequence
  Description of Artificial Sequence: Synthetic oligonucleotide
ccaucucuucacagccuaa

SEQ ID NO: 2534608 - RNA, 19 nt, Artificial Sequence
  Description of Artificial Sequence: Synthetic oligonucleotide
ggcccuucugugaguaaua

SEQ ID NO: 2534609 - RNA, 19 nt, Artificial Sequence
  Description of Artificial Sequence: Synthetic oligonucleotide
  modified_base (3)..(3): a, c, u, g, unknown or other
ccncaagaucucuugccuu

SEQ ID NO: 2534610 - RNA, 19 nt, Artificial Sequence
  Description of Artificial Sequence: Synthetic oligonucleotide
gcgaguggaugagcuuuga

SEQ ID NO: 2534611 - RNA, 19 nt, Artificial Sequence
  Description of Artificial Sequence: Synthetic oligonucleotide
gcccuggcuuguuuacucu

SEQ ID NO: 2534612 - RNA, 19 nt, Artificial Sequence
  Description of Artificial Sequence: Synthetic oligonucleotide
ccuaaacgcuuuguggcau

SEQ ID NO: 2534613 - RNA, 19 nt, Artificial Sequence
  Description of Artificial Sequence: Synthetic oligonucleotide
auccaccggcagacagcga

SEQ ID NO: 2534614 - RNA, 19 nt, Artificial Sequence
  Description of Artificial Sequence: Synthetic oligonucleotide
ccacaagcugauagauuau

SEQ ID NO: 2534615 - RNA, 19 nt, Artificial Sequence
  Description of Artificial Sequence: Synthetic oligonucleotide
cgccgacuucucugugagc

SEQ ID NO: 2534616 - RNA, 19 nt, Artificial Sequence
  Description of Artificial Sequence: Synthetic oligonucleotide
gaguuggcccuggcuuguu

SEQ ID NO: 2534617 - RNA, 19 nt, Artificial Sequence
  Description of Artificial Sequence: Synthetic oligonucleotide
ccaccggcagacagcgagu

SEQ ID NO: 2534618 - RNA, 19 nt, Artificial Sequence
  Description of Artificial Sequence: Synthetic oligonucleotide
ccgagcauacgaggaaaau

SEQ ID NO: 2534619 - RNA, 19 nt, Artificial Sequence
  Description of Artificial Sequence: Synthetic oligonucleotide
cuuauccacugggcccauu

SEQ ID NO: 2534620 - RNA, 19 nt, Artificial Sequence
  Description of Artificial Sequence: Synthetic oligonucleotide
cggugggaguccugccaca

SEQ ID NO: 2534621 - RNA, 19 nt, Artificial Sequence
  Description of Artificial Sequence: Synthetic oligonucleotide
cggcagacagcgaguggau

SEQ ID NO: 2534622 - RNA, 19 nt, Artificial Sequence
  Description of Artificial Sequence: Synthetic oligonucleotide
gccucuggucggaguucuu

SEQ ID NO: 2534623 - RNA, 19 nt, Artificial Sequence
  Description of Artificial Sequence: Synthetic oligonucleotide
aauaaaaggcaccaaauug

SEQ ID NO: 2534624 - RNA, 19 nt, Artificial Sequence
  Description of Artificial Sequence: Synthetic oligonucleotide
aacaguccaaccuagcucc

SEQ ID NO: 2534625 - RNA, 19 nt, Artificial Sequence
  Description of Artificial Sequence: Synthetic oligonucleotide
agaaacaaggguuucauac

SEQ ID NO: 2534626 - RNA, 19 nt, Artificial Sequence
  Description of Artificial Sequence: Synthetic oligonucleotide
uuuuaagauagcuaccugg

SEQ ID NO: 2534627 - RNA, 19 nt, Artificial Sequence
  Description of Artificial Sequence: Synthetic oligonucleotide
uuuaagauagcuaccuggg

SEQ ID NO: 2534628 - RNA, 19 nt, Artificial Sequence
  Description of Artificial Sequence: Synthetic oligonucleotide
uauugguuaaacaugagaa

SEQ ID NO: 2534629 - RNA, 19 nt, Artificial Sequence
  Description of Artificial Sequence: Synthetic oligonucleotide
aaggugauaauccaggaca

SEQ ID NO: 2534630 - RNA, 19 nt, Artificial Sequence
  Description of Artificial Sequence: Synthetic oligonucleotide
aacaugagaacuccaacuc

SEQ ID NO: 2534631 - RNA, 19 nt, Artificial Sequence
  Description of Artificial Sequence: Synthetic oligonucleotide
uauuuuauugguuaaacau

SEQ ID NO: 2534632 - RNA, 19 nt, Artificial Sequence
  Description of Artificial Sequence: Synthetic oligonucleotide
aaacacacaaggcaaagug

SEQ ID NO: 2534633 - RNA, 19 nt, Artificial Sequence
  Description of Artificial Sequence: Synthetic oligonucleotide
aaaggcaccaaauuggggu

SEQ ID NO: 2534634 - RNA, 19 nt, Artificial Sequence
  Description of Artificial Sequence: Synthetic oligonucleotide
uagauuucaacuuugggac

SEQ ID NO: 2534635 - RNA, 19 nt, Artificial Sequence
  Description of Artificial Sequence: Synthetic oligonucleotide
uuuaaagucaacuacuuuu

SEQ ID NO: 2534636 - RNA, 19 nt, Artificial Sequence
  Description of Artificial Sequence: Synthetic oligonucleotide
aagauagcuaccugggacg

SEQ ID NO: 2534637 - RNA, 19 nt, Artificial Sequence
  Description of Artificial Sequence: Synthetic oligonucleotide
aagucaacuacuuuuauuu

SEQ ID NO: 2534638 - RNA, 19 nt, Artificial Sequence
  Description of Artificial Sequence: Synthetic oligonucleotide
gauauugcuucucaggaag

SEQ ID NO: 2534639 - RNA, 19 nt, Artificial Sequence
  Description of Artificial Sequence: Synthetic oligonucleotide
agaacuccaacucagaaca

SEQ ID NO: 2534640 - RNA, 19 nt, Artificial Sequence
  Description of Artificial Sequence: Synthetic oligonucleotide
aaggcaucuagaaaggggc

SEQ ID NO: 2534641 - RNA, 19 nt, Artificial Sequence
  Description of Artificial Sequence: Synthetic oligonucleotide
ucaacuuugggacugaaau

SEQ ID NO: 2534642 - RNA, 19 nt, Artificial Sequence
  Description of Artificial Sequence: Synthetic oligonucleotide
auugguuaaacaugagaac

SEQ ID NO: 2534643 - RNA, 19 nt, Artificial Sequence
  Description of Artificial Sequence: Synthetic oligonucleotide
aggguuucauaccacaccc

SEQ ID NO: 2534644 - RNA, 19 nt, Artificial Sequence
  Description of Artificial Sequence: Synthetic oligonucleotide
auaaaaggcaccaaauugg

SEQ ID NO: 2534645 - RNA, 19 nt, Artificial Sequence
  Description of Artificial Sequence: Synthetic oligonucleotide
uuauugguuaaacaugaga

SEQ ID NO: 2534646 - RNA, 19 nt, Artificial Sequence
  Description of Artificial Sequence: Synthetic oligonucleotide
uaagauagcuaccugggac

SEQ ID NO: 2534647 - RNA, 19 nt, Artificial Sequence
  Description of Artificial Sequence: Synthetic oligonucleotide
ggagaaggcaucuagaaag

SEQ ID NO: 2534648 - RNA, 19 nt, Artificial Sequence
  Description of Artificial Sequence: Synthetic oligonucleotide
aaauaaaaggcaccaaauu

SEQ ID NO: 2534649 - RNA, 19 nt, Artificial Sequence
  Description of Artificial Sequence: Synthetic oligonucleotide
acagacucugaccagauug

SEQ ID NO: 2534650 - RNA, 19 nt, Artificial Sequence
  Description of Artificial Sequence: Synthetic oligonucleotide
gaauaaagagcccauccug

SEQ ID NO: 2534651 - RNA, 19 nt, Artificial Sequence
  Description of Artificial Sequence: Synthetic oligonucleotide
aggauugucagggaaaugg

SEQ ID NO: 2534652 - RNA, 19 nt, Artificial Sequence
  Description of Artificial Sequence: Synthetic oligonucleotide
aaacaaggguuucauacca

SEQ ID NO: 2534653 - RNA, 19 nt, Artificial Sequence
  Description of Artificial Sequence: Synthetic oligonucleotide
auaaagagcccauccugcc

SEQ ID NO: 2534654 - RNA, 19 nt, Artificial Sequence
  Description of Artificial Sequence: Synthetic oligonucleotide
uugggacugaaauaacugg

SEQ ID NO: 2534655 - RNA, 19 nt, Artificial Sequence
  Description of Artificial Sequence: Synthetic oligonucleotide
aaaggcaacgggaauaaag

SEQ ID NO: 2534656 - RNA, 19 nt, Artificial Sequence
  Description of Artificial Sequence: Synthetic oligonucleotide
uacgcuuuguuacacagac

SEQ ID NO: 2534657 - RNA, 19 nt, Artificial Sequence
  Description of Artificial Sequence: Synthetic oligonucleotide
aaagagcccauccugccag

SEQ ID NO: 2534658 - RNA, 19 nt, Artificial Sequence
  Description of Artificial Sequence: Synthetic oligonucleotide
aggacaggaauccugaucu

SEQ ID NO: 2534659 - RNA, 19 nt, Artificial Sequence
  Description of Artificial Sequence: Synthetic oligonucleotide
uugguuaaacaugagaacu

SEQ ID NO: 2534660 - RNA, 19 nt, Artificial Sequence
  Description of Artificial Sequence: Synthetic oligonucleotide
aggaauuaggacccucugc

SEQ ID NO: 2534661 - RNA, 19 nt, Artificial Sequence
  Description of Artificial Sequence: Synthetic oligonucleotide
ggucccaccacacaaaugg

SEQ ID NO: 2534662 - RNA, 19 nt, Artificial Sequence
  Description of Artificial Sequence: Synthetic oligonucleotide
uuuguuacacagaccacug

SEQ ID NO: 2534663 - RNA, 19 nt, Artificial Sequence
  Description of Artificial Sequence: Synthetic oligonucleotide
ucugaccagauugucaugg

SEQ ID NO: 2534664 - RNA, 19 nt, Artificial Sequence
  Description of Artificial Sequence: Synthetic oligonucleotide
ucuagaaaggggcucagaa

SEQ ID NO: 2534665 - RNA, 19 nt, Artificial Sequence
  Description of Artificial Sequence: Synthetic oligonucleotide
cacacauacgcuuuguuac

SEQ ID NO: 2534666 - RNA, 19 nt, Artificial Sequence
  Description of Artificial Sequence: Synthetic oligonucleotide
aacuuugggacugaaauaa

SEQ ID NO: 2534667 - RNA, 19 nt, Artificial Sequence
  Description of Artificial Sequence: Synthetic oligonucleotide
aaaauaaaaggcaccaaau

SEQ ID NO: 2534668 - RNA, 19 nt, Artificial Sequence
  Description of Artificial Sequence: Synthetic oligonucleotide
uuuggcaucacagacucug

SEQ ID NO: 2534669 - RNA, 19 nt, Artificial Sequence
  Description of Artificial Sequence: Synthetic oligonucleotide
ugacaagguaguuuuaaga

SEQ ID NO: 2534670 - RNA, 19 nt, Artificial Sequence
  Description of Artificial Sequence: Synthetic oligonucleotide
uuaaagucaacuacuuuua

SEQ ID NO: 2534671 - RNA, 19 nt, Artificial Sequence
  Description of Artificial Sequence: Synthetic oligonucleotide
uuguagauuucaacuuugg

SEQ ID NO: 2534672 - RNA, 19 nt, Artificial Sequence
  Description of Artificial Sequence: Synthetic oligonucleotide
uagaaaggggcucagaauu

SEQ ID NO: 2534673 - RNA, 19 nt, Artificial Sequence
  Description of Artificial Sequence: Synthetic oligonucleotide
uuucauaccacacccacuu

SEQ ID NO: 2534674 - RNA, 19 nt, Artificial Sequence
  Description of Artificial Sequence: Synthetic oligonucleotide
auugggauuaucuccugag

SEQ ID NO: 2534675 - RNA, 19 nt, Artificial Sequence
  Description of Artificial Sequence: Synthetic oligonucleotide
ugggauuaucuccugagga

SEQ ID NO: 2534676 - RNA, 19 nt, Artificial Sequence
  Description of Artificial Sequence: Synthetic oligonucleotide
agggauauugcuucucagg

SEQ ID NO: 2534677 - RNA, 19 nt, Artificial Sequence
  Description of Artificial Sequence: Synthetic oligonucleotide
caaauugggguuuggagac

SEQ ID NO: 2534678 - RNA, 19 nt, Artificial Sequence
  Description of Artificial Sequence: Synthetic oligonucleotide
auugucauggccccaaggu

SEQ ID NO: 2534679 - RNA, 19 nt, Artificial Sequence
  Description of Artificial Sequence: Synthetic oligonucleotide
aggaauccugaucuuggcc

SEQ ID NO: 2534680 - RNA, 19 nt, Artificial Sequence
  Description of Artificial Sequence: Synthetic oligonucleotide
ugucauggccccaagguga

SEQ ID NO: 2534681 - RNA, 19 nt, Artificial Sequence
  Description of Artificial Sequence: Synthetic oligonucleotide
aaagucaacuacuuuuauu

SEQ ID NO: 2534682 - RNA, 19 nt, Artificial Sequence
  Description of Artificial Sequence: Synthetic oligonucleotide
accagauugucauggcccc

SEQ ID NO: 2534683 - RNA, 19 nt, Artificial Sequence
  Description of Artificial Sequence: Synthetic oligonucleotide
uugggauuaucuccugagg

SEQ ID NO: 2534684 - RNA, 19 nt, Artificial Sequence
  Description of Artificial Sequence: Synthetic oligonucleotide
aguuuuaagauagcuaccu

SEQ ID NO: 2534685 - RNA, 19 nt, Artificial Sequence
  Description of Artificial Sequence: Synthetic oligonucleotide
ggaauuaggacccucugcc

SEQ ID NO: 2534686 - RNA, 19 nt, Artificial Sequence
  Description of Artificial Sequence: Synthetic oligonucleotide
cauacgcuuuguuacacag

SEQ ID NO: 2534687 - RNA, 19 nt, Artificial Sequence
  Description of Artificial Sequence: Synthetic oligonucleotide
aguggguucucaugugggc

SEQ ID NO: 2534688 - RNA, 19 nt, Artificial Sequence
  Description of Artificial Sequence: Synthetic oligonucleotide
aauggcagaaguagaaaca

SEQ ID NO: 2534689 - RNA, 19 nt, Artificial Sequence
  Description of Artificial Sequence: Synthetic oligonucleotide
uaguuuuaagauagcuacc

SEQ ID NO: 2534690 - RNA, 19 nt, Artificial Sequence
  Description of Artificial Sequence: Synthetic oligonucleotide
ucaggucuccaauagcuca

SEQ ID NO: 2534691 - RNA, 19 nt, Artificial Sequence
  Description of Artificial Sequence: Synthetic oligonucleotide
caaacaugggagaggauug

SEQ ID NO: 2534692 - RNA, 19 nt, Artificial Sequence
  Description of Artificial Sequence: Synthetic oligonucleotide
aaggcaacgggaauaaaga

SEQ ID NO: 2534693 - RNA, 19 nt, Artificial Sequence
  Description of Artificial Sequence: Synthetic oligonucleotide
ugggacugaaauaacuggu

SEQ ID NO: 2534694 - RNA, 19 nt, Artificial Sequence
  Description of Artificial Sequence: Synthetic oligonucleotide
cuuguagauuucaacuuug

SEQ ID NO: 2534695 - RNA, 19 nt, Artificial Sequence
  Description of Artificial Sequence: Synthetic oligonucleotide
aaauggcacagggauauug

SEQ ID NO: 2534696 - RNA, 19 nt, Artificial Sequence
  Description of Artificial Sequence: Synthetic oligonucleotide
gagaacuccaacucagaac

SEQ ID NO: 2534697 - RNA, 19 nt, Artificial Sequence
  Description of Artificial Sequence: Synthetic oligonucleotide
aauugggauuaucuccuga

SEQ ID NO: 2534698 - RNA, 19 nt, Artificial Sequence
  Description of Artificial Sequence: Synthetic oligonucleotide
uauugcuucucaggaaggg

SEQ ID NO: 2534699 - RNA, 19 nt, Artificial Sequence
  Description of Artificial Sequence: Synthetic oligonucleotide
uuacacagaccacuggggu

SEQ ID NO: 2534700 - RNA, 19 nt, Artificial Sequence
  Description of Artificial Sequence: Synthetic oligonucleotide
aacgggaauaaagagccca

SEQ ID NO: 2534701 - RNA, 19 nt, Artificial Sequence
  Description of Artificial Sequence: Synthetic oligonucleotide
uuaagauagcuaccuggga

SEQ ID NO: 2534702 - RNA, 19 nt, Artificial Sequence
  Description of Artificial Sequence: Synthetic oligonucleotide
augugggcacgcuacacac

SEQ ID NO: 2534703 - RNA, 19 nt, Artificial Sequence
  Description of Artificial Sequence: Synthetic oligonucleotide
ggcagaaguagaaacaagg

SEQ ID NO: 2534704 - RNA, 19 nt, Artificial Sequence
  Description of Artificial Sequence: Synthetic oligonucleotide
acagggagaaggcaucuag

SEQ ID NO: 2534705 - RNA, 19 nt, Artificial Sequence
  Description of Artificial Sequence: Synthetic oligonucleotide
ugguuaaacaugagaacuc

SEQ ID NO: 2534706 - RNA, 19 nt, Artificial Sequence
  Description of Artificial Sequence: Synthetic oligonucleotide
cagcuaaccagucaauggc

SEQ ID NO: 2534707 - RNA, 19 nt, Artificial Sequence
  Description of Artificial Sequence: Synthetic oligonucleotide
uugcuucucaggaagggga

SEQ ID NO: 2534708 - RNA, 19 nt, Artificial Sequence
  Description of Artificial Sequence: Synthetic oligonucleotide
auuaggacccucugccagg

SEQ ID NO: 2534709 - RNA, 19 nt, Artificial Sequence
  Description of Artificial Sequence: Synthetic oligonucleotide
agaacauguggugugcuuc

SEQ ID NO: 2534710 - RNA, 19 nt, Artificial Sequence
  Description of Artificial Sequence: Synthetic oligonucleotide
uuuuaaagucaacuacuuu

SEQ ID NO: 2534711 - RNA, 19 nt, Artificial Sequence
  Description of Artificial Sequence: Synthetic oligonucleotide
ucucaugugggcacgcuac

SEQ ID NO: 2534712 - RNA, 19 nt, Artificial Sequence
  Description of Artificial Sequence: Synthetic oligonucleotide
cagucaauggcagaaguag

SEQ ID NO: 2534713 - RNA, 19 nt, Artificial Sequence
  Description of Artificial Sequence: Synthetic oligonucleotide
ugaccagauugucauggcc

SEQ ID NO: 2534714 - RNA, 19 nt, Artificial Sequence
  Description of Artificial Sequence: Synthetic oligonucleotide
aaacggucccaccacacaa

SEQ ID NO: 2534715 - RNA, 19 nt, Artificial Sequence
  Description of Artificial Sequence: Synthetic oligonucleotide
ugauaauccaggacaggaa

SEQ ID NO: 2534716 - RNA, 19 nt, Artificial Sequence
  Description of Artificial Sequence: Synthetic oligonucleotide
aaaaggcaccaaauugggg

SEQ ID NO: 2534717 - RNA, 19 nt, Artificial Sequence
  Description of Artificial Sequence: Synthetic oligonucleotide
uugucauggccccaaggug

SEQ ID NO: 2534718 - RNA, 19 nt, Artificial Sequence
  Description of Artificial Sequence: Synthetic oligonucleotide
aaaacacacaaggcaaagu

SEQ ID NO: 2534719 - RNA, 19 nt, Artificial Sequence
  Description of Artificial Sequence: Synthetic oligonucleotide
gaacaguccaaccuagcuc

SEQ ID NO: 2534720 - RNA, 19 nt, Artificial Sequence
  Description of Artificial Sequence: Synthetic oligonucleotide
gaccagauugucauggccc

SEQ ID NO: 2534721 - RNA, 19 nt, Artificial Sequence
  Description of Artificial Sequence: Synthetic oligonucleotide
aacucagaacauguggugu

SEQ ID NO: 2534722 - RNA, 19 nt, Artificial Sequence
  Description of Artificial Sequence: Synthetic oligonucleotide
auagcuaccugggacgggg

SEQ ID NO: 2534723 - RNA, 19 nt, Artificial Sequence
  Description of Artificial Sequence: Synthetic oligonucleotide
acucugaccagauugucau

SEQ ID NO: 2534724 - RNA, 19 nt, Artificial Sequence
  Description of Artificial Sequence: Synthetic oligonucleotide
aggacccucugccaggugg

SEQ ID NO: 2534725 - RNA, 19 nt, Artificial Sequence
  Description of Artificial Sequence: Synthetic oligonucleotide
aaauugggguuuggagacc

SEQ ID NO: 2534726 - RNA, 19 nt, Artificial Sequence
  Description of Artificial Sequence: Synthetic oligonucleotide
cacaaggcaaaguggcugg

SEQ ID NO: 2534727 - RNA, 19 nt, Artificial Sequence
  Description of Artificial Sequence: Synthetic oligonucleotide
gcaacgggaauaaagagcc

SEQ ID NO: 2534728 - RNA, 19 nt, Artificial Sequence
  Description of Artificial Sequence: Synthetic oligonucleotide
auggucaggucuccaauag

SEQ ID NO: 2534729 - RNA, 19 nt, Artificial Sequence
  Description of Artificial Sequence: Synthetic oligonucleotide
gaaaggggcucagaauugg

SEQ ID NO: 2534730 - RNA, 19 nt, Artificial Sequence
  Description of Artificial Sequence: Synthetic oligonucleotide
gucuccaauagcucauggg

SEQ ID NO: 2534731 - RNA, 19 nt, Artificial Sequence
  Description of Artificial Sequence: Synthetic oligonucleotide
uacuuguagauuucaacuu

SEQ ID NO: 2534732 - RNA, 19 nt, Artificial Sequence
  Description of Artificial Sequence: Synthetic oligonucleotide
guuacacagaccacugggg

SEQ ID NO: 2534733 - RNA, 19 nt, Artificial Sequence
  Description of Artificial Sequence: Synthetic oligonucleotide
gacaagguaguuuuaagau

SEQ ID NO: 2534734 - RNA, 19 nt, Artificial Sequence
  Description of Artificial Sequence: Synthetic oligonucleotide
ccuagcuccccaaacaugg

SEQ ID NO: 2534735 - RNA, 19 nt, Artificial Sequence
  Description of Artificial Sequence: Synthetic oligonucleotide
agaauugggauuaucuccu

SEQ ID NO: 2534736 - RNA, 19 nt, Artificial Sequence
  Description of Artificial Sequence: Synthetic oligonucleotide
aacuccaacucagaacaug

SEQ ID NO: 2534737 - RNA, 19 nt, Artificial Sequence
  Description of Artificial Sequence: Synthetic oligonucleotide
acucagaacauguggugug

SEQ ID NO: 2534738 - RNA, 19 nt, Artificial Sequence
  Description of Artificial Sequence: Synthetic oligonucleotide
uaaagagcccauccugcca

SEQ ID NO: 2534739 - RNA, 19 nt, Artificial Sequence
  Description of Artificial Sequence: Synthetic oligonucleotide
gggaauaaagagcccaucc

SEQ ID NO: 2534740 - RNA, 19 nt, Artificial Sequence
  Description of Artificial Sequence: Synthetic oligonucleotide
aagacauggaggugccugu

SEQ ID NO: 2534741 - RNA, 19 nt, Artificial Sequence
  Description of Artificial Sequence: Synthetic oligonucleotide
acaaauggcacagggauau

SEQ ID NO: 2534742 - RNA, 19 nt, Artificial Sequence
  Description of Artificial Sequence: Synthetic oligonucleotide
gaauccugaucuuggccag

SEQ ID NO: 2534743 - RNA, 19 nt, Artificial Sequence
  Description of Artificial Sequence: Synthetic oligonucleotide
aagguaguuuuaagauagc

SEQ ID NO: 2534744 - RNA, 19 nt, Artificial Sequence
  Description of Artificial Sequence: Synthetic oligonucleotide
acaaggguuucauaccaca

SEQ ID NO: 2534745 - RNA, 19 nt, Artificial Sequence
  Description of Artificial Sequence: Synthetic oligonucleotide
acaggaauccugaucuugg

SEQ ID NO: 2534746 - RNA, 19 nt, Artificial Sequence
  Description of Artificial Sequence: Synthetic oligonucleotide
aacaaggguuucauaccac

SEQ ID NO: 2534747 - RNA, 19 nt, Artificial Sequence
  Description of Artificial Sequence: Synthetic oligonucleotide
acuuguagauuucaacuuu

SEQ ID NO: 2534748 - RNA, 19 nt, Artificial Sequence
  Description of Artificial Sequence: Synthetic oligonucleotide
aaccuagcuccccaaacau

SEQ ID NO: 2534749 - RNA, 19 nt, Artificial Sequence
  Description of Artificial Sequence: Synthetic oligonucleotide
cugacaagguaguuuuaag

SEQ ID NO: 2534750 - RNA, 19 nt, Artificial Sequence
  Description of Artificial Sequence: Synthetic oligonucleotide
auugcuucucaggaagggg

SEQ ID NO: 2534751 - RNA, 19 nt, Artificial Sequence
  Description of Artificial Sequence: Synthetic oligonucleotide
aacaugggagaggauuguc

SEQ ID NO: 2534752 - RNA, 19 nt, Artificial Sequence
  Description of Artificial Sequence: Synthetic oligonucleotide
acaugagaacuccaacuca

SEQ ID NO: 2534753 - RNA, 19 nt, Artificial Sequence
  Description of Artificial Sequence: Synthetic oligonucleotide
guuuuaagauagcuaccug

SEQ ID NO: 2534754 - RNA, 19 nt, Artificial Sequence
  Description of Artificial Sequence: Synthetic oligonucleotide
ucauaccacacccacuuuu

SEQ ID NO: 2534755 - RNA, 19 nt, Artificial Sequence
  Description of Artificial Sequence: Synthetic oligonucleotide
uuaucuccugaggaugggg

SEQ ID NO: 2534756 - RNA, 19 nt, Artificial Sequence
  Description of Artificial Sequence: Synthetic oligonucleotide
uggcagaaguagaaacaag

SEQ ID NO: 2534757 - RNA, 19 nt, Artificial Sequence
  Description of Artificial Sequence: Synthetic oligonucleotide
aggcaacgggaauaaagag

SEQ ID NO: 2534758 - RNA, 19 nt, Artificial Sequence
  Description of Artificial Sequence: Synthetic oligonucleotide
acaagguaguuuuaagaua

SEQ ID NO: 2534759 - RNA, 19 nt, Artificial Sequence
  Description of Artificial Sequence: Synthetic oligonucleotide
aacauggucaggucuccaa

SEQ ID NO: 2534760 - RNA, 19 nt, Artificial Sequence
  Description of Artificial Sequence: Synthetic oligonucleotide
ucugacaagguaguuuuaa

SEQ ID NO: 2534761 - RNA, 19 nt, Artificial Sequence
  Description of Artificial Sequence: Synthetic oligonucleotide
cuccaauagcucaugggac

SEQ ID NO: 2534762 - RNA, 19 nt, Artificial Sequence
  Description of Artificial Sequence: Synthetic oligonucleotide
aauugggguuuggagaccu

SEQ ID NO: 2534763 - RNA, 19 nt, Artificial Sequence
  Description of Artificial Sequence: Synthetic oligonucleotide
ugggcugccaaacgguccc

SEQ ID NO: 2534764 - RNA, 19 nt, Artificial Sequence
  Description of Artificial Sequence: Synthetic oligonucleotide
cugaucuuggccagcaauc

SEQ ID NO: 2534765 - RNA, 19 nt, Artificial Sequence
  Description of Artificial Sequence: Synthetic oligonucleotide
uggugugcuucuccagugg

SEQ ID NO: 2534766 - RNA, 19 nt, Artificial Sequence
  Description of Artificial Sequence: Synthetic oligonucleotide
uugggguuuggagaccugg

SEQ ID NO: 2534767 - RNA, 19 nt, Artificial Sequence
  Description of Artificial Sequence: Synthetic oligonucleotide
gacugaaauaacugguaaa

SEQ ID NO: 2534768 - RNA, 19 nt, Artificial Sequence
  Description of Artificial Sequence: Synthetic oligonucleotide
aagagcccauccugccagc

SEQ ID NO: 2534769 - RNA, 19 nt, Artificial Sequence
  Description of Artificial Sequence: Synthetic oligonucleotide
aauccugaucuuggccagc

SEQ ID NO: 2534770 - RNA, 19 nt, Artificial Sequence
  Description of Artificial Sequence: Synthetic oligonucleotide
caaggugauaauccaggac

SEQ ID NO: 2534771 - RNA, 19 nt, Artificial Sequence
  Description of Artificial Sequence: Synthetic oligonucleotide
uaaccagucaauggcagaa

SEQ ID NO: 2534772 - RNA, 19 nt, Artificial Sequence
  Description of Artificial Sequence: Synthetic oligonucleotide
gaggaauuaggacccucug

SEQ ID NO: 2534773 - RNA, 19 nt, Artificial Sequence
  Description of Artificial Sequence: Synthetic oligonucleotide
acagggauauugcuucuca

SEQ ID NO: 2534774 - RNA, 19 nt, Artificial Sequence
  Description of Artificial Sequence: Synthetic oligonucleotide
gcagaaguagaaacaaggg

SEQ ID NO: 2534775 - RNA, 19 nt, Artificial Sequence
  Description of Artificial Sequence: Synthetic oligonucleotide
gauaauccaggacaggaau

SEQ ID NO: 2534776 - RNA, 19 nt, Artificial Sequence
  Description of Artificial Sequence: Synthetic oligonucleotide
caacucagaacauguggug

SEQ ID NO: 2534777 - RNA, 19 nt, Artificial Sequence
  Description of Artificial Sequence: Synthetic oligonucleotide
aaaggggcucagaauuggg

SEQ ID NO: 2534778 - RNA, 19 nt, Artificial Sequence
  Description of Artificial Sequence: Synthetic oligonucleotide
gugauaauccaggacagga

SEQ ID NO: 2534779 - RNA, 19 nt, Artificial Sequence
  Description of Artificial Sequence: Synthetic oligonucleotide
aguagaaacaaggguuuca

SEQ ID NO: 2534780 - RNA, 19 nt, Artificial Sequence
  Description of Artificial Sequence: Synthetic oligonucleotide
ucuccaguggguucucaug

SEQ ID NO: 2534781 - RNA, 19 nt, Artificial Sequence
  Description of Artificial Sequence: Synthetic oligonucleotide
gacaggaauccugaucuug

SEQ ID NO: 2534782 - RNA, 19 nt, Artificial Sequence
  Description of Artificial Sequence: Synthetic oligonucleotide
caaggguuucauaccacac

SEQ ID NO: 2534783 - RNA, 19 nt, Artificial Sequence
  Description of Artificial Sequence: Synthetic oligonucleotide
agggagaaggcaucuagaa

SEQ ID NO: 2534784 - RNA, 19 nt, Artificial Sequence
  Description of Artificial Sequence: Synthetic oligonucleotide
ggaauccugaucuuggcca

SEQ ID NO: 2534785 - RNA, 19 nt, Artificial Sequence
  Description of Artificial Sequence: Synthetic oligonucleotide
gguuaaacaugagaacucc

SEQ ID NO: 2534786 - RNA, 19 nt, Artificial Sequence
  Description of Artificial Sequence: Synthetic oligonucleotide
acacacauacgcuuuguua

SEQ ID NO: 2534787 - RNA, 19 nt, Artificial Sequence
  Description of Artificial Sequence: Synthetic oligonucleotide
gcacgcuacacacauacgc

SEQ ID NO: 2534788 - RNA, 19 nt, Artificial Sequence
  Description of Artificial Sequence: Synthetic oligonucleotide
agguaguuuuaagauagcu

SEQ ID NO: 2534789 - RNA, 19 nt, Artificial Sequence
  Description of Artificial Sequence: Synthetic oligonucleotide
accagucaauggcagaagu

SEQ ID NO: 2534790 - RNA, 19 nt, Artificial Sequence
  Description of Artificial Sequence: Synthetic oligonucleotide
acacaaggcaaaguggcug

SEQ ID NO: 2534791 - RNA, 19 nt, Artificial Sequence
  Description of Artificial Sequence: Synthetic oligonucleotide
gaccacuggggucacagca

SEQ ID NO: 2534792 - RNA, 19 nt, Artificial Sequence
  Description of Artificial Sequence: Synthetic oligonucleotide
aaggcaccaaauugggguu

SEQ ID NO: 2534793 - RNA, 19 nt, Artificial Sequence
  Description of Artificial Sequence: Synthetic oligonucleotide
ccagcuaaccagucaaugg

SEQ ID NO: 2534794 - RNA, 19 nt, Artificial Sequence
  Description of Artificial Sequence: Synthetic oligonucleotide
uggagaccuggcagcaggg

SEQ ID NO: 2534795 - RNA, 19 nt, Artificial Sequence
  Description of Artificial Sequence: Synthetic oligonucleotide
agauagcuaccugggacgg

SEQ ID NO: 2534796 - RNA, 19 nt, Artificial Sequence
  Description of Artificial Sequence: Synthetic oligonucleotide
gguuucauaccacacccac

SEQ ID NO: 2534797 - RNA, 19 nt, Artificial Sequence
  Description of Artificial Sequence: Synthetic oligonucleotide
acacauacgcuuuguuaca

SEQ ID NO: 2534798 - RNA, 19 nt, Artificial Sequence
  Description of Artificial Sequence: Synthetic oligonucleotide
cccaaggugauaauccagg

SEQ ID NO: 2534799 - RNA, 19 nt, Artificial Sequence
  Description of Artificial Sequence: Synthetic oligonucleotide
auauugcuucucaggaagg

SEQ ID NO: 2534800 - RNA, 19 nt, Artificial Sequence
  Description of Artificial Sequence: Synthetic oligonucleotide
gggauauugcuucucagga

SEQ ID NO: 2534801 - RNA, 19 nt, Artificial Sequence
  Description of Artificial Sequence: Synthetic oligonucleotide
ugggguuuggagaccuggc

SEQ ID NO: 2534802 - RNA, 19 nt, Artificial Sequence
  Description of Artificial Sequence: Synthetic oligonucleotide
uggucaggucuccaauagc

SEQ ID NO: 2534803 - RNA, 19 nt, Artificial Sequence
  Description of Artificial Sequence: Synthetic oligonucleotide
uacacagaccacugggguc

SEQ ID NO: 2534804 - RNA, 19 nt, Artificial Sequence
  Description of Artificial Sequence: Synthetic oligonucleotide
aaacaugggagaggauugu

SEQ ID NO: 2534805 - RNA, 19 nt, Artificial Sequence
  Description of Artificial Sequence: Synthetic oligonucleotide
gaauuaggacccucugcca

SEQ ID NO: 2534806 - RNA, 19 nt, Artificial Sequence
  Description of Artificial Sequence: Synthetic oligonucleotide
acacagaccacugggguca

SEQ ID NO: 2534807 - RNA, 19 nt, Artificial Sequence
  Description of Artificial Sequence: Synthetic oligonucleotide
agaccuggcagcagggaac

SEQ ID NO: 2534808 - RNA, 19 nt, Artificial Sequence
  Description of Artificial Sequence: Synthetic oligonucleotide
auuaucuccugaggauggg

SEQ ID NO: 2534809 - RNA, 19 nt, Artificial Sequence
  Description of Artificial Sequence: Synthetic oligonucleotide
cuguaaggcagugucuggc

SEQ ID NO: 2534810 - RNA, 19 nt, Artificial Sequence
  Description of Artificial Sequence: Synthetic oligonucleotide
caaaguggcugggaggaag

SEQ ID NO: 2534811 - RNA, 19 nt, Artificial Sequence
  Description of Artificial Sequence: Synthetic oligonucleotide
gguuuggagaccuggcagc

SEQ ID NO: 2534812 - RNA, 19 nt, Artificial Sequence
  Description of Artificial Sequence: Synthetic oligonucleotide
aaccagucaauggcagaag

SEQ ID NO: 2534813 - RNA, 19 nt, Artificial Sequence
  Description of Artificial Sequence: Synthetic oligonucleotide
ggcacagggauauugcuuc

SEQ ID NO: 2534814 - RNA, 19 nt, Artificial Sequence
  Description of Artificial Sequence: Synthetic oligonucleotide
aggugauaauccaggacag

SEQ ID NO: 2534815 - RNA, 19 nt, Artificial Sequence
  Description of Artificial Sequence: Synthetic oligonucleotide
uggccagcaaucugacaag

SEQ ID NO: 2534816 - RNA, 19 nt, Artificial Sequence
  Description of Artificial Sequence: Synthetic oligonucleotide
uggcaucacagacucugac

SEQ ID NO: 2534817 - RNA, 19 nt, Artificial Sequence
  Description of Artificial Sequence: Synthetic oligonucleotide
agaccacuggggucacagc

SEQ ID NO: 2534818 - RNA, 19 nt, Artificial Sequence
  Description of Artificial Sequence: Synthetic oligonucleotide
auggcagaaguagaaacaa

SEQ ID NO: 2534819 - RNA, 19 nt, Artificial Sequence
  Description of Artificial Sequence: Synthetic oligonucleotide
aacauguggugugcuucuc

SEQ ID NO: 2534820 - RNA, 19 nt, Artificial Sequence
  Description of Artificial Sequence: Synthetic oligonucleotide
caggaauccugaucuuggc

SEQ ID NO: 2534821 - RNA, 19 nt, Artificial Sequence
  Description of Artificial Sequence: Synthetic oligonucleotide
aguccaaccuagcucccca

SEQ ID NO: 2534822 - RNA, 19 nt, Artificial Sequence
  Description of Artificial Sequence: Synthetic oligonucleotide
agucaacuacuuuuauuuu

SEQ ID NO: 2534823 - RNA, 19 nt, Artificial Sequence
  Description of Artificial Sequence: Synthetic oligonucleotide
cagggauauugcuucucag

SEQ ID NO: 2534824 - RNA, 19 nt, Artificial Sequence
  Description of Artificial Sequence: Synthetic oligonucleotide
acuuugggacugaaauaac

SEQ ID NO: 2534825 - RNA, 19 nt, Artificial Sequence
  Description of Artificial Sequence: Synthetic oligonucleotide
ggguuuggagaccuggcag

SEQ ID NO: 2534826 - RNA, 19 nt, Artificial Sequence
  Description of Artificial Sequence: Synthetic oligonucleotide
ggauuaucuccugaggaug

SEQ ID NO: 2534827 - RNA, 19 nt, Artificial Sequence
  Description of Artificial Sequence: Synthetic oligonucleotide
ggugugcuucuccaguggg

SEQ ID NO: 2534828 - RNA, 19 nt, Artificial Sequence
  Description of Artificial Sequence: Synthetic oligonucleotide
uuggcaucacagacucuga

SEQ ID NO: 2534829 - RNA, 19 nt, Artificial Sequence
  Description of Artificial Sequence: Synthetic oligonucleotide
ggaggugccuguaaggcag

SEQ ID NO: 2534830 - RNA, 19 nt, Artificial Sequence
  Description of Artificial Sequence: Synthetic oligonucleotide
cccaaagacauggaggugc

SEQ ID NO: 2534831 - RNA, 19 nt, Artificial Sequence
  Description of Artificial Sequence: Synthetic oligonucleotide
acauacgcuuuguuacaca

SEQ ID NO: 2534832 - RNA, 19 nt, Artificial Sequence
  Description of Artificial Sequence: Synthetic oligonucleotide
aaggggcucagaauuggga

SEQ ID NO: 2534833 - RNA, 19 nt, Artificial Sequence
  Description of Artificial Sequence: Synthetic oligonucleotide
ugccaaacggucccaccac

SEQ ID NO: 2534834 - RNA, 19 nt, Artificial Sequence
  Description of Artificial Sequence: Synthetic oligonucleotide
uccaguggguucucaugug

SEQ ID NO: 2534835 - RNA, 19 nt, Artificial Sequence
  Description of Artificial Sequence: Synthetic oligonucleotide
cucagaacauguggugugc

SEQ ID NO: 2534836 - RNA, 19 nt, Artificial Sequence
  Description of Artificial Sequence: Synthetic oligonucleotide
agcaaucugacaagguagu

SEQ ID NO: 2534837 - RNA, 19 nt, Artificial Sequence
  Description of Artificial Sequence: Synthetic oligonucleotide
cuuugggacugaaauaacu

SEQ ID NO: 2534838 - RNA, 19 nt, Artificial Sequence
  Description of Artificial Sequence: Synthetic oligonucleotide
cugaccagauugucauggc

SEQ ID NO: 2534839 - RNA, 19 nt, Artificial Sequence
  Description of Artificial Sequence: Synthetic oligonucleotide
acauggucaggucuccaau

SEQ ID NO: 2534840 - RNA, 19 nt, Artificial Sequence
  Description of Artificial Sequence: Synthetic oligonucleotide
uagaaacaaggguuucaua

SEQ ID NO: 2534841 - RNA, 19 nt, Artificial Sequence
  Description of Artificial Sequence: Synthetic oligonucleotide
cacacaaauggcacaggga

SEQ ID NO: 2534842 - RNA, 19 nt, Artificial Sequence
  Description of Artificial Sequence: Synthetic oligonucleotide
cuuuguuacacagaccacu

SEQ ID NO: 2534843 - RNA, 19 nt, Artificial Sequence
  Description of Artificial Sequence: Synthetic oligonucleotide
cauguggugugcuucucca

SEQ ID NO: 2534844 - RNA, 19 nt, Artificial Sequence
  Description of Artificial Sequence: Synthetic oligonucleotide
guuaaacaugagaacucca

SEQ ID NO: 2534845 - RNA, 19 nt, Artificial Sequence
  Description of Artificial Sequence: Synthetic oligonucleotide
guggugugcuucuccagug

SEQ ID NO: 2534846 - RNA, 19 nt, Artificial Sequence
  Description of Artificial Sequence: Synthetic oligonucleotide
agacucugaccagauuguc

SEQ ID NO: 2534847 - RNA, 19 nt, Artificial Sequence
  Description of Artificial Sequence: Synthetic oligonucleotide
gggcacgcuacacacauac

SEQ ID NO: 2534848 - RNA, 19 nt, Artificial Sequence
  Description of Artificial Sequence: Synthetic oligonucleotide
ugugggcacgcuacacaca

SEQ ID NO: 2534849 - RNA, 19 nt, Artificial Sequence
  Description of Artificial Sequence: Synthetic oligonucleotide
caaccuagcuccccaaaca

SEQ ID NO: 2534850 - RNA, 19 nt, Artificial Sequence
  Description of Artificial Sequence: Synthetic oligonucleotide
cagaccacuggggucacag

SEQ ID NO: 2534851 - RNA, 19 nt, Artificial Sequence
  Description of Artificial Sequence: Synthetic oligonucleotide
gacucugaccagauuguca

SEQ ID NO: 2534852 - RNA, 19 nt, Artificial Sequence
  Description of Artificial Sequence: Synthetic oligonucleotide
gauagcuaccugggacggg

SEQ ID NO: 2534853 - RNA, 19 nt, Artificial Sequence
  Description of Artificial Sequence: Synthetic oligonucleotide
ugccuguaaggcagugucu

SEQ ID NO: 2534854 - RNA, 19 nt, Artificial Sequence
  Description of Artificial Sequence: Synthetic oligonucleotide
agcccauccugccagcuaa

SEQ ID NO: 2534855 - RNA, 19 nt, Artificial Sequence
  Description of Artificial Sequence: Synthetic oligonucleotide
gucaauggcagaaguagaa

SEQ ID NO: 2534856 - RNA, 19 nt, Artificial Sequence
  Description of Artificial Sequence: Synthetic oligonucleotide
accacuggggucacagcac

SEQ ID NO: 2534857 - RNA, 19 nt, Artificial Sequence
  Description of Artificial Sequence: Synthetic oligonucleotide
cuccaacucagaacaugug

SEQ ID NO: 2534858 - RNA, 19 nt, Artificial Sequence
  Description of Artificial Sequence: Synthetic oligonucleotide
agauugucauggccccaag

SEQ ID NO: 2534859 - RNA, 19 nt, Artificial Sequence
  Description of Artificial Sequence: Synthetic oligonucleotide
ggucuccaauagcucaugg

SEQ ID NO: 2534860 - RNA, 19 nt, Artificial Sequence
  Description of Artificial Sequence: Synthetic oligonucleotide
ucagaacauguggugugcu

SEQ ID NO: 2534861 - RNA, 19 nt, Artificial Sequence
  Description of Artificial Sequence: Synthetic oligonucleotide
gaaggggacacaggcuccc

SEQ ID NO: 2534862 - RNA, 19 nt, Artificial Sequence
  Description of Artificial Sequence: Synthetic oligonucleotide
agcuccccaaacaugguca

SEQ ID NO: 2534863 - RNA, 19 nt, Artificial Sequence
  Description of Artificial Sequence: Synthetic oligonucleotide
uccaaccuagcuccccaaa

SEQ ID NO: 2534864 - RNA, 19 nt, Artificial Sequence
  Description of Artificial Sequence: Synthetic oligonucleotide
uuuggagaccuggcagcag

SEQ ID NO: 2534865 - RNA, 19 nt, Artificial Sequence
  Description of Artificial Sequence: Synthetic oligonucleotide
cuaaccagucaauggcaga

SEQ ID NO: 2534866 - RNA, 19 nt, Artificial Sequence
  Description of Artificial Sequence: Synthetic oligonucleotide
agcuaaccagucaauggca

SEQ ID NO: 2534867 - RNA, 19 nt, Artificial Sequence
  Description of Artificial Sequence: Synthetic oligonucleotide
cgcuuuguuacacagacca

SEQ ID NO: 2534868 - RNA, 19 nt, Artificial Sequence
  Description of Artificial Sequence: Synthetic oligonucleotide
gagaggauugucagggaaa

SEQ ID NO: 2534869 - RNA, 19 nt, Artificial Sequence
  Description of Artificial Sequence: Synthetic oligonucleotide
cacauacgcuuuguuacac

SEQ ID NO: 2534870 - RNA, 19 nt, Artificial Sequence
  Description of Artificial Sequence: Synthetic oligonucleotide
gguaguuuuaagauagcua

SEQ ID NO: 2534871 - RNA, 19 nt, Artificial Sequence
  Description of Artificial Sequence: Synthetic oligonucleotide
ggacugaaauaacugguaa

SEQ ID NO: 2534872 - RNA, 19 nt, Artificial Sequence
  Description of Artificial Sequence: Synthetic oligonucleotide
agggaacaguccaaccuag

SEQ ID NO: 2534873 - RNA, 19 nt, Artificial Sequence
  Description of Artificial Sequence: Synthetic oligonucleotide
uucuccaguggguucucau

SEQ ID NO: 2534874 - RNA, 19 nt, Artificial Sequence
  Description of Artificial Sequence: Synthetic oligonucleotide
ggaauaaagagcccauccu

SEQ ID NO: 2534875 - RNA, 19 nt, Artificial Sequence
  Description of Artificial Sequence: Synthetic oligonucleotide
acgcuacacacauacgcuu

SEQ ID NO: 2534876 - RNA, 19 nt, Artificial Sequence
  Description of Artificial Sequence: Synthetic oligonucleotide
ggugauaauccaggacagg

SEQ ID NO: 2534877 - RNA, 19 nt, Artificial Sequence
  Description of Artificial Sequence: Synthetic oligonucleotide
acaaggcaaaguggcuggg

SEQ ID NO: 2534878 - RNA, 19 nt, Artificial Sequence
  Description of Artificial Sequence: Synthetic oligonucleotide
caacgggaauaaagagccc

SEQ ID NO: 2534879 - RNA, 19 nt, Artificial Sequence
  Description of Artificial Sequence: Synthetic oligonucleotide
acgcuuuguuacacagacc

SEQ ID NO: 2534880 - RNA, 19 nt, Artificial Sequence
  Description of Artificial Sequence: Synthetic oligonucleotide
caggcucccaaacauggga

SEQ ID NO: 2534881 - RNA, 19 nt, Artificial Sequence
  Description of Artificial Sequence: Synthetic oligonucleotide
uuaggacccucugccaggu

SEQ ID NO: 2534882 - RNA, 19 nt, Artificial Sequence
  Description of Artificial Sequence: Synthetic oligonucleotide
caugugggcacgcuacaca

SEQ ID NO: 2534883 - RNA, 19 nt, Artificial Sequence
  Description of Artificial Sequence: Synthetic oligonucleotide
aggcucccaaacaugggag

SEQ ID NO: 2534884 - RNA, 19 nt, Artificial Sequence
  Description of Artificial Sequence: Synthetic oligonucleotide
cugccaaacggucccacca

SEQ ID NO: 2534885 - RNA, 19 nt, Artificial Sequence
  Description of Artificial Sequence: Synthetic oligonucleotide
ggaagguacuuguagauuu

SEQ ID NO: 2534886 - RNA, 19 nt, Artificial Sequence
  Description of Artificial Sequence: Synthetic oligonucleotide
gcuaaccagucaauggcag

SEQ ID NO: 2534887 - RNA, 19 nt, Artificial Sequence
  Description of Artificial Sequence: Synthetic oligonucleotide
ccaguggguucucaugugg

SEQ ID NO: 2534888 - RNA, 19 nt, Artificial Sequence
  Description of Artificial Sequence: Synthetic oligonucleotide
ccaaagacauggaggugcc

SEQ ID NO: 2534889 - RNA, 19 nt, Artificial Sequence
  Description of Artificial Sequence: Synthetic oligonucleotide
gcuacacacauacgcuuug

SEQ ID NO: 2534890 - RNA, 19 nt, Artificial Sequence
  Description of Artificial Sequence: Synthetic oligonucleotide
acaggcucccaaacauggg

SEQ ID NO: 2534891 - RNA, 19 nt, Artificial Sequence
  Description of Artificial Sequence: Synthetic oligonucleotide
auuucaacuuugggacuga

SEQ ID NO: 2534892 - RNA, 19 nt, Artificial Sequence
  Description of Artificial Sequence: Synthetic oligonucleotide
gacauggaggugccuguaa

SEQ ID NO: 2534893 - RNA, 19 nt, Artificial Sequence
  Description of Artificial Sequence: Synthetic oligonucleotide
acaguccaaccuagcuccc

SEQ ID NO: 2534894 - RNA, 19 nt, Artificial Sequence
  Description of Artificial Sequence: Synthetic oligonucleotide
ggucacagcaccaggaaaa

SEQ ID NO: 2534895 - RNA, 19 nt, Artificial Sequence
  Description of Artificial Sequence: Synthetic oligonucleotide
ggagaggauugucagggaa

SEQ ID NO: 2534896 - RNA, 19 nt, Artificial Sequence
  Description of Artificial Sequence: Synthetic oligonucleotide
acggucccaccacacaaau

SEQ ID NO: 2534897 - RNA, 19 nt, Artificial Sequence
  Description of Artificial Sequence: Synthetic oligonucleotide
ggaacaguccaaccuagcu

SEQ ID NO: 2534898 - RNA, 19 nt, Artificial Sequence
  Description of Artificial Sequence: Synthetic oligonucleotide
ggauauugcuucucaggaa

SEQ ID NO: 2534899 - RNA, 19 nt, Artificial Sequence
  Description of Artificial Sequence: Synthetic oligonucleotide
uuucaacuuugggacugaa

SEQ ID NO: 2534900 - RNA, 19 nt, Artificial Sequence
  Description of Artificial Sequence: Synthetic oligonucleotide
aacggucccaccacacaaa

SEQ ID NO: 2534901 - RNA, 19 nt, Artificial Sequence
  Description of Artificial Sequence: Synthetic oligonucleotide
caauagcucaugggacccc

SEQ ID NO: 2534902 - RNA, 19 nt, Artificial Sequence
  Description of Artificial Sequence: Synthetic oligonucleotide
gccuguaaggcagugucug

SEQ ID NO: 2534903 - RNA, 19 nt, Artificial Sequence
  Description of Artificial Sequence: Synthetic oligonucleotide
guagaaacaaggguuucau

SEQ ID NO: 2534904 - RNA, 19 nt, Artificial Sequence
  Description of Artificial Sequence: Synthetic oligonucleotide
caaacggucccaccacaca

SEQ ID NO: 2534905 - RNA, 19 nt, Artificial Sequence
  Description of Artificial Sequence: Synthetic oligonucleotide
aggaagguacuuguagauu

SEQ ID NO: 2534906 - RNA, 19 nt, Artificial Sequence
  Description of Artificial Sequence: Synthetic oligonucleotide
cacgcuacacacauacgcu

SEQ ID NO: 2534907 - RNA, 19 nt, Artificial Sequence
  Description of Artificial Sequence: Synthetic oligonucleotide
auccugaucuuggccagca

SEQ ID NO: 2534908 - RNA, 19 nt, Artificial Sequence
  Description of Artificial Sequence: Synthetic oligonucleotide
augagaacuccaacucaga

SEQ ID NO: 2534909 - RNA, 19 nt, Artificial Sequence
  Description of Artificial Sequence: Synthetic oligonucleotide
auacgcuuuguuacacaga

SEQ ID NO: 2534910 - RNA, 19 nt, Artificial Sequence
  Description of Artificial Sequence: Synthetic oligonucleotide
aaguggcugggaggaaggu

SEQ ID NO: 2534911 - RNA, 19 nt, Artificial Sequence
  Description of Artificial Sequence: Synthetic oligonucleotide
ccuguaaggcagugucugg

SEQ ID NO: 2534912 - RNA, 19 nt, Artificial Sequence
  Description of Artificial Sequence: Synthetic oligonucleotide
cagggaacaguccaaccua

SEQ ID NO: 2534913 - RNA, 19 nt, Artificial Sequence
  Description of Artificial Sequence: Synthetic oligonucleotide
ccaauagcucaugggaccc

SEQ ID NO: 2534914 - RNA, 19 nt, Artificial Sequence
  Description of Artificial Sequence: Synthetic oligonucleotide
gcucccaaacaugggagag

SEQ ID NO: 2534915 - RNA, 19 nt, Artificial Sequence
  Description of Artificial Sequence: Synthetic oligonucleotide
cauggccccaaggugauaa

SEQ ID NO: 2534916 - RNA, 19 nt, Artificial Sequence
  Description of Artificial Sequence: Synthetic oligonucleotide
uucucaggaaggggacaca

SEQ ID NO: 2534917 - RNA, 19 nt, Artificial Sequence
  Description of Artificial Sequence: Synthetic oligonucleotide
accuagcuccccaaacaug

SEQ ID NO: 2534918 - RNA, 19 nt, Artificial Sequence
  Description of Artificial Sequence: Synthetic oligonucleotide
ccaaccuagcuccccaaac

SEQ ID NO: 2534919 - RNA, 19 nt, Artificial Sequence
  Description of Artificial Sequence: Synthetic oligonucleotide
cacaaauggcacagggaua

SEQ ID NO: 2534920 - RNA, 19 nt, Artificial Sequence
  Description of Artificial Sequence: Synthetic oligonucleotide
gggacacaggcucccaaac

SEQ ID NO: 2534921 - RNA, 19 nt, Artificial Sequence
  Description of Artificial Sequence: Synthetic oligonucleotide
uggcugggaggaagguacu

SEQ ID NO: 2534922 - RNA, 19 nt, Artificial Sequence
  Description of Artificial Sequence: Synthetic oligonucleotide
gucaggucuccaauagcuc

SEQ ID NO: 2534923 - RNA, 19 nt, Artificial Sequence
  Description of Artificial Sequence: Synthetic oligonucleotide
aucuagaaaggggcucaga

SEQ ID NO: 2534924 - RNA, 19 nt, Artificial Sequence
  Description of Artificial Sequence: Synthetic oligonucleotide
ggucaggucuccaauagcu

SEQ ID NO: 2534925 - RNA, 19 nt, Artificial Sequence
  Description of Artificial Sequence: Synthetic oligonucleotide
uggccccaaggugauaauc

SEQ ID NO: 2534926 - RNA, 19 nt, Artificial Sequence
  Description of Artificial Sequence: Synthetic oligonucleotide
gugggcugccaaacggucc

SEQ ID NO: 2534927 - RNA, 19 nt, Artificial Sequence
  Description of Artificial Sequence: Synthetic oligonucleotide
uccugccagcuaaccaguc

SEQ ID NO: 2534928 - RNA, 19 nt, Artificial Sequence
  Description of Artificial Sequence: Synthetic oligonucleotide
cuccaguggguucucaugu

SEQ ID NO: 2534929 - RNA, 19 nt, Artificial Sequence
  Description of Artificial Sequence: Synthetic oligonucleotide
gcagggaacaguccaaccu

SEQ ID NO: 2534930 - RNA, 19 nt, Artificial Sequence
  Description of Artificial Sequence: Synthetic oligonucleotide
cagacucugaccagauugu

SEQ ID NO: 2534931 - RNA, 19 nt, Artificial Sequence
  Description of Artificial Sequence: Synthetic oligonucleotide
gccagcuaaccagucaaug

SEQ ID NO: 2534932 - RNA, 19 nt, Artificial Sequence
  Description of Artificial Sequence: Synthetic oligonucleotide
gcuccccaaacauggucag

SEQ ID NO: 2534933 - RNA, 19 nt, Artificial Sequence
  Description of Artificial Sequence: Synthetic oligonucleotide
ggacacaggcucccaaaca

SEQ ID NO: 2534934 - RNA, 19 nt, Artificial Sequence
  Description of Artificial Sequence: Synthetic oligonucleotide
aggucuccaauagcucaug

SEQ ID NO: 2534935 - RNA, 19 nt, Artificial Sequence
  Description of Artificial Sequence: Synthetic oligonucleotide
uccugaucuuggccagcaa

SEQ ID NO: 2534936 - RNA, 19 nt, Artificial Sequence
  Description of Artificial Sequence: Synthetic oligonucleotide
caguccaaccuagcucccc

SEQ ID NO: 2534937 - RNA, 19 nt, Artificial Sequence
  Description of Artificial Sequence: Synthetic oligonucleotide
aggcaucuagaaaggggcu

SEQ ID NO: 2534938 - RNA, 19 nt, Artificial Sequence
  Description of Artificial Sequence: Synthetic oligonucleotide
gggguuuggagaccuggca

SEQ ID NO: 2534939 - RNA, 19 nt, Artificial Sequence
  Description of Artificial Sequence: Synthetic oligonucleotide
acgggaauaaagagcccau

SEQ ID NO: 2534940 - RNA, 19 nt, Artificial Sequence
  Description of Artificial Sequence: Synthetic oligonucleotide
gcaucuagaaaggggcuca

SEQ ID NO: 2534941 - RNA, 19 nt, Artificial Sequence
  Description of Artificial Sequence: Synthetic oligonucleotide
ccaaacggucccaccacac

SEQ ID NO: 2534942 - RNA, 19 nt, Artificial Sequence
  Description of Artificial Sequence: Synthetic oligonucleotide
ccaacucagaacauguggu

SEQ ID NO: 2534943 - RNA, 19 nt, Artificial Sequence
  Description of Artificial Sequence: Synthetic oligonucleotide
gggauuaucuccugaggau

SEQ ID NO: 2534944 - RNA, 19 nt, Artificial Sequence
  Description of Artificial Sequence: Synthetic oligonucleotide
cucaugugggcacgcuaca

SEQ ID NO: 2534945 - RNA, 19 nt, Artificial Sequence
  Description of Artificial Sequence: Synthetic oligonucleotide
ggcaucuagaaaggggcuc

SEQ ID NO: 2534946 - RNA, 19 nt, Artificial Sequence
  Description of Artificial Sequence: Synthetic oligonucleotide
caccaaauugggguuugga

SEQ ID NO: 2534947 - RNA, 19 nt, Artificial Sequence
  Description of Artificial Sequence: Synthetic oligonucleotide
ggacccucugccagguggg

SEQ ID NO: 2534948 - RNA, 19 nt, Artificial Sequence
  Description of Artificial Sequence: Synthetic oligonucleotide
aguggcugggaggaaggua

SEQ ID NO: 2534949 - RNA, 19 nt, Artificial Sequence
  Description of Artificial Sequence: Synthetic oligonucleotide
gcugccaaacggucccacc

SEQ ID NO: 2534950 - RNA, 19 nt, Artificial Sequence
  Description of Artificial Sequence: Synthetic oligonucleotide
aggggacacaggcucccaa

SEQ ID NO: 2534951 - RNA, 19 nt, Artificial Sequence
  Description of Artificial Sequence: Synthetic oligonucleotide
guuucauaccacacccacu

SEQ ID NO: 2534952 - RNA, 19 nt, Artificial Sequence
  Description of Artificial Sequence: Synthetic oligonucleotide
caaucugacaagguaguuu

SEQ ID NO: 2534953 - RNA, 19 nt, Artificial Sequence
  Description of Artificial Sequence: Synthetic oligonucleotide
cuuggccagcaaucugaca

SEQ ID NO: 2534954 - RNA, 19 nt, Artificial Sequence
  Description of Artificial Sequence: Synthetic oligonucleotide
ggaaggggacacaggcucc

SEQ ID NO: 2534955 - RNA, 19 nt, Artificial Sequence
  Description of Artificial Sequence: Synthetic oligonucleotide
cacacaaggcaaaguggcu

SEQ ID NO: 2534956 - RNA, 19 nt, Artificial Sequence
  Description of Artificial Sequence: Synthetic oligonucleotide
ccaaggugauaauccagga

SEQ ID NO: 2534957 - RNA, 19 nt, Artificial Sequence
  Description of Artificial Sequence: Synthetic oligonucleotide
cagauugucauggccccaa

SEQ ID NO: 2534958 - RNA, 19 nt, Artificial Sequence
  Description of Artificial Sequence: Synthetic oligonucleotide
ggcucccaaacaugggaga

SEQ ID NO: 2534959 - RNA, 19 nt, Artificial Sequence
  Description of Artificial Sequence: Synthetic oligonucleotide
gggacugaaauaacuggua

SEQ ID NO: 2534960 - RNA, 19 nt, Artificial Sequence
  Description of Artificial Sequence: Synthetic oligonucleotide
agagcccauccugccagcu

SEQ ID NO: 2534961 - RNA, 19 nt, Artificial Sequence
  Description of Artificial Sequence: Synthetic oligonucleotide
caaggcaaaguggcuggga

SEQ ID NO: 2534962 - RNA, 19 nt, Artificial Sequence
  Description of Artificial Sequence: Synthetic oligonucleotide
ggguucucaugugggcacg

SEQ ID NO: 2534963 - RNA, 19 nt, Artificial Sequence
  Description of Artificial Sequence: Synthetic oligonucleotide
ggcacgcuacacacauacg

SEQ ID NO: 2534964 - RNA, 19 nt, Artificial Sequence
  Description of Artificial Sequence: Synthetic oligonucleotide
gccccaaggugauaaucca

SEQ ID NO: 2534965 - RNA, 19 nt, Artificial Sequence
  Description of Artificial Sequence: Synthetic oligonucleotide
ggcaccaaauugggguuug

SEQ ID NO: 2534966 - RNA, 19 nt, Artificial Sequence
  Description of Artificial Sequence: Synthetic oligonucleotide
gggaacaguccaaccuagc

SEQ ID NO: 2534967 - RNA, 19 nt, Artificial Sequence
  Description of Artificial Sequence: Synthetic oligonucleotide
gcuuuguuacacagaccac

SEQ ID NO: 2534968 - RNA, 19 nt, Artificial Sequence
  Description of Artificial Sequence: Synthetic oligonucleotide
ggaggaauuaggacccucu

SEQ ID NO: 2534969 - RNA, 19 nt, Artificial Sequence
  Description of Artificial Sequence: Synthetic oligonucleotide
gacccucugccaggugggc

SEQ ID NO: 2534970 - RNA, 19 nt, Artificial Sequence
  Description of Artificial Sequence: Synthetic oligonucleotide
gguucucaugugggcacgc

SEQ ID NO: 2534971 - RNA, 19 nt, Artificial Sequence
  Description of Artificial Sequence: Synthetic oligonucleotide
aggugccuguaaggcagug

SEQ ID NO: 2534972 - RNA, 19 nt, Artificial Sequence
  Description of Artificial Sequence: Synthetic oligonucleotide
agacauggaggugccugua

SEQ ID NO: 2534973 - RNA, 19 nt, Artificial Sequence
  Description of Artificial Sequence: Synthetic oligonucleotide
ugggcacgcuacacacaua

SEQ ID NO: 2534974 - RNA, 19 nt, Artificial Sequence
  Description of Artificial Sequence: Synthetic oligonucleotide
gggacagggagaaggcauc

SEQ ID NO: 2534975 - RNA, 19 nt, Artificial Sequence
  Description of Artificial Sequence: Synthetic oligonucleotide
gggcucagaauugggauua

SEQ ID NO: 2534976 - RNA, 19 nt, Artificial Sequence
  Description of Artificial Sequence: Synthetic oligonucleotide
gccaaacggucccaccaca

SEQ ID NO: 2534977 - RNA, 19 nt, Artificial Sequence
  Description of Artificial Sequence: Synthetic oligonucleotide
gagcccauccugccagcua

SEQ ID NO: 2534978 - RNA, 19 nt, Artificial Sequence
  Description of Artificial Sequence: Synthetic oligonucleotide
acccucugccaggugggcu

SEQ ID NO: 2534979 - RNA, 19 nt, Artificial Sequence
  Description of Artificial Sequence: Synthetic oligonucleotide
gacagggagaaggcaucua

SEQ ID NO: 2534980 - RNA, 19 nt, Artificial Sequence
  Description of Artificial Sequence: Synthetic oligonucleotide
ggggacacaggcucccaaa

SEQ ID NO: 2534981 - RNA, 19 nt, Artificial Sequence
  Description of Artificial Sequence: Synthetic oligonucleotide
gcaccaaauugggguuugg

SEQ ID NO: 2534982 - RNA, 19 nt, Artificial Sequence
  Description of Artificial Sequence: Synthetic oligonucleotide
ccagucaauggcagaagua

SEQ ID NO: 2534983 - RNA, 19 nt, Artificial Sequence
  Description of Artificial Sequence: Synthetic oligonucleotide
guccaaccuagcuccccaa

SEQ ID NO: 2534984 - RNA, 19 nt, Artificial Sequence
  Description of Artificial Sequence: Synthetic oligonucleotide
caggucuccaauagcucau

SEQ ID NO: 2534985 - RNA, 19 nt, Artificial Sequence
  Description of Artificial Sequence: Synthetic oligonucleotide
aggcaccaaauugggguuu

SEQ ID NO: 2534986 - RNA, 19 nt, Artificial Sequence
  Description of Artificial Sequence: Synthetic oligonucleotide
cuagcuccccaaacauggu

SEQ ID NO: 2534987 - RNA, 19 nt, Artificial Sequence
  Description of Artificial Sequence: Synthetic oligonucleotide
gggagaggauugucaggga

SEQ ID NO: 2534988 - RNA, 19 nt, Artificial Sequence
  Description of Artificial Sequence: Synthetic oligonucleotide
cuacacacauacgcuuugu

SEQ ID NO: 2534989 - RNA, 19 nt, Artificial Sequence
  Description of Artificial Sequence: Synthetic oligonucleotide
cccaaacauggucaggucu

SEQ ID NO: 2534990 - RNA, 19 nt, Artificial Sequence
  Description of Artificial Sequence: Synthetic oligonucleotide
aucugacaagguaguuuua

SEQ ID NO: 2534991 - RNA, 19 nt, Artificial Sequence
  Description of Artificial Sequence: Synthetic oligonucleotide
ccaccacacaaauggcaca

SEQ ID NO: 2534992 - RNA, 19 nt, Artificial Sequence
  Description of Artificial Sequence: Synthetic oligonucleotide
ggguuucauaccacaccca

SEQ ID NO: 2534993 - RNA, 19 nt, Artificial Sequence
  Description of Artificial Sequence: Synthetic oligonucleotide
gcucagaauugggauuauc

SEQ ID NO: 2534994 - RNA, 19 nt, Artificial Sequence
  Description of Artificial Sequence: Synthetic oligonucleotide
ccugccagcuaaccaguca

SEQ ID NO: 2534995 - RNA, 19 nt, Artificial Sequence
  Description of Artificial Sequence: Synthetic oligonucleotide
gggaggaauuaggacccuc

SEQ ID NO: 2534996 - RNA, 19 nt, Artificial Sequence
  Description of Artificial Sequence: Synthetic oligonucleotide
cagaacauguggugugcuu

SEQ ID NO: 2534997 - RNA, 19 nt, Artificial Sequence
  Description of Artificial Sequence: Synthetic oligonucleotide
cccauccugccagcuaacc

SEQ ID NO: 2534998 - RNA, 19 nt, Artificial Sequence
  Description of Artificial Sequence: Synthetic oligonucleotide
cacagaccacuggggucac

SEQ ID NO: 2534999 - RNA, 19 nt, Artificial Sequence
  Description of Artificial Sequence: Synthetic oligonucleotide
ggagaccuggcagcaggga

SEQ ID NO: 2535000 - RNA, 19 nt, Artificial Sequence
  Description of Artificial Sequence: Synthetic oligonucleotide
cuucuccaguggguucuca

SEQ ID NO: 2535001 - RNA, 19 nt, Artificial Sequence
  Description of Artificial Sequence: Synthetic oligonucleotide
ggggacagggagaaggcau

SEQ ID NO: 2535002 - RNA, 19 nt, Artificial Sequence
  Description of Artificial Sequence: Synthetic oligonucleotide
guucucaugugggcacgcu

SEQ ID NO: 2535003 - RNA, 19 nt, Artificial Sequence
  Description of Artificial Sequence: Synthetic oligonucleotide
ucauggccccaaggugaua

SEQ ID NO: 2535004 - RNA, 19 nt, Artificial Sequence
  Description of Artificial Sequence: Synthetic oligonucleotide
ggggcucagaauugggauu

SEQ ID NO: 2535005 - RNA, 19 nt, Artificial Sequence
  Description of Artificial Sequence: Synthetic oligonucleotide
ggcugccaaacggucccac

SEQ ID NO: 2535006 - RNA, 19 nt, Artificial Sequence
  Description of Artificial Sequence: Synthetic oligonucleotide
gaggugccuguaaggcagu

SEQ ID NO: 2535007 - RNA, 19 nt, Artificial Sequence
  Description of Artificial Sequence: Synthetic oligonucleotide
caaagacauggaggugccu

SEQ ID NO: 2535008 - RNA, 19 nt, Artificial Sequence
  Description of Artificial Sequence: Synthetic oligonucleotide
cggucccaccacacaaaug

SEQ ID NO: 2535009 - RNA, 19 nt, Artificial Sequence
  Description of Artificial Sequence: Synthetic oligonucleotide
ggacaggaauccugaucuu

SEQ ID NO: 2535010 - RNA, 19 nt, Artificial Sequence
  Description of Artificial Sequence: Synthetic oligonucleotide
ccagauugucauggcccca

SEQ ID NO: 2535011 - RNA, 19 nt, Artificial Sequence
  Description of Artificial Sequence: Synthetic oligonucleotide
gcaaaguggcugggaggaa

SEQ ID NO: 2535012 - RNA, 19 nt, Artificial Sequence
  Description of Artificial Sequence: Synthetic oligonucleotide
gcccauccugccagcuaac

SEQ ID NO: 2535013 - RNA, 19 nt, Artificial Sequence
  Description of Artificial Sequence: Synthetic oligonucleotide
caaauggcacagggauauu

SEQ ID NO: 2535014 - RNA, 19 nt, Artificial Sequence
  Description of Artificial Sequence: Synthetic oligonucleotide
cgcuacacacauacgcuuu

SEQ ID NO: 2535015 - RNA, 19 nt, Artificial Sequence
  Description of Artificial Sequence: Synthetic oligonucleotide
ggggaggaauuaggacccu

SEQ ID NO: 2535016 - RNA, 19 nt, Artificial Sequence
  Description of Artificial Sequence: Synthetic oligonucleotide
ggcugggaggaagguacuu

SEQ ID NO: 2535017 - RNA, 19 nt, Artificial Sequence
  Description of Artificial Sequence: Synthetic oligonucleotide
ggcucagaauugggauuau

SEQ ID NO: 2535018 - RNA, 19 nt, Artificial Sequence
  Description of Artificial Sequence: Synthetic oligonucleotide
aauuagauagaauucccag

SEQ ID NO: 2535019 - RNA, 19 nt, Artificial Sequence
  Description of Artificial Sequence: Synthetic oligonucleotide
ggcaaugucaauuagauag

SEQ ID NO: 2535020 - RNA, 19 nt, Artificial Sequence
  Description of Artificial Sequence: Synthetic oligonucleotide
agauagaauucccagauuc

SEQ ID NO: 2535021 - RNA, 19 nt, Artificial Sequence
  Description of Artificial Sequence: Synthetic oligonucleotide
uuaucgagugcccugaagg

SEQ ID NO: 2535022 - RNA, 19 nt, Artificial Sequence
  Description of Artificial Sequence: Synthetic oligonucleotide
agauucucgucacagaggc

SEQ ID NO: 2535023 - RNA, 19 nt, Artificial Sequence
  Description of Artificial Sequence: Synthetic oligonucleotide
auuccuuuaaccaauuagc

SEQ ID NO: 2535024 - RNA, 19 nt, Artificial Sequence
  Description of Artificial Sequence: Synthetic oligonucleotide
ugagcuguugaaaaggaag

SEQ ID NO: 2535025 - RNA, 19 nt, Artificial Sequence
  Description of Artificial Sequence: Synthetic oligonucleotide
aacuaaggcuccuuugggc

SEQ ID NO: 2535026 - RNA, 19 nt, Artificial Sequence
  Description of Artificial Sequence: Synthetic oligonucleotide
aaggacaauccauugauca

SEQ ID NO: 2535027 - RNA, 19 nt, Artificial Sequence
  Description of Artificial Sequence: Synthetic oligonucleotide
aaaaggacaauccauugau

SEQ ID NO: 2535028 - RNA, 19 nt, Artificial Sequence
  Description of Artificial Sequence: Synthetic oligonucleotide
ugcauuugcaaucagcucu

SEQ ID NO: 2535029 - RNA, 19 nt, Artificial Sequence
  Description of Artificial Sequence: Synthetic oligonucleotide
uaaccaauuagcuugcuga

SEQ ID NO: 2535030 - RNA, 19 nt, Artificial Sequence
  Description of Artificial Sequence: Synthetic oligonucleotide
ucuuggccaauuuagauug

SEQ ID NO: 2535031 - RNA, 19 nt, Artificial Sequence
  Description of Artificial Sequence: Synthetic oligonucleotide
auaauuuacagucuaccca

SEQ ID NO: 2535032 - RNA, 19 nt, Artificial Sequence
  Description of Artificial Sequence: Synthetic oligonucleotide
ugaaggaaagaucuuggcc

SEQ ID NO: 2535033 - RNA, 19 nt, Artificial Sequence
  Description of Artificial Sequence: Synthetic oligonucleotide
uuagauagaauucccagau

SEQ ID NO: 2535034 - RNA, 19 nt, Artificial Sequence
  Description of Artificial Sequence: Synthetic oligonucleotide
uaauuuacagucuacccac

SEQ ID NO: 2535035 - RNA, 19 nt, Artificial Sequence
  Description of Artificial Sequence: Synthetic oligonucleotide
acauuuugcauuugcaauc

SEQ ID NO: 2535036 - RNA, 19 nt, Artificial Sequence
  Description of Artificial Sequence: Synthetic oligonucleotide
ucaauuagauagaauuccc

SEQ ID NO: 2535037 - RNA, 19 nt, Artificial Sequence
  Description of Artificial Sequence: Synthetic oligonucleotide
uuauaauuuacagucuacc

SEQ ID NO: 2535038 - RNA, 19 nt, Artificial Sequence
  Description of Artificial Sequence: Synthetic oligonucleotide
uuagauugguaccucaaga

SEQ ID NO: 2535039 - RNA, 19 nt, Artificial Sequence
  Description of Artificial Sequence: Synthetic oligonucleotide
gaaaaggaagcauggagug

SEQ ID NO: 2535040 - RNA, 19 nt, Artificial Sequence
  Description of Artificial Sequence: Synthetic oligonucleotide
uuagcuugcugaacuaagg

SEQ ID NO: 2535041 - RNA, 19 nt, Artificial Sequence
  Description of Artificial Sequence: Synthetic oligonucleotide
uuuagauugguaccucaag

SEQ ID NO: 2535042 - RNA, 19 nt, Artificial Sequence
  Description of Artificial Sequence: Synthetic oligonucleotide
acuagugacuccuggcugc

SEQ ID NO: 2535043 - RNA, 19 nt, Artificial Sequence
  Description of Artificial Sequence: Synthetic oligonucleotide
aaaaggaagcauggagugc

SEQ ID NO: 2535044 - RNA, 19 nt, Artificial Sequence
  Description of Artificial Sequence: Synthetic oligonucleotide
aguggauucuucaaccucc

SEQ ID NO: 2535045 - RNA, 19 nt, Artificial Sequence
  Description of Artificial Sequence: Synthetic oligonucleotide
ugaacaagcauguggacaa

SEQ ID NO: 2535046 - RNA, 19 nt, Artificial Sequence
  Description of Artificial Sequence: Synthetic oligonucleotide
ugucaauuagauagaauuc

SEQ ID NO: 2535047 - RNA, 19 nt, Artificial Sequence
  Description of Artificial Sequence: Synthetic oligonucleotide
uccaggaaaaggacaaucc

SEQ ID NO: 2535048 - RNA, 19 nt, Artificial Sequence
  Description of Artificial Sequence: Synthetic oligonucleotide
aauuuagauugguaccuca

SEQ ID NO: 2535049 - RNA, 19 nt, Artificial Sequence
  Description of Artificial Sequence: Synthetic oligonucleotide
acagucuacccacagaaug

SEQ ID NO: 2535050 - RNA, 19 nt, Artificial Sequence
  Description of Artificial Sequence: Synthetic oligonucleotide
uuugggaucugacuaguga

SEQ ID NO: 2535051 - RNA, 19 nt, Artificial Sequence
  Description of Artificial Sequence: Synthetic oligonucleotide
gucaauuagauagaauucc

SEQ ID NO: 2535052 - RNA, 19 nt, Artificial Sequence
  Description of Artificial Sequence: Synthetic oligonucleotide
gacaguggauucuucaacc

SEQ ID NO: 2535053 - RNA, 19 nt, Artificial Sequence
  Description of Artificial Sequence: Synthetic oligonucleotide
auuagauagaauucccaga

SEQ ID NO: 2535054 - RNA, 19 nt, Artificial Sequence
  Description of Artificial Sequence: Synthetic oligonucleotide
cuuggaaggcacuaguuug

SEQ ID NO: 2535055 - RNA, 19 nt, Artificial Sequence
  Description of Artificial Sequence: Synthetic oligonucleotide
ugcgugaauagacagugga

SEQ ID NO: 2535056 - RNA, 19 nt, Artificial Sequence
  Description of Artificial Sequence: Synthetic oligonucleotide
uuccuuuaaccaauuagcu

SEQ ID NO: 2535057 - RNA, 19 nt, Artificial Sequence
  Description of Artificial Sequence: Synthetic oligonucleotide
auuauaauuuacagucuac

SEQ ID NO: 2535058 - RNA, 19 nt, Artificial Sequence
  Description of Artificial Sequence: Synthetic oligonucleotide
agauaaauuauaauuuaca

SEQ ID NO: 2535059 - RNA, 19 nt, Artificial Sequence
  Description of Artificial Sequence: Synthetic oligonucleotide
uuaaccaauuagcuugcug

SEQ ID NO: 2535060 - RNA, 19 nt, Artificial Sequence
  Description of Artificial Sequence: Synthetic oligonucleotide
aaggcacuaguuugggauc

SEQ ID NO: 2535061 - RNA, 19 nt, Artificial Sequence
  Description of Artificial Sequence: Synthetic oligonucleotide
cagaacauugccuccauug

SEQ ID NO: 2535062 - RNA, 19 nt, Artificial Sequence
  Description of Artificial Sequence: Synthetic oligonucleotide
ucuuugagcuguugaaaag

SEQ ID NO: 2535063 - RNA, 19 nt, Artificial Sequence
  Description of Artificial Sequence: Synthetic oligonucleotide
ucucacauuuugcauuugc

SEQ ID NO: 2535064 - RNA, 19 nt, Artificial Sequence
  Description of Artificial Sequence: Synthetic oligonucleotide
aucaugcgugaauagacag

SEQ ID NO: 2535065 - RNA, 19 nt, Artificial Sequence
  Description of Artificial Sequence: Synthetic oligonucleotide
cuguugaaaaggaagcaug

SEQ ID NO: 2535066 - RNA, 19 nt, Artificial Sequence
  Description of Artificial Sequence: Synthetic oligonucleotide
aaagaucuuggccaauuua

SEQ ID NO: 2535067 - RNA, 19 nt, Artificial Sequence
  Description of Artificial Sequence: Synthetic oligonucleotide
ggauucuucaaccuccagg

SEQ ID NO: 2535068 - RNA, 19 nt, Artificial Sequence
  Description of Artificial Sequence: Synthetic oligonucleotide
gaaaaggacaauccauuga

SEQ ID NO: 2535069 - RNA, 19 nt, Artificial Sequence
  Description of Artificial Sequence: Synthetic oligonucleotide
aacaagcauguggacaaac

SEQ ID NO: 2535070 - RNA, 19 nt, Artificial Sequence
  Description of Artificial Sequence: Synthetic oligonucleotide
gauagaauucccagauucc

SEQ ID NO: 2535071 - RNA, 19 nt, Artificial Sequence
  Description of Artificial Sequence: Synthetic oligonucleotide
uucccagauuccuuuaacc

SEQ ID NO: 2535072 - RNA, 19 nt, Artificial Sequence
  Description of Artificial Sequence: Synthetic oligonucleotide
uugggaucugacuagugac

SEQ ID NO: 2535073 - RNA, 19 nt, Artificial Sequence
  Description of Artificial Sequence: Synthetic oligonucleotide
ugacuagugacuccuggcu

SEQ ID NO: 2535074 - RNA, 19 nt, Artificial Sequence
  Description of Artificial Sequence: Synthetic oligonucleotide
cuuuaaccaauuagcuugc

SEQ ID NO: 2535075 - RNA, 19 nt, Artificial Sequence
  Description of Artificial Sequence: Synthetic oligonucleotide
auuuacagucuacccacag

SEQ ID NO: 2535076 - RNA, 19 nt, Artificial Sequence
  Description of Artificial Sequence: Synthetic oligonucleotide
auagacaguggauucuuca

SEQ ID NO: 2535077 - RNA, 19 nt, Artificial Sequence
  Description of Artificial Sequence: Synthetic oligonucleotide
ugcuccaaaggcugcaucc

SEQ ID NO: 2535078 - RNA, 19 nt, Artificial Sequence
  Description of Artificial Sequence: Synthetic oligonucleotide
uagauugguaccucaagau

SEQ ID NO: 2535079 - RNA, 19 nt, Artificial Sequence
  Description of Artificial Sequence: Synthetic oligonucleotide
gauugguaccucaagauaa

SEQ ID NO: 2535080 - RNA, 19 nt, Artificial Sequence
  Description of Artificial Sequence: Synthetic oligonucleotide
uaguuugggaucugacuag

SEQ ID NO: 2535081 - RNA, 19 nt, Artificial Sequence
  Description of Artificial Sequence: Synthetic oligonucleotide
aacaaugccucugcacagg

SEQ ID NO: 2535082 - RNA, 19 nt, Artificial Sequence
  Description of Artificial Sequence: Synthetic oligonucleotide
ggagauucucgucacagag

SEQ ID NO: 2535083 - RNA, 19 nt, Artificial Sequence
  Description of Artificial Sequence: Synthetic oligonucleotide
cuugcugaacuaaggcucc

SEQ ID NO: 2535084 - RNA, 19 nt, Artificial Sequence
  Description of Artificial Sequence: Synthetic oligonucleotide
caugcgugaauagacagug

SEQ ID NO: 2535085 - RNA, 19 nt, Artificial Sequence
  Description of Artificial Sequence: Synthetic oligonucleotide
uguuggcaaugucaauuag

SEQ ID NO: 2535086 - RNA, 19 nt, Artificial Sequence
  Description of Artificial Sequence: Synthetic oligonucleotide
gguaccucaagauaaauua

SEQ ID NO: 2535087 - RNA, 19 nt, Artificial Sequence
  Description of Artificial Sequence: Synthetic oligonucleotide
cuuccacuccccaucaccc

SEQ ID NO: 2535088 - RNA, 19 nt, Artificial Sequence
  Description of Artificial Sequence: Synthetic oligonucleotide
gagcuguugaaaaggaagc

SEQ ID NO: 2535089 - RNA, 19 nt, Artificial Sequence
  Description of Artificial Sequence: Synthetic oligonucleotide
aaccaauuagcuugcugaa

SEQ ID NO: 2535090 - RNA, 19 nt, Artificial Sequence
  Description of Artificial Sequence: Synthetic oligonucleotide
gaggagauucucgucacag

SEQ ID NO: 2535091 - RNA, 19 nt, Artificial Sequence
  Description of Artificial Sequence: Synthetic oligonucleotide
auagaauucccagauuccu

SEQ ID NO: 2535092 - RNA, 19 nt, Artificial Sequence
  Description of Artificial Sequence: Synthetic oligonucleotide
ucaaccuccaggccuagau

SEQ ID NO: 2535093 - RNA, 19 nt, Artificial Sequence
  Description of Artificial Sequence: Synthetic oligonucleotide
gugaauagacaguggauuc

SEQ ID NO: 2535094 - RNA, 19 nt, Artificial Sequence
  Description of Artificial Sequence: Synthetic oligonucleotide
aauagacaguggauucuuc

SEQ ID NO: 2535095 - RNA, 19 nt, Artificial Sequence
  Description of Artificial Sequence: Synthetic oligonucleotide
agcggcaaagggaaggccc

SEQ ID NO: 2535096 - RNA, 19 nt, Artificial Sequence
  Description of Artificial Sequence: Synthetic oligonucleotide
aauucccagauuccuuuaa

SEQ ID NO: 2535097 - RNA, 19 nt, Artificial Sequence
  Description of Artificial Sequence: Synthetic oligonucleotide
aggaggagauucucgucac

SEQ ID NO: 2535098 - RNA, 19 nt, Artificial Sequence
  Description of Artificial Sequence: Synthetic oligonucleotide
ugaauagacaguggauucu

SEQ ID NO: 2535099 - RNA, 19 nt, Artificial Sequence
  Description of Artificial Sequence: Synthetic oligonucleotide
uaucgagugcccugaagga

SEQ ID NO: 2535100 - RNA, 19 nt, Artificial Sequence
  Description of Artificial Sequence: Synthetic oligonucleotide
caaucagcucuucagaaga

SEQ ID NO: 2535101 - RNA, 19 nt, Artificial Sequence
  Description of Artificial Sequence: Synthetic oligonucleotide
acagcgcacuuccacuccc

SEQ ID NO: 2535102 - RNA, 19 nt, Artificial Sequence
  Description of Artificial Sequence: Synthetic oligonucleotide
ggccaauuuagauugguac

SEQ ID NO: 2535103 - RNA, 19 nt, Artificial Sequence
  Description of Artificial Sequence: Synthetic oligonucleotide
cugacuagugacuccuggc

SEQ ID NO: 2535104 - RNA, 19 nt, Artificial Sequence
  Description of Artificial Sequence: Synthetic oligonucleotide
gccaauuuagauugguacc

SEQ ID NO: 2535105 - RNA, 19 nt, Artificial Sequence
  Description of Artificial Sequence: Synthetic oligonucleotide
auuagcuugcugaacuaag

SEQ ID NO: 2535106 - RNA, 19 nt, Artificial Sequence
  Description of Artificial Sequence: Synthetic oligonucleotide
gacuagugacuccuggcug

SEQ ID NO: 2535107 - RNA, 19 nt, Artificial Sequence
  Description of Artificial Sequence: Synthetic oligonucleotide
cugaacaaugccucugcac

SEQ ID NO: 2535108 - RNA, 19 nt, Artificial Sequence
  Description of Artificial Sequence: Synthetic oligonucleotide
caauuagauagaauuccca

SEQ ID NO: 2535109 - RNA, 19 nt, Artificial Sequence
  Description of Artificial Sequence: Synthetic oligonucleotide
uccuuuaaccaauuagcuu

SEQ ID NO: 2535110 - RNA, 19 nt, Artificial Sequence
  Description of Artificial Sequence: Synthetic oligonucleotide
accucauuccgggacagcg

SEQ ID NO: 2535111 - RNA, 19 nt, Artificial Sequence
  Description of Artificial Sequence: Synthetic oligonucleotide
ugggaucugacuagugacu

SEQ ID NO: 2535112 - RNA, 19 nt, Artificial Sequence
  Description of Artificial Sequence: Synthetic oligonucleotide
cugcccaaagcacagcggc

SEQ ID NO: 2535113 - RNA, 19 nt, Artificial Sequence
  Description of Artificial Sequence: Synthetic oligonucleotide
uguucuuggaaggcacuag

SEQ ID NO: 2535114 - RNA, 19 nt, Artificial Sequence
  Description of Artificial Sequence: Synthetic oligonucleotide
ggucacaugacccagggaa

SEQ ID NO: 2535115 - RNA, 19 nt, Artificial Sequence
  Description of Artificial Sequence: Synthetic oligonucleotide
caaagcacagcggcaaagg

SEQ ID NO: 2535116 - RNA, 19 nt, Artificial Sequence
  Description of Artificial Sequence: Synthetic oligonucleotide
gaaggcacuaguuugggau

SEQ ID NO: 2535117 - RNA, 19 nt, Artificial Sequence
  Description of Artificial Sequence: Synthetic oligonucleotide
auuugcaaucagcucuuca

SEQ ID NO: 2535118 - RNA, 19 nt, Artificial Sequence
  Description of Artificial Sequence: Synthetic oligonucleotide
ucgagugcccugaaggaaa

SEQ ID NO: 2535119 - RNA, 19 nt, Artificial Sequence
  Description of Artificial Sequence: Synthetic oligonucleotide
uggaucaugcgugaauaga

SEQ ID NO: 2535120 - RNA, 19 nt, Artificial Sequence
  Description of Artificial Sequence: Synthetic oligonucleotide
augguuaucgagugcccug

SEQ ID NO: 2535121 - RNA, 19 nt, Artificial Sequence
  Description of Artificial Sequence: Synthetic oligonucleotide
gaccagagcugcuccaaag

SEQ ID NO: 2535122 - RNA, 19 nt, Artificial Sequence
  Description of Artificial Sequence: Synthetic oligonucleotide
ucagaagauccuguucuug

SEQ ID NO: 2535123 - RNA, 19 nt, Artificial Sequence
  Description of Artificial Sequence: Synthetic oligonucleotide
accaauuagcuugcugaac

SEQ ID NO: 2535124 - RNA, 19 nt, Artificial Sequence
  Description of Artificial Sequence: Synthetic oligonucleotide
agauugguaccucaagaua

SEQ ID NO: 2535125 - RNA, 19 nt, Artificial Sequence
  Description of Artificial Sequence: Synthetic oligonucleotide
aggccuagauccgccaucc

SEQ ID NO: 2535126 - RNA, 19 nt, Artificial Sequence
  Description of Artificial Sequence: Synthetic oligonucleotide
cugaacuaaggcuccuuug

SEQ ID NO: 2535127 - RNA, 19 nt, Artificial Sequence
  Description of Artificial Sequence: Synthetic oligonucleotide
ugguaccucaagauaaauu

SEQ ID NO: 2535128 - RNA, 19 nt, Artificial Sequence
  Description of Artificial Sequence: Synthetic oligonucleotide
acaccccacucuuugagcu

SEQ ID NO: 2535129 - RNA, 19 nt, Artificial Sequence
  Description of Artificial Sequence: Synthetic oligonucleotide
caucacccgguccacaccc

SEQ ID NO: 2535130 - RNA, 19 nt, Artificial Sequence
  Description of Artificial Sequence: Synthetic oligonucleotide
gugacuccuggcugcaugg

SEQ ID NO: 2535131 - RNA, 19 nt, Artificial Sequence
  Description of Artificial Sequence: Synthetic oligonucleotide
acaguggauucuucaaccu

SEQ ID NO: 2535132 - RNA, 19 nt, Artificial Sequence
  Description of Artificial Sequence: Synthetic oligonucleotide
ucugcugugcagccgccug

SEQ ID NO: 2535133 - RNA, 19 nt, Artificial Sequence
  Description of Artificial Sequence: Synthetic oligonucleotide
guuaucgagugcccugaag

SEQ ID NO: 2535134 - RNA, 19 nt, Artificial Sequence
  Description of Artificial Sequence: Synthetic oligonucleotide
uugagcuguugaaaaggaa

SEQ ID NO: 2535135 - RNA, 19 nt, Artificial Sequence
  Description of Artificial Sequence: Synthetic oligonucleotide
cuagauccgccauccacug

SEQ ID NO: 2535136 - RNA, 19 nt, Artificial Sequence
  Description of Artificial Sequence: Synthetic oligonucleotide
aucagcucuucagaagauc

SEQ ID NO: 2535137 - RNA, 19 nt, Artificial Sequence
  Description of Artificial Sequence: Synthetic oligonucleotide
gauccuguucuuggaaggc

SEQ ID NO: 2535138 - RNA, 19 nt, Artificial Sequence
  Description of Artificial Sequence: Synthetic oligonucleotide
gaagauccuguucuuggaa

SEQ ID NO: 2535139 - RNA, 19 nt, Artificial Sequence
  Description of Artificial Sequence: Synthetic oligonucleotide
cauccugcccaaagcacag

SEQ ID NO: 2535140 - RNA, 19 nt, Artificial Sequence
  Description of Artificial Sequence: Synthetic oligonucleotide
aggacaauccauugaucau

SEQ ID NO: 2535141 - RNA, 19 nt, Artificial Sequence
  Description of Artificial Sequence: Synthetic oligonucleotide
uccgccauccacugaacaa

SEQ ID NO: 2535142 - RNA, 19 nt, Artificial Sequence
  Description of Artificial Sequence: Synthetic oligonucleotide
cacagcggcaaagggaagg

SEQ ID NO: 2535143 - RNA, 19 nt, Artificial Sequence
  Description of Artificial Sequence: Synthetic oligonucleotide
cucuuugagcuguugaaaa

SEQ ID NO: 2535144 - RNA, 19 nt, Artificial Sequence
  Description of Artificial Sequence: Synthetic oligonucleotide
auguuggcaaugucaauua

SEQ ID NO: 2535145 - RNA, 19 nt, Artificial Sequence
  Description of Artificial Sequence: Synthetic oligonucleotide
agcucuucagaagauccug

SEQ ID NO: 2535146 - RNA, 19 nt, Artificial Sequence
  Description of Artificial Sequence: Synthetic oligonucleotide
gaucaugcgugaauagaca

SEQ ID NO: 2535147 - RNA, 19 nt, Artificial Sequence
  Description of Artificial Sequence: Synthetic oligonucleotide
ggacaauccauugaucaug

SEQ ID NO: 2535148 - RNA, 19 nt, Artificial Sequence
  Description of Artificial Sequence: Synthetic oligonucleotide
cacauccugcccaaagcac

SEQ ID NO: 2535149 - RNA, 19 nt, Artificial Sequence
  Description of Artificial Sequence: Synthetic oligonucleotide
cacuaguuugggaucugac

SEQ ID NO: 2535150 - RNA, 19 nt, Artificial Sequence
  Description of Artificial Sequence: Synthetic oligonucleotide
uggauucuucaaccuccag

SEQ ID NO: 2535151 - RNA, 19 nt, Artificial Sequence
  Description of Artificial Sequence: Synthetic oligonucleotide
auugaucauguuggcaaug

SEQ ID NO: 2535152 - RNA, 19 nt, Artificial Sequence
  Description of Artificial Sequence: Synthetic oligonucleotide
uugggccgaggucuuuccg

SEQ ID NO: 2535153 - RNA, 19 nt, Artificial Sequence
  Description of Artificial Sequence: Synthetic oligonucleotide
acuguuggggugaugguga

SEQ ID NO: 2535154 - RNA, 19 nt, Artificial Sequence
  Description of Artificial Sequence: Synthetic oligonucleotide
ggaucaugcgugaauagac

SEQ ID NO: 2535155 - RNA, 19 nt, Artificial Sequence
  Description of Artificial Sequence: Synthetic oligonucleotide
gucuuuccggagcaugacc

SEQ ID NO: 2535156 - RNA, 19 nt, Artificial Sequence
  Description of Artificial Sequence: Synthetic oligonucleotide
acuccccaucacccggucc

SEQ ID NO: 2535157 - RNA, 19 nt, Artificial Sequence
  Description of Artificial Sequence: Synthetic oligonucleotide
uucucgucacagaggccag

SEQ ID NO: 2535158 - RNA, 19 nt, Artificial Sequence
  Description of Artificial Sequence: Synthetic oligonucleotide
gcugcaugguuaucgagug

SEQ ID NO: 2535159 - RNA, 19 nt, Artificial Sequence
  Description of Artificial Sequence: Synthetic oligonucleotide
uagauagaauucccagauu

SEQ ID NO: 2535160 - RNA, 19 nt, Artificial Sequence
  Description of Artificial Sequence: Synthetic oligonucleotide
agcacagcggcaaagggaa

SEQ ID NO: 2535161 - RNA, 19 nt, Artificial Sequence
  Description of Artificial Sequence: Synthetic oligonucleotide
cauuuugcauuugcaauca

SEQ ID NO: 2535162 - RNA, 19 nt, Artificial Sequence
  Description of Artificial Sequence: Synthetic oligonucleotide
cuuuccggagcaugaccag

SEQ ID NO: 2535163 - RNA, 19 nt, Artificial Sequence
  Description of Artificial Sequence: Synthetic oligonucleotide
acaagcauguggacaaaca

SEQ ID NO: 2535164 - RNA, 19 nt, Artificial Sequence
  Description of Artificial Sequence: Synthetic oligonucleotide
agcuguugaaaaggaagca

SEQ ID NO: 2535165 - RNA, 19 nt, Artificial Sequence
  Description of Artificial Sequence: Synthetic oligonucleotide
gacagcgcacuuccacucc

SEQ ID NO: 2535166 - RNA, 19 nt, Artificial Sequence
  Description of Artificial Sequence: Synthetic oligonucleotide
ugguuaucgagugcccuga

SEQ ID NO: 2535167 - RNA, 19 nt, Artificial Sequence
  Description of Artificial Sequence: Synthetic oligonucleotide
uggccaauuuagauuggua

SEQ ID NO: 2535168 - RNA, 19 nt, Artificial Sequence
  Description of Artificial Sequence: Synthetic oligonucleotide
ggagugcaaguucugaaca

SEQ ID NO: 2535169 - RNA, 19 nt, Artificial Sequence
  Description of Artificial Sequence: Synthetic oligonucleotide
uuggccaauuuagauuggu

SEQ ID NO: 2535170 - RNA, 19 nt, Artificial Sequence
  Description of Artificial Sequence: Synthetic oligonucleotide
acaugacccagggaaaggu

SEQ ID NO: 2535171 - RNA, 19 nt, Artificial Sequence
  Description of Artificial Sequence: Synthetic oligonucleotide
aggagauucucgucacaga

SEQ ID NO: 2535172 - RNA, 19 nt, Artificial Sequence
  Description of Artificial Sequence: Synthetic oligonucleotide
gugcaaguucugaacaaug

SEQ ID NO: 2535173 - RNA, 19 nt, Artificial Sequence
  Description of Artificial Sequence: Synthetic oligonucleotide
cacaccccacucuuugagc

SEQ ID NO: 2535174 - RNA, 19 nt, Artificial Sequence
  Description of Artificial Sequence: Synthetic oligonucleotide
auuuagauugguaccucaa

SEQ ID NO: 2535175 - RNA, 19 nt, Artificial Sequence
  Description of Artificial Sequence: Synthetic oligonucleotide
gagugcaaguucugaacaa

SEQ ID NO: 2535176 - RNA, 19 nt, Artificial Sequence
  Description of Artificial Sequence: Synthetic oligonucleotide
agcaccucauuccgggaca

SEQ ID NO: 2535177 - RNA, 19 nt, Artificial Sequence
  Description of Artificial Sequence: Synthetic oligonucleotide
agugcaaguucugaacaau

SEQ ID NO: 2535178 - RNA, 19 nt, Artificial Sequence
  Description of Artificial Sequence: Synthetic oligonucleotide
ugccucucacccagcacug

SEQ ID NO: 2535179 - RNA, 19 nt, Artificial Sequence
  Description of Artificial Sequence: Synthetic oligonucleotide
caguggauucuucaaccuc

SEQ ID NO: 2535180 - RNA, 19 nt, Artificial Sequence
  Description of Artificial Sequence: Synthetic oligonucleotide
agucuacccacagaauggu

SEQ ID NO: 2535181 - RNA, 19 nt, Artificial Sequence
  Description of Artificial Sequence: Synthetic oligonucleotide
agcuggucaggcaggugcc

SEQ ID NO: 2535182 - RNA, 19 nt, Artificial Sequence
  Description of Artificial Sequence: Synthetic oligonucleotide
ccagggaaaggucagagga

SEQ ID NO: 2535183 - RNA, 19 nt, Artificial Sequence
  Description of Artificial Sequence: Synthetic oligonucleotide
ccauugaucauguuggcaa

SEQ ID NO: 2535184 - RNA, 19 nt, Artificial Sequence
  Description of Artificial Sequence: Synthetic oligonucleotide
auccacugaacaagcaugu

SEQ ID NO: 2535185 - RNA, 19 nt, Artificial Sequence
  Description of Artificial Sequence: Synthetic oligonucleotide
cucauuccgggacagcgca

SEQ ID NO: 2535186 - RNA, 19 nt, Artificial Sequence
  Description of Artificial Sequence: Synthetic oligonucleotide
ggagcaugaccagagcugc

SEQ ID NO: 2535187 - RNA, 19 nt, Artificial Sequence
  Description of Artificial Sequence: Synthetic oligonucleotide
gaucugacuagugacuccu

SEQ ID NO: 2535188 - RNA, 19 nt, Artificial Sequence
  Description of Artificial Sequence: Synthetic oligonucleotide
cuacccacagaauggucca

SEQ ID NO: 2535189 - RNA, 19 nt, Artificial Sequence
  Description of Artificial Sequence: Synthetic oligonucleotide
uuuaaccaauuagcuugcu

SEQ ID NO: 2535190 - RNA, 19 nt, Artificial Sequence
  Description of Artificial Sequence: Synthetic oligonucleotide
aguuugggaucugacuagu

SEQ ID NO: 2535191 - RNA, 19 nt, Artificial Sequence
  Description of Artificial Sequence: Synthetic oligonucleotide
agauuccuuuaaccaauua

SEQ ID NO: 2535192 - RNA, 19 nt, Artificial Sequence
  Description of Artificial Sequence: Synthetic oligonucleotide
ugaccagagcugcuccaaa

SEQ ID NO: 2535193 - RNA, 19 nt, Artificial Sequence
  Description of Artificial Sequence: Synthetic oligonucleotide
ggaucugacuagugacucc

SEQ ID NO: 2535194 - RNA, 19 nt, Artificial Sequence
  Description of Artificial Sequence: Synthetic oligonucleotide
auugguaccucaagauaaa

SEQ ID NO: 2535195 - RNA, 19 nt, Artificial Sequence
  Description of Artificial Sequence: Synthetic oligonucleotide
uugguaccucaagauaaau

SEQ ID NO: 2535196 - RNA, 19 nt, Artificial Sequence
  Description of Artificial Sequence: Synthetic oligonucleotide
uaaggcuccuuugggccga

SEQ ID NO: 2535197 - RNA, 19 nt, Artificial Sequence
  Description of Artificial Sequence: Synthetic oligonucleotide
guucuuggaaggcacuagu

SEQ ID NO: 2535198 - RNA, 19 nt, Artificial Sequence
  Description of Artificial Sequence: Synthetic oligonucleotide
cugcaugguuaucgagugc

SEQ ID NO: 2535199 - RNA, 19 nt, Artificial Sequence
  Description of Artificial Sequence: Synthetic oligonucleotide
gauucucgucacagaggcc

SEQ ID NO: 2535200 - RNA, 19 nt, Artificial Sequence
  Description of Artificial Sequence: Synthetic oligonucleotide
aggcacuaguuugggaucu

SEQ ID NO: 2535201 - RNA, 19 nt, Artificial Sequence
  Description of Artificial Sequence: Synthetic oligonucleotide
auccuguucuuggaaggca

SEQ ID NO: 2535202 - RNA, 19 nt, Artificial Sequence
  Description of Artificial Sequence: Synthetic oligonucleotide
ucauuccgggacagcgcac

SEQ ID NO: 2535203 - RNA, 19 nt, Artificial Sequence
  Description of Artificial Sequence: Synthetic oligonucleotide
guuugggaucugacuagug

SEQ ID NO: 2535204 - RNA, 19 nt, Artificial Sequence
  Description of Artificial Sequence: Synthetic oligonucleotide
augcgugaauagacagugg

SEQ ID NO: 2535205 - RNA, 19 nt, Artificial Sequence
  Description of Artificial Sequence: Synthetic oligonucleotide
agccgccuggaucaugcgu

SEQ ID NO: 2535206 - RNA, 19 nt, Artificial Sequence
  Description of Artificial Sequence: Synthetic oligonucleotide
aucgagugcccugaaggaa

SEQ ID NO: 2535207 - RNA, 19 nt, Artificial Sequence
  Description of Artificial Sequence: Synthetic oligonucleotide
gccuagauccgccauccac

SEQ ID NO: 2535208 - RNA, 19 nt, Artificial Sequence
  Description of Artificial Sequence: Synthetic oligonucleotide
ggaagcauggagugcaagu

SEQ ID NO: 2535209 - RNA, 19 nt, Artificial Sequence
  Description of Artificial Sequence: Synthetic oligonucleotide
caauuagcuugcugaacua

SEQ ID NO: 2535210 - RNA, 19 nt, Artificial Sequence
  Description of Artificial Sequence: Synthetic oligonucleotide
aggugccucucacccagca

SEQ ID NO: 2535211 - RNA, 19 nt, Artificial Sequence
  Description of Artificial Sequence: Synthetic oligonucleotide
cagaggaggagauucucgu

SEQ ID NO: 2535212 - RNA, 19 nt, Artificial Sequence
  Description of Artificial Sequence: Synthetic oligonucleotide
uacccacagaaugguccag

SEQ ID NO: 2535213 - RNA, 19 nt, Artificial Sequence
  Description of Artificial Sequence: Synthetic oligonucleotide
ccaauuagcuugcugaacu

SEQ ID NO: 2535214 - RNA, 19 nt, Artificial Sequence
  Description of Artificial Sequence: Synthetic oligonucleotide
cccaccucucacauuuugc

SEQ ID NO: 2535215 - RNA, 19 nt, Artificial Sequence
  Description of Artificial Sequence: Synthetic oligonucleotide
caugaccagagcugcucca

SEQ ID NO: 2535216 - RNA, 19 nt, Artificial Sequence
  Description of Artificial Sequence: Synthetic oligonucleotide
agcgcacuuccacucccca

SEQ ID NO: 2535217 - RNA, 19 nt, Artificial Sequence
  Description of Artificial Sequence: Synthetic oligonucleotide
gaauagacaguggauucuu

SEQ ID NO: 2535218 - RNA, 19 nt, Artificial Sequence
  Description of Artificial Sequence: Synthetic oligonucleotide
cauggccagaacauugccu

SEQ ID NO: 2535219 - RNA, 19 nt, Artificial Sequence
  Description of Artificial Sequence: Synthetic oligonucleotide
ucucgucacagaggccagc

SEQ ID NO: 2535220 - RNA, 19 nt, Artificial Sequence
  Description of Artificial Sequence: Synthetic oligonucleotide
accuccaggccuagauccg

SEQ ID NO: 2535221 - RNA, 19 nt, Artificial Sequence
  Description of Artificial Sequence: Synthetic oligonucleotide
ugcugugcagccgccugga

SEQ ID NO: 2535222 - RNA, 19 nt, Artificial Sequence
  Description of Artificial Sequence: Synthetic oligonucleotide
caggccuagauccgccauc

SEQ ID NO: 2535223 - RNA, 19 nt, Artificial Sequence
  Description of Artificial Sequence: Synthetic oligonucleotide
cagcgcacuuccacucccc

SEQ ID NO: 2535224 - RNA, 19 nt, Artificial Sequence
  Description of Artificial Sequence: Synthetic oligonucleotide
acccgguccacaccccacu

SEQ ID NO: 2535225 - RNA, 19 nt, Artificial Sequence
  Description of Artificial Sequence: Synthetic oligonucleotide
caccccacucuuugagcug

SEQ ID NO: 2535226 - RNA, 19 nt, Artificial Sequence
  Description of Artificial Sequence: Synthetic oligonucleotide
augaccagagcugcuccaa

SEQ ID NO: 2535227 - RNA, 19 nt, Artificial Sequence
  Description of Artificial Sequence: Synthetic oligonucleotide
ggacagcgcacuuccacuc

SEQ ID NO: 2535228 - RNA, 19 nt, Artificial Sequence
  Description of Artificial Sequence: Synthetic oligonucleotide
cagggcccgggucacauga

SEQ ID NO: 2535229 - RNA, 19 nt, Artificial Sequence
  Description of Artificial Sequence: Synthetic oligonucleotide
ccucauuccgggacagcgc

SEQ ID NO: 2535230 - RNA, 19 nt, Artificial Sequence
  Description of Artificial Sequence: Synthetic oligonucleotide
gaaggcccucuggaccucc

SEQ ID NO: 2535231 - RNA, 19 nt, Artificial Sequence
  Description of Artificial Sequence: Synthetic oligonucleotide
ggugaggugugugucuuuc

SEQ ID NO: 2535232 - RNA, 19 nt, Artificial Sequence
  Description of Artificial Sequence: Synthetic oligonucleotide
ccacaccccacucuuugag

SEQ ID NO: 2535233 - RNA, 19 nt, Artificial Sequence
  Description of Artificial Sequence: Synthetic oligonucleotide
gccgccuggaucaugcgug

SEQ ID NO: 2535234 - RNA, 19 nt, Artificial Sequence
  Description of Artificial Sequence: Synthetic oligonucleotide
uugcugaacuaaggcuccu

SEQ ID NO: 2535235 - RNA, 19 nt, Artificial Sequence
  Description of Artificial Sequence: Synthetic oligonucleotide
cccagauuccuuuaaccaa

SEQ ID NO: 2535236 - RNA, 19 nt, Artificial Sequence
  Description of Artificial Sequence: Synthetic oligonucleotide
acaauccauugaucauguu

SEQ ID NO: 2535237 - RNA, 19 nt, Artificial Sequence
  Description of Artificial Sequence: Synthetic oligonucleotide
guaccucaagauaaauuau

SEQ ID NO: 2535238 - RNA, 19 nt, Artificial Sequence
  Description of Artificial Sequence: Synthetic oligonucleotide
cauugaucauguuggcaau

SEQ ID NO: 2535239 - RNA, 19 nt, Artificial Sequence
  Description of Artificial Sequence: Synthetic oligonucleotide
ugcugaacuaaggcuccuu

SEQ ID NO: 2535240 - RNA, 19 nt, Artificial Sequence
  Description of Artificial Sequence: Synthetic oligonucleotide
ccgccauccacugaacaag

SEQ ID NO: 2535241 - RNA, 19 nt, Artificial Sequence
  Description of Artificial Sequence: Synthetic oligonucleotide
ccaaagcacagcggcaaag

SEQ ID NO: 2535242 - RNA, 19 nt, Artificial Sequence
  Description of Artificial Sequence: Synthetic oligonucleotide
gauccgccauccacugaac

SEQ ID NO: 2535243 - RNA, 19 nt, Artificial Sequence
  Description of Artificial Sequence: Synthetic oligonucleotide
ccacauccugcccaaagca

SEQ ID NO: 2535244 - RNA, 19 nt, Artificial Sequence
  Description of Artificial Sequence: Synthetic oligonucleotide
ccaauuuagauugguaccu

SEQ ID NO: 2535245 - RNA, 19 nt, Artificial Sequence
  Description of Artificial Sequence: Synthetic oligonucleotide
cagcggcaaagggaaggcc

SEQ ID NO: 2535246 - RNA, 19 nt, Artificial Sequence
  Description of Artificial Sequence: Synthetic oligonucleotide
aucugacuagugacuccug

SEQ ID NO: 2535247 - RNA, 19 nt, Artificial Sequence
  Description of Artificial Sequence: Synthetic oligonucleotide
ccuagauccgccauccacu

SEQ ID NO: 2535248 - RNA, 19 nt, Artificial Sequence
  Description of Artificial Sequence: Synthetic oligonucleotide
cacccgguccacaccccac

SEQ ID NO: 2535249 - RNA, 19 nt, Artificial Sequence
  Description of Artificial Sequence: Synthetic oligonucleotide
ggugccucucacccagcac

SEQ ID NO: 2535250 - RNA, 19 nt, Artificial Sequence
  Description of Artificial Sequence: Synthetic oligonucleotide
cucucacauuuugcauuug

SEQ ID NO: 2535251 - RNA, 19 nt, Artificial Sequence
  Description of Artificial Sequence: Synthetic oligonucleotide
cuagugacuccuggcugca

SEQ ID NO: 2535252 - RNA, 19 nt, Artificial Sequence
  Description of Artificial Sequence: Synthetic oligonucleotide
cagccgccuggaucaugcg

SEQ ID NO: 2535253 - RNA, 19 nt, Artificial Sequence
  Description of Artificial Sequence: Synthetic oligonucleotide
aaggcuccuuugggccgag

SEQ ID NO: 2535254 - RNA, 19 nt, Artificial Sequence
  Description of Artificial Sequence: Synthetic oligonucleotide
auuccgggacagcgcacuu

SEQ ID NO: 2535255 - RNA, 19 nt, Artificial Sequence
  Description of Artificial Sequence: Synthetic oligonucleotide
gggcccgggucacaugacc

SEQ ID NO: 2535256 - RNA, 19 nt, Artificial Sequence
  Description of Artificial Sequence: Synthetic oligonucleotide
guggacaaacauggccaga

SEQ ID NO: 2535257 - RNA, 19 nt, Artificial Sequence
  Description of Artificial Sequence: Synthetic oligonucleotide
gcaugguuaucgagugccc

SEQ ID NO: 2535258 - RNA, 19 nt, Artificial Sequence
  Description of Artificial Sequence: Synthetic oligonucleotide
cgcacuuccacuccccauc

SEQ ID NO: 2535259 - RNA, 19 nt, Artificial Sequence
  Description of Artificial Sequence: Synthetic oligonucleotide
aggaaagaucuuggccaau

SEQ ID NO: 2535260 - RNA, 19 nt, Artificial Sequence
  Description of Artificial Sequence: Synthetic oligonucleotide
ggaggagauucucgucaca

SEQ ID NO: 2535261 - RNA, 19 nt, Artificial Sequence
  Description of Artificial Sequence: Synthetic oligonucleotide
uggugaggugugugucuuu

SEQ ID NO: 2535262 - RNA, 19 nt, Artificial Sequence
  Description of Artificial Sequence: Synthetic oligonucleotide
ugcagccgccuggaucaug

SEQ ID NO: 2535263 - RNA, 19 nt, Artificial Sequence
  Description of Artificial Sequence: Synthetic oligonucleotide
gcuguugaaaaggaagcau

SEQ ID NO: 2535264 - RNA, 19 nt, Artificial Sequence
  Description of Artificial Sequence: Synthetic oligonucleotide
gcauguggacaaacauggc

SEQ ID NO: 2535265 - RNA, 19 nt, Artificial Sequence
  Description of Artificial Sequence: Synthetic oligonucleotide
ccagauuccuuuaaccaau

SEQ ID NO: 2535266 - RNA, 19 nt, Artificial Sequence
  Description of Artificial Sequence: Synthetic oligonucleotide
agggcccgggucacaugac

SEQ ID NO: 2535267 - RNA, 19 nt, Artificial Sequence
  Description of Artificial Sequence: Synthetic oligonucleotide
gggccgaggucuuuccgga

SEQ ID NO: 2535268 - RNA, 19 nt, Artificial Sequence
  Description of Artificial Sequence: Synthetic oligonucleotide
gggacagcgcacuuccacu

SEQ ID NO: 2535269 - RNA, 19 nt, Artificial Sequence
  Description of Artificial Sequence: Synthetic oligonucleotide
gacuccuggcugcaugguu

SEQ ID NO: 2535270 - RNA, 19 nt, Artificial Sequence
  Description of Artificial Sequence: Synthetic oligonucleotide
ccgggucacaugacccagg

SEQ ID NO: 2535271 - RNA, 19 nt, Artificial Sequence
  Description of Artificial Sequence: Synthetic oligonucleotide
ccucaagauaaauuauaau

SEQ ID NO: 2535272 - RNA, 19 nt, Artificial Sequence
  Description of Artificial Sequence: Synthetic oligonucleotide
gcauggagugcaaguucug

SEQ ID NO: 2535273 - RNA, 19 nt, Artificial Sequence
  Description of Artificial Sequence: Synthetic oligonucleotide
cauuccgggacagcgcacu

SEQ ID NO: 2535274 - RNA, 19 nt, Artificial Sequence
  Description of Artificial Sequence: Synthetic oligonucleotide
cgagugcccugaaggaaag

SEQ ID NO: 2535275 - RNA, 19 nt, Artificial Sequence
  Description of Artificial Sequence: Synthetic oligonucleotide
ccuggaucaugcgugaaua

SEQ ID NO: 2535276 - RNA, 19 nt, Artificial Sequence
  Description of Artificial Sequence: Synthetic oligonucleotide
ggaaagaucuuggccaauu

SEQ ID NO: 2535277 - RNA, 19 nt, Artificial Sequence
  Description of Artificial Sequence: Synthetic oligonucleotide
cucgucacagaggccagcu

SEQ ID NO: 2535278 - RNA, 19 nt, Artificial Sequence
  Description of Artificial Sequence: Synthetic oligonucleotide
ccccaccucucacauuuug

SEQ ID NO: 2535279 - RNA, 19 nt, Artificial Sequence
  Description of Artificial Sequence: Synthetic oligonucleotide
cacuccccaucacccgguc

SEQ ID NO: 2535280 - RNA, 19 nt, Artificial Sequence
  Description of Artificial Sequence: Synthetic oligonucleotide
uccccaccucucacauuuu

SEQ ID NO: 2535281 - RNA, 19 nt, Artificial Sequence
  Description of Artificial Sequence: Synthetic oligonucleotide
cgggacagcgcacuuccac

SEQ ID NO: 2535282 - RNA, 19 nt, Artificial Sequence
  Description of Artificial Sequence: Synthetic oligonucleotide
gcacuaguuugggaucuga

SEQ ID NO: 2535283 - RNA, 19 nt, Artificial Sequence
  Description of Artificial Sequence: Synthetic oligonucleotide
ccuccaggccuagauccgc

SEQ ID NO: 2535284 - RNA, 19 nt, Artificial Sequence
  Description of Artificial Sequence: Synthetic oligonucleotide
gcccaaagcacagcggcaa

SEQ ID NO: 2535285 - RNA, 19 nt, Artificial Sequence
  Description of Artificial Sequence: Synthetic oligonucleotide
gguuaucgagugcccugaa

SEQ ID NO: 2535286 - RNA, 19 nt, Artificial Sequence
  Description of Artificial Sequence: Synthetic oligonucleotide
ccauucuccccaccucuca

SEQ ID NO: 2535287 - RNA, 19 nt, Artificial Sequence
  Description of Artificial Sequence: Synthetic oligonucleotide
ccgaggucuuuccggagca

SEQ ID NO: 2535288 - RNA, 19 nt, Artificial Sequence
  Description of Artificial Sequence: Synthetic oligonucleotide
gccuggaucaugcgugaau

SEQ ID NO: 2535289 - RNA, 19 nt, Artificial Sequence
  Description of Artificial Sequence: Synthetic oligonucleotide
cccagcacuguugggguga

SEQ ID NO: 2535290 - RNA, 19 nt, Artificial Sequence
  Description of Artificial Sequence: Synthetic oligonucleotide
gcgugaauagacaguggau

SEQ ID NO: 2535291 - RNA, 19 nt, Artificial Sequence
  Description of Artificial Sequence: Synthetic oligonucleotide
gcacagcggcaaagggaag

SEQ ID NO: 2535292 - RNA, 19 nt, Artificial Sequence
  Description of Artificial Sequence: Synthetic oligonucleotide
ggccuagauccgccaucca

SEQ ID NO: 2535293 - RNA, 19 nt, Artificial Sequence
  Description of Artificial Sequence: Synthetic oligonucleotide
gcggcaaagggaaggcccu

SEQ ID NO: 2535294 - RNA, 19 nt, Artificial Sequence
  Description of Artificial Sequence: Synthetic oligonucleotide
ccgccuggaucaugcguga

SEQ ID NO: 2535295 - RNA, 19 nt, Artificial Sequence
  Description of Artificial Sequence: Synthetic oligonucleotide
gcgcacuuccacuccccau

SEQ ID NO: 2535296 - RNA, 19 nt, Artificial Sequence
  Description of Artificial Sequence: Synthetic oligonucleotide
gggugauggugaggugugu

SEQ ID NO: 2535297 - RNA, 19 nt, Artificial Sequence
  Description of Artificial Sequence: Synthetic oligonucleotide
ccucucacccagcacuguu

SEQ ID NO: 2535298 - RNA, 19 nt, Artificial Sequence
  Description of Artificial Sequence: Synthetic oligonucleotide
ccacuccccaucacccggu

SEQ ID NO: 2535299 - RNA, 19 nt, Artificial Sequence
  Description of Artificial Sequence: Synthetic oligonucleotide
gccucucacccagcacugu

SEQ ID NO: 2535300 - RNA, 19 nt, Artificial Sequence
  Description of Artificial Sequence: Synthetic oligonucleotide
cgguccacaccccacucuu

SEQ ID NO: 2535301 - RNA, 19 nt, Artificial Sequence
  Description of Artificial Sequence: Synthetic oligonucleotide
cccucuggaccuccugcuu

SEQ ID NO: 2535302 - RNA, 19 nt, Artificial Sequence
  Description of Artificial Sequence: Synthetic oligonucleotide
gugcagccgccuggaucau

SEQ ID NO: 2535303 - RNA, 19 nt, Artificial Sequence
  Description of Artificial Sequence: Synthetic oligonucleotide
cgccuggaucaugcgugaa

SEQ ID NO: 2535304 - RNA, 19 nt, Artificial Sequence
  Description of Artificial Sequence: Synthetic oligonucleotide
cgaggucuuuccggagcau

SEQ ID NO: 2535305 - RNA, 19 nt, Artificial Sequence
  Description of Artificial Sequence: Synthetic oligonucleotide
aaaauaaucagauauugca

SEQ ID NO: 2535306 - RNA, 19 nt, Artificial Sequence
  Description of Artificial Sequence: Synthetic oligonucleotide
ucagauauugcaaugauau

SEQ ID NO: 2535307 - RNA, 19 nt, Artificial Sequence
  Description of Artificial Sequence: Synthetic oligonucleotide
aauaaucagauauugcaau

SEQ ID NO: 2535308 - RNA, 19 nt, Artificial Sequence
  Description of Artificial Sequence: Synthetic oligonucleotide
ugccaaaauaaucagauau

SEQ ID NO: 2535309 - RNA, 19 nt, Artificial Sequence
  Description of Artificial Sequence: Synthetic oligonucleotide
aagagcuggucuuuaauag

SEQ ID NO: 2535310 - RNA, 19 nt, Artificial Sequence
  Description of Artificial Sequence: Synthetic oligonucleotide
uuaauagguauguauuuca

SEQ ID NO: 2535311 - RNA, 19 nt, Artificial Sequence
  Description of Artificial Sequence: Synthetic oligonucleotide
uuccuucugacauugauga

SEQ ID NO: 2535312 - RNA, 19 nt, Artificial Sequence
  Description of Artificial Sequence: Synthetic oligonucleotide
ucuuuaauagguauguauu

SEQ ID NO: 2535313 - RNA, 19 nt, Artificial Sequence
  Description of Artificial Sequence: Synthetic oligonucleotide
caaaauaaucagauauugc

SEQ ID NO: 2535314 - RNA, 19 nt, Artificial Sequence
  Description of Artificial Sequence: Synthetic oligonucleotide
uccagaaauccauuggugc

SEQ ID NO: 2535315 - RNA, 19 nt, Artificial Sequence
  Description of Artificial Sequence: Synthetic oligonucleotide
uccauuggugccaaaauaa

SEQ ID NO: 2535316 - RNA, 19 nt, Artificial Sequence
  Description of Artificial Sequence: Synthetic oligonucleotide
uuuccuucugacauugaug

SEQ ID NO: 2535317 - RNA, 19 nt, Artificial Sequence
  Description of Artificial Sequence: Synthetic oligonucleotide
uguguaucuccagaaaucc

SEQ ID NO: 2535318 - RNA, 19 nt, Artificial Sequence
  Description of Artificial Sequence: Synthetic oligonucleotide
auuggugccaaaauaauca

SEQ ID NO: 2535319 - RNA, 19 nt, Artificial Sequence
  Description of Artificial Sequence: Synthetic oligonucleotide
ucugacauugaugaccugc

SEQ ID NO: 2535320 - RNA, 19 nt, Artificial Sequence
  Description of Artificial Sequence: Synthetic oligonucleotide
aaauaaucagauauugcaa

SEQ ID NO: 2535321 - RNA, 19 nt, Artificial Sequence
  Description of Artificial Sequence: Synthetic oligonucleotide
agauauugcaaugauauuu

SEQ ID NO: 2535322 - RNA, 19 nt, Artificial Sequence
  Description of Artificial Sequence: Synthetic oligonucleotide
uuuaauagguauguauuuc

SEQ ID NO: 2535323 - RNA, 19 nt, Artificial Sequence
  Description of Artificial Sequence: Synthetic oligonucleotide
ucuccagaaauccauuggu

SEQ ID NO: 2535324 - RNA, 19 nt, Artificial Sequence
  Description of Artificial Sequence: Synthetic oligonucleotide
aaucagauauugcaaugau

SEQ ID NO: 2535325 - RNA, 19 nt, Artificial Sequence
  Description of Artificial Sequence: Synthetic oligonucleotide
gacauugaugaccugcaug

SEQ ID NO: 2535326 - RNA, 19 nt, Artificial Sequence
  Description of Artificial Sequence: Synthetic oligonucleotide
aucuccagaaauccauugg

SEQ ID NO: 2535327 - RNA, 19 nt, Artificial Sequence
  Description of Artificial Sequence: Synthetic oligonucleotide
agagcuggucuuuaauagg

SEQ ID NO: 2535328 - RNA, 19 nt, Artificial Sequence
  Description of Artificial Sequence: Synthetic oligonucleotide
uaaucagauauugcaauga

SEQ ID NO: 2535329 - RNA, 19 nt, Artificial Sequence
  Description of Artificial Sequence: Synthetic oligonucleotide
aauccauuggugccaaaau

SEQ ID NO: 2535330 - RNA, 19 nt, Artificial Sequence
  Description of Artificial Sequence: Synthetic oligonucleotide
uaauagguauguauuucaa

SEQ ID NO: 2535331 - RNA, 19 nt, Artificial Sequence
  Description of Artificial Sequence: Synthetic oligonucleotide
uaucuccagaaauccauug

SEQ ID NO: 2535332 - RNA, 19 nt, Artificial Sequence
  Description of Artificial Sequence: Synthetic oligonucleotide
uuggugccaaaauaaucag

SEQ ID NO: 2535333 - RNA, 19 nt, Artificial Sequence
  Description of Artificial Sequence: Synthetic oligonucleotide
guauguauuucaaagguaa

SEQ ID NO: 2535334 - RNA, 19 nt, Artificial Sequence
  Description of Artificial Sequence: Synthetic oligonucleotide
cauuggugccaaaauaauc

SEQ ID NO: 2535335 - RNA, 19 nt, Artificial Sequence
  Description of Artificial Sequence: Synthetic oligonucleotide
uauguauuucaaagguaau

SEQ ID NO: 2535336 - RNA, 19 nt, Artificial Sequence
  Description of Artificial Sequence: Synthetic oligonucleotide
ugacagacuuuccuucuga

SEQ ID NO: 2535337 - RNA, 19 nt, Artificial Sequence
  Description of Artificial Sequence: Synthetic oligonucleotide
cuguguaucuccagaaauc

SEQ ID NO: 2535338 - RNA, 19 nt, Artificial Sequence
  Description of Artificial Sequence: Synthetic oligonucleotide
cuggucuuuaauagguaug

SEQ ID NO: 2535339 - RNA, 19 nt, Artificial Sequence
  Description of Artificial Sequence: Synthetic oligonucleotide
uggugccaaaauaaucaga

SEQ ID NO: 2535340 - RNA, 19 nt, Artificial Sequence
  Description of Artificial Sequence: Synthetic oligonucleotide
cuccagaaauccauuggug

SEQ ID NO: 2535341 - RNA, 19 nt, Artificial Sequence
  Description of Artificial Sequence: Synthetic oligonucleotide
acagacuuuccuucugaca

SEQ ID NO: 2535342 - RNA, 19 nt, Artificial Sequence
  Description of Artificial Sequence: Synthetic oligonucleotide
gacuuuccuucugacauug

SEQ ID NO: 2535343 - RNA, 19 nt, Artificial Sequence
  Description of Artificial Sequence: Synthetic oligonucleotide
ccagaaauccauuggugcc

SEQ ID NO: 2535344 - RNA, 19 nt, Artificial Sequence
  Description of Artificial Sequence: Synthetic oligonucleotide
gacagacuuuccuucugac

SEQ ID NO: 2535345 - RNA, 19 nt, Artificial Sequence
  Description of Artificial Sequence: Synthetic oligonucleotide
gucuuuaauagguauguau

SEQ ID NO: 2535346 - RNA, 19 nt, Artificial Sequence
  Description of Artificial Sequence: Synthetic oligonucleotide
ccuucugacauugaugacc

SEQ ID NO: 2535347 - RNA, 19 nt, Artificial Sequence
  Description of Artificial Sequence: Synthetic oligonucleotide
auccauuggugccaaaaua

SEQ ID NO: 2535348 - RNA, 19 nt, Artificial Sequence
  Description of Artificial Sequence: Synthetic oligonucleotide
ugcuguguaucuccagaaa

SEQ ID NO: 2535349 - RNA, 19 nt, Artificial Sequence
  Description of Artificial Sequence: Synthetic oligonucleotide
cugacauugaugaccugca

SEQ ID NO: 2535350 - RNA, 19 nt, Artificial Sequence
  Description of Artificial Sequence: Synthetic oligonucleotide
gauauugcaaugauauuuu

SEQ ID NO: 2535351 - RNA, 19 nt, Artificial Sequence
  Description of Artificial Sequence: Synthetic oligonucleotide
cagacuuuccuucugacau

SEQ ID NO: 2535352 - RNA, 19 nt, Artificial Sequence
  Description of Artificial Sequence: Synthetic oligonucleotide
cuucugacauugaugaccu

SEQ ID NO: 2535353 - RNA, 19 nt, Artificial Sequence
  Description of Artificial Sequence: Synthetic oligonucleotide
cuuuaauagguauguauuu

SEQ ID NO: 2535354 - RNA, 19 nt, Artificial Sequence
  Description of Artificial Sequence: Synthetic oligonucleotide
ugacauugaugaccugcau

SEQ ID NO: 2535355 - RNA, 19 nt, Artificial Sequence
  Description of Artificial Sequence: Synthetic oligonucleotide
aucagauauugcaaugaua

SEQ ID NO: 2535356 - RNA, 19 nt, Artificial Sequence
  Description of Artificial Sequence: Synthetic oligonucleotide
ggugccaaaauaaucagau

SEQ ID NO: 2535357 - RNA, 19 nt, Artificial Sequence
  Description of Artificial Sequence: Synthetic oligonucleotide
cagaaauccauuggugcca

SEQ ID NO: 2535358 - RNA, 19 nt, Artificial Sequence
  Description of Artificial Sequence: Synthetic oligonucleotide
uccuucugacauugaugac

SEQ ID NO: 2535359 - RNA, 19 nt, Artificial Sequence
  Description of Artificial Sequence: Synthetic oligonucleotide
agacuuuccuucugacauu

SEQ ID NO: 2535360 - RNA, 19 nt, Artificial Sequence
  Description of Artificial Sequence: Synthetic oligonucleotide
agaaauccauuggugccaa

SEQ ID NO: 2535361 - RNA, 19 nt, Artificial Sequence
  Description of Artificial Sequence: Synthetic oligonucleotide
gugcuguguaucuccagaa

SEQ ID NO: 2535362 - RNA, 19 nt, Artificial Sequence
  Description of Artificial Sequence: Synthetic oligonucleotide
gguauguauuucaaaggua

SEQ ID NO: 2535363 - RNA, 19 nt, Artificial Sequence
  Description of Artificial Sequence: Synthetic oligonucleotide
gugccaaaauaaucagaua

SEQ ID NO: 2535364 - RNA, 19 nt, Artificial Sequence
  Description of Artificial Sequence: Synthetic oligonucleotide
gcuguguaucuccagaaau

SEQ ID NO: 2535365 - RNA, 19 nt, Artificial Sequence
  Description of Artificial Sequence: Synthetic oligonucleotide
gcuggucuuuaauagguau

SEQ ID NO: 2535366 - RNA, 19 nt, Artificial Sequence
  Description of Artificial Sequence: Synthetic oligonucleotide
gaaauccauuggugccaaa

SEQ ID NO: 2535367 - RNA, 19 nt, Artificial Sequence
  Description of Artificial Sequence: Synthetic oligonucleotide
agcuggucuuuaauaggua

SEQ ID NO: 2535368 - RNA, 19 nt, Artificial Sequence
  Description of Artificial Sequence: Synthetic oligonucleotide
cagauauugcaaugauauu

SEQ ID NO: 2535369 - RNA, 19 nt, Artificial Sequence
  Description of Artificial Sequence: Synthetic oligonucleotide
acuuuccuucugacauuga

SEQ ID NO: 2535370 - RNA, 19 nt, Artificial Sequence
  Description of Artificial Sequence: Synthetic oligonucleotide
guaucuccagaaauccauu

SEQ ID NO: 2535371 - RNA, 19 nt, Artificial Sequence
  Description of Artificial Sequence: Synthetic oligonucleotide
ggucuuuaauagguaugua

SEQ ID NO: 2535372 - RNA, 19 nt, Artificial Sequence
  Description of Artificial Sequence: Synthetic oligonucleotide
ccauuggugccaaaauaau

SEQ ID NO: 2535373 - RNA, 19 nt, Artificial Sequence
  Description of Artificial Sequence: Synthetic oligonucleotide
aaagacauaauucauccgg

SEQ ID NO: 2535374 - RNA, 19 nt, Artificial Sequence
  Description of Artificial Sequence: Synthetic oligonucleotide
aaugcauuaauauacauau

SEQ ID NO: 2535375 - RNA, 19 nt, Artificial Sequence
  Description of Artificial Sequence: Synthetic oligonucleotide
uaauauacauauuauagca

SEQ ID NO: 2535376 - RNA, 19 nt, Artificial Sequence
  Description of Artificial Sequence: Synthetic oligonucleotide
agcaacaucauagaaaucc

SEQ ID NO: 2535377 - RNA, 19 nt, Artificial Sequence
  Description of Artificial Sequence: Synthetic oligonucleotide
auauacauauuauagcaac

SEQ ID NO: 2535378 - RNA, 19 nt, Artificial Sequence
  Description of Artificial Sequence: Synthetic oligonucleotide
uuaauauacauauuauagc

SEQ ID NO: 2535379 - RNA, 19 nt, Artificial Sequence
  Description of Artificial Sequence: Synthetic oligonucleotide
ucuagcaacaaaauguacc

SEQ ID NO: 2535380 - RNA, 19 nt, Artificial Sequence
  Description of Artificial Sequence: Synthetic oligonucleotide
ugaaaugaccuacacauca

SEQ ID NO: 2535381 - RNA, 19 nt, Artificial Sequence
  Description of Artificial Sequence: Synthetic oligonucleotide
aauguugcgguacuggaag

SEQ ID NO: 2535382 - RNA, 19 nt, Artificial Sequence
  Description of Artificial Sequence: Synthetic oligonucleotide
agauuaaggaugcuaaagg

SEQ ID NO: 2535383 - RNA, 19 nt, Artificial Sequence
  Description of Artificial Sequence: Synthetic oligonucleotide
uuacgcagcaugaugaggg

SEQ ID NO: 2535384 - RNA, 19 nt, Artificial Sequence
  Description of Artificial Sequence: Synthetic oligonucleotide
aaggacuugcucuagcaac

SEQ ID NO: 2535385 - RNA, 19 nt, Artificial Sequence
  Description of Artificial Sequence: Synthetic oligonucleotide
uuagccacugaguaggugg

SEQ ID NO: 2535386 - RNA, 19 nt, Artificial Sequence
  Description of Artificial Sequence: Synthetic oligonucleotide
uuaaggaugcuaaaggcga

SEQ ID NO: 2535387 - RNA, 19 nt, Artificial Sequence
  Description of Artificial Sequence: Synthetic oligonucleotide
aacagugcaccauuguggg

SEQ ID NO: 2535388 - RNA, 19 nt, Artificial Sequence
  Description of Artificial Sequence: Synthetic oligonucleotide
augaccaugauccucuugg

SEQ ID NO: 2535389 - RNA, 19 nt, Artificial Sequence
  Description of Artificial Sequence: Synthetic oligonucleotide
gauuaaggaugcuaaaggc

SEQ ID NO: 2535390 - RNA, 19 nt, Artificial Sequence
  Description of Artificial Sequence: Synthetic oligonucleotide
aaaagacauaauucauccg

SEQ ID NO: 2535391 - RNA, 19 nt, Artificial Sequence
  Description of Artificial Sequence: Synthetic oligonucleotide
uauagcaacaucauagaaa

SEQ ID NO: 2535392 - RNA, 19 nt, Artificial Sequence
  Description of Artificial Sequence: Synthetic oligonucleotide
auagcaacaucauagaaau

SEQ ID NO: 2535393 - RNA, 19 nt, Artificial Sequence
  Description of Artificial Sequence: Synthetic oligonucleotide
ugaccuacacaucauggcg

SEQ ID NO: 2535394 - RNA, 19 nt, Artificial Sequence
  Description of Artificial Sequence: Synthetic oligonucleotide
cuagcaacaaaauguaccc

SEQ ID NO: 2535395 - RNA, 19 nt, Artificial Sequence
  Description of Artificial Sequence: Synthetic oligonucleotide
aaggcgaugacauucugug

SEQ ID NO: 2535396 - RNA, 19 nt, Artificial Sequence
  Description of Artificial Sequence: Synthetic oligonucleotide
accaugauccucuuggugg

SEQ ID NO: 2535397 - RNA, 19 nt, Artificial Sequence
  Description of Artificial Sequence: Synthetic oligonucleotide
gacauaauucauccgggcg

SEQ ID NO: 2535398 - RNA, 19 nt, Artificial Sequence
  Description of Artificial Sequence: Synthetic oligonucleotide
uggacugaugagauuaagg

SEQ ID NO: 2535399 - RNA, 19 nt, Artificial Sequence
  Description of Artificial Sequence: Synthetic oligonucleotide
acaaaauguacccauauuu

SEQ ID NO: 2535400 - RNA, 19 nt, Artificial Sequence
  Description of Artificial Sequence: Synthetic oligonucleotide
aaacagugcaccauugugg

SEQ ID NO: 2535401 - RNA, 19 nt, Artificial Sequence
  Description of Artificial Sequence: Synthetic oligonucleotide
uuugcaucguacuuggucu

SEQ ID NO: 2535402 - RNA, 19 nt, Artificial Sequence
  Description of Artificial Sequence: Synthetic oligonucleotide
aaugaccuacacaucaugg

SEQ ID NO: 2535403 - RNA, 19 nt, Artificial Sequence
  Description of Artificial Sequence: Synthetic oligonucleotide
uauacauauuauagcaaca

SEQ ID NO: 2535404 - RNA, 19 nt, Artificial Sequence
  Description of Artificial Sequence: Synthetic oligonucleotide
augaccuacacaucauggc

SEQ ID NO: 2535405 - RNA, 19 nt, Artificial Sequence
  Description of Artificial Sequence: Synthetic oligonucleotide
ucaggucugauguagacac

SEQ ID NO: 2535406 - RNA, 19 nt, Artificial Sequence
  Description of Artificial Sequence: Synthetic oligonucleotide
acauauuauagcaacauca

SEQ ID NO: 2535407 - RNA, 19 nt, Artificial Sequence
  Description of Artificial Sequence: Synthetic oligonucleotide
acugaugagauuaaggaug

SEQ ID NO: 2535408 - RNA, 19 nt, Artificial Sequence
  Description of Artificial Sequence: Synthetic oligonucleotide
uacagaaagacgccaagga

SEQ ID NO: 2535409 - RNA, 19 nt, Artificial Sequence
  Description of Artificial Sequence: Synthetic oligonucleotide
agacauaauucauccgggc

SEQ ID NO: 2535410 - RNA, 19 nt, Artificial Sequence
  Description of Artificial Sequence: Synthetic oligonucleotide
acaucauggcgacugaggg

SEQ ID NO: 2535411 - RNA, 19 nt, Artificial Sequence
  Description of Artificial Sequence: Synthetic oligonucleotide
ggcauaggaguucagaugg

SEQ ID NO: 2535412 - RNA, 19 nt, Artificial Sequence
  Description of Artificial Sequence: Synthetic oligonucleotide
aaaguugcagaauccgcug

SEQ ID NO: 2535413 - RNA, 19 nt, Artificial Sequence
  Description of Artificial Sequence: Synthetic oligonucleotide
aaaugaccuacacaucaug

SEQ ID NO: 2535414 - RNA, 19 nt, Artificial Sequence
  Description of Artificial Sequence: Synthetic oligonucleotide
uguacccauauuuugaaau

SEQ ID NO: 2535415 - RNA, 19 nt, Artificial Sequence
  Description of Artificial Sequence: Synthetic oligonucleotide
accauuguggggcuucucc

SEQ ID NO: 2535416 - RNA, 19 nt, Artificial Sequence
  Description of Artificial Sequence: Synthetic oligonucleotide
uggaguuaggaaaaggaaa

SEQ ID NO: 2535417 - RNA, 19 nt, Artificial Sequence
  Description of Artificial Sequence: Synthetic oligonucleotide
gagauuaaggaugcuaaag

SEQ ID NO: 2535418 - RNA, 19 nt, Artificial Sequence
  Description of Artificial Sequence: Synthetic oligonucleotide
caugaugagggacacagug

SEQ ID NO: 2535419 - RNA, 19 nt, Artificial Sequence
  Description of Artificial Sequence: Synthetic oligonucleotide
cagaaagacgccaaggaug

SEQ ID NO: 2535420 - RNA, 19 nt, Artificial Sequence
  Description of Artificial Sequence: Synthetic oligonucleotide
ugugaggagaauguugcgg

SEQ ID NO: 2535421 - RNA, 19 nt, Artificial Sequence
  Description of Artificial Sequence: Synthetic oligonucleotide
uauuuugaaaugaccuaca

SEQ ID NO: 2535422 - RNA, 19 nt, Artificial Sequence
  Description of Artificial Sequence: Synthetic oligonucleotide
acauaauucauccgggcgu

SEQ ID NO: 2535423 - RNA, 19 nt, Artificial Sequence
  Description of Artificial Sequence: Synthetic oligonucleotide
ugcaaaguugcagaauccg

SEQ ID NO: 2535424 - RNA, 19 nt, Artificial Sequence
  Description of Artificial Sequence: Synthetic oligonucleotide
agaaagacgccaaggaugg

SEQ ID NO: 2535425 - RNA, 19 nt, Artificial Sequence
  Description of Artificial Sequence: Synthetic oligonucleotide
uguuguacagaaagacgcc

SEQ ID NO: 2535426 - RNA, 19 nt, Artificial Sequence
  Description of Artificial Sequence: Synthetic oligonucleotide
ggucuuguuguacagaaag

SEQ ID NO: 2535427 - RNA, 19 nt, Artificial Sequence
  Description of Artificial Sequence: Synthetic oligonucleotide
agcaugaugagggacacag

SEQ ID NO: 2535428 - RNA, 19 nt, Artificial Sequence
  Description of Artificial Sequence: Synthetic oligonucleotide
uggauuacgcagcaugaug

SEQ ID NO: 2535429 - RNA, 19 nt, Artificial Sequence
  Description of Artificial Sequence: Synthetic oligonucleotide
ugguuugcaucguacuugg

SEQ ID NO: 2535430 - RNA, 19 nt, Artificial Sequence
  Description of Artificial Sequence: Synthetic oligonucleotide
uuauagcaacaucauagaa

SEQ ID NO: 2535431 - RNA, 19 nt, Artificial Sequence
  Description of Artificial Sequence: Synthetic oligonucleotide
ucguacuuggucuuguugu

SEQ ID NO: 2535432 - RNA, 19 nt, Artificial Sequence
  Description of Artificial Sequence: Synthetic oligonucleotide
uucugugcaaaguugcaga

SEQ ID NO: 2535433 - RNA, 19 nt, Artificial Sequence
  Description of Artificial Sequence: Synthetic oligonucleotide
ugaugagggacacagugau

SEQ ID NO: 2535434 - RNA, 19 nt, Artificial Sequence
  Description of Artificial Sequence: Synthetic oligonucleotide
aauauacauauuauagcaa

SEQ ID NO: 2535435 - RNA, 19 nt, Artificial Sequence
  Description of Artificial Sequence: Synthetic oligonucleotide
gaugcuaaaggcgaugaca

SEQ ID NO: 2535436 - RNA, 19 nt, Artificial Sequence
  Description of Artificial Sequence: Synthetic oligonucleotide
aguucagauggcucuggcg

SEQ ID NO: 2535437 - RNA, 19 nt, Artificial Sequence
  Description of Artificial Sequence: Synthetic oligonucleotide
aaagacgccaaggauggca

SEQ ID NO: 2535438 - RNA, 19 nt, Artificial Sequence
  Description of Artificial Sequence: Synthetic oligonucleotide
aacuggaguuaggaaaagg

SEQ ID NO: 2535439 - RNA, 19 nt, Artificial Sequence
  Description of Artificial Sequence: Synthetic oligonucleotide
gagaauguugcgguacugg

SEQ ID NO: 2535440 - RNA, 19 nt, Artificial Sequence
  Description of Artificial Sequence: Synthetic oligonucleotide
uaggaguucagauggcucu

SEQ ID NO: 2535441 - RNA, 19 nt, Artificial Sequence
  Description of Artificial Sequence: Synthetic oligonucleotide
aacaucauagaaauccaaa

SEQ ID NO: 2535442 - RNA, 19 nt, Artificial Sequence
  Description of Artificial Sequence: Synthetic oligonucleotide
uucauccgggcguuggugg

SEQ ID NO: 2535443 - RNA, 19 nt, Artificial Sequence
  Description of Artificial Sequence: Synthetic oligonucleotide
uuggucuuguuguacagaa

SEQ ID NO: 2535444 - RNA, 19 nt, Artificial Sequence
  Description of Artificial Sequence: Synthetic oligonucleotide
augagggacacagugauga

SEQ ID NO: 2535445 - RNA, 19 nt, Artificial Sequence
  Description of Artificial Sequence: Synthetic oligonucleotide
cacaucauggcgacugagg

SEQ ID NO: 2535446 - RNA, 19 nt, Artificial Sequence
  Description of Artificial Sequence: Synthetic oligonucleotide
uggucugugaggagaaugu

SEQ ID NO: 2535447 - RNA, 19 nt, Artificial Sequence
  Description of Artificial Sequence: Synthetic oligonucleotide
ugacauucugugcaaaguu

SEQ ID NO: 2535448 - RNA, 19 nt, Artificial Sequence
  Description of Artificial Sequence: Synthetic oligonucleotide
guacccauauuuugaaaug

SEQ ID NO: 2535449 - RNA, 19 nt, Artificial Sequence
  Description of Artificial Sequence: Synthetic oligonucleotide
uguccagggccacugagac

SEQ ID NO: 2535450 - RNA, 19 nt, Artificial Sequence
  Description of Artificial Sequence: Synthetic oligonucleotide
guuugcaucguacuugguc

SEQ ID NO: 2535451 - RNA, 19 nt, Artificial Sequence
  Description of Artificial Sequence: Synthetic oligonucleotide
uaauucauccgggcguugg

SEQ ID NO: 2535452 - RNA, 19 nt, Artificial Sequence
  Description of Artificial Sequence: Synthetic oligonucleotide
agugaugaccaugauccuc

SEQ ID NO: 2535453 - RNA, 19 nt, Artificial Sequence
  Description of Artificial Sequence: Synthetic oligonucleotide
accuacacaucauggcgac

SEQ ID NO: 2535454 - RNA, 19 nt, Artificial Sequence
  Description of Artificial Sequence: Synthetic oligonucleotide
gaaauggucugugaggaga

SEQ ID NO: 2535455 - RNA, 19 nt, Artificial Sequence
  Description of Artificial Sequence: Synthetic oligonucleotide
ggacugaugagauuaagga

SEQ ID NO: 2535456 - RNA, 19 nt, Artificial Sequence
  Description of Artificial Sequence: Synthetic oligonucleotide
agaauguugcgguacugga

SEQ ID NO: 2535457 - RNA, 19 nt, Artificial Sequence
  Description of Artificial Sequence: Synthetic oligonucleotide
ucuugguggcauuagccac

SEQ ID NO: 2535458 - RNA, 19 nt, Artificial Sequence
  Description of Artificial Sequence: Synthetic oligonucleotide
gguggcauuagccacugag

SEQ ID NO: 2535459 - RNA, 19 nt, Artificial Sequence
  Description of Artificial Sequence: Synthetic oligonucleotide
aucauggcgacugagggca

SEQ ID NO: 2535460 - RNA, 19 nt, Artificial Sequence
  Description of Artificial Sequence: Synthetic oligonucleotide
gacauucugugcaaaguug

SEQ ID NO: 2535461 - RNA, 19 nt, Artificial Sequence
  Description of Artificial Sequence: Synthetic oligonucleotide
uggcauuagccacugagua

SEQ ID NO: 2535462 - RNA, 19 nt, Artificial Sequence
  Description of Artificial Sequence: Synthetic oligonucleotide
ugauguagacacugggagu

SEQ ID NO: 2535463 - RNA, 19 nt, Artificial Sequence
  Description of Artificial Sequence: Synthetic oligonucleotide
guacagaaagacgccaagg

SEQ ID NO: 2535464 - RNA, 19 nt, Artificial Sequence
  Description of Artificial Sequence: Synthetic oligonucleotide
uccgcugaccgcuaagagc

SEQ ID NO: 2535465 - RNA, 19 nt, Artificial Sequence
  Description of Artificial Sequence: Synthetic oligonucleotide
cuacacaucauggcgacug

SEQ ID NO: 2535466 - RNA, 19 nt, Artificial Sequence
  Description of Artificial Sequence: Synthetic oligonucleotide
aaguugcagaauccgcuga

SEQ ID NO: 2535467 - RNA, 19 nt, Artificial Sequence
  Description of Artificial Sequence: Synthetic oligonucleotide
uacccauauuuugaaauga

SEQ ID NO: 2535468 - RNA, 19 nt, Artificial Sequence
  Description of Artificial Sequence: Synthetic oligonucleotide
uggaagucaccuugcuggg

SEQ ID NO: 2535469 - RNA, 19 nt, Artificial Sequence
  Description of Artificial Sequence: Synthetic oligonucleotide
acagaaagacgccaaggau

SEQ ID NO: 2535470 - RNA, 19 nt, Artificial Sequence
  Description of Artificial Sequence: Synthetic oligonucleotide
gaagucaccuugcugggga

SEQ ID NO: 2535471 - RNA, 19 nt, Artificial Sequence
  Description of Artificial Sequence: Synthetic oligonucleotide
aauucauccgggcguuggu

SEQ ID NO: 2535472 - RNA, 19 nt, Artificial Sequence
  Description of Artificial Sequence: Synthetic oligonucleotide
ugagauuaaggaugcuaaa

SEQ ID NO: 2535473 - RNA, 19 nt, Artificial Sequence
  Description of Artificial Sequence: Synthetic oligonucleotide
uguagacacugggaguagg

SEQ ID NO: 2535474 - RNA, 19 nt, Artificial Sequence
  Description of Artificial Sequence: Synthetic oligonucleotide
uuguacagaaagacgccaa

SEQ ID NO: 2535475 - RNA, 19 nt, Artificial Sequence
  Description of Artificial Sequence: Synthetic oligonucleotide
cagugcaccauuguggggc

SEQ ID NO: 2535476 - RNA, 19 nt, Artificial Sequence
  Description of Artificial Sequence: Synthetic oligonucleotide
auuacgcagcaugaugagg

SEQ ID NO: 2535477 - RNA, 19 nt, Artificial Sequence
  Description of Artificial Sequence: Synthetic oligonucleotide
agucaucaugcccagcaca

SEQ ID NO: 2535478 - RNA, 19 nt, Artificial Sequence
  Description of Artificial Sequence: Synthetic oligonucleotide
auucugugcaaaguugcag

SEQ ID NO: 2535479 - RNA, 19 nt, Artificial Sequence
  Description of Artificial Sequence: Synthetic oligonucleotide
cauauuuugaaaugaccua

SEQ ID NO: 2535480 - RNA, 19 nt, Artificial Sequence
  Description of Artificial Sequence: Synthetic oligonucleotide
acuuggucuuguuguacag

SEQ ID NO: 2535481 - RNA, 19 nt, Artificial Sequence
  Description of Artificial Sequence: Synthetic oligonucleotide
aucguacuuggucuuguug

SEQ ID NO: 2535482 - RNA, 19 nt, Artificial Sequence
  Description of Artificial Sequence: Synthetic oligonucleotide
augagauuaaggaugcuaa

SEQ ID NO: 2535483 - RNA, 19 nt, Artificial Sequence
  Description of Artificial Sequence: Synthetic oligonucleotide
gaugagauuaaggaugcua

SEQ ID NO: 2535484 - RNA, 19 nt, Artificial Sequence
  Description of Artificial Sequence: Synthetic oligonucleotide
gauguagacacugggagua

SEQ ID NO: 2535485 - RNA, 19 nt, Artificial Sequence
  Description of Artificial Sequence: Synthetic oligonucleotide
acccauauuuugaaaugac

SEQ ID NO: 2535486 - RNA, 19 nt, Artificial Sequence
  Description of Artificial Sequence: Synthetic oligonucleotide
auggcagucaucaugccca

SEQ ID NO: 2535487 - RNA, 19 nt, Artificial Sequence
  Description of Artificial Sequence: Synthetic oligonucleotide
ucugugcaaaguugcagaa

SEQ ID NO: 2535488 - RNA, 19 nt, Artificial Sequence
  Description of Artificial Sequence: Synthetic oligonucleotide
ugcagaauccgcugaccgc

SEQ ID NO: 2535489 - RNA, 19 nt, Artificial Sequence
  Description of Artificial Sequence: Synthetic oligonucleotide
uugaaaugaccuacacauc

SEQ ID NO: 2535490 - RNA, 19 nt, Artificial Sequence
  Description of Artificial Sequence: Synthetic oligonucleotide
gacacugggaguagguggc

SEQ ID NO: 2535491 - RNA, 19 nt, Artificial Sequence
  Description of Artificial Sequence: Synthetic oligonucleotide
agggcauaggaguucagau

SEQ ID NO: 2535492 - RNA, 19 nt, Artificial Sequence
  Description of Artificial Sequence: Synthetic oligonucleotide
aaaggcgaugacauucugu

SEQ ID NO: 2535493 - RNA, 19 nt, Artificial Sequence
  Description of Artificial Sequence: Synthetic oligonucleotide
gaccaugauccucuuggug

SEQ ID NO: 2535494 - RNA, 19 nt, Artificial Sequence
  Description of Artificial Sequence: Synthetic oligonucleotide
cacagugaugaccaugauc

SEQ ID NO: 2535495 - RNA, 19 nt, Artificial Sequence
  Description of Artificial Sequence: Synthetic oligonucleotide
uaaaggcgaugacauucug

SEQ ID NO: 2535496 - RNA, 19 nt, Artificial Sequence
  Description of Artificial Sequence: Synthetic oligonucleotide
aaggaugcuaaaggcgaug

SEQ ID NO: 2535497 - RNA, 19 nt, Artificial Sequence
  Description of Artificial Sequence: Synthetic oligonucleotide
caucauggcgacugagggc

SEQ ID NO: 2535498 - RNA, 19 nt, Artificial Sequence
  Description of Artificial Sequence: Synthetic oligonucleotide
aauccgcugaccgcuaaga

SEQ ID NO: 2535499 - RNA, 19 nt, Artificial Sequence
  Description of Artificial Sequence: Synthetic oligonucleotide
aguguccagggccacugag

SEQ ID NO: 2535500 - RNA, 19 nt, Artificial Sequence
  Description of Artificial Sequence: Synthetic oligonucleotide
aggucugauguagacacug

SEQ ID NO: 2535501 - RNA, 19 nt, Artificial Sequence
  Description of Artificial Sequence: Synthetic oligonucleotide
accgcuaagagcagcagug

SEQ ID NO: 2535502 - RNA, 19 nt, Artificial Sequence
  Description of Artificial Sequence: Synthetic oligonucleotide
cccauauuuugaaaugacc

SEQ ID NO: 2535503 - RNA, 19 nt, Artificial Sequence
  Description of Artificial Sequence: Synthetic oligonucleotide
cucuagcaacaaaauguac

SEQ ID NO: 2535504 - RNA, 19 nt, Artificial Sequence
  Description of Artificial Sequence: Synthetic oligonucleotide
cugguuugcaucguacuug

SEQ ID NO: 2535505 - RNA, 19 nt, Artificial Sequence
  Description of Artificial Sequence: Synthetic oligonucleotide
ugcgguacuggaagucacc

SEQ ID NO: 2535506 - RNA, 19 nt, Artificial Sequence
  Description of Artificial Sequence: Synthetic oligonucleotide
ggcgaugacauucugugca

SEQ ID NO: 2535507 - RNA, 19 nt, Artificial Sequence
  Description of Artificial Sequence: Synthetic oligonucleotide
ugcugguuugcaucguacu

SEQ ID NO: 2535508 - RNA, 19 nt, Artificial Sequence
  Description of Artificial Sequence: Synthetic oligonucleotide
gagggacacagugaugacc

SEQ ID NO: 2535509 - RNA, 19 nt, Artificial Sequence
  Description of Artificial Sequence: Synthetic oligonucleotide
acaacuggaguuaggaaaa

SEQ ID NO: 2535510 - RNA, 19 nt, Artificial Sequence
  Description of Artificial Sequence: Synthetic oligonucleotide
uucuccacugggcuccgca

SEQ ID NO: 2535511 - RNA, 19 nt, Artificial Sequence
  Description of Artificial Sequence: Synthetic oligonucleotide
ugcucucugcugcucaggu

SEQ ID NO: 2535512 - RNA, 19 nt, Artificial Sequence
  Description of Artificial Sequence: Synthetic oligonucleotide
uaaggaugcuaaaggcgau

SEQ ID NO: 2535513 - RNA, 19 nt, Artificial Sequence
  Description of Artificial Sequence: Synthetic oligonucleotide
cauuguggggcuucuccac

SEQ ID NO: 2535514 - RNA, 19 nt, Artificial Sequence
  Description of Artificial Sequence: Synthetic oligonucleotide
gaggagaauguugcgguac

SEQ ID NO: 2535515 - RNA, 19 nt, Artificial Sequence
  Description of Artificial Sequence: Synthetic oligonucleotide
gcuaaaggcgaugacauuc

SEQ ID NO: 2535516 - RNA, 19 nt, Artificial Sequence
  Description of Artificial Sequence: Synthetic oligonucleotide
auggucugugaggagaaug

SEQ ID NO: 2535517 - RNA, 19 nt, Artificial Sequence
  Description of Artificial Sequence: Synthetic oligonucleotide
augcuaaaggcgaugacau

SEQ ID NO: 2535518 - RNA, 19 nt, Artificial Sequence
  Description of Artificial Sequence: Synthetic oligonucleotide
uggggcuucuccacugggc

SEQ ID NO: 2535519 - RNA, 19 nt, Artificial Sequence
  Description of Artificial Sequence: Synthetic oligonucleotide
aggagaauguugcgguacu

SEQ ID NO: 2535520 - RNA, 19 nt, Artificial Sequence
  Description of Artificial Sequence: Synthetic oligonucleotide
ggcauuagccacugaguag

SEQ ID NO: 2535521 - RNA, 19 nt, Artificial Sequence
  Description of Artificial Sequence: Synthetic oligonucleotide
caaaguugcagaauccgcu

SEQ ID NO: 2535522 - RNA, 19 nt, Artificial Sequence
  Description of Artificial Sequence: Synthetic oligonucleotide
ucugccacaacuggaguua

SEQ ID NO: 2535523 - RNA, 19 nt, Artificial Sequence
  Description of Artificial Sequence: Synthetic oligonucleotide
aaauggucugugaggagaa

SEQ ID NO: 2535524 - RNA, 19 nt, Artificial Sequence
  Description of Artificial Sequence: Synthetic oligonucleotide
agguggacugaugagauua

SEQ ID NO: 2535525 - RNA, 19 nt, Artificial Sequence
  Description of Artificial Sequence: Synthetic oligonucleotide
auuguggggcuucuccacu

SEQ ID NO: 2535526 - RNA, 19 nt, Artificial Sequence
  Description of Artificial Sequence: Synthetic oligonucleotide
gaguucagauggcucuggc

SEQ ID NO: 2535527 - RNA, 19 nt, Artificial Sequence
  Description of Artificial Sequence: Synthetic oligonucleotide
gaauccgcugaccgcuaag

SEQ ID NO: 2535528 - RNA, 19 nt, Artificial Sequence
  Description of Artificial Sequence: Synthetic oligonucleotide
guuguacagaaagacgcca

SEQ ID NO: 2535529 - RNA, 19 nt, Artificial Sequence
  Description of Artificial Sequence: Synthetic oligonucleotide
acugagggcauaggaguuc

SEQ ID NO: 2535530 - RNA, 19 nt, Artificial Sequence
  Description of Artificial Sequence: Synthetic oligonucleotide
uacacaucauggcgacuga

SEQ ID NO: 2535531 - RNA, 19 nt, Artificial Sequence
  Description of Artificial Sequence: Synthetic oligonucleotide
guggcgccgagccugcugg

SEQ ID NO: 2535532 - RNA, 19 nt, Artificial Sequence
  Description of Artificial Sequence: Synthetic oligonucleotide
gagccugcugguuugcauc

SEQ ID NO: 2535533 - RNA, 19 nt, Artificial Sequence
  Description of Artificial Sequence: Synthetic oligonucleotide
ugccacaacuggaguuagg

SEQ ID NO: 2535534 - RNA, 19 nt, Artificial Sequence
  Description of Artificial Sequence: Synthetic oligonucleotide
ggaguuaggaaaaggaaaa

SEQ ID NO: 2535535 - RNA, 19 nt, Artificial Sequence
  Description of Artificial Sequence: Synthetic oligonucleotide
guagguggcgccgagccug

SEQ ID NO: 2535536 - RNA, 19 nt, Artificial Sequence
  Description of Artificial Sequence: Synthetic oligonucleotide
ggauuacgcagcaugauga

SEQ ID NO: 2535537 - RNA, 19 nt, Artificial Sequence
  Description of Artificial Sequence: Synthetic oligonucleotide
cuaagagcagcagugucca

SEQ ID NO: 2535538 - RNA, 19 nt, Artificial Sequence
  Description of Artificial Sequence: Synthetic oligonucleotide
ccauauuuugaaaugaccu

SEQ ID NO: 2535539 - RNA, 19 nt, Artificial Sequence
  Description of Artificial Sequence: Synthetic oligonucleotide
uugcgguacuggaagucac

SEQ ID NO: 2535540 - RNA, 19 nt, Artificial Sequence
  Description of Artificial Sequence: Synthetic oligonucleotide
acuggauuacgcagcauga

SEQ ID NO: 2535541 - RNA, 19 nt, Artificial Sequence
  Description of Artificial Sequence: Synthetic oligonucleotide
uccacugggcuccgcaggu

SEQ ID NO: 2535542 - RNA, 19 nt, Artificial Sequence
  Description of Artificial Sequence: Synthetic oligonucleotide
uuguggggcuucuccacug

SEQ ID NO: 2535543 - RNA, 19 nt, Artificial Sequence
  Description of Artificial Sequence: Synthetic oligonucleotide
auccgcugaccgcuaagag

SEQ ID NO: 2535544 - RNA, 19 nt, Artificial Sequence
  Description of Artificial Sequence: Synthetic oligonucleotide
ugcuggucacuggauuacg

SEQ ID NO: 2535545 - RNA, 19 nt, Artificial Sequence
  Description of Artificial Sequence: Synthetic oligonucleotide
ugaccaugauccucuuggu

SEQ ID NO: 2535546 - RNA, 19 nt, Artificial Sequence
  Description of Artificial Sequence: Synthetic oligonucleotide
caaaauguacccauauuuu

SEQ ID NO: 2535547 - RNA, 19 nt, Artificial Sequence
  Description of Artificial Sequence: Synthetic oligonucleotide
cauuggugcuggucacugg

SEQ ID NO: 2535548 - RNA, 19 nt, Artificial Sequence
  Description of Artificial Sequence: Synthetic oligonucleotide
gaccuacacaucauggcga

SEQ ID NO: 2535549 - RNA, 19 nt, Artificial Sequence
  Description of Artificial Sequence: Synthetic oligonucleotide
aggaugcuaaaggcgauga

SEQ ID NO: 2535550 - RNA, 19 nt, Artificial Sequence
  Description of Artificial Sequence: Synthetic oligonucleotide
gggcauaggaguucagaug

SEQ ID NO: 2535551 - RNA, 19 nt, Artificial Sequence
  Description of Artificial Sequence: Synthetic oligonucleotide
cugaguagguggacugaug

SEQ ID NO: 2535552 - RNA, 19 nt, Artificial Sequence
  Description of Artificial Sequence: Synthetic oligonucleotide
uacgcagcaugaugaggga

SEQ ID NO: 2535553 - RNA, 19 nt, Artificial Sequence
  Description of Artificial Sequence: Synthetic oligonucleotide
gcggccauacuggaaaugg

SEQ ID NO: 2535554 - RNA, 19 nt, Artificial Sequence
  Description of Artificial Sequence: Synthetic oligonucleotide
aggacuugcucuagcaaca

SEQ ID NO: 2535555 - RNA, 19 nt, Artificial Sequence
  Description of Artificial Sequence: Synthetic oligonucleotide
uguugcgguacuggaaguc

SEQ ID NO: 2535556 - RNA, 19 nt, Artificial Sequence
  Description of Artificial Sequence: Synthetic oligonucleotide
augaugagggacacaguga

SEQ ID NO: 2535557 - RNA, 19 nt, Artificial Sequence
  Description of Artificial Sequence: Synthetic oligonucleotide
cuccacugggcuccgcagg

SEQ ID NO: 2535558 - RNA, 19 nt, Artificial Sequence
  Description of Artificial Sequence: Synthetic oligonucleotide
uggucuuguuguacagaaa

SEQ ID NO: 2535559 - RNA, 19 nt, Artificial Sequence
  Description of Artificial Sequence: Synthetic oligonucleotide
cucucugcugcucaggucu

SEQ ID NO: 2535560 - RNA, 19 nt, Artificial Sequence
  Description of Artificial Sequence: Synthetic oligonucleotide
gucacuggauuacgcagca

SEQ ID NO: 2535561 - RNA, 19 nt, Artificial Sequence
  Description of Artificial Sequence: Synthetic oligonucleotide
gugcaaaguugcagaaucc

SEQ ID NO: 2535562 - RNA, 19 nt, Artificial Sequence
  Description of Artificial Sequence: Synthetic oligonucleotide
gaauguugcgguacuggaa

SEQ ID NO: 2535563 - RNA, 19 nt, Artificial Sequence
  Description of Artificial Sequence: Synthetic oligonucleotide
ugagggacacagugaugac

SEQ ID NO: 2535564 - RNA, 19 nt, Artificial Sequence
  Description of Artificial Sequence: Synthetic oligonucleotide
ugaggagaauguugcggua

SEQ ID NO: 2535565 - RNA, 19 nt, Artificial Sequence
  Description of Artificial Sequence: Synthetic oligonucleotide
auucauccgggcguuggug

SEQ ID NO: 2535566 - RNA, 19 nt, Artificial Sequence
  Description of Artificial Sequence: Synthetic oligonucleotide
gaugagggacacagugaug

SEQ ID NO: 2535567 - RNA, 19 nt, Artificial Sequence
  Description of Artificial Sequence: Synthetic oligonucleotide
acgcagcaugaugagggac

SEQ ID NO: 2535568 - RNA, 19 nt, Artificial Sequence
  Description of Artificial Sequence: Synthetic oligonucleotide
gcaaaguugcagaauccgc

SEQ ID NO: 2535569 - RNA, 19 nt, Artificial Sequence
  Description of Artificial Sequence: Synthetic oligonucleotide
gacgccaaggauggcaguc

SEQ ID NO: 2535570 - RNA, 19 nt, Artificial Sequence
  Description of Artificial Sequence: Synthetic oligonucleotide
ugcaucguacuuggucuug

SEQ ID NO: 2535571 - RNA, 19 nt, Artificial Sequence
  Description of Artificial Sequence: Synthetic oligonucleotide
ugagggcauaggaguucag

SEQ ID NO: 2535572 - RNA, 19 nt, Artificial Sequence
  Description of Artificial Sequence: Synthetic oligonucleotide
acacaucauggcgacugag

SEQ ID NO: 2535573 - RNA, 19 nt, Artificial Sequence
  Description of Artificial Sequence: Synthetic oligonucleotide
auuagccacugaguaggug

SEQ ID NO: 2535574 - RNA, 19 nt, Artificial Sequence
  Description of Artificial Sequence: Synthetic oligonucleotide
gagggcauaggaguucaga

SEQ ID NO: 2535575 - RNA, 19 nt, Artificial Sequence
  Description of Artificial Sequence: Synthetic oligonucleotide
uggugcuggucacuggauu

SEQ ID NO: 2535576 - RNA, 19 nt, Artificial Sequence
  Description of Artificial Sequence: Synthetic oligonucleotide
caccuugcuggggaaacag

SEQ ID NO: 2535577 - RNA, 19 nt, Artificial Sequence
  Description of Artificial Sequence: Synthetic oligonucleotide
guggacugaugagauuaag

SEQ ID NO: 2535578 - RNA, 19 nt, Artificial Sequence
  Description of Artificial Sequence: Synthetic oligonucleotide
guugcgguacuggaaguca

SEQ ID NO: 2535579 - RNA, 19 nt, Artificial Sequence
  Description of Artificial Sequence: Synthetic oligonucleotide
agugcaccauuguggggcu

SEQ ID NO: 2535580 - RNA, 19 nt, Artificial Sequence
  Description of Artificial Sequence: Synthetic oligonucleotide
ucuggcggccauacuggaa

SEQ ID NO: 2535581 - RNA, 19 nt, Artificial Sequence
  Description of Artificial Sequence: Synthetic oligonucleotide
auguugcgguacuggaagu

SEQ ID NO: 2535582 - RNA, 19 nt, Artificial Sequence
  Description of Artificial Sequence: Synthetic oligonucleotide
cugaccgcuaagagcagca

SEQ ID NO: 2535583 - RNA, 19 nt, Artificial Sequence
  Description of Artificial Sequence: Synthetic oligonucleotide
auggcgacugagggcauag

SEQ ID NO: 2535584 - RNA, 19 nt, Artificial Sequence
  Description of Artificial Sequence: Synthetic oligonucleotide
ugaccgcuaagagcagcag

SEQ ID NO: 2535585 - RNA, 19 nt, Artificial Sequence
  Description of Artificial Sequence: Synthetic oligonucleotide
gcuggggaaacagugcacc

SEQ ID NO: 2535586 - RNA, 19 nt, Artificial Sequence
  Description of Artificial Sequence: Synthetic oligonucleotide
acugaguagguggacugau

SEQ ID NO: 2535587 - RNA, 19 nt, Artificial Sequence
  Description of Artificial Sequence: Synthetic oligonucleotide
ccaaggauggcagucauca

SEQ ID NO: 2535588 - RNA, 19 nt, Artificial Sequence
  Description of Artificial Sequence: Synthetic oligonucleotide
gucuuguuguacagaaaga

SEQ ID NO: 2535589 - RNA, 19 nt, Artificial Sequence
  Description of Artificial Sequence: Synthetic oligonucleotide
ccaugauccucuugguggc

SEQ ID NO: 2535590 - RNA, 19 nt, Artificial Sequence
  Description of Artificial Sequence: Synthetic oligonucleotide
cuggcggccauacuggaaa

SEQ ID NO: 2535591 - RNA, 19 nt, Artificial Sequence
  Description of Artificial Sequence: Synthetic oligonucleotide
uggggaaacagugcaccau

SEQ ID NO: 2535592 - RNA, 19 nt, Artificial Sequence
  Description of Artificial Sequence: Synthetic oligonucleotide
ccgcugaccgcuaagagca

SEQ ID NO: 2535593 - RNA, 19 nt, Artificial Sequence
  Description of Artificial Sequence: Synthetic oligonucleotide
ccacugagacacauaggcc

SEQ ID NO: 2535594 - RNA, 19 nt, Artificial Sequence
  Description of Artificial Sequence: Synthetic oligonucleotide
cuugcucuagcaacaaaau

SEQ ID NO: 2535595 - RNA, 19 nt, Artificial Sequence
  Description of Artificial Sequence: Synthetic oligonucleotide
ugcaccauuguggggcuuc

SEQ ID NO: 2535596 - RNA, 19 nt, Artificial Sequence
  Description of Artificial Sequence: Synthetic oligonucleotide
aggaguucagauggcucug

SEQ ID NO: 2535597 - RNA, 19 nt, Artificial Sequence
  Description of Artificial Sequence: Synthetic oligonucleotide
ggucugauguagacacugg

SEQ ID NO: 2535598 - RNA, 19 nt, Artificial Sequence
  Description of Artificial Sequence: Synthetic oligonucleotide
auguagacacugggaguag

SEQ ID NO: 2535599 - RNA, 19 nt, Artificial Sequence
  Description of Artificial Sequence: Synthetic oligonucleotide
cugggaguagguggcgccg

SEQ ID NO: 2535600 - RNA, 19 nt, Artificial Sequence
  Description of Artificial Sequence: Synthetic oligonucleotide
aguagguggcgccgagccu

SEQ ID NO: 2535601 - RNA, 19 nt, Artificial Sequence
  Description of Artificial Sequence: Synthetic oligonucleotide
gcgacugagggcauaggag

SEQ ID NO: 2535602 - RNA, 19 nt, Artificial Sequence
  Description of Artificial Sequence: Synthetic oligonucleotide
gucaccuugcuggggaaac

SEQ ID NO: 2535603 - RNA, 19 nt, Artificial Sequence
  Description of Artificial Sequence: Synthetic oligonucleotide
aauggucugugaggagaau

SEQ ID NO: 2535604 - RNA, 19 nt, Artificial Sequence
  Description of Artificial Sequence: Synthetic oligonucleotide
uugcaucguacuuggucuu

SEQ ID NO: 2535605 - RNA, 19 nt, Artificial Sequence
  Description of Artificial Sequence: Synthetic oligonucleotide
ugcuaaaggcgaugacauu

SEQ ID NO: 2535606 - RNA, 19 nt, Artificial Sequence
  Description of Artificial Sequence: Synthetic oligonucleotide
ugaugagauuaaggaugcu

SEQ ID NO: 2535607 - RNA, 19 nt, Artificial Sequence
  Description of Artificial Sequence: Synthetic oligonucleotide
auaauucauccgggcguug

SEQ ID NO: 2535608 - RNA, 19 nt, Artificial Sequence
  Description of Artificial Sequence: Synthetic oligonucleotide
ggcgacugagggcauagga

SEQ ID NO: 2535609 - RNA, 19 nt, Artificial Sequence
  Description of Artificial Sequence: Synthetic oligonucleotide
ggaguucagauggcucugg

SEQ ID NO: 2535610 - RNA, 19 nt, Artificial Sequence
  Description of Artificial Sequence: Synthetic oligonucleotide
gaaaugaccuacacaucau

SEQ ID NO: 2535611 - RNA, 19 nt, Artificial Sequence
  Description of Artificial Sequence: Synthetic oligonucleotide
cuugguggcauuagccacu

SEQ ID NO: 2535612 - RNA, 19 nt, Artificial Sequence
  Description of Artificial Sequence: Synthetic oligonucleotide
ggccauacuggaaaugguc

SEQ ID NO: 2535613 - RNA, 19 nt, Artificial Sequence
  Description of Artificial Sequence: Synthetic oligonucleotide
agaauccgcugaccgcuaa

SEQ ID NO: 2535614 - RNA, 19 nt, Artificial Sequence
  Description of Artificial Sequence: Synthetic oligonucleotide
gccacaacuggaguuagga

SEQ ID NO: 2535615 - RNA, 19 nt, Artificial Sequence
  Description of Artificial Sequence: Synthetic oligonucleotide
gacuugcucuagcaacaaa

SEQ ID NO: 2535616 - RNA, 19 nt, Artificial Sequence
  Description of Artificial Sequence: Synthetic oligonucleotide
agccacugaguagguggac

SEQ ID NO: 2535617 - RNA, 19 nt, Artificial Sequence
  Description of Artificial Sequence: Synthetic oligonucleotide
cuggggaaacagugcacca

SEQ ID NO: 2535618 - RNA, 19 nt, Artificial Sequence
  Description of Artificial Sequence: Synthetic oligonucleotide
ggugcucucugcugcucag

SEQ ID NO: 2535619 - RNA, 19 nt, Artificial Sequence
  Description of Artificial Sequence: Synthetic oligonucleotide
gaccgcuaagagcagcagu

SEQ ID NO: 2535620 - RNA, 19 nt, Artificial Sequence
  Description of Artificial Sequence: Synthetic oligonucleotide
gaaagacgccaaggauggc

SEQ ID NO: 2535621 - RNA, 19 nt, Artificial Sequence
  Description of Artificial Sequence: Synthetic oligonucleotide
cacugggaguagguggcgc

SEQ ID NO: 2535622 - RNA, 19 nt, Artificial Sequence
  Description of Artificial Sequence: Synthetic oligonucleotide
cauacuggaaauggucugu

SEQ ID NO: 2535623 - RNA, 19 nt, Artificial Sequence
  Description of Artificial Sequence: Synthetic oligonucleotide
ugggaguagguggcgccga

SEQ ID NO: 2535624 - RNA, 19 nt, Artificial Sequence
  Description of Artificial Sequence: Synthetic oligonucleotide
gggaaacagugcaccauug

SEQ ID NO: 2535625 - RNA, 19 nt, Artificial Sequence
  Description of Artificial Sequence: Synthetic oligonucleotide
guagguggacugaugagau

SEQ ID NO: 2535626 - RNA, 19 nt, Artificial Sequence
  Description of Artificial Sequence: Synthetic oligonucleotide
cauaggaguucagauggcu

SEQ ID NO: 2535627 - RNA, 19 nt, Artificial Sequence
  Description of Artificial Sequence: Synthetic oligonucleotide
cugagggcauaggaguuca

SEQ ID NO: 2535628 - RNA, 19 nt, Artificial Sequence
  Description of Artificial Sequence: Synthetic oligonucleotide
uggcgacugagggcauagg

SEQ ID NO: 2535629 - RNA, 19 nt, Artificial Sequence
  Description of Artificial Sequence: Synthetic oligonucleotide
gauccucuugguggcauua

SEQ ID NO: 2535630 - RNA, 19 nt, Artificial Sequence
  Description of Artificial Sequence: Synthetic oligonucleotide
acgccaaggauggcaguca

SEQ ID NO: 2535631 - RNA, 19 nt, Artificial Sequence
  Description of Artificial Sequence: Synthetic oligonucleotide
acacagugaugaccaugau

SEQ ID NO: 2535632 - RNA, 19 nt, Artificial Sequence
  Description of Artificial Sequence: Synthetic oligonucleotide
ggagaauguugcgguacug

SEQ ID NO: 2535633 - RNA, 19 nt, Artificial Sequence
  Description of Artificial Sequence: Synthetic oligonucleotide
ggaaacagugcaccauugu

SEQ ID NO: 2535634 - RNA, 19 nt, Artificial Sequence
  Description of Artificial Sequence: Synthetic oligonucleotide
gcucuagcaacaaaaugua

SEQ ID NO: 2535635 - RNA, 19 nt, Artificial Sequence
  Description of Artificial Sequence: Synthetic oligonucleotide
augcauuaauauacauauu

SEQ ID NO: 2535636 - RNA, 19 nt, Artificial Sequence
  Description of Artificial Sequence: Synthetic oligonucleotide
guggcauuagccacugagu

SEQ ID NO: 2535637 - RNA, 19 nt, Artificial Sequence
  Description of Artificial Sequence: Synthetic oligonucleotide
guagacacugggaguaggu

SEQ ID NO: 2535638 - RNA, 19 nt, Artificial Sequence
  Description of Artificial Sequence: Synthetic oligonucleotide
gucaucaugcccagcacau

SEQ ID NO: 2535639 - RNA, 19 nt, Artificial Sequence
  Description of Artificial Sequence: Synthetic oligonucleotide
guguccagggccacugaga

SEQ ID NO: 2535640 - RNA, 19 nt, Artificial Sequence
  Description of Artificial Sequence: Synthetic oligonucleotide
gcacauuggugcuggucac

SEQ ID NO: 2535641 - RNA, 19 nt, Artificial Sequence
  Description of Artificial Sequence: Synthetic oligonucleotide
ggauggcagucaucaugcc

SEQ ID NO: 2535642 - RNA, 19 nt, Artificial Sequence
  Description of Artificial Sequence: Synthetic oligonucleotide
uggcggccauacuggaaau

SEQ ID NO: 2535643 - RNA, 19 nt, Artificial Sequence
  Description of Artificial Sequence: Synthetic oligonucleotide
accuugcuggggaaacagu

SEQ ID NO: 2535644 - RNA, 19 nt, Artificial Sequence
  Description of Artificial Sequence: Synthetic oligonucleotide
ucauggcgacugagggcau

SEQ ID NO: 2535645 - RNA, 19 nt, Artificial Sequence
  Description of Artificial Sequence: Synthetic oligonucleotide
gcagaauccgcugaccgcu

SEQ ID NO: 2535646 - RNA, 19 nt, Artificial Sequence
  Description of Artificial Sequence: Synthetic oligonucleotide
ccauuguggggcuucucca

SEQ ID NO: 2535647 - RNA, 19 nt, Artificial Sequence
  Description of Artificial Sequence: Synthetic oligonucleotide
gcugaccgcuaagagcagc

SEQ ID NO: 2535648 - RNA, 19 nt, Artificial Sequence
  Description of Artificial Sequence: Synthetic oligonucleotide
ugguggcauuagccacuga

SEQ ID NO: 2535649 - RNA, 19 nt, Artificial Sequence
  Description of Artificial Sequence: Synthetic oligonucleotide
cauaauucauccgggcguu

SEQ ID NO: 2535650 - RNA, 19 nt, Artificial Sequence
  Description of Artificial Sequence: Synthetic oligonucleotide
cucuggcggccauacugga

SEQ ID NO: 2535651 - RNA, 19 nt, Artificial Sequence
  Description of Artificial Sequence: Synthetic oligonucleotide
cauuagccacugaguaggu

SEQ ID NO: 2535652 - RNA, 19 nt, Artificial Sequence
  Description of Artificial Sequence: Synthetic oligonucleotide
gcugguuugcaucguacuu

SEQ ID NO: 2535653 - RNA, 19 nt, Artificial Sequence
  Description of Artificial Sequence: Synthetic oligonucleotide
cgcuaagagcagcaguguc

SEQ ID NO: 2535654 - RNA, 19 nt, Artificial Sequence
  Description of Artificial Sequence: Synthetic oligonucleotide
ggcggccauacuggaaaug

SEQ ID NO: 2535655 - RNA, 19 nt, Artificial Sequence
  Description of Artificial Sequence: Synthetic oligonucleotide
gguggacugaugagauuaa

SEQ ID NO: 2535656 - RNA, 19 nt, Artificial Sequence
  Description of Artificial Sequence: Synthetic oligonucleotide
cagugaugaccaugauccu

SEQ ID NO: 2535657 - RNA, 19 nt, Artificial Sequence
  Description of Artificial Sequence: Synthetic oligonucleotide
caggugcucucugcugcuc

SEQ ID NO: 2535658 - RNA, 19 nt, Artificial Sequence
  Description of Artificial Sequence: Synthetic oligonucleotide
cgacugagggcauaggagu

SEQ ID NO: 2535659 - RNA, 19 nt, Artificial Sequence
  Description of Artificial Sequence: Synthetic oligonucleotide
cuggauuacgcagcaugau

SEQ ID NO: 2535660 - RNA, 19 nt, Artificial Sequence
  Description of Artificial Sequence: Synthetic oligonucleotide
cagaauccgcugaccgcua

SEQ ID NO: 2535661 - RNA, 19 nt, Artificial Sequence
  Description of Artificial Sequence: Synthetic oligonucleotide
cuucuccacugggcuccgc

SEQ ID NO: 2535662 - RNA, 19 nt, Artificial Sequence
  Description of Artificial Sequence: Synthetic oligonucleotide
ggacuugcucuagcaacaa

SEQ ID NO: 2535663 - RNA, 19 nt, Artificial Sequence
  Description of Artificial Sequence: Synthetic oligonucleotide
gcuccgcaggugcucucug

SEQ ID NO: 2535664 - RNA, 19 nt, Artificial Sequence
  Description of Artificial Sequence: Synthetic oligonucleotide
caguguccagggccacuga

SEQ ID NO: 2535665 - RNA, 19 nt, Artificial Sequence
  Description of Artificial Sequence: Synthetic oligonucleotide
cugugcaaaguugcagaau

SEQ ID NO: 2535666 - RNA, 19 nt, Artificial Sequence
  Description of Artificial Sequence: Synthetic oligonucleotide
caggucugauguagacacu

SEQ ID NO: 2535667 - RNA, 19 nt, Artificial Sequence
  Description of Artificial Sequence: Synthetic oligonucleotide
agggccacugagacacaua

SEQ ID NO: 2535668 - RNA, 19 nt, Artificial Sequence
  Description of Artificial Sequence: Synthetic oligonucleotide
ccgcaggugcucucugcug

SEQ ID NO: 2535669 - RNA, 19 nt, Artificial Sequence
  Description of Artificial Sequence: Synthetic oligonucleotide
gccacugaguagguggacu

SEQ ID NO: 2535670 - RNA, 19 nt, Artificial Sequence
  Description of Artificial Sequence: Synthetic oligonucleotide
cagcaguguccagggccac

SEQ ID NO: 2535671 - RNA, 19 nt, Artificial Sequence
  Description of Artificial Sequence: Synthetic oligonucleotide
cacauuggugcuggucacu

SEQ ID NO: 2535672 - RNA, 19 nt, Artificial Sequence
  Description of Artificial Sequence: Synthetic oligonucleotide
gcuucuccacugggcuccg

SEQ ID NO: 2535673 - RNA, 19 nt, Artificial Sequence
  Description of Artificial Sequence: Synthetic oligonucleotide
caucguacuuggucuuguu

SEQ ID NO: 2535674 - RNA, 19 nt, Artificial Sequence
  Description of Artificial Sequence: Synthetic oligonucleotide
cagauggcucuggcggcca

SEQ ID NO: 2535675 - RNA, 19 nt, Artificial Sequence
  Description of Artificial Sequence: Synthetic oligonucleotide
cguacuuggucuuguugua

SEQ ID NO: 2535676 - RNA, 19 nt, Artificial Sequence
  Description of Artificial Sequence: Synthetic oligonucleotide
cauggcgacugagggcaua

SEQ ID NO: 2535677 - RNA, 19 nt, Artificial Sequence
  Description of Artificial Sequence: Synthetic oligonucleotide
gcaucguacuuggucuugu

SEQ ID NO: 2535678 - RNA, 19 nt, Artificial Sequence
  Description of Artificial Sequence: Synthetic oligonucleotide
ccugcugguuugcaucgua

SEQ ID NO: 2535679 - RNA, 19 nt, Artificial Sequence
  Description of Artificial Sequence: Synthetic oligonucleotide
cgccgagccugcugguuug

SEQ ID NO: 2535680 - RNA, 19 nt, Artificial Sequence
  Description of Artificial Sequence: Synthetic oligonucleotide
gccgagccugcugguuugc

SEQ ID NO: 2535681 - RNA, 19 nt, Artificial Sequence
  Description of Artificial Sequence: Synthetic oligonucleotide
cgcugaccgcuaagagcag

SEQ ID NO: 2535682 - RNA, 19 nt, Artificial Sequence
  Description of Artificial Sequence: Synthetic oligonucleotide
gguuugcaucguacuuggu

SEQ ID NO: 2535683 - RNA, 19 nt, Artificial Sequence
  Description of Artificial Sequence: Synthetic oligonucleotide
ggcuccgcaggugcucucu

SEQ ID NO: 2535684 - RNA, 19 nt, Artificial Sequence
  Description of Artificial Sequence: Synthetic oligonucleotide
cgaugacauucugugcaaa

SEQ ID NO: 2535685 - RNA, 19 nt, Artificial Sequence
  Description of Artificial Sequence: Synthetic oligonucleotide
gcgccgagccugcugguuu

SEQ ID NO: 2535686 - RNA, 19 nt, Artificial Sequence
  Description of Artificial Sequence: Synthetic oligonucleotide
ccgcuaagagcagcagugu

SEQ ID NO: 2535687 - RNA, 19 nt, Artificial Sequence
  Description of Artificial Sequence: Synthetic oligonucleotide
ccgagccugcugguuugca

SEQ ID NO: 2535688 - RNA, 19 nt, Artificial Sequence
  Description of Artificial Sequence: Synthetic oligonucleotide
ccuacacaucauggcgacu

SEQ ID NO: 2535689 - RNA, 19 nt, Artificial Sequence
  Description of Artificial Sequence: Synthetic oligonucleotide
gccugcugguuugcaucgu

SEQ ID NO: 2535690 - RNA, 19 nt, Artificial Sequence
  Description of Artificial Sequence: Synthetic oligonucleotide
gugcaccauuguggggcuu

SEQ ID NO: 2535691 - RNA, 19 nt, Artificial Sequence
  Description of Artificial Sequence: Synthetic oligonucleotide
ggcgccgagccugcugguu

SEQ ID NO: 2535692 - RNA, 19 nt, Artificial Sequence
  Description of Artificial Sequence: Synthetic oligonucleotide
uguaacuuacuacagagca

SEQ ID NO: 2535693 - RNA, 19 nt, Artificial Sequence
  Description of Artificial Sequence: Synthetic oligonucleotide
uuuaggaucucuuucuggg

SEQ ID NO: 2535694 - RNA, 19 nt, Artificial Sequence
  Description of Artificial Sequence: Synthetic oligonucleotide
auuguaacuuacuacagag

SEQ ID NO: 2535695 - RNA, 19 nt, Artificial Sequence
  Description of Artificial Sequence: Synthetic oligonucleotide
aauuuucuugugcagcagg

SEQ ID NO: 2535696 - RNA, 19 nt, Artificial Sequence
  Description of Artificial Sequence: Synthetic oligonucleotide
cuuacuacagagcagcggg

SEQ ID NO: 2535697 - RNA, 19 nt, Artificial Sequence
  Description of Artificial Sequence: Synthetic oligonucleotide
augaacauacuugagggcc

SEQ ID NO: 2535698 - RNA, 19 nt, Artificial Sequence
  Description of Artificial Sequence: Synthetic oligonucleotide
agaacaucgccauuguaac

SEQ ID NO: 2535699 - RNA, 19 nt, Artificial Sequence
  Description of Artificial Sequence: Synthetic oligonucleotide
ucaauggcuacacauuugc

SEQ ID NO: 2535700 - RNA, 19 nt, Artificial Sequence
  Description of Artificial Sequence: Synthetic oligonucleotide
ggaugaacauacuugaggg

SEQ ID NO: 2535701 - RNA, 19 nt, Artificial Sequence
  Description of Artificial Sequence: Synthetic oligonucleotide
uuucuugugcagcaggugc

SEQ ID NO: 2535702 - RNA, 19 nt, Artificial Sequence
  Description of Artificial Sequence: Synthetic oligonucleotide
acaaugggcaucucaggcc

SEQ ID NO: 2535703 - RNA, 19 nt, Artificial Sequence
  Description of Artificial Sequence: Synthetic oligonucleotide
uaacuuacuacagagcagc

SEQ ID NO: 2535704 - RNA, 19 nt, Artificial Sequence
  Description of Artificial Sequence: Synthetic oligonucleotide
uucaagagcuuuaggaucu

SEQ ID NO: 2535705 - RNA, 19 nt, Artificial Sequence
  Description of Artificial Sequence: Synthetic oligonucleotide
agaugagugucccugauga

SEQ ID NO: 2535706 - RNA, 19 nt, Artificial Sequence
  Description of Artificial Sequence: Synthetic oligonucleotide
agagcagcgggccagcucg

SEQ ID NO: 2535707 - RNA, 19 nt, Artificial Sequence
  Description of Artificial Sequence: Synthetic oligonucleotide
agggccuuggcauuguugg

SEQ ID NO: 2535708 - RNA, 19 nt, Artificial Sequence
  Description of Artificial Sequence: Synthetic oligonucleotide
ugagugucccugaugaccc

SEQ ID NO: 2535709 - RNA, 19 nt, Artificial Sequence
  Description of Artificial Sequence: Synthetic oligonucleotide
augagugucccugaugacc

SEQ ID NO: 2535710 - RNA, 19 nt, Artificial Sequence
  Description of Artificial Sequence: Synthetic oligonucleotide
ucagagagacccgagcucg

SEQ ID NO: 2535711 - RNA, 19 nt, Artificial Sequence
  Description of Artificial Sequence: Synthetic oligonucleotide
auacuugagggccuggaag

SEQ ID NO: 2535712 - RNA, 19 nt, Artificial Sequence
  Description of Artificial Sequence: Synthetic oligonucleotide
uguacccaccaucucacag

SEQ ID NO: 2535713 - RNA, 19 nt, Artificial Sequence
  Description of Artificial Sequence: Synthetic oligonucleotide
ucccugaugacccaccuga

SEQ ID NO: 2535714 - RNA, 19 nt, Artificial Sequence
  Description of Artificial Sequence: Synthetic oligonucleotide
uugagcauguguuggcggg

SEQ ID NO: 2535715 - RNA, 19 nt, Artificial Sequence
  Description of Artificial Sequence: Synthetic oligonucleotide
ugucauggcaucuuccaca

SEQ ID NO: 2535716 - RNA, 19 nt, Artificial Sequence
  Description of Artificial Sequence: Synthetic oligonucleotide
gaagucauugugcagugca

SEQ ID NO: 2535717 - RNA, 19 nt, Artificial Sequence
  Description of Artificial Sequence: Synthetic oligonucleotide
uccacuggugcucugggcc

SEQ ID NO: 2535718 - RNA, 19 nt, Artificial Sequence
  Description of Artificial Sequence: Synthetic oligonucleotide
cuuuaggaucucuuucugg

SEQ ID NO: 2535719 - RNA, 19 nt, Artificial Sequence
  Description of Artificial Sequence: Synthetic oligonucleotide
auuguuggccucuuguugu

SEQ ID NO: 2535720 - RNA, 19 nt, Artificial Sequence
  Description of Artificial Sequence: Synthetic oligonucleotide
gguaaugccacuccagcgg

SEQ ID NO: 2535721 - RNA, 19 nt, Artificial Sequence
  Description of Artificial Sequence: Synthetic oligonucleotide
uuguaacuuacuacagagc

SEQ ID NO: 2535722 - RNA, 19 nt, Artificial Sequence
  Description of Artificial Sequence: Synthetic oligonucleotide
gaugaacauacuugagggc

SEQ ID NO: 2535723 - RNA, 19 nt, Artificial Sequence
  Description of Artificial Sequence: Synthetic oligonucleotide
acagucaauggcuacacau

SEQ ID NO: 2535724 - RNA, 19 nt, Artificial Sequence
  Description of Artificial Sequence: Synthetic oligonucleotide
gggaugaacauacuugagg

SEQ ID NO: 2535725 - RNA, 19 nt, Artificial Sequence
  Description of Artificial Sequence: Synthetic oligonucleotide
ucccuuauuucuccacugg

SEQ ID NO: 2535726 - RNA, 19 nt, Artificial Sequence
  Description of Artificial Sequence: Synthetic oligonucleotide
acauuugcugggcccaggc

SEQ ID NO: 2535727 - RNA, 19 nt, Artificial Sequence
  Description of Artificial Sequence: Synthetic oligonucleotide
cuucaagagcuuuaggauc

SEQ ID NO: 2535728 - RNA, 19 nt, Artificial Sequence
  Description of Artificial Sequence: Synthetic oligonucleotide
caaugggcaucucaggccg

SEQ ID NO: 2535729 - RNA, 19 nt, Artificial Sequence
  Description of Artificial Sequence: Synthetic oligonucleotide
ugguagagcuccauggcug

SEQ ID NO: 2535730 - RNA, 19 nt, Artificial Sequence
  Description of Artificial Sequence: Synthetic oligonucleotide
agcuuuaggaucucuuucu

SEQ ID NO: 2535731 - RNA, 19 nt, Artificial Sequence
  Description of Artificial Sequence: Synthetic oligonucleotide
aggaccuguacccaccauc

SEQ ID NO: 2535732 - RNA, 19 nt, Artificial Sequence
  Description of Artificial Sequence: Synthetic oligonucleotide
accugaauuuucuugugca

SEQ ID NO: 2535733 - RNA, 19 nt, Artificial Sequence
  Description of Artificial Sequence: Synthetic oligonucleotide
guacuugucguagagaaca

SEQ ID NO: 2535734 - RNA, 19 nt, Artificial Sequence
  Description of Artificial Sequence: Synthetic oligonucleotide
aacaucgccauuguaacuu

SEQ ID NO: 2535735 - RNA, 19 nt, Artificial Sequence
  Description of Artificial Sequence: Synthetic oligonucleotide
uaagugguaucccgggucu

SEQ ID NO: 2535736 - RNA, 19 nt, Artificial Sequence
  Description of Artificial Sequence: Synthetic oligonucleotide
ugaacauacuugagggccu

SEQ ID NO: 2535737 - RNA, 19 nt, Artificial Sequence
  Description of Artificial Sequence: Synthetic oligonucleotide
gagaacaucgccauuguaa

SEQ ID NO: 2535738 - RNA, 19 nt, Artificial Sequence
  Description of Artificial Sequence: Synthetic oligonucleotide
uuaggaucucuuucugggc

SEQ ID NO: 2535739 - RNA, 19 nt, Artificial Sequence
  Description of Artificial Sequence: Synthetic oligonucleotide
ugcacuuccaccagcuggu

SEQ ID NO: 2535740 - RNA, 19 nt, Artificial Sequence
  Description of Artificial Sequence: Synthetic oligonucleotide
ucuggugacaggccuuuug

SEQ ID NO: 2535741 - RNA, 19 nt, Artificial Sequence
  Description of Artificial Sequence: Synthetic oligonucleotide
cuugagcauguguuggcgg

SEQ ID NO: 2535742 - RNA, 19 nt, Artificial Sequence
  Description of Artificial Sequence: Synthetic oligonucleotide
gacguaagugguaucccgg

SEQ ID NO: 2535743 - RNA, 19 nt, Artificial Sequence
  Description of Artificial Sequence: Synthetic oligonucleotide
acguaagugguaucccggg

SEQ ID NO: 2535744 - RNA, 19 nt, Artificial Sequence
  Description of Artificial Sequence: Synthetic oligonucleotide
uugucguagagaacaucgc

SEQ ID NO: 2535745 - RNA, 19 nt, Artificial Sequence
  Description of Artificial Sequence: Synthetic oligonucleotide
cuacacauuugcugggccc

SEQ ID NO: 2535746 - RNA, 19 nt, Artificial Sequence
  Description of Artificial Sequence: Synthetic oligonucleotide
cauuguuggccucuuguug

SEQ ID NO: 2535747 - RNA, 19 nt, Artificial Sequence
  Description of Artificial Sequence: Synthetic oligonucleotide
gugacaggccuuuugcugc

SEQ ID NO: 2535748 - RNA, 19 nt, Artificial Sequence
  Description of Artificial Sequence: Synthetic oligonucleotide
gccauuguaacuuacuaca

SEQ ID NO: 2535749 - RNA, 19 nt, Artificial Sequence
  Description of Artificial Sequence: Synthetic oligonucleotide
ggugcgguaguccacaaug

SEQ ID NO: 2535750 - RNA, 19 nt, Artificial Sequence
  Description of Artificial Sequence: Synthetic oligonucleotide
uccauguacugcuccaugu

SEQ ID NO: 2535751 - RNA, 19 nt, Artificial Sequence
  Description of Artificial Sequence: Synthetic oligonucleotide
ugggacguaagugguaucc

SEQ ID NO: 2535752 - RNA, 19 nt, Artificial Sequence
  Description of Artificial Sequence: Synthetic oligonucleotide
acuuacuacagagcagcgg

SEQ ID NO: 2535753 - RNA, 19 nt, Artificial Sequence
  Description of Artificial Sequence: Synthetic oligonucleotide
uuauuucuccacuggugcu

SEQ ID NO: 2535754 - RNA, 19 nt, Artificial Sequence
  Description of Artificial Sequence: Synthetic oligonucleotide
cuuccucucacucccuucc

SEQ ID NO: 2535755 - RNA, 19 nt, Artificial Sequence
  Description of Artificial Sequence: Synthetic oligonucleotide
ugacccaccugaauuuucu

SEQ ID NO: 2535756 - RNA, 19 nt, Artificial Sequence
  Description of Artificial Sequence: Synthetic oligonucleotide
agucaauggcuacacauuu

SEQ ID NO: 2535757 - RNA, 19 nt, Artificial Sequence
  Description of Artificial Sequence: Synthetic oligonucleotide
uccaugucggugcugcugu

SEQ ID NO: 2535758 - RNA, 19 nt, Artificial Sequence
  Description of Artificial Sequence: Synthetic oligonucleotide
auguguuggcggguaaugc

SEQ ID NO: 2535759 - RNA, 19 nt, Artificial Sequence
  Description of Artificial Sequence: Synthetic oligonucleotide
ucccacugcacuuccacca

SEQ ID NO: 2535760 - RNA, 19 nt, Artificial Sequence
  Description of Artificial Sequence: Synthetic oligonucleotide
ugcaccuuccucucacucc

SEQ ID NO: 2535761 - RNA, 19 nt, Artificial Sequence
  Description of Artificial Sequence: Synthetic oligonucleotide
uguacuugucguagagaac

SEQ ID NO: 2535762 - RNA, 19 nt, Artificial Sequence
  Description of Artificial Sequence: Synthetic oligonucleotide
ugguccuccauguacugcu

SEQ ID NO: 2535763 - RNA, 19 nt, Artificial Sequence
  Description of Artificial Sequence: Synthetic oligonucleotide
guaacuuacuacagagcag

SEQ ID NO: 2535764 - RNA, 19 nt, Artificial Sequence
  Description of Artificial Sequence: Synthetic oligonucleotide
cuuguuguucccacugcac

SEQ ID NO: 2535765 - RNA, 19 nt, Artificial Sequence
  Description of Artificial Sequence: Synthetic oligonucleotide
uuuggaacgcugucuucug

SEQ ID NO: 2535766 - RNA, 19 nt, Artificial Sequence
  Description of Artificial Sequence: Synthetic oligonucleotide
uuacuacagagcagcgggc

SEQ ID NO: 2535767 - RNA, 19 nt, Artificial Sequence
  Description of Artificial Sequence: Synthetic oligonucleotide
uucagagagacccgagcuc

SEQ ID NO: 2535768 - RNA, 19 nt, Artificial Sequence
  Description of Artificial Sequence: Synthetic oligonucleotide
uuugggacguaagugguau

SEQ ID NO: 2535769 - RNA, 19 nt, Artificial Sequence
  Description of Artificial Sequence: Synthetic oligonucleotide
aacuuacuacagagcagcg

SEQ ID NO: 2535770 - RNA, 19 nt, Artificial Sequence
  Description of Artificial Sequence: Synthetic oligonucleotide
ugccccaccaccaccuugc

SEQ ID NO: 2535771 - RNA, 19 nt, Artificial Sequence
  Description of Artificial Sequence: Synthetic oligonucleotide
guaagugguaucccggguc

SEQ ID NO: 2535772 - RNA, 19 nt, Artificial Sequence
  Description of Artificial Sequence: Synthetic oligonucleotide
uggaagucauugugcagug

SEQ ID NO: 2535773 - RNA, 19 nt, Artificial Sequence
  Description of Artificial Sequence: Synthetic oligonucleotide
auugugcagugcaugcccc

SEQ ID NO: 2535774 - RNA, 19 nt, Artificial Sequence
  Description of Artificial Sequence: Synthetic oligonucleotide
ugcagugcaugccccacca

SEQ ID NO: 2535775 - RNA, 19 nt, Artificial Sequence
  Description of Artificial Sequence: Synthetic oligonucleotide
ucguagagaacaucgccau

SEQ ID NO: 2535776 - RNA, 19 nt, Artificial Sequence
  Description of Artificial Sequence: Synthetic oligonucleotide
agagcuuuaggaucucuuu

SEQ ID NO: 2535777 - RNA, 19 nt, Artificial Sequence
  Description of Artificial Sequence: Synthetic oligonucleotide
ucgccauuguaacuuacua

SEQ ID NO: 2535778 - RNA, 19 nt, Artificial Sequence
  Description of Artificial Sequence: Synthetic oligonucleotide
uagagaacaucgccauugu

SEQ ID NO: 2535779 - RNA, 19 nt, Artificial Sequence
  Description of Artificial Sequence: Synthetic oligonucleotide
uggaacgcugucuucugcu

SEQ ID NO: 2535780 - RNA, 19 nt, Artificial Sequence
  Description of Artificial Sequence: Synthetic oligonucleotide
ugaugacccaccugaauuu

SEQ ID NO: 2535781 - RNA, 19 nt, Artificial Sequence
  Description of Artificial Sequence: Synthetic oligonucleotide
uacuacagagcagcgggcc

SEQ ID NO: 2535782 - RNA, 19 nt, Artificial Sequence
  Description of Artificial Sequence: Synthetic oligonucleotide
caggcguggcuuuggaacg

SEQ ID NO: 2535783 - RNA, 19 nt, Artificial Sequence
  Description of Artificial Sequence: Synthetic oligonucleotide
ugcaugggccaccaccgcc

SEQ ID NO: 2535784 - RNA, 19 nt, Artificial Sequence
  Description of Artificial Sequence: Synthetic oligonucleotide
auguacugcuccaugucgg

SEQ ID NO: 2535785 - RNA, 19 nt, Artificial Sequence
  Description of Artificial Sequence: Synthetic oligonucleotide
uacacauuugcugggccca

SEQ ID NO: 2535786 - RNA, 19 nt, Artificial Sequence
  Description of Artificial Sequence: Synthetic oligonucleotide
cagugcaugccccaccacc

SEQ ID NO: 2535787 - RNA, 19 nt, Artificial Sequence
  Description of Artificial Sequence: Synthetic oligonucleotide
ggacguaagugguaucccg

SEQ ID NO: 2535788 - RNA, 19 nt, Artificial Sequence
  Description of Artificial Sequence: Synthetic oligonucleotide
agagacccgagcucgggug

SEQ ID NO: 2535789 - RNA, 19 nt, Artificial Sequence
  Description of Artificial Sequence: Synthetic oligonucleotide
uuggaacgcugucuucugc

SEQ ID NO: 2535790 - RNA, 19 nt, Artificial Sequence
  Description of Artificial Sequence: Synthetic oligonucleotide
aggccggauguacuugucg

SEQ ID NO: 2535791 - RNA, 19 nt, Artificial Sequence
  Description of Artificial Sequence: Synthetic oligonucleotide
uggcuacacauuugcuggg

SEQ ID NO: 2535792 - RNA, 19 nt, Artificial Sequence
  Description of Artificial Sequence: Synthetic oligonucleotide
uguuguucccacugcacuu

SEQ ID NO: 2535793 - RNA, 19 nt, Artificial Sequence
  Description of Artificial Sequence: Synthetic oligonucleotide
ugcuccaugucggugcugc

SEQ ID NO: 2535794 - RNA, 19 nt, Artificial Sequence
  Description of Artificial Sequence: Synthetic oligonucleotide
agucauugugcagugcaug

SEQ ID NO: 2535795 - RNA, 19 nt, Artificial Sequence
  Description of Artificial Sequence: Synthetic oligonucleotide
ggguaaugccacuccagcg

SEQ ID NO: 2535796 - RNA, 19 nt, Artificial Sequence
  Description of Artificial Sequence: Synthetic oligonucleotide
ggugacaggccuuuugcug

SEQ ID NO: 2535797 - RNA, 19 nt, Artificial Sequence
  Description of Artificial Sequence: Synthetic oligonucleotide
uacccaccaucucacaguc

SEQ ID NO: 2535798 - RNA, 19 nt, Artificial Sequence
  Description of Artificial Sequence: Synthetic oligonucleotide
uucuccacuggugcucugg

SEQ ID NO: 2535799 - RNA, 19 nt, Artificial Sequence
  Description of Artificial Sequence: Synthetic oligonucleotide
cuuccacagaugagugucc

SEQ ID NO: 2535800 - RNA, 19 nt, Artificial Sequence
  Description of Artificial Sequence: Synthetic oligonucleotide
cagguuugggacguaagug

SEQ ID NO: 2535801 - RNA, 19 nt, Artificial Sequence
  Description of Artificial Sequence: Synthetic oligonucleotide
uccuucagagagacccgag

SEQ ID NO: 2535802 - RNA, 19 nt, Artificial Sequence
  Description of Artificial Sequence: Synthetic oligonucleotide
agugguaucccgggucugg

SEQ ID NO: 2535803 - RNA, 19 nt, Artificial Sequence
  Description of Artificial Sequence: Synthetic oligonucleotide
ucucacagucaauggcuac

SEQ ID NO: 2535804 - RNA, 19 nt, Artificial Sequence
  Description of Artificial Sequence: Synthetic oligonucleotide
cucccuuauuucuccacug

SEQ ID NO: 2535805 - RNA, 19 nt, Artificial Sequence
  Description of Artificial Sequence: Synthetic oligonucleotide
uguuggcggguaaugccac

SEQ ID NO: 2535806 - RNA, 19 nt, Artificial Sequence
  Description of Artificial Sequence: Synthetic oligonucleotide
acuugucguagagaacauc

SEQ ID NO: 2535807 - RNA, 19 nt, Artificial Sequence
  Description of Artificial Sequence: Synthetic oligonucleotide
ugcaugccccaccaccacc

SEQ ID NO: 2535808 - RNA, 19 nt, Artificial Sequence
  Description of Artificial Sequence: Synthetic oligonucleotide
uccuccauguacugcucca

SEQ ID NO: 2535809 - RNA, 19 nt, Artificial Sequence
  Description of Artificial Sequence: Synthetic oligonucleotide
uggccuugagcauguguug

SEQ ID NO: 2535810 - RNA, 19 nt, Artificial Sequence
  Description of Artificial Sequence: Synthetic oligonucleotide
ugcccuucaagagcuuuag

SEQ ID NO: 2535811 - RNA, 19 nt, Artificial Sequence
  Description of Artificial Sequence: Synthetic oligonucleotide
ucaggccggauguacuugu

SEQ ID NO: 2535812 - RNA, 19 nt, Artificial Sequence
  Description of Artificial Sequence: Synthetic oligonucleotide
caucaggccaguacugguc

SEQ ID NO: 2535813 - RNA, 19 nt, Artificial Sequence
  Description of Artificial Sequence: Synthetic oligonucleotide
gaugagugucccugaugac

SEQ ID NO: 2535814 - RNA, 19 nt, Artificial Sequence
  Description of Artificial Sequence: Synthetic oligonucleotide
uggugacaggccuuuugcu

SEQ ID NO: 2535815 - RNA, 19 nt, Artificial Sequence
  Description of Artificial Sequence: Synthetic oligonucleotide
ucacccgcccacgaggacc

SEQ ID NO: 2535816 - RNA, 19 nt, Artificial Sequence
  Description of Artificial Sequence: Synthetic oligonucleotide
ugccacuccagcgggugcg

SEQ ID NO: 2535817 - RNA, 19 nt, Artificial Sequence
  Description of Artificial Sequence: Synthetic oligonucleotide
aagagcuuuaggaucucuu

SEQ ID NO: 2535818 - RNA, 19 nt, Artificial Sequence
  Description of Artificial Sequence: Synthetic oligonucleotide
cccacgaggaccuguaccc

SEQ ID NO: 2535819 - RNA, 19 nt, Artificial Sequence
  Description of Artificial Sequence: Synthetic oligonucleotide
gaacauacuugagggccug

SEQ ID NO: 2535820 - RNA, 19 nt, Artificial Sequence
  Description of Artificial Sequence: Synthetic oligonucleotide
cauuugcugggcccaggcc

SEQ ID NO: 2535821 - RNA, 19 nt, Artificial Sequence
  Description of Artificial Sequence: Synthetic oligonucleotide
cauguguuggcggguaaug

SEQ ID NO: 2535822 - RNA, 19 nt, Artificial Sequence
  Description of Artificial Sequence: Synthetic oligonucleotide
acgaggaccuguacccacc

SEQ ID NO: 2535823 - RNA, 19 nt, Artificial Sequence
  Description of Artificial Sequence: Synthetic oligonucleotide
ccauuguaacuuacuacag

SEQ ID NO: 2535824 - RNA, 19 nt, Artificial Sequence
  Description of Artificial Sequence: Synthetic oligonucleotide
uggcggguaaugccacucc

SEQ ID NO: 2535825 - RNA, 19 nt, Artificial Sequence
  Description of Artificial Sequence: Synthetic oligonucleotide
agcucgcucacccgcccac

SEQ ID NO: 2535826 - RNA, 19 nt, Artificial Sequence
  Description of Artificial Sequence: Synthetic oligonucleotide
ccugaauuuucuugugcag

SEQ ID NO: 2535827 - RNA, 19 nt, Artificial Sequence
  Description of Artificial Sequence: Synthetic oligonucleotide
cagcucaucaggccaguac

SEQ ID NO: 2535828 - RNA, 19 nt, Artificial Sequence
  Description of Artificial Sequence: Synthetic oligonucleotide
cugucauggcaucuuccac

SEQ ID NO: 2535829 - RNA, 19 nt, Artificial Sequence
  Description of Artificial Sequence: Synthetic oligonucleotide
uuuugcugcaugggccacc

SEQ ID NO: 2535830 - RNA, 19 nt, Artificial Sequence
  Description of Artificial Sequence: Synthetic oligonucleotide
caugucggugcugcugucg

SEQ ID NO: 2535831 - RNA, 19 nt, Artificial Sequence
  Description of Artificial Sequence: Synthetic oligonucleotide
ggcugagcagguuugggac

SEQ ID NO: 2535832 - RNA, 19 nt, Artificial Sequence
  Description of Artificial Sequence: Synthetic oligonucleotide
cccuucaagagcuuuagga

SEQ ID NO: 2535833 - RNA, 19 nt, Artificial Sequence
  Description of Artificial Sequence: Synthetic oligonucleotide
gucaauggcuacacauuug

SEQ ID NO: 2535834 - RNA, 19 nt, Artificial Sequence
  Description of Artificial Sequence: Synthetic oligonucleotide
aggccaguacugguccucc

SEQ ID NO: 2535835 - RNA, 19 nt, Artificial Sequence
  Description of Artificial Sequence: Synthetic oligonucleotide
ucuggcuccggggaugaac

SEQ ID NO: 2535836 - RNA, 19 nt, Artificial Sequence
  Description of Artificial Sequence: Synthetic oligonucleotide
uccucaggaagggccuugg

SEQ ID NO: 2535837 - RNA, 19 nt, Artificial Sequence
  Description of Artificial Sequence: Synthetic oligonucleotide
auggccuugagcauguguu

SEQ ID NO: 2535838 - RNA, 19 nt, Artificial Sequence
  Description of Artificial Sequence: Synthetic oligonucleotide
ccggggaugaacauacuug

SEQ ID NO: 2535839 - RNA, 19 nt, Artificial Sequence
  Description of Artificial Sequence: Synthetic oligonucleotide
agagagacccgagcucggg

SEQ ID NO: 2535840 - RNA, 19 nt, Artificial Sequence
  Description of Artificial Sequence: Synthetic oligonucleotide
gugcgguaguccacaaugg

SEQ ID NO: 2535841 - RNA, 19 nt, Artificial Sequence
  Description of Artificial Sequence: Synthetic oligonucleotide
ugacaggccuuuugcugca

SEQ ID NO: 2535842 - RNA, 19 nt, Artificial Sequence
  Description of Artificial Sequence: Synthetic oligonucleotide
acagaugagugucccugau

SEQ ID NO: 2535843 - RNA, 19 nt, Artificial Sequence
  Description of Artificial Sequence: Synthetic oligonucleotide
aggccuuuugcugcauggg

SEQ ID NO: 2535844 - RNA, 19 nt, Artificial Sequence
  Description of Artificial Sequence: Synthetic oligonucleotide
ggccuuugggcuucucugg

SEQ ID NO: 2535845 - RNA, 19 nt, Artificial Sequence
  Description of Artificial Sequence: Synthetic oligonucleotide
uggcuuuggaacgcugucu

SEQ ID NO: 2535846 - RNA, 19 nt, Artificial Sequence
  Description of Artificial Sequence: Synthetic oligonucleotide
gcugagcagguuugggacg

SEQ ID NO: 2535847 - RNA, 19 nt, Artificial Sequence
  Description of Artificial Sequence: Synthetic oligonucleotide
agugcaugccccaccacca

SEQ ID NO: 2535848 - RNA, 19 nt, Artificial Sequence
  Description of Artificial Sequence: Synthetic oligonucleotide
uugcccuucaagagcuuua

SEQ ID NO: 2535849 - RNA, 19 nt, Artificial Sequence
  Description of Artificial Sequence: Synthetic oligonucleotide
acuccagcgggugcgguag

SEQ ID NO: 2535850 - RNA, 19 nt, Artificial Sequence
  Description of Artificial Sequence: Synthetic oligonucleotide
aagucauugugcagugcau

SEQ ID NO: 2535851 - RNA, 19 nt, Artificial Sequence
  Description of Artificial Sequence: Synthetic oligonucleotide
guaucccgggucuggcucc

SEQ ID NO: 2535852 - RNA, 19 nt, Artificial Sequence
  Description of Artificial Sequence: Synthetic oligonucleotide
cuucagagagacccgagcu

SEQ ID NO: 2535853 - RNA, 19 nt, Artificial Sequence
  Description of Artificial Sequence: Synthetic oligonucleotide
gucggugcugcugucggag

SEQ ID NO: 2535854 - RNA, 19 nt, Artificial Sequence
  Description of Artificial Sequence: Synthetic oligonucleotide
cacgaggaccuguacccac

SEQ ID NO: 2535855 - RNA, 19 nt, Artificial Sequence
  Description of Artificial Sequence: Synthetic oligonucleotide
cuggcuccggggaugaaca

SEQ ID NO: 2535856 - RNA, 19 nt, Artificial Sequence
  Description of Artificial Sequence: Synthetic oligonucleotide
ucggguguggaagcugggc

SEQ ID NO: 2535857 - RNA, 19 nt, Artificial Sequence
  Description of Artificial Sequence: Synthetic oligonucleotide
caucgccauuguaacuuac

SEQ ID NO: 2535858 - RNA, 19 nt, Artificial Sequence
  Description of Artificial Sequence: Synthetic oligonucleotide
ucccgggucuggcuccggg

SEQ ID NO: 2535859 - RNA, 19 nt, Artificial Sequence
  Description of Artificial Sequence: Synthetic oligonucleotide
cacuuccaccagcugguag

SEQ ID NO: 2535860 - RNA, 19 nt, Artificial Sequence
  Description of Artificial Sequence: Synthetic oligonucleotide
augacccaccugaauuuuc

SEQ ID NO: 2535861 - RNA, 19 nt, Artificial Sequence
  Description of Artificial Sequence: Synthetic oligonucleotide
caucucaggccggauguac

SEQ ID NO: 2535862 - RNA, 19 nt, Artificial Sequence
  Description of Artificial Sequence: Synthetic oligonucleotide
ugugcagugcaugccccac

SEQ ID NO: 2535863 - RNA, 19 nt, Artificial Sequence
  Description of Artificial Sequence: Synthetic oligonucleotide
gguguggaagcugggcugg

SEQ ID NO: 2535864 - RNA, 19 nt, Artificial Sequence
  Description of Artificial Sequence: Synthetic oligonucleotide
ggcuucucuggugacaggc

SEQ ID NO: 2535865 - RNA, 19 nt, Artificial Sequence
  Description of Artificial Sequence: Synthetic oligonucleotide
aguacugguccuccaugua

SEQ ID NO: 2535866 - RNA, 19 nt, Artificial Sequence
  Description of Artificial Sequence: Synthetic oligonucleotide
gcugucauggcaucuucca

SEQ ID NO: 2535867 - RNA, 19 nt, Artificial Sequence
  Description of Artificial Sequence: Synthetic oligonucleotide
acaggccuuuugcugcaug

SEQ ID NO: 2535868 - RNA, 19 nt, Artificial Sequence
  Description of Artificial Sequence: Synthetic oligonucleotide
gcuacacauuugcugggcc

SEQ ID NO: 2535869 - RNA, 19 nt, Artificial Sequence
  Description of Artificial Sequence: Synthetic oligonucleotide
cagagagacccgagcucgg

SEQ ID NO: 2535870 - RNA, 19 nt, Artificial Sequence
  Description of Artificial Sequence: Synthetic oligonucleotide
cucacagucaauggcuaca

SEQ ID NO: 2535871 - RNA, 19 nt, Artificial Sequence
  Description of Artificial Sequence: Synthetic oligonucleotide
agagaacaucgccauugua

SEQ ID NO: 2535872 - RNA, 19 nt, Artificial Sequence
  Description of Artificial Sequence: Synthetic oligonucleotide
aucgccauuguaacuuacu

SEQ ID NO: 2535873 - RNA, 19 nt, Artificial Sequence
  Description of Artificial Sequence: Synthetic oligonucleotide
uggcugucauggcaucuuc

SEQ ID NO: 2535874 - RNA, 19 nt, Artificial Sequence
  Description of Artificial Sequence: Synthetic oligonucleotide
uugggcuucucuggugaca

SEQ ID NO: 2535875 - RNA, 19 nt, Artificial Sequence
  Description of Artificial Sequence: Synthetic oligonucleotide
ccuguacccaccaucucac

SEQ ID NO: 2535876 - RNA, 19 nt, Artificial Sequence
  Description of Artificial Sequence: Synthetic oligonucleotide
ucgcucacccgcccacgag

SEQ ID NO: 2535877 - RNA, 19 nt, Artificial Sequence
  Description of Artificial Sequence: Synthetic oligonucleotide
cuggcugagcagguuuggg

SEQ ID NO: 2535878 - RNA, 19 nt, Artificial Sequence
  Description of Artificial Sequence: Synthetic oligonucleotide
gauggccuugagcaugugu

SEQ ID NO: 2535879 - RNA, 19 nt, Artificial Sequence
  Description of Artificial Sequence: Synthetic oligonucleotide
cugaugacccaccugaauu

SEQ ID NO: 2535880 - RNA, 19 nt, Artificial Sequence
  Description of Artificial Sequence: Synthetic oligonucleotide
aagugguaucccgggucug

SEQ ID NO: 2535881 - RNA, 19 nt, Artificial Sequence
  Description of Artificial Sequence: Synthetic oligonucleotide
guacccaccaucucacagu

SEQ ID NO: 2535882 - RNA, 19 nt, Artificial Sequence
  Description of Artificial Sequence: Synthetic oligonucleotide
uuggcggguaaugccacuc

SEQ ID NO: 2535883 - RNA, 19 nt, Artificial Sequence
  Description of Artificial Sequence: Synthetic oligonucleotide
guguuggcggguaaugcca

SEQ ID NO: 2535884 - RNA, 19 nt, Artificial Sequence
  Description of Artificial Sequence: Synthetic oligonucleotide
gaacaucgccauuguaacu

SEQ ID NO: 2535885 - RNA, 19 nt, Artificial Sequence
  Description of Artificial Sequence: Synthetic oligonucleotide
ugguaucccgggucuggcu

SEQ ID NO: 2535886 - RNA, 19 nt, Artificial Sequence
  Description of Artificial Sequence: Synthetic oligonucleotide
gguaucccgggucuggcuc

SEQ ID NO: 2535887 - RNA, 19 nt, Artificial Sequence
  Description of Artificial Sequence: Synthetic oligonucleotide
ccucuuguuguucccacug

SEQ ID NO: 2535888 - RNA, 19 nt, Artificial Sequence
  Description of Artificial Sequence: Synthetic oligonucleotide
gccuuuugcugcaugggcc

SEQ ID NO: 2535889 - RNA, 19 nt, Artificial Sequence
  Description of Artificial Sequence: Synthetic oligonucleotide
aggaagggccuuggcauug

SEQ ID NO: 2535890 - RNA, 19 nt, Artificial Sequence
  Description of Artificial Sequence: Synthetic oligonucleotide
cucggguguggaagcuggg

SEQ ID NO: 2535891 - RNA, 19 nt, Artificial Sequence
  Description of Artificial Sequence: Synthetic oligonucleotide
uaucccgggucuggcuccg

SEQ ID NO: 2535892 - RNA, 19 nt, Artificial Sequence
  Description of Artificial Sequence: Synthetic oligonucleotide
gcgguaguccacaaugggc

SEQ ID NO: 2535893 - RNA, 19 nt, Artificial Sequence
  Description of Artificial Sequence: Synthetic oligonucleotide
acaucgccauuguaacuua

SEQ ID NO: 2535894 - RNA, 19 nt, Artificial Sequence
  Description of Artificial Sequence: Synthetic oligonucleotide
augccccaccaccaccuug

SEQ ID NO: 2535895 - RNA, 19 nt, Artificial Sequence
  Description of Artificial Sequence: Synthetic oligonucleotide
gcuccggggaugaacauac

SEQ ID NO: 2535896 - RNA, 19 nt, Artificial Sequence
  Description of Artificial Sequence: Synthetic oligonucleotide
cagcugguagagcuccaug

SEQ ID NO: 2535897 - RNA, 19 nt, Artificial Sequence
  Description of Artificial Sequence: Synthetic oligonucleotide
ccuugagcauguguuggcg

SEQ ID NO: 2535898 - RNA, 19 nt, Artificial Sequence
  Description of Artificial Sequence: Synthetic oligonucleotide
gugcagugcaugccccacc

SEQ ID NO: 2535899 - RNA, 19 nt, Artificial Sequence
  Description of Artificial Sequence: Synthetic oligonucleotide
ugucggugcugcugucgga

SEQ ID NO: 2535900 - RNA, 19 nt, Artificial Sequence
  Description of Artificial Sequence: Synthetic oligonucleotide
uugggacguaagugguauc

SEQ ID NO: 2535901 - RNA, 19 nt, Artificial Sequence
  Description of Artificial Sequence: Synthetic oligonucleotide
ucucuggugacaggccuuu

SEQ ID NO: 2535902 - RNA, 19 nt, Artificial Sequence
  Description of Artificial Sequence: Synthetic oligonucleotide
gcugucggagccccugucc

SEQ ID NO: 2535903 - RNA, 19 nt, Artificial Sequence
  Description of Artificial Sequence: Synthetic oligonucleotide
gucccugaugacccaccug

SEQ ID NO: 2535904 - RNA, 19 nt, Artificial Sequence
  Description of Artificial Sequence: Synthetic oligonucleotide
gguccuucagagagacccg

SEQ ID NO: 2535905 - RNA, 19 nt, Artificial Sequence
  Description of Artificial Sequence: Synthetic oligonucleotide
cgccauuguaacuuacuac

SEQ ID NO: 2535906 - RNA, 19 nt, Artificial Sequence
  Description of Artificial Sequence: Synthetic oligonucleotide
guacugcuccaugucggug

SEQ ID NO: 2535907 - RNA, 19 nt, Artificial Sequence
  Description of Artificial Sequence: Synthetic oligonucleotide
ugcugucggagccccuguc

SEQ ID NO: 2535908 - RNA, 19 nt, Artificial Sequence
  Description of Artificial Sequence: Synthetic oligonucleotide
aucucaggccggauguacu

SEQ ID NO: 2535909 - RNA, 19 nt, Artificial Sequence
  Description of Artificial Sequence: Synthetic oligonucleotide
gaucucuuucugggccacc

SEQ ID NO: 2535910 - RNA, 19 nt, Artificial Sequence
  Description of Artificial Sequence: Synthetic oligonucleotide
ggggaugaacauacuugag

SEQ ID NO: 2535911 - RNA, 19 nt, Artificial Sequence
  Description of Artificial Sequence: Synthetic oligonucleotide
gcccacgaggaccuguacc

SEQ ID NO: 2535912 - RNA, 19 nt, Artificial Sequence
  Description of Artificial Sequence: Synthetic oligonucleotide
guaguccacaaugggcauc

SEQ ID NO: 2535913 - RNA, 19 nt, Artificial Sequence
  Description of Artificial Sequence: Synthetic oligonucleotide
ucaagagcuuuaggaucuc

SEQ ID NO: 2535914 - RNA, 19 nt, Artificial Sequence
  Description of Artificial Sequence: Synthetic oligonucleotide
ccggauguacuugucguag

SEQ ID NO: 2535915 - RNA, 19 nt, Artificial Sequence
  Description of Artificial Sequence: Synthetic oligonucleotide
uccuuccugggccucccuu

SEQ ID NO: 2535916 - RNA, 19 nt, Artificial Sequence
  Description of Artificial Sequence: Synthetic oligonucleotide
cucaggccggauguacuug

SEQ ID NO: 2535917 - RNA, 19 nt, Artificial Sequence
  Description of Artificial Sequence: Synthetic oligonucleotide
ggcauuguuggccucuugu

SEQ ID NO: 2535918 - RNA, 19 nt, Artificial Sequence
  Description of Artificial Sequence: Synthetic oligonucleotide
gccuugagcauguguuggc

SEQ ID NO: 2535919 - RNA, 19 nt, Artificial Sequence
  Description of Artificial Sequence: Synthetic oligonucleotide
gaccuguacccaccaucuc

SEQ ID NO: 2535920 - RNA, 19 nt, Artificial Sequence
  Description of Artificial Sequence: Synthetic oligonucleotide
cuuuugcugcaugggccac

SEQ ID NO: 2535921 - RNA, 19 nt, Artificial Sequence
  Description of Artificial Sequence: Synthetic oligonucleotide
agcauguguuggcggguaa

SEQ ID NO: 2535922 - RNA, 19 nt, Artificial Sequence
  Description of Artificial Sequence: Synthetic oligonucleotide
cuuccuuccugggccuccc

SEQ ID NO: 2535923 - RNA, 19 nt, Artificial Sequence
  Description of Artificial Sequence: Synthetic oligonucleotide
gacccgagcucgggugugg

SEQ ID NO: 2535924 - RNA, 19 nt, Artificial Sequence
  Description of Artificial Sequence: Synthetic oligonucleotide
cuuucugggccaccuggaa

SEQ ID NO: 2535925 - RNA, 19 nt, Artificial Sequence
  Description of Artificial Sequence: Synthetic oligonucleotide
ccauguacugcuccauguc

SEQ ID NO: 2535926 - RNA, 19 nt, Artificial Sequence
  Description of Artificial Sequence: Synthetic oligonucleotide
cugguagagcuccauggcu

SEQ ID NO: 2535927 - RNA, 19 nt, Artificial Sequence
  Description of Artificial Sequence: Synthetic oligonucleotide
caugggccaccaccgccag

SEQ ID NO: 2535928 - RNA, 19 nt, Artificial Sequence
  Description of Artificial Sequence: Synthetic oligonucleotide
cugcaugggccaccaccgc

SEQ ID NO: 2535929 - RNA, 19 nt, Artificial Sequence
  Description of Artificial Sequence: Synthetic oligonucleotide
gggacguaagugguauccc

SEQ ID NO: 2535930 - RNA, 19 nt, Artificial Sequence
  Description of Artificial Sequence: Synthetic oligonucleotide
cggguaaugccacuccagc

SEQ ID NO: 2535931 - RNA, 19 nt, Artificial Sequence
  Description of Artificial Sequence: Synthetic oligonucleotide
gggccucccuuauuucucc

SEQ ID NO: 2535932 - RNA, 19 nt, Artificial Sequence
  Description of Artificial Sequence: Synthetic oligonucleotide
gcccuucaagagcuuuagg

SEQ ID NO: 2535933 - RNA, 19 nt, Artificial Sequence
  Description of Artificial Sequence: Synthetic oligonucleotide
agcgggugcgguaguccac

SEQ ID NO: 2535934 - RNA, 19 nt, Artificial Sequence
  Description of Artificial Sequence: Synthetic oligonucleotide
ggccagcucgcucacccgc

SEQ ID NO: 2535935 - RNA, 19 nt, Artificial Sequence
  Description of Artificial Sequence: Synthetic oligonucleotide
ccagguccuucagagagac

SEQ ID NO: 2535936 - RNA, 19 nt, Artificial Sequence
  Description of Artificial Sequence: Synthetic oligonucleotide
cagcgggccagcucgcuca

SEQ ID NO: 2535937 - RNA, 19 nt, Artificial Sequence
  Description of Artificial Sequence: Synthetic oligonucleotide
augggccaccaccgccagg

SEQ ID NO: 2535938 - RNA, 19 nt, Artificial Sequence
  Description of Artificial Sequence: Synthetic oligonucleotide
gugucccugaugacccacc

SEQ ID NO: 2535939 - RNA, 19 nt, Artificial Sequence
  Description of Artificial Sequence: Synthetic oligonucleotide
cagucaauggcuacacauu

SEQ ID NO: 2535940 - RNA, 19 nt, Artificial Sequence
  Description of Artificial Sequence: Synthetic oligonucleotide
gugcaugccccaccaccac

SEQ ID NO: 2535941 - RNA, 19 nt, Artificial Sequence
  Description of Artificial Sequence: Synthetic oligonucleotide
guccuucagagagacccga

SEQ ID NO: 2535942 - RNA, 19 nt, Artificial Sequence
  Description of Artificial Sequence: Synthetic oligonucleotide
gcagguuugggacguaagu

SEQ ID NO: 2535943 - RNA, 19 nt, Artificial Sequence
  Description of Artificial Sequence: Synthetic oligonucleotide
cagguccuucagagagacc

SEQ ID NO: 2535944 - RNA, 19 nt, Artificial Sequence
  Description of Artificial Sequence: Synthetic oligonucleotide
gagagacccgagcucgggu

SEQ ID NO: 2535945 - RNA, 19 nt, Artificial Sequence
  Description of Artificial Sequence: Synthetic oligonucleotide
cacugcacuuccaccagcu

SEQ ID NO: 2535946 - RNA, 19 nt, Artificial Sequence
  Description of Artificial Sequence: Synthetic oligonucleotide
caauggcuacacauuugcu

SEQ ID NO: 2535947 - RNA, 19 nt, Artificial Sequence
  Description of Artificial Sequence: Synthetic oligonucleotide
cagagcagcgggccagcuc

SEQ ID NO: 2535948 - RNA, 19 nt, Artificial Sequence
  Description of Artificial Sequence: Synthetic oligonucleotide
aggugcagggccagguccu

SEQ ID NO: 2535949 - RNA, 19 nt, Artificial Sequence
  Description of Artificial Sequence: Synthetic oligonucleotide
ggaagucauugugcagugc

SEQ ID NO: 2535950 - RNA, 19 nt, Artificial Sequence
  Description of Artificial Sequence: Synthetic oligonucleotide
ucggagccccuguccucag

SEQ ID NO: 2535951 - RNA, 19 nt, Artificial Sequence
  Description of Artificial Sequence: Synthetic oligonucleotide
cggggaugaacauacuuga

SEQ ID NO: 2535952 - RNA, 19 nt, Artificial Sequence
  Description of Artificial Sequence: Synthetic oligonucleotide
gcuucucuggugacaggcc

SEQ ID NO: 2535953 - RNA, 19 nt, Artificial Sequence
  Description of Artificial Sequence: Synthetic oligonucleotide
gcggguaaugccacuccag

SEQ ID NO: 2535954 - RNA, 19 nt, Artificial Sequence
  Description of Artificial Sequence: Synthetic oligonucleotide
ggugcugcugucggagccc

SEQ ID NO: 2535955 - RNA, 19 nt, Artificial Sequence
  Description of Artificial Sequence: Synthetic oligonucleotide
gagacccgagcucgggugu

SEQ ID NO: 2535956 - RNA, 19 nt, Artificial Sequence
  Description of Artificial Sequence: Synthetic oligonucleotide
cagcgggugcgguagucca

SEQ ID NO: 2535957 - RNA, 19 nt, Artificial Sequence
  Description of Artificial Sequence: Synthetic oligonucleotide
gcuggcugagcagguuugg

SEQ ID NO: 2535958 - RNA, 19 nt, Artificial Sequence
  Description of Artificial Sequence: Synthetic oligonucleotide
ggcggguaaugccacucca

SEQ ID NO: 2535959 - RNA, 19 nt, Artificial Sequence
  Description of Artificial Sequence: Synthetic oligonucleotide
caggccggauguacuuguc

SEQ ID NO: 2535960 - RNA, 19 nt, Artificial Sequence
  Description of Artificial Sequence: Synthetic oligonucleotide
ccgagcucggguguggaag

SEQ ID NO: 2535961 - RNA, 19 nt, Artificial Sequence
  Description of Artificial Sequence: Synthetic oligonucleotide
caggccaguacugguccuc

SEQ ID NO: 2535962 - RNA, 19 nt, Artificial Sequence
  Description of Artificial Sequence: Synthetic oligonucleotide
gagcagguuugggacguaa

SEQ ID NO: 2535963 - RNA, 19 nt, Artificial Sequence
  Description of Artificial Sequence: Synthetic oligonucleotide
uuggcauuguuggccucuu

SEQ ID NO: 2535964 - RNA, 19 nt, Artificial Sequence
  Description of Artificial Sequence: Synthetic oligonucleotide
cacuggugcucugggccag

SEQ ID NO: 2535965 - RNA, 19 nt, Artificial Sequence
  Description of Artificial Sequence: Synthetic oligonucleotide
guuugggacguaaguggua

SEQ ID NO: 2535966 - RNA, 19 nt, Artificial Sequence
  Description of Artificial Sequence: Synthetic oligonucleotide
ggaccuguacccaccaucu

SEQ ID NO: 2535967 - RNA, 19 nt, Artificial Sequence
  Description of Artificial Sequence: Synthetic oligonucleotide
agacccgagcucgggugug

SEQ ID NO: 2535968 - RNA, 19 nt, Artificial Sequence
  Description of Artificial Sequence: Synthetic oligonucleotide
cuuggcauuguuggccucu

SEQ ID NO: 2535969 - RNA, 19 nt, Artificial Sequence
  Description of Artificial Sequence: Synthetic oligonucleotide
uccagcgggugcgguaguc

SEQ ID NO: 2535970 - RNA, 19 nt, Artificial Sequence
  Description of Artificial Sequence: Synthetic oligonucleotide
ggccggauguacuugucgu

SEQ ID NO: 2535971 - RNA, 19 nt, Artificial Sequence
  Description of Artificial Sequence: Synthetic oligonucleotide
cgagcucggguguggaagc

SEQ ID NO: 2535972 - RNA, 19 nt, Artificial Sequence
  Description of Artificial Sequence: Synthetic oligonucleotide
gccucccuuauuucuccac

SEQ ID NO: 2535973 - RNA, 19 nt, Artificial Sequence
  Description of Artificial Sequence: Synthetic oligonucleotide
cuguacccaccaucucaca

SEQ ID NO: 2535974 - RNA, 19 nt, Artificial Sequence
  Description of Artificial Sequence: Synthetic oligonucleotide
gcuccauggcugucauggc

SEQ ID NO: 2535975 - RNA, 19 nt, Artificial Sequence
  Description of Artificial Sequence: Synthetic oligonucleotide
gguuugggacguaaguggu

SEQ ID NO: 2535976 - RNA, 19 nt, Artificial Sequence
  Description of Artificial Sequence: Synthetic oligonucleotide
gagcauguguuggcgggua

SEQ ID NO: 2535977 - RNA, 19 nt, Artificial Sequence
  Description of Artificial Sequence: Synthetic oligonucleotide
ugcucugggccagcucauc

SEQ ID NO: 2535978 - RNA, 19 nt, Artificial Sequence
  Description of Artificial Sequence: Synthetic oligonucleotide
ggccagcucaucaggccag

SEQ ID NO: 2535979 - RNA, 19 nt, Artificial Sequence
  Description of Artificial Sequence: Synthetic oligonucleotide
uuccugggccucccuuauu

SEQ ID NO: 2535980 - RNA, 19 nt, Artificial Sequence
  Description of Artificial Sequence: Synthetic oligonucleotide
ggcuggcugagcagguuug

SEQ ID NO: 2535981 - RNA, 19 nt, Artificial Sequence
  Description of Artificial Sequence: Synthetic oligonucleotide
cgcucacccgcccacgagg

SEQ ID NO: 2535982 - RNA, 19 nt, Artificial Sequence
  Description of Artificial Sequence: Synthetic oligonucleotide
uggcuccggggaugaacau

SEQ ID NO: 2535983 - RNA, 19 nt, Artificial Sequence
  Description of Artificial Sequence: Synthetic oligonucleotide
cucacccgcccacgaggac

SEQ ID NO: 2535984 - RNA, 19 nt, Artificial Sequence
  Description of Artificial Sequence: Synthetic oligonucleotide
cugucggagccccuguccu

SEQ ID NO: 2535985 - RNA, 19 nt, Artificial Sequence
  Description of Artificial Sequence: Synthetic oligonucleotide
cucgcucacccgcccacga

SEQ ID NO: 2535986 - RNA, 19 nt, Artificial Sequence
  Description of Artificial Sequence: Synthetic oligonucleotide
gggccagcucgcucacccg

SEQ ID NO: 2535987 - RNA, 19 nt, Artificial Sequence
  Description of Artificial Sequence: Synthetic oligonucleotide
ggcuuuggaacgcugucuu

SEQ ID NO: 2535988 - RNA, 19 nt, Artificial Sequence
  Description of Artificial Sequence: Synthetic oligonucleotide
accgccaggcguggcuuug

SEQ ID NO: 2535989 - RNA, 19 nt, Artificial Sequence
  Description of Artificial Sequence: Synthetic oligonucleotide
ugcugggcccaggccuuug

SEQ ID NO: 2535990 - RNA, 19 nt, Artificial Sequence
  Description of Artificial Sequence: Synthetic oligonucleotide
gcaugggccaccaccgcca

SEQ ID NO: 2535991 - RNA, 19 nt, Artificial Sequence
  Description of Artificial Sequence: Synthetic oligonucleotide
guuggcggguaaugccacu

SEQ ID NO: 2535992 - RNA, 19 nt, Artificial Sequence
  Description of Artificial Sequence: Synthetic oligonucleotide
ugggcaucucaggccggau

SEQ ID NO: 2535993 - RNA, 19 nt, Artificial Sequence
  Description of Artificial Sequence: Synthetic oligonucleotide
gcauuguuggccucuuguu

SEQ ID NO: 2535994 - RNA, 19 nt, Artificial Sequence
  Description of Artificial Sequence: Synthetic oligonucleotide
ccagcgggugcgguagucc

SEQ ID NO: 2535995 - RNA, 19 nt, Artificial Sequence
  Description of Artificial Sequence: Synthetic oligonucleotide
caagagcuuuaggaucucu

SEQ ID NO: 2535996 - RNA, 19 nt, Artificial Sequence
  Description of Artificial Sequence: Synthetic oligonucleotide
gagcagcgggccagcucgc

SEQ ID NO: 2535997 - RNA, 19 nt, Artificial Sequence
  Description of Artificial Sequence: Synthetic oligonucleotide
cacuccagcgggugcggua

SEQ ID NO: 2535998 - RNA, 19 nt, Artificial Sequence
  Description of Artificial Sequence: Synthetic oligonucleotide
gccggauguacuugucgua

SEQ ID NO: 2535999 - RNA, 19 nt, Artificial Sequence
  Description of Artificial Sequence: Synthetic oligonucleotide
gcucgcucacccgcccacg

SEQ ID NO: 2536000 - RNA, 19 nt, Artificial Sequence
  Description of Artificial Sequence: Synthetic oligonucleotide
acccgagcucgggugugga

SEQ ID NO: 2536001 - RNA, 19 nt, Artificial Sequence
  Description of Artificial Sequence: Synthetic oligonucleotide
ccacuggugcucugggcca

SEQ ID NO: 2536002 - RNA, 19 nt, Artificial Sequence
  Description of Artificial Sequence: Synthetic oligonucleotide
cuuccugggccucccuuau

SEQ ID NO: 2536003 - RNA, 19 nt, Artificial Sequence
  Description of Artificial Sequence: Synthetic oligonucleotide
gcagugcaugccccaccac

SEQ ID NO: 2536004 - RNA, 19 nt, Artificial Sequence
  Description of Artificial Sequence: Synthetic oligonucleotide
cuugcccuucaagagcuuu

SEQ ID NO: 2536005 - RNA, 19 nt, Artificial Sequence
  Description of Artificial Sequence: Synthetic oligonucleotide
cccuuauuucuccacuggu

SEQ ID NO: 2536006 - RNA, 19 nt, Artificial Sequence
  Description of Artificial Sequence: Synthetic oligonucleotide
gaggaccuguacccaccau

SEQ ID NO: 2536007 - RNA, 19 nt, Artificial Sequence
  Description of Artificial Sequence: Synthetic oligonucleotide
gccacuccagcgggugcgg

SEQ ID NO: 2536008 - RNA, 19 nt, Artificial Sequence
  Description of Artificial Sequence: Synthetic oligonucleotide
cacccgcccacgaggaccu

SEQ ID NO: 2536009 - RNA, 19 nt, Artificial Sequence
  Description of Artificial Sequence: Synthetic oligonucleotide
ggccucccuuauuucucca

SEQ ID NO: 2536010 - RNA, 19 nt, Artificial Sequence
  Description of Artificial Sequence: Synthetic oligonucleotide
gaagggccuuggcauuguu

SEQ ID NO: 2536011 - RNA, 19 nt, Artificial Sequence
  Description of Artificial Sequence: Synthetic oligonucleotide
gcagcgggccagcucgcuc

SEQ ID NO: 2536012 - RNA, 19 nt, Artificial Sequence
  Description of Artificial Sequence: Synthetic oligonucleotide
ccucccuuauuucuccacu

SEQ ID NO: 2536013 - RNA, 19 nt, Artificial Sequence
  Description of Artificial Sequence: Synthetic oligonucleotide
gcucacccgcccacgagga

SEQ ID NO: 2536014 - RNA, 19 nt, Artificial Sequence
  Description of Artificial Sequence: Synthetic oligonucleotide
aucccgggucuggcuccgg

SEQ ID NO: 2536015 - RNA, 19 nt, Artificial Sequence
  Description of Artificial Sequence: Synthetic oligonucleotide
gcgggugcgguaguccaca

SEQ ID NO: 2536016 - RNA, 19 nt, Artificial Sequence
  Description of Artificial Sequence: Synthetic oligonucleotide
gccaguacugguccuccau

SEQ ID NO: 2536017 - RNA, 19 nt, Artificial Sequence
  Description of Artificial Sequence: Synthetic oligonucleotide
gcaugccccaccaccaccu

SEQ ID NO: 2536018 - RNA, 19 nt, Artificial Sequence
  Description of Artificial Sequence: Synthetic oligonucleotide
cggauguacuugucguaga

SEQ ID NO: 2536019 - RNA, 19 nt, Artificial Sequence
  Description of Artificial Sequence: Synthetic oligonucleotide
cugcuccaugucggugcug

SEQ ID NO: 2536020 - RNA, 19 nt, Artificial Sequence
  Description of Artificial Sequence: Synthetic oligonucleotide
gccaggcguggcuuuggaa

SEQ ID NO: 2536021 - RNA, 19 nt, Artificial Sequence
  Description of Artificial Sequence: Synthetic oligonucleotide
ggcuccggggaugaacaua

SEQ ID NO: 2536022 - RNA, 19 nt, Artificial Sequence
  Description of Artificial Sequence: Synthetic oligonucleotide
ccgggucuggcuccgggga

SEQ ID NO: 2536023 - RNA, 19 nt, Artificial Sequence
  Description of Artificial Sequence: Synthetic oligonucleotide
uugcugggcccaggccuuu

SEQ ID NO: 2536024 - RNA, 19 nt, Artificial Sequence
  Description of Artificial Sequence: Synthetic oligonucleotide
gcguggcuuuggaacgcug

SEQ ID NO: 2536025 - RNA, 19 nt, Artificial Sequence
  Description of Artificial Sequence: Synthetic oligonucleotide
caccaccgccaggcguggc

SEQ ID NO: 2536026 - RNA, 19 nt, Artificial Sequence
  Description of Artificial Sequence: Synthetic oligonucleotide
ccugaugacccaccugaau

SEQ ID NO: 2536027 - RNA, 19 nt, Artificial Sequence
  Description of Artificial Sequence: Synthetic oligonucleotide
gcauguguuggcggguaau

SEQ ID NO: 2536028 - RNA, 19 nt, Artificial Sequence
  Description of Artificial Sequence: Synthetic oligonucleotide
cgaggaccuguacccacca

SEQ ID NO: 2536029 - RNA, 19 nt, Artificial Sequence
  Description of Artificial Sequence: Synthetic oligonucleotide
cuccggggaugaacauacu

SEQ ID NO: 2536030 - RNA, 19 nt, Artificial Sequence
  Description of Artificial Sequence: Synthetic oligonucleotide
cguaagugguaucccgggu

SEQ ID NO: 2536031 - RNA, 19 nt, Artificial Sequence
  Description of Artificial Sequence: Synthetic oligonucleotide
gacaggccuuuugcugcau

SEQ ID NO: 2536032 - RNA, 19 nt, Artificial Sequence
  Description of Artificial Sequence: Synthetic oligonucleotide
ccgccaggcguggcuuugg

SEQ ID NO: 2536033 - RNA, 19 nt, Artificial Sequence
  Description of Artificial Sequence: Synthetic oligonucleotide
ccacgaggaccuguaccca

SEQ ID NO: 2536034 - RNA, 19 nt, Artificial Sequence
  Description of Artificial Sequence: Synthetic oligonucleotide
cggguguggaagcugggcu

SEQ ID NO: 2536035 - RNA, 19 nt, Artificial Sequence
  Description of Artificial Sequence: Synthetic oligonucleotide
gcaucucaggccggaugua

SEQ ID NO: 2536036 - RNA, 19 nt, Artificial Sequence
  Description of Artificial Sequence: Synthetic oligonucleotide
gcccaggccuuugggcuuc

SEQ ID NO: 2536037 - RNA, 19 nt, Artificial Sequence
  Description of Artificial Sequence: Synthetic oligonucleotide
cuggugcucugggccagcu

SEQ ID NO: 2536038 - RNA, 19 nt, Artificial Sequence
  Description of Artificial Sequence: Synthetic oligonucleotide
ggcguggcuuuggaacgcu

SEQ ID NO: 2536039 - RNA, 19 nt, Artificial Sequence
  Description of Artificial Sequence: Synthetic oligonucleotide
gcuccaugucggugcugcu

SEQ ID NO: 2536040 - RNA, 19 nt, Artificial Sequence
  Description of Artificial Sequence: Synthetic oligonucleotide
ccgcccacgaggaccugua

SEQ ID NO: 2536041 - RNA, 19 nt, Artificial Sequence
  Description of Artificial Sequence: Synthetic oligonucleotide
cgcccacgaggaccuguac

SEQ ID NO: 2536042 - RNA, 19 nt, Artificial Sequence
  Description of Artificial Sequence: Synthetic oligonucleotide
cccgagcucggguguggaa

SEQ ID NO: 2536043 - RNA, 19 nt, Artificial Sequence
  Description of Artificial Sequence: Synthetic oligonucleotide
cuccagcgggugcgguagu

SEQ ID NO: 2536044 - RNA, 19 nt, Artificial Sequence
  Description of Artificial Sequence: Synthetic oligonucleotide
gucuggcuccggggaugaa

SEQ ID NO: 2536045 - RNA, 19 nt, Artificial Sequence
  Description of Artificial Sequence: Synthetic oligonucleotide
caccgccaggcguggcuuu

SEQ ID NO: 2536046 - RNA, 19 nt, Artificial Sequence
  Description of Artificial Sequence: Synthetic oligonucleotide
cguagagaacaucgccauu

SEQ ID NO: 2536047 - RNA, 19 nt, Artificial Sequence
  Description of Artificial Sequence: Synthetic oligonucleotide
ccagcugguagagcuccau

SEQ ID NO: 2536048 - RNA, 19 nt, Artificial Sequence
  Description of Artificial Sequence: Synthetic oligonucleotide
cgccaggcguggcuuugga

SEQ ID NO: 2536049 - RNA, 19 nt, Artificial Sequence
  Description of Artificial Sequence: Synthetic oligonucleotide
cgggugcgguaguccacaa

SEQ ID NO: 2536050 - RNA, 19 nt, Artificial Sequence
  Description of Artificial Sequence: Synthetic oligonucleotide
cccgcccacgaggaccugu

SEQ ID NO: 2536051 - RNA, 19 nt, Artificial Sequence
  Description of Artificial Sequence: Synthetic oligonucleotide
ccacuccagcgggugcggu

SEQ ID NO: 2536052 - RNA, 19 nt, Artificial Sequence
  Description of Artificial Sequence: Synthetic oligonucleotide
cauuuaaugggaaauuugg

SEQ ID NO: 2536053 - RNA, 19 nt, Artificial Sequence
  Description of Artificial Sequence: Synthetic oligonucleotide
aaguccgcaaucuugcagc

SEQ ID NO: 2536054 - RNA, 19 nt, Artificial Sequence
  Description of Artificial Sequence: Synthetic oligonucleotide
uuaaugggaaauuuggccc

SEQ ID NO: 2536055 - RNA, 19 nt, Artificial Sequence
  Description of Artificial Sequence: Synthetic oligonucleotide
uuagcuuccgccaggaagg

SEQ ID NO: 2536056 - RNA, 19 nt, Artificial Sequence
  Description of Artificial Sequence: Synthetic oligonucleotide
ucaguuugaugccugaggg

SEQ ID NO: 2536057 - RNA, 19 nt, Artificial Sequence
  Description of Artificial Sequence: Synthetic oligonucleotide
aguuaauggcuucuggugc

SEQ ID NO: 2536058 - RNA, 19 nt, Artificial Sequence
  Description of Artificial Sequence: Synthetic oligonucleotide
cacacaucggacuugaugg

SEQ ID NO: 2536059 - RNA, 19 nt, Artificial Sequence
  Description of Artificial Sequence: Synthetic oligonucleotide
guaauuuugcucuucaaug

SEQ ID NO: 2536060 - RNA, 19 nt, Artificial Sequence
  Description of Artificial Sequence: Synthetic oligonucleotide
ucuugagaaaaucuacuag

SEQ ID NO: 2536061 - RNA, 19 nt, Artificial Sequence
  Description of Artificial Sequence: Synthetic oligonucleotide
gauguuggcagcccgaagg

SEQ ID NO: 2536062 - RNA, 19 nt, Artificial Sequence
  Description of Artificial Sequence: Synthetic oligonucleotide
agaaaaucuacuaggcucc

SEQ ID NO: 2536063 - RNA, 19 nt, Artificial Sequence
  Description of Artificial Sequence: Synthetic oligonucleotide
aaucacuucaggguuaguc

SEQ ID NO: 2536064 - RNA, 19 nt, Artificial Sequence
  Description of Artificial Sequence: Synthetic oligonucleotide
aaugagacgugccaggcca

SEQ ID NO: 2536065 - RNA, 19 nt, Artificial Sequence
  Description of Artificial Sequence: Synthetic oligonucleotide
aaucuugcagcucaaugug

SEQ ID NO: 2536066 - RNA, 19 nt, Artificial Sequence
  Description of Artificial Sequence: Synthetic oligonucleotide
uugagaaaaucuacuaggc

SEQ ID NO: 2536067 - RNA, 19 nt, Artificial Sequence
  Description of Artificial Sequence: Synthetic oligonucleotide
uucaguuugaugccugagg

SEQ ID NO: 2536068 - RNA, 19 nt, Artificial Sequence
  Description of Artificial Sequence: Synthetic oligonucleotide
uguaauuuugcucuucaau

SEQ ID NO: 2536069 - RNA, 19 nt, Artificial Sequence
  Description of Artificial Sequence: Synthetic oligonucleotide
ucaaugaaugccaugcccu

SEQ ID NO: 2536070 - RNA, 19 nt, Artificial Sequence
  Description of Artificial Sequence: Synthetic oligonucleotide
gauucugaaucacuucagg

SEQ ID NO: 2536071 - RNA, 19 nt, Artificial Sequence
  Description of Artificial Sequence: Synthetic oligonucleotide
uaauuuugcucuucaauga

SEQ ID NO: 2536072 - RNA, 19 nt, Artificial Sequence
  Description of Artificial Sequence: Synthetic oligonucleotide
aaaucuacuaggcucccgu

SEQ ID NO: 2536073 - RNA, 19 nt, Artificial Sequence
  Description of Artificial Sequence: Synthetic oligonucleotide
auuuaaugggaaauuuggc

SEQ ID NO: 2536074 - RNA, 19 nt, Artificial Sequence
  Description of Artificial Sequence: Synthetic oligonucleotide
aaaguccgcaaucuugcag

SEQ ID NO: 2536075 - RNA, 19 nt, Artificial Sequence
  Description of Artificial Sequence: Synthetic oligonucleotide
cuuguugauguucaguuug

SEQ ID NO: 2536076 - RNA, 19 nt, Artificial Sequence
  Description of Artificial Sequence: Synthetic oligonucleotide
agcucaaugugucggacac

SEQ ID NO: 2536077 - RNA, 19 nt, Artificial Sequence
  Description of Artificial Sequence: Synthetic oligonucleotide
guuagcuuccgccaggaag

SEQ ID NO: 2536078 - RNA, 19 nt, Artificial Sequence
  Description of Artificial Sequence: Synthetic oligonucleotide
uguaguaccccauccacac

SEQ ID NO: 2536079 - RNA, 19 nt, Artificial Sequence
  Description of Artificial Sequence: Synthetic oligonucleotide
gacuugauggugaaggucc

SEQ ID NO: 2536080 - RNA, 19 nt, Artificial Sequence
  Description of Artificial Sequence: Synthetic oligonucleotide
auaguuaauggcuucuggu

SEQ ID NO: 2536081 - RNA, 19 nt, Artificial Sequence
  Description of Artificial Sequence: Synthetic oligonucleotide
accaacuucagugucuccc

SEQ ID NO: 2536082 - RNA, 19 nt, Artificial Sequence
  Description of Artificial Sequence: Synthetic oligonucleotide
uccaacagcuuguugaugu

SEQ ID NO: 2536083 - RNA, 19 nt, Artificial Sequence
  Description of Artificial Sequence: Synthetic oligonucleotide
aauuuugcucuucaaugaa

SEQ ID NO: 2536084 - RNA, 19 nt, Artificial Sequence
  Description of Artificial Sequence: Synthetic oligonucleotide
aaggucccauaguuaaugg

SEQ ID NO: 2536085 - RNA, 19 nt, Artificial Sequence
  Description of Artificial Sequence: Synthetic oligonucleotide
aguuugaugccugagggag

SEQ ID NO: 2536086 - RNA, 19 nt, Artificial Sequence
  Description of Artificial Sequence: Synthetic oligonucleotide
gauggauguaauuuugcuc

SEQ ID NO: 2536087 - RNA, 19 nt, Artificial Sequence
  Description of Artificial Sequence: Synthetic oligonucleotide
caugagguuagcuuccgcc

SEQ ID NO: 2536088 - RNA, 19 nt, Artificial Sequence
  Description of Artificial Sequence: Synthetic oligonucleotide
agcaagaucccgaaagacc

SEQ ID NO: 2536089 - RNA, 19 nt, Artificial Sequence
  Description of Artificial Sequence: Synthetic oligonucleotide
uccgcaaucuugcagcuca

SEQ ID NO: 2536090 - RNA, 19 nt, Artificial Sequence
  Description of Artificial Sequence: Synthetic oligonucleotide
aaacuggccagcucccagg

SEQ ID NO: 2536091 - RNA, 19 nt, Artificial Sequence
  Description of Artificial Sequence: Synthetic oligonucleotide
guuucaugagguuagcuuc

SEQ ID NO: 2536092 - RNA, 19 nt, Artificial Sequence
  Description of Artificial Sequence: Synthetic oligonucleotide
acuucaggguuagucaucc

SEQ ID NO: 2536093 - RNA, 19 nt, Artificial Sequence
  Description of Artificial Sequence: Synthetic oligonucleotide
gugaccacugcguaaagcc

SEQ ID NO: 2536094 - RNA, 19 nt, Artificial Sequence
  Description of Artificial Sequence: Synthetic oligonucleotide
ugugcugccauguccaaca

SEQ ID NO: 2536095 - RNA, 19 nt, Artificial Sequence
  Description of Artificial Sequence: Synthetic oligonucleotide
uucagugucucccugggaa

SEQ ID NO: 2536096 - RNA, 19 nt, Artificial Sequence
  Description of Artificial Sequence: Synthetic oligonucleotide
uaaugggaaauuuggcccc

SEQ ID NO: 2536097 - RNA, 19 nt, Artificial Sequence
  Description of Artificial Sequence: Synthetic oligonucleotide
cauucauccucccaccacg

SEQ ID NO: 2536098 - RNA, 19 nt, Artificial Sequence
  Description of Artificial Sequence: Synthetic oligonucleotide
auuguccucaaugagacgu

SEQ ID NO: 2536099 - RNA, 19 nt, Artificial Sequence
  Description of Artificial Sequence: Synthetic oligonucleotide
caaugugucggacaccagg

SEQ ID NO: 2536100 - RNA, 19 nt, Artificial Sequence
  Description of Artificial Sequence: Synthetic oligonucleotide
cauaguuaauggcuucugg

SEQ ID NO: 2536101 - RNA, 19 nt, Artificial Sequence
  Description of Artificial Sequence: Synthetic oligonucleotide
ucuacuaggcucccguucu

SEQ ID NO: 2536102 - RNA, 19 nt, Artificial Sequence
  Description of Artificial Sequence: Synthetic oligonucleotide
gauguagaugggcuccugg

SEQ ID NO: 2536103 - RNA, 19 nt, Artificial Sequence
  Description of Artificial Sequence: Synthetic oligonucleotide
uucaggguuagucaucccu

SEQ ID NO: 2536104 - RNA, 19 nt, Artificial Sequence
  Description of Artificial Sequence: Synthetic oligonucleotide
gaugauguagaugggcucc

SEQ ID NO: 2536105 - RNA, 19 nt, Artificial Sequence
  Description of Artificial Sequence: Synthetic oligonucleotide
ugugaugauguagaugggc

SEQ ID NO: 2536106 - RNA, 19 nt, Artificial Sequence
  Description of Artificial Sequence: Synthetic oligonucleotide
aucacuucaggguuaguca

SEQ ID NO: 2536107 - RNA, 19 nt, Artificial Sequence
  Description of Artificial Sequence: Synthetic oligonucleotide
ucugucagcaagaucccga

SEQ ID NO: 2536108 - RNA, 19 nt, Artificial Sequence
  Description of Artificial Sequence: Synthetic oligonucleotide
ucaggguuagucaucccug

SEQ ID NO: 2536109 - RNA, 19 nt, Artificial Sequence
  Description of Artificial Sequence: Synthetic oligonucleotide
aggucccauaguuaauggc

SEQ ID NO: 2536110 - RNA, 19 nt, Artificial Sequence
  Description of Artificial Sequence: Synthetic oligonucleotide
cuggacaguugucaggucg

SEQ ID NO: 2536111 - RNA, 19 nt, Artificial Sequence
  Description of Artificial Sequence: Synthetic oligonucleotide
auguagaugggcuccuggg

SEQ ID NO: 2536112 - RNA, 19 nt, Artificial Sequence
  Description of Artificial Sequence: Synthetic oligonucleotide
gacgaucucugucagcaag

SEQ ID NO: 2536113 - RNA, 19 nt, Artificial Sequence
  Description of Artificial Sequence: Synthetic oligonucleotide
ugugucggacaccaggaug

SEQ ID NO: 2536114 - RNA, 19 nt, Artificial Sequence
  Description of Artificial Sequence: Synthetic oligonucleotide
aaugccaugcccucugcaa

SEQ ID NO: 2536115 - RNA, 19 nt, Artificial Sequence
  Description of Artificial Sequence: Synthetic oligonucleotide
ucaaccaacuucagugucu

SEQ ID NO: 2536116 - RNA, 19 nt, Artificial Sequence
  Description of Artificial Sequence: Synthetic oligonucleotide
cacacuuccccaaacuggc

SEQ ID NO: 2536117 - RNA, 19 nt, Artificial Sequence
  Description of Artificial Sequence: Synthetic oligonucleotide
ugucaggucgaaccaugcg

SEQ ID NO: 2536118 - RNA, 19 nt, Artificial Sequence
  Description of Artificial Sequence: Synthetic oligonucleotide
ucagcaagaucccgaaaga

SEQ ID NO: 2536119 - RNA, 19 nt, Artificial Sequence
  Description of Artificial Sequence: Synthetic oligonucleotide
uccucaaugagacgugcca

SEQ ID NO: 2536120 - RNA, 19 nt, Artificial Sequence
  Description of Artificial Sequence: Synthetic oligonucleotide
cuggguaagggauucugcc

SEQ ID NO: 2536121 - RNA, 19 nt, Artificial Sequence
  Description of Artificial Sequence: Synthetic oligonucleotide
acugcguaaagccggacca

SEQ ID NO: 2536122 - RNA, 19 nt, Artificial Sequence
  Description of Artificial Sequence: Synthetic oligonucleotide
ugagguuagcuuccgccag

SEQ ID NO: 2536123 - RNA, 19 nt, Artificial Sequence
  Description of Artificial Sequence: Synthetic oligonucleotide
cucaaugagacgugccagg

SEQ ID NO: 2536124 - RNA, 19 nt, Artificial Sequence
  Description of Artificial Sequence: Synthetic oligonucleotide
aauggcuucuggugcuguc

SEQ ID NO: 2536125 - RNA, 19 nt, Artificial Sequence
  Description of Artificial Sequence: Synthetic oligonucleotide
gaaggucccauaguuaaug

SEQ ID NO: 2536126 - RNA, 19 nt, Artificial Sequence
  Description of Artificial Sequence: Synthetic oligonucleotide
ucuggugcuguccauuuaa

SEQ ID NO: 2536127 - RNA, 19 nt, Artificial Sequence
  Description of Artificial Sequence: Synthetic oligonucleotide
guagccucgcuccagauuc

SEQ ID NO: 2536128 - RNA, 19 nt, Artificial Sequence
  Description of Artificial Sequence: Synthetic oligonucleotide
ucaggucgaaccaugcggu

SEQ ID NO: 2536129 - RNA, 19 nt, Artificial Sequence
  Description of Artificial Sequence: Synthetic oligonucleotide
ugggugacgaucucuguca

SEQ ID NO: 2536130 - RNA, 19 nt, Artificial Sequence
  Description of Artificial Sequence: Synthetic oligonucleotide
aaaaucuacuaggcucccg

SEQ ID NO: 2536131 - RNA, 19 nt, Artificial Sequence
  Description of Artificial Sequence: Synthetic oligonucleotide
uuagucaucccuggguaag

SEQ ID NO: 2536132 - RNA, 19 nt, Artificial Sequence
  Description of Artificial Sequence: Synthetic oligonucleotide
aaugugucggacaccagga

SEQ ID NO: 2536133 - RNA, 19 nt, Artificial Sequence
  Description of Artificial Sequence: Synthetic oligonucleotide
guuggcagcccgaaggucg

SEQ ID NO: 2536134 - RNA, 19 nt, Artificial Sequence
  Description of Artificial Sequence: Synthetic oligonucleotide
guuguaguaccccauccac

SEQ ID NO: 2536135 - RNA, 19 nt, Artificial Sequence
  Description of Artificial Sequence: Synthetic oligonucleotide
agcuuguugauguucaguu

SEQ ID NO: 2536136 - RNA, 19 nt, Artificial Sequence
  Description of Artificial Sequence: Synthetic oligonucleotide
uuguaguaccccauccaca

SEQ ID NO: 2536137 - RNA, 19 nt, Artificial Sequence
  Description of Artificial Sequence: Synthetic oligonucleotide
gauucugccaugggugacg

SEQ ID NO: 2536138 - RNA, 19 nt, Artificial Sequence
  Description of Artificial Sequence: Synthetic oligonucleotide
uuguugauguucaguuuga

SEQ ID NO: 2536139 - RNA, 19 nt, Artificial Sequence
  Description of Artificial Sequence: Synthetic oligonucleotide
uguccauuuaaugggaaau

SEQ ID NO: 2536140 - RNA, 19 nt, Artificial Sequence
  Description of Artificial Sequence: Synthetic oligonucleotide
ucaucccuggguaagggau

SEQ ID NO: 2536141 - RNA, 19 nt, Artificial Sequence
  Description of Artificial Sequence: Synthetic oligonucleotide
guaaagccggaccagccgc

SEQ ID NO: 2536142 - RNA, 19 nt, Artificial Sequence
  Description of Artificial Sequence: Synthetic oligonucleotide
cuugcagcucaaugugucg

SEQ ID NO: 2536143 - RNA, 19 nt, Artificial Sequence
  Description of Artificial Sequence: Synthetic oligonucleotide
uugcagcucaaugugucgg

SEQ ID NO: 2536144 - RNA, 19 nt, Artificial Sequence
  Description of Artificial Sequence: Synthetic oligonucleotide
gaccacugcguaaagccgg

SEQ ID NO: 2536145 - RNA, 19 nt, Artificial Sequence
  Description of Artificial Sequence: Synthetic oligonucleotide
ucugccaugggugacgauc

SEQ ID NO: 2536146 - RNA, 19 nt, Artificial Sequence
  Description of Artificial Sequence: Synthetic oligonucleotide
augagguuagcuuccgcca

SEQ ID NO: 2536147 - RNA, 19 nt, Artificial Sequence
  Description of Artificial Sequence: Synthetic oligonucleotide
ucaaugagacgugccaggc

SEQ ID NO: 2536148 - RNA, 19 nt, Artificial Sequence
  Description of Artificial Sequence: Synthetic oligonucleotide
uggguaagggauucugcca

SEQ ID NO: 2536149 - RNA, 19 nt, Artificial Sequence
  Description of Artificial Sequence: Synthetic oligonucleotide
uggacaguugucaggucga

SEQ ID NO: 2536150 - RNA, 19 nt, Artificial Sequence
  Description of Artificial Sequence: Synthetic oligonucleotide
uaguaccccauccacacuu

SEQ ID NO: 2536151 - RNA, 19 nt, Artificial Sequence
  Description of Artificial Sequence: Synthetic oligonucleotide
ugaugauguagaugggcuc

SEQ ID NO: 2536152 - RNA, 19 nt, Artificial Sequence
  Description of Artificial Sequence: Synthetic oligonucleotide
gugaaggucccauaguuaa

SEQ ID NO: 2536153 - RNA, 19 nt, Artificial Sequence
  Description of Artificial Sequence: Synthetic oligonucleotide
augaaugccaugcccucug

SEQ ID NO: 2536154 - RNA, 19 nt, Artificial Sequence
  Description of Artificial Sequence: Synthetic oligonucleotide
gaaccucccauucauccuc

SEQ ID NO: 2536155 - RNA, 19 nt, Artificial Sequence
  Description of Artificial Sequence: Synthetic oligonucleotide
aaugaaugccaugcccucu

SEQ ID NO: 2536156 - RNA, 19 nt, Artificial Sequence
  Description of Artificial Sequence: Synthetic oligonucleotide
ucgcuccagauucugaauc

SEQ ID NO: 2536157 - RNA, 19 nt, Artificial Sequence
  Description of Artificial Sequence: Synthetic oligonucleotide
cucccauucauccucccac

SEQ ID NO: 2536158 - RNA, 19 nt, Artificial Sequence
  Description of Artificial Sequence: Synthetic oligonucleotide
aaccaugcgguagccucgc

SEQ ID NO: 2536159 - RNA, 19 nt, Artificial Sequence
  Description of Artificial Sequence: Synthetic oligonucleotide
auggcuucuggugcugucc

SEQ ID NO: 2536160 - RNA, 19 nt, Artificial Sequence
  Description of Artificial Sequence: Synthetic oligonucleotide
guaagggauucugccaugg

SEQ ID NO: 2536161 - RNA, 19 nt, Artificial Sequence
  Description of Artificial Sequence: Synthetic oligonucleotide
uugucaggucgaaccaugc

SEQ ID NO: 2536162 - RNA, 19 nt, Artificial Sequence
  Description of Artificial Sequence: Synthetic oligonucleotide
gagguuagcuuccgccagg

SEQ ID NO: 2536163 - RNA, 19 nt, Artificial Sequence
  Description of Artificial Sequence: Synthetic oligonucleotide
uucugugaugauguagaug

SEQ ID NO: 2536164 - RNA, 19 nt, Artificial Sequence
  Description of Artificial Sequence: Synthetic oligonucleotide
ucacuucaggguuagucau

SEQ ID NO: 2536165 - RNA, 19 nt, Artificial Sequence
  Description of Artificial Sequence: Synthetic oligonucleotide
aagaucccgaaagaccaca

SEQ ID NO: 2536166 - RNA, 19 nt, Artificial Sequence
  Description of Artificial Sequence: Synthetic oligonucleotide
agggauucugccaugggug

SEQ ID NO: 2536167 - RNA, 19 nt, Artificial Sequence
  Description of Artificial Sequence: Synthetic oligonucleotide
agcuccucuggacaguugu

SEQ ID NO: 2536168 - RNA, 19 nt, Artificial Sequence
  Description of Artificial Sequence: Synthetic oligonucleotide
uguccaacagcuuguugau

SEQ ID NO: 2536169 - RNA, 19 nt, Artificial Sequence
  Description of Artificial Sequence: Synthetic oligonucleotide
uucaugagguuagcuuccg

SEQ ID NO: 2536170 - RNA, 19 nt, Artificial Sequence
  Description of Artificial Sequence: Synthetic oligonucleotide
caggguuagucaucccugg

SEQ ID NO: 2536171 - RNA, 19 nt, Artificial Sequence
  Description of Artificial Sequence: Synthetic oligonucleotide
caaucuugcagcucaaugu

SEQ ID NO: 2536172 - RNA, 19 nt, Artificial Sequence
  Description of Artificial Sequence: Synthetic oligonucleotide
aggguuagucaucccuggg

SEQ ID NO: 2536173 - RNA, 19 nt, Artificial Sequence
  Description of Artificial Sequence: Synthetic oligonucleotide
agcccgaaggucgcgaugg

SEQ ID NO: 2536174 - RNA, 19 nt, Artificial Sequence
  Description of Artificial Sequence: Synthetic oligonucleotide
aaccucccauucauccucc

SEQ ID NO: 2536175 - RNA, 19 nt, Artificial Sequence
  Description of Artificial Sequence: Synthetic oligonucleotide
gaaccaugcgguagccucg

SEQ ID NO: 2536176 - RNA, 19 nt, Artificial Sequence
  Description of Artificial Sequence: Synthetic oligonucleotide
uaggcucccguucuccaug

SEQ ID NO: 2536177 - RNA, 19 nt, Artificial Sequence
  Description of Artificial Sequence: Synthetic oligonucleotide
agauucugaaucacuucag

SEQ ID NO: 2536178 - RNA, 19 nt, Artificial Sequence
  Description of Artificial Sequence: Synthetic oligonucleotide
uccugggugaccacugcgu

SEQ ID NO: 2536179 - RNA, 19 nt, Artificial Sequence
  Description of Artificial Sequence: Synthetic oligonucleotide
guacagcuccucuggacag

SEQ ID NO: 2536180 - RNA, 19 nt, Artificial Sequence
  Description of Artificial Sequence: Synthetic oligonucleotide
cacugcguaaagccggacc

SEQ ID NO: 2536181 - RNA, 19 nt, Artificial Sequence
  Description of Artificial Sequence: Synthetic oligonucleotide
cuucgugugcccguuguag

SEQ ID NO: 2536182 - RNA, 19 nt, Artificial Sequence
  Description of Artificial Sequence: Synthetic oligonucleotide
ucccauucauccucccacc

SEQ ID NO: 2536183 - RNA, 19 nt, Artificial Sequence
  Description of Artificial Sequence: Synthetic oligonucleotide
aaggucgcgauggauguaa

SEQ ID NO: 2536184 - RNA, 19 nt, Artificial Sequence
  Description of Artificial Sequence: Synthetic oligonucleotide
caaugaaugccaugcccuc

SEQ ID NO: 2536185 - RNA, 19 nt, Artificial Sequence
  Description of Artificial Sequence: Synthetic oligonucleotide
cucaaugugucggacacca

SEQ ID NO: 2536186 - RNA, 19 nt, Artificial Sequence
  Description of Artificial Sequence: Synthetic oligonucleotide
ucaugagguuagcuuccgc

SEQ ID NO: 2536187 - RNA, 19 nt, Artificial Sequence
  Description of Artificial Sequence: Synthetic oligonucleotide
gucuugagaaaaucuacua

SEQ ID NO: 2536188 - RNA, 19 nt, Artificial Sequence
  Description of Artificial Sequence: Synthetic oligonucleotide
cgcucaaccaacuucagug

SEQ ID NO: 2536189 - RNA, 19 nt, Artificial Sequence
  Description of Artificial Sequence: Synthetic oligonucleotide
ucagugucucccugggaac

SEQ ID NO: 2536190 - RNA, 19 nt, Artificial Sequence
  Description of Artificial Sequence: Synthetic oligonucleotide
agacgugccaggccaaagu

SEQ ID NO: 2536191 - RNA, 19 nt, Artificial Sequence
  Description of Artificial Sequence: Synthetic oligonucleotide
gaaaaucuacuaggcuccc

SEQ ID NO: 2536192 - RNA, 19 nt, Artificial Sequence
  Description of Artificial Sequence: Synthetic oligonucleotide
ccacacuuccccaaacugg

SEQ ID NO: 2536193 - RNA, 19 nt, Artificial Sequence
  Description of Artificial Sequence: Synthetic oligonucleotide
uucgugugcccguuguagu

SEQ ID NO: 2536194 - RNA, 19 nt, Artificial Sequence
  Description of Artificial Sequence: Synthetic oligonucleotide
acgugccaggccaaagucc

SEQ ID NO: 2536195 - RNA, 19 nt, Artificial Sequence
  Description of Artificial Sequence: Synthetic oligonucleotide
caaugagacgugccaggcc

SEQ ID NO: 2536196 - RNA, 19 nt, Artificial Sequence
  Description of Artificial Sequence: Synthetic oligonucleotide
aaucuacuaggcucccguu

SEQ ID NO: 2536197 - RNA, 19 nt, Artificial Sequence
  Description of Artificial Sequence: Synthetic oligonucleotide
cucaaccaacuucaguguc

SEQ ID NO: 2536198 - RNA, 19 nt, Artificial Sequence
  Description of Artificial Sequence: Synthetic oligonucleotide
ugaaugccaugcccucugc

SEQ ID NO: 2536199 - RNA, 19 nt, Artificial Sequence
  Description of Artificial Sequence: Synthetic oligonucleotide
ugcguaaagccggaccagc

SEQ ID NO: 2536200 - RNA, 19 nt, Artificial Sequence
  Description of Artificial Sequence: Synthetic oligonucleotide
ugcagcucaaugugucgga

SEQ ID NO: 2536201 - RNA, 19 nt, Artificial Sequence
  Description of Artificial Sequence: Synthetic oligonucleotide
uguccucaaugagacgugc

SEQ ID NO: 2536202 - RNA, 19 nt, Artificial Sequence
  Description of Artificial Sequence: Synthetic oligonucleotide
ucaaugugucggacaccag

SEQ ID NO: 2536203 - RNA, 19 nt, Artificial Sequence
  Description of Artificial Sequence: Synthetic oligonucleotide
ugaaggucccauaguuaau

SEQ ID NO: 2536204 - RNA, 19 nt, Artificial Sequence
  Description of Artificial Sequence: Synthetic oligonucleotide
auguaauuuugcucuucaa

SEQ ID NO: 2536205 - RNA, 19 nt, Artificial Sequence
  Description of Artificial Sequence: Synthetic oligonucleotide
uaaagccggaccagccgcu

SEQ ID NO: 2536206 - RNA, 19 nt, Artificial Sequence
  Description of Artificial Sequence: Synthetic oligonucleotide
uucauccucccaccacggc

SEQ ID NO: 2536207 - RNA, 19 nt, Artificial Sequence
  Description of Artificial Sequence: Synthetic oligonucleotide
gcaaggacggcucaacuuc

SEQ ID NO: 2536208 - RNA, 19 nt, Artificial Sequence
  Description of Artificial Sequence: Synthetic oligonucleotide
uggcuucuggugcugucca

SEQ ID NO: 2536209 - RNA, 19 nt, Artificial Sequence
  Description of Artificial Sequence: Synthetic oligonucleotide
gcaagaucccgaaagacca

SEQ ID NO: 2536210 - RNA, 19 nt, Artificial Sequence
  Description of Artificial Sequence: Synthetic oligonucleotide
ugucucccugggaaccucc

SEQ ID NO: 2536211 - RNA, 19 nt, Artificial Sequence
  Description of Artificial Sequence: Synthetic oligonucleotide
uuggcagcccgaaggucgc

SEQ ID NO: 2536212 - RNA, 19 nt, Artificial Sequence
  Description of Artificial Sequence: Synthetic oligonucleotide
ugggugaccacugcguaaa

SEQ ID NO: 2536213 - RNA, 19 nt, Artificial Sequence
  Description of Artificial Sequence: Synthetic oligonucleotide
ugcugccauguccaacagc

SEQ ID NO: 2536214 - RNA, 19 nt, Artificial Sequence
  Description of Artificial Sequence: Synthetic oligonucleotide
ugcccguuguaguacccca

SEQ ID NO: 2536215 - RNA, 19 nt, Artificial Sequence
  Description of Artificial Sequence: Synthetic oligonucleotide
auucauccucccaccacgg

SEQ ID NO: 2536216 - RNA, 19 nt, Artificial Sequence
  Description of Artificial Sequence: Synthetic oligonucleotide
caggcgcucaaccaacuuc

SEQ ID NO: 2536217 - RNA, 19 nt, Artificial Sequence
  Description of Artificial Sequence: Synthetic oligonucleotide
ugugcccguuguaguaccc

SEQ ID NO: 2536218 - RNA, 19 nt, Artificial Sequence
  Description of Artificial Sequence: Synthetic oligonucleotide
guuaauggcuucuggugcu

SEQ ID NO: 2536219 - RNA, 19 nt, Artificial Sequence
  Description of Artificial Sequence: Synthetic oligonucleotide
ucgcgauggauguaauuuu

SEQ ID NO: 2536220 - RNA, 19 nt, Artificial Sequence
  Description of Artificial Sequence: Synthetic oligonucleotide
acacaucggacuugauggu

SEQ ID NO: 2536221 - RNA, 19 nt, Artificial Sequence
  Description of Artificial Sequence: Synthetic oligonucleotide
uacuaggcucccguucucc

SEQ ID NO: 2536222 - RNA, 19 nt, Artificial Sequence
  Description of Artificial Sequence: Synthetic oligonucleotide
gaucucugucagcaagauc

SEQ ID NO: 2536223 - RNA, 19 nt, Artificial Sequence
  Description of Artificial Sequence: Synthetic oligonucleotide
cuccugggugaccacugcg

SEQ ID NO: 2536224 - RNA, 19 nt, Artificial Sequence
  Description of Artificial Sequence: Synthetic oligonucleotide
caagaucccgaaagaccac

SEQ ID NO: 2536225 - RNA, 19 nt, Artificial Sequence
  Description of Artificial Sequence: Synthetic oligonucleotide
cagcaagaucccgaaagac

SEQ ID NO: 2536226 - RNA, 19 nt, Artificial Sequence
  Description of Artificial Sequence: Synthetic oligonucleotide
ggucgaaccaugcgguagc

SEQ ID NO: 2536227 - RNA, 19 nt, Artificial Sequence
  Description of Artificial Sequence: Synthetic oligonucleotide
ucucccugggaaccuccca

SEQ ID NO: 2536228 - RNA, 19 nt, Artificial Sequence
  Description of Artificial Sequence: Synthetic oligonucleotide
gaaugccaugcccucugca

SEQ ID NO: 2536229 - RNA, 19 nt, Artificial Sequence
  Description of Artificial Sequence: Synthetic oligonucleotide
caaccaacuucagugucuc

SEQ ID NO: 2536230 - RNA, 19 nt, Artificial Sequence
  Description of Artificial Sequence: Synthetic oligonucleotide
ucccaggcgcucaaccaac

SEQ ID NO: 2536231 - RNA, 19 nt, Artificial Sequence
  Description of Artificial Sequence: Synthetic oligonucleotide
uccgccaggaaggcaucgg

SEQ ID NO: 2536232 - RNA, 19 nt, Artificial Sequence
  Description of Artificial Sequence: Synthetic oligonucleotide
aggcgcucaaccaacuuca

SEQ ID NO: 2536233 - RNA, 19 nt, Artificial Sequence
  Description of Artificial Sequence: Synthetic oligonucleotide
accucccauucauccuccc

SEQ ID NO: 2536234 - RNA, 19 nt, Artificial Sequence
  Description of Artificial Sequence: Synthetic oligonucleotide
aguccgcaaucuugcagcu

SEQ ID NO: 2536235 - RNA, 19 nt, Artificial Sequence
  Description of Artificial Sequence: Synthetic oligonucleotide
uguugauguucaguuugau

SEQ ID NO: 2536236 - RNA, 19 nt, Artificial Sequence
  Description of Artificial Sequence: Synthetic oligonucleotide
cgugccaggccaaaguccg

SEQ ID NO: 2536237 - RNA, 19 nt, Artificial Sequence
  Description of Artificial Sequence: Synthetic oligonucleotide
gacaugcucccuugcuuca

SEQ ID NO: 2536238 - RNA, 19 nt, Artificial Sequence
  Description of Artificial Sequence: Synthetic oligonucleotide
ugucagcaagaucccgaaa

SEQ ID NO: 2536239 - RNA, 19 nt, Artificial Sequence
  Description of Artificial Sequence: Synthetic oligonucleotide
augccaugcccucugcaau

SEQ ID NO: 2536240 - RNA, 19 nt, Artificial Sequence
  Description of Artificial Sequence: Synthetic oligonucleotide
ucacugccaccuucgugug

SEQ ID NO: 2536241 - RNA, 19 nt, Artificial Sequence
  Description of Artificial Sequence: Synthetic oligonucleotide
accuucgugugcccguugu

SEQ ID NO: 2536242 - RNA, 19 nt, Artificial Sequence
  Description of Artificial Sequence: Synthetic oligonucleotide
cagugucucccugggaacc

SEQ ID NO: 2536243 - RNA, 19 nt, Artificial Sequence
  Description of Artificial Sequence: Synthetic oligonucleotide
cucugucagcaagaucccg

SEQ ID NO: 2536244 - RNA, 19 nt, Artificial Sequence
  Description of Artificial Sequence: Synthetic oligonucleotide
ucgugugcccguuguagua

SEQ ID NO: 2536245 - RNA, 19 nt, Artificial Sequence
  Description of Artificial Sequence: Synthetic oligonucleotide
gugaugauguagaugggcu

SEQ ID NO: 2536246 - RNA, 19 nt, Artificial Sequence
  Description of Artificial Sequence: Synthetic oligonucleotide
uggauguaauuuugcucuu

SEQ ID NO: 2536247 - RNA, 19 nt, Artificial Sequence
  Description of Artificial Sequence: Synthetic oligonucleotide
gauguucaguuugaugccu

SEQ ID NO: 2536248 - RNA, 19 nt, Artificial Sequence
  Description of Artificial Sequence: Synthetic oligonucleotide
aguaccccauccacacuuc

SEQ ID NO: 2536249 - RNA, 19 nt, Artificial Sequence
  Description of Artificial Sequence: Synthetic oligonucleotide
aaagccggaccagccgcug

SEQ ID NO: 2536250 - RNA, 19 nt, Artificial Sequence
  Description of Artificial Sequence: Synthetic oligonucleotide
ccgaaggucgcgauggaug

SEQ ID NO: 2536251 - RNA, 19 nt, Artificial Sequence
  Description of Artificial Sequence: Synthetic oligonucleotide
gguuagucaucccugggua

SEQ ID NO: 2536252 - RNA, 19 nt, Artificial Sequence
  Description of Artificial Sequence: Synthetic oligonucleotide
gacaguugucaggucgaac

SEQ ID NO: 2536253 - RNA, 19 nt, Artificial Sequence
  Description of Artificial Sequence: Synthetic oligonucleotide
gaugccugagggagucuug

SEQ ID NO: 2536254 - RNA, 19 nt, Artificial Sequence
  Description of Artificial Sequence: Synthetic oligonucleotide
uuccgccaggaaggcaucg

SEQ ID NO: 2536255 - RNA, 19 nt, Artificial Sequence
  Description of Artificial Sequence: Synthetic oligonucleotide
ugggaaccucccauucauc

SEQ ID NO: 2536256 - RNA, 19 nt, Artificial Sequence
  Description of Artificial Sequence: Synthetic oligonucleotide
caguuugaugccugaggga

SEQ ID NO: 2536257 - RNA, 19 nt, Artificial Sequence
  Description of Artificial Sequence: Synthetic oligonucleotide
aguugucaggucgaaccau

SEQ ID NO: 2536258 - RNA, 19 nt, Artificial Sequence
  Description of Artificial Sequence: Synthetic oligonucleotide
ugccaccuucgugugcccg

SEQ ID NO: 2536259 - RNA, 19 nt, Artificial Sequence
  Description of Artificial Sequence: Synthetic oligonucleotide
acgaucucugucagcaaga

SEQ ID NO: 2536260 - RNA, 19 nt, Artificial Sequence
  Description of Artificial Sequence: Synthetic oligonucleotide
ugaugccugagggagucuu

SEQ ID NO: 2536261 - RNA, 19 nt, Artificial Sequence
  Description of Artificial Sequence: Synthetic oligonucleotide
ccagauucugaaucacuuc

SEQ ID NO: 2536262 - RNA, 19 nt, Artificial Sequence
  Description of Artificial Sequence: Synthetic oligonucleotide
gguaagggauucugccaug

SEQ ID NO: 2536263 - RNA, 19 nt, Artificial Sequence
  Description of Artificial Sequence: Synthetic oligonucleotide
caguugucaggucgaacca

SEQ ID NO: 2536264 - RNA, 19 nt, Artificial Sequence
  Description of Artificial Sequence: Synthetic oligonucleotide
ccaugggugacgaucucug

SEQ ID NO: 2536265 - RNA, 19 nt, Artificial Sequence
  Description of Artificial Sequence: Synthetic oligonucleotide
ugcgguagccucgcuccag

SEQ ID NO: 2536266 - RNA, 19 nt, Artificial Sequence
  Description of Artificial Sequence: Synthetic oligonucleotide
gcugccauguccaacagcu

SEQ ID NO: 2536267 - RNA, 19 nt, Artificial Sequence
  Description of Artificial Sequence: Synthetic oligonucleotide
augugucggacaccaggau

SEQ ID NO: 2536268 - RNA, 19 nt, Artificial Sequence
  Description of Artificial Sequence: Synthetic oligonucleotide
gcuucugggucuggcaagg

SEQ ID NO: 2536269 - RNA, 19 nt, Artificial Sequence
  Description of Artificial Sequence: Synthetic oligonucleotide
cguaaagccggaccagccg

SEQ ID NO: 2536270 - RNA, 19 nt, Artificial Sequence
  Description of Artificial Sequence: Synthetic oligonucleotide
guccucaaugagacgugcc

SEQ ID NO: 2536271 - RNA, 19 nt, Artificial Sequence
  Description of Artificial Sequence: Synthetic oligonucleotide
ucuggacaguugucagguc

SEQ ID NO: 2536272 - RNA, 19 nt, Artificial Sequence
  Description of Artificial Sequence: Synthetic oligonucleotide
gucaucccuggguaaggga

SEQ ID NO: 2536273 - RNA, 19 nt, Artificial Sequence
  Description of Artificial Sequence: Synthetic oligonucleotide
gucgcgauggauguaauuu

SEQ ID NO: 2536274 - RNA, 19 nt, Artificial Sequence
  Description of Artificial Sequence: Synthetic oligonucleotide
ccgaaagaccacacaucgg

SEQ ID NO: 2536275 - RNA, 19 nt, Artificial Sequence
  Description of Artificial Sequence: Synthetic oligonucleotide
ugacgaucucugucagcaa

SEQ ID NO: 2536276 - RNA, 19 nt, Artificial Sequence
  Description of Artificial Sequence: Synthetic oligonucleotide
augccugagggagucuuga

SEQ ID NO: 2536277 - RNA, 19 nt, Artificial Sequence
  Description of Artificial Sequence: Synthetic oligonucleotide
cgaaccaugcgguagccuc

SEQ ID NO: 2536278 - RNA, 19 nt, Artificial Sequence
  Description of Artificial Sequence: Synthetic oligonucleotide
auucugccaugggugacga

SEQ ID NO: 2536279 - RNA, 19 nt, Artificial Sequence
  Description of Artificial Sequence: Synthetic oligonucleotide
cugcguaaagccggaccag

SEQ ID NO: 2536280 - RNA, 19 nt, Artificial Sequence
  Description of Artificial Sequence: Synthetic oligonucleotide
aaggacggcucaacuucgu

SEQ ID NO: 2536281 - RNA, 19 nt, Artificial Sequence
  Description of Artificial Sequence: Synthetic oligonucleotide
agugucucccugggaaccu

SEQ ID NO: 2536282 - RNA, 19 nt, Artificial Sequence
  Description of Artificial Sequence: Synthetic oligonucleotide
ccguuguaguaccccaucc

SEQ ID NO: 2536283 - RNA, 19 nt, Artificial Sequence
  Description of Artificial Sequence: Synthetic oligonucleotide
gcgauggauguaauuuugc

SEQ ID NO: 2536284 - RNA, 19 nt, Artificial Sequence
  Description of Artificial Sequence: Synthetic oligonucleotide
ccaggauguuggcagcccg

SEQ ID NO: 2536285 - RNA, 19 nt, Artificial Sequence
  Description of Artificial Sequence: Synthetic oligonucleotide
auccucccaccacggcuuc

SEQ ID NO: 2536286 - RNA, 19 nt, Artificial Sequence
  Description of Artificial Sequence: Synthetic oligonucleotide
cagcucaaugugucggaca

SEQ ID NO: 2536287 - RNA, 19 nt, Artificial Sequence
  Description of Artificial Sequence: Synthetic oligonucleotide
uacagcuccucuggacagu

SEQ ID NO: 2536288 - RNA, 19 nt, Artificial Sequence
  Description of Artificial Sequence: Synthetic oligonucleotide
ggugacgaucucugucagc

SEQ ID NO: 2536289 - RNA, 19 nt, Artificial Sequence
  Description of Artificial Sequence: Synthetic oligonucleotide
ccucaaugagacgugccag

SEQ ID NO: 2536290 - RNA, 19 nt, Artificial Sequence
  Description of Artificial Sequence: Synthetic oligonucleotide
agguuagcuuccgccagga

SEQ ID NO: 2536291 - RNA, 19 nt, Artificial Sequence
  Description of Artificial Sequence: Synthetic oligonucleotide
ggauguuggcagcccgaag

SEQ ID NO: 2536292 - RNA, 19 nt, Artificial Sequence
  Description of Artificial Sequence: Synthetic oligonucleotide
ucccuggcuguguacucau

SEQ ID NO: 2536293 - RNA, 19 nt, Artificial Sequence
  Description of Artificial Sequence: Synthetic oligonucleotide
agccggaccagccgcuggu

SEQ ID NO: 2536294 - RNA, 19 nt, Artificial Sequence
  Description of Artificial Sequence: Synthetic oligonucleotide
ggacuugauggugaagguc

SEQ ID NO: 2536295 - RNA, 19 nt, Artificial Sequence
  Description of Artificial Sequence: Synthetic oligonucleotide
cucuggacaguugucaggu

SEQ ID NO: 2536296 - RNA, 19 nt, Artificial Sequence
  Description of Artificial Sequence: Synthetic oligonucleotide
ucgaaccaugcgguagccu

SEQ ID NO: 2536297 - RNA, 19 nt, Artificial Sequence
  Description of Artificial Sequence: Synthetic oligonucleotide
gggugacgaucucugucag

SEQ ID NO: 2536298 - RNA, 19 nt, Artificial Sequence
  Description of Artificial Sequence: Synthetic oligonucleotide
uagccucgcuccagauucu

SEQ ID NO: 2536299 - RNA, 19 nt, Artificial Sequence
  Description of Artificial Sequence: Synthetic oligonucleotide
aggcucccguucuccaugu

SEQ ID NO: 2536300 - RNA, 19 nt, Artificial Sequence
  Description of Artificial Sequence: Synthetic oligonucleotide
ugagacgugccaggccaaa

SEQ ID NO: 2536301 - RNA, 19 nt, Artificial Sequence
  Description of Artificial Sequence: Synthetic oligonucleotide
aggauguuggcagcccgaa

SEQ ID NO: 2536302 - RNA, 19 nt, Artificial Sequence
  Description of Artificial Sequence: Synthetic oligonucleotide
ggauguaauuuugcucuuc

SEQ ID NO: 2536303 - RNA, 19 nt, Artificial Sequence
  Description of Artificial Sequence: Synthetic oligonucleotide
caugcccucugcaaucugu

SEQ ID NO: 2536304 - RNA, 19 nt, Artificial Sequence
  Description of Artificial Sequence: Synthetic oligonucleotide
cuacuaggcucccguucuc

SEQ ID NO: 2536305 - RNA, 19 nt, Artificial Sequence
  Description of Artificial Sequence: Synthetic oligonucleotide
cgcgauggauguaauuuug

SEQ ID NO: 2536306 - RNA, 19 nt, Artificial Sequence
  Description of Artificial Sequence: Synthetic oligonucleotide
gugcccguuguaguacccc

SEQ ID NO: 2536307 - RNA, 19 nt, Artificial Sequence
  Description of Artificial Sequence: Synthetic oligonucleotide
ucccugggaaccucccauu

SEQ ID NO: 2536308 - RNA, 19 nt, Artificial Sequence
  Description of Artificial Sequence: Synthetic oligonucleotide
cugccaugggugacgaucu

SEQ ID NO: 2536309 - RNA, 19 nt, Artificial Sequence
  Description of Artificial Sequence: Synthetic oligonucleotide
cugugcugccauguccaac

SEQ ID NO: 2536310 - RNA, 19 nt, Artificial Sequence
  Description of Artificial Sequence: Synthetic oligonucleotide
cacugccaccuucgugugc

SEQ ID NO: 2536311 - RNA, 19 nt, Artificial Sequence
  Description of Artificial Sequence: Synthetic oligonucleotide
cugagggagucuugagaaa

SEQ ID NO: 2536312 - RNA, 19 nt, Artificial Sequence
  Description of Artificial Sequence: Synthetic oligonucleotide
ugccaugggugacgaucuc

SEQ ID NO: 2536313 - RNA, 19 nt, Artificial Sequence
  Description of Artificial Sequence: Synthetic oligonucleotide
cucccaggcgcucaaccaa

SEQ ID NO: 2536314 - RNA, 19 nt, Artificial Sequence
  Description of Artificial Sequence: Synthetic oligonucleotide
ggguuagucaucccugggu

SEQ ID NO: 2536315 - RNA, 19 nt, Artificial Sequence
  Description of Artificial Sequence: Synthetic oligonucleotide
cugggugaccacugcguaa

SEQ ID NO: 2536316 - RNA, 19 nt, Artificial Sequence
  Description of Artificial Sequence: Synthetic oligonucleotide
gggagucuugagaaaaucu

SEQ ID NO: 2536317 - RNA, 19 nt, Artificial Sequence
  Description of Artificial Sequence: Synthetic oligonucleotide
cugggaaccucccauucau

SEQ ID NO: 2536318 - RNA, 19 nt, Artificial Sequence
  Description of Artificial Sequence: Synthetic oligonucleotide
cuucagugucucccuggga

SEQ ID NO: 2536319 - RNA, 19 nt, Artificial Sequence
  Description of Artificial Sequence: Synthetic oligonucleotide
accacugcguaaagccgga

SEQ ID NO: 2536320 - RNA, 19 nt, Artificial Sequence
  Description of Artificial Sequence: Synthetic oligonucleotide
augcgguagccucgcucca

SEQ ID NO: 2536321 - RNA, 19 nt, Artificial Sequence
  Description of Artificial Sequence: Synthetic oligonucleotide
gcuguuucaugagguuagc

SEQ ID NO: 2536322 - RNA, 19 nt, Artificial Sequence
  Description of Artificial Sequence: Synthetic oligonucleotide
gcguaaagccggaccagcc

SEQ ID NO: 2536323 - RNA, 19 nt, Artificial Sequence
  Description of Artificial Sequence: Synthetic oligonucleotide
uugaugccugagggagucu

SEQ ID NO: 2536324 - RNA, 19 nt, Artificial Sequence
  Description of Artificial Sequence: Synthetic oligonucleotide
ggaaccucccauucauccu

SEQ ID NO: 2536325 - RNA, 19 nt, Artificial Sequence
  Description of Artificial Sequence: Synthetic oligonucleotide
gcucaaccaacuucagugu

SEQ ID NO: 2536326 - RNA, 19 nt, Artificial Sequence
  Description of Artificial Sequence: Synthetic oligonucleotide
ggugaaggucccauaguua

SEQ ID NO: 2536327 - RNA, 19 nt, Artificial Sequence
  Description of Artificial Sequence: Synthetic oligonucleotide
gcucccaggcgcucaacca

SEQ ID NO: 2536328 - RNA, 19 nt, Artificial Sequence
  Description of Artificial Sequence: Synthetic oligonucleotide
ugggucuggcaaggacggc

SEQ ID NO: 2536329 - RNA, 19 nt, Artificial Sequence
  Description of Artificial Sequence: Synthetic oligonucleotide
uggcagcccgaaggucgcg

SEQ ID NO: 2536330 - RNA, 19 nt, Artificial Sequence
  Description of Artificial Sequence: Synthetic oligonucleotide
gucuggcaaggacggcuca

SEQ ID NO: 2536331 - RNA, 19 nt, Artificial Sequence
  Description of Artificial Sequence: Synthetic oligonucleotide
gggcuucugggucuggcaa

SEQ ID NO: 2536332 - RNA, 19 nt, Artificial Sequence
  Description of Artificial Sequence: Synthetic oligonucleotide
cucccguucuccauguauu

SEQ ID NO: 2536333 - RNA, 19 nt, Artificial Sequence
  Description of Artificial Sequence: Synthetic oligonucleotide
ggauucugccaugggugac

SEQ ID NO: 2536334 - RNA, 19 nt, Artificial Sequence
  Description of Artificial Sequence: Synthetic oligonucleotide
guaguaccccauccacacu

SEQ ID NO: 2536335 - RNA, 19 nt, Artificial Sequence
  Description of Artificial Sequence: Synthetic oligonucleotide
acggcuucuggggcuucug

SEQ ID NO: 2536336 - RNA, 19 nt, Artificial Sequence
  Description of Artificial Sequence: Synthetic oligonucleotide
ugucggacaccaggauguu

SEQ ID NO: 2536337 - RNA, 19 nt, Artificial Sequence
  Description of Artificial Sequence: Synthetic oligonucleotide
cucccuugcuucaggcucu

SEQ ID NO: 2536338 - RNA, 19 nt, Artificial Sequence
  Description of Artificial Sequence: Synthetic oligonucleotide
cucccuggcuguguacuca

SEQ ID NO: 2536339 - RNA, 19 nt, Artificial Sequence
  Description of Artificial Sequence: Synthetic oligonucleotide
cguuguaguaccccaucca

SEQ ID NO: 2536340 - RNA, 19 nt, Artificial Sequence
  Description of Artificial Sequence: Synthetic oligonucleotide
gcagcucaaugugucggac

SEQ ID NO: 2536341 - RNA, 19 nt, Artificial Sequence
  Description of Artificial Sequence: Synthetic oligonucleotide
guuugaugccugagggagu

SEQ ID NO: 2536342 - RNA, 19 nt, Artificial Sequence
  Description of Artificial Sequence: Synthetic oligonucleotide
cuguuucaugagguuagcu

SEQ ID NO: 2536343 - RNA, 19 nt, Artificial Sequence
  Description of Artificial Sequence: Synthetic oligonucleotide
ccucgcuccagauucugaa

SEQ ID NO: 2536344 - RNA, 19 nt, Artificial Sequence
  Description of Artificial Sequence: Synthetic oligonucleotide
gggugaccacugcguaaag

SEQ ID NO: 2536345 - RNA, 19 nt, Artificial Sequence
  Description of Artificial Sequence: Synthetic oligonucleotide
ggcuccugggugaccacug

SEQ ID NO: 2536346 - RNA, 19 nt, Artificial Sequence
  Description of Artificial Sequence: Synthetic oligonucleotide
caugggugacgaucucugu

SEQ ID NO: 2536347 - RNA, 19 nt, Artificial Sequence
  Description of Artificial Sequence: Synthetic oligonucleotide
gcucaaugugucggacacc

SEQ ID NO: 2536348 - RNA, 19 nt, Artificial Sequence
  Description of Artificial Sequence: Synthetic oligonucleotide
caccuucgugugcccguug

SEQ ID NO: 2536349 - RNA, 19 nt, Artificial Sequence
  Description of Artificial Sequence: Synthetic oligonucleotide
ggcaaggacggcucaacuu

SEQ ID NO: 2536350 - RNA, 19 nt, Artificial Sequence
  Description of Artificial Sequence: Synthetic oligonucleotide
agcuuccgccaggaaggca

SEQ ID NO: 2536351 - RNA, 19 nt, Artificial Sequence
  Description of Artificial Sequence: Synthetic oligonucleotide
uucugccaugggugacgau

SEQ ID NO: 2536352 - RNA, 19 nt, Artificial Sequence
  Description of Artificial Sequence: Synthetic oligonucleotide
cccuggguaagggauucug

SEQ ID NO: 2536353 - RNA, 19 nt, Artificial Sequence
  Description of Artificial Sequence: Synthetic oligonucleotide
cagcuuguugauguucagu

SEQ ID NO: 2536354 - RNA, 19 nt, Artificial Sequence
  Description of Artificial Sequence: Synthetic oligonucleotide
gaaggucgcgauggaugua

SEQ ID NO: 2536355 - RNA, 19 nt, Artificial Sequence
  Description of Artificial Sequence: Synthetic oligonucleotide
cucgcuccagauucugaau

SEQ ID NO: 2536356 - RNA, 19 nt, Artificial Sequence
  Description of Artificial Sequence: Synthetic oligonucleotide
cucccugggaaccucccau

SEQ ID NO: 2536357 - RNA, 19 nt, Artificial Sequence
  Description of Artificial Sequence: Synthetic oligonucleotide
cugcaaucugugcugccau

SEQ ID NO: 2536358 - RNA, 19 nt, Artificial Sequence
  Description of Artificial Sequence: Synthetic oligonucleotide
cccugggaaccucccauuc

SEQ ID NO: 2536359 - RNA, 19 nt, Artificial Sequence
  Description of Artificial Sequence: Synthetic oligonucleotide
ggcgcucaaccaacuucag

SEQ ID NO: 2536360 - RNA, 19 nt, Artificial Sequence
  Description of Artificial Sequence: Synthetic oligonucleotide
ccugggaaccucccauuca

SEQ ID NO: 2536361 - RNA, 19 nt, Artificial Sequence
  Description of Artificial Sequence: Synthetic oligonucleotide
augagacgugccaggccaa

SEQ ID NO: 2536362 - RNA, 19 nt, Artificial Sequence
  Description of Artificial Sequence: Synthetic oligonucleotide
cgauggauguaauuuugcu

SEQ ID NO: 2536363 - RNA, 19 nt, Artificial Sequence
  Description of Artificial Sequence: Synthetic oligonucleotide
caggucgaaccaugcggua

SEQ ID NO: 2536364 - RNA, 19 nt, Artificial Sequence
  Description of Artificial Sequence: Synthetic oligonucleotide
cuggugcuguccauuuaau

SEQ ID NO: 2536365 - RNA, 19 nt, Artificial Sequence
  Description of Artificial Sequence: Synthetic oligonucleotide
ccggaccagccgcuggugc

SEQ ID NO: 2536366 - RNA, 19 nt, Artificial Sequence
  Description of Artificial Sequence: Synthetic oligonucleotide
cuaggcucccguucuccau

SEQ ID NO: 2536367 - RNA, 19 nt, Artificial Sequence
  Description of Artificial Sequence: Synthetic oligonucleotide
guccgcaaucuugcagcuc

SEQ ID NO: 2536368 - RNA, 19 nt, Artificial Sequence
  Description of Artificial Sequence: Synthetic oligonucleotide
gggucuggcaaggacggcu

SEQ ID NO: 2536369 - RNA, 19 nt, Artificial Sequence
  Description of Artificial Sequence: Synthetic oligonucleotide
cccauucauccucccacca

SEQ ID NO: 2536370 - RNA, 19 nt, Artificial Sequence
  Description of Artificial Sequence: Synthetic oligonucleotide
cuucugggucuggcaagga

SEQ ID NO: 2536371 - RNA, 19 nt, Artificial Sequence
  Description of Artificial Sequence: Synthetic oligonucleotide
gcucccguucuccauguau

SEQ ID NO: 2536372 - RNA, 19 nt, Artificial Sequence
  Description of Artificial Sequence: Synthetic oligonucleotide
gcgguagccucgcuccaga

SEQ ID NO: 2536373 - RNA, 19 nt, Artificial Sequence
  Description of Artificial Sequence: Synthetic oligonucleotide
ccucccauucauccuccca

SEQ ID NO: 2536374 - RNA, 19 nt, Artificial Sequence
  Description of Artificial Sequence: Synthetic oligonucleotide
gguuagcuuccgccaggaa

SEQ ID NO: 2536375 - RNA, 19 nt, Artificial Sequence
  Description of Artificial Sequence: Synthetic oligonucleotide
gguagccucgcuccagauu

SEQ ID NO: 2536376 - RNA, 19 nt, Artificial Sequence
  Description of Artificial Sequence: Synthetic oligonucleotide
aggucgcgauggauguaau

SEQ ID NO: 2536377 - RNA, 19 nt, Artificial Sequence
  Description of Artificial Sequence: Synthetic oligonucleotide
cgaaggucgcgauggaugu

SEQ ID NO: 2536378 - RNA, 19 nt, Artificial Sequence
  Description of Artificial Sequence: Synthetic oligonucleotide
ggacaguugucaggucgaa

SEQ ID NO: 2536379 - RNA, 19 nt, Artificial Sequence
  Description of Artificial Sequence: Synthetic oligonucleotide
gcgcucaaccaacuucagu

SEQ ID NO: 2536380 - RNA, 19 nt, Artificial Sequence
  Description of Artificial Sequence: Synthetic oligonucleotide
ggcagcccgaaggucgcga

SEQ ID NO: 2536381 - RNA, 19 nt, Artificial Sequence
  Description of Artificial Sequence: Synthetic oligonucleotide
ccugggugaccacugcgua

SEQ ID NO: 2536382 - RNA, 19 nt, Artificial Sequence
  Description of Artificial Sequence: Synthetic oligonucleotide
ccaugcccucugcaaucug

SEQ ID NO: 2536383 - RNA, 19 nt, Artificial Sequence
  Description of Artificial Sequence: Synthetic oligonucleotide
gccaugggugacgaucucu

SEQ ID NO: 2536384 - RNA, 19 nt, Artificial Sequence
  Description of Artificial Sequence: Synthetic oligonucleotide
ggucgcgauggauguaauu

SEQ ID NO: 2536385 - RNA, 19 nt, Artificial Sequence
  Description of Artificial Sequence: Synthetic oligonucleotide
gccaccuucgugugcccgu

SEQ ID NO: 2536386 - RNA, 19 nt, Artificial Sequence
  Description of Artificial Sequence: Synthetic oligonucleotide
cagcucccaggcgcucaac

SEQ ID NO: 2536387 - RNA, 19 nt, Artificial Sequence
  Description of Artificial Sequence: Synthetic oligonucleotide
gccucgcuccagauucuga

SEQ ID NO: 2536388 - RNA, 19 nt, Artificial Sequence
  Description of Artificial Sequence: Synthetic oligonucleotide
gcuucuggugcuguccauu

SEQ ID NO: 2536389 - RNA, 19 nt, Artificial Sequence
  Description of Artificial Sequence: Synthetic oligonucleotide
cugccauguccaacagcuu

SEQ ID NO: 2536390 - RNA, 19 nt, Artificial Sequence
  Description of Artificial Sequence: Synthetic oligonucleotide
gccaugcccucugcaaucu

SEQ ID NO: 2536391 - RNA, 19 nt, Artificial Sequence
  Description of Artificial Sequence: Synthetic oligonucleotide
ccacugcguaaagccggac

SEQ ID NO: 2536392 - RNA, 19 nt, Artificial Sequence
  Description of Artificial Sequence: Synthetic oligonucleotide
ccuucgugugcccguugua

SEQ ID NO: 2536393 - RNA, 19 nt, Artificial Sequence
  Description of Artificial Sequence: Synthetic oligonucleotide
gcagcccgaaggucgcgau

SEQ ID NO: 2536394 - RNA, 19 nt, Artificial Sequence
  Description of Artificial Sequence: Synthetic oligonucleotide
ggcuucuggugcuguccau

SEQ ID NO: 2536395 - RNA, 19 nt, Artificial Sequence
  Description of Artificial Sequence: Synthetic oligonucleotide
ggcucuucacugccaccuu

SEQ ID NO: 2536396 - RNA, 19 nt, Artificial Sequence
  Description of Artificial Sequence: Synthetic oligonucleotide
cacggcuucuggggcuucu

SEQ ID NO: 2536397 - RNA, 19 nt, Artificial Sequence
  Description of Artificial Sequence: Synthetic oligonucleotide
ccgcuggugcugcagcugu

SEQ ID NO: 2536398 - RNA, 19 nt, Artificial Sequence
  Description of Artificial Sequence: Synthetic oligonucleotide
ccgcaaucuugcagcucaa

SEQ ID NO: 2536399 - RNA, 19 nt, Artificial Sequence
  Description of Artificial Sequence: Synthetic oligonucleotide
cccucccuggcuguguacu

SEQ ID NO: 2536400 - RNA, 19 nt, Artificial Sequence
  Description of Artificial Sequence: Synthetic oligonucleotide
cccaggcgcucaaccaacu

SEQ ID NO: 2536401 - RNA, 19 nt, Artificial Sequence
  Description of Artificial Sequence: Synthetic oligonucleotide
gcccguuguaguaccccau

SEQ ID NO: 2536402 - RNA, 19 nt, Artificial Sequence
  Description of Artificial Sequence: Synthetic oligonucleotide
cgaucucugucagcaagau

SEQ ID NO: 2536403 - RNA, 19 nt, Artificial Sequence
  Description of Artificial Sequence: Synthetic oligonucleotide
ccauguccaacagcuuguu

SEQ ID NO: 2536404 - RNA, 19 nt, Artificial Sequence
  Description of Artificial Sequence: Synthetic oligonucleotide
cccgaaggucgcgauggau

SEQ ID NO: 2536405 - RNA, 19 nt, Artificial Sequence
  Description of Artificial Sequence: Synthetic oligonucleotide
ccacggcuucuggggcuuc

SEQ ID NO: 2536406 - RNA, 19 nt, Artificial Sequence
  Description of Artificial Sequence: Synthetic oligonucleotide
ccaccuucgugugcccguu

SEQ ID NO: 2536407 - RNA, 19 nt, Artificial Sequence
  Description of Artificial Sequence: Synthetic oligonucleotide
cgguagccucgcuccagau

SEQ ID NO: 2536408 - RNA, 19 nt, Artificial Sequence
  Description of Artificial Sequence: Synthetic oligonucleotide
cccuggcuguguacucauu

SEQ ID NO: 2536409 - RNA, 19 nt, Artificial Sequence
  Description of Artificial Sequence: Synthetic oligonucleotide
uuuauugcuaaucagacca

SEQ ID NO: 2536410 - RNA, 19 nt, Artificial Sequence
  Description of Artificial Sequence: Synthetic oligonucleotide
uuggcgaagauguagaugg

SEQ ID NO: 2536411 - RNA, 19 nt, Artificial Sequence
  Description of Artificial Sequence: Synthetic oligonucleotide
ugaacuuucggucaacacg

SEQ ID NO: 2536412 - RNA, 19 nt, Artificial Sequence
  Description of Artificial Sequence: Synthetic oligonucleotide
aaugaguggcccuaacacc

SEQ ID NO: 2536413 - RNA, 19 nt, Artificial Sequence
  Description of Artificial Sequence: Synthetic oligonucleotide
ucuggaauuguuuucuugg

SEQ ID NO: 2536414 - RNA, 19 nt, Artificial Sequence
  Description of Artificial Sequence: Synthetic oligonucleotide
gauucuaucagcaugccag

SEQ ID NO: 2536415 - RNA, 19 nt, Artificial Sequence
  Description of Artificial Sequence: Synthetic oligonucleotide
aaucagaccacucagggaa

SEQ ID NO: 2536416 - RNA, 19 nt, Artificial Sequence
  Description of Artificial Sequence: Synthetic oligonucleotide
cagauuguagccaauagcc

SEQ ID NO: 2536417 - RNA, 19 nt, Artificial Sequence
  Description of Artificial Sequence: Synthetic oligonucleotide
acagauuguagccaauagc

SEQ ID NO: 2536418 - RNA, 19 nt, Artificial Sequence
  Description of Artificial Sequence: Synthetic oligonucleotide
uuugauuauuucuacggug

SEQ ID NO: 2536419 - RNA, 19 nt, Artificial Sequence
  Description of Artificial Sequence: Synthetic oligonucleotide
acuccuucuguuccgaucc

SEQ ID NO: 2536420 - RNA, 19 nt, Artificial Sequence
  Description of Artificial Sequence: Synthetic oligonucleotide
aaugccguucuucuuggcg

SEQ ID NO: 2536421 - RNA, 19 nt, Artificial Sequence
  Description of Artificial Sequence: Synthetic oligonucleotide
aguauuuauugcuaaucag

SEQ ID NO: 2536422 - RNA, 19 nt, Artificial Sequence
  Description of Artificial Sequence: Synthetic oligonucleotide
aacagauuguagccaauag

SEQ ID NO: 2536423 - RNA, 19 nt, Artificial Sequence
  Description of Artificial Sequence: Synthetic oligonucleotide
gacacaugagaucagccag

SEQ ID NO: 2536424 - RNA, 19 nt, Artificial Sequence
  Description of Artificial Sequence: Synthetic oligonucleotide
gauuguagccaauagccac

SEQ ID NO: 2536425 - RNA, 19 nt, Artificial Sequence
  Description of Artificial Sequence: Synthetic oligonucleotide
aaguuuccgucuuugagga

SEQ ID NO: 2536426 - RNA, 19 nt, Artificial Sequence
  Description of Artificial Sequence: Synthetic oligonucleotide
uguaucaacuccuccagac

SEQ ID NO: 2536427 - RNA, 19 nt, Artificial Sequence
  Description of Artificial Sequence: Synthetic oligonucleotide
aaguguugcccuuugauua

SEQ ID NO: 2536428 - RNA, 19 nt, Artificial Sequence
  Description of Artificial Sequence: Synthetic oligonucleotide
ugcuaaucagaccacucag

SEQ ID NO: 2536429 - RNA, 19 nt, Artificial Sequence
  Description of Artificial Sequence: Synthetic oligonucleotide
uuauccauacuccuucugu

SEQ ID NO: 2536430 - RNA, 19 nt, Artificial Sequence
  Description of Artificial Sequence: Synthetic oligonucleotide
agagaguuauccauacucc

SEQ ID NO: 2536431 - RNA, 19 nt, Artificial Sequence
  Description of Artificial Sequence: Synthetic oligonucleotide
aauuguuuucuuggcugcc

SEQ ID NO: 2536432 - RNA, 19 nt, Artificial Sequence
  Description of Artificial Sequence: Synthetic oligonucleotide
aaugccuccacccgcucuc

SEQ ID NO: 2536433 - RNA, 19 nt, Artificial Sequence
  Description of Artificial Sequence: Synthetic oligonucleotide
ugaccagcaaggaaggccc

SEQ ID NO: 2536434 - RNA, 19 nt, Artificial Sequence
  Description of Artificial Sequence: Synthetic oligonucleotide
cacaggagcacuccgaagg

SEQ ID NO: 2536435 - RNA, 19 nt, Artificial Sequence
  Description of Artificial Sequence: Synthetic oligonucleotide
auuucuacggugugcaucu

SEQ ID NO: 2536436 - RNA, 19 nt, Artificial Sequence
  Description of Artificial Sequence: Synthetic oligonucleotide
gaguauuuauugcuaauca

SEQ ID NO: 2536437 - RNA, 19 nt, Artificial Sequence
  Description of Artificial Sequence: Synthetic oligonucleotide
uuggagcucagguaaauca

SEQ ID NO: 2536438 - RNA, 19 nt, Artificial Sequence
  Description of Artificial Sequence: Synthetic oligonucleotide
agcagcaugauaugauggg

SEQ ID NO: 2536439 - RNA, 19 nt, Artificial Sequence
  Description of Artificial Sequence: Synthetic oligonucleotide
agaucaguacccaagaaug

SEQ ID NO: 2536440 - RNA, 19 nt, Artificial Sequence
  Description of Artificial Sequence: Synthetic oligonucleotide
auucuaucagcaugccagc

SEQ ID NO: 2536441 - RNA, 19 nt, Artificial Sequence
  Description of Artificial Sequence: Synthetic oligonucleotide
auaugaugggcuucugggg

SEQ ID NO: 2536442 - RNA, 19 nt, Artificial Sequence
  Description of Artificial Sequence: Synthetic oligonucleotide
aacggaaugccguucuucu

SEQ ID NO: 2536443 - RNA, 19 nt, Artificial Sequence
  Description of Artificial Sequence: Synthetic oligonucleotide
ucggucaacacgaaguuuc

SEQ ID NO: 2536444 - RNA, 19 nt, Artificial Sequence
  Description of Artificial Sequence: Synthetic oligonucleotide
gaagcagcaugauaugaug

SEQ ID NO: 2536445 - RNA, 19 nt, Artificial Sequence
  Description of Artificial Sequence: Synthetic oligonucleotide
acggugugcaucuggaacg

SEQ ID NO: 2536446 - RNA, 19 nt, Artificial Sequence
  Description of Artificial Sequence: Synthetic oligonucleotide
uccauacuccuucuguucc

SEQ ID NO: 2536447 - RNA, 19 nt, Artificial Sequence
  Description of Artificial Sequence: Synthetic oligonucleotide
ucaccugcugaccagcaag

SEQ ID NO: 2536448 - RNA, 19 nt, Artificial Sequence
  Description of Artificial Sequence: Synthetic oligonucleotide
cugcugaccagcaaggaag

SEQ ID NO: 2536449 - RNA, 19 nt, Artificial Sequence
  Description of Artificial Sequence: Synthetic oligonucleotide
auuguagccaauagccacc

SEQ ID NO: 2536450 - RNA, 19 nt, Artificial Sequence
  Description of Artificial Sequence: Synthetic oligonucleotide
acggauucuaucagcaugc

SEQ ID NO: 2536451 - RNA, 19 nt, Artificial Sequence
  Description of Artificial Sequence: Synthetic oligonucleotide
uggagcucagguaaaucag

SEQ ID NO: 2536452 - RNA, 19 nt, Artificial Sequence
  Description of Artificial Sequence: Synthetic oligonucleotide
uugcuaaucagaccacuca

SEQ ID NO: 2536453 - RNA, 19 nt, Artificial Sequence
  Description of Artificial Sequence: Synthetic oligonucleotide
ucaugauggcaccaugagc

SEQ ID NO: 2536454 - RNA, 19 nt, Artificial Sequence
  Description of Artificial Sequence: Synthetic oligonucleotide
aagcagcaugauaugaugg

SEQ ID NO: 2536455 - RNA, 19 nt, Artificial Sequence
  Description of Artificial Sequence: Synthetic oligonucleotide
aagauguagauggcgcgac

SEQ ID NO: 2536456 - RNA, 19 nt, Artificial Sequence
  Description of Artificial Sequence: Synthetic oligonucleotide
agcaaggaaggcccugucc

SEQ ID NO: 2536457 - RNA, 19 nt, Artificial Sequence
  Description of Artificial Sequence: Synthetic oligonucleotide
agaauugcuugcucaagug

SEQ ID NO: 2536458 - RNA, 19 nt, Artificial Sequence
  Description of Artificial Sequence: Synthetic oligonucleotide
agacaguucaucucggaga

SEQ ID NO: 2536459 - RNA, 19 nt, Artificial Sequence
  Description of Artificial Sequence: Synthetic oligonucleotide
ugaucugccaccugguacu

SEQ ID NO: 2536460 - RNA, 19 nt, Artificial Sequence
  Description of Artificial Sequence: Synthetic oligonucleotide
auucgaagcagcaugauau

SEQ ID NO: 2536461 - RNA, 19 nt, Artificial Sequence
  Description of Artificial Sequence: Synthetic oligonucleotide
ucuggguuccaaugagugg

SEQ ID NO: 2536462 - RNA, 19 nt, Artificial Sequence
  Description of Artificial Sequence: Synthetic oligonucleotide
ugaguauuuauugcuaauc

SEQ ID NO: 2536463 - RNA, 19 nt, Artificial Sequence
  Description of Artificial Sequence: Synthetic oligonucleotide
ucaaguguugcccuuugau

SEQ ID NO: 2536464 - RNA, 19 nt, Artificial Sequence
  Description of Artificial Sequence: Synthetic oligonucleotide
auagccaccggcuguauca

SEQ ID NO: 2536465 - RNA, 19 nt, Artificial Sequence
  Description of Artificial Sequence: Synthetic oligonucleotide
gauuauuucuacggugugc

SEQ ID NO: 2536466 - RNA, 19 nt, Artificial Sequence
  Description of Artificial Sequence: Synthetic oligonucleotide
aauucgaagcagcaugaua

SEQ ID NO: 2536467 - RNA, 19 nt, Artificial Sequence
  Description of Artificial Sequence: Synthetic oligonucleotide
uucaucucggagaauugcu

SEQ ID NO: 2536468 - RNA, 19 nt, Artificial Sequence
  Description of Artificial Sequence: Synthetic oligonucleotide
uggaaucuggguuccaaug

SEQ ID NO: 2536469 - RNA, 19 nt, Artificial Sequence
  Description of Artificial Sequence: Synthetic oligonucleotide
ucuguuccgauccaccuuc

SEQ ID NO: 2536470 - RNA, 19 nt, Artificial Sequence
  Description of Artificial Sequence: Synthetic oligonucleotide
gaacuuucggucaacacga

SEQ ID NO: 2536471 - RNA, 19 nt, Artificial Sequence
  Description of Artificial Sequence: Synthetic oligonucleotide
uucuuggcgaagauguaga

SEQ ID NO: 2536472 - RNA, 19 nt, Artificial Sequence
  Description of Artificial Sequence: Synthetic oligonucleotide
uacggugugcaucuggaac

SEQ ID NO: 2536473 - RNA, 19 nt, Artificial Sequence
  Description of Artificial Sequence: Synthetic oligonucleotide
ucuaucagcaugccagccu

SEQ ID NO: 2536474 - RNA, 19 nt, Artificial Sequence
  Description of Artificial Sequence: Synthetic oligonucleotide
gaguuauccauacuccuuc

SEQ ID NO: 2536475 - RNA, 19 nt, Artificial Sequence
  Description of Artificial Sequence: Synthetic oligonucleotide
agguaaaucaggauggcug

SEQ ID NO: 2536476 - RNA, 19 nt, Artificial Sequence
  Description of Artificial Sequence: Synthetic oligonucleotide
ucaguacccaagaaugccu

SEQ ID NO: 2536477 - RNA, 19 nt, Artificial Sequence
  Description of Artificial Sequence: Synthetic oligonucleotide
accaugagccugcucacac

SEQ ID NO: 2536478 - RNA, 19 nt, Artificial Sequence
  Description of Artificial Sequence: Synthetic oligonucleotide
ugguacuuggagcucaggu

SEQ ID NO: 2536479 - RNA, 19 nt, Artificial Sequence
  Description of Artificial Sequence: Synthetic oligonucleotide
uucuacggugugcaucugg

SEQ ID NO: 2536480 - RNA, 19 nt, Artificial Sequence
  Description of Artificial Sequence: Synthetic oligonucleotide
ucuacggugugcaucugga

SEQ ID NO: 2536481 - RNA, 19 nt, Artificial Sequence
  Description of Artificial Sequence: Synthetic oligonucleotide
agacacaugagaucagcca

SEQ ID NO: 2536482 - RNA, 19 nt, Artificial Sequence
  Description of Artificial Sequence: Synthetic oligonucleotide
aggaacuguccgcagacag

SEQ ID NO: 2536483 - RNA, 19 nt, Artificial Sequence
  Description of Artificial Sequence: Synthetic oligonucleotide
cuggguuccaaugaguggc

SEQ ID NO: 2536484 - RNA, 19 nt, Artificial Sequence
  Description of Artificial Sequence: Synthetic oligonucleotide
cucacacagaucaguaccc

SEQ ID NO: 2536485 - RNA, 19 nt, Artificial Sequence
  Description of Artificial Sequence: Synthetic oligonucleotide
ugcugaccagcaaggaagg

SEQ ID NO: 2536486 - RNA, 19 nt, Artificial Sequence
  Description of Artificial Sequence: Synthetic oligonucleotide
gauguagauggcgcgacag

SEQ ID NO: 2536487 - RNA, 19 nt, Artificial Sequence
  Description of Artificial Sequence: Synthetic oligonucleotide
ggcccuaacaccuuggccc

SEQ ID NO: 2536488 - RNA, 19 nt, Artificial Sequence
  Description of Artificial Sequence: Synthetic oligonucleotide
ucggagaauugcuugcuca

SEQ ID NO: 2536489 - RNA, 19 nt, Artificial Sequence
  Description of Artificial Sequence: Synthetic oligonucleotide
uccuccagacacaugagau

SEQ ID NO: 2536490 - RNA, 19 nt, Artificial Sequence
  Description of Artificial Sequence: Synthetic oligonucleotide
ugcccuuugauuauuucua

SEQ ID NO: 2536491 - RNA, 19 nt, Artificial Sequence
  Description of Artificial Sequence: Synthetic oligonucleotide
ugagccugcucacacagau

SEQ ID NO: 2536492 - RNA, 19 nt, Artificial Sequence
  Description of Artificial Sequence: Synthetic oligonucleotide
cuggaauuguuuucuuggc

SEQ ID NO: 2536493 - RNA, 19 nt, Artificial Sequence
  Description of Artificial Sequence: Synthetic oligonucleotide
uuccgauccaccuucuccu

SEQ ID NO: 2536494 - RNA, 19 nt, Artificial Sequence
  Description of Artificial Sequence: Synthetic oligonucleotide
gcucagguaaaucaggaug

SEQ ID NO: 2536495 - RNA, 19 nt, Artificial Sequence
  Description of Artificial Sequence: Synthetic oligonucleotide
cacggauucuaucagcaug

SEQ ID NO: 2536496 - RNA, 19 nt, Artificial Sequence
  Description of Artificial Sequence: Synthetic oligonucleotide
uuuccgucuuugaggacag

SEQ ID NO: 2536497 - RNA, 19 nt, Artificial Sequence
  Description of Artificial Sequence: Synthetic oligonucleotide
ucaacacgaaguuuccguc

SEQ ID NO: 2536498 - RNA, 19 nt, Artificial Sequence
  Description of Artificial Sequence: Synthetic oligonucleotide
uaaucagaccacucaggga

SEQ ID NO: 2536499 - RNA, 19 nt, Artificial Sequence
  Description of Artificial Sequence: Synthetic oligonucleotide
gguaccacggauucuauca

SEQ ID NO: 2536500 - RNA, 19 nt, Artificial Sequence
  Description of Artificial Sequence: Synthetic oligonucleotide
caagaaugccuccacccgc

SEQ ID NO: 2536501 - RNA, 19 nt, Artificial Sequence
  Description of Artificial Sequence: Synthetic oligonucleotide
cucaugauggcaccaugag

SEQ ID NO: 2536502 - RNA, 19 nt, Artificial Sequence
  Description of Artificial Sequence: Synthetic oligonucleotide
acccaagaaugccuccacc

SEQ ID NO: 2536503 - RNA, 19 nt, Artificial Sequence
  Description of Artificial Sequence: Synthetic oligonucleotide
ugcaucuggaacggaaugc

SEQ ID NO: 2536504 - RNA, 19 nt, Artificial Sequence
  Description of Artificial Sequence: Synthetic oligonucleotide
uauuucuacggugugcauc

SEQ ID NO: 2536505 - RNA, 19 nt, Artificial Sequence
  Description of Artificial Sequence: Synthetic oligonucleotide
cacagagaguuauccauac

SEQ ID NO: 2536506 - RNA, 19 nt, Artificial Sequence
  Description of Artificial Sequence: Synthetic oligonucleotide
cccucaaacagauuguagc

SEQ ID NO: 2536507 - RNA, 19 nt, Artificial Sequence
  Description of Artificial Sequence: Synthetic oligonucleotide
acuguccgcagacaguuca

SEQ ID NO: 2536508 - RNA, 19 nt, Artificial Sequence
  Description of Artificial Sequence: Synthetic oligonucleotide
cagacacaugagaucagcc

SEQ ID NO: 2536509 - RNA, 19 nt, Artificial Sequence
  Description of Artificial Sequence: Synthetic oligonucleotide
gacaguucaucucggagaa

SEQ ID NO: 2536510 - RNA, 19 nt, Artificial Sequence
  Description of Artificial Sequence: Synthetic oligonucleotide
aacacgaaguuuccgucuu

SEQ ID NO: 2536511 - RNA, 19 nt, Artificial Sequence
  Description of Artificial Sequence: Synthetic oligonucleotide
agguagagcuccaagacca

SEQ ID NO: 2536512 - RNA, 19 nt, Artificial Sequence
  Description of Artificial Sequence: Synthetic oligonucleotide
caucucggagaauugcuug

SEQ ID NO: 2536513 - RNA, 19 nt, Artificial Sequence
  Description of Artificial Sequence: Synthetic oligonucleotide
cugaccagcaaggaaggcc

SEQ ID NO: 2536514 - RNA, 19 nt, Artificial Sequence
  Description of Artificial Sequence: Synthetic oligonucleotide
guaccagugaucugccacc

SEQ ID NO: 2536515 - RNA, 19 nt, Artificial Sequence
  Description of Artificial Sequence: Synthetic oligonucleotide
aggaugcucaugauggcac

SEQ ID NO: 2536516 - RNA, 19 nt, Artificial Sequence
  Description of Artificial Sequence: Synthetic oligonucleotide
uuguagccaauagccaccg

SEQ ID NO: 2536517 - RNA, 19 nt, Artificial Sequence
  Description of Artificial Sequence: Synthetic oligonucleotide
ugugcaucuggaacggaau

SEQ ID NO: 2536518 - RNA, 19 nt, Artificial Sequence
  Description of Artificial Sequence: Synthetic oligonucleotide
acuuucggucaacacgaag

SEQ ID NO: 2536519 - RNA, 19 nt, Artificial Sequence
  Description of Artificial Sequence: Synthetic oligonucleotide
cagacaguucaucucggag

SEQ ID NO: 2536520 - RNA, 19 nt, Artificial Sequence
  Description of Artificial Sequence: Synthetic oligonucleotide
uuucggucaacacgaaguu

SEQ ID NO: 2536521 - RNA, 19 nt, Artificial Sequence
  Description of Artificial Sequence: Synthetic oligonucleotide
cacuccgaagguaccacgg

SEQ ID NO: 2536522 - RNA, 19 nt, Artificial Sequence
  Description of Artificial Sequence: Synthetic oligonucleotide
cuuucggucaacacgaagu

SEQ ID NO: 2536523 - RNA, 19 nt, Artificial Sequence
  Description of Artificial Sequence: Synthetic oligonucleotide
uacucguggacucgggcac

SEQ ID NO: 2536524 - RNA, 19 nt, Artificial Sequence
  Description of Artificial Sequence: Synthetic oligonucleotide
ugcgacagcagguccaggu

SEQ ID NO: 2536525 - RNA, 19 nt, Artificial Sequence
  Description of Artificial Sequence: Synthetic oligonucleotide
caucuggaacggaaugccg

SEQ ID NO: 2536526 - RNA, 19 nt, Artificial Sequence
  Description of Artificial Sequence: Synthetic oligonucleotide
uggaacggaaugccguucu

SEQ ID NO: 2536527 - RNA, 19 nt, Artificial Sequence
  Description of Artificial Sequence: Synthetic oligonucleotide
uauugcuaaucagaccacu

SEQ ID NO: 2536528 - RNA, 19 nt, Artificial Sequence
  Description of Artificial Sequence: Synthetic oligonucleotide
aaacagauuguagccaaua

SEQ ID NO: 2536529 - RNA, 19 nt, Artificial Sequence
  Description of Artificial Sequence: Synthetic oligonucleotide
acacagaucaguacccaag

SEQ ID NO: 2536530 - RNA, 19 nt, Artificial Sequence
  Description of Artificial Sequence: Synthetic oligonucleotide
gacacagagaguuauccau

SEQ ID NO: 2536531 - RNA, 19 nt, Artificial Sequence
  Description of Artificial Sequence: Synthetic oligonucleotide
augccguucuucuuggcga

SEQ ID NO: 2536532 - RNA, 19 nt, Artificial Sequence
  Description of Artificial Sequence: Synthetic oligonucleotide
gcaaggaaggcccuguccc

SEQ ID NO: 2536533 - RNA, 19 nt, Artificial Sequence
  Description of Artificial Sequence: Synthetic oligonucleotide
augaguauuuauugcuaau

SEQ ID NO: 2536534 - RNA, 19 nt, Artificial Sequence
  Description of Artificial Sequence: Synthetic oligonucleotide
ucgccaugcugucaguugu

SEQ ID NO: 2536535 - RNA, 19 nt, Artificial Sequence
  Description of Artificial Sequence: Synthetic oligonucleotide
agugucaccugcugaccag

SEQ ID NO: 2536536 - RNA, 19 nt, Artificial Sequence
  Description of Artificial Sequence: Synthetic oligonucleotide
uccgucuuugaggacagga

SEQ ID NO: 2536537 - RNA, 19 nt, Artificial Sequence
  Description of Artificial Sequence: Synthetic oligonucleotide
aguuauccauacuccuucu

SEQ ID NO: 2536538 - RNA, 19 nt, Artificial Sequence
  Description of Artificial Sequence: Synthetic oligonucleotide
uaccacggauucuaucagc

SEQ ID NO: 2536539 - RNA, 19 nt, Artificial Sequence
  Description of Artificial Sequence: Synthetic oligonucleotide
guuuccgucuuugaggaca

SEQ ID NO: 2536540 - RNA, 19 nt, Artificial Sequence
  Description of Artificial Sequence: Synthetic oligonucleotide
guuauccauacuccuucug

SEQ ID NO: 2536541 - RNA, 19 nt, Artificial Sequence
  Description of Artificial Sequence: Synthetic oligonucleotide
cugcaggucagcuggguac

SEQ ID NO: 2536542 - RNA, 19 nt, Artificial Sequence
  Description of Artificial Sequence: Synthetic oligonucleotide
ucaucucggagaauugcuu

SEQ ID NO: 2536543 - RNA, 19 nt, Artificial Sequence
  Description of Artificial Sequence: Synthetic oligonucleotide
agccuagguacucguggac

SEQ ID NO: 2536544 - RNA, 19 nt, Artificial Sequence
  Description of Artificial Sequence: Synthetic oligonucleotide
gguaccagugaucugccac

SEQ ID NO: 2536545 - RNA, 19 nt, Artificial Sequence
  Description of Artificial Sequence: Synthetic oligonucleotide
gcuguaucaacuccuccag

SEQ ID NO: 2536546 - RNA, 19 nt, Artificial Sequence
  Description of Artificial Sequence: Synthetic oligonucleotide
gaagguaccacggauucua

SEQ ID NO: 2536547 - RNA, 19 nt, Artificial Sequence
  Description of Artificial Sequence: Synthetic oligonucleotide
gagaauugcuugcucaagu

SEQ ID NO: 2536548 - RNA, 19 nt, Artificial Sequence
  Description of Artificial Sequence: Synthetic oligonucleotide
ugcucacacagaucaguac

SEQ ID NO: 2536549 - RNA, 19 nt, Artificial Sequence
  Description of Artificial Sequence: Synthetic oligonucleotide
uggcccuaacaccuuggcc

SEQ ID NO: 2536550 - RNA, 19 nt, Artificial Sequence
  Description of Artificial Sequence: Synthetic oligonucleotide
agguaccacggauucuauc

SEQ ID NO: 2536551 - RNA, 19 nt, Artificial Sequence
  Description of Artificial Sequence: Synthetic oligonucleotide
caccugcugaccagcaagg

SEQ ID NO: 2536552 - RNA, 19 nt, Artificial Sequence
  Description of Artificial Sequence: Synthetic oligonucleotide
caggauggcugaacuuucg

SEQ ID NO: 2536553 - RNA, 19 nt, Artificial Sequence
  Description of Artificial Sequence: Synthetic oligonucleotide
aagaaugccuccacccgcu

SEQ ID NO: 2536554 - RNA, 19 nt, Artificial Sequence
  Description of Artificial Sequence: Synthetic oligonucleotide
gagaguuauccauacuccu

SEQ ID NO: 2536555 - RNA, 19 nt, Artificial Sequence
  Description of Artificial Sequence: Synthetic oligonucleotide
uguggccuucccucaaaca

SEQ ID NO: 2536556 - RNA, 19 nt, Artificial Sequence
  Description of Artificial Sequence: Synthetic oligonucleotide
uucuaucagcaugccagcc

SEQ ID NO: 2536557 - RNA, 19 nt, Artificial Sequence
  Description of Artificial Sequence: Synthetic oligonucleotide
caaggaaggcccugucccc

SEQ ID NO: 2536558 - RNA, 19 nt, Artificial Sequence
  Description of Artificial Sequence: Synthetic oligonucleotide
agcaugauaugaugggcuu

SEQ ID NO: 2536559 - RNA, 19 nt, Artificial Sequence
  Description of Artificial Sequence: Synthetic oligonucleotide
uggguuccaaugaguggcc

SEQ ID NO: 2536560 - RNA, 19 nt, Artificial Sequence
  Description of Artificial Sequence: Synthetic oligonucleotide
guaucaacuccuccagaca

SEQ ID NO: 2536561 - RNA, 19 nt, Artificial Sequence
  Description of Artificial Sequence: Synthetic oligonucleotide
uccgcagacaguucaucuc

SEQ ID NO: 2536562 - RNA, 19 nt, Artificial Sequence
  Description of Artificial Sequence: Synthetic oligonucleotide
uguagccaauagccaccgg

SEQ ID NO: 2536563 - RNA, 19 nt, Artificial Sequence
  Description of Artificial Sequence: Synthetic oligonucleotide
aguguugcccuuugauuau

SEQ ID NO: 2536564 - RNA, 19 nt, Artificial Sequence
  Description of Artificial Sequence: Synthetic oligonucleotide
gauggcgcgacagggcugc

SEQ ID NO: 2536565 - RNA, 19 nt, Artificial Sequence
  Description of Artificial Sequence: Synthetic oligonucleotide
uggguaccagugaucugcc

SEQ ID NO: 2536566 - RNA, 19 nt, Artificial Sequence
  Description of Artificial Sequence: Synthetic oligonucleotide
auugcuugcucaaguguug

SEQ ID NO: 2536567 - RNA, 19 nt, Artificial Sequence
  Description of Artificial Sequence: Synthetic oligonucleotide
uacuccuucuguuccgauc

SEQ ID NO: 2536568 - RNA, 19 nt, Artificial Sequence
  Description of Artificial Sequence: Synthetic oligonucleotide
aucagcaugccagccuagg

SEQ ID NO: 2536569 - RNA, 19 nt, Artificial Sequence
  Description of Artificial Sequence: Synthetic oligonucleotide
cccaagaaugccuccaccc

SEQ ID NO: 2536570 - RNA, 19 nt, Artificial Sequence
  Description of Artificial Sequence: Synthetic oligonucleotide
gugcaucuggaacggaaug

SEQ ID NO: 2536571 - RNA, 19 nt, Artificial Sequence
  Description of Artificial Sequence: Synthetic oligonucleotide
gcuaaucagaccacucagg

SEQ ID NO: 2536572 - RNA, 19 nt, Artificial Sequence
  Description of Artificial Sequence: Synthetic oligonucleotide
gucaacacgaaguuuccgu

SEQ ID NO: 2536573 - RNA, 19 nt, Artificial Sequence
  Description of Artificial Sequence: Synthetic oligonucleotide
guacucguggacucgggca

SEQ ID NO: 2536574 - RNA, 19 nt, Artificial Sequence
  Description of Artificial Sequence: Synthetic oligonucleotide
agcacuccgaagguaccac

SEQ ID NO: 2536575 - RNA, 19 nt, Artificial Sequence
  Description of Artificial Sequence: Synthetic oligonucleotide
agauuguagccaauagcca

SEQ ID NO: 2536576 - RNA, 19 nt, Artificial Sequence
  Description of Artificial Sequence: Synthetic oligonucleotide
ggaaucuggguuccaauga

SEQ ID NO: 2536577 - RNA, 19 nt, Artificial Sequence
  Description of Artificial Sequence: Synthetic oligonucleotide
acagaucaguacccaagaa

SEQ ID NO: 2536578 - RNA, 19 nt, Artificial Sequence
  Description of Artificial Sequence: Synthetic oligonucleotide
aggacaggaacuguccgca

SEQ ID NO: 2536579 - RNA, 19 nt, Artificial Sequence
  Description of Artificial Sequence: Synthetic oligonucleotide
aguuuccgucuuugaggac

SEQ ID NO: 2536580 - RNA, 19 nt, Artificial Sequence
  Description of Artificial Sequence: Synthetic oligonucleotide
ucuggaacggaaugccguu

SEQ ID NO: 2536581 - RNA, 19 nt, Artificial Sequence
  Description of Artificial Sequence: Synthetic oligonucleotide
ggagcucagguaaaucagg

SEQ ID NO: 2536582 - RNA, 19 nt, Artificial Sequence
  Description of Artificial Sequence: Synthetic oligonucleotide
caguacccaagaaugccuc

SEQ ID NO: 2536583 - RNA, 19 nt, Artificial Sequence
  Description of Artificial Sequence: Synthetic oligonucleotide
cacagaucaguacccaaga

SEQ ID NO: 2536584 - RNA, 19 nt, Artificial Sequence
  Description of Artificial Sequence: Synthetic oligonucleotide
ccaagaaugccuccacccg

SEQ ID NO: 2536585 - RNA, 19 nt, Artificial Sequence
  Description of Artificial Sequence: Synthetic oligonucleotide
agccaauagccaccggcug

SEQ ID NO: 2536586 - RNA, 19 nt, Artificial Sequence
  Description of Artificial Sequence: Synthetic oligonucleotide
uuguggccuucccucaaac

SEQ ID NO: 2536587 - RNA, 19 nt, Artificial Sequence
  Description of Artificial Sequence: Synthetic oligonucleotide
ucuuggcgaagauguagau

SEQ ID NO: 2536588 - RNA, 19 nt, Artificial Sequence
  Description of Artificial Sequence: Synthetic oligonucleotide
ggcgaagauguagauggcg

SEQ ID NO: 2536589 - RNA, 19 nt, Artificial Sequence
  Description of Artificial Sequence: Synthetic oligonucleotide
uucuguuccgauccaccuu

SEQ ID NO: 2536590 - RNA, 19 nt, Artificial Sequence
  Description of Artificial Sequence: Synthetic oligonucleotide
uccaaugaguggcccuaac

SEQ ID NO: 2536591 - RNA, 19 nt, Artificial Sequence
  Description of Artificial Sequence: Synthetic oligonucleotide
aucuggaacggaaugccgu

SEQ ID NO: 2536592 - RNA, 19 nt, Artificial Sequence
  Description of Artificial Sequence: Synthetic oligonucleotide
accacggauucuaucagca

SEQ ID NO: 2536593 - RNA, 19 nt, Artificial Sequence
  Description of Artificial Sequence: Synthetic oligonucleotide
cuuugauuauuucuacggu

SEQ ID NO: 2536594 - RNA, 19 nt, Artificial Sequence
  Description of Artificial Sequence: Synthetic oligonucleotide
uccuagcaauucgaagcag

SEQ ID NO: 2536595 - RNA, 19 nt, Artificial Sequence
  Description of Artificial Sequence: Synthetic oligonucleotide
ccagccuagguacucgugg

SEQ ID NO: 2536596 - RNA, 19 nt, Artificial Sequence
  Description of Artificial Sequence: Synthetic oligonucleotide
ucucggagaauugcuugcu

SEQ ID NO: 2536597 - RNA, 19 nt, Artificial Sequence
  Description of Artificial Sequence: Synthetic oligonucleotide
gaacggaaugccguucuuc

SEQ ID NO: 2536598 - RNA, 19 nt, Artificial Sequence
  Description of Artificial Sequence: Synthetic oligonucleotide
gagcucagguaaaucagga

SEQ ID NO: 2536599 - RNA, 19 nt, Artificial Sequence
  Description of Artificial Sequence: Synthetic oligonucleotide
agauguagauggcgcgaca

SEQ ID NO: 2536600 - RNA, 19 nt, Artificial Sequence
  Description of Artificial Sequence: Synthetic oligonucleotide
agggcugcgacagcagguc

SEQ ID NO: 2536601 - RNA, 19 nt, Artificial Sequence
  Description of Artificial Sequence: Synthetic oligonucleotide
acuccgaagguaccacgga

SEQ ID NO: 2536602 - RNA, 19 nt, Artificial Sequence
  Description of Artificial Sequence: Synthetic oligonucleotide
uggcgaagauguagauggc

SEQ ID NO: 2536603 - RNA, 19 nt, Artificial Sequence
  Description of Artificial Sequence: Synthetic oligonucleotide
cacgaaguuuccgucuuug

SEQ ID NO: 2536604 - RNA, 19 nt, Artificial Sequence
  Description of Artificial Sequence: Synthetic oligonucleotide
guagauggcgcgacagggc

SEQ ID NO: 2536605 - RNA, 19 nt, Artificial Sequence
  Description of Artificial Sequence: Synthetic oligonucleotide
uacuuggagcucagguaaa

SEQ ID NO: 2536606 - RNA, 19 nt, Artificial Sequence
  Description of Artificial Sequence: Synthetic oligonucleotide
aguucaucucggagaauug

SEQ ID NO: 2536607 - RNA, 19 nt, Artificial Sequence
  Description of Artificial Sequence: Synthetic oligonucleotide
uuauuucuacggugugcau

SEQ ID NO: 2536608 - RNA, 19 nt, Artificial Sequence
  Description of Artificial Sequence: Synthetic oligonucleotide
cuaacaccuuggcccacag

SEQ ID NO: 2536609 - RNA, 19 nt, Artificial Sequence
  Description of Artificial Sequence: Synthetic oligonucleotide
agaaugccuccacccgcuc

SEQ ID NO: 2536610 - RNA, 19 nt, Artificial Sequence
  Description of Artificial Sequence: Synthetic oligonucleotide
ccgcagacaguucaucucg

SEQ ID NO: 2536611 - RNA, 19 nt, Artificial Sequence
  Description of Artificial Sequence: Synthetic oligonucleotide
agaguuauccauacuccuu

SEQ ID NO: 2536612 - RNA, 19 nt, Artificial Sequence
  Description of Artificial Sequence: Synthetic oligonucleotide
caccuucuccucuggaauc

SEQ ID NO: 2536613 - RNA, 19 nt, Artificial Sequence
  Description of Artificial Sequence: Synthetic oligonucleotide
gcgacacagagaguuaucc

SEQ ID NO: 2536614 - RNA, 19 nt, Artificial Sequence
  Description of Artificial Sequence: Synthetic oligonucleotide
uggcugaacuuucggucaa

SEQ ID NO: 2536615 - RNA, 19 nt, Artificial Sequence
  Description of Artificial Sequence: Synthetic oligonucleotide
cgaaguuuccgucuuugag

SEQ ID NO: 2536616 - RNA, 19 nt, Artificial Sequence
  Description of Artificial Sequence: Synthetic oligonucleotide
cuaucagcaugccagccua

SEQ ID NO: 2536617 - RNA, 19 nt, Artificial Sequence
  Description of Artificial Sequence: Synthetic oligonucleotide
cuuggagcucagguaaauc

SEQ ID NO: 2536618 - RNA, 19 nt, Artificial Sequence
  Description of Artificial Sequence: Synthetic oligonucleotide
aguggcccuaacaccuugg

SEQ ID NO: 2536619 - RNA, 19 nt, Artificial Sequence
  Description of Artificial Sequence: Synthetic oligonucleotide
gcaucuggaacggaaugcc

SEQ ID NO: 2536620 - RNA, 19 nt, Artificial Sequence
  Description of Artificial Sequence: Synthetic oligonucleotide
uguuccgauccaccuucuc

SEQ ID NO: 2536621 - RNA, 19 nt, Artificial Sequence
  Description of Artificial Sequence: Synthetic oligonucleotide
gguacucguggacucgggc

SEQ ID NO: 2536622 - RNA, 19 nt, Artificial Sequence
  Description of Artificial Sequence: Synthetic oligonucleotide
aacuguccgcagacaguuc

SEQ ID NO: 2536623 - RNA, 19 nt, Artificial Sequence
  Description of Artificial Sequence: Synthetic oligonucleotide
ggagaauugcuugcucaag

SEQ ID NO: 2536624 - RNA, 19 nt, Artificial Sequence
  Description of Artificial Sequence: Synthetic oligonucleotide
agugaucugccaccuggua

SEQ ID NO: 2536625 - RNA, 19 nt, Artificial Sequence
  Description of Artificial Sequence: Synthetic oligonucleotide
caccggcuguaucaacucc

SEQ ID NO: 2536626 - RNA, 19 nt, Artificial Sequence
  Description of Artificial Sequence: Synthetic oligonucleotide
augccagccuagguacucg

SEQ ID NO: 2536627 - RNA, 19 nt, Artificial Sequence
  Description of Artificial Sequence: Synthetic oligonucleotide
cagaucaguacccaagaau

SEQ ID NO: 2536628 - RNA, 19 nt, Artificial Sequence
  Description of Artificial Sequence: Synthetic oligonucleotide
cuuuuccuccaggcgacac

SEQ ID NO: 2536629 - RNA, 19 nt, Artificial Sequence
  Description of Artificial Sequence: Synthetic oligonucleotide
caugauaugaugggcuucu

SEQ ID NO: 2536630 - RNA, 19 nt, Artificial Sequence
  Description of Artificial Sequence: Synthetic oligonucleotide
gaucagccagugucaccug

SEQ ID NO: 2536631 - RNA, 19 nt, Artificial Sequence
  Description of Artificial Sequence: Synthetic oligonucleotide
ggucaacacgaaguuuccg

SEQ ID NO: 2536632 - RNA, 19 nt, Artificial Sequence
  Description of Artificial Sequence: Synthetic oligonucleotide
cagcaugauaugaugggcu

SEQ ID NO: 2536633 - RNA, 19 nt, Artificial Sequence
  Description of Artificial Sequence: Synthetic oligonucleotide
cucggagaauugcuugcuc

SEQ ID NO: 2536634 - RNA, 19 nt, Artificial Sequence
  Description of Artificial Sequence: Synthetic oligonucleotide
uaccagugaucugccaccu

SEQ ID NO: 2536635 - RNA, 19 nt, Artificial Sequence
  Description of Artificial Sequence: Synthetic oligonucleotide
ugccguucuucuuggcgaa

SEQ ID NO: 2536636 - RNA, 19 nt, Artificial Sequence
  Description of Artificial Sequence: Synthetic oligonucleotide
guacccaagaaugccucca

SEQ ID NO: 2536637 - RNA, 19 nt, Artificial Sequence
  Description of Artificial Sequence: Synthetic oligonucleotide
ccauacuccuucuguuccg

SEQ ID NO: 2536638 - RNA, 19 nt, Artificial Sequence
  Description of Artificial Sequence: Synthetic oligonucleotide
agccaccggcuguaucaac

SEQ ID NO: 2536639 - RNA, 19 nt, Artificial Sequence
  Description of Artificial Sequence: Synthetic oligonucleotide
uccuucuguuccgauccac

SEQ ID NO: 2536640 - RNA, 19 nt, Artificial Sequence
  Description of Artificial Sequence: Synthetic oligonucleotide
ggauucuaucagcaugcca

SEQ ID NO: 2536641 - RNA, 19 nt, Artificial Sequence
  Description of Artificial Sequence: Synthetic oligonucleotide
cgucuuugaggacaggaac

SEQ ID NO: 2536642 - RNA, 19 nt, Artificial Sequence
  Description of Artificial Sequence: Synthetic oligonucleotide
ugccagccuagguacucgu

SEQ ID NO: 2536643 - RNA, 19 nt, Artificial Sequence
  Description of Artificial Sequence: Synthetic oligonucleotide
uucggucaacacgaaguuu

SEQ ID NO: 2536644 - RNA, 19 nt, Artificial Sequence
  Description of Artificial Sequence: Synthetic oligonucleotide
uguccgcagacaguucauc

SEQ ID NO: 2536645 - RNA, 19 nt, Artificial Sequence
  Description of Artificial Sequence: Synthetic oligonucleotide
gcacuccgaagguaccacg

SEQ ID NO: 2536646 - RNA, 19 nt, Artificial Sequence
  Description of Artificial Sequence: Synthetic oligonucleotide
caugccagccuagguacuc

SEQ ID NO: 2536647 - RNA, 19 nt, Artificial Sequence
  Description of Artificial Sequence: Synthetic oligonucleotide
cacacagaucaguacccaa

SEQ ID NO: 2536648 - RNA, 19 nt, Artificial Sequence
  Description of Artificial Sequence: Synthetic oligonucleotide
cagccuagguacucgugga

SEQ ID NO: 2536649 - RNA, 19 nt, Artificial Sequence
  Description of Artificial Sequence: Synthetic oligonucleotide
cucagggaauccuagcaau

SEQ ID NO: 2536650 - RNA, 19 nt, Artificial Sequence
  Description of Artificial Sequence: Synthetic oligonucleotide
accagugaucugccaccug

SEQ ID NO: 2536651 - RNA, 19 nt, Artificial Sequence
  Description of Artificial Sequence: Synthetic oligonucleotide
acccgcucucgccaugcug

SEQ ID NO: 2536652 - RNA, 19 nt, Artificial Sequence
  Description of Artificial Sequence: Synthetic oligonucleotide
gcccuuugauuauuucuac

SEQ ID NO: 2536653 - RNA, 19 nt, Artificial Sequence
  Description of Artificial Sequence: Synthetic oligonucleotide
gagcacuccgaagguacca

SEQ ID NO: 2536654 - RNA, 19 nt, Artificial Sequence
  Description of Artificial Sequence: Synthetic oligonucleotide
cagcaugccagccuaggua

SEQ ID NO: 2536655 - RNA, 19 nt, Artificial Sequence
  Description of Artificial Sequence: Synthetic oligonucleotide
cuguaucaacuccuccaga

SEQ ID NO: 2536656 - RNA, 19 nt, Artificial Sequence
  Description of Artificial Sequence: Synthetic oligonucleotide
gggaauccuagcaauucga

SEQ ID NO: 2536657 - RNA, 19 nt, Artificial Sequence
  Description of Artificial Sequence: Synthetic oligonucleotide
ccgaagguaccacggauuc

SEQ ID NO: 2536658 - RNA, 19 nt, Artificial Sequence
  Description of Artificial Sequence: Synthetic oligonucleotide
guuccaaugaguggcccua

SEQ ID NO: 2536659 - RNA, 19 nt, Artificial Sequence
  Description of Artificial Sequence: Synthetic oligonucleotide
augauaugaugggcuucug

SEQ ID NO: 2536660 - RNA, 19 nt, Artificial Sequence
  Description of Artificial Sequence: Synthetic oligonucleotide
gugugcaucuggaacggaa

SEQ ID NO: 2536661 - RNA, 19 nt, Artificial Sequence
  Description of Artificial Sequence: Synthetic oligonucleotide
aggcgacacagagaguuau

SEQ ID NO: 2536662 - RNA, 19 nt, Artificial Sequence
  Description of Artificial Sequence: Synthetic oligonucleotide
auacuccuucuguuccgau

SEQ ID NO: 2536663 - RNA, 19 nt, Artificial Sequence
  Description of Artificial Sequence: Synthetic oligonucleotide
ccuccagacacaugagauc

SEQ ID NO: 2536664 - RNA, 19 nt, Artificial Sequence
  Description of Artificial Sequence: Synthetic oligonucleotide
cauacuccuucuguuccga

SEQ ID NO: 2536665 - RNA, 19 nt, Artificial Sequence
  Description of Artificial Sequence: Synthetic oligonucleotide
guccgcagacaguucaucu

SEQ ID NO: 2536666 - RNA, 19 nt, Artificial Sequence
  Description of Artificial Sequence: Synthetic oligonucleotide
ccaugcugucaguuguggc

SEQ ID NO: 2536667 - RNA, 19 nt, Artificial Sequence
  Description of Artificial Sequence: Synthetic oligonucleotide
uugcucaaguguugcccuu

SEQ ID NO: 2536668 - RNA, 19 nt, Artificial Sequence
  Description of Artificial Sequence: Synthetic oligonucleotide
guaaaucaggauggcugaa

SEQ ID NO: 2536669 - RNA, 19 nt, Artificial Sequence
  Description of Artificial Sequence: Synthetic oligonucleotide
acggaaugccguucuucuu

SEQ ID NO: 2536670 - RNA, 19 nt, Artificial Sequence
  Description of Artificial Sequence: Synthetic oligonucleotide
cuggaacggaaugccguuc

SEQ ID NO: 2536671 - RNA, 19 nt, Artificial Sequence
  Description of Artificial Sequence: Synthetic oligonucleotide
agguacucguggacucggg

SEQ ID NO: 2536672 - RNA, 19 nt, Artificial Sequence
  Description of Artificial Sequence: Synthetic oligonucleotide
ggcgcgacagggcugcgac

SEQ ID NO: 2536673 - RNA, 19 nt, Artificial Sequence
  Description of Artificial Sequence: Synthetic oligonucleotide
cucaaguguugcccuuuga

SEQ ID NO: 2536674 - RNA, 19 nt, Artificial Sequence
  Description of Artificial Sequence: Synthetic oligonucleotide
uccacccgcucucgccaug

SEQ ID NO: 2536675 - RNA, 19 nt, Artificial Sequence
  Description of Artificial Sequence: Synthetic oligonucleotide
uuucuacggugugcaucug

SEQ ID NO: 2536676 - RNA, 19 nt, Artificial Sequence
  Description of Artificial Sequence: Synthetic oligonucleotide
uuccaaugaguggcccuaa

SEQ ID NO: 2536677 - RNA, 19 nt, Artificial Sequence
  Description of Artificial Sequence: Synthetic oligonucleotide
caguuguggccuucccuca

SEQ ID NO: 2536678 - RNA, 19 nt, Artificial Sequence
  Description of Artificial Sequence: Synthetic oligonucleotide
ccaaugaguggcccuaaca

SEQ ID NO: 2536679 - RNA, 19 nt, Artificial Sequence
  Description of Artificial Sequence: Synthetic oligonucleotide
guuguggccuucccucaaa

SEQ ID NO: 2536680 - RNA, 19 nt, Artificial Sequence
  Description of Artificial Sequence: Synthetic oligonucleotide
ggaauccuagcaauucgaa

SEQ ID NO: 2536681 - RNA, 19 nt, Artificial Sequence
  Description of Artificial Sequence: Synthetic oligonucleotide
acacgaaguuuccgucuuu

SEQ ID NO: 2536682 - RNA, 19 nt, Artificial Sequence
  Description of Artificial Sequence: Synthetic oligonucleotide
gcucaaguguugcccuuug

SEQ ID NO: 2536683 - RNA, 19 nt, Artificial Sequence
  Description of Artificial Sequence: Synthetic oligonucleotide
uuccgucuuugaggacagg

SEQ ID NO: 2536684 - RNA, 19 nt, Artificial Sequence
  Description of Artificial Sequence: Synthetic oligonucleotide
ggacaggaacuguccgcag

SEQ ID NO: 2536685 - RNA, 19 nt, Artificial Sequence
  Description of Artificial Sequence: Synthetic oligonucleotide
uccaggcgacacagagagu

SEQ ID NO: 2536686 - RNA, 19 nt, Artificial Sequence
  Description of Artificial Sequence: Synthetic oligonucleotide
ggcacgggccugcagguca

SEQ ID NO: 2536687 - RNA, 19 nt, Artificial Sequence
  Description of Artificial Sequence: Synthetic oligonucleotide
ccaaggaacuuuuccucca

SEQ ID NO: 2536688 - RNA, 19 nt, Artificial Sequence
  Description of Artificial Sequence: Synthetic oligonucleotide
cuacggugugcaucuggaa

SEQ ID NO: 2536689 - RNA, 19 nt, Artificial Sequence
  Description of Artificial Sequence: Synthetic oligonucleotide
uagccaccggcuguaucaa

SEQ ID NO: 2536690 - RNA, 19 nt, Artificial Sequence
  Description of Artificial Sequence: Synthetic oligonucleotide
gcagacaguucaucucgga

SEQ ID NO: 2536691 - RNA, 19 nt, Artificial Sequence
  Description of Artificial Sequence: Synthetic oligonucleotide
ggagcacuccgaagguacc

SEQ ID NO: 2536692 - RNA, 19 nt, Artificial Sequence
  Description of Artificial Sequence: Synthetic oligonucleotide
gcugaacuuucggucaaca

SEQ ID NO: 2536693 - RNA, 19 nt, Artificial Sequence
  Description of Artificial Sequence: Synthetic oligonucleotide
agauggcgcgacagggcug

SEQ ID NO: 2536694 - RNA, 19 nt, Artificial Sequence
  Description of Artificial Sequence: Synthetic oligonucleotide
gcaugauaugaugggcuuc

SEQ ID NO: 2536695 - RNA, 19 nt, Artificial Sequence
  Description of Artificial Sequence: Synthetic oligonucleotide
acuuuuccuccaggcgaca

SEQ ID NO: 2536696 - RNA, 19 nt, Artificial Sequence
  Description of Artificial Sequence: Synthetic oligonucleotide
gucaccugcugaccagcaa

SEQ ID NO: 2536697 - RNA, 19 nt, Artificial Sequence
  Description of Artificial Sequence: Synthetic oligonucleotide
gcugcgacagcagguccag

SEQ ID NO: 2536698 - RNA, 19 nt, Artificial Sequence
  Description of Artificial Sequence: Synthetic oligonucleotide
ccugguacuuggagcucag

SEQ ID NO: 2536699 - RNA, 19 nt, Artificial Sequence
  Description of Artificial Sequence: Synthetic oligonucleotide
gguuccaaugaguggcccu

SEQ ID NO: 2536700 - RNA, 19 nt, Artificial Sequence
  Description of Artificial Sequence: Synthetic oligonucleotide
aucagaccacucagggaau

SEQ ID NO: 2536701 - RNA, 19 nt, Artificial Sequence
  Description of Artificial Sequence: Synthetic oligonucleotide
cggucaacacgaaguuucc

SEQ ID NO: 2536702 - RNA, 19 nt, Artificial Sequence
  Description of Artificial Sequence: Synthetic oligonucleotide
ggaaggcccuguccccaag

SEQ ID NO: 2536703 - RNA, 19 nt, Artificial Sequence
  Description of Artificial Sequence: Synthetic oligonucleotide
cgcagacaguucaucucgg

SEQ ID NO: 2536704 - RNA, 19 nt, Artificial Sequence
  Description of Artificial Sequence: Synthetic oligonucleotide
caaacagauuguagccaau

SEQ ID NO: 2536705 - RNA, 19 nt, Artificial Sequence
  Description of Artificial Sequence: Synthetic oligonucleotide
gccaauagccaccggcugu

SEQ ID NO: 2536706 - RNA, 19 nt, Artificial Sequence
  Description of Artificial Sequence: Synthetic oligonucleotide
ggguuccaaugaguggccc

SEQ ID NO: 2536707 - RNA, 19 nt, Artificial Sequence
  Description of Artificial Sequence: Synthetic oligonucleotide
ccaccggcuguaucaacuc

SEQ ID NO: 2536708 - RNA, 19 nt, Artificial Sequence
  Description of Artificial Sequence: Synthetic oligonucleotide
gggcugcgacagcaggucc

SEQ ID NO: 2536709 - RNA, 19 nt, Artificial Sequence
  Description of Artificial Sequence: Synthetic oligonucleotide
cagugaucugccaccuggu

SEQ ID NO: 2536710 - RNA, 19 nt, Artificial Sequence
  Description of Artificial Sequence: Synthetic oligonucleotide
cgcgacagggcugcgacag

SEQ ID NO: 2536711 - RNA, 19 nt, Artificial Sequence
  Description of Artificial Sequence: Synthetic oligonucleotide
ccucuggaaucuggguucc

SEQ ID NO: 2536712 - RNA, 19 nt, Artificial Sequence
  Description of Artificial Sequence: Synthetic oligonucleotide
ccggcuguaucaacuccuc

SEQ ID NO: 2536713 - RNA, 19 nt, Artificial Sequence
  Description of Artificial Sequence: Synthetic oligonucleotide
uggcgcgacagggcugcga

SEQ ID NO: 2536714 - RNA, 19 nt, Artificial Sequence
  Description of Artificial Sequence: Synthetic oligonucleotide
ccugcugaccagcaaggaa

SEQ ID NO: 2536715 - RNA, 19 nt, Artificial Sequence
  Description of Artificial Sequence: Synthetic oligonucleotide
cuccuucuguuccgaucca

SEQ ID NO: 2536716 - RNA, 19 nt, Artificial Sequence
  Description of Artificial Sequence: Synthetic oligonucleotide
caggcgacacagagaguua

SEQ ID NO: 2536717 - RNA, 19 nt, Artificial Sequence
  Description of Artificial Sequence: Synthetic oligonucleotide
cugcgacagcagguccagg

SEQ ID NO: 2536718 - RNA, 19 nt, Artificial Sequence
  Description of Artificial Sequence: Synthetic oligonucleotide
gcugaccagcaaggaaggc

SEQ ID NO: 2536719 - RNA, 19 nt, Artificial Sequence
  Description of Artificial Sequence: Synthetic oligonucleotide
ggcugcgacagcaggucca

SEQ ID NO: 2536720 - RNA, 19 nt, Artificial Sequence
  Description of Artificial Sequence: Synthetic oligonucleotide
ggaacuguccgcagacagu

SEQ ID NO: 2536721 - RNA, 19 nt, Artificial Sequence
  Description of Artificial Sequence: Synthetic oligonucleotide
ggcugaacuuucggucaac

SEQ ID NO: 2536722 - RNA, 19 nt, Artificial Sequence
  Description of Artificial Sequence: Synthetic oligonucleotide
ccaggcgacacagagaguu

SEQ ID NO: 2536723 - RNA, 19 nt, Artificial Sequence
  Description of Artificial Sequence: Synthetic oligonucleotide
gcgacagcagguccaggua

SEQ ID NO: 2536724 - RNA, 19 nt, Artificial Sequence
  Description of Artificial Sequence: Synthetic oligonucleotide
ggguaccagugaucugcca

SEQ ID NO: 2536725 - RNA, 19 nt, Artificial Sequence
  Description of Artificial Sequence: Synthetic oligonucleotide
cggagaauugcuugcucaa

SEQ ID NO: 2536726 - RNA, 19 nt, Artificial Sequence
  Description of Artificial Sequence: Synthetic oligonucleotide
cggcuguaucaacuccucc

SEQ ID NO: 2536727 - RNA, 19 nt, Artificial Sequence
  Description of Artificial Sequence: Synthetic oligonucleotide
caauucgaagcagcaugau

SEQ ID NO: 2536728 - RNA, 19 nt, Artificial Sequence
  Description of Artificial Sequence: Synthetic oligonucleotide
cccgcucucgccaugcugu

SEQ ID NO: 2536729 - RNA, 19 nt, Artificial Sequence
  Description of Artificial Sequence: Synthetic oligonucleotide
gccagccuagguacucgug

SEQ ID NO: 2536730 - RNA, 19 nt, Artificial Sequence
  Description of Artificial Sequence: Synthetic oligonucleotide
gccaccggcuguaucaacu

SEQ ID NO: 2536731 - RNA, 19 nt, Artificial Sequence
  Description of Artificial Sequence: Synthetic oligonucleotide
gccugcucacacagaucag

SEQ ID NO: 2536732 - RNA, 19 nt, Artificial Sequence
  Description of Artificial Sequence: Synthetic oligonucleotide
caggagcacuccgaaggua

SEQ ID NO: 2536733 - RNA, 19 nt, Artificial Sequence
  Description of Artificial Sequence: Synthetic oligonucleotide
ccuccacccgcucucgcca

SEQ ID NO: 2536734 - RNA, 19 nt, Artificial Sequence
  Description of Artificial Sequence: Synthetic oligonucleotide
gguggcucuggaauuguuu

SEQ ID NO: 2536735 - RNA, 19 nt, Artificial Sequence
  Description of Artificial Sequence: Synthetic oligonucleotide
cggauucuaucagcaugcc

SEQ ID NO: 2536736 - RNA, 19 nt, Artificial Sequence
  Description of Artificial Sequence: Synthetic oligonucleotide
gccguucuucuuggcgaag

SEQ ID NO: 2536737 - RNA, 19 nt, Artificial Sequence
  Description of Artificial Sequence: Synthetic oligonucleotide
ccacccgcucucgccaugc

SEQ ID NO: 2536738 - RNA, 19 nt, Artificial Sequence
  Description of Artificial Sequence: Synthetic oligonucleotide
auggcgcgacagggcugcg

SEQ ID NO: 2536739 - RNA, 19 nt, Artificial Sequence
  Description of Artificial Sequence: Synthetic oligonucleotide
gcgacagggcugcgacagc

SEQ ID NO: 2536740 - RNA, 19 nt, Artificial Sequence
  Description of Artificial Sequence: Synthetic oligonucleotide
ccguucuucuuggcgaaga

SEQ ID NO: 2536741 - RNA, 19 nt, Artificial Sequence
  Description of Artificial Sequence: Synthetic oligonucleotide
ccuaacaccuuggcccaca

SEQ ID NO: 2536742 - RNA, 19 nt, Artificial Sequence
  Description of Artificial Sequence: Synthetic oligonucleotide
gcugucaguuguggccuuc

SEQ ID NO: 2536743 - RNA, 19 nt, Artificial Sequence
  Description of Artificial Sequence: Synthetic oligonucleotide
gcacgggccugcaggucag

SEQ ID NO: 2536744 - RNA, 19 nt, Artificial Sequence
  Description of Artificial Sequence: Synthetic oligonucleotide
ggccuucccucaaacagau

SEQ ID NO: 2536745 - RNA, 19 nt, Artificial Sequence
  Description of Artificial Sequence: Synthetic oligonucleotide
ccuuggcccacaggagcac

SEQ ID NO: 2536746 - RNA, 19 nt, Artificial Sequence
  Description of Artificial Sequence: Synthetic oligonucleotide
gaucugccaccugguacuu

SEQ ID NO: 2536747 - RNA, 19 nt, Artificial Sequence
  Description of Artificial Sequence: Synthetic oligonucleotide
ccugcaggucagcugggua

SEQ ID NO: 2536748 - RNA, 19 nt, Artificial Sequence
  Description of Artificial Sequence: Synthetic oligonucleotide
ggacucgggcacgggccug

SEQ ID NO: 2536749 - RNA, 19 nt, Artificial Sequence
  Description of Artificial Sequence: Synthetic oligonucleotide
ggaacggaaugccguucuu

SEQ ID NO: 2536750 - RNA, 19 nt, Artificial Sequence
  Description of Artificial Sequence: Synthetic oligonucleotide
gguagagcuccaagaccau

SEQ ID NO: 2536751 - RNA, 19 nt, Artificial Sequence
  Description of Artificial Sequence: Synthetic oligonucleotide
ccgcucucgccaugcuguc

SEQ ID NO: 2536752 - RNA, 19 nt, Artificial Sequence
  Description of Artificial Sequence: Synthetic oligonucleotide
gcgcgacagggcugcgaca

SEQ ID NO: 2536753 - RNA, 19 nt, Artificial Sequence
  Description of Artificial Sequence: Synthetic oligonucleotide
ccacggauucuaucagcau

SEQ ID NO: 2536754 - RNA, 19 nt, Artificial Sequence
  Description of Artificial Sequence: Synthetic oligonucleotide
cuccacccgcucucgccau

SEQ ID NO: 2536755 - RNA, 19 nt, Artificial Sequence
  Description of Artificial Sequence: Synthetic oligonucleotide
cccuaacaccuuggcccac

SEQ ID NO: 2536756 - RNA, 19 nt, Artificial Sequence
  Description of Artificial Sequence: Synthetic oligonucleotide
gggguggcucuggaauugu

SEQ ID NO: 2536757 - RNA, 19 nt, Artificial Sequence
  Description of Artificial Sequence: Synthetic oligonucleotide
cacccgcucucgccaugcu

SEQ ID NO: 2536758 - RNA, 19 nt, Artificial Sequence
  Description of Artificial Sequence: Synthetic oligonucleotide
ccuguccccaaggaacuuu

SEQ ID NO: 2536759 - RNA, 19 nt, Artificial Sequence
  Description of Artificial Sequence: Synthetic oligonucleotide
ggguggcucuggaauuguu

SEQ ID NO: 2536760 - RNA, 19 nt, Artificial Sequence
  Description of Artificial Sequence: Synthetic oligonucleotide
cgcucucgccaugcuguca

SEQ ID NO: 2536761 - RNA, 19 nt, Artificial Sequence
  Description of Artificial Sequence: Synthetic oligonucleotide
gccuucccucaaacagauu

SEQ ID NO: 2536762 - RNA, 19 nt, Artificial Sequence
  Description of Artificial Sequence: Synthetic oligonucleotide
cccuguccccaaggaacuu

SEQ ID NO: 2536763 - RNA, 19 nt, Artificial Sequence
  Description of Artificial Sequence: Synthetic oligonucleotide
uuuuaagguacuaagacac

SEQ ID NO: 2536764 - RNA, 19 nt, Artificial Sequence
  Description of Artificial Sequence: Synthetic oligonucleotide
ugggugaucuguaagaugg

SEQ ID NO: 2536765 - RNA, 19 nt, Artificial Sequence
  Description of Artificial Sequence: Synthetic oligonucleotide
agaucuaacacuugugcgc

SEQ ID NO: 2536766 - RNA, 19 nt, Artificial Sequence
  Description of Artificial Sequence: Synthetic oligonucleotide
aagcuugucaguugaauac

SEQ ID NO: 2536767 - RNA, 19 nt, Artificial Sequence
  Description of Artificial Sequence: Synthetic oligonucleotide
cauucuaacacuuggauug

SEQ ID NO: 2536768 - RNA, 19 nt, Artificial Sequence
  Description of Artificial Sequence: Synthetic oligonucleotide
ucucuuauccuccugacag

SEQ ID NO: 2536769 - RNA, 19 nt, Artificial Sequence
  Description of Artificial Sequence: Synthetic oligonucleotide
agagaauggaugcugaagg

SEQ ID NO: 2536770 - RNA, 19 nt, Artificial Sequence
  Description of Artificial Sequence: Synthetic oligonucleotide
ugguauaaaggauagggag

SEQ ID NO: 2536771 - RNA, 19 nt, Artificial Sequence
  Description of Artificial Sequence: Synthetic oligonucleotide
uacuaagacacaaagucug

SEQ ID NO: 2536772 - RNA, 19 nt, Artificial Sequence
  Description of Artificial Sequence: Synthetic oligonucleotide
gacacaauaacacauggca

SEQ ID NO: 2536773 - RNA, 19 nt, Artificial Sequence
  Description of Artificial Sequence: Synthetic oligonucleotide
auuguaggcgcugaaaugc

SEQ ID NO: 2536774 - RNA, 19 nt, Artificial Sequence
  Description of Artificial Sequence: Synthetic oligonucleotide
ugaucuguaagaugggagg

SEQ ID NO: 2536775 - RNA, 19 nt, Artificial Sequence
  Description of Artificial Sequence: Synthetic oligonucleotide
aacccuaguaaccaaaaca

SEQ ID NO: 2536776 - RNA, 19 nt, Artificial Sequence
  Description of Artificial Sequence: Synthetic oligonucleotide
uuauugguauaaaggauag

SEQ ID NO: 2536777 - RNA, 19 nt, Artificial Sequence
  Description of Artificial Sequence: Synthetic oligonucleotide
aauaugaaccugucugcgg

SEQ ID NO: 2536778 - RNA, 19 nt, Artificial Sequence
  Description of Artificial Sequence: Synthetic oligonucleotide
ugguuauugguauaaagga

SEQ ID NO: 2536779 - RNA, 19 nt, Artificial Sequence
  Description of Artificial Sequence: Synthetic oligonucleotide
auucuguaauuguaggcgc

SEQ ID NO: 2536780 - RNA, 19 nt, Artificial Sequence
  Description of Artificial Sequence: Synthetic oligonucleotide
uugauucucaaugauaagc

SEQ ID NO: 2536781 - RNA, 19 nt, Artificial Sequence
  Description of Artificial Sequence: Synthetic oligonucleotide
cacauuauggcugugacag

SEQ ID NO: 2536782 - RNA, 19 nt, Artificial Sequence
  Description of Artificial Sequence: Synthetic oligonucleotide
uacacucuuauuuucucgg

SEQ ID NO: 2536783 - RNA, 19 nt, Artificial Sequence
  Description of Artificial Sequence: Synthetic oligonucleotide
ugauucucaaugauaagcu

SEQ ID NO: 2536784 - RNA, 19 nt, Artificial Sequence
  Description of Artificial Sequence: Synthetic oligonucleotide
gguacuaagacacaaaguc

SEQ ID NO: 2536785 - RNA, 19 nt, Artificial Sequence
  Description of Artificial Sequence: Synthetic oligonucleotide
aaggauagggagauaauuc

SEQ ID NO: 2536786 - RNA, 19 nt, Artificial Sequence
  Description of Artificial Sequence: Synthetic oligonucleotide
ucugcaaaagcucuauaca

SEQ ID NO: 2536787 - RNA, 19 nt, Artificial Sequence
  Description of Artificial Sequence: Synthetic oligonucleotide
cagaaugcaaaugugaccc

SEQ ID NO: 2536788 - RNA, 19 nt, Artificial Sequence
  Description of Artificial Sequence: Synthetic oligonucleotide
aauuguaggcgcugaaaug

SEQ ID NO: 2536789 - RNA, 19 nt, Artificial Sequence
  Description of Artificial Sequence: Synthetic oligonucleotide
ucaacccuaaugucaaacg

SEQ ID NO: 2536790 - RNA, 19 nt, Artificial Sequence
  Description of Artificial Sequence: Synthetic oligonucleotide
aaacccuaguaaccaaaac

SEQ ID NO: 2536791 - RNA, 19 nt, Artificial Sequence
  Description of Artificial Sequence: Synthetic oligonucleotide
agaggagacacaauaacac

SEQ ID NO: 2536792 - RNA, 19 nt, Artificial Sequence
  Description of Artificial Sequence: Synthetic oligonucleotide
ugucaguugaauacaguug

SEQ ID NO: 2536793 - RNA, 19 nt, Artificial Sequence
  Description of Artificial Sequence: Synthetic oligonucleotide
uaacacauggcauuauucu

SEQ ID NO: 2536794 - RNA, 19 nt, Artificial Sequence
  Description of Artificial Sequence: Synthetic oligonucleotide
uucuuagugaccuccagcu

SEQ ID NO: 2536795 - RNA, 19 nt, Artificial Sequence
  Description of Artificial Sequence: Synthetic oligonucleotide
ugacagaaugcaaauguga

SEQ ID NO: 2536796 - RNA, 19 nt, Artificial Sequence
  Description of Artificial Sequence: Synthetic oligonucleotide
ucuacaggauccuuuacac

SEQ ID NO: 2536797 - RNA, 19 nt, Artificial Sequence
  Description of Artificial Sequence: Synthetic oligonucleotide
uacgucaacccuaauguca

SEQ ID NO: 2536798 - RNA, 19 nt, Artificial Sequence
  Description of Artificial Sequence: Synthetic oligonucleotide
ugauaagcuugucaguuga

SEQ ID NO: 2536799 - RNA, 19 nt, Artificial Sequence
  Description of Artificial Sequence: Synthetic oligonucleotide
aaugauaagcuugucaguu

SEQ ID NO: 2536800 - RNA, 19 nt, Artificial Sequence
  Description of Artificial Sequence: Synthetic oligonucleotide
uaauuguaggcgcugaaau

SEQ ID NO: 2536801 - RNA, 19 nt, Artificial Sequence
  Description of Artificial Sequence: Synthetic oligonucleotide
uuauggcugugacagaaug

SEQ ID NO: 2536802 - RNA, 19 nt, Artificial Sequence
  Description of Artificial Sequence: Synthetic oligonucleotide
uucuacaggauccuuuaca

SEQ ID NO: 2536803 - RNA, 19 nt, Artificial Sequence
  Description of Artificial Sequence: Synthetic oligonucleotide
aaacagguccuucuucgag

SEQ ID NO: 2536804 - RNA, 19 nt, Artificial Sequence
  Description of Artificial Sequence: Synthetic oligonucleotide
uucucaaugauaagcuugu

SEQ ID NO: 2536805 - RNA, 19 nt, Artificial Sequence
  Description of Artificial Sequence: Synthetic oligonucleotide
gcaaaagcucuauacaugg

SEQ ID NO: 2536806 - RNA, 19 nt, Artificial Sequence
  Description of Artificial Sequence: Synthetic oligonucleotide
agggagauaauucuguuau

SEQ ID NO: 2536807 - RNA, 19 nt, Artificial Sequence
  Description of Artificial Sequence: Synthetic oligonucleotide
agggcuugaauuucuacag

SEQ ID NO: 2536808 - RNA, 19 nt, Artificial Sequence
  Description of Artificial Sequence: Synthetic oligonucleotide
uugguauaaaggauaggga

SEQ ID NO: 2536809 - RNA, 19 nt, Artificial Sequence
  Description of Artificial Sequence: Synthetic oligonucleotide
gaucuaacacuugugcgcg

SEQ ID NO: 2536810 - RNA, 19 nt, Artificial Sequence
  Description of Artificial Sequence: Synthetic oligonucleotide
uuaucagcuccuacaaggc

SEQ ID NO: 2536811 - RNA, 19 nt, Artificial Sequence
  Description of Artificial Sequence: Synthetic oligonucleotide
aauaacacauggcauuauu

SEQ ID NO: 2536812 - RNA, 19 nt, Artificial Sequence
  Description of Artificial Sequence: Synthetic oligonucleotide
aacacuugugcgcggcugg

SEQ ID NO: 2536813 - RNA, 19 nt, Artificial Sequence
  Description of Artificial Sequence: Synthetic oligonucleotide
cucuuauuuucucggaagg

SEQ ID NO: 2536814 - RNA, 19 nt, Artificial Sequence
  Description of Artificial Sequence: Synthetic oligonucleotide
acagcauacauucuguaau

SEQ ID NO: 2536815 - RNA, 19 nt, Artificial Sequence
  Description of Artificial Sequence: Synthetic oligonucleotide
gaaggcaucucuuauccuc

SEQ ID NO: 2536816 - RNA, 19 nt, Artificial Sequence
  Description of Artificial Sequence: Synthetic oligonucleotide
aagacacaaagucugcaaa

SEQ ID NO: 2536817 - RNA, 19 nt, Artificial Sequence
  Description of Artificial Sequence: Synthetic oligonucleotide
uucacauuauggcugugac

SEQ ID NO: 2536818 - RNA, 19 nt, Artificial Sequence
  Description of Artificial Sequence: Synthetic oligonucleotide
gccaauaugaaccugucug

SEQ ID NO: 2536819 - RNA, 19 nt, Artificial Sequence
  Description of Artificial Sequence: Synthetic oligonucleotide
uacaugggugaucuguaag

SEQ ID NO: 2536820 - RNA, 19 nt, Artificial Sequence
  Description of Artificial Sequence: Synthetic oligonucleotide
aaagcucuauacaugggug

SEQ ID NO: 2536821 - RNA, 19 nt, Artificial Sequence
  Description of Artificial Sequence: Synthetic oligonucleotide
aggauagggagauaauucu

SEQ ID NO: 2536822 - RNA, 19 nt, Artificial Sequence
  Description of Artificial Sequence: Synthetic oligonucleotide
uuuaccagggcuugaauuu

SEQ ID NO: 2536823 - RNA, 19 nt, Artificial Sequence
  Description of Artificial Sequence: Synthetic oligonucleotide
auacaguuggccaauauga

SEQ ID NO: 2536824 - RNA, 19 nt, Artificial Sequence
  Description of Artificial Sequence: Synthetic oligonucleotide
auaugaaccugucugcgga

SEQ ID NO: 2536825 - RNA, 19 nt, Artificial Sequence
  Description of Artificial Sequence: Synthetic oligonucleotide
uacagaucuaacacuugug

SEQ ID NO: 2536826 - RNA, 19 nt, Artificial Sequence
  Description of Artificial Sequence: Synthetic oligonucleotide
gaucuguaagaugggaggg

SEQ ID NO: 2536827 - RNA, 19 nt, Artificial Sequence
  Description of Artificial Sequence: Synthetic oligonucleotide
auggcauuauucuuaguga

SEQ ID NO: 2536828 - RNA, 19 nt, Artificial Sequence
  Description of Artificial Sequence: Synthetic oligonucleotide
guuacgucaacccuaaugu

SEQ ID NO: 2536829 - RNA, 19 nt, Artificial Sequence
  Description of Artificial Sequence: Synthetic oligonucleotide
uuggccaauaugaaccugu

SEQ ID NO: 2536830 - RNA, 19 nt, Artificial Sequence
  Description of Artificial Sequence: Synthetic oligonucleotide
uuauuuucucggaaggcau

SEQ ID NO: 2536831 - RNA, 19 nt, Artificial Sequence
  Description of Artificial Sequence: Synthetic oligonucleotide
uauucuuagugaccuccag

SEQ ID NO: 2536832 - RNA, 19 nt, Artificial Sequence
  Description of Artificial Sequence: Synthetic oligonucleotide
uugucaguugaauacaguu

SEQ ID NO: 2536833 - RNA, 19 nt, Artificial Sequence
  Description of Artificial Sequence: Synthetic oligonucleotide
uuuaagguacuaagacaca

SEQ ID NO: 2536834 - RNA, 19 nt, Artificial Sequence
  Description of Artificial Sequence: Synthetic oligonucleotide
cuccugacagcauacauuc

SEQ ID NO: 2536835 - RNA, 19 nt, Artificial Sequence
  Description of Artificial Sequence: Synthetic oligonucleotide
aaaggauagggagauaauu

SEQ ID NO: 2536836 - RNA, 19 nt, Artificial Sequence
  Description of Artificial Sequence: Synthetic oligonucleotide
aagcucuauacauggguga

SEQ ID NO: 2536837 - RNA, 19 nt, Artificial Sequence
  Description of Artificial Sequence: Synthetic oligonucleotide
uguucagccagcacuggga

SEQ ID NO: 2536838 - RNA, 19 nt, Artificial Sequence
  Description of Artificial Sequence: Synthetic oligonucleotide
ucucucucagcaucgcccg

SEQ ID NO: 2536839 - RNA, 19 nt, Artificial Sequence
  Description of Artificial Sequence: Synthetic oligonucleotide
ccuaguaaccaaaacaaac

SEQ ID NO: 2536840 - RNA, 19 nt, Artificial Sequence
  Description of Artificial Sequence: Synthetic oligonucleotide
ggauugaggaugcacagcc

SEQ ID NO: 2536841 - RNA, 19 nt, Artificial Sequence
  Description of Artificial Sequence: Synthetic oligonucleotide
gacccaguuuaucagcucc

SEQ ID NO: 2536842 - RNA, 19 nt, Artificial Sequence
  Description of Artificial Sequence: Synthetic oligonucleotide
acagcauagagaauggaug

SEQ ID NO: 2536843 - RNA, 19 nt, Artificial Sequence
  Description of Artificial Sequence: Synthetic oligonucleotide
uggcauuauucuuagugac

SEQ ID NO: 2536844 - RNA, 19 nt, Artificial Sequence
  Description of Artificial Sequence: Synthetic oligonucleotide
aacacauggcauuauucuu

SEQ ID NO: 2536845 - RNA, 19 nt, Artificial Sequence
  Description of Artificial Sequence: Synthetic oligonucleotide
uuguaaugguuauugguau

SEQ ID NO: 2536846 - RNA, 19 nt, Artificial Sequence
  Description of Artificial Sequence: Synthetic oligonucleotide
aguuuaucagcuccuacaa

SEQ ID NO: 2536847 - RNA, 19 nt, Artificial Sequence
  Description of Artificial Sequence: Synthetic oligonucleotide
uaagacacaaagucugcaa

SEQ ID NO: 2536848 - RNA, 19 nt, Artificial Sequence
  Description of Artificial Sequence: Synthetic oligonucleotide
uuaagguacuaagacacaa

SEQ ID NO: 2536849 - RNA, 19 nt, Artificial Sequence
  Description of Artificial Sequence: Synthetic oligonucleotide
ugugacccaguuuaucagc

SEQ ID NO: 2536850 - RNA, 19 nt, Artificial Sequence
  Description of Artificial Sequence: Synthetic oligonucleotide
ucuuauuuucucggaaggc

SEQ ID NO: 2536851 - RNA, 19 nt, Artificial Sequence
  Description of Artificial Sequence: Synthetic oligonucleotide
uuuacacucuuauuuucuc

SEQ ID NO: 2536852 - RNA, 19 nt, Artificial Sequence
  Description of Artificial Sequence: Synthetic oligonucleotide
auuauuucaaggucucuuu

SEQ ID NO: 2536853 - RNA, 19 nt, Artificial Sequence
  Description of Artificial Sequence: Synthetic oligonucleotide
auacauucuguaauuguag

SEQ ID NO: 2536854 - RNA, 19 nt, Artificial Sequence
  Description of Artificial Sequence: Synthetic oligonucleotide
cuuggauugaggaugcaca

SEQ ID NO: 2536855 - RNA, 19 nt, Artificial Sequence
  Description of Artificial Sequence: Synthetic oligonucleotide
uaagcuugucaguugaaua

SEQ ID NO: 2536856 - RNA, 19 nt, Artificial Sequence
  Description of Artificial Sequence: Synthetic oligonucleotide
uuauucuuagugaccucca

SEQ ID NO: 2536857 - RNA, 19 nt, Artificial Sequence
  Description of Artificial Sequence: Synthetic oligonucleotide
acuaagacacaaagucugc

SEQ ID NO: 2536858 - RNA, 19 nt, Artificial Sequence
  Description of Artificial Sequence: Synthetic oligonucleotide
cucucucucagcaucgccc

SEQ ID NO: 2536859 - RNA, 19 nt, Artificial Sequence
  Description of Artificial Sequence: Synthetic oligonucleotide
agacacaauaacacauggc

SEQ ID NO: 2536860 - RNA, 19 nt, Artificial Sequence
  Description of Artificial Sequence: Synthetic oligonucleotide
uggaugcugaagguggucg

SEQ ID NO: 2536861 - RNA, 19 nt, Artificial Sequence
  Description of Artificial Sequence: Synthetic oligonucleotide
ugcggauuauuucaagguc

SEQ ID NO: 2536862 - RNA, 19 nt, Artificial Sequence
  Description of Artificial Sequence: Synthetic oligonucleotide
acaugggugaucuguaaga

SEQ ID NO: 2536863 - RNA, 19 nt, Artificial Sequence
  Description of Artificial Sequence: Synthetic oligonucleotide
gguuccacagcauagagaa

SEQ ID NO: 2536864 - RNA, 19 nt, Artificial Sequence
  Description of Artificial Sequence: Synthetic oligonucleotide
acuuggauugaggaugcac

SEQ ID NO: 2536865 - RNA, 19 nt, Artificial Sequence
  Description of Artificial Sequence: Synthetic oligonucleotide
auggagaggagacacaaua

SEQ ID NO: 2536866 - RNA, 19 nt, Artificial Sequence
  Description of Artificial Sequence: Synthetic oligonucleotide
uaagguacuaagacacaaa

SEQ ID NO: 2536867 - RNA, 19 nt, Artificial Sequence
  Description of Artificial Sequence: Synthetic oligonucleotide
uauacaugggugaucugua

SEQ ID NO: 2536868 - RNA, 19 nt, Artificial Sequence
  Description of Artificial Sequence: Synthetic oligonucleotide
auuuaccagggcuugaauu

SEQ ID NO: 2536869 - RNA, 19 nt, Artificial Sequence
  Description of Artificial Sequence: Synthetic oligonucleotide
gguuacgucaacccuaaug

SEQ ID NO: 2536870 - RNA, 19 nt, Artificial Sequence
  Description of Artificial Sequence: Synthetic oligonucleotide
uccuucuucgaggaggugc

SEQ ID NO: 2536871 - RNA, 19 nt, Artificial Sequence
  Description of Artificial Sequence: Synthetic oligonucleotide
uauugguauaaaggauagg

SEQ ID NO: 2536872 - RNA, 19 nt, Artificial Sequence
  Description of Artificial Sequence: Synthetic oligonucleotide
ucauucuaacacuuggauu

SEQ ID NO: 2536873 - RNA, 19 nt, Artificial Sequence
  Description of Artificial Sequence: Synthetic oligonucleotide
uuauccuccugacagcaua

SEQ ID NO: 2536874 - RNA, 19 nt, Artificial Sequence
  Description of Artificial Sequence: Synthetic oligonucleotide
acuugugcgcggcuggagg

SEQ ID NO: 2536875 - RNA, 19 nt, Artificial Sequence
  Description of Artificial Sequence: Synthetic oligonucleotide
gcaaaugugacccaguuua

SEQ ID NO: 2536876 - RNA, 19 nt, Artificial Sequence
  Description of Artificial Sequence: Synthetic oligonucleotide
ugaaaugcuugcucucucu

SEQ ID NO: 2536877 - RNA, 19 nt, Artificial Sequence
  Description of Artificial Sequence: Synthetic oligonucleotide
guuauugguauaaaggaua

SEQ ID NO: 2536878 - RNA, 19 nt, Artificial Sequence
  Description of Artificial Sequence: Synthetic oligonucleotide
gcuccuacaaggcaggaag

SEQ ID NO: 2536879 - RNA, 19 nt, Artificial Sequence
  Description of Artificial Sequence: Synthetic oligonucleotide
caagaggcucuguucagcc

SEQ ID NO: 2536880 - RNA, 19 nt, Artificial Sequence
  Description of Artificial Sequence: Synthetic oligonucleotide
uuauuucaaggucucuuuu

SEQ ID NO: 2536881 - RNA, 19 nt, Artificial Sequence
  Description of Artificial Sequence: Synthetic oligonucleotide
cuugauucucaaugauaag

SEQ ID NO: 2536882 - RNA, 19 nt, Artificial Sequence
  Description of Artificial Sequence: Synthetic oligonucleotide
agguccuucuucgaggagg

SEQ ID NO: 2536883 - RNA, 19 nt, Artificial Sequence
  Description of Artificial Sequence: Synthetic oligonucleotide
cuugcucucucucagcauc

SEQ ID NO: 2536884 - RNA, 19 nt, Artificial Sequence
  Description of Artificial Sequence: Synthetic oligonucleotide
uucuguaauuguaggcgcu

SEQ ID NO: 2536885 - RNA, 19 nt, Artificial Sequence
  Description of Artificial Sequence: Synthetic oligonucleotide
gagaggagacacaauaaca

SEQ ID NO: 2536886 - RNA, 19 nt, Artificial Sequence
  Description of Artificial Sequence: Synthetic oligonucleotide
cuuauuuucucggaaggca

SEQ ID NO: 2536887 - RNA, 19 nt, Artificial Sequence
  Description of Artificial Sequence: Synthetic oligonucleotide
uggucgguucugcugcugg

SEQ ID NO: 2536888 - RNA, 19 nt, Artificial Sequence
  Description of Artificial Sequence: Synthetic oligonucleotide
uguaauuguaggcgcugaa

SEQ ID NO: 2536889 - RNA, 19 nt, Artificial Sequence
  Description of Artificial Sequence: Synthetic oligonucleotide
uacaguuggccaauaugaa

SEQ ID NO: 2536890 - RNA, 19 nt, Artificial Sequence
  Description of Artificial Sequence: Synthetic oligonucleotide
gagcaagaggcucuguuca

SEQ ID NO: 2536891 - RNA, 19 nt, Artificial Sequence
  Description of Artificial Sequence: Synthetic oligonucleotide
cuuuauuuaccagggcuug

SEQ ID NO: 2536892 - RNA, 19 nt, Artificial Sequence
  Description of Artificial Sequence: Synthetic oligonucleotide
ucacauuauggcugugaca

SEQ ID NO: 2536893 - RNA, 19 nt, Artificial Sequence
  Description of Artificial Sequence: Synthetic oligonucleotide
uucuucacauuauggcugu

SEQ ID NO: 2536894 - RNA, 19 nt, Artificial Sequence
  Description of Artificial Sequence: Synthetic oligonucleotide
caguuuaucagcuccuaca

SEQ ID NO: 2536895 - RNA, 19 nt, Artificial Sequence
  Description of Artificial Sequence: Synthetic oligonucleotide
uccuacaaggcaggaagag

SEQ ID NO: 2536896 - RNA, 19 nt, Artificial Sequence
  Description of Artificial Sequence: Synthetic oligonucleotide
uuuccuagugcugggcucc

SEQ ID NO: 2536897 - RNA, 19 nt, Artificial Sequence
  Description of Artificial Sequence: Synthetic oligonucleotide
gugaucuguaagaugggag

SEQ ID NO: 2536898 - RNA, 19 nt, Artificial Sequence
  Description of Artificial Sequence: Synthetic oligonucleotide
ucuguaauuguaggcgcug

SEQ ID NO: 2536899 - RNA, 19 nt, Artificial Sequence
  Description of Artificial Sequence: Synthetic oligonucleotide
ugccauguuggaaggaaaa

SEQ ID NO: 2536900 - RNA, 19 nt, Artificial Sequence
  Description of Artificial Sequence: Synthetic oligonucleotide
cugucugcggauuauuuca

SEQ ID NO: 2536901 - RNA, 19 nt, Artificial Sequence
  Description of Artificial Sequence: Synthetic oligonucleotide
aggaugcacagccauuucu

SEQ ID NO: 2536902 - RNA, 19 nt, Artificial Sequence
  Description of Artificial Sequence: Synthetic oligonucleotide
uguaaugguuauugguaua

SEQ ID NO: 2536903 - RNA, 19 nt, Artificial Sequence
  Description of Artificial Sequence: Synthetic oligonucleotide
gacagcauacauucuguaa

SEQ ID NO: 2536904 - RNA, 19 nt, Artificial Sequence
  Description of Artificial Sequence: Synthetic oligonucleotide
aaaacccuaguaaccaaaa

SEQ ID NO: 2536905 - RNA, 19 nt, Artificial Sequence
  Description of Artificial Sequence: Synthetic oligonucleotide
uaacacuuggauugaggau

SEQ ID NO: 2536906 - RNA, 19 nt, Artificial Sequence
  Description of Artificial Sequence: Synthetic oligonucleotide
uucgaggaggugccgaggu

SEQ ID NO: 2536907 - RNA, 19 nt, Artificial Sequence
  Description of Artificial Sequence: Synthetic oligonucleotide
acccuaguaaccaaaacaa

SEQ ID NO: 2536908 - RNA, 19 nt, Artificial Sequence
  Description of Artificial Sequence: Synthetic oligonucleotide
aacccuaaugucaaacgau

SEQ ID NO: 2536909 - RNA, 19 nt, Artificial Sequence
  Description of Artificial Sequence: Synthetic oligonucleotide
aguuggccaauaugaaccu

SEQ ID NO: 2536910 - RNA, 19 nt, Artificial Sequence
  Description of Artificial Sequence: Synthetic oligonucleotide
aaugcaaaugugacccagu

SEQ ID NO: 2536911 - RNA, 19 nt, Artificial Sequence
  Description of Artificial Sequence: Synthetic oligonucleotide
uuuauuuaccagggcuuga

SEQ ID NO: 2536912 - RNA, 19 nt, Artificial Sequence
  Description of Artificial Sequence: Synthetic oligonucleotide
cauagagaauggaugcuga

SEQ ID NO: 2536913 - RNA, 19 nt, Artificial Sequence
  Description of Artificial Sequence: Synthetic oligonucleotide
gaugcacagccauuucuuc

SEQ ID NO: 2536914 - RNA, 19 nt, Artificial Sequence
  Description of Artificial Sequence: Synthetic oligonucleotide
cuaaugucaaacgaugcaa

SEQ ID NO: 2536915 - RNA, 19 nt, Artificial Sequence
  Description of Artificial Sequence: Synthetic oligonucleotide
ucuguaagaugggagggau

SEQ ID NO: 2536916 - RNA, 19 nt, Artificial Sequence
  Description of Artificial Sequence: Synthetic oligonucleotide
augcacagccauuucuuca

SEQ ID NO: 2536917 - RNA, 19 nt, Artificial Sequence
  Description of Artificial Sequence: Synthetic oligonucleotide
cagggcuugaauuucuaca

SEQ ID NO: 2536918 - RNA, 19 nt, Artificial Sequence
  Description of Artificial Sequence: Synthetic oligonucleotide
gaggcuguuuccuagugcu

SEQ ID NO: 2536919 - RNA, 19 nt, Artificial Sequence
  Description of Artificial Sequence: Synthetic oligonucleotide
uguccugggcgucucuuga

SEQ ID NO: 2536920 - RNA, 19 nt, Artificial Sequence
  Description of Artificial Sequence: Synthetic oligonucleotide
uauuuaccagggcuugaau

SEQ ID NO: 2536921 - RNA, 19 nt, Artificial Sequence
  Description of Artificial Sequence: Synthetic oligonucleotide
uuacgucaacccuaauguc

SEQ ID NO: 2536922 - RNA, 19 nt, Artificial Sequence
  Description of Artificial Sequence: Synthetic oligonucleotide
aggagacacaauaacacau

SEQ ID NO: 2536923 - RNA, 19 nt, Artificial Sequence
  Description of Artificial Sequence: Synthetic oligonucleotide
ucagcaucgcccgguacag

SEQ ID NO: 2536924 - RNA, 19 nt, Artificial Sequence
  Description of Artificial Sequence: Synthetic oligonucleotide
acccuaaugucaaacgaug

SEQ ID NO: 2536925 - RNA, 19 nt, Artificial Sequence
  Description of Artificial Sequence: Synthetic oligonucleotide
uuguaggcgcugaaaugcu

SEQ ID NO: 2536926 - RNA, 19 nt, Artificial Sequence
  Description of Artificial Sequence: Synthetic oligonucleotide
cuugugcgcggcuggaggc

SEQ ID NO: 2536927 - RNA, 19 nt, Artificial Sequence
  Description of Artificial Sequence: Synthetic oligonucleotide
ggcuccuauguccugggcg

SEQ ID NO: 2536928 - RNA, 19 nt, Artificial Sequence
  Description of Artificial Sequence: Synthetic oligonucleotide
aucucuuauccuccugaca

SEQ ID NO: 2536929 - RNA, 19 nt, Artificial Sequence
  Description of Artificial Sequence: Synthetic oligonucleotide
agcaagaggcucuguucag

SEQ ID NO: 2536930 - RNA, 19 nt, Artificial Sequence
  Description of Artificial Sequence: Synthetic oligonucleotide
auagagaauggaugcugaa

SEQ ID NO: 2536931 - RNA, 19 nt, Artificial Sequence
  Description of Artificial Sequence: Synthetic oligonucleotide
ucuuagugaccuccagcuc

SEQ ID NO: 2536932 - RNA, 19 nt, Artificial Sequence
  Description of Artificial Sequence: Synthetic oligonucleotide
gugacagaaugcaaaugug

SEQ ID NO: 2536933 - RNA, 19 nt, Artificial Sequence
  Description of Artificial Sequence: Synthetic oligonucleotide
cuuagugaccuccagcucu

SEQ ID NO: 2536934 - RNA, 19 nt, Artificial Sequence
  Description of Artificial Sequence: Synthetic oligonucleotide
ugcugcuggaggcuguuuc

SEQ ID NO: 2536935 - RNA, 19 nt, Artificial Sequence
  Description of Artificial Sequence: Synthetic oligonucleotide
ugaggaugcacagccauuu

SEQ ID NO: 2536936 - RNA, 19 nt, Artificial Sequence
  Description of Artificial Sequence: Synthetic oligonucleotide
gguauaaaggauagggaga

SEQ ID NO: 2536937 - RNA, 19 nt, Artificial Sequence
  Description of Artificial Sequence: Synthetic oligonucleotide
auagggagauaauucuguu

SEQ ID NO: 2536938 - RNA, 19 nt, Artificial Sequence
  Description of Artificial Sequence: Synthetic oligonucleotide
uaggcgcugaaaugcuugc

SEQ ID NO: 2536939 - RNA, 19 nt, Artificial Sequence
  Description of Artificial Sequence: Synthetic oligonucleotide
caacccuaaugucaaacga

SEQ ID NO: 2536940 - RNA, 19 nt, Artificial Sequence
  Description of Artificial Sequence: Synthetic oligonucleotide
uggcuuuauuuaccagggc

SEQ ID NO: 2536941 - RNA, 19 nt, Artificial Sequence
  Description of Artificial Sequence: Synthetic oligonucleotide
uggauugaggaugcacagc

SEQ ID NO: 2536942 - RNA, 19 nt, Artificial Sequence
  Description of Artificial Sequence: Synthetic oligonucleotide
ugaaccugucugcggauua

SEQ ID NO: 2536943 - RNA, 19 nt, Artificial Sequence
  Description of Artificial Sequence: Synthetic oligonucleotide
acacucuuauuuucucgga

SEQ ID NO: 2536944 - RNA, 19 nt, Artificial Sequence
  Description of Artificial Sequence: Synthetic oligonucleotide
ugucugcggauuauuucaa

SEQ ID NO: 2536945 - RNA, 19 nt, Artificial Sequence
  Description of Artificial Sequence: Synthetic oligonucleotide
aauggaugcugaagguggu

SEQ ID NO: 2536946 - RNA, 19 nt, Artificial Sequence
  Description of Artificial Sequence: Synthetic oligonucleotide
uccuccugacagcauacau

SEQ ID NO: 2536947 - RNA, 19 nt, Artificial Sequence
  Description of Artificial Sequence: Synthetic oligonucleotide
ugggagguuccacagcaua

SEQ ID NO: 2536948 - RNA, 19 nt, Artificial Sequence
  Description of Artificial Sequence: Synthetic oligonucleotide
ccugacagcauacauucug

SEQ ID NO: 2536949 - RNA, 19 nt, Artificial Sequence
  Description of Artificial Sequence: Synthetic oligonucleotide
uaacacuugugcgcggcug

SEQ ID NO: 2536950 - RNA, 19 nt, Artificial Sequence
  Description of Artificial Sequence: Synthetic oligonucleotide
augcaaaugugacccaguu

SEQ ID NO: 2536951 - RNA, 19 nt, Artificial Sequence
  Description of Artificial Sequence: Synthetic oligonucleotide
ucuauacaugggugaucug

SEQ ID NO: 2536952 - RNA, 19 nt, Artificial Sequence
  Description of Artificial Sequence: Synthetic oligonucleotide
gauuauuucaaggucucuu

SEQ ID NO: 2536953 - RNA, 19 nt, Artificial Sequence
  Description of Artificial Sequence: Synthetic oligonucleotide
ugggcuccuauguccuggg

SEQ ID NO: 2536954 - RNA, 19 nt, Artificial Sequence
  Description of Artificial Sequence: Synthetic oligonucleotide
uaccagggcuugaauuucu

SEQ ID NO: 2536955 - RNA, 19 nt, Artificial Sequence
  Description of Artificial Sequence: Synthetic oligonucleotide
aucuaacacuugugcgcgg

SEQ ID NO: 2536956 - RNA, 19 nt, Artificial Sequence
  Description of Artificial Sequence: Synthetic oligonucleotide
acacaauaacacauggcau

SEQ ID NO: 2536957 - RNA, 19 nt, Artificial Sequence
  Description of Artificial Sequence: Synthetic oligonucleotide
agcuugucaguugaauaca

SEQ ID NO: 2536958 - RNA, 19 nt, Artificial Sequence
  Description of Artificial Sequence: Synthetic oligonucleotide
cauuauggcugugacagaa

SEQ ID NO: 2536959 - RNA, 19 nt, Artificial Sequence
  Description of Artificial Sequence: Synthetic oligonucleotide
ugacagcauacauucugua

SEQ ID NO: 2536960 - RNA, 19 nt, Artificial Sequence
  Description of Artificial Sequence: Synthetic oligonucleotide
cauuauucuuagugaccuc

SEQ ID NO: 2536961 - RNA, 19 nt, Artificial Sequence
  Description of Artificial Sequence: Synthetic oligonucleotide
auacaugggugaucuguaa

SEQ ID NO: 2536962 - RNA, 19 nt, Artificial Sequence
  Description of Artificial Sequence: Synthetic oligonucleotide
guauaaaggauagggagau

SEQ ID NO: 2536963 - RNA, 19 nt, Artificial Sequence
  Description of Artificial Sequence: Synthetic oligonucleotide
cccgguacagaucuaacac

SEQ ID NO: 2536964 - RNA, 19 nt, Artificial Sequence
  Description of Artificial Sequence: Synthetic oligonucleotide
uaaugguuauugguauaaa

SEQ ID NO: 2536965 - RNA, 19 nt, Artificial Sequence
  Description of Artificial Sequence: Synthetic oligonucleotide
cgucucuugauucucaaug

SEQ ID NO: 2536966 - RNA, 19 nt, Artificial Sequence
  Description of Artificial Sequence: Synthetic oligonucleotide
ggagacacaauaacacaug

SEQ ID NO: 2536967 - RNA, 19 nt, Artificial Sequence
  Description of Artificial Sequence: Synthetic oligonucleotide
gucugcggauuauuucaag

SEQ ID NO: 2536968 - RNA, 19 nt, Artificial Sequence
  Description of Artificial Sequence: Synthetic oligonucleotide
gagauaauucuguuauuuu

SEQ ID NO: 2536969 - RNA, 19 nt, Artificial Sequence
  Description of Artificial Sequence: Synthetic oligonucleotide
guuuccuagugcugggcuc

SEQ ID NO: 2536970 - RNA, 19 nt, Artificial Sequence
  Description of Artificial Sequence: Synthetic oligonucleotide
agcauagagaauggaugcu

SEQ ID NO: 2536971 - RNA, 19 nt, Artificial Sequence
  Description of Artificial Sequence: Synthetic oligonucleotide
ggcuuuauuuaccagggcu

SEQ ID NO: 2536972 - RNA, 19 nt, Artificial Sequence
  Description of Artificial Sequence: Synthetic oligonucleotide
uucucggaaggcaucucuu

SEQ ID NO: 2536973 - RNA, 19 nt, Artificial Sequence
  Description of Artificial Sequence: Synthetic oligonucleotide
ggaugcugaagguggucgg

SEQ ID NO: 2536974 - RNA, 19 nt, Artificial Sequence
  Description of Artificial Sequence: Synthetic oligonucleotide
ggcauuauucuuagugacc

SEQ ID NO: 2536975 - RNA, 19 nt, Artificial Sequence
  Description of Artificial Sequence: Synthetic oligonucleotide
uggccaauaugaaccuguc

SEQ ID NO: 2536976 - RNA, 19 nt, Artificial Sequence
  Description of Artificial Sequence: Synthetic oligonucleotide
cuauacaugggugaucugu

SEQ ID NO: 2536977 - RNA, 19 nt, Artificial Sequence
  Description of Artificial Sequence: Synthetic oligonucleotide
uaugaaccugucugcggau

SEQ ID NO: 2536978 - RNA, 19 nt, Artificial Sequence
  Description of Artificial Sequence: Synthetic oligonucleotide
uuaccagggcuugaauuuc

SEQ ID NO: 2536979 - RNA, 19 nt, Artificial Sequence
  Description of Artificial Sequence: Synthetic oligonucleotide
cuguaagaugggagggaug

SEQ ID NO: 2536980 - RNA, 19 nt, Artificial Sequence
  Description of Artificial Sequence: Synthetic oligonucleotide
acacauggcauuauucuua

SEQ ID NO: 2536981 - RNA, 19 nt, Artificial Sequence
  Description of Artificial Sequence: Synthetic oligonucleotide
cugaaaugcuugcucucuc

SEQ ID NO: 2536982 - RNA, 19 nt, Artificial Sequence
  Description of Artificial Sequence: Synthetic oligonucleotide
cuaagacacaaagucugca

SEQ ID NO: 2536983 - RNA, 19 nt, Artificial Sequence
  Description of Artificial Sequence: Synthetic oligonucleotide
ugcugaagguggucgguuc

SEQ ID NO: 2536984 - RNA, 19 nt, Artificial Sequence
  Description of Artificial Sequence: Synthetic oligonucleotide
ggauagggagauaauucug

SEQ ID NO: 2536985 - RNA, 19 nt, Artificial Sequence
  Description of Artificial Sequence: Synthetic oligonucleotide
cccuaaugucaaacgaugc

SEQ ID NO: 2536986 - RNA, 19 nt, Artificial Sequence
  Description of Artificial Sequence: Synthetic oligonucleotide
auucuaacacuuggauuga

SEQ ID NO: 2536987 - RNA, 19 nt, Artificial Sequence
  Description of Artificial Sequence: Synthetic oligonucleotide
uugaggaugcacagccauu

SEQ ID NO: 2536988 - RNA, 19 nt, Artificial Sequence
  Description of Artificial Sequence: Synthetic oligonucleotide
aucuguaagaugggaggga

SEQ ID NO: 2536989 - RNA, 19 nt, Artificial Sequence
  Description of Artificial Sequence: Synthetic oligonucleotide
guaauuguaggcgcugaaa

SEQ ID NO: 2536990 - RNA, 19 nt, Artificial Sequence
  Description of Artificial Sequence: Synthetic oligonucleotide
guacuaagacacaaagucu

SEQ ID NO: 2536991 - RNA, 19 nt, Artificial Sequence
  Description of Artificial Sequence: Synthetic oligonucleotide
cucuauacaugggugaucu

SEQ ID NO: 2536992 - RNA, 19 nt, Artificial Sequence
  Description of Artificial Sequence: Synthetic oligonucleotide
cuagugcugggcuccuaug

SEQ ID NO: 2536993 - RNA, 19 nt, Artificial Sequence
  Description of Artificial Sequence: Synthetic oligonucleotide
gccgagguuacgucaaccc

SEQ ID NO: 2536994 - RNA, 19 nt, Artificial Sequence
  Description of Artificial Sequence: Synthetic oligonucleotide
gauucucaaugauaagcuu

SEQ ID NO: 2536995 - RNA, 19 nt, Artificial Sequence
  Description of Artificial Sequence: Synthetic oligonucleotide
gcuguuuccuagugcuggg

SEQ ID NO: 2536996 - RNA, 19 nt, Artificial Sequence
  Description of Artificial Sequence: Synthetic oligonucleotide
cagccauuucuucacauua

SEQ ID NO: 2536997 - RNA, 19 nt, Artificial Sequence
  Description of Artificial Sequence: Synthetic oligonucleotide
cuucacauuauggcuguga

SEQ ID NO: 2536998 - RNA, 19 nt, Artificial Sequence
  Description of Artificial Sequence: Synthetic oligonucleotide
ccuaaugucaaacgaugca

SEQ ID NO: 2536999 - RNA, 19 nt, Artificial Sequence
  Description of Artificial Sequence: Synthetic oligonucleotide
agcucuauacaugggugau

SEQ ID NO: 2537000 - RNA, 19 nt, Artificial Sequence
  Description of Artificial Sequence: Synthetic oligonucleotide
cggaaggcaucucuuaucc

SEQ ID NO: 2537001 - RNA, 19 nt, Artificial Sequence
  Description of Artificial Sequence: Synthetic oligonucleotide
ugccgagguuacgucaacc

SEQ ID NO: 2537002 - RNA, 19 nt, Artificial Sequence
  Description of Artificial Sequence: Synthetic oligonucleotide
cacagcauagagaauggau

SEQ ID NO: 2537003 - RNA, 19 nt, Artificial Sequence
  Description of Artificial Sequence: Synthetic oligonucleotide
acaggauccuuuacacucu

SEQ ID NO: 2537004 - RNA, 19 nt, Artificial Sequence
  Description of Artificial Sequence: Synthetic oligonucleotide
gcuugucaguugaauacag

SEQ ID NO: 2537005 - RNA, 19 nt, Artificial Sequence
  Description of Artificial Sequence: Synthetic oligonucleotide
acgucaacccuaaugucaa

SEQ ID NO: 2537006 - RNA, 19 nt, Artificial Sequence
  Description of Artificial Sequence: Synthetic oligonucleotide
uggcugugacagaaugcaa

SEQ ID NO: 2537007 - RNA, 19 nt, Artificial Sequence
  Description of Artificial Sequence: Synthetic oligonucleotide
gaggaugcacagccauuuc

SEQ ID NO: 2537008 - RNA, 19 nt, Artificial Sequence
  Description of Artificial Sequence: Synthetic oligonucleotide
gagguuacgucaacccuaa

SEQ ID NO: 2537009 - RNA, 19 nt, Artificial Sequence
  Description of Artificial Sequence: Synthetic oligonucleotide
gcauuauucuuagugaccu

SEQ ID NO: 2537010 - RNA, 19 nt, Artificial Sequence
  Description of Artificial Sequence: Synthetic oligonucleotide
ggcgcugaaaugcuugcuc

SEQ ID NO: 2537011 - RNA, 19 nt, Artificial Sequence
  Description of Artificial Sequence: Synthetic oligonucleotide
uccugggcgucucuugauu

SEQ ID NO: 2537012 - RNA, 19 nt, Artificial Sequence
  Description of Artificial Sequence: Synthetic oligonucleotide
auguuggaaggaaaacaaa

SEQ ID NO: 2537013 - RNA, 19 nt, Artificial Sequence
  Description of Artificial Sequence: Synthetic oligonucleotide
cuucgaggaggugccgagg

SEQ ID NO: 2537014 - RNA, 19 nt, Artificial Sequence
  Description of Artificial Sequence: Synthetic oligonucleotide
cuguuuccuagugcugggc

SEQ ID NO: 2537015 - RNA, 19 nt, Artificial Sequence
  Description of Artificial Sequence: Synthetic oligonucleotide
gauccuuuacacucuuauu

SEQ ID NO: 2537016 - RNA, 19 nt, Artificial Sequence
  Description of Artificial Sequence: Synthetic oligonucleotide
ccuacaaggcaggaagagc

SEQ ID NO: 2537017 - RNA, 19 nt, Artificial Sequence
  Description of Artificial Sequence: Synthetic oligonucleotide
gauaagcuugucaguugaa

SEQ ID NO: 2537018 - RNA, 19 nt, Artificial Sequence
  Description of Artificial Sequence: Synthetic oligonucleotide
caaugauaagcuugucagu

SEQ ID NO: 2537019 - RNA, 19 nt, Artificial Sequence
  Description of Artificial Sequence: Synthetic oligonucleotide
guuggccaauaugaaccug

SEQ ID NO: 2537020 - RNA, 19 nt, Artificial Sequence
  Description of Artificial Sequence: Synthetic oligonucleotide
ggauccuuuacacucuuau

SEQ ID NO: 2537021 - RNA, 19 nt, Artificial Sequence
  Description of Artificial Sequence: Synthetic oligonucleotide
uccuauguccugggcgucu

SEQ ID NO: 2537022 - RNA, 19 nt, Artificial Sequence
  Description of Artificial Sequence: Synthetic oligonucleotide
gguacagaucuaacacuug

SEQ ID NO: 2537023 - RNA, 19 nt, Artificial Sequence
  Description of Artificial Sequence: Synthetic oligonucleotide
uuuucucggaaggcaucuc

SEQ ID NO: 2537024 - RNA, 19 nt, Artificial Sequence
  Description of Artificial Sequence: Synthetic oligonucleotide
ccugucugcggauuauuuc

SEQ ID NO: 2537025 - RNA, 19 nt, Artificial Sequence
  Description of Artificial Sequence: Synthetic oligonucleotide
cuccuacaaggcaggaaga

SEQ ID NO: 2537026 - RNA, 19 nt, Artificial Sequence
  Description of Artificial Sequence: Synthetic oligonucleotide
ggagauaauucuguuauuu

SEQ ID NO: 2537027 - RNA, 19 nt, Artificial Sequence
  Description of Artificial Sequence: Synthetic oligonucleotide
ggugaucuguaagauggga

SEQ ID NO: 2537028 - RNA, 19 nt, Artificial Sequence
  Description of Artificial Sequence: Synthetic oligonucleotide
gaggaggugccgagguuac

SEQ ID NO: 2537029 - RNA, 19 nt, Artificial Sequence
  Description of Artificial Sequence: Synthetic oligonucleotide
auuauggcugugacagaau

SEQ ID NO: 2537030 - RNA, 19 nt, Artificial Sequence
  Description of Artificial Sequence: Synthetic oligonucleotide
caucgcccgguacagaucu

SEQ ID NO: 2537031 - RNA, 19 nt, Artificial Sequence
  Description of Artificial Sequence: Synthetic oligonucleotide
aaccugucugcggauuauu

SEQ ID NO: 2537032 - RNA, 19 nt, Artificial Sequence
  Description of Artificial Sequence: Synthetic oligonucleotide
ucgcccgguacagaucuaa

SEQ ID NO: 2537033 - RNA, 19 nt, Artificial Sequence
  Description of Artificial Sequence: Synthetic oligonucleotide
ccaguuuaucagcuccuac

SEQ ID NO: 2537034 - RNA, 19 nt, Artificial Sequence
  Description of Artificial Sequence: Synthetic oligonucleotide
ugugcgcggcuggaggcug

SEQ ID NO: 2537035 - RNA, 19 nt, Artificial Sequence
  Description of Artificial Sequence: Synthetic oligonucleotide
gguuauugguauaaaggau

SEQ ID NO: 2537036 - RNA, 19 nt, Artificial Sequence
  Description of Artificial Sequence: Synthetic oligonucleotide
cuguaauuguaggcgcuga

SEQ ID NO: 2537037 - RNA, 19 nt, Artificial Sequence
  Description of Artificial Sequence: Synthetic oligonucleotide
ggcugugacagaaugcaaa

SEQ ID NO: 2537038 - RNA, 19 nt, Artificial Sequence
  Description of Artificial Sequence: Synthetic oligonucleotide
ugggcgucucuugauucuc

SEQ ID NO: 2537039 - RNA, 19 nt, Artificial Sequence
  Description of Artificial Sequence: Synthetic oligonucleotide
acccaguuuaucagcuccu

SEQ ID NO: 2537040 - RNA, 19 nt, Artificial Sequence
  Description of Artificial Sequence: Synthetic oligonucleotide
ggagguuccacagcauaga

SEQ ID NO: 2537041 - RNA, 19 nt, Artificial Sequence
  Description of Artificial Sequence: Synthetic oligonucleotide
ucgaggaggugccgagguu

SEQ ID NO: 2537042 - RNA, 19 nt, Artificial Sequence
  Description of Artificial Sequence: Synthetic oligonucleotide
uugugcgcggcuggaggcu

SEQ ID NO: 2537043 - RNA, 19 nt, Artificial Sequence
  Description of Artificial Sequence: Synthetic oligonucleotide
ccagggcuugaauuucuac

SEQ ID NO: 2537044 - RNA, 19 nt, Artificial Sequence
  Description of Artificial Sequence: Synthetic oligonucleotide
gcccgguacagaucuaaca

SEQ ID NO: 2537045 - RNA, 19 nt, Artificial Sequence
  Description of Artificial Sequence: Synthetic oligonucleotide
guaagaugggagggaugga

SEQ ID NO: 2537046 - RNA, 19 nt, Artificial Sequence
  Description of Artificial Sequence: Synthetic oligonucleotide
gcugugacagaaugcaaau

SEQ ID NO: 2537047 - RNA, 19 nt, Artificial Sequence
  Description of Artificial Sequence: Synthetic oligonucleotide
augaaccugucugcggauu

SEQ ID NO: 2537048 - RNA, 19 nt, Artificial Sequence
  Description of Artificial Sequence: Synthetic oligonucleotide
gcuccuauguccugggcgu

SEQ ID NO: 2537049 - RNA, 19 nt, Artificial Sequence
  Description of Artificial Sequence: Synthetic oligonucleotide
ccugggcgucucuugauuc

SEQ ID NO: 2537050 - RNA, 19 nt, Artificial Sequence
  Description of Artificial Sequence: Synthetic oligonucleotide
cacuugugcgcggcuggag

SEQ ID NO: 2537051 - RNA, 19 nt, Artificial Sequence
  Description of Artificial Sequence: Synthetic oligonucleotide
caaaugugacccaguuuau

SEQ ID NO: 2537052 - RNA, 19 nt, Artificial Sequence
  Description of Artificial Sequence: Synthetic oligonucleotide
caugggugaucuguaagau

SEQ ID NO: 2537053 - RNA, 19 nt, Artificial Sequence
  Description of Artificial Sequence: Synthetic oligonucleotide
acacuugugcgcggcugga

SEQ ID NO: 2537054 - RNA, 19 nt, Artificial Sequence
  Description of Artificial Sequence: Synthetic oligonucleotide
cucggaaggcaucucuuau

SEQ ID NO: 2537055 - RNA, 19 nt, Artificial Sequence
  Description of Artificial Sequence: Synthetic oligonucleotide
gauggagaggagacacaau

SEQ ID NO: 2537056 - RNA, 19 nt, Artificial Sequence
  Description of Artificial Sequence: Synthetic oligonucleotide
cccuaguaaccaaaacaaa

SEQ ID NO: 2537057 - RNA, 19 nt, Artificial Sequence
  Description of Artificial Sequence: Synthetic oligonucleotide
cugggcgucucuugauucu

SEQ ID NO: 2537058 - RNA, 19 nt, Artificial Sequence
  Description of Artificial Sequence: Synthetic oligonucleotide
ggucgguucugcugcugga

SEQ ID NO: 2537059 - RNA, 19 nt, Artificial Sequence
  Description of Artificial Sequence: Synthetic oligonucleotide
ugcgcggcuggaggcugcc

SEQ ID NO: 2537060 - RNA, 19 nt, Artificial Sequence
  Description of Artificial Sequence: Synthetic oligonucleotide
gcucuauacaugggugauc

SEQ ID NO: 2537061 - RNA, 19 nt, Artificial Sequence
  Description of Artificial Sequence: Synthetic oligonucleotide
ggcgucucuugauucucaa

SEQ ID NO: 2537062 - RNA, 19 nt, Artificial Sequence
  Description of Artificial Sequence: Synthetic oligonucleotide
cgagguuacgucaacccua

SEQ ID NO: 2537063 - RNA, 19 nt, Artificial Sequence
  Description of Artificial Sequence: Synthetic oligonucleotide
ggccaauaugaaccugucu

SEQ ID NO: 2537064 - RNA, 19 nt, Artificial Sequence
  Description of Artificial Sequence: Synthetic oligonucleotide
gaaccugucugcggauuau

SEQ ID NO: 2537065 - RNA, 19 nt, Artificial Sequence
  Description of Artificial Sequence: Synthetic oligonucleotide
guggucgguucugcugcug

SEQ ID NO: 2537066 - RNA, 19 nt, Artificial Sequence
  Description of Artificial Sequence: Synthetic oligonucleotide
cuuauccuccugacagcau

SEQ ID NO: 2537067 - RNA, 19 nt, Artificial Sequence
  Description of Artificial Sequence: Synthetic oligonucleotide
agguuacgucaacccuaau

SEQ ID NO: 2537068 - RNA, 19 nt, Artificial Sequence
  Description of Artificial Sequence: Synthetic oligonucleotide
ggaaggcaucucuuauccu

SEQ ID NO: 2537069 - RNA, 19 nt, Artificial Sequence
  Description of Artificial Sequence: Synthetic oligonucleotide
gcggcuggaggcugccaug

SEQ ID NO: 2537070 - RNA, 19 nt, Artificial Sequence
  Description of Artificial Sequence: Synthetic oligonucleotide
aggauccuuuacacucuua

SEQ ID NO: 2537071 - RNA, 19 nt, Artificial Sequence
  Description of Artificial Sequence: Synthetic oligonucleotide
ccgguacagaucuaacacu

SEQ ID NO: 2537072 - RNA, 19 nt, Artificial Sequence
  Description of Artificial Sequence: Synthetic oligonucleotide
caauaacacauggcauuau

SEQ ID NO: 2537073 - RNA, 19 nt, Artificial Sequence
  Description of Artificial Sequence: Synthetic oligonucleotide
gggcuccuauguccugggc

SEQ ID NO: 2537074 - RNA, 19 nt, Artificial Sequence
  Description of Artificial Sequence: Synthetic oligonucleotide
cucucagcaucgcccggua

SEQ ID NO: 2537075 - RNA, 19 nt, Artificial Sequence
  Description of Artificial Sequence: Synthetic oligonucleotide
aggucucuuuuggcuuuau

SEQ ID NO: 2537076 - RNA, 19 nt, Artificial Sequence
  Description of Artificial Sequence: Synthetic oligonucleotide
uccuagugcugggcuccua

SEQ ID NO: 2537077 - RNA, 19 nt, Artificial Sequence
  Description of Artificial Sequence: Synthetic oligonucleotide
ccuccugacagcauacauu

SEQ ID NO: 2537078 - RNA, 19 nt, Artificial Sequence
  Description of Artificial Sequence: Synthetic oligonucleotide
gggagauaauucuguuauu

SEQ ID NO: 2537079 - RNA, 19 nt, Artificial Sequence
  Description of Artificial Sequence: Synthetic oligonucleotide
ccuauguccugggcgucuc

SEQ ID NO: 2537080 - RNA, 19 nt, Artificial Sequence
  Description of Artificial Sequence: Synthetic oligonucleotide
cacuuggauugaggaugca

SEQ ID NO: 2537081 - RNA, 19 nt, Artificial Sequence
  Description of Artificial Sequence: Synthetic oligonucleotide
gggcgucucuugauucuca

SEQ ID NO: 2537082 - RNA, 19 nt, Artificial Sequence
  Description of Artificial Sequence: Synthetic oligonucleotide
cuauguccugggcgucucu

SEQ ID NO: 2537083 - RNA, 19 nt, Artificial Sequence
  Description of Artificial Sequence: Synthetic oligonucleotide
ccgagguuacgucaacccu

SEQ ID NO: 2537084 - RNA, 19 nt, Artificial Sequence
  Description of Artificial Sequence: Synthetic oligonucleotide
caggauccuuuacacucuu

SEQ ID NO: 2537085 - RNA, 19 nt, Artificial Sequence
  Description of Artificial Sequence: Synthetic oligonucleotide
cagcuccuacaaggcagga

SEQ ID NO: 2537086 - RNA, 19 nt, Artificial Sequence
  Description of Artificial Sequence: Synthetic oligonucleotide
gcaucgcccgguacagauc

SEQ ID NO: 2537087 - RNA, 19 nt, Artificial Sequence
  Description of Artificial Sequence: Synthetic oligonucleotide
cgcccgguacagaucuaac

SEQ ID NO: 2537088 - RNA, 19 nt, Artificial Sequence
  Description of Artificial Sequence: Synthetic oligonucleotide
guuccacagcauagagaau

SEQ ID NO: 2537089 - RNA, 19 nt, Artificial Sequence
  Description of Artificial Sequence: Synthetic oligonucleotide
ccuagugcugggcuccuau

SEQ ID NO: 2537090 - RNA, 19 nt, Artificial Sequence
  Description of Artificial Sequence: Synthetic oligonucleotide
gcgucucuugauucucaau

SEQ ID NO: 2537091 - RNA, 19 nt, Artificial Sequence
  Description of Artificial Sequence: Synthetic oligonucleotide
cgaggaggugccgagguua

SEQ ID NO: 2537092 - RNA, 19 nt, Artificial Sequence
  Description of Artificial Sequence: Synthetic oligonucleotide
cccaguuuaucagcuccua

SEQ ID NO: 2537093 - RNA, 19 nt, Artificial Sequence
  Description of Artificial Sequence: Synthetic oligonucleotide
aucgcccgguacagaucua

SEQ ID NO: 2537094 - RNA, 19 nt, Artificial Sequence
  Description of Artificial Sequence: Synthetic oligonucleotide
cgucaacccuaaugucaaa

SEQ ID NO: 2537095 - RNA, 19 nt, Artificial Sequence
  Description of Artificial Sequence: Synthetic oligonucleotide
gcgcggcuggaggcugcca

SEQ ID NO: 2537096 - RNA, 19 nt, Artificial Sequence
  Description of Artificial Sequence: Synthetic oligonucleotide
cauaauaugaauuuuauug

SEQ ID NO: 2537097 - RNA, 19 nt, Artificial Sequence
  Description of Artificial Sequence: Synthetic oligonucleotide
gaaguuaagauuuaagugg

SEQ ID NO: 2537098 - RNA, 19 nt, Artificial Sequence
  Description of Artificial Sequence: Synthetic oligonucleotide
ugaaauuuagaauauauug

SEQ ID NO: 2537099 - RNA, 19 nt, Artificial Sequence
  Description of Artificial Sequence: Synthetic oligonucleotide
aauaaagucaaaucuauca

SEQ ID NO: 2537100 - RNA, 19 nt, Artificial Sequence
  Description of Artificial Sequence: Synthetic oligonucleotide
auaauaugaauuuuauugc

SEQ ID NO: 2537101 - RNA, 19 nt, Artificial Sequence
  Description of Artificial Sequence: Synthetic oligonucleotide
  modified_base (3)..(3): a, c, u, g, unknown or other
  modified_base (7)..(7): a, c, u, g, unknown or other
aanaaanaaaaguuaauua

SEQ ID NO: 2537102 - RNA, 19 nt, Artificial Sequence
  Description of Artificial Sequence: Synthetic oligonucleotide
agaagugucaaauaaaguc

SEQ ID NO: 2537103 - RNA, 19 nt, Artificial Sequence
  Description of Artificial Sequence: Synthetic oligonucleotide
aaaguuuacagaaacagac

SEQ ID NO: 2537104 - RNA, 19 nt, Artificial Sequence
  Description of Artificial Sequence: Synthetic oligonucleotide
aauagggagaaacuuggcc

SEQ ID NO: 2537105 - RNA, 19 nt, Artificial Sequence
  Description of Artificial Sequence: Synthetic oligonucleotide
aaaugacagaacuaguuac

SEQ ID NO: 2537106 - RNA, 19 nt, Artificial Sequence
  Description of Artificial Sequence: Synthetic oligonucleotide
aauuuuauugccuaacuga

SEQ ID NO: 2537107 - RNA, 19 nt, Artificial Sequence
  Description of Artificial Sequence: Synthetic oligonucleotide
uuugcauugagaaagaaaa

SEQ ID NO: 2537108 - RNA, 19 nt, Artificial Sequence
  Description of Artificial Sequence: Synthetic oligonucleotide
aauauugucagaaauaacu

SEQ ID NO: 2537109 - RNA, 19 nt, Artificial Sequence
  Description of Artificial Sequence: Synthetic oligonucleotide
uuuguaaucuuauuaagug

SEQ ID NO: 2537110 - RNA, 19 nt, Artificial Sequence
  Description of Artificial Sequence: Synthetic oligonucleotide
gacagaacuaguuacagag

SEQ ID NO: 2537111 - RNA, 19 nt, Artificial Sequence
  Description of Artificial Sequence: Synthetic oligonucleotide
uuuaacauugugaagccag

SEQ ID NO: 2537112 - RNA, 19 nt, Artificial Sequence
  Description of Artificial Sequence: Synthetic oligonucleotide
acagaaaauauacuuaguc

SEQ ID NO: 2537113 - RNA, 19 nt, Artificial Sequence
  Description of Artificial Sequence: Synthetic oligonucleotide
aaucuuauuaagugguuuc

SEQ ID NO: 2537114 - RNA, 19 nt, Artificial Sequence
  Description of Artificial Sequence: Synthetic oligonucleotide
  modified_base (14)..(14): a, c, u, g, unknown or other
  modified_base (18)..(18): a, c, u, g, unknown or other
ucuucauacacaanaaana

SEQ ID NO: 2537115 - RNA, 19 nt, Artificial Sequence
  Description of Artificial Sequence: Synthetic oligonucleotide
aaauauacuuagucacucc

SEQ ID NO: 2537116 - RNA, 19 nt, Artificial Sequence
  Description of Artificial Sequence: Synthetic oligonucleotide
  modified_base (11)..(11): a, c, u, g, unknown or other
  modified_base (15)..(15): a, c, u, g, unknown or other
ucauacacaanaaanaaaa

SEQ ID NO: 2537117 - RNA, 19 nt, Artificial Sequence
  Description of Artificial Sequence: Synthetic oligonucleotide
aaaaggacagaggagacac

SEQ ID NO: 2537118 - RNA, 19 nt, Artificial Sequence
  Description of Artificial Sequence: Synthetic oligonucleotide
gagaguaaagaucagaaac

SEQ ID NO: 2537119 - RNA, 19 nt, Artificial Sequence
  Description of Artificial Sequence: Synthetic oligonucleotide
  modified_base (8)..(8): a, c, u, g, unknown or other
  modified_base (12)..(12): a, c, u, g, unknown or other
uacacaanaaanaaaaguu

SEQ ID NO: 2537120 - RNA, 19 nt, Artificial Sequence
  Description of Artificial Sequence: Synthetic oligonucleotide
acagaaaguuuacagaaac

SEQ ID NO: 2537121 - RNA, 19 nt, Artificial Sequence
  Description of Artificial Sequence: Synthetic oligonucleotide
agaaguuaagauuuaagug

SEQ ID NO: 2537122 - RNA, 19 nt, Artificial Sequence
  Description of Artificial Sequence: Synthetic oligonucleotide
uggaguuuuauguaugugg

SEQ ID NO: 2537123 - RNA, 19 nt, Artificial Sequence
  Description of Artificial Sequence: Synthetic oligonucleotide
  modified_base (10)..(10): a, c, u, g, unknown or other
  modified_base (14)..(14): a, c, u, g, unknown or other
cauacacaanaaanaaaag

SEQ ID NO: 2537124 - RNA, 19 nt, Artificial Sequence
  Description of Artificial Sequence: Synthetic oligonucleotide
uuuauugccuaacugaagu

SEQ ID NO: 2537125 - RNA, 19 nt, Artificial Sequence
  Description of Artificial Sequence: Synthetic oligonucleotide
uauauuaccauauucugaa

SEQ ID NO: 2537126 - RNA, 19 nt, Artificial Sequence
  Description of Artificial Sequence: Synthetic oligonucleotide
aacuccacagaaaauauac

SEQ ID NO: 2537127 - RNA, 19 nt, Artificial Sequence
  Description of Artificial Sequence: Synthetic oligonucleotide
aaaauauacuuagucacuc

SEQ ID NO: 2537128 - RNA, 19 nt, Artificial Sequence
  Description of Artificial Sequence: Synthetic oligonucleotide
uauauauuaccauauucug

SEQ ID NO: 2537129 - RNA, 19 nt, Artificial Sequence
  Description of Artificial Sequence: Synthetic oligonucleotide
aaaagcauuagcuaauuuu

SEQ ID NO: 2537130 - RNA, 19 nt, Artificial Sequence
  Description of Artificial Sequence: Synthetic oligonucleotide
uguauuauggaguuuuaug

SEQ ID NO: 2537131 - RNA, 19 nt, Artificial Sequence
  Description of Artificial Sequence: Synthetic oligonucleotide
uggguaaacaucacaauag

SEQ ID NO: 2537132 - RNA, 19 nt, Artificial Sequence
  Description of Artificial Sequence: Synthetic oligonucleotide
uagaaguuaagauuuaagu

SEQ ID NO: 2537133 - RNA, 19 nt, Artificial Sequence
  Description of Artificial Sequence: Synthetic oligonucleotide
aauauacuuagucacuccu

SEQ ID NO: 2537134 - RNA, 19 nt, Artificial Sequence
  Description of Artificial Sequence: Synthetic oligonucleotide
auaaagucaaaucuaucag

SEQ ID NO: 2537135 - RNA, 19 nt, Artificial Sequence
  Description of Artificial Sequence: Synthetic oligonucleotide
uccuagagaguaaagauca

SEQ ID NO: 2537136 - RNA, 19 nt, Artificial Sequence
  Description of Artificial Sequence: Synthetic oligonucleotide
aaacuguuaaggcaagaag

SEQ ID NO: 2537137 - RNA, 19 nt, Artificial Sequence
  Description of Artificial Sequence: Synthetic oligonucleotide
uuauuaagugguuucaaca

SEQ ID NO: 2537138 - RNA, 19 nt, Artificial Sequence
  Description of Artificial Sequence: Synthetic oligonucleotide
uagucacuccuaaagaugg

SEQ ID NO: 2537139 - RNA, 19 nt, Artificial Sequence
  Description of Artificial Sequence: Synthetic oligonucleotide
uuguaaucuuauuaagugg

SEQ ID NO: 2537140 - RNA, 19 nt, Artificial Sequence
  Description of Artificial Sequence: Synthetic oligonucleotide
ucuaaaagcugcuugcugc

SEQ ID NO: 2537141 - RNA, 19 nt, Artificial Sequence
  Description of Artificial Sequence: Synthetic oligonucleotide
uauugcuuucauaauauga

SEQ ID NO: 2537142 - RNA, 19 nt, Artificial Sequence
  Description of Artificial Sequence: Synthetic oligonucleotide
uacuuagucacuccuaaag

SEQ ID NO: 2537143 - RNA, 19 nt, Artificial Sequence
  Description of Artificial Sequence: Synthetic oligonucleotide
uauacagaaaguuuacaga

SEQ ID NO: 2537144 - RNA, 19 nt, Artificial Sequence
  Description of Artificial Sequence: Synthetic oligonucleotide
caagaagugucaaauaaag

SEQ ID NO: 2537145 - RNA, 19 nt, Artificial Sequence
  Description of Artificial Sequence: Synthetic oligonucleotide
aaguuuguaaucuuauuaa

SEQ ID NO: 2537146 - RNA, 19 nt, Artificial Sequence
  Description of Artificial Sequence: Synthetic oligonucleotide
agugguguauuuuaaauga

SEQ ID NO: 2537147 - RNA, 19 nt, Artificial Sequence
  Description of Artificial Sequence: Synthetic oligonucleotide
guaaagaucagaaacagca

SEQ ID NO: 2537148 - RNA, 19 nt, Artificial Sequence
  Description of Artificial Sequence: Synthetic oligonucleotide
gaucagaaacagcaaaagg

SEQ ID NO: 2537149 - RNA, 19 nt, Artificial Sequence
  Description of Artificial Sequence: Synthetic oligonucleotide
  modified_base (12)..(12): a, c, u, g, unknown or other
  modified_base (16)..(16): a, c, u, g, unknown or other
uucauacacaanaaanaaa

SEQ ID NO: 2537150 - RNA, 19 nt, Artificial Sequence
  Description of Artificial Sequence: Synthetic oligonucleotide
aauguagaaguuaagauuu

SEQ ID NO: 2537151 - RNA, 19 nt, Artificial Sequence
  Description of Artificial Sequence: Synthetic oligonucleotide
aagugguguauuuuaaaug

SEQ ID NO: 2537152 - RNA, 19 nt, Artificial Sequence
  Description of Artificial Sequence: Synthetic oligonucleotide
gaugagagagauucuacag

SEQ ID NO: 2537153 - RNA, 19 nt, Artificial Sequence
  Description of Artificial Sequence: Synthetic oligonucleotide
ugaaauguagaaguuaaga

SEQ ID NO: 2537154 - RNA, 19 nt, Artificial Sequence
  Description of Artificial Sequence: Synthetic oligonucleotide
gaaauaacuccacagaaaa

SEQ ID NO: 2537155 - RNA, 19 nt, Artificial Sequence
  Description of Artificial Sequence: Synthetic oligonucleotide
agagagauucuacagaacu

SEQ ID NO: 2537156 - RNA, 19 nt, Artificial Sequence
  Description of Artificial Sequence: Synthetic oligonucleotide
guguuuaacauugugaagc

SEQ ID NO: 2537157 - RNA, 19 nt, Artificial Sequence
  Description of Artificial Sequence: Synthetic oligonucleotide
auauauauuaccauauucu

SEQ ID NO: 2537158 - RNA, 19 nt, Artificial Sequence
  Description of Artificial Sequence: Synthetic oligonucleotide
uauauugcuuucauaauau

SEQ ID NO: 2537159 - RNA, 19 nt, Artificial Sequence
  Description of Artificial Sequence: Synthetic oligonucleotide
ugcauugagaaagaaaagc

SEQ ID NO: 2537160 - RNA, 19 nt, Artificial Sequence
  Description of Artificial Sequence: Synthetic oligonucleotide
uuaaaugacagaacuaguu

SEQ ID NO: 2537161 - RNA, 19 nt, Artificial Sequence
  Description of Artificial Sequence: Synthetic oligonucleotide
agacuuugaacucacaaga

SEQ ID NO: 2537162 - RNA, 19 nt, Artificial Sequence
  Description of Artificial Sequence: Synthetic oligonucleotide
auucuacagaacuugucac

SEQ ID NO: 2537163 - RNA, 19 nt, Artificial Sequence
  Description of Artificial Sequence: Synthetic oligonucleotide
ucuugaaacuguuaaggca

SEQ ID NO: 2537164 - RNA, 19 nt, Artificial Sequence
  Description of Artificial Sequence: Synthetic oligonucleotide
uguaugugguucuugaaac

SEQ ID NO: 2537165 - RNA, 19 nt, Artificial Sequence
  Description of Artificial Sequence: Synthetic oligonucleotide
  modified_base (6)..(6): a, c, u, g, unknown or other
  modified_base (10)..(10): a, c, u, g, unknown or other
cacaanaaanaaaaguuaa

SEQ ID NO: 2537166 - RNA, 19 nt, Artificial Sequence
  Description of Artificial Sequence: Synthetic oligonucleotide
uuuaacagguauauacaga

SEQ ID NO: 2537167 - RNA, 19 nt, Artificial Sequence
  Description of Artificial Sequence: Synthetic oligonucleotide
gauucuacagaacuuguca

SEQ ID NO: 2537168 - RNA, 19 nt, Artificial Sequence
  Description of Artificial Sequence: Synthetic oligonucleotide
uauuaccauauucugaaaa

SEQ ID NO: 2537169 - RNA, 19 nt, Artificial Sequence
  Description of Artificial Sequence: Synthetic oligonucleotide
aacuguuaaggcaagaagu

SEQ ID NO: 2537170 - RNA, 19 nt, Artificial Sequence
  Description of Artificial Sequence: Synthetic oligonucleotide
ugucaaauaaagucaaauc

SEQ ID NO: 2537171 - RNA, 19 nt, Artificial Sequence
  Description of Artificial Sequence: Synthetic oligonucleotide
auuuagaauauauugcuuu

SEQ ID NO: 2537172 - RNA, 19 nt, Artificial Sequence
  Description of Artificial Sequence: Synthetic oligonucleotide
uuagucacuccuaaagaug

SEQ ID NO: 2537173 - RNA, 19 nt, Artificial Sequence
  Description of Artificial Sequence: Synthetic oligonucleotide
aguuuguaaucuuauuaag

SEQ ID NO: 2537174 - RNA, 19 nt, Artificial Sequence
  Description of Artificial Sequence: Synthetic oligonucleotide
uagagaguaaagaucagaa

SEQ ID NO: 2537175 - RNA, 19 nt, Artificial Sequence
  Description of Artificial Sequence: Synthetic oligonucleotide
aaagaugguucuugaaaug

SEQ ID NO: 2537176 - RNA, 19 nt, Artificial Sequence
  Description of Artificial Sequence: Synthetic oligonucleotide
aauauauugcuuucauaau

SEQ ID NO: 2537177 - RNA, 19 nt, Artificial Sequence
  Description of Artificial Sequence: Synthetic oligonucleotide
  modified_base (9)..(9): a, c, u, g, unknown or other
  modified_base (13)..(13): a, c, u, g, unknown or other
auacacaanaaanaaaagu

SEQ ID NO: 2537178 - RNA, 19 nt, Artificial Sequence
  Description of Artificial Sequence: Synthetic oligonucleotide
aguuugaacgcuuccaucu

SEQ ID NO: 2537179 - RNA, 19 nt, Artificial Sequence
  Description of Artificial Sequence: Synthetic oligonucleotide
auagggagaaacuuggcca

SEQ ID NO: 2537180 - RNA, 19 nt, Artificial Sequence
  Description of Artificial Sequence: Synthetic oligonucleotide
uucuacagaacuugucacg

SEQ ID NO: 2537181 - RNA, 19 nt, Artificial Sequence
  Description of Artificial Sequence: Synthetic oligonucleotide
aaagcugcuugcugcauag

SEQ ID NO: 2537182 - RNA, 19 nt, Artificial Sequence
  Description of Artificial Sequence: Synthetic oligonucleotide
aaggacagaggagacacgg

SEQ ID NO: 2537183 - RNA, 19 nt, Artificial Sequence
  Description of Artificial Sequence: Synthetic oligonucleotide
aucagaaacagcaaaagga

SEQ ID NO: 2537184 - RNA, 19 nt, Artificial Sequence
  Description of Artificial Sequence: Synthetic oligonucleotide
uguuaaggcaagaaguguc

SEQ ID NO: 2537185 - RNA, 19 nt, Artificial Sequence
  Description of Artificial Sequence: Synthetic oligonucleotide
acgucuuugaaauuuagaa

SEQ ID NO: 2537186 - RNA, 19 nt, Artificial Sequence
  Description of Artificial Sequence: Synthetic oligonucleotide
cuucugaugagagagauuc

SEQ ID NO: 2537187 - RNA, 19 nt, Artificial Sequence
  Description of Artificial Sequence: Synthetic oligonucleotide
uucauaauaugaauuuuau

SEQ ID NO: 2537188 - RNA, 19 nt, Artificial Sequence
  Description of Artificial Sequence: Synthetic oligonucleotide
uauacuuagucacuccuaa

SEQ ID NO: 2537189 - RNA, 19 nt, Artificial Sequence
  Description of Artificial Sequence: Synthetic oligonucleotide
uauuaagugguuucaacau

SEQ ID NO: 2537190 - RNA, 19 nt, Artificial Sequence
  Description of Artificial Sequence: Synthetic oligonucleotide
uuuuauugccuaacugaag

SEQ ID NO: 2537191 - RNA, 19 nt, Artificial Sequence
  Description of Artificial Sequence: Synthetic oligonucleotide
uuauguaugugguucuuga

SEQ ID NO: 2537192 - RNA, 19 nt, Artificial Sequence
  Description of Artificial Sequence: Synthetic oligonucleotide
aacgcuuccaucuucugau

SEQ ID NO: 2537193 - RNA, 19 nt, Artificial Sequence
  Description of Artificial Sequence: Synthetic oligonucleotide
uguuuaacauugugaagcc

SEQ ID NO: 2537194 - RNA, 19 nt, Artificial Sequence
  Description of Artificial Sequence: Synthetic oligonucleotide
uugaccaugcuacuccuag

SEQ ID NO: 2537195 - RNA, 19 nt, Artificial Sequence
  Description of Artificial Sequence: Synthetic oligonucleotide
aaauaaagucaaaucuauc

SEQ ID NO: 2537196 - RNA, 19 nt, Artificial Sequence
  Description of Artificial Sequence: Synthetic oligonucleotide
gucaaauaaagucaaaucu

SEQ ID NO: 2537197 - RNA, 19 nt, Artificial Sequence
  Description of Artificial Sequence: Synthetic oligonucleotide
ugagagagauucuacagaa

SEQ ID NO: 2537198 - RNA, 19 nt, Artificial Sequence
  Description of Artificial Sequence: Synthetic oligonucleotide
uuuagaauauauugcuuuc

SEQ ID NO: 2537199 - RNA, 19 nt, Artificial Sequence
  Description of Artificial Sequence: Synthetic oligonucleotide
agaaacagcaaaaggacag

SEQ ID NO: 2537200 - RNA, 19 nt, Artificial Sequence
  Description of Artificial Sequence: Synthetic oligonucleotide
guaaacaucacaauaggga

SEQ ID NO: 2537201 - RNA, 19 nt, Artificial Sequence
  Description of Artificial Sequence: Synthetic oligonucleotide
aacauugugaagccagccu

SEQ ID NO: 2537202 - RNA, 19 nt, Artificial Sequence
  Description of Artificial Sequence: Synthetic oligonucleotide
uucuugaaacuguuaaggc

SEQ ID NO: 2537203 - RNA, 19 nt, Artificial Sequence
  Description of Artificial Sequence: Synthetic oligonucleotide
auagguucaggugaagugg

SEQ ID NO: 2537204 - RNA, 19 nt, Artificial Sequence
  Description of Artificial Sequence: Synthetic oligonucleotide
gaagugucaaauaaaguca

SEQ ID NO: 2537205 - RNA, 19 nt, Artificial Sequence
  Description of Artificial Sequence: Synthetic oligonucleotide
uuuugcauugagaaagaaa

SEQ ID NO: 2537206 - RNA, 19 nt, Artificial Sequence
  Description of Artificial Sequence: Synthetic oligonucleotide
aagaguauaaauauacaua

SEQ ID NO: 2537207 - RNA, 19 nt, Artificial Sequence
  Description of Artificial Sequence: Synthetic oligonucleotide
ucaaccacuucguaaguug

SEQ ID NO: 2537208 - RNA, 19 nt, Artificial Sequence
  Description of Artificial Sequence: Synthetic oligonucleotide
auauauugcuuucauaaua

SEQ ID NO: 2537209 - RNA, 19 nt, Artificial Sequence
  Description of Artificial Sequence: Synthetic oligonucleotide
cuuauuaagugguuucaac

SEQ ID NO: 2537210 - RNA, 19 nt, Artificial Sequence
  Description of Artificial Sequence: Synthetic oligonucleotide
uuaagugguuucaacauuu

SEQ ID NO: 2537211 - RNA, 19 nt, Artificial Sequence
  Description of Artificial Sequence: Synthetic oligonucleotide
uuauggaguuuuauguaug

SEQ ID NO: 2537212 - RNA, 19 nt, Artificial Sequence
  Description of Artificial Sequence: Synthetic oligonucleotide
acaauagggagaaacuugg

SEQ ID NO: 2537213 - RNA, 19 nt, Artificial Sequence
  Description of Artificial Sequence: Synthetic oligonucleotide
auauugucagaaauaacuc

SEQ ID NO: 2537214 - RNA, 19 nt, Artificial Sequence
  Description of Artificial Sequence: Synthetic oligonucleotide
uugaaauuuagaauauauu

SEQ ID NO: 2537215 - RNA, 19 nt, Artificial Sequence
  Description of Artificial Sequence: Synthetic oligonucleotide
ugguucuugaaacuguuaa

SEQ ID NO: 2537216 - RNA, 19 nt, Artificial Sequence
  Description of Artificial Sequence: Synthetic oligonucleotide
uacagaacuugucacgucu

SEQ ID NO: 2537217 - RNA, 19 nt, Artificial Sequence
  Description of Artificial Sequence: Synthetic oligonucleotide
uguguuuaacauugugaag

SEQ ID NO: 2537218 - RNA, 19 nt, Artificial Sequence
  Description of Artificial Sequence: Synthetic oligonucleotide
aaguggcaucucuucauac

SEQ ID NO: 2537219 - RNA, 19 nt, Artificial Sequence
  Description of Artificial Sequence: Synthetic oligonucleotide
auuauggaguuuuauguau

SEQ ID NO: 2537220 - RNA, 19 nt, Artificial Sequence
  Description of Artificial Sequence: Synthetic oligonucleotide
ggagacacggucuaaaagc

SEQ ID NO: 2537221 - RNA, 19 nt, Artificial Sequence
  Description of Artificial Sequence: Synthetic oligonucleotide
augaauuuuauugccuaac

SEQ ID NO: 2537222 - RNA, 19 nt, Artificial Sequence
  Description of Artificial Sequence: Synthetic oligonucleotide
uaagugguguauuuuaaau

SEQ ID NO: 2537223 - RNA, 19 nt, Artificial Sequence
  Description of Artificial Sequence: Synthetic oligonucleotide
uuuaagugguguauuuuaa

SEQ ID NO: 2537224 - RNA, 19 nt, Artificial Sequence
  Description of Artificial Sequence: Synthetic oligonucleotide
cagacuuugaacucacaag

SEQ ID NO: 2537225 - RNA, 19 nt, Artificial Sequence
  Description of Artificial Sequence: Synthetic oligonucleotide
uuaacauugugaagccagc

SEQ ID NO: 2537226 - RNA, 19 nt, Artificial Sequence
  Description of Artificial Sequence: Synthetic oligonucleotide
ugagaaagaaaagcauuag

SEQ ID NO: 2537227 - RNA, 19 nt, Artificial Sequence
  Description of Artificial Sequence: Synthetic oligonucleotide
cucauauggguaaacauca

SEQ ID NO: 2537228 - RNA, 19 nt, Artificial Sequence
  Description of Artificial Sequence: Synthetic oligonucleotide
uugaaauguagaaguuaag

SEQ ID NO: 2537229 - RNA, 19 nt, Artificial Sequence
  Description of Artificial Sequence: Synthetic oligonucleotide
cuugaaacuguuaaggcaa

SEQ ID NO: 2537230 - RNA, 19 nt, Artificial Sequence
  Description of Artificial Sequence: Synthetic oligonucleotide
uccacagaaaauauacuua

SEQ ID NO: 2537231 - RNA, 19 nt, Artificial Sequence
  Description of Artificial Sequence: Synthetic oligonucleotide
aagaugguucuugaaaugu

SEQ ID NO: 2537232 - RNA, 19 nt, Artificial Sequence
  Description of Artificial Sequence: Synthetic oligonucleotide
gaugguucuugaaauguag

SEQ ID NO: 2537233 - RNA, 19 nt, Artificial Sequence
  Description of Artificial Sequence: Synthetic oligonucleotide
aaguuaagauuuaaguggu

SEQ ID NO: 2537234 - RNA, 19 nt, Artificial Sequence
  Description of Artificial Sequence: Synthetic oligonucleotide
aaacagcaaaaggacagag

SEQ ID NO: 2537235 - RNA, 19 nt, Artificial Sequence
  Description of Artificial Sequence: Synthetic oligonucleotide
aaucuaucagagucugugu

SEQ ID NO: 2537236 - RNA, 19 nt, Artificial Sequence
  Description of Artificial Sequence: Synthetic oligonucleotide
aacaucacaauagggagaa

SEQ ID NO: 2537237 - RNA, 19 nt, Artificial Sequence
  Description of Artificial Sequence: Synthetic oligonucleotide
cacaauagggagaaacuug

SEQ ID NO: 2537238 - RNA, 19 nt, Artificial Sequence
  Description of Artificial Sequence: Synthetic oligonucleotide
  modified_base (13)..(13): a, c, u, g, unknown or other
  modified_base (17)..(17): a, c, u, g, unknown or other
cuucauacacaanaaanaa

SEQ ID NO: 2537239 - RNA, 19 nt, Artificial Sequence
  Description of Artificial Sequence: Synthetic oligonucleotide
agagauucuacagaacuug

SEQ ID NO: 2537240 - RNA, 19 nt, Artificial Sequence
  Description of Artificial Sequence: Synthetic oligonucleotide
uugcauugagaaagaaaag

SEQ ID NO: 2537241 - RNA, 19 nt, Artificial Sequence
  Description of Artificial Sequence: Synthetic oligonucleotide
cuugaaauguagaaguuaa

SEQ ID NO: 2537242 - RNA, 19 nt, Artificial Sequence
  Description of Artificial Sequence: Synthetic oligonucleotide
guauuauggaguuuuaugu

SEQ ID NO: 2537243 - RNA, 19 nt, Artificial Sequence
  Description of Artificial Sequence: Synthetic oligonucleotide
cauagguucaggugaagug

SEQ ID NO: 2537244 - RNA, 19 nt, Artificial Sequence
  Description of Artificial Sequence: Synthetic oligonucleotide
gaccaugcuacuccuagag

SEQ ID NO: 2537245 - RNA, 19 nt, Artificial Sequence
  Description of Artificial Sequence: Synthetic oligonucleotide
auuuaagugguguauuuua

SEQ ID NO: 2537246 - RNA, 19 nt, Artificial Sequence
  Description of Artificial Sequence: Synthetic oligonucleotide
uauuauggaguuuuaugua

SEQ ID NO: 2537247 - RNA, 19 nt, Artificial Sequence
  Description of Artificial Sequence: Synthetic oligonucleotide
ugcuuucauaauaugaauu

SEQ ID NO: 2537248 - RNA, 19 nt, Artificial Sequence
  Description of Artificial Sequence: Synthetic oligonucleotide
aacugaagugucuaauuuu

SEQ ID NO: 2537249 - RNA, 19 nt, Artificial Sequence
  Description of Artificial Sequence: Synthetic oligonucleotide
aaggcaagaagugucaaau

SEQ ID NO: 2537250 - RNA, 19 nt, Artificial Sequence
  Description of Artificial Sequence: Synthetic oligonucleotide
uuagaauauauugcuuuca

SEQ ID NO: 2537251 - RNA, 19 nt, Artificial Sequence
  Description of Artificial Sequence: Synthetic oligonucleotide
aacucacaagaguauaaau

SEQ ID NO: 2537252 - RNA, 19 nt, Artificial Sequence
  Description of Artificial Sequence: Synthetic oligonucleotide
uuacagagcucauaugggu

SEQ ID NO: 2537253 - RNA, 19 nt, Artificial Sequence
  Description of Artificial Sequence: Synthetic oligonucleotide
uuaagauuuaaguggugua

SEQ ID NO: 2537254 - RNA, 19 nt, Artificial Sequence
  Description of Artificial Sequence: Synthetic oligonucleotide
gaaauguagaaguuaagau

SEQ ID NO: 2537255 - RNA, 19 nt, Artificial Sequence
  Description of Artificial Sequence: Synthetic oligonucleotide
ucguaaguuggccuugacc

SEQ ID NO: 2537256 - RNA, 19 nt, Artificial Sequence
  Description of Artificial Sequence: Synthetic oligonucleotide
aaugacagaacuaguuaca

SEQ ID NO: 2537257 - RNA, 19 nt, Artificial Sequence
  Description of Artificial Sequence: Synthetic oligonucleotide
acuccuagagaguaaagau

SEQ ID NO: 2537258 - RNA, 19 nt, Artificial Sequence
  Description of Artificial Sequence: Synthetic oligonucleotide
auugucagaaauaacucca

SEQ ID NO: 2537259 - RNA, 19 nt, Artificial Sequence
  Description of Artificial Sequence: Synthetic oligonucleotide
uaaagaucagaaacagcaa

SEQ ID NO: 2537260 - RNA, 19 nt, Artificial Sequence
  Description of Artificial Sequence: Synthetic oligonucleotide
acuuagucacuccuaaaga

SEQ ID NO: 2537261 - RNA, 19 nt, Artificial Sequence
  Description of Artificial Sequence: Synthetic oligonucleotide
uauauacagaaaguuuaca

SEQ ID NO: 2537262 - RNA, 19 nt, Artificial Sequence
  Description of Artificial Sequence: Synthetic oligonucleotide
uauggaguuuuauguaugu

SEQ ID NO: 2537263 - RNA, 19 nt, Artificial Sequence
  Description of Artificial Sequence: Synthetic oligonucleotide
gguguauuuuaaaugacag

SEQ ID NO: 2537264 - RNA, 19 nt, Artificial Sequence
  Description of Artificial Sequence: Synthetic oligonucleotide
agaucagaaacagcaaaag

SEQ ID NO: 2537265 - RNA, 19 nt, Artificial Sequence
  Description of Artificial Sequence: Synthetic oligonucleotide
aaacagacuuugaacucac

SEQ ID NO: 2537266 - RNA, 19 nt, Artificial Sequence
  Description of Artificial Sequence: Synthetic oligonucleotide
gaacuaguuacagagcuca

SEQ ID NO: 2537267 - RNA, 19 nt, Artificial Sequence
  Description of Artificial Sequence: Synthetic oligonucleotide
auaugaauuuuauugccua

SEQ ID NO: 2537268 - RNA, 19 nt, Artificial Sequence
  Description of Artificial Sequence: Synthetic oligonucleotide
guagaaguuaagauuuaag

SEQ ID NO: 2537269 - RNA, 19 nt, Artificial Sequence
  Description of Artificial Sequence: Synthetic oligonucleotide
gacacggucuaaaagcugc

SEQ ID NO: 2537270 - RNA, 19 nt, Artificial Sequence
  Description of Artificial Sequence: Synthetic oligonucleotide
agaguaaagaucagaaaca

SEQ ID NO: 2537271 - RNA, 19 nt, Artificial Sequence
  Description of Artificial Sequence: Synthetic oligonucleotide
caucacaauagggagaaac

SEQ ID NO: 2537272 - RNA, 19 nt, Artificial Sequence
  Description of Artificial Sequence: Synthetic oligonucleotide
ugucagaaauaacuccaca

SEQ ID NO: 2537273 - RNA, 19 nt, Artificial Sequence
  Description of Artificial Sequence: Synthetic oligonucleotide
auuuuaacagguauauaca

SEQ ID NO: 2537274 - RNA, 19 nt, Artificial Sequence
  Description of Artificial Sequence: Synthetic oligonucleotide
augagagagauucuacaga

SEQ ID NO: 2537275 - RNA, 19 nt, Artificial Sequence
  Description of Artificial Sequence: Synthetic oligonucleotide
uaagauuuaagugguguau

SEQ ID NO: 2537276 - RNA, 19 nt, Artificial Sequence
  Description of Artificial Sequence: Synthetic oligonucleotide
uuaagugguguauuuuaaa

SEQ ID NO: 2537277 - RNA, 19 nt, Artificial Sequence
  Description of Artificial Sequence: Synthetic oligonucleotide
guuacagagcucauauggg

SEQ ID NO: 2537278 - RNA, 19 nt, Artificial Sequence
  Description of Artificial Sequence: Synthetic oligonucleotide
uuauugccuaacugaagug

SEQ ID NO: 2537279 - RNA, 19 nt, Artificial Sequence
  Description of Artificial Sequence: Synthetic oligonucleotide
ucuacagaacuugucacgu

SEQ ID NO: 2537280 - RNA, 19 nt, Artificial Sequence
  Description of Artificial Sequence: Synthetic oligonucleotide
uauugccuaacugaagugu

SEQ ID NO: 2537281 - RNA, 19 nt, Artificial Sequence
  Description of Artificial Sequence: Synthetic oligonucleotide
acagacuuugaacucacaa

SEQ ID NO: 2537282 - RNA, 19 nt, Artificial Sequence
  Description of Artificial Sequence: Synthetic oligonucleotide
accacuucguaaguuggcc

SEQ ID NO: 2537283 - RNA, 19 nt, Artificial Sequence
  Description of Artificial Sequence: Synthetic oligonucleotide
uaugaauuuuauugccuaa

SEQ ID NO: 2537284 - RNA, 19 nt, Artificial Sequence
  Description of Artificial Sequence: Synthetic oligonucleotide
auggguaaacaucacaaua

SEQ ID NO: 2537285 - RNA, 19 nt, Artificial Sequence
  Description of Artificial Sequence: Synthetic oligonucleotide
  modified_base (7)..(7): a, c, u, g, unknown or other
  modified_base (11)..(11): a, c, u, g, unknown or other
acacaanaaanaaaaguua

SEQ ID NO: 2537286 - RNA, 19 nt, Artificial Sequence
  Description of Artificial Sequence: Synthetic oligonucleotide
  modified_base (18)..(18): a, c, u, g, unknown or other
caucucuucauacacaana

SEQ ID NO: 2537287 - RNA, 19 nt, Artificial Sequence
  Description of Artificial Sequence: Synthetic oligonucleotide
uacuccuagagaguaaaga

SEQ ID NO: 2537288 - RNA, 19 nt, Artificial Sequence
  Description of Artificial Sequence: Synthetic oligonucleotide
auguaugugguucuugaaa

SEQ ID NO: 2537289 - RNA, 19 nt, Artificial Sequence
  Description of Artificial Sequence: Synthetic oligonucleotide
uugaaacuguuaaggcaag

SEQ ID NO: 2537290 - RNA, 19 nt, Artificial Sequence
  Description of Artificial Sequence: Synthetic oligonucleotide
acuguuaaggcaagaagug

SEQ ID NO: 2537291 - RNA, 19 nt, Artificial Sequence
  Description of Artificial Sequence: Synthetic oligonucleotide
aggagacacggucuaaaag

SEQ ID NO: 2537292 - RNA, 19 nt, Artificial Sequence
  Description of Artificial Sequence: Synthetic oligonucleotide
caaccacuucguaaguugg

SEQ ID NO: 2537293 - RNA, 19 nt, Artificial Sequence
  Description of Artificial Sequence: Synthetic oligonucleotide
uagguucaggugaaguggc

SEQ ID NO: 2537294 - RNA, 19 nt, Artificial Sequence
  Description of Artificial Sequence: Synthetic oligonucleotide
uacagaaaguuuacagaaa

SEQ ID NO: 2537295 - RNA, 19 nt, Artificial Sequence
  Description of Artificial Sequence: Synthetic oligonucleotide
aagaucagaaacagcaaaa

SEQ ID NO: 2537296 - RNA, 19 nt, Artificial Sequence
  Description of Artificial Sequence: Synthetic oligonucleotide
aaccacuucguaaguuggc

SEQ ID NO: 2537297 - RNA, 19 nt, Artificial Sequence
  Description of Artificial Sequence: Synthetic oligonucleotide
gaacuugucacgucuuuga

SEQ ID NO: 2537298 - RNA, 19 nt, Artificial Sequence
  Description of Artificial Sequence: Synthetic oligonucleotide
caaguuuguaaucuuauua

SEQ ID NO: 2537299 - RNA, 19 nt, Artificial Sequence
  Description of Artificial Sequence: Synthetic oligonucleotide
gguaaacaucacaauaggg

SEQ ID NO: 2537300 - RNA, 19 nt, Artificial Sequence
  Description of Artificial Sequence: Synthetic oligonucleotide
ucacgucuuugaaauuuag

SEQ ID NO: 2537301 - RNA, 19 nt, Artificial Sequence
  Description of Artificial Sequence: Synthetic oligonucleotide
auauggguaaacaucacaa

SEQ ID NO: 2537302 - RNA, 19 nt, Artificial Sequence
  Description of Artificial Sequence: Synthetic oligonucleotide
acggucuaaaagcugcuug

SEQ ID NO: 2537303 - RNA, 19 nt, Artificial Sequence
  Description of Artificial Sequence: Synthetic oligonucleotide
ucacuccuaaagaugguuc

SEQ ID NO: 2537304 - RNA, 19 nt, Artificial Sequence
  Description of Artificial Sequence: Synthetic oligonucleotide
aauuuagaauauauugcuu

SEQ ID NO: 2537305 - RNA, 19 nt, Artificial Sequence
  Description of Artificial Sequence: Synthetic oligonucleotide
ucuugaaauguagaaguua

SEQ ID NO: 2537306 - RNA, 19 nt, Artificial Sequence
  Description of Artificial Sequence: Synthetic oligonucleotide
cuccuagagaguaaagauc

SEQ ID NO: 2537307 - RNA, 19 nt, Artificial Sequence
  Description of Artificial Sequence: Synthetic oligonucleotide
aaacaucacaauagggaga

SEQ ID NO: 2537308 - RNA, 19 nt, Artificial Sequence
  Description of Artificial Sequence: Synthetic oligonucleotide
aagaaaagcauuagcuaau

SEQ ID NO: 2537309 - RNA, 19 nt, Artificial Sequence
  Description of Artificial Sequence: Synthetic oligonucleotide
augacagaacuaguuacag

SEQ ID NO: 2537310 - RNA, 19 nt, Artificial Sequence
  Description of Artificial Sequence: Synthetic oligonucleotide
ugcugcauagguucaggug

SEQ ID NO: 2537311 - RNA, 19 nt, Artificial Sequence
  Description of Artificial Sequence: Synthetic oligonucleotide
auugccuaacugaaguguc

SEQ ID NO: 2537312 - RNA, 19 nt, Artificial Sequence
  Description of Artificial Sequence: Synthetic oligonucleotide
uauggguaaacaucacaau

SEQ ID NO: 2537313 - RNA, 19 nt, Artificial Sequence
  Description of Artificial Sequence: Synthetic oligonucleotide
agagaguaaagaucagaaa

SEQ ID NO: 2537314 - RNA, 19 nt, Artificial Sequence
  Description of Artificial Sequence: Synthetic oligonucleotide
  modified_base (5)..(5): a, c, u, g, unknown or other
  modified_base (9)..(9): a, c, u, g, unknown or other
acaanaaanaaaaguuaau

SEQ ID NO: 2537315 - RNA, 19 nt, Artificial Sequence
  Description of Artificial Sequence: Synthetic oligonucleotide
uguagaaguuaagauuuaa

SEQ ID NO: 2537316 - RNA, 19 nt, Artificial Sequence
  Description of Artificial Sequence: Synthetic oligonucleotide
ucacaagaguauaaauaua

SEQ ID NO: 2537317 - RNA, 19 nt, Artificial Sequence
  Description of Artificial Sequence: Synthetic oligonucleotide
uugcuuucauaauaugaau

SEQ ID NO: 2537318 - RNA, 19 nt, Artificial Sequence
  Description of Artificial Sequence: Synthetic oligonucleotide
uccuaaagaugguucuuga

SEQ ID NO: 2537319 - RNA, 19 nt, Artificial Sequence
  Description of Artificial Sequence: Synthetic oligonucleotide
uaacauugugaagccagcc

SEQ ID NO: 2537320 - RNA, 19 nt, Artificial Sequence
  Description of Artificial Sequence: Synthetic oligonucleotide
cugaugagagagauucuac

SEQ ID NO: 2537321 - RNA, 19 nt, Artificial Sequence
  Description of Artificial Sequence: Synthetic oligonucleotide
ucugaugagagagauucua

SEQ ID NO: 2537322 - RNA, 19 nt, Artificial Sequence
  Description of Artificial Sequence: Synthetic oligonucleotide
ugacagaacuaguuacaga

SEQ ID NO: 2537323 - RNA, 19 nt, Artificial Sequence
  Description of Artificial Sequence: Synthetic oligonucleotide
ugaaguggcaucucuucau

SEQ ID NO: 2537324 - RNA, 19 nt, Artificial Sequence
  Description of Artificial Sequence: Synthetic oligonucleotide
aagugucaaauaaagucaa

SEQ ID NO: 2537325 - RNA, 19 nt, Artificial Sequence
  Description of Artificial Sequence: Synthetic oligonucleotide
agcucauauggguaaacau

SEQ ID NO: 2537326 - RNA, 19 nt, Artificial Sequence
  Description of Artificial Sequence: Synthetic oligonucleotide
uuacagaaacagacuuuga

SEQ ID NO: 2537327 - RNA, 19 nt, Artificial Sequence
  Description of Artificial Sequence: Synthetic oligonucleotide
cucacaagaguauaaauau

SEQ ID NO: 2537328 - RNA, 19 nt, Artificial Sequence
  Description of Artificial Sequence: Synthetic oligonucleotide
agauuuaagugguguauuu

SEQ ID NO: 2537329 - RNA, 19 nt, Artificial Sequence
  Description of Artificial Sequence: Synthetic oligonucleotide
uaaucuuauuaagugguuu

SEQ ID NO: 2537330 - RNA, 19 nt, Artificial Sequence
  Description of Artificial Sequence: Synthetic oligonucleotide
acauugugaagccagccuu

SEQ ID NO: 2537331 - RNA, 19 nt, Artificial Sequence
  Description of Artificial Sequence: Synthetic oligonucleotide
ucauugcuuuugcauugag

SEQ ID NO: 2537332 - RNA, 19 nt, Artificial Sequence
  Description of Artificial Sequence: Synthetic oligonucleotide
gaaacuguuaaggcaagaa

SEQ ID NO: 2537333 - RNA, 19 nt, Artificial Sequence
  Description of Artificial Sequence: Synthetic oligonucleotide
ucaaguuuguaaucuuauu

SEQ ID NO: 2537334 - RNA, 19 nt, Artificial Sequence
  Description of Artificial Sequence: Synthetic oligonucleotide
aacuuggccacuguauuau

SEQ ID NO: 2537335 - RNA, 19 nt, Artificial Sequence
  Description of Artificial Sequence: Synthetic oligonucleotide
acucacaagaguauaaaua

SEQ ID NO: 2537336 - RNA, 19 nt, Artificial Sequence
  Description of Artificial Sequence: Synthetic oligonucleotide
cagaaauaacuccacagaa

SEQ ID NO: 2537337 - RNA, 19 nt, Artificial Sequence
  Description of Artificial Sequence: Synthetic oligonucleotide
agauucuacagaacuuguc

SEQ ID NO: 2537338 - RNA, 19 nt, Artificial Sequence
  Description of Artificial Sequence: Synthetic oligonucleotide
aacuugucacgucuuugaa

SEQ ID NO: 2537339 - RNA, 19 nt, Artificial Sequence
  Description of Artificial Sequence: Synthetic oligonucleotide
uauguaugugguucuugaa

SEQ ID NO: 2537340 - RNA, 19 nt, Artificial Sequence
  Description of Artificial Sequence: Synthetic oligonucleotide
uucuugaaauguagaaguu

SEQ ID NO: 2537341 - RNA, 19 nt, Artificial Sequence
  Description of Artificial Sequence: Synthetic oligonucleotide
ucauauggguaaacaucac

SEQ ID NO: 2537342 - RNA, 19 nt, Artificial Sequence
  Description of Artificial Sequence: Synthetic oligonucleotide
gucuaaaagcugcuugcug

SEQ ID NO: 2537343 - RNA, 19 nt, Artificial Sequence
  Description of Artificial Sequence: Synthetic oligonucleotide
ugucacgucuuugaaauuu

SEQ ID NO: 2537344 - RNA, 19 nt, Artificial Sequence
  Description of Artificial Sequence: Synthetic oligonucleotide
cauauggguaaacaucaca

SEQ ID NO: 2537345 - RNA, 19 nt, Artificial Sequence
  Description of Artificial Sequence: Synthetic oligonucleotide
cuugucacgucuuugaaau

SEQ ID NO: 2537346 - RNA, 19 nt, Artificial Sequence
  Description of Artificial Sequence: Synthetic oligonucleotide
aucacaauagggagaaacu

SEQ ID NO: 2537347 - RNA, 19 nt, Artificial Sequence
  Description of Artificial Sequence: Synthetic oligonucleotide
aucuaucagagucuguguu

SEQ ID NO: 2537348 - RNA, 19 nt, Artificial Sequence
  Description of Artificial Sequence: Synthetic oligonucleotide
uaaggcaagaagugucaaa

SEQ ID NO: 2537349 - RNA, 19 nt, Artificial Sequence
  Description of Artificial Sequence: Synthetic oligonucleotide
gaaaauauacuuagucacu

SEQ ID NO: 2537350 - RNA, 19 nt, Artificial Sequence
  Description of Artificial Sequence: Synthetic oligonucleotide
agaaauaacuccacagaaa

SEQ ID NO: 2537351 - RNA, 19 nt, Artificial Sequence
  Description of Artificial Sequence: Synthetic oligonucleotide
ucacaauagggagaaacuu

SEQ ID NO: 2537352 - RNA, 19 nt, Artificial Sequence
  Description of Artificial Sequence: Synthetic oligonucleotide
caaauaaagucaaaucuau

SEQ ID NO: 2537353 - RNA, 19 nt, Artificial Sequence
  Description of Artificial Sequence: Synthetic oligonucleotide
acagagcucauauggguaa

SEQ ID NO: 2537354 - RNA, 19 nt, Artificial Sequence
  Description of Artificial Sequence: Synthetic oligonucleotide
uucaggugaaguggcaucu

SEQ ID NO: 2537355 - RNA, 19 nt, Artificial Sequence
  Description of Artificial Sequence: Synthetic oligonucleotide
uugccuaacugaagugucu

SEQ ID NO: 2537356 - RNA, 19 nt, Artificial Sequence
  Description of Artificial Sequence: Synthetic oligonucleotide
caauagggagaaacuuggc

SEQ ID NO: 2537357 - RNA, 19 nt, Artificial Sequence
  Description of Artificial Sequence: Synthetic oligonucleotide
acaagaguauaaauauaca

SEQ ID NO: 2537358 - RNA, 19 nt, Artificial Sequence
  Description of Artificial Sequence: Synthetic oligonucleotide
agaacuaguuacagagcuc

SEQ ID NO: 2537359 - RNA, 19 nt, Artificial Sequence
  Description of Artificial Sequence: Synthetic oligonucleotide
uuucaaccacuucguaagu

SEQ ID NO: 2537360 - RNA, 19 nt, Artificial Sequence
  Description of Artificial Sequence: Synthetic oligonucleotide
uaguuacagagcucauaug

SEQ ID NO: 2537361 - RNA, 19 nt, Artificial Sequence
  Description of Artificial Sequence: Synthetic oligonucleotide
guuaagauuuaaguggugu

SEQ ID NO: 2537362 - RNA, 19 nt, Artificial Sequence
  Description of Artificial Sequence: Synthetic oligonucleotide
acuugucacgucuuugaaa

SEQ ID NO: 2537363 - RNA, 19 nt, Artificial Sequence
  Description of Artificial Sequence: Synthetic oligonucleotide
gaacgcuuccaucuucuga

SEQ ID NO: 2537364 - RNA, 19 nt, Artificial Sequence
  Description of Artificial Sequence: Synthetic oligonucleotide
ggcaagaagugucaaauaa

SEQ ID NO: 2537365 - RNA, 19 nt, Artificial Sequence
  Description of Artificial Sequence: Synthetic oligonucleotide
uguggucauugcuuuugca

SEQ ID NO: 2537366 - RNA, 19 nt, Artificial Sequence
  Description of Artificial Sequence: Synthetic oligonucleotide
aaaggacagaggagacacg

SEQ ID NO: 2537367 - RNA, 19 nt, Artificial Sequence
  Description of Artificial Sequence: Synthetic oligonucleotide
guuuguaaucuuauuaagu

SEQ ID NO: 2537368 - RNA, 19 nt, Artificial Sequence
  Description of Artificial Sequence: Synthetic oligonucleotide
agaacuugucacgucuuug

SEQ ID NO: 2537369 - RNA, 19 nt, Artificial Sequence
  Description of Artificial Sequence: Synthetic oligonucleotide
cguaaguuggccuugacca

SEQ ID NO: 2537370 - RNA, 19 nt, Artificial Sequence
  Description of Artificial Sequence: Synthetic oligonucleotide
agagucuguguuuaacauu

SEQ ID NO: 2537371 - RNA, 19 nt, Artificial Sequence
  Description of Artificial Sequence: Synthetic oligonucleotide
cauugugaagccagccuuc

SEQ ID NO: 2537372 - RNA, 19 nt, Artificial Sequence
  Description of Artificial Sequence: Synthetic oligonucleotide
agagcucauauggguaaac

SEQ ID NO: 2537373 - RNA, 19 nt, Artificial Sequence
  Description of Artificial Sequence: Synthetic oligonucleotide
cagaaaguuuacagaaaca

SEQ ID NO: 2537374 - RNA, 19 nt, Artificial Sequence
  Description of Artificial Sequence: Synthetic oligonucleotide
guuaaggcaagaaguguca

SEQ ID NO: 2537375 - RNA, 19 nt, Artificial Sequence
  Description of Artificial Sequence: Synthetic oligonucleotide
uugaacucacaagaguaua

SEQ ID NO: 2537376 - RNA, 19 nt, Artificial Sequence
  Description of Artificial Sequence: Synthetic oligonucleotide
cuaguuacagagcucauau

SEQ ID NO: 2537377 - RNA, 19 nt, Artificial Sequence
  Description of Artificial Sequence: Synthetic oligonucleotide
uggcaucucuucauacaca

SEQ ID NO: 2537378 - RNA, 19 nt, Artificial Sequence
  Description of Artificial Sequence: Synthetic oligonucleotide
gcauugagaaagaaaagca

SEQ ID NO: 2537379 - RNA, 19 nt, Artificial Sequence
  Description of Artificial Sequence: Synthetic oligonucleotide
uugcuuuugcauugagaaa

SEQ ID NO: 2537380 - RNA, 19 nt, Artificial Sequence
  Description of Artificial Sequence: Synthetic oligonucleotide
gaaacagcaaaaggacaga

SEQ ID NO: 2537381 - RNA, 19 nt, Artificial Sequence
  Description of Artificial Sequence: Synthetic oligonucleotide
ugaaacuguuaaggcaaga

SEQ ID NO: 2537382 - RNA, 19 nt, Artificial Sequence
  Description of Artificial Sequence: Synthetic oligonucleotide
cuagagaguaaagaucaga

SEQ ID NO: 2537383 - RNA, 19 nt, Artificial Sequence
  Description of Artificial Sequence: Synthetic oligonucleotide
cuccuaaagaugguucuug

SEQ ID NO: 2537384 - RNA, 19 nt, Artificial Sequence
  Description of Artificial Sequence: Synthetic oligonucleotide
cauugcuuuugcauugaga

SEQ ID NO: 2537385 - RNA, 19 nt, Artificial Sequence
  Description of Artificial Sequence: Synthetic oligonucleotide
cuuagucacuccuaaagau

SEQ ID NO: 2537386 - RNA, 19 nt, Artificial Sequence
  Description of Artificial Sequence: Synthetic oligonucleotide
uaagugguuucaacauuuu

SEQ ID NO: 2537387 - RNA, 19 nt, Artificial Sequence
  Description of Artificial Sequence: Synthetic oligonucleotide
cuacuccuagagaguaaag

SEQ ID NO: 2537388 - RNA, 19 nt, Artificial Sequence
  Description of Artificial Sequence: Synthetic oligonucleotide
uuaaggcaagaagugucaa

SEQ ID NO: 2537389 - RNA, 19 nt, Artificial Sequence
  Description of Artificial Sequence: Synthetic oligonucleotide
auauuaccauauucugaaa

SEQ ID NO: 2537390 - RNA, 19 nt, Artificial Sequence
  Description of Artificial Sequence: Synthetic oligonucleotide
cauugagaaagaaaagcau

SEQ ID NO: 2537391 - RNA, 19 nt, Artificial Sequence
  Description of Artificial Sequence: Synthetic oligonucleotide
gaacucacaagaguauaaa

SEQ ID NO: 2537392 - RNA, 19 nt, Artificial Sequence
  Description of Artificial Sequence: Synthetic oligonucleotide
caguuugaacgcuuccauc

SEQ ID NO: 2537393 - RNA, 19 nt, Artificial Sequence
  Description of Artificial Sequence: Synthetic oligonucleotide
ugaacgcuuccaucuucug

SEQ ID NO: 2537394 - RNA, 19 nt, Artificial Sequence
  Description of Artificial Sequence: Synthetic oligonucleotide
ugaccaugcuacuccuaga

SEQ ID NO: 2537395 - RNA, 19 nt, Artificial Sequence
  Description of Artificial Sequence: Synthetic oligonucleotide
auggaguuuuauguaugug

SEQ ID NO: 2537396 - RNA, 19 nt, Artificial Sequence
  Description of Artificial Sequence: Synthetic oligonucleotide
ggugaaguggcaucucuuc

SEQ ID NO: 2537397 - RNA, 19 nt, Artificial Sequence
  Description of Artificial Sequence: Synthetic oligonucleotide
cacgucuuugaaauuuaga

SEQ ID NO: 2537398 - RNA, 19 nt, Artificial Sequence
  Description of Artificial Sequence: Synthetic oligonucleotide
gugaaguggcaucucuuca

SEQ ID NO: 2537399 - RNA, 19 nt, Artificial Sequence
  Description of Artificial Sequence: Synthetic oligonucleotide
gcucauauggguaaacauc

SEQ ID NO: 2537400 - RNA, 19 nt, Artificial Sequence
  Description of Artificial Sequence: Synthetic oligonucleotide
auacuuagucacuccuaaa

SEQ ID NO: 2537401 - RNA, 19 nt, Artificial Sequence
  Description of Artificial Sequence: Synthetic oligonucleotide
cuguggucauugcuuuugc

SEQ ID NO: 2537402 - RNA, 19 nt, Artificial Sequence
  Description of Artificial Sequence: Synthetic oligonucleotide
gagaaacuuggccacugua

SEQ ID NO: 2537403 - RNA, 19 nt, Artificial Sequence
  Description of Artificial Sequence: Synthetic oligonucleotide
gccuugaccaugcuacucc

SEQ ID NO: 2537404 - RNA, 19 nt, Artificial Sequence
  Description of Artificial Sequence: Synthetic oligonucleotide
acagaggagacacggucua

SEQ ID NO: 2537405 - RNA, 19 nt, Artificial Sequence
  Description of Artificial Sequence: Synthetic oligonucleotide
acugcuguggucauugcuu

SEQ ID NO: 2537406 - RNA, 19 nt, Artificial Sequence
  Description of Artificial Sequence: Synthetic oligonucleotide
ggacagaggagacacgguc

SEQ ID NO: 2537407 - RNA, 19 nt, Artificial Sequence
  Description of Artificial Sequence: Synthetic oligonucleotide
auugugaagccagccuucu

SEQ ID NO: 2537408 - RNA, 19 nt, Artificial Sequence
  Description of Artificial Sequence: Synthetic oligonucleotide
aguuaagauuuaaguggug

SEQ ID NO: 2537409 - RNA, 19 nt, Artificial Sequence
  Description of Artificial Sequence: Synthetic oligonucleotide
augguucuugaaauguaga

SEQ ID NO: 2537410 - RNA, 19 nt, Artificial Sequence
  Description of Artificial Sequence: Synthetic oligonucleotide
gaaguggcaucucuucaua

SEQ ID NO: 2537411 - RNA, 19 nt, Artificial Sequence
  Description of Artificial Sequence: Synthetic oligonucleotide
gagcucauauggguaaaca

SEQ ID NO: 2537412 - RNA, 19 nt, Artificial Sequence
  Description of Artificial Sequence: Synthetic oligonucleotide
cuccacagaaaauauacuu

SEQ ID NO: 2537413 - RNA, 19 nt, Artificial Sequence
  Description of Artificial Sequence: Synthetic oligonucleotide
gagagagauucuacagaac

SEQ ID NO: 2537414 - RNA, 19 nt, Artificial Sequence
  Description of Artificial Sequence: Synthetic oligonucleotide
uucguaaguuggccuugac

SEQ ID NO: 2537415 - RNA, 19 nt, Artificial Sequence
  Description of Artificial Sequence: Synthetic oligonucleotide
acuuggccacuguauuaug

SEQ ID NO: 2537416 - RNA, 19 nt, Artificial Sequence
  Description of Artificial Sequence: Synthetic oligonucleotide
acuaguuacagagcucaua

SEQ ID NO: 2537417 - RNA, 19 nt, Artificial Sequence
  Description of Artificial Sequence: Synthetic oligonucleotide
gaggagacacggucuaaaa

SEQ ID NO: 2537418 - RNA, 19 nt, Artificial Sequence
  Description of Artificial Sequence: Synthetic oligonucleotide
cuacagaacuugucacguc

SEQ ID NO: 2537419 - RNA, 19 nt, Artificial Sequence
  Description of Artificial Sequence: Synthetic oligonucleotide
gugguguauuuuaaaugac

SEQ ID NO: 2537420 - RNA, 19 nt, Artificial Sequence
  Description of Artificial Sequence: Synthetic oligonucleotide
acuucguaaguuggccuug

SEQ ID NO: 2537421 - RNA, 19 nt, Artificial Sequence
  Description of Artificial Sequence: Synthetic oligonucleotide
gugucaaauaaagucaaau

SEQ ID NO: 2537422 - RNA, 19 nt, Artificial Sequence
  Description of Artificial Sequence: Synthetic oligonucleotide
uucaaccacuucguaaguu

SEQ ID NO: 2537423 - RNA, 19 nt, Artificial Sequence
  Description of Artificial Sequence: Synthetic oligonucleotide
ugcuacuccuagagaguaa

SEQ ID NO: 2537424 - RNA, 19 nt, Artificial Sequence
  Description of Artificial Sequence: Synthetic oligonucleotide
auauacuuagucacuccua

SEQ ID NO: 2537425 - RNA, 19 nt, Artificial Sequence
  Description of Artificial Sequence: Synthetic oligonucleotide
augugguucuugaaacugu

SEQ ID NO: 2537426 - RNA, 19 nt, Artificial Sequence
  Description of Artificial Sequence: Synthetic oligonucleotide
guuuaacauugugaagcca

SEQ ID NO: 2537427 - RNA, 19 nt, Artificial Sequence
  Description of Artificial Sequence: Synthetic oligonucleotide
agaggagacacggucuaaa

SEQ ID NO: 2537428 - RNA, 19 nt, Artificial Sequence
  Description of Artificial Sequence: Synthetic oligonucleotide
ugccuaacugaagugucua

SEQ ID NO: 2537429 - RNA, 19 nt, Artificial Sequence
  Description of Artificial Sequence: Synthetic oligonucleotide
aagcugcuugcugcauagg

SEQ ID NO: 2537430 - RNA, 19 nt, Artificial Sequence
  Description of Artificial Sequence: Synthetic oligonucleotide
gagacacggucuaaaagcu

SEQ ID NO: 2537431 - RNA, 19 nt, Artificial Sequence
  Description of Artificial Sequence: Synthetic oligonucleotide
gucaaaucuaucagagucu

SEQ ID NO: 2537432 - RNA, 19 nt, Artificial Sequence
  Description of Artificial Sequence: Synthetic oligonucleotide
ugcauagguucaggugaag

SEQ ID NO: 2537433 - RNA, 19 nt, Artificial Sequence
  Description of Artificial Sequence: Synthetic oligonucleotide
aggcaagaagugucaaaua

SEQ ID NO: 2537434 - RNA, 19 nt, Artificial Sequence
  Description of Artificial Sequence: Synthetic oligonucleotide
guaugugguucuugaaacu

SEQ ID NO: 2537435 - RNA, 19 nt, Artificial Sequence
  Description of Artificial Sequence: Synthetic oligonucleotide
gauuuaagugguguauuuu

SEQ ID NO: 2537436 - RNA, 19 nt, Artificial Sequence
  Description of Artificial Sequence: Synthetic oligonucleotide
ggaguuuuauguauguggu

SEQ ID NO: 2537437 - RNA, 19 nt, Artificial Sequence
  Description of Artificial Sequence: Synthetic oligonucleotide
aacagacuuugaacucaca

SEQ ID NO: 2537438 - RNA, 19 nt, Artificial Sequence
  Description of Artificial Sequence: Synthetic oligonucleotide
uaaaagcugcuugcugcau

SEQ ID NO: 2537439 - RNA, 19 nt, Artificial Sequence
  Description of Artificial Sequence: Synthetic oligonucleotide
augcuacuccuagagagua

SEQ ID NO: 2537440 - RNA, 19 nt, Artificial Sequence
  Description of Artificial Sequence: Synthetic oligonucleotide
agacacggucuaaaagcug

SEQ ID NO: 2537441 - RNA, 19 nt, Artificial Sequence
  Description of Artificial Sequence: Synthetic oligonucleotide
agaugguucuugaaaugua

SEQ ID NO: 2537442 - RNA, 19 nt, Artificial Sequence
  Description of Artificial Sequence: Synthetic oligonucleotide
cacuccuaaagaugguucu

SEQ ID NO: 2537443 - RNA, 19 nt, Artificial Sequence
  Description of Artificial Sequence: Synthetic oligonucleotide
agugucaaauaaagucaaa

SEQ ID NO: 2537444 - RNA, 19 nt, Artificial Sequence
  Description of Artificial Sequence: Synthetic oligonucleotide
aacuaguuacagagcucau

SEQ ID NO: 2537445 - RNA, 19 nt, Artificial Sequence
  Description of Artificial Sequence: Synthetic oligonucleotide
uggccuugaccaugcuacu

SEQ ID NO: 2537446 - RNA, 19 nt, Artificial Sequence
  Description of Artificial Sequence: Synthetic oligonucleotide
uugugaagccagccuucua

SEQ ID NO: 2537447 - RNA, 19 nt, Artificial Sequence
  Description of Artificial Sequence: Synthetic oligonucleotide
caugcuacuccuagagagu

SEQ ID NO: 2537448 - RNA, 19 nt, Artificial Sequence
  Description of Artificial Sequence: Synthetic oligonucleotide
gcaagaagugucaaauaaa

SEQ ID NO: 2537449 - RNA, 19 nt, Artificial Sequence
  Description of Artificial Sequence: Synthetic oligonucleotide
guuggccuugaccaugcua

SEQ ID NO: 2537450 - RNA, 19 nt, Artificial Sequence
  Description of Artificial Sequence: Synthetic oligonucleotide
ccuagagaguaaagaucag

SEQ ID NO: 2537451 - RNA, 19 nt, Artificial Sequence
  Description of Artificial Sequence: Synthetic oligonucleotide
cacuguauuauggaguuuu

SEQ ID NO: 2537452 - RNA, 19 nt, Artificial Sequence
  Description of Artificial Sequence: Synthetic oligonucleotide
acuccuaaagaugguucuu

SEQ ID NO: 2537453 - RNA, 19 nt, Artificial Sequence
  Description of Artificial Sequence: Synthetic oligonucleotide
ucaggugaaguggcaucuc

SEQ ID NO: 2537454 - RNA, 19 nt, Artificial Sequence
  Description of Artificial Sequence: Synthetic oligonucleotide
gagagauucuacagaacuu

SEQ ID NO: 2537455 - RNA, 19 nt, Artificial Sequence
  Description of Artificial Sequence: Synthetic oligonucleotide
uugucacgucuuugaaauu

SEQ ID NO: 2537456 - RNA, 19 nt, Artificial Sequence
  Description of Artificial Sequence: Synthetic oligonucleotide
cuuuugcauugagaaagaa

SEQ ID NO: 2537457 - RNA, 19 nt, Artificial Sequence
  Description of Artificial Sequence: Synthetic oligonucleotide
cugcauagguucaggugaa

SEQ ID NO: 2537458 - RNA, 19 nt, Artificial Sequence
  Description of Artificial Sequence: Synthetic oligonucleotide
gucauugcuuuugcauuga

SEQ ID NO: 2537459 - RNA, 19 nt, Artificial Sequence
  Description of Artificial Sequence: Synthetic oligonucleotide
acuguauuauggaguuuua

SEQ ID NO: 2537460 - RNA, 19 nt, Artificial Sequence
  Description of Artificial Sequence: Synthetic oligonucleotide
gcuacuccuagagaguaaa

SEQ ID NO: 2537461 - RNA, 19 nt, Artificial Sequence
  Description of Artificial Sequence: Synthetic oligonucleotide
agucacuccuaaagauggu

SEQ ID NO: 2537462 - RNA, 19 nt, Artificial Sequence
  Description of Artificial Sequence: Synthetic oligonucleotide
guaaguuggccuugaccau

SEQ ID NO: 2537463 - RNA, 19 nt, Artificial Sequence
  Description of Artificial Sequence: Synthetic oligonucleotide
auguagaaguuaagauuua

SEQ ID NO: 2537464 - RNA, 19 nt, Artificial Sequence
  Description of Artificial Sequence: Synthetic oligonucleotide
acagaacuugucacgucuu

SEQ ID NO: 2537465 - RNA, 19 nt, Artificial Sequence
  Description of Artificial Sequence: Synthetic oligonucleotide
agggagaaacuuggccacu

SEQ ID NO: 2537466 - RNA, 19 nt, Artificial Sequence
  Description of Artificial Sequence: Synthetic oligonucleotide
acacggucuaaaagcugcu

SEQ ID NO: 2537467 - RNA, 19 nt, Artificial Sequence
  Description of Artificial Sequence: Synthetic oligonucleotide
gucacgucuuugaaauuua

SEQ ID NO: 2537468 - RNA, 19 nt, Artificial Sequence
  Description of Artificial Sequence: Synthetic oligonucleotide
agucuguguuuaacauugu

SEQ ID NO: 2537469 - RNA, 19 nt, Artificial Sequence
  Description of Artificial Sequence: Synthetic oligonucleotide
ccuaaagaugguucuugaa

SEQ ID NO: 2537470 - RNA, 19 nt, Artificial Sequence
  Description of Artificial Sequence: Synthetic oligonucleotide
cuucguaaguuggccuuga

SEQ ID NO: 2537471 - RNA, 19 nt, Artificial Sequence
  Description of Artificial Sequence: Synthetic oligonucleotide
guaaucuuauuaagugguu

SEQ ID NO: 2537472 - RNA, 19 nt, Artificial Sequence
  Description of Artificial Sequence: Synthetic oligonucleotide
aggugaaguggcaucucuu

SEQ ID NO: 2537473 - RNA, 19 nt, Artificial Sequence
  Description of Artificial Sequence: Synthetic oligonucleotide
gcuuuugcauugagaaaga

SEQ ID NO: 2537474 - RNA, 19 nt, Artificial Sequence
  Description of Artificial Sequence: Synthetic oligonucleotide
cuugaccaugcuacuccua

SEQ ID NO: 2537475 - RNA, 19 nt, Artificial Sequence
  Description of Artificial Sequence: Synthetic oligonucleotide
cacuucguaaguuggccuu

SEQ ID NO: 2537476 - RNA, 19 nt, Artificial Sequence
  Description of Artificial Sequence: Synthetic oligonucleotide
cuguauuauggaguuuuau

SEQ ID NO: 2537477 - RNA, 19 nt, Artificial Sequence
  Description of Artificial Sequence: Synthetic oligonucleotide
gucacuccuaaagaugguu

SEQ ID NO: 2537478 - RNA, 19 nt, Artificial Sequence
  Description of Artificial Sequence: Synthetic oligonucleotide
gugguucuugaaacuguua

SEQ ID NO: 2537479 - RNA, 19 nt, Artificial Sequence
  Description of Artificial Sequence: Synthetic oligonucleotide
ggucuaaaagcugcuugcu

SEQ ID NO: 2537480 - RNA, 19 nt, Artificial Sequence
  Description of Artificial Sequence: Synthetic oligonucleotide
ggccacuguauuauggagu

SEQ ID NO: 2537481 - RNA, 19 nt, Artificial Sequence
  Description of Artificial Sequence: Synthetic oligonucleotide
gcauagguucaggugaagu

SEQ ID NO: 2537482 - RNA, 19 nt, Artificial Sequence
  Description of Artificial Sequence: Synthetic oligonucleotide
gccuaacugaagugucuaa

SEQ ID NO: 2537483 - RNA, 19 nt, Artificial Sequence
  Description of Artificial Sequence: Synthetic oligonucleotide
ggagaaacuuggccacugu

SEQ ID NO: 2537484 - RNA, 19 nt, Artificial Sequence
  Description of Artificial Sequence: Synthetic oligonucleotide
gccuucuacugcugugguc

SEQ ID NO: 2537485 - RNA, 19 nt, Artificial Sequence
  Description of Artificial Sequence: Synthetic oligonucleotide
cagagcucauauggguaaa

SEQ ID NO: 2537486 - RNA, 19 nt, Artificial Sequence
  Description of Artificial Sequence: Synthetic oligonucleotide
ggccuugaccaugcuacuc

SEQ ID NO: 2537487 - RNA, 19 nt, Artificial Sequence
  Description of Artificial Sequence: Synthetic oligonucleotide
acaucacaauagggagaaa

SEQ ID NO: 2537488 - RNA, 19 nt, Artificial Sequence
  Description of Artificial Sequence: Synthetic oligonucleotide
cagaacuugucacgucuuu

SEQ ID NO: 2537489 - RNA, 19 nt, Artificial Sequence
  Description of Artificial Sequence: Synthetic oligonucleotide
ccuaacugaagugucuaau

SEQ ID NO: 2537490 - RNA, 19 nt, Artificial Sequence
  Description of Artificial Sequence: Synthetic oligonucleotide
cagaggagacacggucuaa

SEQ ID NO: 2537491 - RNA, 19 nt, Artificial Sequence
  Description of Artificial Sequence: Synthetic oligonucleotide
cuucuacugcuguggucau

SEQ ID NO: 2537492 - RNA, 19 nt, Artificial Sequence
  Description of Artificial Sequence: Synthetic oligonucleotide
ccacuucguaaguuggccu

SEQ ID NO: 2537493 - RNA, 19 nt, Artificial Sequence
  Description of Artificial Sequence: Synthetic oligonucleotide
cacggucuaaaagcugcuu

SEQ ID NO: 2537494 - RNA, 19 nt, Artificial Sequence
  Description of Artificial Sequence: Synthetic oligonucleotide
ccacuguauuauggaguuu

SEQ ID NO: 2537495 - RNA, 19 nt, Artificial Sequence
  Description of Artificial Sequence: Synthetic oligonucleotide
uuaguucuaaauaucaaug

SEQ ID NO: 2537496 - RNA, 19 nt, Artificial Sequence
  Description of Artificial Sequence: Synthetic oligonucleotide
uguggaagacuucugaagg

SEQ ID NO: 2537497 - RNA, 19 nt, Artificial Sequence
  Description of Artificial Sequence: Synthetic oligonucleotide
cuaaauaucaaugugucac

SEQ ID NO: 2537498 - RNA, 19 nt, Artificial Sequence
  Description of Artificial Sequence: Synthetic oligonucleotide
aauaucaaugugucacaac

SEQ ID NO: 2537499 - RNA, 19 nt, Artificial Sequence
  Description of Artificial Sequence: Synthetic oligonucleotide
auaucaaugugucacaacu

SEQ ID NO: 2537500 - RNA, 19 nt, Artificial Sequence
  Description of Artificial Sequence: Synthetic oligonucleotide
ugugucacaacugagaacu

SEQ ID NO: 2537501 - RNA, 19 nt, Artificial Sequence
  Description of Artificial Sequence: Synthetic oligonucleotide
agcaguuccaucccuaggc

SEQ ID NO: 2537502 - RNA, 19 nt, Artificial Sequence
  Description of Artificial Sequence: Synthetic oligonucleotide
aaggucuucuucugguucc

SEQ ID NO: 2537503 - RNA, 19 nt, Artificial Sequence
  Description of Artificial Sequence: Synthetic oligonucleotide
ucuucagaacuaaaagggg

SEQ ID NO: 2537504 - RNA, 19 nt, Artificial Sequence
  Description of Artificial Sequence: Synthetic oligonucleotide
ucagaaucagaccagcccc

SEQ ID NO: 2537505 - RNA, 19 nt, Artificial Sequence
  Description of Artificial Sequence: Synthetic oligonucleotide
ugagaacuguccaagagca

SEQ ID NO: 2537506 - RNA, 19 nt, Artificial Sequence
  Description of Artificial Sequence: Synthetic oligonucleotide
gaaacagggguacuggagg

SEQ ID NO: 2537507 - RNA, 19 nt, Artificial Sequence
  Description of Artificial Sequence: Synthetic oligonucleotide
aguucuaaauaucaaugug

SEQ ID NO: 2537508 - RNA, 19 nt, Artificial Sequence
  Description of Artificial Sequence: Synthetic oligonucleotide
auccucagaaagcugagac

SEQ ID NO: 2537509 - RNA, 19 nt, Artificial Sequence
  Description of Artificial Sequence: Synthetic oligonucleotide
aaucagaccagccccagcu

SEQ ID NO: 2537510 - RNA, 19 nt, Artificial Sequence
  Description of Artificial Sequence: Synthetic oligonucleotide
aaaagcugacgagaucucc

SEQ ID NO: 2537511 - RNA, 19 nt, Artificial Sequence
  Description of Artificial Sequence: Synthetic oligonucleotide
cugggaagaacuuuagggg

SEQ ID NO: 2537512 - RNA, 19 nt, Artificial Sequence
  Description of Artificial Sequence: Synthetic oligonucleotide
uuuacuggcguuucaagcu

SEQ ID NO: 2537513 - RNA, 19 nt, Artificial Sequence
  Description of Artificial Sequence: Synthetic oligonucleotide
ugguuaguucuaaauauca

SEQ ID NO: 2537514 - RNA, 19 nt, Artificial Sequence
  Description of Artificial Sequence: Synthetic oligonucleotide
ugaggucucagaaucagac

SEQ ID NO: 2537515 - RNA, 19 nt, Artificial Sequence
  Description of Artificial Sequence: Synthetic oligonucleotide
aaacagggguacuggaggg

SEQ ID NO: 2537516 - RNA, 19 nt, Artificial Sequence
  Description of Artificial Sequence: Synthetic oligonucleotide
aaugcuuugagggcaaugu

SEQ ID NO: 2537517 - RNA, 19 nt, Artificial Sequence
  Description of Artificial Sequence: Synthetic oligonucleotide
uugaaugguauccugguua

SEQ ID NO: 2537518 - RNA, 19 nt, Artificial Sequence
  Description of Artificial Sequence: Synthetic oligonucleotide
uaguucuaaauaucaaugu

SEQ ID NO: 2537519 - RNA, 19 nt, Artificial Sequence
  Description of Artificial Sequence: Synthetic oligonucleotide
cuuuacuggcguuucaagc

SEQ ID NO: 2537520 - RNA, 19 nt, Artificial Sequence
  Description of Artificial Sequence: Synthetic oligonucleotide
ugaaugguauccugguuag

SEQ ID NO: 2537521 - RNA, 19 nt, Artificial Sequence
  Description of Artificial Sequence: Synthetic oligonucleotide
agacacacguugcacaagg

SEQ ID NO: 2537522 - RNA, 19 nt, Artificial Sequence
  Description of Artificial Sequence: Synthetic oligonucleotide
uaaauaucaaugugucaca

SEQ ID NO: 2537523 - RNA, 19 nt, Artificial Sequence
  Description of Artificial Sequence: Synthetic oligonucleotide
ucugugaggaacugucccg

SEQ ID NO: 2537524 - RNA, 19 nt, Artificial Sequence
  Description of Artificial Sequence: Synthetic oligonucleotide
uugaccaucgacugcacca

SEQ ID NO: 2537525 - RNA, 19 nt, Artificial Sequence
  Description of Artificial Sequence: Synthetic oligonucleotide
aucaaugugucacaacuga

SEQ ID NO: 2537526 - RNA, 19 nt, Artificial Sequence
  Description of Artificial Sequence: Synthetic oligonucleotide
ucuugguugaaugguaucc

SEQ ID NO: 2537527 - RNA, 19 nt, Artificial Sequence
  Description of Artificial Sequence: Synthetic oligonucleotide
gaaagcugagacuuccuug

SEQ ID NO: 2537528 - RNA, 19 nt, Artificial Sequence
  Description of Artificial Sequence: Synthetic oligonucleotide
aagacuucugaagggcagc

SEQ ID NO: 2537529 - RNA, 19 nt, Artificial Sequence
  Description of Artificial Sequence: Synthetic oligonucleotide
ugcuuugagggcaaugucu

SEQ ID NO: 2537530 - RNA, 19 nt, Artificial Sequence
  Description of Artificial Sequence: Synthetic oligonucleotide
aacacacugaccccuccag

SEQ ID NO: 2537531 - RNA, 19 nt, Artificial Sequence
  Description of Artificial Sequence: Synthetic oligonucleotide
uuaagaacacacugacccc

SEQ ID NO: 2537532 - RNA, 19 nt, Artificial Sequence
  Description of Artificial Sequence: Synthetic oligonucleotide
gaguaaaugcuuugagggc

SEQ ID NO: 2537533 - RNA, 19 nt, Artificial Sequence
  Description of Artificial Sequence: Synthetic oligonucleotide
auguaggggaacccggccc

SEQ ID NO: 2537534 - RNA, 19 nt, Artificial Sequence
  Description of Artificial Sequence: Synthetic oligonucleotide
ugugucucugaagagcggg

SEQ ID NO: 2537535 - RNA, 19 nt, Artificial Sequence
  Description of Artificial Sequence: Synthetic oligonucleotide
cugagaacuguccaagagc

SEQ ID NO: 2537536 - RNA, 19 nt, Artificial Sequence
  Description of Artificial Sequence: Synthetic oligonucleotide
aguaaaugcuuugagggca

SEQ ID NO: 2537537 - RNA, 19 nt, Artificial Sequence
  Description of Artificial Sequence: Synthetic oligonucleotide
uggauguaggggaacccgg

SEQ ID NO: 2537538 - RNA, 19 nt, Artificial Sequence
  Description of Artificial Sequence: Synthetic oligonucleotide
ucuuuacuggcguuucaag

SEQ ID NO: 2537539 - RNA, 19 nt, Artificial Sequence
  Description of Artificial Sequence: Synthetic oligonucleotide
acacacguugcacaagguc

SEQ ID NO: 2537540 - RNA, 19 nt, Artificial Sequence
  Description of Artificial Sequence: Synthetic oligonucleotide
ucacaacugagaacugucc

SEQ ID NO: 2537541 - RNA, 19 nt, Artificial Sequence
  Description of Artificial Sequence: Synthetic oligonucleotide
aaugguauccugguuaguu

SEQ ID NO: 2537542 - RNA, 19 nt, Artificial Sequence
  Description of Artificial Sequence: Synthetic oligonucleotide
augguauccugguuaguuc

SEQ ID NO: 2537543 - RNA, 19 nt, Artificial Sequence
  Description of Artificial Sequence: Synthetic oligonucleotide
acugucccgacugucaugg

SEQ ID NO: 2537544 - RNA, 19 nt, Artificial Sequence
  Description of Artificial Sequence: Synthetic oligonucleotide
uccaucccuaggcaggcgg

SEQ ID NO: 2537545 - RNA, 19 nt, Artificial Sequence
  Description of Artificial Sequence: Synthetic oligonucleotide
uuccucuucagaacuaaaa

SEQ ID NO: 2537546 - RNA, 19 nt, Artificial Sequence
  Description of Artificial Sequence: Synthetic oligonucleotide
aaggucauccuggucuugg

SEQ ID NO: 2537547 - RNA, 19 nt, Artificial Sequence
  Description of Artificial Sequence: Synthetic oligonucleotide
uccugguuaguucuaaaua

SEQ ID NO: 2537548 - RNA, 19 nt, Artificial Sequence
  Description of Artificial Sequence: Synthetic oligonucleotide
uuacuggcguuucaagcug

SEQ ID NO: 2537549 - RNA, 19 nt, Artificial Sequence
  Description of Artificial Sequence: Synthetic oligonucleotide
acucucauccucagaaagc

SEQ ID NO: 2537550 - RNA, 19 nt, Artificial Sequence
  Description of Artificial Sequence: Synthetic oligonucleotide
guggaagacuucugaaggg

SEQ ID NO: 2537551 - RNA, 19 nt, Artificial Sequence
  Description of Artificial Sequence: Synthetic oligonucleotide
augugucacaacugagaac

SEQ ID NO: 2537552 - RNA, 19 nt, Artificial Sequence
  Description of Artificial Sequence: Synthetic oligonucleotide
uaagaacacacugaccccu

SEQ ID NO: 2537553 - RNA, 19 nt, Artificial Sequence
  Description of Artificial Sequence: Synthetic oligonucleotide
aaauaucaaugugucacaa

SEQ ID NO: 2537554 - RNA, 19 nt, Artificial Sequence
  Description of Artificial Sequence: Synthetic oligonucleotide
ugguauccugguuaguucu

SEQ ID NO: 2537555 - RNA, 19 nt, Artificial Sequence
  Description of Artificial Sequence: Synthetic oligonucleotide
ucucagaaucagaccagcc

SEQ ID NO: 2537556 - RNA, 19 nt, Artificial Sequence
  Description of Artificial Sequence: Synthetic oligonucleotide
acuguccaagagcagagcu

SEQ ID NO: 2537557 - RNA, 19 nt, Artificial Sequence
  Description of Artificial Sequence: Synthetic oligonucleotide
uggcguuucaagcugcuuc

SEQ ID NO: 2537558 - RNA, 19 nt, Artificial Sequence
  Description of Artificial Sequence: Synthetic oligonucleotide
aacuguccaagagcagagc

SEQ ID NO: 2537559 - RNA, 19 nt, Artificial Sequence
  Description of Artificial Sequence: Synthetic oligonucleotide
uucugaagggcagcguugg

SEQ ID NO: 2537560 - RNA, 19 nt, Artificial Sequence
  Description of Artificial Sequence: Synthetic oligonucleotide
agaacuguccaagagcaga

SEQ ID NO: 2537561 - RNA, 19 nt, Artificial Sequence
  Description of Artificial Sequence: Synthetic oligonucleotide
cacucucauccucagaaag

SEQ ID NO: 2537562 - RNA, 19 nt, Artificial Sequence
  Description of Artificial Sequence: Synthetic oligonucleotide
cacacugaccccuccagag

SEQ ID NO: 2537563 - RNA, 19 nt, Artificial Sequence
  Description of Artificial Sequence: Synthetic oligonucleotide
ugagcaguuccaucccuag

SEQ ID NO: 2537564 - RNA, 19 nt, Artificial Sequence
  Description of Artificial Sequence: Synthetic oligonucleotide
ugacgagaucuccaaguca

SEQ ID NO: 2537565 - RNA, 19 nt, Artificial Sequence
  Description of Artificial Sequence: Synthetic oligonucleotide
gcuucgguggaguaaaugc

SEQ ID NO: 2537566 - RNA, 19 nt, Artificial Sequence
  Description of Artificial Sequence: Synthetic oligonucleotide
ugaagagcgggcguagaag

SEQ ID NO: 2537567 - RNA, 19 nt, Artificial Sequence
  Description of Artificial Sequence: Synthetic oligonucleotide
aacugagaacuguccaaga

SEQ ID NO: 2537568 - RNA, 19 nt, Artificial Sequence
  Description of Artificial Sequence: Synthetic oligonucleotide
uugguugaaugguauccug

SEQ ID NO: 2537569 - RNA, 19 nt, Artificial Sequence
  Description of Artificial Sequence: Synthetic oligonucleotide
uuugaccaucgacugcacc

SEQ ID NO: 2537570 - RNA, 19 nt, Artificial Sequence
  Description of Artificial Sequence: Synthetic oligonucleotide
uguaggggaacccggccca

SEQ ID NO: 2537571 - RNA, 19 nt, Artificial Sequence
  Description of Artificial Sequence: Synthetic oligonucleotide
aaagcugacgagaucucca

SEQ ID NO: 2537572 - RNA, 19 nt, Artificial Sequence
  Description of Artificial Sequence: Synthetic oligonucleotide
guuaguucuaaauaucaau

SEQ ID NO: 2537573 - RNA, 19 nt, Artificial Sequence
  Description of Artificial Sequence: Synthetic oligonucleotide
cugguuaguucuaaauauc

SEQ ID NO: 2537574 - RNA, 19 nt, Artificial Sequence
  Description of Artificial Sequence: Synthetic oligonucleotide
gagggcaaugucugugagg

SEQ ID NO: 2537575 - RNA, 19 nt, Artificial Sequence
  Description of Artificial Sequence: Synthetic oligonucleotide
gcugagacuuccuugcagg

SEQ ID NO: 2537576 - RNA, 19 nt, Artificial Sequence
  Description of Artificial Sequence: Synthetic oligonucleotide
gacugucauggauguaggg

SEQ ID NO: 2537577 - RNA, 19 nt, Artificial Sequence
  Description of Artificial Sequence: Synthetic oligonucleotide
aagucacucucauccucag

SEQ ID NO: 2537578 - RNA, 19 nt, Artificial Sequence
  Description of Artificial Sequence: Synthetic oligonucleotide
ugcugugucucugaagagc

SEQ ID NO: 2537579 - RNA, 19 nt, Artificial Sequence
  Description of Artificial Sequence: Synthetic oligonucleotide
cucauccucagaaagcuga

SEQ ID NO: 2537580 - RNA, 19 nt, Artificial Sequence
  Description of Artificial Sequence: Synthetic oligonucleotide
gauguaggggaacccggcc

SEQ ID NO: 2537581 - RNA, 19 nt, Artificial Sequence
  Description of Artificial Sequence: Synthetic oligonucleotide
aguuccaucccuaggcagg

SEQ ID NO: 2537582 - RNA, 19 nt, Artificial Sequence
  Description of Artificial Sequence: Synthetic oligonucleotide
caaugugucacaacugaga

SEQ ID NO: 2537583 - RNA, 19 nt, Artificial Sequence
  Description of Artificial Sequence: Synthetic oligonucleotide
ugucugugaggaacugucc

SEQ ID NO: 2537584 - RNA, 19 nt, Artificial Sequence
  Description of Artificial Sequence: Synthetic oligonucleotide
uggagagacacacguugca

SEQ ID NO: 2537585 - RNA, 19 nt, Artificial Sequence
  Description of Artificial Sequence: Synthetic oligonucleotide
acaacugagaacuguccaa

SEQ ID NO: 2537586 - RNA, 19 nt, Artificial Sequence
  Description of Artificial Sequence: Synthetic oligonucleotide
auggauguaggggaacccg

SEQ ID NO: 2537587 - RNA, 19 nt, Artificial Sequence
  Description of Artificial Sequence: Synthetic oligonucleotide
ugggcccuuaagaacacac

SEQ ID NO: 2537588 - RNA, 19 nt, Artificial Sequence
  Description of Artificial Sequence: Synthetic oligonucleotide
uccaagagcagagcuucgg

SEQ ID NO: 2537589 - RNA, 19 nt, Artificial Sequence
  Description of Artificial Sequence: Synthetic oligonucleotide
cacugaccccuccagaggg

SEQ ID NO: 2537590 - RNA, 19 nt, Artificial Sequence
  Description of Artificial Sequence: Synthetic oligonucleotide
gaacuguccaagagcagag

SEQ ID NO: 2537591 - RNA, 19 nt, Artificial Sequence
  Description of Artificial Sequence: Synthetic oligonucleotide
aaaugcuuugagggcaaug

SEQ ID NO: 2537592 - RNA, 19 nt, Artificial Sequence
  Description of Artificial Sequence: Synthetic oligonucleotide
cugucauggauguagggga

SEQ ID NO: 2537593 - RNA, 19 nt, Artificial Sequence
  Description of Artificial Sequence: Synthetic oligonucleotide
ucgacugcaccaguguucc

SEQ ID NO: 2537594 - RNA, 19 nt, Artificial Sequence
  Description of Artificial Sequence: Synthetic oligonucleotide
aacccggcccacugugagc

SEQ ID NO: 2537595 - RNA, 19 nt, Artificial Sequence
  Description of Artificial Sequence: Synthetic oligonucleotide
gagagacacacguugcaca

SEQ ID NO: 2537596 - RNA, 19 nt, Artificial Sequence
  Description of Artificial Sequence: Synthetic oligonucleotide
ugagggcaaugucugugag

SEQ ID NO: 2537597 - RNA, 19 nt, Artificial Sequence
  Description of Artificial Sequence: Synthetic oligonucleotide
augcuuugagggcaauguc

SEQ ID NO: 2537598 - RNA, 19 nt, Artificial Sequence
  Description of Artificial Sequence: Synthetic oligonucleotide
uccuggucuugguugaaug

SEQ ID NO: 2537599 - RNA, 19 nt, Artificial Sequence
  Description of Artificial Sequence: Synthetic oligonucleotide
accugggaagaacuuuagg

SEQ ID NO: 2537600 - RNA, 19 nt, Artificial Sequence
  Description of Artificial Sequence: Synthetic oligonucleotide
uugagggcaaugucuguga

SEQ ID NO: 2537601 - RNA, 19 nt, Artificial Sequence
  Description of Artificial Sequence: Synthetic oligonucleotide
cagagggcuucuuuacugg

SEQ ID NO: 2537602 - RNA, 19 nt, Artificial Sequence
  Description of Artificial Sequence: Synthetic oligonucleotide
guuucaagcugcuucucga

SEQ ID NO: 2537603 - RNA, 19 nt, Artificial Sequence
  Description of Artificial Sequence: Synthetic oligonucleotide
agcugagacuuccuugcag

SEQ ID NO: 2537604 - RNA, 19 nt, Artificial Sequence
  Description of Artificial Sequence: Synthetic oligonucleotide
caacugagaacuguccaag

SEQ ID NO: 2537605 - RNA, 19 nt, Artificial Sequence
  Description of Artificial Sequence: Synthetic oligonucleotide
ugaggaagccagcccaccu

SEQ ID NO: 2537606 - RNA, 19 nt, Artificial Sequence
  Description of Artificial Sequence: Synthetic oligonucleotide
agguguggaagacuucuga

SEQ ID NO: 2537607 - RNA, 19 nt, Artificial Sequence
  Description of Artificial Sequence: Synthetic oligonucleotide
gagacuuccuugcaggugu

SEQ ID NO: 2537608 - RNA, 19 nt, Artificial Sequence
  Description of Artificial Sequence: Synthetic oligonucleotide
gguacuggaggguccaugc

SEQ ID NO: 2537609 - RNA, 19 nt, Artificial Sequence
  Description of Artificial Sequence: Synthetic oligonucleotide
aagcugacgagaucuccaa

SEQ ID NO: 2537610 - RNA, 19 nt, Artificial Sequence
  Description of Artificial Sequence: Synthetic oligonucleotide
ugugagcaguuccaucccu

SEQ ID NO: 2537611 - RNA, 19 nt, Artificial Sequence
  Description of Artificial Sequence: Synthetic oligonucleotide
gaagccagcccaccugagc

SEQ ID NO: 2537612 - RNA, 19 nt, Artificial Sequence
  Description of Artificial Sequence: Synthetic oligonucleotide
uugcagguguggaagacuu

SEQ ID NO: 2537613 - RNA, 19 nt, Artificial Sequence
  Description of Artificial Sequence: Synthetic oligonucleotide
ggcccuuaagaacacacug

SEQ ID NO: 2537614 - RNA, 19 nt, Artificial Sequence
  Description of Artificial Sequence: Synthetic oligonucleotide
aggcaggcgguccugaacu

SEQ ID NO: 2537615 - RNA, 19 nt, Artificial Sequence
  Description of Artificial Sequence: Synthetic oligonucleotide
ugaccaucgacugcaccag

SEQ ID NO: 2537616 - RNA, 19 nt, Artificial Sequence
  Description of Artificial Sequence: Synthetic oligonucleotide
gacugcaccaguguuccug

SEQ ID NO: 2537617 - RNA, 19 nt, Artificial Sequence
  Description of Artificial Sequence: Synthetic oligonucleotide
cuucugaagggcagcguug

SEQ ID NO: 2537618 - RNA, 19 nt, Artificial Sequence
  Description of Artificial Sequence: Synthetic oligonucleotide
auccugguuaguucuaaau

SEQ ID NO: 2537619 - RNA, 19 nt, Artificial Sequence
  Description of Artificial Sequence: Synthetic oligonucleotide
agcguugggcccuuaagaa

SEQ ID NO: 2537620 - RNA, 19 nt, Artificial Sequence
  Description of Artificial Sequence: Synthetic oligonucleotide
guccaugcacucuggggcg

SEQ ID NO: 2537621 - RNA, 19 nt, Artificial Sequence
  Description of Artificial Sequence: Synthetic oligonucleotide
aagaacacacugaccccuc

SEQ ID NO: 2537622 - RNA, 19 nt, Artificial Sequence
  Description of Artificial Sequence: Synthetic oligonucleotide
agggcuucuuuacuggcgu

SEQ ID NO: 2537623 - RNA, 19 nt, Artificial Sequence
  Description of Artificial Sequence: Synthetic oligonucleotide
ucuggggugcagaccuggg

SEQ ID NO: 2537624 - RNA, 19 nt, Artificial Sequence
  Description of Artificial Sequence: Synthetic oligonucleotide
agaaagcugagacuuccuu

SEQ ID NO: 2537625 - RNA, 19 nt, Artificial Sequence
  Description of Artificial Sequence: Synthetic oligonucleotide
gaacccggcccacugugag

SEQ ID NO: 2537626 - RNA, 19 nt, Artificial Sequence
  Description of Artificial Sequence: Synthetic oligonucleotide
agacuucugaagggcagcg

SEQ ID NO: 2537627 - RNA, 19 nt, Artificial Sequence
  Description of Artificial Sequence: Synthetic oligonucleotide
ugucauggauguaggggaa

SEQ ID NO: 2537628 - RNA, 19 nt, Artificial Sequence
  Description of Artificial Sequence: Synthetic oligonucleotide
aacugucccgacugucaug

SEQ ID NO: 2537629 - RNA, 19 nt, Artificial Sequence
  Description of Artificial Sequence: Synthetic oligonucleotide
gcugugucucugaagagcg

SEQ ID NO: 2537630 - RNA, 19 nt, Artificial Sequence
  Description of Artificial Sequence: Synthetic oligonucleotide
ugagacuuccuugcaggug

SEQ ID NO: 2537631 - RNA, 19 nt, Artificial Sequence
  Description of Artificial Sequence: Synthetic oligonucleotide
uucuuuacuggcguuucaa

SEQ ID NO: 2537632 - RNA, 19 nt, Artificial Sequence
  Description of Artificial Sequence: Synthetic oligonucleotide
uacuggcguuucaagcugc

SEQ ID NO: 2537633 - RNA, 19 nt, Artificial Sequence
  Description of Artificial Sequence: Synthetic oligonucleotide
cugacgagaucuccaaguc

SEQ ID NO: 2537634 - RNA, 19 nt, Artificial Sequence
  Description of Artificial Sequence: Synthetic oligonucleotide
ugucccgacugucauggau

SEQ ID NO: 2537635 - RNA, 19 nt, Artificial Sequence
  Description of Artificial Sequence: Synthetic oligonucleotide
cuguucuccgucuggggug

SEQ ID NO: 2537636 - RNA, 19 nt, Artificial Sequence
  Description of Artificial Sequence: Synthetic oligonucleotide
agcuguucuccgucugggg

SEQ ID NO: 2537637 - RNA, 19 nt, Artificial Sequence
  Description of Artificial Sequence: Synthetic oligonucleotide
cacucuggggcguggaaug

SEQ ID NO: 2537638 - RNA, 19 nt, Artificial Sequence
  Description of Artificial Sequence: Synthetic oligonucleotide
guugcacaaggucuucuuc

SEQ ID NO: 2537639 - RNA, 19 nt, Artificial Sequence
  Description of Artificial Sequence: Synthetic oligonucleotide
cacacguugcacaaggucu

SEQ ID NO: 2537640 - RNA, 19 nt, Artificial Sequence
  Description of Artificial Sequence: Synthetic oligonucleotide
aucccuaggcaggcggucc

SEQ ID NO: 2537641 - RNA, 19 nt, Artificial Sequence
  Description of Artificial Sequence: Synthetic oligonucleotide
aggaagccagcccaccuga

SEQ ID NO: 2537642 - RNA, 19 nt, Artificial Sequence
  Description of Artificial Sequence: Synthetic oligonucleotide
acugcaccaguguuccuga

SEQ ID NO: 2537643 - RNA, 19 nt, Artificial Sequence
  Description of Artificial Sequence: Synthetic oligonucleotide
cuccagagggcuucuuuac

SEQ ID NO: 2537644 - RNA, 19 nt, Artificial Sequence
  Description of Artificial Sequence: Synthetic oligonucleotide
agagcuucgguggaguaaa

SEQ ID NO: 2537645 - RNA, 19 nt, Artificial Sequence
  Description of Artificial Sequence: Synthetic oligonucleotide
gucacaacugagaacuguc

SEQ ID NO: 2537646 - RNA, 19 nt, Artificial Sequence
  Description of Artificial Sequence: Synthetic oligonucleotide
uccucugaggucucagaau

SEQ ID NO: 2537647 - RNA, 19 nt, Artificial Sequence
  Description of Artificial Sequence: Synthetic oligonucleotide
agagcagagcuucggugga

SEQ ID NO: 2537648 - RNA, 19 nt, Artificial Sequence
  Description of Artificial Sequence: Synthetic oligonucleotide
cccuuaagaacacacugac

SEQ ID NO: 2537649 - RNA, 19 nt, Artificial Sequence
  Description of Artificial Sequence: Synthetic oligonucleotide
cauggauguaggggaaccc

SEQ ID NO: 2537650 - RNA, 19 nt, Artificial Sequence
  Description of Artificial Sequence: Synthetic oligonucleotide
uuuugaccaucgacugcac

SEQ ID NO: 2537651 - RNA, 19 nt, Artificial Sequence
  Description of Artificial Sequence: Synthetic oligonucleotide
ucgguggaguaaaugcuuu

SEQ ID NO: 2537652 - RNA, 19 nt, Artificial Sequence
  Description of Artificial Sequence: Synthetic oligonucleotide
uguucuccgucuggggugc

SEQ ID NO: 2537653 - RNA, 19 nt, Artificial Sequence
  Description of Artificial Sequence: Synthetic oligonucleotide
ggaaacagggguacuggag

SEQ ID NO: 2537654 - RNA, 19 nt, Artificial Sequence
  Description of Artificial Sequence: Synthetic oligonucleotide
gaacacacugaccccucca

SEQ ID NO: 2537655 - RNA, 19 nt, Artificial Sequence
  Description of Artificial Sequence: Synthetic oligonucleotide
uauccugguuaguucuaaa

SEQ ID NO: 2537656 - RNA, 19 nt, Artificial Sequence
  Description of Artificial Sequence: Synthetic oligonucleotide
agcugacgagaucuccaag

SEQ ID NO: 2537657 - RNA, 19 nt, Artificial Sequence
  Description of Artificial Sequence: Synthetic oligonucleotide
aggaacugucccgacuguc

SEQ ID NO: 2537658 - RNA, 19 nt, Artificial Sequence
  Description of Artificial Sequence: Synthetic oligonucleotide
ucccgacugucauggaugu

SEQ ID NO: 2537659 - RNA, 19 nt, Artificial Sequence
  Description of Artificial Sequence: Synthetic oligonucleotide
ccuggucuugguugaaugg

SEQ ID NO: 2537660 - RNA, 19 nt, Artificial Sequence
  Description of Artificial Sequence: Synthetic oligonucleotide
uaggcaggcgguccugaac

SEQ ID NO: 2537661 - RNA, 19 nt, Artificial Sequence
  Description of Artificial Sequence: Synthetic oligonucleotide
gucucagaaucagaccagc

SEQ ID NO: 2537662 - RNA, 19 nt, Artificial Sequence
  Description of Artificial Sequence: Synthetic oligonucleotide
gacacucuccucugagguc

SEQ ID NO: 2537663 - RNA, 19 nt, Artificial Sequence
  Description of Artificial Sequence: Synthetic oligonucleotide
ggaggguccaugcacucug

SEQ ID NO: 2537664 - RNA, 19 nt, Artificial Sequence
  Description of Artificial Sequence: Synthetic oligonucleotide
uccuugcagguguggaaga

SEQ ID NO: 2537665 - RNA, 19 nt, Artificial Sequence
  Description of Artificial Sequence: Synthetic oligonucleotide
agaaucagaccagccccag

SEQ ID NO: 2537666 - RNA, 19 nt, Artificial Sequence
  Description of Artificial Sequence: Synthetic oligonucleotide
gucccgacugucauggaug

SEQ ID NO: 2537667 - RNA, 19 nt, Artificial Sequence
  Description of Artificial Sequence: Synthetic oligonucleotide
aggggaaacagggguacug

SEQ ID NO: 2537668 - RNA, 19 nt, Artificial Sequence
  Description of Artificial Sequence: Synthetic oligonucleotide
ugugaggaacugucccgac

SEQ ID NO: 2537669 - RNA, 19 nt, Artificial Sequence
  Description of Artificial Sequence: Synthetic oligonucleotide
aacagggguacuggagggu

SEQ ID NO: 2537670 - RNA, 19 nt, Artificial Sequence
  Description of Artificial Sequence: Synthetic oligonucleotide
cugugucucugaagagcgg

SEQ ID NO: 2537671 - RNA, 19 nt, Artificial Sequence
  Description of Artificial Sequence: Synthetic oligonucleotide
gcuuugagggcaaugucug

SEQ ID NO: 2537672 - RNA, 19 nt, Artificial Sequence
  Description of Artificial Sequence: Synthetic oligonucleotide
ccgacugucauggauguag

SEQ ID NO: 2537673 - RNA, 19 nt, Artificial Sequence
  Description of Artificial Sequence: Synthetic oligonucleotide
gaccugggaagaacuuuag

SEQ ID NO: 2537674 - RNA, 19 nt, Artificial Sequence
  Description of Artificial Sequence: Synthetic oligonucleotide
acacacugaccccuccaga

SEQ ID NO: 2537675 - RNA, 19 nt, Artificial Sequence
  Description of Artificial Sequence: Synthetic oligonucleotide
gguccugaacuguauaaaa

SEQ ID NO: 2537676 - RNA, 19 nt, Artificial Sequence
  Description of Artificial Sequence: Synthetic oligonucleotide
ccaguguuccugaggaagc

SEQ ID NO: 2537677 - RNA, 19 nt, Artificial Sequence
  Description of Artificial Sequence: Synthetic oligonucleotide
gacuuccuugcaggugugg

SEQ ID NO: 2537678 - RNA, 19 nt, Artificial Sequence
  Description of Artificial Sequence: Synthetic oligonucleotide
agagcgggcguagaaggcu

SEQ ID NO: 2537679 - RNA, 19 nt, Artificial Sequence
  Description of Artificial Sequence: Synthetic oligonucleotide
acuggaggguccaugcacu

SEQ ID NO: 2537680 - RNA, 19 nt, Artificial Sequence
  Description of Artificial Sequence: Synthetic oligonucleotide
caguguuccugaggaagcc

SEQ ID NO: 2537681 - RNA, 19 nt, Artificial Sequence
  Description of Artificial Sequence: Synthetic oligonucleotide
guuccaucccuaggcaggc

SEQ ID NO: 2537682 - RNA, 19 nt, Artificial Sequence
  Description of Artificial Sequence: Synthetic oligonucleotide
cuucgguggaguaaaugcu

SEQ ID NO: 2537683 - RNA, 19 nt, Artificial Sequence
  Description of Artificial Sequence: Synthetic oligonucleotide
cagcguugggcccuuaaga

SEQ ID NO: 2537684 - RNA, 19 nt, Artificial Sequence
  Description of Artificial Sequence: Synthetic oligonucleotide
aagggcagcguugggcccu

SEQ ID NO: 2537685 - RNA, 19 nt, Artificial Sequence
  Description of Artificial Sequence: Synthetic oligonucleotide
cagaaucagaccagcccca

SEQ ID NO: 2537686 - RNA, 19 nt, Artificial Sequence
  Description of Artificial Sequence: Synthetic oligonucleotide
ucugaagagcgggcguaga

SEQ ID NO: 2537687 - RNA, 19 nt, Artificial Sequence
  Description of Artificial Sequence: Synthetic oligonucleotide
cagguguggaagacuucug

SEQ ID NO: 2537688 - RNA, 19 nt, Artificial Sequence
  Description of Artificial Sequence: Synthetic oligonucleotide
accaucgacugcaccagug

SEQ ID NO: 2537689 - RNA, 19 nt, Artificial Sequence
  Description of Artificial Sequence: Synthetic oligonucleotide
gguguggaagacuucugaa

SEQ ID NO: 2537690 - RNA, 19 nt, Artificial Sequence
  Description of Artificial Sequence: Synthetic oligonucleotide
gguggaguaaaugcuuuga

SEQ ID NO: 2537691 - RNA, 19 nt, Artificial Sequence
  Description of Artificial Sequence: Synthetic oligonucleotide
acucuggggcguggaaugg

SEQ ID NO: 2537692 - RNA, 19 nt, Artificial Sequence
  Description of Artificial Sequence: Synthetic oligonucleotide
ugcagguguggaagacuuc

SEQ ID NO: 2537693 - RNA, 19 nt, Artificial Sequence
  Description of Artificial Sequence: Synthetic oligonucleotide
ucccuaggcaggcgguccu

SEQ ID NO: 2537694 - RNA, 19 nt, Artificial Sequence
  Description of Artificial Sequence: Synthetic oligonucleotide
cguuucaagcugcuucucg

SEQ ID NO: 2537695 - RNA, 19 nt, Artificial Sequence
  Description of Artificial Sequence: Synthetic oligonucleotide
ucuccgucuggggugcaga

SEQ ID NO: 2537696 - RNA, 19 nt, Artificial Sequence
  Description of Artificial Sequence: Synthetic oligonucleotide
gguuaguucuaaauaucaa

SEQ ID NO: 2537697 - RNA, 19 nt, Artificial Sequence
  Description of Artificial Sequence: Synthetic oligonucleotide
cucugaagagcgggcguag

SEQ ID NO: 2537698 - RNA, 19 nt, Artificial Sequence
  Description of Artificial Sequence: Synthetic oligonucleotide
acccggcccacugugagca

SEQ ID NO: 2537699 - RNA, 19 nt, Artificial Sequence
  Description of Artificial Sequence: Synthetic oligonucleotide
ggcguagaaggcucugcug

SEQ ID NO: 2537700 - RNA, 19 nt, Artificial Sequence
  Description of Artificial Sequence: Synthetic oligonucleotide
cugaggaagccagcccacc

SEQ ID NO: 2537701 - RNA, 19 nt, Artificial Sequence
  Description of Artificial Sequence: Synthetic oligonucleotide
agcccaccugagcccuugc

SEQ ID NO: 2537702 - RNA, 19 nt, Artificial Sequence
  Description of Artificial Sequence: Synthetic oligonucleotide
cugaggucucagaaucaga

SEQ ID NO: 2537703 - RNA, 19 nt, Artificial Sequence
  Description of Artificial Sequence: Synthetic oligonucleotide
cucuggggcguggaauggg

SEQ ID NO: 2537704 - RNA, 19 nt, Artificial Sequence
  Description of Artificial Sequence: Synthetic oligonucleotide
guaaaugcuuugagggcaa

SEQ ID NO: 2537705 - RNA, 19 nt, Artificial Sequence
  Description of Artificial Sequence: Synthetic oligonucleotide
gcagcguugggcccuuaag

SEQ ID NO: 2537706 - RNA, 19 nt, Artificial Sequence
  Description of Artificial Sequence: Synthetic oligonucleotide
cugguuccucuucagaacu

SEQ ID NO: 2537707 - RNA, 19 nt, Artificial Sequence
  Description of Artificial Sequence: Synthetic oligonucleotide
uccgucuggggugcagacc

SEQ ID NO: 2537708 - RNA, 19 nt, Artificial Sequence
  Description of Artificial Sequence: Synthetic oligonucleotide
gcugacgagaucuccaagu

SEQ ID NO: 2537709 - RNA, 19 nt, Artificial Sequence
  Description of Artificial Sequence: Synthetic oligonucleotide
ggggugcagaccugggaag

SEQ ID NO: 2537710 - RNA, 19 nt, Artificial Sequence
  Description of Artificial Sequence: Synthetic oligonucleotide
uggaggguccaugcacucu

SEQ ID NO: 2537711 - RNA, 19 nt, Artificial Sequence
  Description of Artificial Sequence: Synthetic oligonucleotide
uuccaucccuaggcaggcg

SEQ ID NO: 2537712 - RNA, 19 nt, Artificial Sequence
  Description of Artificial Sequence: Synthetic oligonucleotide
ccugguuaguucuaaauau

SEQ ID NO: 2537713 - RNA, 19 nt, Artificial Sequence
  Description of Artificial Sequence: Synthetic oligonucleotide
ggauguaggggaacccggc

SEQ ID NO: 2537714 - RNA, 19 nt, Artificial Sequence
  Description of Artificial Sequence: Synthetic oligonucleotide
gucauggauguaggggaac

SEQ ID NO: 2537715 - RNA, 19 nt, Artificial Sequence
  Description of Artificial Sequence: Synthetic oligonucleotide
guacuggaggguccaugca

SEQ ID NO: 2537716 - RNA, 19 nt, Artificial Sequence
  Description of Artificial Sequence: Synthetic oligonucleotide
ggaacugucccgacuguca

SEQ ID NO: 2537717 - RNA, 19 nt, Artificial Sequence
  Description of Artificial Sequence: Synthetic oligonucleotide
cuccgucuggggugcagac

SEQ ID NO: 2537718 - RNA, 19 nt, Artificial Sequence
  Description of Artificial Sequence: Synthetic oligonucleotide
ggaagacuucugaagggca

SEQ ID NO: 2537719 - RNA, 19 nt, Artificial Sequence
  Description of Artificial Sequence: Synthetic oligonucleotide
cugaagagcgggcguagaa

SEQ ID NO: 2537720 - RNA, 19 nt, Artificial Sequence
  Description of Artificial Sequence: Synthetic oligonucleotide
guccaagagcagagcuucg

SEQ ID NO: 2537721 - RNA, 19 nt, Artificial Sequence
  Description of Artificial Sequence: Synthetic oligonucleotide
ggacacucuccucugaggu

SEQ ID NO: 2537722 - RNA, 19 nt, Artificial Sequence
  Description of Artificial Sequence: Synthetic oligonucleotide
cucuccucugaggucucag

SEQ ID NO: 2537723 - RNA, 19 nt, Artificial Sequence
  Description of Artificial Sequence: Synthetic oligonucleotide
cguugggcccuuaagaaca

SEQ ID NO: 2537724 - RNA, 19 nt, Artificial Sequence
  Description of Artificial Sequence: Synthetic oligonucleotide
gaacugucccgacugucau

SEQ ID NO: 2537725 - RNA, 19 nt, Artificial Sequence
  Description of Artificial Sequence: Synthetic oligonucleotide
cugugaggaacugucccga

SEQ ID NO: 2537726 - RNA, 19 nt, Artificial Sequence
  Description of Artificial Sequence: Synthetic oligonucleotide
caugcacucuggggcgugg

SEQ ID NO: 2537727 - RNA, 19 nt, Artificial Sequence
  Description of Artificial Sequence: Synthetic oligonucleotide
uucuccgucuggggugcag

SEQ ID NO: 2537728 - RNA, 19 nt, Artificial Sequence
  Description of Artificial Sequence: Synthetic oligonucleotide
cuugguugaaugguauccu

SEQ ID NO: 2537729 - RNA, 19 nt, Artificial Sequence
  Description of Artificial Sequence: Synthetic oligonucleotide
ccagcuguucuccgucugg

SEQ ID NO: 2537730 - RNA, 19 nt, Artificial Sequence
  Description of Artificial Sequence: Synthetic oligonucleotide
acacguugcacaaggucuu

SEQ ID NO: 2537731 - RNA, 19 nt, Artificial Sequence
  Description of Artificial Sequence: Synthetic oligonucleotide
gggaaacagggguacugga

SEQ ID NO: 2537732 - RNA, 19 nt, Artificial Sequence
  Description of Artificial Sequence: Synthetic oligonucleotide
guauccugguuaguucuaa

SEQ ID NO: 2537733 - RNA, 19 nt, Artificial Sequence
  Description of Artificial Sequence: Synthetic oligonucleotide
acguugcacaaggucuucu

SEQ ID NO: 2537734 - RNA, 19 nt, Artificial Sequence
  Description of Artificial Sequence: Synthetic oligonucleotide
gcguugggcccuuaagaac

SEQ ID NO: 2537735 - RNA, 19 nt, Artificial Sequence
  Description of Artificial Sequence: Synthetic oligonucleotide
gaccccuccagagggcuuc

SEQ ID NO: 2537736 - RNA, 19 nt, Artificial Sequence
  Description of Artificial Sequence: Synthetic oligonucleotide
agccccagcuguucuccgu

SEQ ID NO: 2537737 - RNA, 19 nt, Artificial Sequence
  Description of Artificial Sequence: Synthetic oligonucleotide
gcaguuccaucccuaggca

SEQ ID NO: 2537738 - RNA, 19 nt, Artificial Sequence
  Description of Artificial Sequence: Synthetic oligonucleotide
guugaaugguauccugguu

SEQ ID NO: 2537739 - RNA, 19 nt, Artificial Sequence
  Description of Artificial Sequence: Synthetic oligonucleotide
ggcguuucaagcugcuucu

SEQ ID NO: 2537740 - RNA, 19 nt, Artificial Sequence
  Description of Artificial Sequence: Synthetic oligonucleotide
uccaugcacucuggggcgu

SEQ ID NO: 2537741 - RNA, 19 nt, Artificial Sequence
  Description of Artificial Sequence: Synthetic oligonucleotide
cgacugucauggauguagg

SEQ ID NO: 2537742 - RNA, 19 nt, Artificial Sequence
  Description of Artificial Sequence: Synthetic oligonucleotide
uugggcccuuaagaacaca

SEQ ID NO: 2537743 - RNA, 19 nt, Artificial Sequence
  Description of Artificial Sequence: Synthetic oligonucleotide
guugggcccuuaagaacac

SEQ ID NO: 2537744 - RNA, 19 nt, Artificial Sequence
  Description of Artificial Sequence: Synthetic oligonucleotide
gcccuuaagaacacacuga

SEQ ID NO: 2537745 - RNA, 19 nt, Artificial Sequence
  Description of Artificial Sequence: Synthetic oligonucleotide
gugaggaacugucccgacu

SEQ ID NO: 2537746 - RNA, 19 nt, Artificial Sequence
  Description of Artificial Sequence: Synthetic oligonucleotide
cugcaccaguguuccugag

SEQ ID NO: 2537747 - RNA, 19 nt, Artificial Sequence
  Description of Artificial Sequence: Synthetic oligonucleotide
cuggucuugguugaauggu

SEQ ID NO: 2537748 - RNA, 19 nt, Artificial Sequence
  Description of Artificial Sequence: Synthetic oligonucleotide
gagcgggcguagaaggcuc

SEQ ID NO: 2537749 - RNA, 19 nt, Artificial Sequence
  Description of Artificial Sequence: Synthetic oligonucleotide
ggggugcucagcccaggcc

SEQ ID NO: 2537750 - RNA, 19 nt, Artificial Sequence
  Description of Artificial Sequence: Synthetic oligonucleotide
gugucacaacugagaacug

SEQ ID NO: 2537751 - RNA, 19 nt, Artificial Sequence
  Description of Artificial Sequence: Synthetic oligonucleotide
acuggcguuucaagcugcu

SEQ ID NO: 2537752 - RNA, 19 nt, Artificial Sequence
  Description of Artificial Sequence: Synthetic oligonucleotide
cccacugugagcaguucca

SEQ ID NO: 2537753 - RNA, 19 nt, Artificial Sequence
  Description of Artificial Sequence: Synthetic oligonucleotide
gggcuggagagacacacgu

SEQ ID NO: 2537754 - RNA, 19 nt, Artificial Sequence
  Description of Artificial Sequence: Synthetic oligonucleotide
gcgguccugaacuguauaa

SEQ ID NO: 2537755 - RNA, 19 nt, Artificial Sequence
  Description of Artificial Sequence: Synthetic oligonucleotide
cugagacuuccuugcaggu

SEQ ID NO: 2537756 - RNA, 19 nt, Artificial Sequence
  Description of Artificial Sequence: Synthetic oligonucleotide
acgagaucuccaagucacu

SEQ ID NO: 2537757 - RNA, 19 nt, Artificial Sequence
  Description of Artificial Sequence: Synthetic oligonucleotide
ccugaggaagccagcccac

SEQ ID NO: 2537758 - RNA, 19 nt, Artificial Sequence
  Description of Artificial Sequence: Synthetic oligonucleotide
caucccuaggcaggcgguc

SEQ ID NO: 2537759 - RNA, 19 nt, Artificial Sequence
  Description of Artificial Sequence: Synthetic oligonucleotide
gcuguucuccgucuggggu

SEQ ID NO: 2537760 - RNA, 19 nt, Artificial Sequence
  Description of Artificial Sequence: Synthetic oligonucleotide
ccaggggaaacagggguac

SEQ ID NO: 2537761 - RNA, 19 nt, Artificial Sequence
  Description of Artificial Sequence: Synthetic oligonucleotide
cuuugagggcaaugucugu

SEQ ID NO: 2537762 - RNA, 19 nt, Artificial Sequence
  Description of Artificial Sequence: Synthetic oligonucleotide
caaggucauccuggucuug

SEQ ID NO: 2537763 - RNA, 19 nt, Artificial Sequence
  Description of Artificial Sequence: Synthetic oligonucleotide
cacguugcacaaggucuuc

SEQ ID NO: 2537764 - RNA, 19 nt, Artificial Sequence
  Description of Artificial Sequence: Synthetic oligonucleotide
agacuuccuugcaggugug

SEQ ID NO: 2537765 - RNA, 19 nt, Artificial Sequence
  Description of Artificial Sequence: Synthetic oligonucleotide
gcagguguggaagacuucu

SEQ ID NO: 2537766 - RNA, 19 nt, Artificial Sequence
  Description of Artificial Sequence: Synthetic oligonucleotide
ggggcuggagagacacacg

SEQ ID NO: 2537767 - RNA, 19 nt, Artificial Sequence
  Description of Artificial Sequence: Synthetic oligonucleotide
uaggggaacccggcccacu

SEQ ID NO: 2537768 - RNA, 19 nt, Artificial Sequence
  Description of Artificial Sequence: Synthetic oligonucleotide
ugaccccuccagagggcuu

SEQ ID NO: 2537769 - RNA, 19 nt, Artificial Sequence
  Description of Artificial Sequence: Synthetic oligonucleotide
cagagcuucgguggaguaa

SEQ ID NO: 2537770 - RNA, 19 nt, Artificial Sequence
  Description of Artificial Sequence: Synthetic oligonucleotide
ggguacuggaggguccaug

SEQ ID NO: 2537771 - RNA, 19 nt, Artificial Sequence
  Description of Artificial Sequence: Synthetic oligonucleotide
cagaaagcugagacuuccu

SEQ ID NO: 2537772 - RNA, 19 nt, Artificial Sequence
  Description of Artificial Sequence: Synthetic oligonucleotide
caggcgguccugaacugua

SEQ ID NO: 2537773 - RNA, 19 nt, Artificial Sequence
  Description of Artificial Sequence: Synthetic oligonucleotide
cuguccaagagcagagcuu

SEQ ID NO: 2537774 - RNA, 19 nt, Artificial Sequence
  Description of Artificial Sequence: Synthetic oligonucleotide
ggcaggcgguccugaacug

SEQ ID NO: 2537775 - RNA, 19 nt, Artificial Sequence
  Description of Artificial Sequence: Synthetic oligonucleotide
gacacacguugcacaaggu

SEQ ID NO: 2537776 - RNA, 19 nt, Artificial Sequence
  Description of Artificial Sequence: Synthetic oligonucleotide
cuaggcaggcgguccugaa

SEQ ID NO: 2537777 - RNA, 19 nt, Artificial Sequence
  Description of Artificial Sequence: Synthetic oligonucleotide
cgagaucuccaagucacuc

SEQ ID NO: 2537778 - RNA, 19 nt, Artificial Sequence
  Description of Artificial Sequence: Synthetic oligonucleotide
gacuucugaagggcagcgu

SEQ ID NO: 2537779 - RNA, 19 nt, Artificial Sequence
  Description of Artificial Sequence: Synthetic oligonucleotide
ccucagaaagcugagacuu

SEQ ID NO: 2537780 - RNA, 19 nt, Artificial Sequence
  Description of Artificial Sequence: Synthetic oligonucleotide
gaccaucgacugcaccagu

SEQ ID NO: 2537781 - RNA, 19 nt, Artificial Sequence
  Description of Artificial Sequence: Synthetic oligonucleotide
augcacucuggggcgugga

SEQ ID NO: 2537782 - RNA, 19 nt, Artificial Sequence
  Description of Artificial Sequence: Synthetic oligonucleotide
gggugcagaccugggaaga

SEQ ID NO: 2537783 - RNA, 19 nt, Artificial Sequence
  Description of Artificial Sequence: Synthetic oligonucleotide
cgguggaguaaaugcuuug

SEQ ID NO: 2537784 - RNA, 19 nt, Artificial Sequence
  Description of Artificial Sequence: Synthetic oligonucleotide
caucgacugcaccaguguu

SEQ ID NO: 2537785 - RNA, 19 nt, Artificial Sequence
  Description of Artificial Sequence: Synthetic oligonucleotide
gcccaccugagcccuugcc

SEQ ID NO: 2537786 - RNA, 19 nt, Artificial Sequence
  Description of Artificial Sequence: Synthetic oligonucleotide
gggcguagaaggcucugcu

SEQ ID NO: 2537787 - RNA, 19 nt, Artificial Sequence
  Description of Artificial Sequence: Synthetic oligonucleotide
ccuccagagggcuucuuua

SEQ ID NO: 2537788 - RNA, 19 nt, Artificial Sequence
  Description of Artificial Sequence: Synthetic oligonucleotide
caccaguguuccugaggaa

SEQ ID NO: 2537789 - RNA, 19 nt, Artificial Sequence
  Description of Artificial Sequence: Synthetic oligonucleotide
ggucuugguugaaugguau

SEQ ID NO: 2537790 - RNA, 19 nt, Artificial Sequence
  Description of Artificial Sequence: Synthetic oligonucleotide
ggcgguccugaacuguaua

SEQ ID NO: 2537791 - RNA, 19 nt, Artificial Sequence
  Description of Artificial Sequence: Synthetic oligonucleotide
gguauccugguuaguucua

SEQ ID NO: 2537792 - RNA, 19 nt, Artificial Sequence
  Description of Artificial Sequence: Synthetic oligonucleotide
ccugagcccuugccagggg

SEQ ID NO: 2537793 - RNA, 19 nt, Artificial Sequence
  Description of Artificial Sequence: Synthetic oligonucleotide
ggugcagaccugggaagaa

SEQ ID NO: 2537794 - RNA, 19 nt, Artificial Sequence
  Description of Artificial Sequence: Synthetic oligonucleotide
ccgucuggggugcagaccu

SEQ ID NO: 2537795 - RNA, 19 nt, Artificial Sequence
  Description of Artificial Sequence: Synthetic oligonucleotide
cagaccugggaagaacuuu

SEQ ID NO: 2537796 - RNA, 19 nt, Artificial Sequence
  Description of Artificial Sequence: Synthetic oligonucleotide
aggcgguccugaacuguau

SEQ ID NO: 2537797 - RNA, 19 nt, Artificial Sequence
  Description of Artificial Sequence: Synthetic oligonucleotide
cugaccccuccagagggcu

SEQ ID NO: 2537798 - RNA, 19 nt, Artificial Sequence
  Description of Artificial Sequence: Synthetic oligonucleotide
ggaacccggcccacuguga

SEQ ID NO: 2537799 - RNA, 19 nt, Artificial Sequence
  Description of Artificial Sequence: Synthetic oligonucleotide
ggcagcguugggcccuuaa

SEQ ID NO: 2537800 - RNA, 19 nt, Artificial Sequence
  Description of Artificial Sequence: Synthetic oligonucleotide
cccaggggaaacaggggua

SEQ ID NO: 2537801 - RNA, 19 nt, Artificial Sequence
  Description of Artificial Sequence: Synthetic oligonucleotide
ccaucgacugcaccagugu

SEQ ID NO: 2537802 - RNA, 19 nt, Artificial Sequence
  Description of Artificial Sequence: Synthetic oligonucleotide
cugucccgacugucaugga

SEQ ID NO: 2537803 - RNA, 19 nt, Artificial Sequence
  Description of Artificial Sequence: Synthetic oligonucleotide
gggcccuuaagaacacacu

SEQ ID NO: 2537804 - RNA, 19 nt, Artificial Sequence
  Description of Artificial Sequence: Synthetic oligonucleotide
accccuccagagggcuucu

SEQ ID NO: 2537805 - RNA, 19 nt, Artificial Sequence
  Description of Artificial Sequence: Synthetic oligonucleotide
ggcuucuuuacuggcguuu

SEQ ID NO: 2537806 - RNA, 19 nt, Artificial Sequence
  Description of Artificial Sequence: Synthetic oligonucleotide
cagaccagccccagcuguu

SEQ ID NO: 2537807 - RNA, 19 nt, Artificial Sequence
  Description of Artificial Sequence: Synthetic oligonucleotide
gcguuucaagcugcuucuc

SEQ ID NO: 2537808 - RNA, 19 nt, Artificial Sequence
  Description of Artificial Sequence: Synthetic oligonucleotide
cgggcguagaaggcucugc

SEQ ID NO: 2537809 - RNA, 19 nt, Artificial Sequence
  Description of Artificial Sequence: Synthetic oligonucleotide
gcgggcguagaaggcucug

SEQ ID NO: 2537810 - RNA, 19 nt, Artificial Sequence
  Description of Artificial Sequence: Synthetic oligonucleotide
ccaugcacucuggggcgug

SEQ ID NO: 2537811 - RNA, 19 nt, Artificial Sequence
  Description of Artificial Sequence: Synthetic oligonucleotide
caggggaaacagggguacu

SEQ ID NO: 2537812 - RNA, 19 nt, Artificial Sequence
  Description of Artificial Sequence: Synthetic oligonucleotide
ggggaacccggcccacugu

SEQ ID NO: 2537813 - RNA, 19 nt, Artificial Sequence
  Description of Artificial Sequence: Synthetic oligonucleotide
ccuaggcaggcgguccuga

SEQ ID NO: 2537814 - RNA, 19 nt, Artificial Sequence
  Description of Artificial Sequence: Synthetic oligonucleotide
gagcuucgguggaguaaau

SEQ ID NO: 2537815 - RNA, 19 nt, Artificial Sequence
  Description of Artificial Sequence: Synthetic oligonucleotide
gcaggcgguccugaacugu

SEQ ID NO: 2537816 - RNA, 19 nt, Artificial Sequence
  Description of Artificial Sequence: Synthetic oligonucleotide
ggcccacugugagcaguuc

SEQ ID NO: 2537817 - RNA, 19 nt, Artificial Sequence
  Description of Artificial Sequence: Synthetic oligonucleotide
ccaucccuaggcaggcggu

SEQ ID NO: 2537818 - RNA, 19 nt, Artificial Sequence
  Description of Artificial Sequence: Synthetic oligonucleotide
cccuaggcaggcgguccug

SEQ ID NO: 2537819 - RNA, 19 nt, Artificial Sequence
  Description of Artificial Sequence: Synthetic oligonucleotide
gcagaccugggaagaacuu

SEQ ID NO: 2537820 - RNA, 19 nt, Artificial Sequence
  Description of Artificial Sequence: Synthetic oligonucleotide
cuggcguuucaagcugcuu

SEQ ID NO: 2537821 - RNA, 19 nt, Artificial Sequence
  Description of Artificial Sequence: Synthetic oligonucleotide
cguugcacaaggucuucuu

SEQ ID NO: 2537822 - RNA, 19 nt, Artificial Sequence
  Description of Artificial Sequence: Synthetic oligonucleotide
cccggcccacugugagcag

SEQ ID NO: 2537823 - RNA, 19 nt, Artificial Sequence
  Description of Artificial Sequence: Synthetic oligonucleotide
gggcuucuuuacuggcguu

SEQ ID NO: 2537824 - RNA, 19 nt, Artificial Sequence
  Description of Artificial Sequence: Synthetic oligonucleotide
ccggcccacugugagcagu

SEQ ID NO: 2537825 - RNA, 19 nt, Artificial Sequence
  Description of Artificial Sequence: Synthetic oligonucleotide
cccgacugucauggaugua

SEQ ID NO: 2537826 - RNA, 19 nt, Artificial Sequence
  Description of Artificial Sequence: Synthetic oligonucleotide
cggcccacugugagcaguu

SEQ ID NO: 2537827 - RNA, 19 nt, Artificial Sequence
  Description of Artificial Sequence: Synthetic oligonucleotide
cgacugcaccaguguuccu

SEQ ID NO: 2537828 - RNA, 19 nt, Artificial Sequence
  Description of Artificial Sequence: Synthetic oligonucleotide
ccccuccagagggcuucuu

SEQ ID NO: 2537829 - RNA, 19 nt, Artificial Sequence
  Description of Artificial Sequence: Synthetic oligonucleotide
auaaccaucaaccaggucg

SEQ ID NO: 2537830 - RNA, 19 nt, Artificial Sequence
  Description of Artificial Sequence: Synthetic oligonucleotide
auuuccauaaccaucaacc

SEQ ID NO: 2537831 - RNA, 19 nt, Artificial Sequence
  Description of Artificial Sequence: Synthetic oligonucleotide
agggauucauaauagaggc

SEQ ID NO: 2537832 - RNA, 19 nt, Artificial Sequence
  Description of Artificial Sequence: Synthetic oligonucleotide
uccauaaccaucaaccagg

SEQ ID NO: 2537833 - RNA, 19 nt, Artificial Sequence
  Description of Artificial Sequence: Synthetic oligonucleotide
uugauaauuuccauaacca

SEQ ID NO: 2537834 - RNA, 19 nt, Artificial Sequence
  Description of Artificial Sequence: Synthetic oligonucleotide
guugauaauuuccauaacc

SEQ ID NO: 2537835 - RNA, 19 nt, Artificial Sequence
  Description of Artificial Sequence: Synthetic oligonucleotide
uucucauugaccaggaccc

SEQ ID NO: 2537836 - RNA, 19 nt, Artificial Sequence
  Description of Artificial Sequence: Synthetic oligonucleotide
uagaggcugacauugaccg

SEQ ID NO: 2537837 - RNA, 19 nt, Artificial Sequence
  Description of Artificial Sequence: Synthetic oligonucleotide
aauagaggcugacauugac

SEQ ID NO: 2537838 - RNA, 19 nt, Artificial Sequence
  Description of Artificial Sequence: Synthetic oligonucleotide
aaagggauucauaauagag

SEQ ID NO: 2537839 - RNA, 19 nt, Artificial Sequence
  Description of Artificial Sequence: Synthetic oligonucleotide
uuauagcaaaccuuccugg

SEQ ID NO: 2537840 - RNA, 19 nt, Artificial Sequence
  Description of Artificial Sequence: Synthetic oligonucleotide
agagguuucucauugacca

SEQ ID NO: 2537841 - RNA, 19 nt, Artificial Sequence
  Description of Artificial Sequence: Synthetic oligonucleotide
uugaccaggacccagggca

SEQ ID NO: 2537842 - RNA, 19 nt, Artificial Sequence
  Description of Artificial Sequence: Synthetic oligonucleotide
acagaugucugguuucucc

SEQ ID NO: 2537843 - RNA, 19 nt, Artificial Sequence
  Description of Artificial Sequence: Synthetic oligonucleotide
auaauagaggcugacauug

SEQ ID NO: 2537844 - RNA, 19 nt, Artificial Sequence
  Description of Artificial Sequence: Synthetic oligonucleotide
ucacuuauagcaaaccuuc

SEQ ID NO: 2537845 - RNA, 19 nt, Artificial Sequence
  Description of Artificial Sequence: Synthetic oligonucleotide
uggagcauauaccugcagg

SEQ ID NO: 2537846 - RNA, 19 nt, Artificial Sequence
  Description of Artificial Sequence: Synthetic oligonucleotide
uaaccaucaaccaggucgg

SEQ ID NO: 2537847 - RNA, 19 nt, Artificial Sequence
  Description of Artificial Sequence: Synthetic oligonucleotide
gacauuucuuuccugcgcg

SEQ ID NO: 2537848 - RNA, 19 nt, Artificial Sequence
  Description of Artificial Sequence: Synthetic oligonucleotide
uauaccugcaggcacggcc

SEQ ID NO: 2537849 - RNA, 19 nt, Artificial Sequence
  Description of Artificial Sequence: Synthetic oligonucleotide
auaauuuccauaaccauca

SEQ ID NO: 2537850 - RNA, 19 nt, Artificial Sequence
  Description of Artificial Sequence: Synthetic oligonucleotide
agcauauaccugcaggcac

SEQ ID NO: 2537851 - RNA, 19 nt, Artificial Sequence
  Description of Artificial Sequence: Synthetic oligonucleotide
ggaaguaucgacaagcucc

SEQ ID NO: 2537852 - RNA, 19 nt, Artificial Sequence
  Description of Artificial Sequence: Synthetic oligonucleotide
auggcaggaacagagaccg

SEQ ID NO: 2537853 - RNA, 19 nt, Artificial Sequence
  Description of Artificial Sequence: Synthetic oligonucleotide
auagcaaaccuuccugggg

SEQ ID NO: 2537854 - RNA, 19 nt, Artificial Sequence
  Description of Artificial Sequence: Synthetic oligonucleotide
acaccucuggagcauauac

SEQ ID NO: 2537855 - RNA, 19 nt, Artificial Sequence
  Description of Artificial Sequence: Synthetic oligonucleotide
agaucgugggccuugcagg

SEQ ID NO: 2537856 - RNA, 19 nt, Artificial Sequence
  Description of Artificial Sequence: Synthetic oligonucleotide
uccgcaaagggauucauaa

SEQ ID NO: 2537857 - RNA, 19 nt, Artificial Sequence
  Description of Artificial Sequence: Synthetic oligonucleotide
ucauugaccaggacccagg

SEQ ID NO: 2537858 - RNA, 19 nt, Artificial Sequence
  Description of Artificial Sequence: Synthetic oligonucleotide
acguugauaauuuccauaa

SEQ ID NO: 2537859 - RNA, 19 nt, Artificial Sequence
  Description of Artificial Sequence: Synthetic oligonucleotide
uucacuuauagcaaaccuu

SEQ ID NO: 2537860 - RNA, 19 nt, Artificial Sequence
  Description of Artificial Sequence: Synthetic oligonucleotide
acgauggucagcaaggccg

SEQ ID NO: 2537861 - RNA, 19 nt, Artificial Sequence
  Description of Artificial Sequence: Synthetic oligonucleotide
cagacgauggucagcaagg

SEQ ID NO: 2537862 - RNA, 19 nt, Artificial Sequence
  Description of Artificial Sequence: Synthetic oligonucleotide
uaggguaccagcgugacgu

SEQ ID NO: 2537863 - RNA, 19 nt, Artificial Sequence
  Description of Artificial Sequence: Synthetic oligonucleotide
gaaguaucgacaagcuccg

SEQ ID NO: 2537864 - RNA, 19 nt, Artificial Sequence
  Description of Artificial Sequence: Synthetic oligonucleotide
acuuauagcaaaccuuccu

SEQ ID NO: 2537865 - RNA, 19 nt, Artificial Sequence
  Description of Artificial Sequence: Synthetic oligonucleotide
uuuccauaaccaucaacca

SEQ ID NO: 2537866 - RNA, 19 nt, Artificial Sequence
  Description of Artificial Sequence: Synthetic oligonucleotide
ugacacgugaacucccagg

SEQ ID NO: 2537867 - RNA, 19 nt, Artificial Sequence
  Description of Artificial Sequence: Synthetic oligonucleotide
accagcgugacguugauaa

SEQ ID NO: 2537868 - RNA, 19 nt, Artificial Sequence
  Description of Artificial Sequence: Synthetic oligonucleotide
cagcuuauccagcagacag

SEQ ID NO: 2537869 - RNA, 19 nt, Artificial Sequence
  Description of Artificial Sequence: Synthetic oligonucleotide
ugauaauuuccauaaccau

SEQ ID NO: 2537870 - RNA, 19 nt, Artificial Sequence
  Description of Artificial Sequence: Synthetic oligonucleotide
ugacauuucuuuccugcgc

SEQ ID NO: 2537871 - RNA, 19 nt, Artificial Sequence
  Description of Artificial Sequence: Synthetic oligonucleotide
auacucauggggcggcugc

SEQ ID NO: 2537872 - RNA, 19 nt, Artificial Sequence
  Description of Artificial Sequence: Synthetic oligonucleotide
cacgugaacucccaggugc

SEQ ID NO: 2537873 - RNA, 19 nt, Artificial Sequence
  Description of Artificial Sequence: Synthetic oligonucleotide
acagacgauggucagcaag

SEQ ID NO: 2537874 - RNA, 19 nt, Artificial Sequence
  Description of Artificial Sequence: Synthetic oligonucleotide
accucuggagcauauaccu

SEQ ID NO: 2537875 - RNA, 19 nt, Artificial Sequence
  Description of Artificial Sequence: Synthetic oligonucleotide
uucccguaggguaccagcg

SEQ ID NO: 2537876 - RNA, 19 nt, Artificial Sequence
  Description of Artificial Sequence: Synthetic oligonucleotide
ggauucauaauagaggcug

SEQ ID NO: 2537877 - RNA, 19 nt, Artificial Sequence
  Description of Artificial Sequence: Synthetic oligonucleotide
agcggagacacucuggcug

SEQ ID NO: 2537878 - RNA, 19 nt, Artificial Sequence
  Description of Artificial Sequence: Synthetic oligonucleotide
ucggguagaagcagcagca

SEQ ID NO: 2537879 - RNA, 19 nt, Artificial Sequence
  Description of Artificial Sequence: Synthetic oligonucleotide
agggcacauacucaugggg

SEQ ID NO: 2537880 - RNA, 19 nt, Artificial Sequence
  Description of Artificial Sequence: Synthetic oligonucleotide
cagaucucggaccaggaag

SEQ ID NO: 2537881 - RNA, 19 nt, Artificial Sequence
  Description of Artificial Sequence: Synthetic oligonucleotide
ucggaggacgcuugcagcg

SEQ ID NO: 2537882 - RNA, 19 nt, Artificial Sequence
  Description of Artificial Sequence: Synthetic oligonucleotide
uccaugaugcugucugggg

SEQ ID NO: 2537883 - RNA, 19 nt, Artificial Sequence
  Description of Artificial Sequence: Synthetic oligonucleotide
aguaucgacaagcuccgca

SEQ ID NO: 2537884 - RNA, 19 nt, Artificial Sequence
  Description of Artificial Sequence: Synthetic oligonucleotide
auucauaauagaggcugac

SEQ ID NO: 2537885 - RNA, 19 nt, Artificial Sequence
  Description of Artificial Sequence: Synthetic oligonucleotide
ucucggaccaggaaguauc

SEQ ID NO: 2537886 - RNA, 19 nt, Artificial Sequence
  Description of Artificial Sequence: Synthetic oligonucleotide
ucgggaacagaucucggac

SEQ ID NO: 2537887 - RNA, 19 nt, Artificial Sequence
  Description of Artificial Sequence: Synthetic oligonucleotide
aggaaguaucgacaagcuc

SEQ ID NO: 2537888 - RNA, 19 nt, Artificial Sequence
  Description of Artificial Sequence: Synthetic oligonucleotide
gaacagaucucggaccagg

SEQ ID NO: 2537889 - RNA, 19 nt, Artificial Sequence
  Description of Artificial Sequence: Synthetic oligonucleotide
ucgacaagcuccgcaaagg

SEQ ID NO: 2537890 - RNA, 19 nt, Artificial Sequence
  Description of Artificial Sequence: Synthetic oligonucleotide
ugucuggggacaccucugg

SEQ ID NO: 2537891 - RNA, 19 nt, Artificial Sequence
  Description of Artificial Sequence: Synthetic oligonucleotide
caugcugacacgugaacuc

SEQ ID NO: 2537892 - RNA, 19 nt, Artificial Sequence
  Description of Artificial Sequence: Synthetic oligonucleotide
agguuucucauugaccagg

SEQ ID NO: 2537893 - RNA, 19 nt, Artificial Sequence
  Description of Artificial Sequence: Synthetic oligonucleotide
ucugguuucuccacucccu

SEQ ID NO: 2537894 - RNA, 19 nt, Artificial Sequence
  Description of Artificial Sequence: Synthetic oligonucleotide
ucccugguacagcugacag

SEQ ID NO: 2537895 - RNA, 19 nt, Artificial Sequence
  Description of Artificial Sequence: Synthetic oligonucleotide
ucgugggccuugcaggugg

SEQ ID NO: 2537896 - RNA, 19 nt, Artificial Sequence
  Description of Artificial Sequence: Synthetic oligonucleotide
uccugcaucucuuccacac

SEQ ID NO: 2537897 - RNA, 19 nt, Artificial Sequence
  Description of Artificial Sequence: Synthetic oligonucleotide
ggagcauauaccugcaggc

SEQ ID NO: 2537898 - RNA, 19 nt, Artificial Sequence
  Description of Artificial Sequence: Synthetic oligonucleotide
caauggcaggaacagagac

SEQ ID NO: 2537899 - RNA, 19 nt, Artificial Sequence
  Description of Artificial Sequence: Synthetic oligonucleotide
caugaugcugucuggggac

SEQ ID NO: 2537900 - RNA, 19 nt, Artificial Sequence
  Description of Artificial Sequence: Synthetic oligonucleotide
cagagguuucucauugacc

SEQ ID NO: 2537901 - RNA, 19 nt, Artificial Sequence
  Description of Artificial Sequence: Synthetic oligonucleotide
aucgacaagcuccgcaaag

SEQ ID NO: 2537902 - RNA, 19 nt, Artificial Sequence
  Description of Artificial Sequence: Synthetic oligonucleotide
uuucuccacucccugguac

SEQ ID NO: 2537903 - RNA, 19 nt, Artificial Sequence
  Description of Artificial Sequence: Synthetic oligonucleotide
auaccugcaggcacggccc

SEQ ID NO: 2537904 - RNA, 19 nt, Artificial Sequence
  Description of Artificial Sequence: Synthetic oligonucleotide
augucugguuucuccacuc

SEQ ID NO: 2537905 - RNA, 19 nt, Artificial Sequence
  Description of Artificial Sequence: Synthetic oligonucleotide
augcugacacgugaacucc

SEQ ID NO: 2537906 - RNA, 19 nt, Artificial Sequence
  Description of Artificial Sequence: Synthetic oligonucleotide
uaauagaggcugacauuga

SEQ ID NO: 2537907 - RNA, 19 nt, Artificial Sequence
  Description of Artificial Sequence: Synthetic oligonucleotide
gacagugcucaggagcugg

SEQ ID NO: 2537908 - RNA, 19 nt, Artificial Sequence
  Description of Artificial Sequence: Synthetic oligonucleotide
ugcagcggagacacucugg

SEQ ID NO: 2537909 - RNA, 19 nt, Artificial Sequence
  Description of Artificial Sequence: Synthetic oligonucleotide
cugcaucucuuccacacag

SEQ ID NO: 2537910 - RNA, 19 nt, Artificial Sequence
  Description of Artificial Sequence: Synthetic oligonucleotide
uuucuuuccugcgcguucc

SEQ ID NO: 2537911 - RNA, 19 nt, Artificial Sequence
  Description of Artificial Sequence: Synthetic oligonucleotide
gacguugauaauuuccaua

SEQ ID NO: 2537912 - RNA, 19 nt, Artificial Sequence
  Description of Artificial Sequence: Synthetic oligonucleotide
aacagagaccggggcaugg

SEQ ID NO: 2537913 - RNA, 19 nt, Artificial Sequence
  Description of Artificial Sequence: Synthetic oligonucleotide
uuggcgugcaugagcugcg

SEQ ID NO: 2537914 - RNA, 19 nt, Artificial Sequence
  Description of Artificial Sequence: Synthetic oligonucleotide
cacuuauagcaaaccuucc

SEQ ID NO: 2537915 - RNA, 19 nt, Artificial Sequence
  Description of Artificial Sequence: Synthetic oligonucleotide
ucuggagcauauaccugca

SEQ ID NO: 2537916 - RNA, 19 nt, Artificial Sequence
  Description of Artificial Sequence: Synthetic oligonucleotide
agcaggcacagaucguggg

SEQ ID NO: 2537917 - RNA, 19 nt, Artificial Sequence
  Description of Artificial Sequence: Synthetic oligonucleotide
cuggggacaccucuggagc

SEQ ID NO: 2537918 - RNA, 19 nt, Artificial Sequence
  Description of Artificial Sequence: Synthetic oligonucleotide
ugagcugcgugccacgcuc

SEQ ID NO: 2537919 - RNA, 19 nt, Artificial Sequence
  Description of Artificial Sequence: Synthetic oligonucleotide
ggcacauacucauggggcg

SEQ ID NO: 2537920 - RNA, 19 nt, Artificial Sequence
  Description of Artificial Sequence: Synthetic oligonucleotide
aggucgggaacagaucucg

SEQ ID NO: 2537921 - RNA, 19 nt, Artificial Sequence
  Description of Artificial Sequence: Synthetic oligonucleotide
gacgauggucagcaaggcc

SEQ ID NO: 2537922 - RNA, 19 nt, Artificial Sequence
  Description of Artificial Sequence: Synthetic oligonucleotide
acacagacgauggucagca

SEQ ID NO: 2537923 - RNA, 19 nt, Artificial Sequence
  Description of Artificial Sequence: Synthetic oligonucleotide
cagaucgugggccuugcag

SEQ ID NO: 2537924 - RNA, 19 nt, Artificial Sequence
  Description of Artificial Sequence: Synthetic oligonucleotide
cauugaccaggacccaggg

SEQ ID NO: 2537925 - RNA, 19 nt, Artificial Sequence
  Description of Artificial Sequence: Synthetic oligonucleotide
guuggcgugcaugagcugc

SEQ ID NO: 2537926 - RNA, 19 nt, Artificial Sequence
  Description of Artificial Sequence: Synthetic oligonucleotide
caccucuggagcauauacc

SEQ ID NO: 2537927 - RNA, 19 nt, Artificial Sequence
  Description of Artificial Sequence: Synthetic oligonucleotide
gccacugacauuucuuucc

SEQ ID NO: 2537928 - RNA, 19 nt, Artificial Sequence
  Description of Artificial Sequence: Synthetic oligonucleotide
ucccaggugccacugacau

SEQ ID NO: 2537929 - RNA, 19 nt, Artificial Sequence
  Description of Artificial Sequence: Synthetic oligonucleotide
gagguuucucauugaccag

SEQ ID NO: 2537930 - RNA, 19 nt, Artificial Sequence
  Description of Artificial Sequence: Synthetic oligonucleotide
agacgauggucagcaaggc

SEQ ID NO: 2537931 - RNA, 19 nt, Artificial Sequence
  Description of Artificial Sequence: Synthetic oligonucleotide
gugacguugauaauuucca

SEQ ID NO: 2537932 - RNA, 19 nt, Artificial Sequence
  Description of Artificial Sequence: Synthetic oligonucleotide
guucccguaggguaccagc

SEQ ID NO: 2537933 - RNA, 19 nt, Artificial Sequence
  Description of Artificial Sequence: Synthetic oligonucleotide
cucggaccaggaaguaucg

SEQ ID NO: 2537934 - RNA, 19 nt, Artificial Sequence
  Description of Artificial Sequence: Synthetic oligonucleotide
guggcacacuccaugaugc

SEQ ID NO: 2537935 - RNA, 19 nt, Artificial Sequence
  Description of Artificial Sequence: Synthetic oligonucleotide
aagcuccgcaaagggauuc

SEQ ID NO: 2537936 - RNA, 19 nt, Artificial Sequence
  Description of Artificial Sequence: Synthetic oligonucleotide
ugggcguuggcgugcauga

SEQ ID NO: 2537937 - RNA, 19 nt, Artificial Sequence
  Description of Artificial Sequence: Synthetic oligonucleotide
gcaaagggauucauaauag

SEQ ID NO: 2537938 - RNA, 19 nt, Artificial Sequence
  Description of Artificial Sequence: Synthetic oligonucleotide
uccccaugcugacacguga

SEQ ID NO: 2537939 - RNA, 19 nt, Artificial Sequence
  Description of Artificial Sequence: Synthetic oligonucleotide
ugcugacacgugaacuccc

SEQ ID NO: 2537940 - RNA, 19 nt, Artificial Sequence
  Description of Artificial Sequence: Synthetic oligonucleotide
cagccugcacuccagcucc

SEQ ID NO: 2537941 - RNA, 19 nt, Artificial Sequence
  Description of Artificial Sequence: Synthetic oligonucleotide
uccuucagagguuucucau

SEQ ID NO: 2537942 - RNA, 19 nt, Artificial Sequence
  Description of Artificial Sequence: Synthetic oligonucleotide
uauccagcagacaggccuc

SEQ ID NO: 2537943 - RNA, 19 nt, Artificial Sequence
  Description of Artificial Sequence: Synthetic oligonucleotide
ccaggaaguaucgacaagc

SEQ ID NO: 2537944 - RNA, 19 nt, Artificial Sequence
  Description of Artificial Sequence: Synthetic oligonucleotide
aaccaggucgggaacagau

SEQ ID NO: 2537945 - RNA, 19 nt, Artificial Sequence
  Description of Artificial Sequence: Synthetic oligonucleotide
guaucgacaagcuccgcaa

SEQ ID NO: 2537946 - RNA, 19 nt, Artificial Sequence
  Description of Artificial Sequence: Synthetic oligonucleotide
agcuuauccagcagacagg

SEQ ID NO: 2537947 - RNA, 19 nt, Artificial Sequence
  Description of Artificial Sequence: Synthetic oligonucleotide
agaggcugacauugaccgg

SEQ ID NO: 2537948 - RNA, 19 nt, Artificial Sequence
  Description of Artificial Sequence: Synthetic oligonucleotide
caaagggauucauaauaga

SEQ ID NO: 2537949 - RNA, 19 nt, Artificial Sequence
  Description of Artificial Sequence: Synthetic oligonucleotide
gacacgugaacucccaggu

SEQ ID NO: 2537950 - RNA, 19 nt, Artificial Sequence
  Description of Artificial Sequence: Synthetic oligonucleotide
aaguaucgacaagcuccgc

SEQ ID NO: 2537951 - RNA, 19 nt, Artificial Sequence
  Description of Artificial Sequence: Synthetic oligonucleotide
ugcgcguucccguagggua

SEQ ID NO: 2537952 - RNA, 19 nt, Artificial Sequence
  Description of Artificial Sequence: Synthetic oligonucleotide
ggcaggaacagagaccggg

SEQ ID NO: 2537953 - RNA, 19 nt, Artificial Sequence
  Description of Artificial Sequence: Synthetic oligonucleotide
ugggccuugcagguggccg

SEQ ID NO: 2537954 - RNA, 19 nt, Artificial Sequence
  Description of Artificial Sequence: Synthetic oligonucleotide
ugacguugauaauuuccau

SEQ ID NO: 2537955 - RNA, 19 nt, Artificial Sequence
  Description of Artificial Sequence: Synthetic oligonucleotide
cugacauugaccggcggug

SEQ ID NO: 2537956 - RNA, 19 nt, Artificial Sequence
  Description of Artificial Sequence: Synthetic oligonucleotide
guagaagcagcagcagaag

SEQ ID NO: 2537957 - RNA, 19 nt, Artificial Sequence
  Description of Artificial Sequence: Synthetic oligonucleotide
aaggggcagcaauggcagg

SEQ ID NO: 2537958 - RNA, 19 nt, Artificial Sequence
  Description of Artificial Sequence: Synthetic oligonucleotide
cucggaggacgcuugcagc

SEQ ID NO: 2537959 - RNA, 19 nt, Artificial Sequence
  Description of Artificial Sequence: Synthetic oligonucleotide
gauucauaauagaggcuga

SEQ ID NO: 2537960 - RNA, 19 nt, Artificial Sequence
  Description of Artificial Sequence: Synthetic oligonucleotide
cgugacguugauaauuucc

SEQ ID NO: 2537961 - RNA, 19 nt, Artificial Sequence
  Description of Artificial Sequence: Synthetic oligonucleotide
accaggaaguaucgacaag

SEQ ID NO: 2537962 - RNA, 19 nt, Artificial Sequence
  Description of Artificial Sequence: Synthetic oligonucleotide
gacagacagugcucaggag

SEQ ID NO: 2537963 - RNA, 19 nt, Artificial Sequence
  Description of Artificial Sequence: Synthetic oligonucleotide
uccugcgcguucccguagg

SEQ ID NO: 2537964 - RNA, 19 nt, Artificial Sequence
  Description of Artificial Sequence: Synthetic oligonucleotide
ugcaucucuuccacacaga

SEQ ID NO: 2537965 - RNA, 19 nt, Artificial Sequence
  Description of Artificial Sequence: Synthetic oligonucleotide
gaccaggaaguaucgacaa

SEQ ID NO: 2537966 - RNA, 19 nt, Artificial Sequence
  Description of Artificial Sequence: Synthetic oligonucleotide
acagagaccggggcauggc

SEQ ID NO: 2537967 - RNA, 19 nt, Artificial Sequence
  Description of Artificial Sequence: Synthetic oligonucleotide
ugccauggaggaacagaug

SEQ ID NO: 2537968 - RNA, 19 nt, Artificial Sequence
  Description of Artificial Sequence: Synthetic oligonucleotide
agaucucggaccaggaagu

SEQ ID NO: 2537969 - RNA, 19 nt, Artificial Sequence
  Description of Artificial Sequence: Synthetic oligonucleotide
acgugaacucccaggugcc

SEQ ID NO: 2537970 - RNA, 19 nt, Artificial Sequence
  Description of Artificial Sequence: Synthetic oligonucleotide
uaucgacaagcuccgcaaa

SEQ ID NO: 2537971 - RNA, 19 nt, Artificial Sequence
  Description of Artificial Sequence: Synthetic oligonucleotide
cuuauccagcagacaggcc

SEQ ID NO: 2537972 - RNA, 19 nt, Artificial Sequence
  Description of Artificial Sequence: Synthetic oligonucleotide
gcauauaccugcaggcacg

SEQ ID NO: 2537973 - RNA, 19 nt, Artificial Sequence
  Description of Artificial Sequence: Synthetic oligonucleotide
cagacaggccuccaccuug

SEQ ID NO: 2537974 - RNA, 19 nt, Artificial Sequence
  Description of Artificial Sequence: Synthetic oligonucleotide
uugcagcggagacacucug

SEQ ID NO: 2537975 - RNA, 19 nt, Artificial Sequence
  Description of Artificial Sequence: Synthetic oligonucleotide
gcuuauccagcagacaggc

SEQ ID NO: 2537976 - RNA, 19 nt, Artificial Sequence
  Description of Artificial Sequence: Synthetic oligonucleotide
ugacauugaccggcggugc

SEQ ID NO: 2537977 - RNA, 19 nt, Artificial Sequence
  Description of Artificial Sequence: Synthetic oligonucleotide
agagaccggggcauggccg

SEQ ID NO: 2537978 - RNA, 19 nt, Artificial Sequence
  Description of Artificial Sequence: Synthetic oligonucleotide
auugaccggcggugcaggg

SEQ ID NO: 2537979 - RNA, 19 nt, Artificial Sequence
  Description of Artificial Sequence: Synthetic oligonucleotide
gagaccggggcauggccgc

SEQ ID NO: 2537980 - RNA, 19 nt, Artificial Sequence
  Description of Artificial Sequence: Synthetic oligonucleotide
cccgagcaggcacagaucg

SEQ ID NO: 2537981 - RNA, 19 nt, Artificial Sequence
  Description of Artificial Sequence: Synthetic oligonucleotide
aacagaucucggaccagga

SEQ ID NO: 2537982 - RNA, 19 nt, Artificial Sequence
  Description of Artificial Sequence: Synthetic oligonucleotide
ugcaugagcugcgugccac

SEQ ID NO: 2537983 - RNA, 19 nt, Artificial Sequence
  Description of Artificial Sequence: Synthetic oligonucleotide
guaggguaccagcgugacg

SEQ ID NO: 2537984 - RNA, 19 nt, Artificial Sequence
  Description of Artificial Sequence: Synthetic oligonucleotide
ugccacugacauuucuuuc

SEQ ID NO: 2537985 - RNA, 19 nt, Artificial Sequence
  Description of Artificial Sequence: Synthetic oligonucleotide
acauuucuuuccugcgcgu

SEQ ID NO: 2537986 - RNA, 19 nt, Artificial Sequence
  Description of Artificial Sequence: Synthetic oligonucleotide
uggggacaccucuggagca

SEQ ID NO: 2537987 - RNA, 19 nt, Artificial Sequence
  Description of Artificial Sequence: Synthetic oligonucleotide
aacgggcgcggcccgagca

SEQ ID NO: 2537988 - RNA, 19 nt, Artificial Sequence
  Description of Artificial Sequence: Synthetic oligonucleotide
uugaccggcggugcagggg

SEQ ID NO: 2537989 - RNA, 19 nt, Artificial Sequence
  Description of Artificial Sequence: Synthetic oligonucleotide
gagcauauaccugcaggca

SEQ ID NO: 2537990 - RNA, 19 nt, Artificial Sequence
  Description of Artificial Sequence: Synthetic oligonucleotide
cagaugucugguuucucca

SEQ ID NO: 2537991 - RNA, 19 nt, Artificial Sequence
  Description of Artificial Sequence: Synthetic oligonucleotide
acagaucucggaccaggaa

SEQ ID NO: 2537992 - RNA, 19 nt, Artificial Sequence
  Description of Artificial Sequence: Synthetic oligonucleotide
cagaaggggcagcaauggc

SEQ ID NO: 2537993 - RNA, 19 nt, Artificial Sequence
  Description of Artificial Sequence: Synthetic oligonucleotide
acacgugaacucccaggug

SEQ ID NO: 2537994 - RNA, 19 nt, Artificial Sequence
  Description of Artificial Sequence: Synthetic oligonucleotide
gucgggaacagaucucgga

SEQ ID NO: 2537995 - RNA, 19 nt, Artificial Sequence
  Description of Artificial Sequence: Synthetic oligonucleotide
acggcccuaguuucuucuc

SEQ ID NO: 2537996 - RNA, 19 nt, Artificial Sequence
  Description of Artificial Sequence: Synthetic oligonucleotide
gaugucugguuucuccacu

SEQ ID NO: 2537997 - RNA, 19 nt, Artificial Sequence
  Description of Artificial Sequence: Synthetic oligonucleotide
acauugaccggcggugcag

SEQ ID NO: 2537998 - RNA, 19 nt, Artificial Sequence
  Description of Artificial Sequence: Synthetic oligonucleotide
cauugaccggcggugcagg

SEQ ID NO: 2537999 - RNA, 19 nt, Artificial Sequence
  Description of Artificial Sequence: Synthetic oligonucleotide
uggucagcaaggccgccuc

SEQ ID NO: 2538000 - RNA, 19 nt, Artificial Sequence
  Description of Artificial Sequence: Synthetic oligonucleotide
gcagaaggggcagcaaugg

SEQ ID NO: 2538001 - RNA, 19 nt, Artificial Sequence
  Description of Artificial Sequence: Synthetic oligonucleotide
ucccguaggguaccagcgu

SEQ ID NO: 2538002 - RNA, 19 nt, Artificial Sequence
  Description of Artificial Sequence: Synthetic oligonucleotide
cagagaccggggcauggcc

SEQ ID NO: 2538003 - RNA, 19 nt, Artificial Sequence
  Description of Artificial Sequence: Synthetic oligonucleotide
gguagaagcagcagcagaa

SEQ ID NO: 2538004 - RNA, 19 nt, Artificial Sequence
  Description of Artificial Sequence: Synthetic oligonucleotide
gggaacagaucucggacca

SEQ ID NO: 2538005 - RNA, 19 nt, Artificial Sequence
  Description of Artificial Sequence: Synthetic oligonucleotide
gacauugaccggcggugca

SEQ ID NO: 2538006 - RNA, 19 nt, Artificial Sequence
  Description of Artificial Sequence: Synthetic oligonucleotide
gaugcugucuggggacacc

SEQ ID NO: 2538007 - RNA, 19 nt, Artificial Sequence
  Description of Artificial Sequence: Synthetic oligonucleotide
agacacucuggcugcucug

SEQ ID NO: 2538008 - RNA, 19 nt, Artificial Sequence
  Description of Artificial Sequence: Synthetic oligonucleotide
aucaaccaggucgggaaca

SEQ ID NO: 2538009 - RNA, 19 nt, Artificial Sequence
  Description of Artificial Sequence: Synthetic oligonucleotide
caucaaccaggucgggaac

SEQ ID NO: 2538010 - RNA, 19 nt, Artificial Sequence
  Description of Artificial Sequence: Synthetic oligonucleotide
cacauacucauggggcggc

SEQ ID NO: 2538011 - RNA, 19 nt, Artificial Sequence
  Description of Artificial Sequence: Synthetic oligonucleotide
gggcacauacucauggggc

SEQ ID NO: 2538012 - RNA, 19 nt, Artificial Sequence
  Description of Artificial Sequence: Synthetic oligonucleotide
aaccaucaaccaggucggg

SEQ ID NO: 2538013 - RNA, 19 nt, Artificial Sequence
  Description of Artificial Sequence: Synthetic oligonucleotide
cugacacgugaacucccag

SEQ ID NO: 2538014 - RNA, 19 nt, Artificial Sequence
  Description of Artificial Sequence: Synthetic oligonucleotide
uuccugcgcguucccguag

SEQ ID NO: 2538015 - RNA, 19 nt, Artificial Sequence
  Description of Artificial Sequence: Synthetic oligonucleotide
caggcacggcccuaguuuc

SEQ ID NO: 2538016 - RNA, 19 nt, Artificial Sequence
  Description of Artificial Sequence: Synthetic oligonucleotide
gcgugcaugagcugcgugc

SEQ ID NO: 2538017 - RNA, 19 nt, Artificial Sequence
  Description of Artificial Sequence: Synthetic oligonucleotide
cacacagacgauggucagc

SEQ ID NO: 2538018 - RNA, 19 nt, Artificial Sequence
  Description of Artificial Sequence: Synthetic oligonucleotide
cugucuggggacaccucug

SEQ ID NO: 2538019 - RNA, 19 nt, Artificial Sequence
  Description of Artificial Sequence: Synthetic oligonucleotide
agcaaggccgccuccuuuu

SEQ ID NO: 2538020 - RNA, 19 nt, Artificial Sequence
  Description of Artificial Sequence: Synthetic oligonucleotide
cuggagcauauaccugcag

SEQ ID NO: 2538021 - RNA, 19 nt, Artificial Sequence
  Description of Artificial Sequence: Synthetic oligonucleotide
ucggugagcugggcguugg

SEQ ID NO: 2538022 - RNA, 19 nt, Artificial Sequence
  Description of Artificial Sequence: Synthetic oligonucleotide
uuuccugcgcguucccgua

SEQ ID NO: 2538023 - RNA, 19 nt, Artificial Sequence
  Description of Artificial Sequence: Synthetic oligonucleotide
ggcguuggcgugcaugagc

SEQ ID NO: 2538024 - RNA, 19 nt, Artificial Sequence
  Description of Artificial Sequence: Synthetic oligonucleotide
uccagcuccccaugcugac

SEQ ID NO: 2538025 - RNA, 19 nt, Artificial Sequence
  Description of Artificial Sequence: Synthetic oligonucleotide
aacucccaggugccacuga

SEQ ID NO: 2538026 - RNA, 19 nt, Artificial Sequence
  Description of Artificial Sequence: Synthetic oligonucleotide
cagacagugcucaggagcu

SEQ ID NO: 2538027 - RNA, 19 nt, Artificial Sequence
  Description of Artificial Sequence: Synthetic oligonucleotide
caaggccgccuccuuuucc

SEQ ID NO: 2538028 - RNA, 19 nt, Artificial Sequence
  Description of Artificial Sequence: Synthetic oligonucleotide
caugagcugcgugccacgc

SEQ ID NO: 2538029 - RNA, 19 nt, Artificial Sequence
  Description of Artificial Sequence: Synthetic oligonucleotide
accaucaaccaggucggga

SEQ ID NO: 2538030 - RNA, 19 nt, Artificial Sequence
  Description of Artificial Sequence: Synthetic oligonucleotide
uggcaggaacagagaccgg

SEQ ID NO: 2538031 - RNA, 19 nt, Artificial Sequence
  Description of Artificial Sequence: Synthetic oligonucleotide
accaggucgggaacagauc

SEQ ID NO: 2538032 - RNA, 19 nt, Artificial Sequence
  Description of Artificial Sequence: Synthetic oligonucleotide
ucucauugaccaggaccca

SEQ ID NO: 2538033 - RNA, 19 nt, Artificial Sequence
  Description of Artificial Sequence: Synthetic oligonucleotide
ccuucacuuauagcaaacc

SEQ ID NO: 2538034 - RNA, 19 nt, Artificial Sequence
  Description of Artificial Sequence: Synthetic oligonucleotide
gggucugccauggaggaac

SEQ ID NO: 2538035 - RNA, 19 nt, Artificial Sequence
  Description of Artificial Sequence: Synthetic oligonucleotide
gacgcuugcagcggagaca

SEQ ID NO: 2538036 - RNA, 19 nt, Artificial Sequence
  Description of Artificial Sequence: Synthetic oligonucleotide
agcgugacguugauaauuu

SEQ ID NO: 2538037 - RNA, 19 nt, Artificial Sequence
  Description of Artificial Sequence: Synthetic oligonucleotide
gagacacucuggcugcucu

SEQ ID NO: 2538038 - RNA, 19 nt, Artificial Sequence
  Description of Artificial Sequence: Synthetic oligonucleotide
cauaauagaggcugacauu

SEQ ID NO: 2538039 - RNA, 19 nt, Artificial Sequence
  Description of Artificial Sequence: Synthetic oligonucleotide
gaucgugggccuugcaggu

SEQ ID NO: 2538040 - RNA, 19 nt, Artificial Sequence
  Description of Artificial Sequence: Synthetic oligonucleotide
aggcacagaucgugggccu

SEQ ID NO: 2538041 - RNA, 19 nt, Artificial Sequence
  Description of Artificial Sequence: Synthetic oligonucleotide
gcugggguccuucagaggu

SEQ ID NO: 2538042 - RNA, 19 nt, Artificial Sequence
  Description of Artificial Sequence: Synthetic oligonucleotide
ccuaguuucuucuccaugu

SEQ ID NO: 2538043 - RNA, 19 nt, Artificial Sequence
  Description of Artificial Sequence: Synthetic oligonucleotide
gaacucccaggugccacug

SEQ ID NO: 2538044 - RNA, 19 nt, Artificial Sequence
  Description of Artificial Sequence: Synthetic oligonucleotide
gcacauacucauggggcgg

SEQ ID NO: 2538045 - RNA, 19 nt, Artificial Sequence
  Description of Artificial Sequence: Synthetic oligonucleotide
augagcugcgugccacgcu

SEQ ID NO: 2538046 - RNA, 19 nt, Artificial Sequence
  Description of Artificial Sequence: Synthetic oligonucleotide
agcuccccaugcugacacg

SEQ ID NO: 2538047 - RNA, 19 nt, Artificial Sequence
  Description of Artificial Sequence: Synthetic oligonucleotide
ugcaggcacggcccuaguu

SEQ ID NO: 2538048 - RNA, 19 nt, Artificial Sequence
  Description of Artificial Sequence: Synthetic oligonucleotide
gaacagagaccggggcaug

SEQ ID NO: 2538049 - RNA, 19 nt, Artificial Sequence
  Description of Artificial Sequence: Synthetic oligonucleotide
ggaccaggaaguaucgaca

SEQ ID NO: 2538050 - RNA, 19 nt, Artificial Sequence
  Description of Artificial Sequence: Synthetic oligonucleotide
ugaugcugucuggggacac

SEQ ID NO: 2538051 - RNA, 19 nt, Artificial Sequence
  Description of Artificial Sequence: Synthetic oligonucleotide
caggucgggaacagaucuc

SEQ ID NO: 2538052 - RNA, 19 nt, Artificial Sequence
  Description of Artificial Sequence: Synthetic oligonucleotide
ucucuuccacacagacgau

SEQ ID NO: 2538053 - RNA, 19 nt, Artificial Sequence
  Description of Artificial Sequence: Synthetic oligonucleotide
caggaaguaucgacaagcu

SEQ ID NO: 2538054 - RNA, 19 nt, Artificial Sequence
  Description of Artificial Sequence: Synthetic oligonucleotide
uacucauggggcggcugca

SEQ ID NO: 2538055 - RNA, 19 nt, Artificial Sequence
  Description of Artificial Sequence: Synthetic oligonucleotide
cuccccaugcugacacgug

SEQ ID NO: 2538056 - RNA, 19 nt, Artificial Sequence
  Description of Artificial Sequence: Synthetic oligonucleotide
acucauggggcggcugcag

SEQ ID NO: 2538057 - RNA, 19 nt, Artificial Sequence
  Description of Artificial Sequence: Synthetic oligonucleotide
cgacaagcuccgcaaaggg

SEQ ID NO: 2538058 - RNA, 19 nt, Artificial Sequence
  Description of Artificial Sequence: Synthetic oligonucleotide
gcggagacacucuggcugc

SEQ ID NO: 2538059 - RNA, 19 nt, Artificial Sequence
  Description of Artificial Sequence: Synthetic oligonucleotide
cugggcguuggcgugcaug

SEQ ID NO: 2538060 - RNA, 19 nt, Artificial Sequence
  Description of Artificial Sequence: Synthetic oligonucleotide
gguaccagcgugacguuga

SEQ ID NO: 2538061 - RNA, 19 nt, Artificial Sequence
  Description of Artificial Sequence: Synthetic oligonucleotide
ggcacacuccaugaugcug

SEQ ID NO: 2538062 - RNA, 19 nt, Artificial Sequence
  Description of Artificial Sequence: Synthetic oligonucleotide
aggcugacauugaccggcg

SEQ ID NO: 2538063 - RNA, 19 nt, Artificial Sequence
  Description of Artificial Sequence: Synthetic oligonucleotide
acucccugguacagcugac

SEQ ID NO: 2538064 - RNA, 19 nt, Artificial Sequence
  Description of Artificial Sequence: Synthetic oligonucleotide
gauggucagcaaggccgcc

SEQ ID NO: 2538065 - RNA, 19 nt, Artificial Sequence
  Description of Artificial Sequence: Synthetic oligonucleotide
gugagcugggcguuggcgu

SEQ ID NO: 2538066 - RNA, 19 nt, Artificial Sequence
  Description of Artificial Sequence: Synthetic oligonucleotide
gacccagggcacauacuca

SEQ ID NO: 2538067 - RNA, 19 nt, Artificial Sequence
  Description of Artificial Sequence: Synthetic oligonucleotide
ucggaccaggaaguaucga

SEQ ID NO: 2538068 - RNA, 19 nt, Artificial Sequence
  Description of Artificial Sequence: Synthetic oligonucleotide
gcaugagcugcgugccacg

SEQ ID NO: 2538069 - RNA, 19 nt, Artificial Sequence
  Description of Artificial Sequence: Synthetic oligonucleotide
gaggacgcuugcagcggag

SEQ ID NO: 2538070 - RNA, 19 nt, Artificial Sequence
  Description of Artificial Sequence: Synthetic oligonucleotide
ccaucaaccaggucgggaa

SEQ ID NO: 2538071 - RNA, 19 nt, Artificial Sequence
  Description of Artificial Sequence: Synthetic oligonucleotide
ccucggaggacgcuugcag

SEQ ID NO: 2538072 - RNA, 19 nt, Artificial Sequence
  Description of Artificial Sequence: Synthetic oligonucleotide
aucucggaccaggaaguau

SEQ ID NO: 2538073 - RNA, 19 nt, Artificial Sequence
  Description of Artificial Sequence: Synthetic oligonucleotide
acagaucgugggccuugca

SEQ ID NO: 2538074 - RNA, 19 nt, Artificial Sequence
  Description of Artificial Sequence: Synthetic oligonucleotide
uaccugcaggcacggcccu

SEQ ID NO: 2538075 - RNA, 19 nt, Artificial Sequence
  Description of Artificial Sequence: Synthetic oligonucleotide
ugcugucuggggacaccuc

SEQ ID NO: 2538076 - RNA, 19 nt, Artificial Sequence
  Description of Artificial Sequence: Synthetic oligonucleotide
cacagaucgugggccuugc

SEQ ID NO: 2538077 - RNA, 19 nt, Artificial Sequence
  Description of Artificial Sequence: Synthetic oligonucleotide
ggccucggugagcugggcg

SEQ ID NO: 2538078 - RNA, 19 nt, Artificial Sequence
  Description of Artificial Sequence: Synthetic oligonucleotide
cuuuccugcgcguucccgu

SEQ ID NO: 2538079 - RNA, 19 nt, Artificial Sequence
  Description of Artificial Sequence: Synthetic oligonucleotide
gccgcagccucggaggacg

SEQ ID NO: 2538080 - RNA, 19 nt, Artificial Sequence
  Description of Artificial Sequence: Synthetic oligonucleotide
cgggaacagaucucggacc

SEQ ID NO: 2538081 - RNA, 19 nt, Artificial Sequence
  Description of Artificial Sequence: Synthetic oligonucleotide
aggccgccuccuuuuccag

SEQ ID NO: 2538082 - RNA, 19 nt, Artificial Sequence
  Description of Artificial Sequence: Synthetic oligonucleotide
ggacgcuugcagcggagac

SEQ ID NO: 2538083 - RNA, 19 nt, Artificial Sequence
  Description of Artificial Sequence: Synthetic oligonucleotide
uggggcggcugcagggccu

SEQ ID NO: 2538084 - RNA, 19 nt, Artificial Sequence
  Description of Artificial Sequence: Synthetic oligonucleotide
cguggcacacuccaugaug

SEQ ID NO: 2538085 - RNA, 19 nt, Artificial Sequence
  Description of Artificial Sequence: Synthetic oligonucleotide
caccuuguucagccugcac

SEQ ID NO: 2538086 - RNA, 19 nt, Artificial Sequence
  Description of Artificial Sequence: Synthetic oligonucleotide
gguuucucauugaccagga

SEQ ID NO: 2538087 - RNA, 19 nt, Artificial Sequence
  Description of Artificial Sequence: Synthetic oligonucleotide
cagccucggaggacgcuug

SEQ ID NO: 2538088 - RNA, 19 nt, Artificial Sequence
  Description of Artificial Sequence: Synthetic oligonucleotide
ggcccuaguuucuucucca

SEQ ID NO: 2538089 - RNA, 19 nt, Artificial Sequence
  Description of Artificial Sequence: Synthetic oligonucleotide
cuugcagcggagacacucu

SEQ ID NO: 2538090 - RNA, 19 nt, Artificial Sequence
  Description of Artificial Sequence: Synthetic oligonucleotide
agacagugcucaggagcug

SEQ ID NO: 2538091 - RNA, 19 nt, Artificial Sequence
  Description of Artificial Sequence: Synthetic oligonucleotide
cccuaguuucuucuccaug

SEQ ID NO: 2538092 - RNA, 19 nt, Artificial Sequence
  Description of Artificial Sequence: Synthetic oligonucleotide
agacaggccuccaccuugu

SEQ ID NO: 2538093 - RNA, 19 nt, Artificial Sequence
  Description of Artificial Sequence: Synthetic oligonucleotide
agcuccgcaaagggauuca

SEQ ID NO: 2538094 - RNA, 19 nt, Artificial Sequence
  Description of Artificial Sequence: Synthetic oligonucleotide
ccaugaugcugucugggga

SEQ ID NO: 2538095 - RNA, 19 nt, Artificial Sequence
  Description of Artificial Sequence: Synthetic oligonucleotide
gucuggggacaccucugga

SEQ ID NO: 2538096 - RNA, 19 nt, Artificial Sequence
  Description of Artificial Sequence: Synthetic oligonucleotide
acauacucauggggcggcu

SEQ ID NO: 2538097 - RNA, 19 nt, Artificial Sequence
  Description of Artificial Sequence: Synthetic oligonucleotide
aggacgcuugcagcggaga

SEQ ID NO: 2538098 - RNA, 19 nt, Artificial Sequence
  Description of Artificial Sequence: Synthetic oligonucleotide
cagguggccgcagccucgg

SEQ ID NO: 2538099 - RNA, 19 nt, Artificial Sequence
  Description of Artificial Sequence: Synthetic oligonucleotide
gggccuugcagguggccgc

SEQ ID NO: 2538100 - RNA, 19 nt, Artificial Sequence
  Description of Artificial Sequence: Synthetic oligonucleotide
gaccggggcauggccgcgg

SEQ ID NO: 2538101 - RNA, 19 nt, Artificial Sequence
  Description of Artificial Sequence: Synthetic oligonucleotide
ggucgggaacagaucucgg

SEQ ID NO: 2538102 - RNA, 19 nt, Artificial Sequence
  Description of Artificial Sequence: Synthetic oligonucleotide
ccacacagacgauggucag

SEQ ID NO: 2538103 - RNA, 19 nt, Artificial Sequence
  Description of Artificial Sequence: Synthetic oligonucleotide
gugccacugacauuucuuu

SEQ ID NO: 2538104 - RNA, 19 nt, Artificial Sequence
  Description of Artificial Sequence: Synthetic oligonucleotide
ggaacagaucucggaccag

SEQ ID NO: 2538105 - RNA, 19 nt, Artificial Sequence
  Description of Artificial Sequence: Synthetic oligonucleotide
ggcugacauugaccggcgg

SEQ ID NO: 2538106 - RNA, 19 nt, Artificial Sequence
  Description of Artificial Sequence: Synthetic oligonucleotide
cccguaggguaccagcgug

SEQ ID NO: 2538107 - RNA, 19 nt, Artificial Sequence
  Description of Artificial Sequence: Synthetic oligonucleotide
cucccaggugccacugaca

SEQ ID NO: 2538108 - RNA, 19 nt, Artificial Sequence
  Description of Artificial Sequence: Synthetic oligonucleotide
cguugauaauuuccauaac

SEQ ID NO: 2538109 - RNA, 19 nt, Artificial Sequence
  Description of Artificial Sequence: Synthetic oligonucleotide
aucgugggccuugcaggug

SEQ ID NO: 2538110 - RNA, 19 nt, Artificial Sequence
  Description of Artificial Sequence: Synthetic oligonucleotide
ggggcaacgggcgcggccc

SEQ ID NO: 2538111 - RNA, 19 nt, Artificial Sequence
  Description of Artificial Sequence: Synthetic oligonucleotide
gaggaacagaugucugguu

SEQ ID NO: 2538112 - RNA, 19 nt, Artificial Sequence
  Description of Artificial Sequence: Synthetic oligonucleotide
cgauggucagcaaggccgc

SEQ ID NO: 2538113 - RNA, 19 nt, Artificial Sequence
  Description of Artificial Sequence: Synthetic oligonucleotide
gagcugcgugccacgcucc

SEQ ID NO: 2538114 - RNA, 19 nt, Artificial Sequence
  Description of Artificial Sequence: Synthetic oligonucleotide
gcugacauugaccggcggu

SEQ ID NO: 2538115 - RNA, 19 nt, Artificial Sequence
  Description of Artificial Sequence: Synthetic oligonucleotide
cuccgcaaagggauucaua

SEQ ID NO: 2538116 - RNA, 19 nt, Artificial Sequence
  Description of Artificial Sequence: Synthetic oligonucleotide
cgugcaugagcugcgugcc

SEQ ID NO: 2538117 - RNA, 19 nt, Artificial Sequence
  Description of Artificial Sequence: Synthetic oligonucleotide
agaccggggcauggccgcg

SEQ ID NO: 2538118 - RNA, 19 nt, Artificial Sequence
  Description of Artificial Sequence: Synthetic oligonucleotide
gaucucggaccaggaagua

SEQ ID NO: 2538119 - RNA, 19 nt, Artificial Sequence
  Description of Artificial Sequence: Synthetic oligonucleotide
gcaauggcaggaacagaga

SEQ ID NO: 2538120 - RNA, 19 nt, Artificial Sequence
  Description of Artificial Sequence: Synthetic oligonucleotide
ggucagcaaggccgccucc

SEQ ID NO: 2538121 - RNA, 19 nt, Artificial Sequence
  Description of Artificial Sequence: Synthetic oligonucleotide
ggaggacgcuugcagcgga

SEQ ID NO: 2538122 - RNA, 19 nt, Artificial Sequence
  Description of Artificial Sequence: Synthetic oligonucleotide
ggcgugcaugagcugcgug

SEQ ID NO: 2538123 - RNA, 19 nt, Artificial Sequence
  Description of Artificial Sequence: Synthetic oligonucleotide
cacggcccuaguuucuucu

SEQ ID NO: 2538124 - RNA, 19 nt, Artificial Sequence
  Description of Artificial Sequence: Synthetic oligonucleotide
cucccugguacagcugaca

SEQ ID NO: 2538125 - RNA, 19 nt, Artificial Sequence
  Description of Artificial Sequence: Synthetic oligonucleotide
cugguacagcugacagaca

SEQ ID NO: 2538126 - RNA, 19 nt, Artificial Sequence
  Description of Artificial Sequence: Synthetic oligonucleotide
gacaccucuggagcauaua

SEQ ID NO: 2538127 - RNA, 19 nt, Artificial Sequence
  Description of Artificial Sequence: Synthetic oligonucleotide
ggaacagagaccggggcau

SEQ ID NO: 2538128 - RNA, 19 nt, Artificial Sequence
  Description of Artificial Sequence: Synthetic oligonucleotide
ggcauggccgcggaggaaa

SEQ ID NO: 2538129 - RNA, 19 nt, Artificial Sequence
  Description of Artificial Sequence: Synthetic oligonucleotide
gcagguggccgcagccucg

SEQ ID NO: 2538130 - RNA, 19 nt, Artificial Sequence
  Description of Artificial Sequence: Synthetic oligonucleotide
ggccgccuccuuuuccagc

SEQ ID NO: 2538131 - RNA, 19 nt, Artificial Sequence
  Description of Artificial Sequence: Synthetic oligonucleotide
cucggugagcugggcguug

SEQ ID NO: 2538132 - RNA, 19 nt, Artificial Sequence
  Description of Artificial Sequence: Synthetic oligonucleotide
ccccguggcacacuccaug

SEQ ID NO: 2538133 - RNA, 19 nt, Artificial Sequence
  Description of Artificial Sequence: Synthetic oligonucleotide
gaccaggacccagggcaca

SEQ ID NO: 2538134 - RNA, 19 nt, Artificial Sequence
  Description of Artificial Sequence: Synthetic oligonucleotide
ggguaccagcgugacguug

SEQ ID NO: 2538135 - RNA, 19 nt, Artificial Sequence
  Description of Artificial Sequence: Synthetic oligonucleotide
uggcgugcaugagcugcgu

SEQ ID NO: 2538136 - RNA, 19 nt, Artificial Sequence
  Description of Artificial Sequence: Synthetic oligonucleotide
gcacagaucgugggccuug

SEQ ID NO: 2538137 - RNA, 19 nt, Artificial Sequence
  Description of Artificial Sequence: Synthetic oligonucleotide
caacgggcgcggcccgagc

SEQ ID NO: 2538138 - RNA, 19 nt, Artificial Sequence
  Description of Artificial Sequence: Synthetic oligonucleotide
aggacccagggcacauacu

SEQ ID NO: 2538139 - RNA, 19 nt, Artificial Sequence
  Description of Artificial Sequence: Synthetic oligonucleotide
ccaggugccacugacauuu

SEQ ID NO: 2538140 - RNA, 19 nt, Artificial Sequence
  Description of Artificial Sequence: Synthetic oligonucleotide
accggggcauggccgcgga

SEQ ID NO: 2538141 - RNA, 19 nt, Artificial Sequence
  Description of Artificial Sequence: Synthetic oligonucleotide
gcugacacgugaacuccca

SEQ ID NO: 2538142 - RNA, 19 nt, Artificial Sequence
  Description of Artificial Sequence: Synthetic oligonucleotide
aggguaccagcgugacguu

SEQ ID NO: 2538143 - RNA, 19 nt, Artificial Sequence
  Description of Artificial Sequence: Synthetic oligonucleotide
ggggcauggccgcggagga

SEQ ID NO: 2538144 - RNA, 19 nt, Artificial Sequence
  Description of Artificial Sequence: Synthetic oligonucleotide
gggcagcaauggcaggaac

SEQ ID NO: 2538145 - RNA, 19 nt, Artificial Sequence
  Description of Artificial Sequence: Synthetic oligonucleotide
ggcccgagcaggcacagau

SEQ ID NO: 2538146 - RNA, 19 nt, Artificial Sequence
  Description of Artificial Sequence: Synthetic oligonucleotide
cagcgugacguugauaauu

SEQ ID NO: 2538147 - RNA, 19 nt, Artificial Sequence
  Description of Artificial Sequence: Synthetic oligonucleotide
ggggccucggguagaagca

SEQ ID NO: 2538148 - RNA, 19 nt, Artificial Sequence
  Description of Artificial Sequence: Synthetic oligonucleotide
caggugccacugacauuuc

SEQ ID NO: 2538149 - RNA, 19 nt, Artificial Sequence
  Description of Artificial Sequence: Synthetic oligonucleotide
ccugcaggcacggcccuag

SEQ ID NO: 2538150 - RNA, 19 nt, Artificial Sequence
  Description of Artificial Sequence: Synthetic oligonucleotide
ggccucggguagaagcagc

SEQ ID NO: 2538151 - RNA, 19 nt, Artificial Sequence
  Description of Artificial Sequence: Synthetic oligonucleotide
ccugcgcguucccguaggg

SEQ ID NO: 2538152 - RNA, 19 nt, Artificial Sequence
  Description of Artificial Sequence: Synthetic oligonucleotide
gugggccuugcagguggcc

SEQ ID NO: 2538153 - RNA, 19 nt, Artificial Sequence
  Description of Artificial Sequence: Synthetic oligonucleotide
gggauucauaauagaggcu

SEQ ID NO: 2538154 - RNA, 19 nt, Artificial Sequence
  Description of Artificial Sequence: Synthetic oligonucleotide
gcgugacguugauaauuuc

SEQ ID NO: 2538155 - RNA, 19 nt, Artificial Sequence
  Description of Artificial Sequence: Synthetic oligonucleotide
cccguggcacacuccauga

SEQ ID NO: 2538156 - RNA, 19 nt, Artificial Sequence
  Description of Artificial Sequence: Synthetic oligonucleotide
gccucggugagcugggcgu

SEQ ID NO: 2538157 - RNA, 19 nt, Artificial Sequence
  Description of Artificial Sequence: Synthetic oligonucleotide
gguacagcugacagacagu

SEQ ID NO: 2538158 - RNA, 19 nt, Artificial Sequence
  Description of Artificial Sequence: Synthetic oligonucleotide
agcugggcguuggcgugca

SEQ ID NO: 2538159 - RNA, 19 nt, Artificial Sequence
  Description of Artificial Sequence: Synthetic oligonucleotide
cauuucuuuccugcgcguu

SEQ ID NO: 2538160 - RNA, 19 nt, Artificial Sequence
  Description of Artificial Sequence: Synthetic oligonucleotide
gcguuggcgugcaugagcu

SEQ ID NO: 2538161 - RNA, 19 nt, Artificial Sequence
  Description of Artificial Sequence: Synthetic oligonucleotide
caaccaggucgggaacaga

SEQ ID NO: 2538162 - RNA, 19 nt, Artificial Sequence
  Description of Artificial Sequence: Synthetic oligonucleotide
cguaggguaccagcgugac

SEQ ID NO: 2538163 - RNA, 19 nt, Artificial Sequence
  Description of Artificial Sequence: Synthetic oligonucleotide
cccugguacagcugacaga

SEQ ID NO: 2538164 - RNA, 19 nt, Artificial Sequence
  Description of Artificial Sequence: Synthetic oligonucleotide
gcaaggccgccuccuuuuc

SEQ ID NO: 2538165 - RNA, 19 nt, Artificial Sequence
  Description of Artificial Sequence: Synthetic oligonucleotide
ccauaaccaucaaccaggu

SEQ ID NO: 2538166 - RNA, 19 nt, Artificial Sequence
  Description of Artificial Sequence: Synthetic oligonucleotide
ccguaggguaccagcguga

SEQ ID NO: 2538167 - RNA, 19 nt, Artificial Sequence
  Description of Artificial Sequence: Synthetic oligonucleotide
gggcaacgggcgcggcccg

SEQ ID NO: 2538168 - RNA, 19 nt, Artificial Sequence
  Description of Artificial Sequence: Synthetic oligonucleotide
cacagacgauggucagcaa

SEQ ID NO: 2538169 - RNA, 19 nt, Artificial Sequence
  Description of Artificial Sequence: Synthetic oligonucleotide
caagcuccgcaaagggauu

SEQ ID NO: 2538170 - RNA, 19 nt, Artificial Sequence
  Description of Artificial Sequence: Synthetic oligonucleotide
gcgcguucccguaggguac

SEQ ID NO: 2538171 - RNA, 19 nt, Artificial Sequence
  Description of Artificial Sequence: Synthetic oligonucleotide
ccacugacauuucuuuccu

SEQ ID NO: 2538172 - RNA, 19 nt, Artificial Sequence
  Description of Artificial Sequence: Synthetic oligonucleotide
gcaacgggcgcggcccgag

SEQ ID NO: 2538173 - RNA, 19 nt, Artificial Sequence
  Description of Artificial Sequence: Synthetic oligonucleotide
gcugcgugccacgcucccc

SEQ ID NO: 2538174 - RNA, 19 nt, Artificial Sequence
  Description of Artificial Sequence: Synthetic oligonucleotide
guaccagcgugacguugau

SEQ ID NO: 2538175 - RNA, 19 nt, Artificial Sequence
  Description of Artificial Sequence: Synthetic oligonucleotide
ccaugcugacacgugaacu

SEQ ID NO: 2538176 - RNA, 19 nt, Artificial Sequence
  Description of Artificial Sequence: Synthetic oligonucleotide
ccagcuuauccagcagaca

SEQ ID NO: 2538177 - RNA, 19 nt, Artificial Sequence
  Description of Artificial Sequence: Synthetic oligonucleotide
gcacggcccuaguuucuuc

SEQ ID NO: 2538178 - RNA, 19 nt, Artificial Sequence
  Description of Artificial Sequence: Synthetic oligonucleotide
cggaggacgcuugcagcgg

SEQ ID NO: 2538179 - RNA, 19 nt, Artificial Sequence
  Description of Artificial Sequence: Synthetic oligonucleotide
ccccaugcugacacgugaa

SEQ ID NO: 2538180 - RNA, 19 nt, Artificial Sequence
  Description of Artificial Sequence: Synthetic oligonucleotide
gcgcggcccgagcaggcac

SEQ ID NO: 2538181 - RNA, 19 nt, Artificial Sequence
  Description of Artificial Sequence: Synthetic oligonucleotide
ggccuugcagguggccgca

SEQ ID NO: 2538182 - RNA, 19 nt, Artificial Sequence
  Description of Artificial Sequence: Synthetic oligonucleotide
cgugggccuugcagguggc

SEQ ID NO: 2538183 - RNA, 19 nt, Artificial Sequence
  Description of Artificial Sequence: Synthetic oligonucleotide
cagcaaggccgccuccuuu

SEQ ID NO: 2538184 - RNA, 19 nt, Artificial Sequence
  Description of Artificial Sequence: Synthetic oligonucleotide
cguuggcgugcaugagcug

SEQ ID NO: 2538185 - RNA, 19 nt, Artificial Sequence
  Description of Artificial Sequence: Synthetic oligonucleotide
gcccgagcaggcacagauc

SEQ ID NO: 2538186 - RNA, 19 nt, Artificial Sequence
  Description of Artificial Sequence: Synthetic oligonucleotide
cgcguucccguaggguacc

SEQ ID NO: 2538187 - RNA, 19 nt, Artificial Sequence
  Description of Artificial Sequence: Synthetic oligonucleotide
cugcgcguucccguagggu

SEQ ID NO: 2538188 - RNA, 19 nt, Artificial Sequence
  Description of Artificial Sequence: Synthetic oligonucleotide
gcccuaguuucuucuccau

SEQ ID NO: 2538189 - RNA, 19 nt, Artificial Sequence
  Description of Artificial Sequence: Synthetic oligonucleotide
ccgcagccucggaggacgc

SEQ ID NO: 2538190 - RNA, 19 nt, Artificial Sequence
  Description of Artificial Sequence: Synthetic oligonucleotide
ccgcaaagggauucauaau

SEQ ID NO: 2538191 - RNA, 19 nt, Artificial Sequence
  Description of Artificial Sequence: Synthetic oligonucleotide
gccuugcagguggccgcag

SEQ ID NO: 2538192 - RNA, 19 nt, Artificial Sequence
  Description of Artificial Sequence: Synthetic oligonucleotide
ggccgcagccucggaggac

SEQ ID NO: 2538193 - RNA, 19 nt, Artificial Sequence
  Description of Artificial Sequence: Synthetic oligonucleotide
ggggucugccauggaggaa

SEQ ID NO: 2538194 - RNA, 19 nt, Artificial Sequence
  Description of Artificial Sequence: Synthetic oligonucleotide
gcagccucggaggacgcuu

SEQ ID NO: 2538195 - RNA, 19 nt, Artificial Sequence
  Description of Artificial Sequence: Synthetic oligonucleotide
ccaccuuguucagccugca

SEQ ID NO: 2538196 - RNA, 19 nt, Artificial Sequence
  Description of Artificial Sequence: Synthetic oligonucleotide
gcauggccgcggaggaaaa

SEQ ID NO: 2538197 - RNA, 19 nt, Artificial Sequence
  Description of Artificial Sequence: Synthetic oligonucleotide
ggacaccucuggagcauau

SEQ ID NO: 2538198 - RNA, 19 nt, Artificial Sequence
  Description of Artificial Sequence: Synthetic oligonucleotide
ggcgcggcccgagcaggca

SEQ ID NO: 2538199 - RNA, 19 nt, Artificial Sequence
  Description of Artificial Sequence: Synthetic oligonucleotide
gcggcugcagggccucggu

SEQ ID NO: 2538200 - RNA, 19 nt, Artificial Sequence
  Description of Artificial Sequence: Synthetic oligonucleotide
ccggggcauggccgcggag

SEQ ID NO: 2538201 - RNA, 19 nt, Artificial Sequence
  Description of Artificial Sequence: Synthetic oligonucleotide
ggcaacgggcgcggcccga

SEQ ID NO: 2538202 - RNA, 19 nt, Artificial Sequence
  Description of Artificial Sequence: Synthetic oligonucleotide
cugcaggcacggcccuagu

SEQ ID NO: 2538203 - RNA, 19 nt, Artificial Sequence
  Description of Artificial Sequence: Synthetic oligonucleotide
ggcacggcccuaguuucuu

SEQ ID NO: 2538204 - RNA, 19 nt, Artificial Sequence
  Description of Artificial Sequence: Synthetic oligonucleotide
gcuccgcaaagggauucau

SEQ ID NO: 2538205 - RNA, 19 nt, Artificial Sequence
  Description of Artificial Sequence: Synthetic oligonucleotide
ccagcgugacguugauaau

SEQ ID NO: 2538206 - RNA, 19 nt, Artificial Sequence
  Description of Artificial Sequence: Synthetic oligonucleotide
gggcauggccgcggaggaa

SEQ ID NO: 2538207 - RNA, 19 nt, Artificial Sequence
  Description of Artificial Sequence: Synthetic oligonucleotide
ggcacagaucgugggccuu

SEQ ID NO: 2538208 - RNA, 19 nt, Artificial Sequence
  Description of Artificial Sequence: Synthetic oligonucleotide
cgcggcccgagcaggcaca

SEQ ID NO: 2538209 - RNA, 19 nt, Artificial Sequence
  Description of Artificial Sequence: Synthetic oligonucleotide
ccguggcacacuccaugau

SEQ ID NO: 2538210 - RNA, 19 nt, Artificial Sequence
  Description of Artificial Sequence: Synthetic oligonucleotide
ccaggacccagggcacaua

SEQ ID NO: 2538211 - RNA, 19 nt, Artificial Sequence
  Description of Artificial Sequence: Synthetic oligonucleotide
cccaggugccacugacauu

SEQ ID NO: 2538212 - RNA, 19 nt, Artificial Sequence
  Description of Artificial Sequence: Synthetic oligonucleotide
ccucggugagcugggcguu

SEQ ID NO: 2538213 - RNA, 19 nt, Artificial Sequence
  Description of Artificial Sequence: Synthetic oligonucleotide
gcugggcguuggcgugcau

SEQ ID NO: 2538214 - RNA, 19 nt, Artificial Sequence
  Description of Artificial Sequence: Synthetic oligonucleotide
cggagacacucuggcugcu

SEQ ID NO: 2538215 - RNA, 19 nt, Artificial Sequence
  Description of Artificial Sequence: Synthetic oligonucleotide
cgcagccucggaggacgcu

SEQ ID NO: 2538216 - RNA, 19 nt, Artificial Sequence
  Description of Artificial Sequence: Synthetic oligonucleotide
cggcccgagcaggcacaga

SEQ ID NO: 2538217 - RNA, 19 nt, Artificial Sequence
  Description of Artificial Sequence: Synthetic oligonucleotide
aggaaugagaaauaaaucc

SEQ ID NO: 2538218 - RNA, 19 nt, Artificial Sequence
  Description of Artificial Sequence: Synthetic oligonucleotide
aaauaaaucccaaaggugc

SEQ ID NO: 2538219 - RNA, 19 nt, Artificial Sequence
  Description of Artificial Sequence: Synthetic oligonucleotide
aaugguaucucuuccaccc

SEQ ID NO: 2538220 - RNA, 19 nt, Artificial Sequence
  Description of Artificial Sequence: Synthetic oligonucleotide
uuuucuuacauuauggaug

SEQ ID NO: 2538221 - RNA, 19 nt, Artificial Sequence
  Description of Artificial Sequence: Synthetic oligonucleotide
auuacaaugacaucagcac

SEQ ID NO: 2538222 - RNA, 19 nt, Artificial Sequence
  Description of Artificial Sequence: Synthetic oligonucleotide
auaaaugaacuucaacucc

SEQ ID NO: 2538223 - RNA, 19 nt, Artificial Sequence
  Description of Artificial Sequence: Synthetic oligonucleotide
aaaauucuccauuaagcuc

SEQ ID NO: 2538224 - RNA, 19 nt, Artificial Sequence
  Description of Artificial Sequence: Synthetic oligonucleotide
aaagguaacccgcauaaag

SEQ ID NO: 2538225 - RNA, 19 nt, Artificial Sequence
  Description of Artificial Sequence: Synthetic oligonucleotide
uuuggugugagccacacgc

SEQ ID NO: 2538226 - RNA, 19 nt, Artificial Sequence
  Description of Artificial Sequence: Synthetic oligonucleotide
ucaaccaagaccuuucccg

SEQ ID NO: 2538227 - RNA, 19 nt, Artificial Sequence
  Description of Artificial Sequence: Synthetic oligonucleotide
aagagagaaucuuggagac

SEQ ID NO: 2538228 - RNA, 19 nt, Artificial Sequence
  Description of Artificial Sequence: Synthetic oligonucleotide
aacuccucgagugagaagg

SEQ ID NO: 2538229 - RNA, 19 nt, Artificial Sequence
  Description of Artificial Sequence: Synthetic oligonucleotide
uauucgaagacauuauuca

SEQ ID NO: 2538230 - RNA, 19 nt, Artificial Sequence
  Description of Artificial Sequence: Synthetic oligonucleotide
aaugcaucaacgugaacug

SEQ ID NO: 2538231 - RNA, 19 nt, Artificial Sequence
  Description of Artificial Sequence: Synthetic oligonucleotide
uacacaucaaaguucaaug

SEQ ID NO: 2538232 - RNA, 19 nt, Artificial Sequence
  Description of Artificial Sequence: Synthetic oligonucleotide
aaauucuccauuaagcucu

SEQ ID NO: 2538233 - RNA, 19 nt, Artificial Sequence
  Description of Artificial Sequence: Synthetic oligonucleotide
aagcacagccucuuggggc

SEQ ID NO: 2538234 - RNA, 19 nt, Artificial Sequence
  Description of Artificial Sequence: Synthetic oligonucleotide
aacuucaacuccucgagug

SEQ ID NO: 2538235 - RNA, 19 nt, Artificial Sequence
  Description of Artificial Sequence: Synthetic oligonucleotide
uaagcucuacuccauagag

SEQ ID NO: 2538236 - RNA, 19 nt, Artificial Sequence
  Description of Artificial Sequence: Synthetic oligonucleotide
uuuuaugaccauuuccugc

SEQ ID NO: 2538237 - RNA, 19 nt, Artificial Sequence
  Description of Artificial Sequence: Synthetic oligonucleotide
ucaguaaggaaauauucga

SEQ ID NO: 2538238 - RNA, 19 nt, Artificial Sequence
  Description of Artificial Sequence: Synthetic oligonucleotide
gaccuuucccgacagaucg

SEQ ID NO: 2538239 - RNA, 19 nt, Artificial Sequence
  Description of Artificial Sequence: Synthetic oligonucleotide
uuuaugaccauuuccugca

SEQ ID NO: 2538240 - RNA, 19 nt, Artificial Sequence
  Description of Artificial Sequence: Synthetic oligonucleotide
aaugaacuucaacuccucg

SEQ ID NO: 2538241 - RNA, 19 nt, Artificial Sequence
  Description of Artificial Sequence: Synthetic oligonucleotide
aguacaugcugauaaauga

SEQ ID NO: 2538242 - RNA, 19 nt, Artificial Sequence
  Description of Artificial Sequence: Synthetic oligonucleotide
uuucuuacauuauggauga

SEQ ID NO: 2538243 - RNA, 19 nt, Artificial Sequence
  Description of Artificial Sequence: Synthetic oligonucleotide
uucauuacaaugacaucag

SEQ ID NO: 2538244 - RNA, 19 nt, Artificial Sequence
  Description of Artificial Sequence: Synthetic oligonucleotide
aaggaaugagaaauaaauc

SEQ ID NO: 2538245 - RNA, 19 nt, Artificial Sequence
  Description of Artificial Sequence: Synthetic oligonucleotide
cuaagagagaaucuuggag

SEQ ID NO: 2538246 - RNA, 19 nt, Artificial Sequence
  Description of Artificial Sequence: Synthetic oligonucleotide
acaaugaaucaauaacguc

SEQ ID NO: 2538247 - RNA, 19 nt, Artificial Sequence
  Description of Artificial Sequence: Synthetic oligonucleotide
aagguaacccgcauaaagg

SEQ ID NO: 2538248 - RNA, 19 nt, Artificial Sequence
  Description of Artificial Sequence: Synthetic oligonucleotide
uguggauacacaucaaagu

SEQ ID NO: 2538249 - RNA, 19 nt, Artificial Sequence
  Description of Artificial Sequence: Synthetic oligonucleotide
ugcauauuagucucaagac

SEQ ID NO: 2538250 - RNA, 19 nt, Artificial Sequence
  Description of Artificial Sequence: Synthetic oligonucleotide
agcucuacuccauagagcu

SEQ ID NO: 2538251 - RNA, 19 nt, Artificial Sequence
  Description of Artificial Sequence: Synthetic oligonucleotide
gagaaccuuauauaaauga

SEQ ID NO: 2538252 - RNA, 19 nt, Artificial Sequence
  Description of Artificial Sequence: Synthetic oligonucleotide
cugugaguaauagugaucc

SEQ ID NO: 2538253 - RNA, 19 nt, Artificial Sequence
  Description of Artificial Sequence: Synthetic oligonucleotide
uuugcagaagugaaccuug

SEQ ID NO: 2538254 - RNA, 19 nt, Artificial Sequence
  Description of Artificial Sequence: Synthetic oligonucleotide
uuagucucaagaccuaaga

SEQ ID NO: 2538255 - RNA, 19 nt, Artificial Sequence
  Description of Artificial Sequence: Synthetic oligonucleotide
acugugccaagucuggagc

SEQ ID NO: 2538256 - RNA, 19 nt, Artificial Sequence
  Description of Artificial Sequence: Synthetic oligonucleotide
agucucaagaccuaagaga

SEQ ID NO: 2538257 - RNA, 19 nt, Artificial Sequence
  Description of Artificial Sequence: Synthetic oligonucleotide
uagagaaccuuauauaaau

SEQ ID NO: 2538258 - RNA, 19 nt, Artificial Sequence
  Description of Artificial Sequence: Synthetic oligonucleotide
auaaaggaaugcaucaacg

SEQ ID NO: 2538259 - RNA, 19 nt, Artificial Sequence
  Description of Artificial Sequence: Synthetic oligonucleotide
ggaacugugaguaauagug

SEQ ID NO: 2538260 - RNA, 19 nt, Artificial Sequence
  Description of Artificial Sequence: Synthetic oligonucleotide
auauucgaagacauuauuc

SEQ ID NO: 2538261 - RNA, 19 nt, Artificial Sequence
  Description of Artificial Sequence: Synthetic oligonucleotide
ucuuacauuauggaugaug

SEQ ID NO: 2538262 - RNA, 19 nt, Artificial Sequence
  Description of Artificial Sequence: Synthetic oligonucleotide
uccauuaagcucuacucca

SEQ ID NO: 2538263 - RNA, 19 nt, Artificial Sequence
  Description of Artificial Sequence: Synthetic oligonucleotide
uaacgucuucaucauaaag

SEQ ID NO: 2538264 - RNA, 19 nt, Artificial Sequence
  Description of Artificial Sequence: Synthetic oligonucleotide
aaggaaauauucgaagaca

SEQ ID NO: 2538265 - RNA, 19 nt, Artificial Sequence
  Description of Artificial Sequence: Synthetic oligonucleotide
aauauucgaagacauuauu

SEQ ID NO: 2538266 - RNA, 19 nt, Artificial Sequence
  Description of Artificial Sequence: Synthetic oligonucleotide
ucaucauaaaggaaugcau

SEQ ID NO: 2538267 - RNA, 19 nt, Artificial Sequence
  Description of Artificial Sequence: Synthetic oligonucleotide
aaggaaugcaucaacguga

SEQ ID NO: 2538268 - RNA, 19 nt, Artificial Sequence
  Description of Artificial Sequence: Synthetic oligonucleotide
ucugucaccgaacugguau

SEQ ID NO: 2538269 - RNA, 19 nt, Artificial Sequence
  Description of Artificial Sequence: Synthetic oligonucleotide
uuccgagcaaagcacagcc

SEQ ID NO: 2538270 - RNA, 19 nt, Artificial Sequence
  Description of Artificial Sequence: Synthetic oligonucleotide
gucucaagaccuaagagag

SEQ ID NO: 2538271 - RNA, 19 nt, Artificial Sequence
  Description of Artificial Sequence: Synthetic oligonucleotide
agugcaguaguuucugcuc

SEQ ID NO: 2538272 - RNA, 19 nt, Artificial Sequence
  Description of Artificial Sequence: Synthetic oligonucleotide
aaaggugcuguuuggugug

SEQ ID NO: 2538273 - RNA, 19 nt, Artificial Sequence
  Description of Artificial Sequence: Synthetic oligonucleotide
caucauaaaggaaugcauc

SEQ ID NO: 2538274 - RNA, 19 nt, Artificial Sequence
  Description of Artificial Sequence: Synthetic oligonucleotide
ucuccauuaagcucuacuc

SEQ ID NO: 2538275 - RNA, 19 nt, Artificial Sequence
  Description of Artificial Sequence: Synthetic oligonucleotide
ugcaucaacgugaacugug

SEQ ID NO: 2538276 - RNA, 19 nt, Artificial Sequence
  Description of Artificial Sequence: Synthetic oligonucleotide
uggauacacaucaaaguuc

SEQ ID NO: 2538277 - RNA, 19 nt, Artificial Sequence
  Description of Artificial Sequence: Synthetic oligonucleotide
cuguggauacacaucaaag

SEQ ID NO: 2538278 - RNA, 19 nt, Artificial Sequence
  Description of Artificial Sequence: Synthetic oligonucleotide
cauaaaggaaugcaucaac

SEQ ID NO: 2538279 - RNA, 19 nt, Artificial Sequence
  Description of Artificial Sequence: Synthetic oligonucleotide
agcuguaaagguaacccgc

SEQ ID NO: 2538280 - RNA, 19 nt, Artificial Sequence
  Description of Artificial Sequence: Synthetic oligonucleotide
uuaagcucuacuccauaga

SEQ ID NO: 2538281 - RNA, 19 nt, Artificial Sequence
  Description of Artificial Sequence: Synthetic oligonucleotide
ucaaugguaucucuuccac

SEQ ID NO: 2538282 - RNA, 19 nt, Artificial Sequence
  Description of Artificial Sequence: Synthetic oligonucleotide
ucgaagacauuauucauua

SEQ ID NO: 2538283 - RNA, 19 nt, Artificial Sequence
  Description of Artificial Sequence: Synthetic oligonucleotide
gagcuguaaagguaacccg

SEQ ID NO: 2538284 - RNA, 19 nt, Artificial Sequence
  Description of Artificial Sequence: Synthetic oligonucleotide
gaaugcaucaacgugaacu

SEQ ID NO: 2538285 - RNA, 19 nt, Artificial Sequence
  Description of Artificial Sequence: Synthetic oligonucleotide
uucuccauuaagcucuacu

SEQ ID NO: 2538286 - RNA, 19 nt, Artificial Sequence
  Description of Artificial Sequence: Synthetic oligonucleotide
uguucaagaguuucucugu

SEQ ID NO: 2538287 - RNA, 19 nt, Artificial Sequence
  Description of Artificial Sequence: Synthetic oligonucleotide
gaaggaaugagaaauaaau

SEQ ID NO: 2538288 - RNA, 19 nt, Artificial Sequence
  Description of Artificial Sequence: Synthetic oligonucleotide
uacuccauagagcugcacu

SEQ ID NO: 2538289 - RNA, 19 nt, Artificial Sequence
  Description of Artificial Sequence: Synthetic oligonucleotide
aauaaaucccaaaggugcu

SEQ ID NO: 2538290 - RNA, 19 nt, Artificial Sequence
  Description of Artificial Sequence: Synthetic oligonucleotide
cauauuagucucaagaccu

SEQ ID NO: 2538291 - RNA, 19 nt, Artificial Sequence
  Description of Artificial Sequence: Synthetic oligonucleotide
gccaaugucaaccaagacc

SEQ ID NO: 2538292 - RNA, 19 nt, Artificial Sequence
  Description of Artificial Sequence: Synthetic oligonucleotide
aaccaagaccuuucccgac

SEQ ID NO: 2538293 - RNA, 19 nt, Artificial Sequence
  Description of Artificial Sequence: Synthetic oligonucleotide
cuccauuaagcucuacucc

SEQ ID NO: 2538294 - RNA, 19 nt, Artificial Sequence
  Description of Artificial Sequence: Synthetic oligonucleotide
aagcucuacuccauagagc

SEQ ID NO: 2538295 - RNA, 19 nt, Artificial Sequence
  Description of Artificial Sequence: Synthetic oligonucleotide
gaaugagaaauaaauccca

SEQ ID NO: 2538296 - RNA, 19 nt, Artificial Sequence
  Description of Artificial Sequence: Synthetic oligonucleotide
augaacuucaacuccucga

SEQ ID NO: 2538297 - RNA, 19 nt, Artificial Sequence
  Description of Artificial Sequence: Synthetic oligonucleotide
uucgaagacauuauucauu

SEQ ID NO: 2538298 - RNA, 19 nt, Artificial Sequence
  Description of Artificial Sequence: Synthetic oligonucleotide
cugcauauuagucucaaga

SEQ ID NO: 2538299 - RNA, 19 nt, Artificial Sequence
  Description of Artificial Sequence: Synthetic oligonucleotide
cacuuugcagaagugaacc

SEQ ID NO: 2538300 - RNA, 19 nt, Artificial Sequence
  Description of Artificial Sequence: Synthetic oligonucleotide
aauuuguucaagaguuucu

SEQ ID NO: 2538301 - RNA, 19 nt, Artificial Sequence
  Description of Artificial Sequence: Synthetic oligonucleotide
cagaucggggaguacaugc

SEQ ID NO: 2538302 - RNA, 19 nt, Artificial Sequence
  Description of Artificial Sequence: Synthetic oligonucleotide
gcaugaagcaccuuuauuc

SEQ ID NO: 2538303 - RNA, 19 nt, Artificial Sequence
  Description of Artificial Sequence: Synthetic oligonucleotide
aagucuggagccaauguca

SEQ ID NO: 2538304 - RNA, 19 nt, Artificial Sequence
  Description of Artificial Sequence: Synthetic oligonucleotide
ugcaauuggcaaaauucuc

SEQ ID NO: 2538305 - RNA, 19 nt, Artificial Sequence
  Description of Artificial Sequence: Synthetic oligonucleotide
gaauuuguucaagaguuuc

SEQ ID NO: 2538306 - RNA, 19 nt, Artificial Sequence
  Description of Artificial Sequence: Synthetic oligonucleotide
uguaaagguaacccgcaua

SEQ ID NO: 2538307 - RNA, 19 nt, Artificial Sequence
  Description of Artificial Sequence: Synthetic oligonucleotide
aaauauucgaagacauuau

SEQ ID NO: 2538308 - RNA, 19 nt, Artificial Sequence
  Description of Artificial Sequence: Synthetic oligonucleotide
agggcuagcuguuccgagc

SEQ ID NO: 2538309 - RNA, 19 nt, Artificial Sequence
  Description of Artificial Sequence: Synthetic oligonucleotide
ucauuacaaugacaucagc

SEQ ID NO: 2538310 - RNA, 19 nt, Artificial Sequence
  Description of Artificial Sequence: Synthetic oligonucleotide
aucaacgugaacugugggu

SEQ ID NO: 2538311 - RNA, 19 nt, Artificial Sequence
  Description of Artificial Sequence: Synthetic oligonucleotide
accuaagagagaaucuugg

SEQ ID NO: 2538312 - RNA, 19 nt, Artificial Sequence
  Description of Artificial Sequence: Synthetic oligonucleotide
ucaauaacgucuucaucau

SEQ ID NO: 2538313 - RNA, 19 nt, Artificial Sequence
  Description of Artificial Sequence: Synthetic oligonucleotide
agguaacccgcauaaagga

SEQ ID NO: 2538314 - RNA, 19 nt, Artificial Sequence
  Description of Artificial Sequence: Synthetic oligonucleotide
gaacuguggguucuggcug

SEQ ID NO: 2538315 - RNA, 19 nt, Artificial Sequence
  Description of Artificial Sequence: Synthetic oligonucleotide
gcauauuagucucaagacc

SEQ ID NO: 2538316 - RNA, 19 nt, Artificial Sequence
  Description of Artificial Sequence: Synthetic oligonucleotide
ccugcaauuggcaaaauuc

SEQ ID NO: 2538317 - RNA, 19 nt, Artificial Sequence
  Description of Artificial Sequence: Synthetic oligonucleotide
uggaugauguagucccagg

SEQ ID NO: 2538318 - RNA, 19 nt, Artificial Sequence
  Description of Artificial Sequence: Synthetic oligonucleotide
caagaccuaagagagaauc

SEQ ID NO: 2538319 - RNA, 19 nt, Artificial Sequence
  Description of Artificial Sequence: Synthetic oligonucleotide
ugcuagagaaccuuauaua

SEQ ID NO: 2538320 - RNA, 19 nt, Artificial Sequence
  Description of Artificial Sequence: Synthetic oligonucleotide
guuacuucagugcuagaga

SEQ ID NO: 2538321 - RNA, 19 nt, Artificial Sequence
  Description of Artificial Sequence: Synthetic oligonucleotide
ucgagugagaaggaaugag

SEQ ID NO: 2538322 - RNA, 19 nt, Artificial Sequence
  Description of Artificial Sequence: Synthetic oligonucleotide
aagaccuuucccgacagau

SEQ ID NO: 2538323 - RNA, 19 nt, Artificial Sequence
  Description of Artificial Sequence: Synthetic oligonucleotide
uugcagaagugaaccuugg

SEQ ID NO: 2538324 - RNA, 19 nt, Artificial Sequence
  Description of Artificial Sequence: Synthetic oligonucleotide
gacugugccaagucuggag

SEQ ID NO: 2538325 - RNA, 19 nt, Artificial Sequence
  Description of Artificial Sequence: Synthetic oligonucleotide
ugauccuuguuuucuuaca

SEQ ID NO: 2538326 - RNA, 19 nt, Artificial Sequence
  Description of Artificial Sequence: Synthetic oligonucleotide
uuggaacugugaguaauag

SEQ ID NO: 2538327 - RNA, 19 nt, Artificial Sequence
  Description of Artificial Sequence: Synthetic oligonucleotide
ugagaaggaaugagaaaua

SEQ ID NO: 2538328 - RNA, 19 nt, Artificial Sequence
  Description of Artificial Sequence: Synthetic oligonucleotide
ugaggcucaguaaggaaau

SEQ ID NO: 2538329 - RNA, 19 nt, Artificial Sequence
  Description of Artificial Sequence: Synthetic oligonucleotide
uaacccgcauaaaggacug

SEQ ID NO: 2538330 - RNA, 19 nt, Artificial Sequence
  Description of Artificial Sequence: Synthetic oligonucleotide
auucgaagacauuauucau

SEQ ID NO: 2538331 - RNA, 19 nt, Artificial Sequence
  Description of Artificial Sequence: Synthetic oligonucleotide
auagugauccuuguuuucu

SEQ ID NO: 2538332 - RNA, 19 nt, Artificial Sequence
  Description of Artificial Sequence: Synthetic oligonucleotide
uucccgacagaucggggag

SEQ ID NO: 2538333 - RNA, 19 nt, Artificial Sequence
  Description of Artificial Sequence: Synthetic oligonucleotide
ucaacgugaacuguggguu

SEQ ID NO: 2538334 - RNA, 19 nt, Artificial Sequence
  Description of Artificial Sequence: Synthetic oligonucleotide
aggacagcugcauauuagu

SEQ ID NO: 2538335 - RNA, 19 nt, Artificial Sequence
  Description of Artificial Sequence: Synthetic oligonucleotide
gguuacuucagugcuagag

SEQ ID NO: 2538336 - RNA, 19 nt, Artificial Sequence
  Description of Artificial Sequence: Synthetic oligonucleotide
cuuggggcaaacagcuccg

SEQ ID NO: 2538337 - RNA, 19 nt, Artificial Sequence
  Description of Artificial Sequence: Synthetic oligonucleotide
acugccgagcuguaaaggu

SEQ ID NO: 2538338 - RNA, 19 nt, Artificial Sequence
  Description of Artificial Sequence: Synthetic oligonucleotide
uuggguacagaugucugca

SEQ ID NO: 2538339 - RNA, 19 nt, Artificial Sequence
  Description of Artificial Sequence: Synthetic oligonucleotide
aagggcuagcuguuccgag

SEQ ID NO: 2538340 - RNA, 19 nt, Artificial Sequence
  Description of Artificial Sequence: Synthetic oligonucleotide
aagaccuaagagagaaucu

SEQ ID NO: 2538341 - RNA, 19 nt, Artificial Sequence
  Description of Artificial Sequence: Synthetic oligonucleotide
caaugguaucucuuccacc

SEQ ID NO: 2538342 - RNA, 19 nt, Artificial Sequence
  Description of Artificial Sequence: Synthetic oligonucleotide
ugcacugccgagcuguaaa

SEQ ID NO: 2538343 - RNA, 19 nt, Artificial Sequence
  Description of Artificial Sequence: Synthetic oligonucleotide
auuauucauuacaaugaca

SEQ ID NO: 2538344 - RNA, 19 nt, Artificial Sequence
  Description of Artificial Sequence: Synthetic oligonucleotide
ucuuccacccaggaggaca

SEQ ID NO: 2538345 - RNA, 19 nt, Artificial Sequence
  Description of Artificial Sequence: Synthetic oligonucleotide
auacacaucaaaguucaau

SEQ ID NO: 2538346 - RNA, 19 nt, Artificial Sequence
  Description of Artificial Sequence: Synthetic oligonucleotide
ugauguagucccaggcacu

SEQ ID NO: 2538347 - RNA, 19 nt, Artificial Sequence
  Description of Artificial Sequence: Synthetic oligonucleotide
uaaaucccaaaggugcugu

SEQ ID NO: 2538348 - RNA, 19 nt, Artificial Sequence
  Description of Artificial Sequence: Synthetic oligonucleotide
agacuuggaacugugagua

SEQ ID NO: 2538349 - RNA, 19 nt, Artificial Sequence
  Description of Artificial Sequence: Synthetic oligonucleotide
caagucuggagccaauguc

SEQ ID NO: 2538350 - RNA, 19 nt, Artificial Sequence
  Description of Artificial Sequence: Synthetic oligonucleotide
gcuagagaaccuuauauaa

SEQ ID NO: 2538351 - RNA, 19 nt, Artificial Sequence
  Description of Artificial Sequence: Synthetic oligonucleotide
agacauuauucauuacaau

SEQ ID NO: 2538352 - RNA, 19 nt, Artificial Sequence
  Description of Artificial Sequence: Synthetic oligonucleotide
ggcacuugccuguugaggc

SEQ ID NO: 2538353 - RNA, 19 nt, Artificial Sequence
  Description of Artificial Sequence: Synthetic oligonucleotide
gaaucaauaacgucuucau

SEQ ID NO: 2538354 - RNA, 19 nt, Artificial Sequence
  Description of Artificial Sequence: Synthetic oligonucleotide
agaaccuuauauaaaugaa

SEQ ID NO: 2538355 - RNA, 19 nt, Artificial Sequence
  Description of Artificial Sequence: Synthetic oligonucleotide
acauuauggaugauguagu

SEQ ID NO: 2538356 - RNA, 19 nt, Artificial Sequence
  Description of Artificial Sequence: Synthetic oligonucleotide
ugccgagcuguaaagguaa

SEQ ID NO: 2538357 - RNA, 19 nt, Artificial Sequence
  Description of Artificial Sequence: Synthetic oligonucleotide
augucaaccaagaccuuuc

SEQ ID NO: 2538358 - RNA, 19 nt, Artificial Sequence
  Description of Artificial Sequence: Synthetic oligonucleotide
gaccuaagagagaaucuug

SEQ ID NO: 2538359 - RNA, 19 nt, Artificial Sequence
  Description of Artificial Sequence: Synthetic oligonucleotide
gaggacagcugcauauuag

SEQ ID NO: 2538360 - RNA, 19 nt, Artificial Sequence
  Description of Artificial Sequence: Synthetic oligonucleotide
uauggaugauguaguccca

SEQ ID NO: 2538361 - RNA, 19 nt, Artificial Sequence
  Description of Artificial Sequence: Synthetic oligonucleotide
acuucaacuccucgaguga

SEQ ID NO: 2538362 - RNA, 19 nt, Artificial Sequence
  Description of Artificial Sequence: Synthetic oligonucleotide
uccucgagugagaaggaau

SEQ ID NO: 2538363 - RNA, 19 nt, Artificial Sequence
  Description of Artificial Sequence: Synthetic oligonucleotide
caucaacgugaacuguggg

SEQ ID NO: 2538364 - RNA, 19 nt, Artificial Sequence
  Description of Artificial Sequence: Synthetic oligonucleotide
cacgcagugcaguaguuuc

SEQ ID NO: 2538365 - RNA, 19 nt, Artificial Sequence
  Description of Artificial Sequence: Synthetic oligonucleotide
auaaaucccaaaggugcug

SEQ ID NO: 2538366 - RNA, 19 nt, Artificial Sequence
  Description of Artificial Sequence: Synthetic oligonucleotide
ucucaagaccuaagagaga

SEQ ID NO: 2538367 - RNA, 19 nt, Artificial Sequence
  Description of Artificial Sequence: Synthetic oligonucleotide
augaccauuuccugcaauu

SEQ ID NO: 2538368 - RNA, 19 nt, Artificial Sequence
  Description of Artificial Sequence: Synthetic oligonucleotide
uauuagucucaagaccuaa

SEQ ID NO: 2538369 - RNA, 19 nt, Artificial Sequence
  Description of Artificial Sequence: Synthetic oligonucleotide
ugcaugaagcaccuuuauu

SEQ ID NO: 2538370 - RNA, 19 nt, Artificial Sequence
  Description of Artificial Sequence: Synthetic oligonucleotide
gugcuguuuggugugagcc

SEQ ID NO: 2538371 - RNA, 19 nt, Artificial Sequence
  Description of Artificial Sequence: Synthetic oligonucleotide
ggauacacaucaaaguuca

SEQ ID NO: 2538372 - RNA, 19 nt, Artificial Sequence
  Description of Artificial Sequence: Synthetic oligonucleotide
uggguucuggcugcugucg

SEQ ID NO: 2538373 - RNA, 19 nt, Artificial Sequence
  Description of Artificial Sequence: Synthetic oligonucleotide
gugauccuuguuuucuuac

SEQ ID NO: 2538374 - RNA, 19 nt, Artificial Sequence
  Description of Artificial Sequence: Synthetic oligonucleotide
acaucagcacuuugcagaa

SEQ ID NO: 2538375 - RNA, 19 nt, Artificial Sequence
  Description of Artificial Sequence: Synthetic oligonucleotide
uaugaccauuuccugcaau

SEQ ID NO: 2538376 - RNA, 19 nt, Artificial Sequence
  Description of Artificial Sequence: Synthetic oligonucleotide
gucaaccaagaccuuuccc

SEQ ID NO: 2538377 - RNA, 19 nt, Artificial Sequence
  Description of Artificial Sequence: Synthetic oligonucleotide
accaagaccuuucccgaca

SEQ ID NO: 2538378 - RNA, 19 nt, Artificial Sequence
  Description of Artificial Sequence: Synthetic oligonucleotide
ucagugcuagagaaccuua

SEQ ID NO: 2538379 - RNA, 19 nt, Artificial Sequence
  Description of Artificial Sequence: Synthetic oligonucleotide
uuacauuauggaugaugua

SEQ ID NO: 2538380 - RNA, 19 nt, Artificial Sequence
  Description of Artificial Sequence: Synthetic oligonucleotide
acaucaaaguucaauggua

SEQ ID NO: 2538381 - RNA, 19 nt, Artificial Sequence
  Description of Artificial Sequence: Synthetic oligonucleotide
cugugccaagucuggagcc

SEQ ID NO: 2538382 - RNA, 19 nt, Artificial Sequence
  Description of Artificial Sequence: Synthetic oligonucleotide
uuggugugagccacacgca

SEQ ID NO: 2538383 - RNA, 19 nt, Artificial Sequence
  Description of Artificial Sequence: Synthetic oligonucleotide
gaaccuuauauaaaugaau

SEQ ID NO: 2538384 - RNA, 19 nt, Artificial Sequence
  Description of Artificial Sequence: Synthetic oligonucleotide
ugugaguaauagugauccu

SEQ ID NO: 2538385 - RNA, 19 nt, Artificial Sequence
  Description of Artificial Sequence: Synthetic oligonucleotide
agaccuaagagagaaucuu

SEQ ID NO: 2538386 - RNA, 19 nt, Artificial Sequence
  Description of Artificial Sequence: Synthetic oligonucleotide
agugcuagagaaccuuaua

SEQ ID NO: 2538387 - RNA, 19 nt, Artificial Sequence
  Description of Artificial Sequence: Synthetic oligonucleotide
uccugcaauuggcaaaauu

SEQ ID NO: 2538388 - RNA, 19 nt, Artificial Sequence
  Description of Artificial Sequence: Synthetic oligonucleotide
uggcaaaauucuccauuaa

SEQ ID NO: 2538389 - RNA, 19 nt, Artificial Sequence
  Description of Artificial Sequence: Synthetic oligonucleotide
caguaaggaaauauucgaa

SEQ ID NO: 2538390 - RNA, 19 nt, Artificial Sequence
  Description of Artificial Sequence: Synthetic oligonucleotide
guccaugucccucugugga

SEQ ID NO: 2538391 - RNA, 19 nt, Artificial Sequence
  Description of Artificial Sequence: Synthetic oligonucleotide
acuuggaacugugaguaau

SEQ ID NO: 2538392 - RNA, 19 nt, Artificial Sequence
  Description of Artificial Sequence: Synthetic oligonucleotide
agcacuuugcagaagugaa

SEQ ID NO: 2538393 - RNA, 19 nt, Artificial Sequence
  Description of Artificial Sequence: Synthetic oligonucleotide
ccuccucacacaaugaauc

SEQ ID NO: 2538394 - RNA, 19 nt, Artificial Sequence
  Description of Artificial Sequence: Synthetic oligonucleotide
ggggaguacaugcugauaa

SEQ ID NO: 2538395 - RNA, 19 nt, Artificial Sequence
  Description of Artificial Sequence: Synthetic oligonucleotide
aaucccaaaggugcuguuu

SEQ ID NO: 2538396 - RNA, 19 nt, Artificial Sequence
  Description of Artificial Sequence: Synthetic oligonucleotide
auagagcugcacugccgag

SEQ ID NO: 2538397 - RNA, 19 nt, Artificial Sequence
  Description of Artificial Sequence: Synthetic oligonucleotide
uucagugcuagagaaccuu

SEQ ID NO: 2538398 - RNA, 19 nt, Artificial Sequence
  Description of Artificial Sequence: Synthetic oligonucleotide
cuuucccgacagaucgggg

SEQ ID NO: 2538399 - RNA, 19 nt, Artificial Sequence
  Description of Artificial Sequence: Synthetic oligonucleotide
cugcaauuggcaaaauucu

SEQ ID NO: 2538400 - RNA, 19 nt, Artificial Sequence
  Description of Artificial Sequence: Synthetic oligonucleotide
uuaugaccauuuccugcaa

SEQ ID NO: 2538401 - RNA, 19 nt, Artificial Sequence
  Description of Artificial Sequence: Synthetic oligonucleotide
accuuuauucugucaccga

SEQ ID NO: 2538402 - RNA, 19 nt, Artificial Sequence
  Description of Artificial Sequence: Synthetic oligonucleotide
cagaugucugcaugaagca

SEQ ID NO: 2538403 - RNA, 19 nt, Artificial Sequence
  Description of Artificial Sequence: Synthetic oligonucleotide
uccucacacaaugaaucaa

SEQ ID NO: 2538404 - RNA, 19 nt, Artificial Sequence
  Description of Artificial Sequence: Synthetic oligonucleotide
guuuggugugagccacacg

SEQ ID NO: 2538405 - RNA, 19 nt, Artificial Sequence
  Description of Artificial Sequence: Synthetic oligonucleotide
caaccaagaccuuucccga

SEQ ID NO: 2538406 - RNA, 19 nt, Artificial Sequence
  Description of Artificial Sequence: Synthetic oligonucleotide
uccgagcaaagcacagccu

SEQ ID NO: 2538407 - RNA, 19 nt, Artificial Sequence
  Description of Artificial Sequence: Synthetic oligonucleotide
gugcaguaguuucugcuca

SEQ ID NO: 2538408 - RNA, 19 nt, Artificial Sequence
  Description of Artificial Sequence: Synthetic oligonucleotide
ccucgagugagaaggaaug

SEQ ID NO: 2538409 - RNA, 19 nt, Artificial Sequence
  Description of Artificial Sequence: Synthetic oligonucleotide
accuuggguacagaugucu

SEQ ID NO: 2538410 - RNA, 19 nt, Artificial Sequence
  Description of Artificial Sequence: Synthetic oligonucleotide
aaaucccaaaggugcuguu

SEQ ID NO: 2538411 - RNA, 19 nt, Artificial Sequence
  Description of Artificial Sequence: Synthetic oligonucleotide
agaaucuuggagacuugga

SEQ ID NO: 2538412 - RNA, 19 nt, Artificial Sequence
  Description of Artificial Sequence: Synthetic oligonucleotide
acccgcauaaaggacugug

SEQ ID NO: 2538413 - RNA, 19 nt, Artificial Sequence
  Description of Artificial Sequence: Synthetic oligonucleotide
gugcuagagaaccuuauau

SEQ ID NO: 2538414 - RNA, 19 nt, Artificial Sequence
  Description of Artificial Sequence: Synthetic oligonucleotide
guacaugcugauaaaugaa

SEQ ID NO: 2538415 - RNA, 19 nt, Artificial Sequence
  Description of Artificial Sequence: Synthetic oligonucleotide
ccgcauaaaggacugugcc

SEQ ID NO: 2538416 - RNA, 19 nt, Artificial Sequence
  Description of Artificial Sequence: Synthetic oligonucleotide
gcaucaacgugaacugugg

SEQ ID NO: 2538417 - RNA, 19 nt, Artificial Sequence
  Description of Artificial Sequence: Synthetic oligonucleotide
aggcucaguaaggaaauau

SEQ ID NO: 2538418 - RNA, 19 nt, Artificial Sequence
  Description of Artificial Sequence: Synthetic oligonucleotide
cgagcuguaaagguaaccc

SEQ ID NO: 2538419 - RNA, 19 nt, Artificial Sequence
  Description of Artificial Sequence: Synthetic oligonucleotide
aaccuuggguacagauguc

SEQ ID NO: 2538420 - RNA, 19 nt, Artificial Sequence
  Description of Artificial Sequence: Synthetic oligonucleotide
guaacccgcauaaaggacu

SEQ ID NO: 2538421 - RNA, 19 nt, Artificial Sequence
  Description of Artificial Sequence: Synthetic oligonucleotide
uagugauccuuguuuucuu

SEQ ID NO: 2538422 - RNA, 19 nt, Artificial Sequence
  Description of Artificial Sequence: Synthetic oligonucleotide
cuuggaacugugaguaaua

SEQ ID NO: 2538423 - RNA, 19 nt, Artificial Sequence
  Description of Artificial Sequence: Synthetic oligonucleotide
ugcaguaguuucugcucau

SEQ ID NO: 2538424 - RNA, 19 nt, Artificial Sequence
  Description of Artificial Sequence: Synthetic oligonucleotide
cacugccgagcuguaaagg

SEQ ID NO: 2538425 - RNA, 19 nt, Artificial Sequence
  Description of Artificial Sequence: Synthetic oligonucleotide
guuccgagcaaagcacagc

SEQ ID NO: 2538426 - RNA, 19 nt, Artificial Sequence
  Description of Artificial Sequence: Synthetic oligonucleotide
caacgugaacuguggguuc

SEQ ID NO: 2538427 - RNA, 19 nt, Artificial Sequence
  Description of Artificial Sequence: Synthetic oligonucleotide
gcauaaaggacugugccaa

SEQ ID NO: 2538428 - RNA, 19 nt, Artificial Sequence
  Description of Artificial Sequence: Synthetic oligonucleotide
gcagaagugaaccuugggu

SEQ ID NO: 2538429 - RNA, 19 nt, Artificial Sequence
  Description of Artificial Sequence: Synthetic oligonucleotide
uccaugucccucuguggau

SEQ ID NO: 2538430 - RNA, 19 nt, Artificial Sequence
  Description of Artificial Sequence: Synthetic oligonucleotide
gguaucucuuccacccagg

SEQ ID NO: 2538431 - RNA, 19 nt, Artificial Sequence
  Description of Artificial Sequence: Synthetic oligonucleotide
ccaaaggugcuguuuggug

SEQ ID NO: 2538432 - RNA, 19 nt, Artificial Sequence
  Description of Artificial Sequence: Synthetic oligonucleotide
cucacacaaugaaucaaua

SEQ ID NO: 2538433 - RNA, 19 nt, Artificial Sequence
  Description of Artificial Sequence: Synthetic oligonucleotide
cuguuccgagcaaagcaca

SEQ ID NO: 2538434 - RNA, 19 nt, Artificial Sequence
  Description of Artificial Sequence: Synthetic oligonucleotide
aggaaugcaucaacgugaa

SEQ ID NO: 2538435 - RNA, 19 nt, Artificial Sequence
  Description of Artificial Sequence: Synthetic oligonucleotide
ucggggaguacaugcugau

SEQ ID NO: 2538436 - RNA, 19 nt, Artificial Sequence
  Description of Artificial Sequence: Synthetic oligonucleotide
aucggggaguacaugcuga

SEQ ID NO: 2538437 - RNA, 19 nt, Artificial Sequence
  Description of Artificial Sequence: Synthetic oligonucleotide
gcuguuccgagcaaagcac

SEQ ID NO: 2538438 - RNA, 19 nt, Artificial Sequence
  Description of Artificial Sequence: Synthetic oligonucleotide
gaagggcuagcuguuccga

SEQ ID NO: 2538439 - RNA, 19 nt, Artificial Sequence
  Description of Artificial Sequence: Synthetic oligonucleotide
cccgcauaaaggacugugc

SEQ ID NO: 2538440 - RNA, 19 nt, Artificial Sequence
  Description of Artificial Sequence: Synthetic oligonucleotide
gguaacccgcauaaaggac

SEQ ID NO: 2538441 - RNA, 19 nt, Artificial Sequence
  Description of Artificial Sequence: Synthetic oligonucleotide
agaucggggaguacaugcu

SEQ ID NO: 2538442 - RNA, 19 nt, Artificial Sequence
  Description of Artificial Sequence: Synthetic oligonucleotide
acagaucggggaguacaug

SEQ ID NO: 2538443 - RNA, 19 nt, Artificial Sequence
  Description of Artificial Sequence: Synthetic oligonucleotide
gaacuucaacuccucgagu

SEQ ID NO: 2538444 - RNA, 19 nt, Artificial Sequence
  Description of Artificial Sequence: Synthetic oligonucleotide
ugucaccgaacugguauuu

SEQ ID NO: 2538445 - RNA, 19 nt, Artificial Sequence
  Description of Artificial Sequence: Synthetic oligonucleotide
agagaaucuuggagacuug

SEQ ID NO: 2538446 - RNA, 19 nt, Artificial Sequence
  Description of Artificial Sequence: Synthetic oligonucleotide
auauuagucucaagaccua

SEQ ID NO: 2538447 - RNA, 19 nt, Artificial Sequence
  Description of Artificial Sequence: Synthetic oligonucleotide
aaggugcuguuugguguga

SEQ ID NO: 2538448 - RNA, 19 nt, Artificial Sequence
  Description of Artificial Sequence: Synthetic oligonucleotide
gugaaccuuggguacagau

SEQ ID NO: 2538449 - RNA, 19 nt, Artificial Sequence
  Description of Artificial Sequence: Synthetic oligonucleotide
cauuaagcucuacuccaua

SEQ ID NO: 2538450 - RNA, 19 nt, Artificial Sequence
  Description of Artificial Sequence: Synthetic oligonucleotide
ccuaagagagaaucuugga

SEQ ID NO: 2538451 - RNA, 19 nt, Artificial Sequence
  Description of Artificial Sequence: Synthetic oligonucleotide
cagugcaguaguuucugcu

SEQ ID NO: 2538452 - RNA, 19 nt, Artificial Sequence
  Description of Artificial Sequence: Synthetic oligonucleotide
augcaucaacgugaacugu

SEQ ID NO: 2538453 - RNA, 19 nt, Artificial Sequence
  Description of Artificial Sequence: Synthetic oligonucleotide
accuuucccgacagaucgg

SEQ ID NO: 2538454 - RNA, 19 nt, Artificial Sequence
  Description of Artificial Sequence: Synthetic oligonucleotide
gcacugccgagcuguaaag

SEQ ID NO: 2538455 - RNA, 19 nt, Artificial Sequence
  Description of Artificial Sequence: Synthetic oligonucleotide
gacuuggaacugugaguaa

SEQ ID NO: 2538456 - RNA, 19 nt, Artificial Sequence
  Description of Artificial Sequence: Synthetic oligonucleotide
ccuuucccgacagaucggg

SEQ ID NO: 2538457 - RNA, 19 nt, Artificial Sequence
  Description of Artificial Sequence: Synthetic oligonucleotide
ccuuuauucugucaccgaa

SEQ ID NO: 2538458 - RNA, 19 nt, Artificial Sequence
  Description of Artificial Sequence: Synthetic oligonucleotide
gccucuuggggcaaacagc

SEQ ID NO: 2538459 - RNA, 19 nt, Artificial Sequence
  Description of Artificial Sequence: Synthetic oligonucleotide
cucgagugagaaggaauga

SEQ ID NO: 2538460 - RNA, 19 nt, Artificial Sequence
  Description of Artificial Sequence: Synthetic oligonucleotide
ccaagaccuuucccgacag

SEQ ID NO: 2538461 - RNA, 19 nt, Artificial Sequence
  Description of Artificial Sequence: Synthetic oligonucleotide
guacagaugucugcaugaa

SEQ ID NO: 2538462 - RNA, 19 nt, Artificial Sequence
  Description of Artificial Sequence: Synthetic oligonucleotide
cacuugccuguugaggcuc

SEQ ID NO: 2538463 - RNA, 19 nt, Artificial Sequence
  Description of Artificial Sequence: Synthetic oligonucleotide
cucuuggggcaaacagcuc

SEQ ID NO: 2538464 - RNA, 19 nt, Artificial Sequence
  Description of Artificial Sequence: Synthetic oligonucleotide
ggacagcugcauauuaguc

SEQ ID NO: 2538465 - RNA, 19 nt, Artificial Sequence
  Description of Artificial Sequence: Synthetic oligonucleotide
cgagugagaaggaaugaga

SEQ ID NO: 2538466 - RNA, 19 nt, Artificial Sequence
  Description of Artificial Sequence: Synthetic oligonucleotide
gauacacaucaaaguucaa

SEQ ID NO: 2538467 - RNA, 19 nt, Artificial Sequence
  Description of Artificial Sequence: Synthetic oligonucleotide
cugccgagcuguaaaggua

SEQ ID NO: 2538468 - RNA, 19 nt, Artificial Sequence
  Description of Artificial Sequence: Synthetic oligonucleotide
uuggggcaaacagcuccga

SEQ ID NO: 2538469 - RNA, 19 nt, Artificial Sequence
  Description of Artificial Sequence: Synthetic oligonucleotide
acacgcagugcaguaguuu

SEQ ID NO: 2538470 - RNA, 19 nt, Artificial Sequence
  Description of Artificial Sequence: Synthetic oligonucleotide
aacccgcauaaaggacugu

SEQ ID NO: 2538471 - RNA, 19 nt, Artificial Sequence
  Description of Artificial Sequence: Synthetic oligonucleotide
gauguagucccaggcacuu

SEQ ID NO: 2538472 - RNA, 19 nt, Artificial Sequence
  Description of Artificial Sequence: Synthetic oligonucleotide
acgcagugcaguaguuucu

SEQ ID NO: 2538473 - RNA, 19 nt, Artificial Sequence
  Description of Artificial Sequence: Synthetic oligonucleotide
aggaggacagcugcauauu

SEQ ID NO: 2538474 - RNA, 19 nt, Artificial Sequence
  Description of Artificial Sequence: Synthetic oligonucleotide
ucccgacagaucggggagu

SEQ ID NO: 2538475 - RNA, 19 nt, Artificial Sequence
  Description of Artificial Sequence: Synthetic oligonucleotide
ccucuuggggcaaacagcu

SEQ ID NO: 2538476 - RNA, 19 nt, Artificial Sequence
  Description of Artificial Sequence: Synthetic oligonucleotide
cuacuccauagagcugcac

SEQ ID NO: 2538477 - RNA, 19 nt, Artificial Sequence
  Description of Artificial Sequence: Synthetic oligonucleotide
agugaaccuuggguacaga

SEQ ID NO: 2538478 - RNA, 19 nt, Artificial Sequence
  Description of Artificial Sequence: Synthetic oligonucleotide
cuugccuguugaggcucag

SEQ ID NO: 2538479 - RNA, 19 nt, Artificial Sequence
  Description of Artificial Sequence: Synthetic oligonucleotide
gacagaucggggaguacau

SEQ ID NO: 2538480 - RNA, 19 nt, Artificial Sequence
  Description of Artificial Sequence: Synthetic oligonucleotide
ccgagcuguaaagguaacc

SEQ ID NO: 2538481 - RNA, 19 nt, Artificial Sequence
  Description of Artificial Sequence: Synthetic oligonucleotide
acuccucgagugagaagga

SEQ ID NO: 2538482 - RNA, 19 nt, Artificial Sequence
  Description of Artificial Sequence: Synthetic oligonucleotide
acgugaacuguggguucug

SEQ ID NO: 2538483 - RNA, 19 nt, Artificial Sequence
  Description of Artificial Sequence: Synthetic oligonucleotide
ggaaugcaucaacgugaac

SEQ ID NO: 2538484 - RNA, 19 nt, Artificial Sequence
  Description of Artificial Sequence: Synthetic oligonucleotide
ggaguacaugcugauaaau

SEQ ID NO: 2538485 - RNA, 19 nt, Artificial Sequence
  Description of Artificial Sequence: Synthetic oligonucleotide
gccacacgcagugcaguag

SEQ ID NO: 2538486 - RNA, 19 nt, Artificial Sequence
  Description of Artificial Sequence: Synthetic oligonucleotide
acuguggguucuggcugcu

SEQ ID NO: 2538487 - RNA, 19 nt, Artificial Sequence
  Description of Artificial Sequence: Synthetic oligonucleotide
cagugcuagagaaccuuau

SEQ ID NO: 2538488 - RNA, 19 nt, Artificial Sequence
  Description of Artificial Sequence: Synthetic oligonucleotide
gcuagcuguuccgagcaaa

SEQ ID NO: 2538489 - RNA, 19 nt, Artificial Sequence
  Description of Artificial Sequence: Synthetic oligonucleotide
uuccugcaauuggcaaaau

SEQ ID NO: 2538490 - RNA, 19 nt, Artificial Sequence
  Description of Artificial Sequence: Synthetic oligonucleotide
ggaaauauucgaagacauu

SEQ ID NO: 2538491 - RNA, 19 nt, Artificial Sequence
  Description of Artificial Sequence: Synthetic oligonucleotide
ggcucaguaaggaaauauu

SEQ ID NO: 2538492 - RNA, 19 nt, Artificial Sequence
  Description of Artificial Sequence: Synthetic oligonucleotide
gcucuacuccauagagcug

SEQ ID NO: 2538493 - RNA, 19 nt, Artificial Sequence
  Description of Artificial Sequence: Synthetic oligonucleotide
cuccucgagugagaaggaa

SEQ ID NO: 2538494 - RNA, 19 nt, Artificial Sequence
  Description of Artificial Sequence: Synthetic oligonucleotide
cugucaccgaacugguauu

SEQ ID NO: 2538495 - RNA, 19 nt, Artificial Sequence
  Description of Artificial Sequence: Synthetic oligonucleotide
cgacagaucggggaguaca

SEQ ID NO: 2538496 - RNA, 19 nt, Artificial Sequence
  Description of Artificial Sequence: Synthetic oligonucleotide
ggacugugccaagucugga

SEQ ID NO: 2538497 - RNA, 19 nt, Artificial Sequence
  Description of Artificial Sequence: Synthetic oligonucleotide
gcacuugccuguugaggcu

SEQ ID NO: 2538498 - RNA, 19 nt, Artificial Sequence
  Description of Artificial Sequence: Synthetic oligonucleotide
ccauuaagcucuacuccau

SEQ ID NO: 2538499 - RNA, 19 nt, Artificial Sequence
  Description of Artificial Sequence: Synthetic oligonucleotide
gccgagcuguaaagguaac

SEQ ID NO: 2538500 - RNA, 19 nt, Artificial Sequence
  Description of Artificial Sequence: Synthetic oligonucleotide
ggguucuggcugcugucgu

SEQ ID NO: 2538501 - RNA, 19 nt, Artificial Sequence
  Description of Artificial Sequence: Synthetic oligonucleotide
gucaccgaacugguauuuu

SEQ ID NO: 2538502 - RNA, 19 nt, Artificial Sequence
  Description of Artificial Sequence: Synthetic oligonucleotide
caaugucaaccaagaccuu

SEQ ID NO: 2538503 - RNA, 19 nt, Artificial Sequence
  Description of Artificial Sequence: Synthetic oligonucleotide
ccacacgcagugcaguagu

SEQ ID NO: 2538504 - RNA, 19 nt, Artificial Sequence
  Description of Artificial Sequence: Synthetic oligonucleotide
cacacgcagugcaguaguu

SEQ ID NO: 2538505 - RNA, 19 nt, Artificial Sequence
  Description of Artificial Sequence: Synthetic oligonucleotide
cugcacugccgagcuguaa

SEQ ID NO: 2538506 - RNA, 19 nt, Artificial Sequence
  Description of Artificial Sequence: Synthetic oligonucleotide
cccaaaggugcuguuuggu

SEQ ID NO: 2538507 - RNA, 19 nt, Artificial Sequence
  Description of Artificial Sequence: Synthetic oligonucleotide
cacagccucuuggggcaaa

SEQ ID NO: 2538508 - RNA, 19 nt, Artificial Sequence
  Description of Artificial Sequence: Synthetic oligonucleotide
ccgacagaucggggaguac

SEQ ID NO: 2538509 - RNA, 19 nt, Artificial Sequence
  Description of Artificial Sequence: Synthetic oligonucleotide
gcaguaguuucugcucauu

SEQ ID NO: 2538510 - RNA, 19 nt, Artificial Sequence
  Description of Artificial Sequence: Synthetic oligonucleotide
cccgacagaucggggagua

SEQ ID NO: 2538511 - RNA, 19 nt, Artificial Sequence
  Description of Artificial Sequence: Synthetic oligonucleotide
gcugcacugccgagcugua

SEQ ID NO: 2538512 - RNA, 19 nt, Artificial Sequence
  Description of Artificial Sequence: Synthetic oligonucleotide
uguagaucgucucaaaggg

SEQ ID NO: 2538513 - RNA, 19 nt, Artificial Sequence
  Description of Artificial Sequence: Synthetic oligonucleotide
uguuaaggcaauauugaag

SEQ ID NO: 2538514 - RNA, 19 nt, Artificial Sequence
  Description of Artificial Sequence: Synthetic oligonucleotide
agacagaaggcccagguac

SEQ ID NO: 2538515 - RNA, 19 nt, Artificial Sequence
  Description of Artificial Sequence: Synthetic oligonucleotide
acuagaaauaauugggcag

SEQ ID NO: 2538516 - RNA, 19 nt, Artificial Sequence
  Description of Artificial Sequence: Synthetic oligonucleotide
ucuaacuucuccgagaaca

SEQ ID NO: 2538517 - RNA, 19 nt, Artificial Sequence
  Description of Artificial Sequence: Synthetic oligonucleotide
gaugaauagggccaccagg

SEQ ID NO: 2538518 - RNA, 19 nt, Artificial Sequence
  Description of Artificial Sequence: Synthetic oligonucleotide
aacagggaugguuuguaac

SEQ ID NO: 2538519 - RNA, 19 nt, Artificial Sequence
  Description of Artificial Sequence: Synthetic oligonucleotide
auguagaucgucucaaagg

SEQ ID NO: 2538520 - RNA, 19 nt, Artificial Sequence
  Description of Artificial Sequence: Synthetic oligonucleotide
acaguuguagcuccaaagg

SEQ ID NO: 2538521 - RNA, 19 nt, Artificial Sequence
  Description of Artificial Sequence: Synthetic oligonucleotide
aaauagaagccaccaguag

SEQ ID NO: 2538522 - RNA, 19 nt, Artificial Sequence
  Description of Artificial Sequence: Synthetic oligonucleotide
gaaauaauugggcaggcca

SEQ ID NO: 2538523 - RNA, 19 nt, Artificial Sequence
  Description of Artificial Sequence: Synthetic oligonucleotide
uaguagucuaacuucuccg

SEQ ID NO: 2538524 - RNA, 19 nt, Artificial Sequence
  Description of Artificial Sequence: Synthetic oligonucleotide
uagaucgucucaaagggug

SEQ ID NO: 2538525 - RNA, 19 nt, Artificial Sequence
  Description of Artificial Sequence: Synthetic oligonucleotide
ugaggagaugaauagggcc

SEQ ID NO: 2538526 - RNA, 19 nt, Artificial Sequence
  Description of Artificial Sequence: Synthetic oligonucleotide
cuagaaauaauugggcagg

SEQ ID NO: 2538527 - RNA, 19 nt, Artificial Sequence
  Description of Artificial Sequence: Synthetic oligonucleotide
aguuguagcuccaaaggcc

SEQ ID NO: 2538528 - RNA, 19 nt, Artificial Sequence
  Description of Artificial Sequence: Synthetic oligonucleotide
aggcacuagaaauaauugg

SEQ ID NO: 2538529 - RNA, 19 nt, Artificial Sequence
  Description of Artificial Sequence: Synthetic oligonucleotide
ugauguugggagcugaaga

SEQ ID NO: 2538530 - RNA, 19 nt, Artificial Sequence
  Description of Artificial Sequence: Synthetic oligonucleotide
aauagggccaccaggauca

SEQ ID NO: 2538531 - RNA, 19 nt, Artificial Sequence
  Description of Artificial Sequence: Synthetic oligonucleotide
ugguuuguaacagcaaagg

SEQ ID NO: 2538532 - RNA, 19 nt, Artificial Sequence
  Description of Artificial Sequence: Synthetic oligonucleotide
caguguuaaggcaauauug

SEQ ID NO: 2538533 - RNA, 19 nt, Artificial Sequence
  Description of Artificial Sequence: Synthetic oligonucleotide
aacuucuccgagaacacgg

SEQ ID NO: 2538534 - RNA, 19 nt, Artificial Sequence
  Description of Artificial Sequence: Synthetic oligonucleotide
guuguugcucgucaggagg

SEQ ID NO: 2538535 - RNA, 19 nt, Artificial Sequence
  Description of Artificial Sequence: Synthetic oligonucleotide
uguaguggccuguagcugc

SEQ ID NO: 2538536 - RNA, 19 nt, Artificial Sequence
  Description of Artificial Sequence: Synthetic oligonucleotide
gauguugggagcugaagac

SEQ ID NO: 2538537 - RNA, 19 nt, Artificial Sequence
  Description of Artificial Sequence: Synthetic oligonucleotide
guuuguaacagcaaaggca

SEQ ID NO: 2538538 - RNA, 19 nt, Artificial Sequence
  Description of Artificial Sequence: Synthetic oligonucleotide
aggacacaguuguagcucc

SEQ ID NO: 2538539 - RNA, 19 nt, Artificial Sequence
  Description of Artificial Sequence: Synthetic oligonucleotide
uguaacagcaaaggcaucu

SEQ ID NO: 2538540 - RNA, 19 nt, Artificial Sequence
  Description of Artificial Sequence: Synthetic oligonucleotide
aaggacacaguuguagcuc

SEQ ID NO: 2538541 - RNA, 19 nt, Artificial Sequence
  Description of Artificial Sequence: Synthetic oligonucleotide
ggcacuagaaauaauuggg

SEQ ID NO: 2538542 - RNA, 19 nt, Artificial Sequence
  Description of Artificial Sequence: Synthetic oligonucleotide
aagacuggcacaucccacu

SEQ ID NO: 2538543 - RNA, 19 nt, Artificial Sequence
  Description of Artificial Sequence: Synthetic oligonucleotide
aaugugaagacuggcacau

SEQ ID NO: 2538544 - RNA, 19 nt, Artificial Sequence
  Description of Artificial Sequence: Synthetic oligonucleotide
gaugguuuguaacagcaaa

SEQ ID NO: 2538545 - RNA, 19 nt, Artificial Sequence
  Description of Artificial Sequence: Synthetic oligonucleotide
aagggcaaugugaagacug

SEQ ID NO: 2538546 - RNA, 19 nt, Artificial Sequence
  Description of Artificial Sequence: Synthetic oligonucleotide
uguuggagagggcugcucc

SEQ ID NO: 2538547 - RNA, 19 nt, Artificial Sequence
  Description of Artificial Sequence: Synthetic oligonucleotide
ucuguccaugugauguugg

SEQ ID NO: 2538548 - RNA, 19 nt, Artificial Sequence
  Description of Artificial Sequence: Synthetic oligonucleotide
aguagaugcgguuggccuc

SEQ ID NO: 2538549 - RNA, 19 nt, Artificial Sequence
  Description of Artificial Sequence: Synthetic oligonucleotide
aggaaguagaugcgguugg

SEQ ID NO: 2538550 - RNA, 19 nt, Artificial Sequence
  Description of Artificial Sequence: Synthetic oligonucleotide
gaugcgguuggccucuggg

SEQ ID NO: 2538551 - RNA, 19 nt, Artificial Sequence
  Description of Artificial Sequence: Synthetic oligonucleotide
agaaauaauugggcaggcc

SEQ ID NO: 2538552 - RNA, 19 nt, Artificial Sequence
  Description of Artificial Sequence: Synthetic oligonucleotide
guaugcacagaacagggca

SEQ ID NO: 2538553 - RNA, 19 nt, Artificial Sequence
  Description of Artificial Sequence: Synthetic oligonucleotide
ggugaggagaugaauaggg

SEQ ID NO: 2538554 - RNA, 19 nt, Artificial Sequence
  Description of Artificial Sequence: Synthetic oligonucleotide
aguguuaaggcaauauuga

SEQ ID NO: 2538555 - RNA, 19 nt, Artificial Sequence
  Description of Artificial Sequence: Synthetic oligonucleotide
uguaugcacagaacagggc

SEQ ID NO: 2538556 - RNA, 19 nt, Artificial Sequence
  Description of Artificial Sequence: Synthetic oligonucleotide
gagaacacggccaucagca

SEQ ID NO: 2538557 - RNA, 19 nt, Artificial Sequence
  Description of Artificial Sequence: Synthetic oligonucleotide
guugucacagccauagacc

SEQ ID NO: 2538558 - RNA, 19 nt, Artificial Sequence
  Description of Artificial Sequence: Synthetic oligonucleotide
ugugucugccaggugaggg

SEQ ID NO: 2538559 - RNA, 19 nt, Artificial Sequence
  Description of Artificial Sequence: Synthetic oligonucleotide
aauaauugggcaggccaug

SEQ ID NO: 2538560 - RNA, 19 nt, Artificial Sequence
  Description of Artificial Sequence: Synthetic oligonucleotide
guggugaggagaugaauag

SEQ ID NO: 2538561 - RNA, 19 nt, Artificial Sequence
  Description of Artificial Sequence: Synthetic oligonucleotide
agggaugguuuguaacagc

SEQ ID NO: 2538562 - RNA, 19 nt, Artificial Sequence
  Description of Artificial Sequence: Synthetic oligonucleotide
accaguaguagucuaacuu

SEQ ID NO: 2538563 - RNA, 19 nt, Artificial Sequence
  Description of Artificial Sequence: Synthetic oligonucleotide
caguuguagcuccaaaggc

SEQ ID NO: 2538564 - RNA, 19 nt, Artificial Sequence
  Description of Artificial Sequence: Synthetic oligonucleotide
gauggcgauacaggaaagg

SEQ ID NO: 2538565 - RNA, 19 nt, Artificial Sequence
  Description of Artificial Sequence: Synthetic oligonucleotide
ugcuacucaaggcacuaga

SEQ ID NO: 2538566 - RNA, 19 nt, Artificial Sequence
  Description of Artificial Sequence: Synthetic oligonucleotide
cuggccgaccccaacaggg

SEQ ID NO: 2538567 - RNA, 19 nt, Artificial Sequence
  Description of Artificial Sequence: Synthetic oligonucleotide
agcagucccaccagcaucc

SEQ ID NO: 2538568 - RNA, 19 nt, Artificial Sequence
  Description of Artificial Sequence: Synthetic oligonucleotide
acaggaaauagaagccacc

SEQ ID NO: 2538569 - RNA, 19 nt, Artificial Sequence
  Description of Artificial Sequence: Synthetic oligonucleotide
uagucuaacuucuccgaga

SEQ ID NO: 2538570 - RNA, 19 nt, Artificial Sequence
  Description of Artificial Sequence: Synthetic oligonucleotide
gagcuuguagaugccaggg

SEQ ID NO: 2538571 - RNA, 19 nt, Artificial Sequence
  Description of Artificial Sequence: Synthetic oligonucleotide
guagucuaacuucuccgag

SEQ ID NO: 2538572 - RNA, 19 nt, Artificial Sequence
  Description of Artificial Sequence: Synthetic oligonucleotide
aaauaauugggcaggccau

SEQ ID NO: 2538573 - RNA, 19 nt, Artificial Sequence
  Description of Artificial Sequence: Synthetic oligonucleotide
agucuaacuucuccgagaa

SEQ ID NO: 2538574 - RNA, 19 nt, Artificial Sequence
  Description of Artificial Sequence: Synthetic oligonucleotide
gaauagggccaccaggauc

SEQ ID NO: 2538575 - RNA, 19 nt, Artificial Sequence
  Description of Artificial Sequence: Synthetic oligonucleotide
agagacagaaggcccaggu

SEQ ID NO: 2538576 - RNA, 19 nt, Artificial Sequence
  Description of Artificial Sequence: Synthetic oligonucleotide
uggcacgccaaccacugcc

SEQ ID NO: 2538577 - RNA, 19 nt, Artificial Sequence
  Description of Artificial Sequence: Synthetic oligonucleotide
ugucguggggaagaagagg

SEQ ID NO: 2538578 - RNA, 19 nt, Artificial Sequence
  Description of Artificial Sequence: Synthetic oligonucleotide
cacuagaaauaauugggca

SEQ ID NO: 2538579 - RNA, 19 nt, Artificial Sequence
  Description of Artificial Sequence: Synthetic oligonucleotide
auaauugggcaggccaugg

SEQ ID NO: 2538580 - RNA, 19 nt, Artificial Sequence
  Description of Artificial Sequence: Synthetic oligonucleotide
uggcgauacaggaaaggac

SEQ ID NO: 2538581 - RNA, 19 nt, Artificial Sequence
  Description of Artificial Sequence: Synthetic oligonucleotide
ggaaaggacacaguuguag

SEQ ID NO: 2538582 - RNA, 19 nt, Artificial Sequence
  Description of Artificial Sequence: Synthetic oligonucleotide
gaggagaugaauagggcca

SEQ ID NO: 2538583 - RNA, 19 nt, Artificial Sequence
  Description of Artificial Sequence: Synthetic oligonucleotide
uugcucgucaggaggagga

SEQ ID NO: 2538584 - RNA, 19 nt, Artificial Sequence
  Description of Artificial Sequence: Synthetic oligonucleotide
gcuccaaaggcccauguag

SEQ ID NO: 2538585 - RNA, 19 nt, Artificial Sequence
  Description of Artificial Sequence: Synthetic oligonucleotide
gguuuguaacagcaaaggc

SEQ ID NO: 2538586 - RNA, 19 nt, Artificial Sequence
  Description of Artificial Sequence: Synthetic oligonucleotide
augaauagggccaccagga

SEQ ID NO: 2538587 - RNA, 19 nt, Artificial Sequence
  Description of Artificial Sequence: Synthetic oligonucleotide
uggugaggagaugaauagg

SEQ ID NO: 2538588 - RNA, 19 nt, Artificial Sequence
  Description of Artificial Sequence: Synthetic oligonucleotide
uccgagaacacggccauca

SEQ ID NO: 2538589 - RNA, 19 nt, Artificial Sequence
  Description of Artificial Sequence: Synthetic oligonucleotide
augguuuguaacagcaaag

SEQ ID NO: 2538590 - RNA, 19 nt, Artificial Sequence
  Description of Artificial Sequence: Synthetic oligonucleotide
aucucaaucucuguccaug

SEQ ID NO: 2538591 - RNA, 19 nt, Artificial Sequence
  Description of Artificial Sequence: Synthetic oligonucleotide
caggugagggcguagaaca

SEQ ID NO: 2538592 - RNA, 19 nt, Artificial Sequence
  Description of Artificial Sequence: Synthetic oligonucleotide
gaaauagaagccaccagua

SEQ ID NO: 2538593 - RNA, 19 nt, Artificial Sequence
  Description of Artificial Sequence: Synthetic oligonucleotide
ggcaucucaaucucugucc

SEQ ID NO: 2538594 - RNA, 19 nt, Artificial Sequence
  Description of Artificial Sequence: Synthetic oligonucleotide
cugccaucauguuggagag

SEQ ID NO: 2538595 - RNA, 19 nt, Artificial Sequence
  Description of Artificial Sequence: Synthetic oligonucleotide
uggguaggugacuuugcug

SEQ ID NO: 2538596 - RNA, 19 nt, Artificial Sequence
  Description of Artificial Sequence: Synthetic oligonucleotide
gguuguaguggccuguagc

SEQ ID NO: 2538597 - RNA, 19 nt, Artificial Sequence
  Description of Artificial Sequence: Synthetic oligonucleotide
uacaguguuaaggcaauau

SEQ ID NO: 2538598 - RNA, 19 nt, Artificial Sequence
  Description of Artificial Sequence: Synthetic oligonucleotide
acagcaaaggcaucucaau

SEQ ID NO: 2538599 - RNA, 19 nt, Artificial Sequence
  Description of Artificial Sequence: Synthetic oligonucleotide
acgauugacccuauggcug

SEQ ID NO: 2538600 - RNA, 19 nt, Artificial Sequence
  Description of Artificial Sequence: Synthetic oligonucleotide
aggagaugaauagggccac

SEQ ID NO: 2538601 - RNA, 19 nt, Artificial Sequence
  Description of Artificial Sequence: Synthetic oligonucleotide
acuagugccagcaggugug

SEQ ID NO: 2538602 - RNA, 19 nt, Artificial Sequence
  Description of Artificial Sequence: Synthetic oligonucleotide
aggguguggccacagucag

SEQ ID NO: 2538603 - RNA, 19 nt, Artificial Sequence
  Description of Artificial Sequence: Synthetic oligonucleotide
gccagguacaguguuaagg

SEQ ID NO: 2538604 - RNA, 19 nt, Artificial Sequence
  Description of Artificial Sequence: Synthetic oligonucleotide
guuguaguggccuguagcu

SEQ ID NO: 2538605 - RNA, 19 nt, Artificial Sequence
  Description of Artificial Sequence: Synthetic oligonucleotide
ucucaaaggguguggccac

SEQ ID NO: 2538606 - RNA, 19 nt, Artificial Sequence
  Description of Artificial Sequence: Synthetic oligonucleotide
uaauugggcaggccaugga

SEQ ID NO: 2538607 - RNA, 19 nt, Artificial Sequence
  Description of Artificial Sequence: Synthetic oligonucleotide
gguggagagacagaaggcc

SEQ ID NO: 2538608 - RNA, 19 nt, Artificial Sequence
  Description of Artificial Sequence: Synthetic oligonucleotide
auagaagccaccaguagua

SEQ ID NO: 2538609 - RNA, 19 nt, Artificial Sequence
  Description of Artificial Sequence: Synthetic oligonucleotide
auggcgauacaggaaagga

SEQ ID NO: 2538610 - RNA, 19 nt, Artificial Sequence
  Description of Artificial Sequence: Synthetic oligonucleotide
caggaaaggacacaguugu

SEQ ID NO: 2538611 - RNA, 19 nt, Artificial Sequence
  Description of Artificial Sequence: Synthetic oligonucleotide
ggcuccacaagugucgugg

SEQ ID NO: 2538612 - RNA, 19 nt, Artificial Sequence
  Description of Artificial Sequence: Synthetic oligonucleotide
uccaaaggcccauguagau

SEQ ID NO: 2538613 - RNA, 19 nt, Artificial Sequence
  Description of Artificial Sequence: Synthetic oligonucleotide
ucuccgagaacacggccau

SEQ ID NO: 2538614 - RNA, 19 nt, Artificial Sequence
  Description of Artificial Sequence: Synthetic oligonucleotide
cugcaugcaagcagaugag

SEQ ID NO: 2538615 - RNA, 19 nt, Artificial Sequence
  Description of Artificial Sequence: Synthetic oligonucleotide
uccgauggcgauacaggaa

SEQ ID NO: 2538616 - RNA, 19 nt, Artificial Sequence
  Description of Artificial Sequence: Synthetic oligonucleotide
ucccauguaugcacagaac

SEQ ID NO: 2538617 - RNA, 19 nt, Artificial Sequence
  Description of Artificial Sequence: Synthetic oligonucleotide
uguccaugugauguuggga

SEQ ID NO: 2538618 - RNA, 19 nt, Artificial Sequence
  Description of Artificial Sequence: Synthetic oligonucleotide
ugaauagggccaccaggau

SEQ ID NO: 2538619 - RNA, 19 nt, Artificial Sequence
  Description of Artificial Sequence: Synthetic oligonucleotide
aguggugaggagaugaaua

SEQ ID NO: 2538620 - RNA, 19 nt, Artificial Sequence
  Description of Artificial Sequence: Synthetic oligonucleotide
cccacgauugacccuaugg

SEQ ID NO: 2538621 - RNA, 19 nt, Artificial Sequence
  Description of Artificial Sequence: Synthetic oligonucleotide
caaugugaagacuggcaca

SEQ ID NO: 2538622 - RNA, 19 nt, Artificial Sequence
  Description of Artificial Sequence: Synthetic oligonucleotide
ugcgguuggccucugggua

SEQ ID NO: 2538623 - RNA, 19 nt, Artificial Sequence
  Description of Artificial Sequence: Synthetic oligonucleotide
gaaggucacaggaaauaga

SEQ ID NO: 2538624 - RNA, 19 nt, Artificial Sequence
  Description of Artificial Sequence: Synthetic oligonucleotide
gucucaaaggguguggcca

SEQ ID NO: 2538625 - RNA, 19 nt, Artificial Sequence
  Description of Artificial Sequence: Synthetic oligonucleotide
ggcgauacaggaaaggaca

SEQ ID NO: 2538626 - RNA, 19 nt, Artificial Sequence
  Description of Artificial Sequence: Synthetic oligonucleotide
guguuaaggcaauauugaa

SEQ ID NO: 2538627 - RNA, 19 nt, Artificial Sequence
  Description of Artificial Sequence: Synthetic oligonucleotide
aucgucucaaagggugugg

SEQ ID NO: 2538628 - RNA, 19 nt, Artificial Sequence
  Description of Artificial Sequence: Synthetic oligonucleotide
gcaauauugaagggcaaug

SEQ ID NO: 2538629 - RNA, 19 nt, Artificial Sequence
  Description of Artificial Sequence: Synthetic oligonucleotide
augccuccgauggcgauac

SEQ ID NO: 2538630 - RNA, 19 nt, Artificial Sequence
  Description of Artificial Sequence: Synthetic oligonucleotide
gagaugaauagggccacca

SEQ ID NO: 2538631 - RNA, 19 nt, Artificial Sequence
  Description of Artificial Sequence: Synthetic oligonucleotide
gaucgucucaaagggugug

SEQ ID NO: 2538632 - RNA, 19 nt, Artificial Sequence
  Description of Artificial Sequence: Synthetic oligonucleotide
ccacgauugacccuauggc

SEQ ID NO: 2538633 - RNA, 19 nt, Artificial Sequence
  Description of Artificial Sequence: Synthetic oligonucleotide
gaagacuggcacaucccac

SEQ ID NO: 2538634 - RNA, 19 nt, Artificial Sequence
  Description of Artificial Sequence: Synthetic oligonucleotide
uuguaguggccuguagcug

SEQ ID NO: 2538635 - RNA, 19 nt, Artificial Sequence
  Description of Artificial Sequence: Synthetic oligonucleotide
gcacuagaaauaauugggc

SEQ ID NO: 2538636 - RNA, 19 nt, Artificial Sequence
  Description of Artificial Sequence: Synthetic oligonucleotide
caggaaauagaagccacca

SEQ ID NO: 2538637 - RNA, 19 nt, Artificial Sequence
  Description of Artificial Sequence: Synthetic oligonucleotide
cagggaugguuuguaacag

SEQ ID NO: 2538638 - RNA, 19 nt, Artificial Sequence
  Description of Artificial Sequence: Synthetic oligonucleotide
cacaggcuccacaaguguc

SEQ ID NO: 2538639 - RNA, 19 nt, Artificial Sequence
  Description of Artificial Sequence: Synthetic oligonucleotide
gugaggagaugaauagggc

SEQ ID NO: 2538640 - RNA, 19 nt, Artificial Sequence
  Description of Artificial Sequence: Synthetic oligonucleotide
cuacucaaggcacuagaaa

SEQ ID NO: 2538641 - RNA, 19 nt, Artificial Sequence
  Description of Artificial Sequence: Synthetic oligonucleotide
aucacaccaccuguccagg

SEQ ID NO: 2538642 - RNA, 19 nt, Artificial Sequence
  Description of Artificial Sequence: Synthetic oligonucleotide
uuguagcuccaaaggccca

SEQ ID NO: 2538643 - RNA, 19 nt, Artificial Sequence
  Description of Artificial Sequence: Synthetic oligonucleotide
cuccacaagugucgugggg

SEQ ID NO: 2538644 - RNA, 19 nt, Artificial Sequence
  Description of Artificial Sequence: Synthetic oligonucleotide
ugcaugcaagcagaugagu

SEQ ID NO: 2538645 - RNA, 19 nt, Artificial Sequence
  Description of Artificial Sequence: Synthetic oligonucleotide
cucuggguaggugacuuug

SEQ ID NO: 2538646 - RNA, 19 nt, Artificial Sequence
  Description of Artificial Sequence: Synthetic oligonucleotide
gugauguugggagcugaag

SEQ ID NO: 2538647 - RNA, 19 nt, Artificial Sequence
  Description of Artificial Sequence: Synthetic oligonucleotide
ugagggcguagaacaugcc

SEQ ID NO: 2538648 - RNA, 19 nt, Artificial Sequence
  Description of Artificial Sequence: Synthetic oligonucleotide
guugcucgucaggaggagg

SEQ ID NO: 2538649 - RNA, 19 nt, Artificial Sequence
  Description of Artificial Sequence: Synthetic oligonucleotide
auggcugcaugcaagcaga

SEQ ID NO: 2538650 - RNA, 19 nt, Artificial Sequence
  Description of Artificial Sequence: Synthetic oligonucleotide
ugguggcacgccaaccacu

SEQ ID NO: 2538651 - RNA, 19 nt, Artificial Sequence
  Description of Artificial Sequence: Synthetic oligonucleotide
gcugagugggagcuuguag

SEQ ID NO: 2538652 - RNA, 19 nt, Artificial Sequence
  Description of Artificial Sequence: Synthetic oligonucleotide
auagaccuggccgacccca

SEQ ID NO: 2538653 - RNA, 19 nt, Artificial Sequence
  Description of Artificial Sequence: Synthetic oligonucleotide
guggccuguagcugccagg

SEQ ID NO: 2538654 - RNA, 19 nt, Artificial Sequence
  Description of Artificial Sequence: Synthetic oligonucleotide
caggaucacaccaccuguc

SEQ ID NO: 2538655 - RNA, 19 nt, Artificial Sequence
  Description of Artificial Sequence: Synthetic oligonucleotide
uguugcucgucaggaggag

SEQ ID NO: 2538656 - RNA, 19 nt, Artificial Sequence
  Description of Artificial Sequence: Synthetic oligonucleotide
agguuguaguggccuguag

SEQ ID NO: 2538657 - RNA, 19 nt, Artificial Sequence
  Description of Artificial Sequence: Synthetic oligonucleotide
uagcuccaaaggcccaugu

SEQ ID NO: 2538658 - RNA, 19 nt, Artificial Sequence
  Description of Artificial Sequence: Synthetic oligonucleotide
agaccuggccgaccccaac

SEQ ID NO: 2538659 - RNA, 19 nt, Artificial Sequence
  Description of Artificial Sequence: Synthetic oligonucleotide
gcugcucccauguaugcac

SEQ ID NO: 2538660 - RNA, 19 nt, Artificial Sequence
  Description of Artificial Sequence: Synthetic oligonucleotide
cucaaggcacuagaaauaa

SEQ ID NO: 2538661 - RNA, 19 nt, Artificial Sequence
  Description of Artificial Sequence: Synthetic oligonucleotide
gagggcguagaacaugccu

SEQ ID NO: 2538662 - RNA, 19 nt, Artificial Sequence
  Description of Artificial Sequence: Synthetic oligonucleotide
augcgguuggccucugggu

SEQ ID NO: 2538663 - RNA, 19 nt, Artificial Sequence
  Description of Artificial Sequence: Synthetic oligonucleotide
cucccauguaugcacagaa

SEQ ID NO: 2538664 - RNA, 19 nt, Artificial Sequence
  Description of Artificial Sequence: Synthetic oligonucleotide
cacgauugacccuauggcu

SEQ ID NO: 2538665 - RNA, 19 nt, Artificial Sequence
  Description of Artificial Sequence: Synthetic oligonucleotide
ugggagcuuguagaugcca

SEQ ID NO: 2538666 - RNA, 19 nt, Artificial Sequence
  Description of Artificial Sequence: Synthetic oligonucleotide
caguaguagucuaacuucu

SEQ ID NO: 2538667 - RNA, 19 nt, Artificial Sequence
  Description of Artificial Sequence: Synthetic oligonucleotide
cagguacaguguuaaggca

SEQ ID NO: 2538668 - RNA, 19 nt, Artificial Sequence
  Description of Artificial Sequence: Synthetic oligonucleotide
gggaugguuuguaacagca

SEQ ID NO: 2538669 - RNA, 19 nt, Artificial Sequence
  Description of Artificial Sequence: Synthetic oligonucleotide
ugccagguacaguguuaag

SEQ ID NO: 2538670 - RNA, 19 nt, Artificial Sequence
  Description of Artificial Sequence: Synthetic oligonucleotide
ccauagaccuggccgaccc

SEQ ID NO: 2538671 - RNA, 19 nt, Artificial Sequence
  Description of Artificial Sequence: Synthetic oligonucleotide
gaugcuacucaaggcacua

SEQ ID NO: 2538672 - RNA, 19 nt, Artificial Sequence
  Description of Artificial Sequence: Synthetic oligonucleotide
uggccgaccccaacaggga

SEQ ID NO: 2538673 - RNA, 19 nt, Artificial Sequence
  Description of Artificial Sequence: Synthetic oligonucleotide
gaugaguggugaggagaug

SEQ ID NO: 2538674 - RNA, 19 nt, Artificial Sequence
  Description of Artificial Sequence: Synthetic oligonucleotide
gaccuggccgaccccaaca

SEQ ID NO: 2538675 - RNA, 19 nt, Artificial Sequence
  Description of Artificial Sequence: Synthetic oligonucleotide
uguagcugccagguacagu

SEQ ID NO: 2538676 - RNA, 19 nt, Artificial Sequence
  Description of Artificial Sequence: Synthetic oligonucleotide
uggccucuggguaggugac

SEQ ID NO: 2538677 - RNA, 19 nt, Artificial Sequence
  Description of Artificial Sequence: Synthetic oligonucleotide
aacaugccuccgauggcga

SEQ ID NO: 2538678 - RNA, 19 nt, Artificial Sequence
  Description of Artificial Sequence: Synthetic oligonucleotide
cacagacuagugccagcag

SEQ ID NO: 2538679 - RNA, 19 nt, Artificial Sequence
  Description of Artificial Sequence: Synthetic oligonucleotide
agccauagaccuggccgac

SEQ ID NO: 2538680 - RNA, 19 nt, Artificial Sequence
  Description of Artificial Sequence: Synthetic oligonucleotide
uaccugguggcacgccaac

SEQ ID NO: 2538681 - RNA, 19 nt, Artificial Sequence
  Description of Artificial Sequence: Synthetic oligonucleotide
acaucccacuuggugaaga

SEQ ID NO: 2538682 - RNA, 19 nt, Artificial Sequence
  Description of Artificial Sequence: Synthetic oligonucleotide
caauauugaagggcaaugu

SEQ ID NO: 2538683 - RNA, 19 nt, Artificial Sequence
  Description of Artificial Sequence: Synthetic oligonucleotide
cauagaccuggccgacccc

SEQ ID NO: 2538684 - RNA, 19 nt, Artificial Sequence
  Description of Artificial Sequence: Synthetic oligonucleotide
ggcaaugugaagacuggca

SEQ ID NO: 2538685 - RNA, 19 nt, Artificial Sequence
  Description of Artificial Sequence: Synthetic oligonucleotide
caucauguuggagagggcu

SEQ ID NO: 2538686 - RNA, 19 nt, Artificial Sequence
  Description of Artificial Sequence: Synthetic oligonucleotide
caugugauguugggagcug

SEQ ID NO: 2538687 - RNA, 19 nt, Artificial Sequence
  Description of Artificial Sequence: Synthetic oligonucleotide
gaggugaaggucacaggaa

SEQ ID NO: 2538688 - RNA, 19 nt, Artificial Sequence
  Description of Artificial Sequence: Synthetic oligonucleotide
agaucgucucaaagggugu

SEQ ID NO: 2538689 - RNA, 19 nt, Artificial Sequence
  Description of Artificial Sequence: Synthetic oligonucleotide
ccagguaccugguggcacg

SEQ ID NO: 2538690 - RNA, 19 nt, Artificial Sequence
  Description of Artificial Sequence: Synthetic oligonucleotide
agaugccaggguuguugcu

SEQ ID NO: 2538691 - RNA, 19 nt, Artificial Sequence
  Description of Artificial Sequence: Synthetic oligonucleotide
cccuauggcugcaugcaag

SEQ ID NO: 2538692 - RNA, 19 nt, Artificial Sequence
  Description of Artificial Sequence: Synthetic oligonucleotide
augugauguugggagcuga

SEQ ID NO: 2538693 - RNA, 19 nt, Artificial Sequence
  Description of Artificial Sequence: Synthetic oligonucleotide
ccaaccacugccaucaugu

SEQ ID NO: 2538694 - RNA, 19 nt, Artificial Sequence
  Description of Artificial Sequence: Synthetic oligonucleotide
agacuggcacaucccacuu

SEQ ID NO: 2538695 - RNA, 19 nt, Artificial Sequence
  Description of Artificial Sequence: Synthetic oligonucleotide
augcuacucaaggcacuag

SEQ ID NO: 2538696 - RNA, 19 nt, Artificial Sequence
  Description of Artificial Sequence: Synthetic oligonucleotide
auacaggaaaggacacagu

SEQ ID NO: 2538697 - RNA, 19 nt, Artificial Sequence
  Description of Artificial Sequence: Synthetic oligonucleotide
agcugccagguacaguguu

SEQ ID NO: 2538698 - RNA, 19 nt, Artificial Sequence
  Description of Artificial Sequence: Synthetic oligonucleotide
augugaagacuggcacauc

SEQ ID NO: 2538699 - RNA, 19 nt, Artificial Sequence
  Description of Artificial Sequence: Synthetic oligonucleotide
ggugagggcguagaacaug

SEQ ID NO: 2538700 - RNA, 19 nt, Artificial Sequence
  Description of Artificial Sequence: Synthetic oligonucleotide
guaguggccuguagcugcc

SEQ ID NO: 2538701 - RNA, 19 nt, Artificial Sequence
  Description of Artificial Sequence: Synthetic oligonucleotide
cacgccaaccacugccauc

SEQ ID NO: 2538702 - RNA, 19 nt, Artificial Sequence
  Description of Artificial Sequence: Synthetic oligonucleotide
gguggcacgccaaccacug

SEQ ID NO: 2538703 - RNA, 19 nt, Artificial Sequence
  Description of Artificial Sequence: Synthetic oligonucleotide
ugccaggugagggcguaga
